United States Patent Application Publication US 2005/0244851 A1 - sequence listing, part 43

SEQ ID NO: 1664307 - DNA, 25 bp, Homo sapien
gatcgagcctcgtgaaacatgagag

SEQ ID NO: 1664308 - DNA, 25 bp, Homo sapien
gaagagctttagtcacggccatcag

SEQ ID NO: 1664309 - DNA, 25 bp, Homo sapien
ggtgatcagatcaactatcccagca

SEQ ID NO: 1664310 - DNA, 25 bp, Homo sapien
gacttagtagccgtcttggtgatca

SEQ ID NO: 1664311 - DNA, 25 bp, Homo sapien
tgatgaaatctctcgctgtccggct

SEQ ID NO: 1664312 - DNA, 25 bp, Homo sapien
tttgcttaacagtggccccagagag

SEQ ID NO: 1664313 - DNA, 25 bp, Homo sapien
caggtgtccactgcgggtcttcaaa

SEQ ID NO: 1664314 - DNA, 25 bp, Homo sapien
tgtaacacgtgagaaagcctttggt

SEQ ID NO: 1664315 - DNA, 25 bp, Homo sapien
gaataaccctgctaatgtaacacgt

SEQ ID NO: 1664316 - DNA, 25 bp, Homo sapien
taggaaggcctctagactacatcca

SEQ ID NO: 1664317 - DNA, 25 bp, Homo sapien
tttgctcactggcaatgcacaaggg

SEQ ID NO: 1664318 - DNA, 25 bp, Homo sapien
tcagcaagggactagggatgttttc

SEQ ID NO: 1664319 - DNA, 25 bp, Homo sapien
gctgttgattgttctccaagctgtg

SEQ ID NO: 1664320 - DNA, 25 bp, Homo sapien
gggctttaagtgtatcccaccttca

SEQ ID NO: 1664321 - DNA, 25 bp, Homo sapien
atccagactccacattgggcccagg

SEQ ID NO: 1664322 - DNA, 25 bp, Homo sapien
actccacattgggcccaggtctcag

SEQ ID NO: 1664323 - DNA, 25 bp, Homo sapien
tccagactccacattgggcccaggt

SEQ ID NO: 1664324 - DNA, 25 bp, Homo sapien
cagactccacattgggcccaggtct

SEQ ID NO: 1664325 - DNA, 25 bp, Homo sapien
catcaggtaaacatgtgcagagatg

SEQ ID NO: 1664326 - DNA, 25 bp, Homo sapien
ccagaggagaacaggcaacaggggg

SEQ ID NO: 1664327 - DNA, 25 bp, Homo sapien
accagaggagaacaggcaacagggg

SEQ ID NO: 1664328 - DNA, 25 bp, Homo sapien
ctgaccagaggagaacaggcaacag

SEQ ID NO: 1664329 - DNA, 25 bp, Homo sapien
aagtgaatcccacaatgagcaccag

SEQ ID NO: 1664330 - DNA, 25 bp, Homo sapien
cgtttgggccaatgggccaatacca

SEQ ID NO: 1664331 - DNA, 25 bp, Homo sapien
ggctgtctccagacggtgaaagtga

SEQ ID NO: 1664332 - DNA, 25 bp, Homo sapien
cagccgctgcgatgtagatcagctc

SEQ ID NO: 1664333 - DNA, 25 bp, Homo sapien
cggagtgctggacgcttcaggaaca

SEQ ID NO: 1664334 - DNA, 25 bp, Homo sapien
gaaaggcacatccatagacgatgcg

SEQ ID NO: 1664335 - DNA, 25 bp, Homo sapien
tgggtacagaattcatctcaactac

SEQ ID NO: 1664336 - DNA, 25 bp, Homo sapien
tgctgaaattctcgtctggctggta

SEQ ID NO: 1664337 - DNA, 25 bp, Homo sapien
cacaaggtcactgaactcaaacagg

SEQ ID NO: 1664338 - DNA, 25 bp, Homo sapien
gtcccgatggacaagaggctcacaa

SEQ ID NO: 1664339 - DNA, 25 bp, Homo sapien
cagaaaaagccaccaaggagtaagc

SEQ ID NO: 1664340 - DNA, 25 bp, Homo sapien
taagcaagcatagtcccgatggaca

SEQ ID NO: 1664341 - DNA, 25 bp, Homo sapien
aaaaggagcctgtcctcagccattg

SEQ ID NO: 1664342 - DNA, 25 bp, Homo sapien
atccgggcgagtccgcagaaaagga

SEQ ID NO: 1664343 - DNA, 25 bp, Homo sapien
ctggtgtgggcgtggatccgggcga

SEQ ID NO: 1664344 - DNA, 25 bp, Homo sapien
ctgcaagggtcccagcaacgacagt

SEQ ID NO: 1664345 - DNA, 25 bp, Homo sapien
gggttctcgggacatatcaggtagt

SEQ ID NO: 1664346 - DNA, 25 bp, Homo sapien
gtgagcgccgctgagacaccaaaat

SEQ ID NO: 1664347 - DNA, 25 bp, Homo sapien
tgccgacggccacagcatatctgat

SEQ ID NO: 1664348 - DNA, 25 bp, Homo sapien
ggcactatgagggtgagcgccgctg

SEQ ID NO: 1664349 - DNA, 25 bp, Homo sapien
gacaggtatatgcaccgggcggtga

SEQ ID NO: 1664350 - DNA, 25 bp, Homo sapien
tgcaccgggcggtgagggtggaggg

SEQ ID NO: 1664351 - DNA, 25 bp, Homo sapien
cttctcctgcgggacaggtatatgc

SEQ ID NO: 1664352 - DNA, 25 bp, Homo sapien
cctgcgggacaggtatatgcaccgg

SEQ ID NO: 1664353 - DNA, 25 bp, Homo sapien
aaacagtgcccaaacccccgatgag

SEQ ID NO: 1664354 - DNA, 25 bp, Homo sapien
ggtagcctttaatgaaacctgtgcc

SEQ ID NO: 1664355 - DNA, 25 bp, Homo sapien
ccccgatgagacagaatgaccgtgt

SEQ ID NO: 1664356 - DNA, 25 bp, Homo sapien
tgtgcccagcggcagcccaaacagt

SEQ ID NO: 1664357 - DNA, 25 bp, Homo sapien
acgtggccgctccatggagaatcac

SEQ ID NO: 1664358 - DNA, 25 bp, Homo sapien
aaagaaacacgtggccgctccatgg

SEQ ID NO: 1664359 - DNA, 25 bp, Homo sapien
tccatggagaatcacgccaaagcca

SEQ ID NO: 1664360 - DNA, 25 bp, Homo sapien
gaatcacgccaaagccaaaaggcac

SEQ ID NO: 1664361 - DNA, 25 bp, Homo sapien
cccatttgtagtcggcgtctgtgag

SEQ ID NO: 1664362 - DNA, 25 bp, Homo sapien
gcagatctcccttgatgaagccgga

SEQ ID NO: 1664363 - DNA, 25 bp, Homo sapien
tgagctgccagttgtgcagatctcc

SEQ ID NO: 1664364 - DNA, 25 bp, Homo sapien
tgggtgtcgttggaccaccccagct

SEQ ID NO: 1664365 - DNA, 25 bp, Homo sapien
ctgtgaagactttggaaccccaggc

SEQ ID NO: 1664366 - DNA, 25 bp, Homo sapien
gctgactcccgagctcccagagcca

SEQ ID NO: 1664367 - DNA, 25 bp, Homo sapien
aagactttggaaccccaggctgact

SEQ ID NO: 1664368 - DNA, 25 bp, Homo sapien
cccaggctgactcccgagctcccag

SEQ ID NO: 1664369 - DNA, 25 bp, Homo sapien
cctggctgcacatgccgttggccat

SEQ ID NO: 1664370 - DNA, 25 bp, Homo sapien
cgccctggctgcacatgccgttggc

SEQ ID NO: 1664371 - DNA, 25 bp, Homo sapien
tgaagctgaagaagccgccctggct

SEQ ID NO: 1664372 - DNA, 25 bp, Homo sapien
aagccgccctggctgcacatgccgt

SEQ ID NO: 1664373 - DNA, 25 bp, Homo sapien
ggcatcccttggtcaaacttctttg

SEQ ID NO: 1664374 - DNA, 25 bp, Homo sapien
gcatcccttggtcaaacttctttgt

SEQ ID NO: 1664375 - DNA, 25 bp, Homo sapien
gtgatgtctgaggaggcatcccttg

SEQ ID NO: 1664376 - DNA, 25 bp, Homo sapien
aggcatcccttggtcaaacttcttt

SEQ ID NO: 1664377 - DNA, 25 bp, Homo sapien
agctgctgccaaaccattttcaggc

SEQ ID NO: 1664378 - DNA, 25 bp, Homo sapien
ctggagctgctgccaaaccattttc

SEQ ID NO: 1664379 - DNA, 25 bp, Homo sapien
tagactctggagctgctgccaaacc

SEQ ID NO: 1664380 - DNA, 25 bp, Homo sapien
actctggagctgctgccaaaccatt

SEQ ID NO: 1664381 - DNA, 25 bp, Homo sapien
aaccacaggtggttgtgctccgcct

SEQ ID NO: 1664382 - DNA, 25 bp, Homo sapien
gcagctttcgtgtgagccactgact

SEQ ID NO: 1664383 - DNA, 25 bp, Homo sapien
gatggtgcaccctcagtggactgaa

SEQ ID NO: 1664384 - DNA, 25 bp, Homo sapien
tcaccttcattgtgccatggcagct

SEQ ID NO: 1664385 - DNA, 25 bp, Homo sapien
tcaaatttcacctagttgagagggt

SEQ ID NO: 1664386 - DNA, 25 bp, Homo sapien
aaattctgtgtgcaaacacgttgac

SEQ ID NO: 1664387 - DNA, 25 bp, Homo sapien
tcgtgaaaggaaatttaagccacca

SEQ ID NO: 1664388 - DNA, 25 bp, Homo sapien
taagaataagctcacggtttgaaca

SEQ ID NO: 1664389 - DNA, 25 bp, Homo sapien
gactgggaggaatcacatcgcttct

SEQ ID NO: 1664390 - DNA, 25 bp, Homo sapien
catgttgtcttggaggacgtgcaga

SEQ ID NO: 1664391 - DNA, 25 bp, Homo sapien
caaacgggagtctctggctgtcaag

SEQ ID NO: 1664392 - DNA, 25 bp, Homo sapien
gatgccgtcttagagtcactggtca

SEQ ID NO: 1664393 - DNA, 25 bp, Homo sapien
ggtctccaccctcctagagttatag

SEQ ID NO: 1664394 - DNA, 25 bp, Homo sapien
tcagggtaggttccatgttagtact

SEQ ID NO: 1664395 - DNA, 25 bp, Homo sapien
tatagtctaggcctgcggttaagca

SEQ ID NO: 1664396 - DNA, 25 bp, Homo sapien
gatttttgtgcaggaatcaaaccca

SEQ ID NO: 1664397 - DNA, 25 bp, Homo sapien
tagctgagattacagccgtgcctgg

SEQ ID NO: 1664398 - DNA, 25 bp, Homo sapien
tgatctcagctcactgcaacctctg

SEQ ID NO: 1664399 - DNA, 25 bp, Homo sapien
agtgcagtgcagtgatctcagctca

SEQ ID NO: 1664400 - DNA, 25 bp, Homo sapien
gatcccactctattgcccagcctgg

SEQ ID NO: 1664401 - DNA, 25 bp, Homo sapien
tcttgtatgggtgtccagttgagga

SEQ ID NO: 1664402 - DNA, 25 bp, Homo sapien
gcaatgtgaatcttaccactgaagg

SEQ ID NO: 1664403 - DNA, 25 bp, Homo sapien
taatgggttggtcctggttgtctgc

SEQ ID NO: 1664404 - DNA, 25 bp, Homo sapien
tcacgtagaccaatcttgtatgggt

SEQ ID NO: 1664405 - DNA, 25 bp, Homo sapien
aactggagatggtccttttcaggcg

SEQ ID NO: 1664406 - DNA, 25 bp, Homo sapien
gaactggagatggtccttttcaggc

SEQ ID NO: 1664407 - DNA, 25 bp, Homo sapien
actggagatggtccttttcaggcgt

SEQ ID NO: 1664408 - DNA, 25 bp, Homo sapien
ctggagatggtccttttcaggcgtt

SEQ ID NO: 1664409 - DNA, 25 bp, Homo sapien
tggactgtttcggtttgagtaaagc

SEQ ID NO: 1664410 - DNA, 25 bp, Homo sapien
gtaaagcagcgttgaagttgatgct

SEQ ID NO: 1664411 - DNA, 25 bp, Homo sapien
gagtaaagcagcgttgaagttgatg

SEQ ID NO: 1664412 - DNA, 25 bp, Homo sapien
agtaaagcagcgttgaagttgatgc

SEQ ID NO: 1664413 - DNA, 25 bp, Homo sapien
agtggcaggaacttcgctccctgta

SEQ ID NO: 1664414 - DNA, 25 bp, Homo sapien
gatcttgtgtgcaagctcacctcct

SEQ ID NO: 1664415 - DNA, 25 bp, Homo sapien
ttactcatcgatttttgaaacagag

SEQ ID NO: 1664416 - DNA, 25 bp, Homo sapien
ccattgtgcccagcggtcctctttt

SEQ ID NO: 1664417 - DNA, 25 bp, Homo sapien
aatgtggtggcacttccaacctagc

SEQ ID NO: 1664418 - DNA, 25 bp, Homo sapien
tggtggcacttccaacctagctctc

SEQ ID NO: 1664419 - DNA, 25 bp, Homo sapien
gcgatcttcgcttatttcaacctcc

SEQ ID NO: 1664420 - DNA, 25 bp, Homo sapien
gcacttccaacctagctctcttggg

SEQ ID NO: 1664421 - DNA, 25 bp, Homo sapien
agtggccctcttttttgggtcagag

SEQ ID NO: 1664422 - DNA, 25 bp, Homo sapien
tcaagtggccctcttttttgggtca

SEQ ID NO: 1664423 - DNA, 25 bp, Homo sapien
tcttgctctgtggccctggctggag

SEQ ID NO: 1664424 - DNA, 25 bp, Homo sapien
gcagtgtcaggatctctgctcacta

SEQ ID NO: 1664425 - DNA, 25 bp, Homo sapien
ccagcccaattctcttggttaaatg

SEQ ID NO: 1664426 - DNA, 25 bp, Homo sapien
gcccaattctcttggttaaatgtaa

SEQ ID NO: 1664427 - DNA, 25 bp, Homo sapien
ggtatgtgtagtaggcaatgctttt

SEQ ID NO: 1664428 - DNA, 25 bp, Homo sapien
aaatgtaaggtatgtgtagtaggca

SEQ ID NO: 1664429 - DNA, 25 bp, Homo sapien
cgcctggcaaatttagattccattt

SEQ ID NO: 1664430 - DNA, 25 bp, Homo sapien
ttccattttggatgctcccatcatg

SEQ ID NO: 1664431 - DNA, 25 bp, Homo sapien
ttagattccattttggatgctccca

SEQ ID NO: 1664432 - DNA, 25 bp, Homo sapien
acgcctggcaaatttagattccatt

SEQ ID NO: 1664433 - DNA, 25 bp, Homo sapien
aggaactggagatggtccttttagg

SEQ ID NO: 1664434 - DNA, 25 bp, Homo sapien
tgaagaaaggaactggagatggtcc

SEQ ID NO: 1664435 - DNA, 25 bp, Homo sapien
agaaaggaactggagatggtccttt

SEQ ID NO: 1664436 - DNA, 25 bp, Homo sapien
ctgcagagcctttgaagaaaggaac

SEQ ID NO: 1664437 - DNA, 25 bp, Homo sapien
gatcttggtaatacatttgcagacc

SEQ ID NO: 1664438 - DNA, 25 bp, Homo sapien
gaaaagccacgttgaagatgatgct

SEQ ID NO: 1664439 - DNA, 25 bp, Homo sapien
ttgggaaaagccacgttgaagatga

SEQ ID NO: 1664440 - DNA, 25 bp, Homo sapien
atgatgctgatcttggtaatacatt

SEQ ID NO: 1664441 - DNA, 25 bp, Homo sapien
caattttttcatgcgtgctgccaaa

SEQ ID NO: 1664442 - DNA, 25 bp, Homo sapien
tttttcatgcgtgctgccaaagcta

SEQ ID NO: 1664443 - DNA, 25 bp, Homo sapien
attttttcatgcgtgctgccaaagc

SEQ ID NO: 1664444 - DNA, 25 bp, Homo sapien
tgagtgtcacctttgcgcagggccc

SEQ ID NO: 1664445 - DNA, 25 bp, Homo sapien
tcgtagactcgatgttggatgctcc

SEQ ID NO: 1664446 - DNA, 25 bp, Homo sapien
ctggaactcgagtgaacacttggct

SEQ ID NO: 1664447 - DNA, 25 bp, Homo sapien
cacttggctctaagttcattgctgt

SEQ ID NO: 1664448 - DNA, 25 bp, Homo sapien
ccatcgggactgtgtgtccctgtac

SEQ ID NO: 1664449 - DNA, 25 bp, Homo sapien
gccaacatgcccggcctgaattttt

SEQ ID NO: 1664450 - DNA, 25 bp, Homo sapien
tgagccaacatgcccggcctgaatt

SEQ ID NO: 1664451 - DNA, 25 bp, Homo sapien
atgatctcggcccatacaacctcag

SEQ ID NO: 1664452 - DNA, 25 bp, Homo sapien
gatatggggcttccccatgttggtc

SEQ ID NO: 1664453 - DNA, 25 bp, Homo sapien
atttttctggcactggtatagaacc

SEQ ID NO: 1664454 - DNA, 25 bp, Homo sapien
tctggcactggtatagaacctcacg

SEQ ID NO: 1664455 - DNA, 25 bp, Homo sapien
gcactggtatagaacctcacgtggg

SEQ ID NO: 1664456 - DNA, 25 bp, Homo sapien
tggagttgaagggacctcagtgtcc

SEQ ID NO: 1664457 - DNA, 25 bp, Homo sapien
cagatgggatgagcaagagcacgga

SEQ ID NO: 1664458 - DNA, 25 bp, Homo sapien
tgggatgagcaagagcacggaggtg

SEQ ID NO: 1664459 - DNA, 25 bp, Homo sapien
tgcagatgggatgagcaagagcacg

SEQ ID NO: 1664460 - DNA, 25 bp, Homo sapien
gatgggatgagcaagagcacggagg

SEQ ID NO: 1664461 - DNA, 25 bp, Homo sapien
aggaactggagatggtccttttagg

SEQ ID NO: 1664462 - DNA, 25 bp, Homo sapien
gaaggaactggagatggtcctttta

SEQ ID NO: 1664463 - DNA, 25 bp, Homo sapien
ctgttgattctttgagggaaggaac

SEQ ID NO: 1664464 - DNA, 25 bp, Homo sapien
gttgattctttgagggaaggaactg

SEQ ID NO: 1664465 - DNA, 25 bp, Homo sapien
ctggctaatttagattccattttgg

SEQ ID NO: 1664466 - DNA, 25 bp, Homo sapien
tccattttggatgctcccatcagga

SEQ ID NO: 1664467 - DNA, 25 bp, Homo sapien
tagattccattttggatgctcccat

SEQ ID NO: 1664468 - DNA, 25 bp, Homo sapien
agtggcagaaactctcctcactgca

SEQ ID NO: 1664469 - DNA, 25 bp, Homo sapien
tttggatgtcacttttgtgcagggg

SEQ ID NO: 1664470 - DNA, 25 bp, Homo sapien
tgaatttggatgtcacttttgtgca

SEQ ID NO: 1664471 - DNA, 25 bp, Homo sapien
ttggatgtcacttttgtgcaggggc

SEQ ID NO: 1664472 - DNA, 25 bp, Homo sapien
ggagagggcgcgtgccggctgtctg

SEQ ID NO: 1664473 - DNA, 25 bp, Homo sapien
gagagggcgcgtgccggctgtctgc

SEQ ID NO: 1664474 - DNA, 25 bp, Homo sapien
cgcatacaggttggttgtgagattc

SEQ ID NO: 1664475 - DNA, 25 bp, Homo sapien
tagcagggtcaatatttggaaaata

SEQ ID NO: 1664476 - DNA, 25 bp, Homo sapien
aaaataaagagaccgcatacaggtt

SEQ ID NO: 1664477 - DNA, 25 bp, Homo sapien
ggttgtgagattcacaattttgcct

SEQ ID NO: 1664478 - DNA, 25 bp, Homo sapien
ctcaaagagttctgttgctctaaaa

SEQ ID NO: 1664479 - DNA, 25 bp, Homo sapien
tctcaaagagttctgttgctctaaa

SEQ ID NO: 1664480 - DNA, 25 bp, Homo sapien
cagcaagaggtaaacggtcctttat

SEQ ID NO: 1664481 - DNA, 25 bp, Homo sapien
ttccattaacttcagtgataatatc

SEQ ID NO: 1664482 - DNA, 25 bp, Homo sapien
tgttgacattcctctggtgtgagtg

SEQ ID NO: 1664483 - DNA, 25 bp, Homo sapien
gtgataatatcactacccaccacag

SEQ ID NO: 1664484 - DNA, 25 bp, Homo sapien
tatcagtcagacgaattcttgggga

SEQ ID NO: 1664485 - DNA, 25 bp, Homo sapien
cctgagagacgtctaaggcttaaaa

SEQ ID NO: 1664486 - DNA, 25 bp, Homo sapien
gctagcgcctgagagacgtctaagg

SEQ ID NO: 1664487 - DNA, 25 bp, Homo sapien
attagctagcgcctgagagacgtct

SEQ ID NO: 1664488 - DNA, 25 bp, Homo sapien
ctctgtctccgagctcgcctgcatc

SEQ ID NO: 1664489 - DNA, 25 bp, Homo sapien
tctgtctccgagctcgcctgcatct

SEQ ID NO: 1664490 - DNA, 25 bp, Homo sapien
ggcgctcattctgcacgacgatgag

SEQ ID NO: 1664491 - DNA, 25 bp, Homo sapien
aggcgctcattctgcacgacgatga

SEQ ID NO: 1664492 - DNA, 25 bp, Homo sapien
ctaggcgctcattctgcacgacgat

SEQ ID NO: 1664493 - DNA, 25 bp, Homo sapien
gctcattctgcacgacgatgaggtg

SEQ ID NO: 1664494 - DNA, 25 bp, Homo sapien
ctggtcaatgtcaacatcgggagcc

SEQ ID NO: 1664495 - DNA, 25 bp, Homo sapien
ctcatctgcagtgtagaggctggtg

SEQ ID NO: 1664496 - DNA, 25 bp, Homo sapien
gagcctcatctgcagtgtagaggct

SEQ ID NO: 1664497 - DNA, 25 bp, Homo sapien
tcaatgtcaacatcgggagcctcat

SEQ ID NO: 1664498 - DNA, 25 bp, Homo sapien
tcagtcttaaggacgaaggccccac

SEQ ID NO: 1664499 - DNA, 25 bp, Homo sapien
cattgtactcagtcctcatggcttg

SEQ ID NO: 1664500 - DNA, 25 bp, Homo sapien
tcaagagcaatcctaccaccgtagc

SEQ ID NO: 1664501 - DNA, 25 bp, Homo sapien
gaatatctatacgtggaaagccttg

SEQ ID NO: 1664502 - DNA, 25 bp, Homo sapien
cggtgacgcccatatcaacggatgc

SEQ ID NO: 1664503 - DNA, 25 bp, Homo sapien
tgcgacatttgagcgtcaccggtga

SEQ ID NO: 1664504 - DNA, 25 bp, Homo sapien
tgtggtttcgattcccagccggaaa

SEQ ID NO: 1664505 - DNA, 25 bp, Homo sapien
tacaggtcccttacagcgtctggct

SEQ ID NO: 1664506 - DNA, 25 bp, Homo sapien
gcttctctgcggggcaccagtctgt

SEQ ID NO: 1664507 - DNA, 25 bp, Homo sapien
tctgcggggcaccagtctgtatgct

SEQ ID NO: 1664508 - DNA, 25 bp, Homo sapien
gcggggcaccagtctgtatgctcca

SEQ ID NO: 1664509 - DNA, 25 bp, Homo sapien
ttctctgcggggcaccagtctgtat

SEQ ID NO: 1664510 - DNA, 25 bp, Homo sapien
gacttttgatctcaatctgcatgag

SEQ ID NO: 1664511 - DNA, 25 bp, Homo sapien
gccagctctgtcaaacattaatttg

SEQ ID NO: 1664512 - DNA, 25 bp, Homo sapien
gggtgatgagcaccctcccatcttc

SEQ ID NO: 1664513 - DNA, 25 bp, Homo sapien
ctgcatgagtctgtctctaggaagg

SEQ ID NO: 1664514 - DNA, 25 bp, Homo sapien
ataaggttttgttactcgaagcgct

SEQ ID NO: 1664515 - DNA, 25 bp, Homo sapien
ttgttactcgaagcgctgccaacct

SEQ ID NO: 1664516 - DNA, 25 bp, Homo sapien
ttttgttactcgaagcgctgccaac

SEQ ID NO: 1664517 - DNA, 25 bp, Homo sapien
ggttttgttactcgaagcgctgcca

SEQ ID NO: 1664518 - DNA, 25 bp, Homo sapien
tttattcaggtccatcccaaataac

SEQ ID NO: 1664519 - DNA, 25 bp, Homo sapien
tgggtcattttattcaggtccatcc

SEQ ID NO: 1664520 - DNA, 25 bp, Homo sapien
tgtgggtcattttattcaggtccat

SEQ ID NO: 1664521 - DNA, 25 bp, Homo sapien
attttattcaggtccatcccaaata

SEQ ID NO: 1664522 - DNA, 25 bp, Homo sapien
atggctcagccgcttgcaaagcagt

SEQ ID NO: 1664523 - DNA, 25 bp, Homo sapien
tcggagtttgcagccaggatggctc

SEQ ID NO: 1664524 - DNA, 25 bp, Homo sapien
cagccgcttgcaaagcagtcggaca

SEQ ID NO: 1664525 - DNA, 25 bp, Homo sapien
cagaggactcggagtttgcagccag

SEQ ID NO: 1664526 - DNA, 25 bp, Homo sapien
tgtcccctagggcgttgttggtcag

SEQ ID NO: 1664527 - DNA, 25 bp, Homo sapien
tcaggtaaaggtcggtcaaggtctg

SEQ ID NO: 1664528 - DNA, 25 bp, Homo sapien
caaggtctggttgatccccagggtg

SEQ ID NO: 1664529 - DNA, 25 bp, Homo sapien
taaagattctcacaagccttggctg

SEQ ID NO: 1664530 - DNA, 25 bp, Homo sapien
cacccccaaatcagaataagttcag

SEQ ID NO: 1664531 - DNA, 25 bp, Homo sapien
gggtagcacccccaaatcagaataa

SEQ ID NO: 1664532 - DNA, 25 bp, Homo sapien
gtagcacccccaaatcagaataagt

SEQ ID NO: 1664533 - DNA, 25 bp, Homo sapien
taagtcgggtagcacccccaaatca

SEQ ID NO: 1664534 - DNA, 25 bp, Homo sapien
tctggagtctgcaggcgggatgttg

SEQ ID NO: 1664535 - DNA, 25 bp, Homo sapien
ccaggtcgttgaaactcaagtccag

SEQ ID NO: 1664536 - DNA, 25 bp, Homo sapien
gtctcccaggtcgttgaaactcaag

SEQ ID NO: 1664537 - DNA, 25 bp, Homo sapien
ccagtctcccaggtcgttgaaactc

SEQ ID NO: 1664538 - DNA, 25 bp, Homo sapien
gagcttgcacgtgggatgcctgagg

SEQ ID NO: 1664539 - DNA, 25 bp, Homo sapien
tggagcttgcacgtgggatgcctga

SEQ ID NO: 1664540 - DNA, 25 bp, Homo sapien
tctggagcttgcacgtgggatgcct

SEQ ID NO: 1664541 - DNA, 25 bp, Homo sapien
gtctggagcttgcacgtgggatgcc

SEQ ID NO: 1664542 - DNA, 25 bp, Homo sapien
gagagttgaggccagctcgtcacag

SEQ ID NO: 1664543 - DNA, 25 bp, Homo sapien
gttgaggccagctcgtcacaggcag

SEQ ID NO: 1664544 - DNA, 25 bp, Homo sapien
ccccagctcattcaggctcaggtcc

SEQ ID NO: 1664545 - DNA, 25 bp, Homo sapien
tgaggccagctcgtcacaggcagca

SEQ ID NO: 1664546 - DNA, 25 bp, Homo sapien
caaagtccgtagtctgcagactggg

SEQ ID NO: 1664547 - DNA, 25 bp, Homo sapien
tcaggtccaactcaaccagatgtgg

SEQ ID NO: 1664548 - DNA, 25 bp, Homo sapien
ccagatgtgggttggtgccgagcac

SEQ ID NO: 1664549 - DNA, 25 bp, Homo sapien
tcagtccctggcatagtaacctcag

SEQ ID NO: 1664550 - DNA, 25 bp, Homo sapien
tcttattggctatgagagctgcaga

SEQ ID NO: 1664551 - DNA, 25 bp, Homo sapien
gcctgggaatccaacgccgttgcca

SEQ ID NO: 1664552 - DNA, 25 bp, Homo sapien
aggccctcgcaaagcagcatcatgc

SEQ ID NO: 1664553 - DNA, 25 bp, Homo sapien
cgttgccactgagatccatccttgt

SEQ ID NO: 1664554 - DNA, 25 bp, Homo sapien
tcaagtgatcctccccatctgggcc

SEQ ID NO: 1664555 - DNA, 25 bp, Homo sapien
aagtgatcctccccatctgggcctc

SEQ ID NO: 1664556 - DNA, 25 bp, Homo sapien
agtgatcctccccatctgggcctcc

SEQ ID NO: 1664557 - DNA, 25 bp, Homo sapien
ggtcaagtgatcctccccatctggg

SEQ ID NO: 1664558 - DNA, 25 bp, Homo sapien
cagagacagctctatcaggtttgga

SEQ ID NO: 1664559 - DNA, 25 bp, Homo sapien
cagatgttcactgtaggcgtccagc

SEQ ID NO: 1664560 - DNA, 25 bp, Homo sapien
gcccagggcatttcggtacagagac

SEQ ID NO: 1664561 - DNA, 25 bp, Homo sapien
gcgtccagcagaacggtcctctctg

SEQ ID NO: 1664562 - DNA, 25 bp, Homo sapien
cacatccggccaaagcatgctatct

SEQ ID NO: 1664563 - DNA, 25 bp, Homo sapien
ccaccgataaaagggatatagaggc

SEQ ID NO: 1664564 - DNA, 25 bp, Homo sapien
tctacagaagattgttgggtccacc

SEQ ID NO: 1664565 - DNA, 25 bp, Homo sapien
gatgcgtgctctcttgggaccattg

SEQ ID NO: 1664566 - DNA, 25 bp, Homo sapien
aatgttgctgaccacgatcacctgg

SEQ ID NO: 1664567 - DNA, 25 bp, Homo sapien
tgtaggtggcgccatacaagtgcag

SEQ ID NO: 1664568 - DNA, 25 bp, Homo sapien
ttcagacagaacgaggagaccatgt

SEQ ID NO: 1664569 - DNA, 25 bp, Homo sapien
agaaaacgcgtactcggtcaacagc

SEQ ID NO: 1664570 - DNA, 25 bp, Homo sapien
ctcacgtaattgaagacttggcccg

SEQ ID NO: 1664571 - DNA, 25 bp, Homo sapien
gcccgcctgctctgcattgtggaaa

SEQ ID NO: 1664572 - DNA, 25 bp, Homo sapien
gagaggctcgttgtccctcacgtaa

SEQ ID NO: 1664573 - DNA, 25 bp, Homo sapien
tacactgcagtggtggtcctggacg

SEQ ID NO: 1664574 - DNA, 25 bp, Homo sapien
gataatcaaatctgccttggaagag

SEQ ID NO: 1664575 - DNA, 25 bp, Homo sapien
tgctgcattccgtggcactctggtt

SEQ ID NO: 1664576 - DNA, 25 bp, Homo sapien
aactcggatgagctcctggagaggc

SEQ ID NO: 1664577 - DNA, 25 bp, Homo sapien
tccctgaggatcgtggaaagaaggc

SEQ ID NO: 1664578 - DNA, 25 bp, Homo sapien
gccagcatggacttgcctatccctg

SEQ ID NO: 1664579 - DNA, 25 bp, Homo sapien
cagcatcaccttgtgtgccagcatg

SEQ ID NO: 1664580 - DNA, 25 bp, Homo sapien
tgccgcgccttgcatgaccacggtg

SEQ ID NO: 1664581 - DNA, 25 bp, Homo sapien
ccttgcatgaccacggtgcgcggtg

SEQ ID NO: 1664582 - DNA, 25 bp, Homo sapien
caaagagggtctctatcttgatggg

SEQ ID NO: 1664583 - DNA, 25 bp, Homo sapien
tcttgatggggctagcctggtgtcc

SEQ ID NO: 1664584 - DNA, 25 bp, Homo sapien
gcatggggtttgagtgctccttcac

SEQ ID NO: 1664585 - DNA, 25 bp, Homo sapien
tggtgtcccacggtcctcgcgtgtc

SEQ ID NO: 1664586 - DNA, 25 bp, Homo sapien
cgggtgtaccggtggctgaggttga

SEQ ID NO: 1664587 - DNA, 25 bp, Homo sapien
cattgcggtcttccatgagccggaa

SEQ ID NO: 1664588 - DNA, 25 bp, Homo sapien
cctaggcgcgcattgcggtcttcca

SEQ ID NO: 1664589 - DNA, 25 bp, Homo sapien
tgacacattcccctaggcgcgcatt

SEQ ID NO: 1664590 - DNA, 25 bp, Homo sapien
ggacatagtccctgtaggtttcctg

SEQ ID NO: 1664591 - DNA, 25 bp, Homo sapien
acatagtccctgtaggtttcctggg

SEQ ID NO: 1664592 - DNA, 25 bp, Homo sapien
gcggacatagtccctgtaggtttcc

SEQ ID NO: 1664593 - DNA, 25 bp, Homo sapien
ctgcggacatagtccctgtaggttt

SEQ ID NO: 1664594 - DNA, 25 bp, Homo sapien
catgttgactggttcccaagtgagg

SEQ ID NO: 1664595 - DNA, 25 bp, Homo sapien
tccagaaggcatgttgactggttcc

SEQ ID NO: 1664596 - DNA, 25 bp, Homo sapien
ttgactggttcccaagtgaggacgg

SEQ ID NO: 1664597 - DNA, 25 bp, Homo sapien
agaaggcatgttgactggttcccaa

SEQ ID NO: 1664598 - DNA, 25 bp, Homo sapien
ctctgtcgcggtccccaggtataac

SEQ ID NO: 1664599 - DNA, 25 bp, Homo sapien
tccacagcctcgagttcttccaagt

SEQ ID NO: 1664600 - DNA, 25 bp, Homo sapien
tcctctggcccgaagtgggtgatga

SEQ ID NO: 1664601 - DNA, 25 bp, Homo sapien
tatccgctcaaaggtgctgagagcc

SEQ ID NO: 1664602 - DNA, 25 bp, Homo sapien
caagggaggaaagaccttttgctga

SEQ ID NO: 1664603 - DNA, 25 bp, Homo sapien
ttgcatcattcacaggcagcgggcg

SEQ ID NO: 1664604 - DNA, 25 bp, Homo sapien
aggctgagatgctcctatgcacggg

SEQ ID NO: 1664605 - DNA, 25 bp, Homo sapien
tcctatgcacgggacacagggcgac

SEQ ID NO: 1664606 - DNA, 25 bp, Homo sapien
gggcacaatgcactctaggatactt

SEQ ID NO: 1664607 - DNA, 25 bp, Homo sapien
cagggcacaatgcactctaggatac

SEQ ID NO: 1664608 - DNA, 25 bp, Homo sapien
tgcagtgcccgtctgtaacagggca

SEQ ID NO: 1664609 - DNA, 25 bp, Homo sapien
cccgtctgtaacagggcacaatgca

SEQ ID NO: 1664610 - DNA, 25 bp, Homo sapien
ctcctggaagcttgatggaggaaaa

SEQ ID NO: 1664611 - DNA, 25 bp, Homo sapien
aagcatctacagccatttgttatca

SEQ ID NO: 1664612 - DNA, 25 bp, Homo sapien
cctcctggaagcttgatggaggaaa

SEQ ID NO: 1664613 - DNA, 25 bp, Homo sapien
aaaagcatctacagccatttgttat

SEQ ID NO: 1664614 - DNA, 25 bp, Homo sapien
ctgtaagattgcatcctcatgcatc

SEQ ID NO: 1664615 - DNA, 25 bp, Homo sapien
gcatcctcatgcatcattgttcact

SEQ ID NO: 1664616 - DNA, 25 bp, Homo sapien
cttttcatttaggtaaacagagctt

SEQ ID NO: 1664617 - DNA, 25 bp, Homo sapien
tcatttaggtaaacagagcttcctc

SEQ ID NO: 1664618 - DNA, 25 bp, Homo sapien
cggaatccggctcaggaatgtggca

SEQ ID NO: 1664619 - DNA, 25 bp, Homo sapien
gactagtgacacctttgcccttgcc

SEQ ID NO: 1664620 - DNA, 25 bp, Homo sapien
tacatggaaaggctacggaatccgg

SEQ ID NO: 1664621 - DNA, 25 bp, Homo sapien
aggaggccaagaatagacagcagca

SEQ ID NO: 1664622 - DNA, 25 bp, Homo sapien
ttgcagcgagccgaaatcgtgctac

SEQ ID NO: 1664623 - DNA, 25 bp, Homo sapien
gcgagccgaaatcgtgctactgcac

SEQ ID NO: 1664624 - DNA, 25 bp, Homo sapien
agcgagccgaaatcgtgctactgca

SEQ ID NO: 1664625 - DNA, 25 bp, Homo sapien
aggttgcagcgagccgaaatcgtgc

SEQ ID NO: 1664626 - DNA, 25 bp, Homo sapien
ccgggacgactgcagagcgcggtga

SEQ ID NO: 1664627 - DNA, 25 bp, Homo sapien
cagacgcgccccgttagctcagcgt

SEQ ID NO: 1664628 - DNA, 25 bp, Homo sapien
cagagggagggactcaggcgtccca

SEQ ID NO: 1664629 - DNA, 25 bp, Homo sapien
gctcagcgtcgctgagcatccgcag

SEQ ID NO: 1664630 - DNA, 25 bp, Homo sapien
acgctgggccagtcccgatttcctt

SEQ ID NO: 1664631 - DNA, 25 bp, Homo sapien
agtagcccgccttctagagcacggg

SEQ ID NO: 1664632 - DNA, 25 bp, Homo sapien
gggacagaatgagtgacgccctcgc

SEQ ID NO: 1664633 - DNA, 25 bp, Homo sapien
cgccttctagagcacgggacgctgg

SEQ ID NO: 1664634 - DNA, 25 bp, Homo sapien
tatgtggctgacctggtgcactctg

SEQ ID NO: 1664635 - DNA, 25 bp, Homo sapien
catcaacctactggcgtatgtggct

SEQ ID NO: 1664636 - DNA, 25 bp, Homo sapien
tcgatgagaagtatggcggccagcc

SEQ ID NO: 1664637 - DNA, 25 bp, Homo sapien
tcgagagatgtaagctgcagccgca

SEQ ID NO: 1664638 - DNA, 25 bp, Homo sapien
cctagaggccatcttaaaggaagca

SEQ ID NO: 1664639 - DNA, 25 bp, Homo sapien
ttacagaacacccactgcctagagg

SEQ ID NO: 1664640 - DNA, 25 bp, Homo sapien
cagtaatttccaatgggcgggaggc

SEQ ID NO: 1664641 - DNA, 25 bp, Homo sapien
ccttgggagccctgagacttctttc

SEQ ID NO: 1664642 - DNA, 25 bp, Homo sapien
ctttgggagaccaagtcaggcaatc

SEQ ID NO: 1664643 - DNA, 25 bp, Homo sapien
ttgggagaccaagtcaggcaatcat

SEQ ID NO: 1664644 - DNA, 25 bp, Homo sapien
tttgggagaccaagtcaggcaatca

SEQ ID NO: 1664645 - DNA, 25 bp, Homo sapien
gacaaaaattactgagtggccctta

SEQ ID NO: 1664646 - DNA, 25 bp, Homo sapien
gaataacgtgtcctgctttggcaga

SEQ ID NO: 1664647 - DNA, 25 bp, Homo sapien
tgaatgtgtagtgcacacgcacggg

SEQ ID NO: 1664648 - DNA, 25 bp, Homo sapien
tcggacgaagaaccacaggatgttg

SEQ ID NO: 1664649 - DNA, 25 bp, Homo sapien
gtgagctatgacggtgctgctgtac

SEQ ID NO: 1664650 - DNA, 25 bp, Homo sapien
actctccctagctctgactgctggc

SEQ ID NO: 1664651 - DNA, 25 bp, Homo sapien
agctatgacggtgctgctgtactcc

SEQ ID NO: 1664652 - DNA, 25 bp, Homo sapien
agactccatctcactctccctagct

SEQ ID NO: 1664653 - DNA, 25 bp, Homo sapien
attggtggagttgccccaggtctgg

SEQ ID NO: 1664654 - DNA, 25 bp, Homo sapien
tcattggtggagttgccccaggtct

SEQ ID NO: 1664655 - DNA, 25 bp, Homo sapien
gtcattggtggagttgccccaggtc

SEQ ID NO: 1664656 - DNA, 25 bp, Homo sapien
cattggtggagttgccccaggtctg

SEQ ID NO: 1664657 - DNA, 25 bp, Homo sapien
cattggtggagttgccccaggtctg

SEQ ID NO: 1664658 - DNA, 25 bp, Homo sapien
ggtcattggtggagttgccccaggt

SEQ ID NO: 1664659 - DNA, 25 bp, Homo sapien
attggtggagttgccccaggtctgg

SEQ ID NO: 1664660 - DNA, 25 bp, Homo sapien
tcattggtggagttgccccaggtct

SEQ ID NO: 1664661 - DNA, 25 bp, Homo sapien
tggagttggtcccaggtctggtcat

SEQ ID NO: 1664662 - DNA, 25 bp, Homo sapien
cctggtcattggtggacttgccgca

SEQ ID NO: 1664663 - DNA, 25 bp, Homo sapien
tctggtcattggtggactttcccca

SEQ ID NO: 1664664 - DNA, 25 bp, Homo sapien
tgtccccaggtctggtcattggtgg

SEQ ID NO: 1664665 - DNA, 25 bp, Homo sapien
gaagttgccccaggtctggtcattg

SEQ ID NO: 1664666 - DNA, 25 bp, Homo sapien
gccccaggtctggtcattggtggac

SEQ ID NO: 1664667 - DNA, 25 bp, Homo sapien
tctggtcattggtgaagttgcccca

SEQ ID NO: 1664668 - DNA, 25 bp, Homo sapien
ttgccccaggtctggtcattggtga

SEQ ID NO: 1664669 - DNA, 25 bp, Homo sapien
ccaggctggtcattggcggacttgc

SEQ ID NO: 1664670 - DNA, 25 bp, Homo sapien
tgccccaggctggtcattggcggac

SEQ ID NO: 1664671 - DNA, 25 bp, Homo sapien
tcattggtggagttgtccccaggcc

SEQ ID NO: 1664672 - DNA, 25 bp, Homo sapien
ccccaggctggtcattggcggactt

SEQ ID NO: 1664673 - DNA, 25 bp, Homo sapien
attttattgatatggacgaagagca

SEQ ID NO: 1664674 - DNA, 25 bp, Homo sapien
ttccgataaccttggccagcacgat

SEQ ID NO: 1664675 - DNA, 25 bp, Homo sapien
tatggacgaagagcaaggaaacaca

SEQ ID NO: 1664676 - DNA, 25 bp, Homo sapien
ctccagatttccgataaccttggcc

SEQ ID NO: 1664677 - DNA, 25 bp, Homo sapien
agacagggcgctggtgcttagctca

SEQ ID NO: 1664678 - DNA, 25 bp, Homo sapien
ctgaagctgcctcagacagggcgct

SEQ ID NO: 1664679 - DNA, 25 bp, Homo sapien
tacactttcagtgccgcatattcat

SEQ ID NO: 1664680 - DNA, 25 bp, Homo sapien
tgccgcatattcatgagatcctggg

SEQ ID NO: 1664681 - DNA, 25 bp, Homo sapien
agagataccctttccatattggata

SEQ ID NO: 1664682 - DNA, 25 bp, Homo sapien
gagataccctttccatattggataa

SEQ ID NO: 1664683 - DNA, 25 bp, Homo sapien
ctttccatattggataaatctgcct

SEQ ID NO: 1664684 - DNA, 25 bp, Homo sapien
accctttccatattggataaatctg

SEQ ID NO: 1664685 - DNA, 25 bp, Homo sapien
agcctcctgctccggaagtttggaa

SEQ ID NO: 1664686 - DNA, 25 bp, Homo sapien
cctcctgctccggaagtttggaatg

SEQ ID NO: 1664687 - DNA, 25 bp, Homo sapien
gcctcctgctccggaagtttggaat

SEQ ID NO: 1664688 - DNA, 25 bp, Homo sapien
ctcttggtggattcctcagatgatg

SEQ ID NO: 1664689 - DNA, 25 bp, Homo sapien
tcttggtggattcctcagatgatga

SEQ ID NO: 1664690 - DNA, 25 bp, Homo sapien
ttggtggattcctcagatgatgaac

SEQ ID NO: 1664691 - DNA, 25 bp, Homo sapien
cttggtggattcctcagatgatgaa

SEQ ID NO: 1664692 - DNA, 25 bp, Homo sapien
tctccctttgcgttctctgagctca

SEQ ID NO: 1664693 - DNA, 25 bp, Homo sapien
cctctctccctttgcgttctctgag

SEQ ID NO: 1664694 - DNA, 25 bp, Homo sapien
cccctctctccctttgcgttctctg

SEQ ID NO: 1664695 - DNA, 25 bp, Homo sapien
tctctccctttgcgttctctgagct

SEQ ID NO: 1664696 - DNA, 25 bp, Homo sapien
agatggcgacaaagatggttctggt

SEQ ID NO: 1664697 - DNA, 25 bp, Homo sapien
aagatggcgacaaagatggttctgg

SEQ ID NO: 1664698 - DNA, 25 bp, Homo sapien
gatggcgacaaagatggttctggtg

SEQ ID NO: 1664699 - DNA, 25 bp, Homo sapien
tccctagcctctggtcttcgacctt

SEQ ID NO: 1664700 - DNA, 25 bp, Homo sapien
ggagcttcaagttcatcgtgtttat

SEQ ID NO: 1664701 - DNA, 25 bp, Homo sapien
agggagcttcaagttcatcgtgttt

SEQ ID NO: 1664702 - DNA, 25 bp, Homo sapien
gggagcttcaagttcatcgtgttta

SEQ ID NO: 1664703 - DNA, 25 bp, Homo sapien
cattgactgagagcaaaggttctgg

SEQ ID NO: 1664704 - DNA, 25 bp, Homo sapien
tatggagtgagacatcgaagtgtcc

SEQ ID NO: 1664705 - DNA, 25 bp, Homo sapien
tacttgtcacgttccagagcatgaa

SEQ ID NO: 1664706 - DNA, 25 bp, Homo sapien
tgacttgtaatggttctgggatccc

SEQ ID NO: 1664707 - DNA, 25 bp, Homo sapien
catccttaggcttcaggtccgtgaa

SEQ ID NO: 1664708 - DNA, 25 bp, Homo sapien
tgtacccagagtcgttcaccttgcg

SEQ ID NO: 1664709 - DNA, 25 bp, Homo sapien
cacttcagggtcacattgctctcgg

SEQ ID NO: 1664710 - DNA, 25 bp, Homo sapien
gaattcagcttcgttttctgccgag

SEQ ID NO: 1664711 - DNA, 25 bp, Homo sapien
tttttctcatcttcgtagcccagac

SEQ ID NO: 1664712 - DNA, 25 bp, Homo sapien
ttctcatcttcgtagcccagacaca

SEQ ID NO: 1664713 - DNA, 25 bp, Homo sapien
ctcatcttcgtagcccagacacagc

SEQ ID NO: 1664714 - DNA, 25 bp, Homo sapien
ttttctcatcttcgtagcccagaca

SEQ ID NO: 1664715 - DNA, 25 bp, Homo sapien
aagcagggagaggaattctgcggtc

SEQ ID NO: 1664716 - DNA, 25 bp, Homo sapien
cgaggcaaagcagggagaggaattc

SEQ ID NO: 1664717 - DNA, 25 bp, Homo sapien
gcagggagaggaattctgcggtcat

SEQ ID NO: 1664718 - DNA, 25 bp, Homo sapien
caaagcagggagaggaattctgcgg

SEQ ID NO: 1664719 - DNA, 25 bp, Homo sapien
ggctgcccggttcgtccccaggatg

SEQ ID NO: 1664720 - DNA, 25 bp, Homo sapien
agcgtcccttctgccagaaccaagg

SEQ ID NO: 1664721 - DNA, 25 bp, Homo sapien
ggaggttttgctctgacactctggt

SEQ ID NO: 1664722 - DNA, 25 bp, Homo sapien
cgtccccaggatgtgcagatagagg

SEQ ID NO: 1664723 - DNA, 25 bp, Homo sapien
ctagcgcatgctacccttggcagct

SEQ ID NO: 1664724 - DNA, 25 bp, Homo sapien
agcgcatgctacccttggcagctgt

SEQ ID NO: 1664725 - DNA, 25 bp, Homo sapien
tagcgcatgctacccttggcagctg

SEQ ID NO: 1664726 - DNA, 25 bp, Homo sapien
caacccatcattccctgggcagctg

SEQ ID NO: 1664727 - DNA, 25 bp, Homo sapien
tcagctggtccaacccatcattccc

SEQ ID NO: 1664728 - DNA, 25 bp, Homo sapien
ggtccaacccatcattccctgggca

SEQ ID NO: 1664729 - DNA, 25 bp, Homo sapien
cccatcattccctgggcagctgtgg

SEQ ID NO: 1664730 - DNA, 25 bp, Homo sapien
tggagacacattccggctgtaccag

SEQ ID NO: 1664731 - DNA, 25 bp, Homo sapien
gataaccacaattacggcagccaga

SEQ ID NO: 1664732 - DNA, 25 bp, Homo sapien
caggaaagctcccatgataaccaca

SEQ ID NO: 1664733 - DNA, 25 bp, Homo sapien
gccagacccagtcgtacgaagttac

SEQ ID NO: 1664734 - DNA, 25 bp, Homo sapien
caagctgatcactgggttctgaggc

SEQ ID NO: 1664735 - DNA, 25 bp, Homo sapien
gctgtcacgtccaccagagagaagt

SEQ ID NO: 1664736 - DNA, 25 bp, Homo sapien
aaacaattggtctcgcttctggcac

SEQ ID NO: 1664737 - DNA, 25 bp, Homo sapien
gatggcgtccctgccttcagtagag

SEQ ID NO: 1664738 - DNA, 25 bp, Homo sapien
cctgtcccccgtatgtcattggcag

SEQ ID NO: 1664739 - DNA, 25 bp, Homo sapien
tcccccgtatgtcattggcaggcac

SEQ ID NO: 1664740 - DNA, 25 bp, Homo sapien
cccgtatgtcattggcaggcaccct

SEQ ID NO: 1664741 - DNA, 25 bp, Homo sapien
gtatgtcattggcaggcaccctgtc

SEQ ID NO: 1664742 - DNA, 25 bp, Homo sapien
ggccgcgccctctgtagaatcaagg

SEQ ID NO: 1664743 - DNA, 25 bp, Homo sapien
attgaggtgaaattcggccgcgccc

SEQ ID NO: 1664744 - DNA, 25 bp, Homo sapien
tggcaggagtccaacatcgcagcgt

SEQ ID NO: 1664745 - DNA, 25 bp, Homo sapien
tcaccaacagtagaaggacgtcact

SEQ ID NO: 1664746 - DNA, 25 bp, Homo sapien
ctggacccgatgccctcccctgctc

SEQ ID NO: 1664747 - DNA, 25 bp, Homo sapien
acagaggagggaaagcagcttaggg

SEQ ID NO: 1664748 - DNA, 25 bp, Homo sapien
gaggagggaaagcagcttagggatc

SEQ ID NO: 1664749 - DNA, 25 bp, Homo sapien
cagaggagggaaagcagcttaggga

SEQ ID NO: 1664750 - DNA, 25 bp, Homo sapien
ggagggaaagcagcttagggatcat

SEQ ID NO: 1664751 - DNA, 25 bp, Homo sapien
ggaagtcttaaccactaatcgcgtc

SEQ ID NO: 1664752 - DNA, 25 bp, Homo sapien
gtctaaggaccgttccgcggagctc

SEQ ID NO: 1664753 - DNA, 25 bp, Homo sapien
tactacagtgagtagacggcagtgc

SEQ ID NO: 1664754 - DNA, 25 bp, Homo sapien
gaaaggcctggaaagaagctacagc

SEQ ID NO: 1664755 - DNA, 25 bp, Homo sapien
cagcaggagcgcggttctgactgcg

SEQ ID NO: 1664756 - DNA, 25 bp, Homo sapien
ccccgggtgtagtcggaggagccag

SEQ ID NO: 1664757 - DNA, 25 bp, Homo sapien
acagtctcaaagttgagggggagtc

SEQ ID NO: 1664758 - DNA, 25 bp, Homo sapien
atcagctcccggaccccaaagtctg

SEQ ID NO: 1664759 - DNA, 25 bp, Homo sapien
ggacttagggacctgactctacagt

SEQ ID NO: 1664760 - DNA, 25 bp, Homo sapien
gggagtcgatggaggcttcaactcc

SEQ ID NO: 1664761 - DNA, 25 bp, Homo sapien
gctgggtcccaggaatcctgggtct

SEQ ID NO: 1664762 - DNA, 25 bp, Homo sapien
ggcctgcattcctggggcggaggag

SEQ ID NO: 1664763 - DNA, 25 bp, Homo sapien
aggactagacccctgggtctgaagg

SEQ ID NO: 1664764 - DNA, 25 bp, Homo sapien
gggctgcaggactagacccctgggt

SEQ ID NO: 1664765 - DNA, 25 bp, Homo sapien
tcgcggtacagcacgaagctcatgt

SEQ ID NO: 1664766 - DNA, 25 bp, Homo sapien
tcgctgcgctgcgacagcacgtagg

SEQ ID NO: 1664767 - DNA, 25 bp, Homo sapien
cggagggcgtgtgatagtagcagct

SEQ ID NO: 1664768 - DNA, 25 bp, Homo sapien
gcccagcagcgtgaagtcggcccag

SEQ ID NO: 1664769 - DNA, 25 bp, Homo sapien
gcagctccaggacatcgctgggctg

SEQ ID NO: 1664770 - DNA, 25 bp, Homo sapien
agcagctccaggacatcgctgggct

SEQ ID NO: 1664771 - DNA, 25 bp, Homo sapien
cagctccaggacatcgctgggctgg

SEQ ID NO: 1664772 - DNA, 25 bp, Homo sapien
aaagaattctgccagctcggaggac

SEQ ID NO: 1664773 - DNA, 25 bp, Homo sapien
ggtgcccggcatctcaaggtcacgt

SEQ ID NO: 1664774 - DNA, 25 bp, Homo sapien
gggtcacaactgtagccggctgagc

SEQ ID NO: 1664775 - DNA, 25 bp, Homo sapien
tcggtagcagcagcggtaaattccc

SEQ ID NO: 1664776 - DNA, 25 bp, Homo sapien
tgagatctcacagcggcccatttta

SEQ ID NO: 1664777 - DNA, 25 bp, Homo sapien
caggctcagggttttgcacatgtga

SEQ ID NO: 1664778 - DNA, 25 bp, Homo sapien
gaaatggagtcttagcaagctgtga

SEQ ID NO: 1664779 - DNA, 25 bp, Homo sapien
tttcttaagccctgtactgtgccag

SEQ ID NO: 1664780 - DNA, 25 bp, Homo sapien
cagacggagtgatgtctgtgtgaca

SEQ ID NO: 1664781 - DNA, 25 bp, Homo sapien
cggagtgatgtctgtgtgacacaga

SEQ ID NO: 1664782 - DNA, 25 bp, Homo sapien
gacggagtgatgtctgtgtgacaca

SEQ ID NO: 1664783 - DNA, 25 bp, Homo sapien
agacggagtgatgtctgtgtgacac

SEQ ID NO: 1664784 - DNA, 25 bp, Homo sapien
gggtcagcagctggaggatcagcac

SEQ ID NO: 1664785 - DNA, 25 bp, Homo sapien
gagggtcagcagctggaggatcagc

SEQ ID NO: 1664786 - DNA, 25 bp, Homo sapien
cagcagctggaggatcagcaccagg

SEQ ID NO: 1664787 - DNA, 25 bp, Homo sapien
gtcagcagctggaggatcagcacca

SEQ ID NO: 1664788 - DNA, 25 bp, Homo sapien
gcagatacccgctagagctggagcc

SEQ ID NO: 1664789 - DNA, 25 bp, Homo sapien
ggtgactgtgtcatagccctatggc

SEQ ID NO: 1664790 - DNA, 25 bp, Homo sapien
gaaatgaggcaacatcagaaaacca

SEQ ID NO: 1664791 - DNA, 25 bp, Homo sapien
catttacggaagagagtatcgaggt

SEQ ID NO: 1664792 - DNA, 25 bp, Homo sapien
ctccacggctccatctttgttctgc

SEQ ID NO: 1664793 - DNA, 25 bp, Homo sapien
tccacggctccatctttgttctgcg

SEQ ID NO: 1664794 - DNA, 25 bp, Homo sapien
ccatctttgttctgcgcgagtgcgc

SEQ ID NO: 1664795 - DNA, 25 bp, Homo sapien
gctccatctttgttctgcgcgagtg

SEQ ID NO: 1664796 - DNA, 25 bp, Homo sapien
tcgtgatcctcccaactcggtctcc

SEQ ID NO: 1664797 - DNA, 25 bp, Homo sapien
ctcgtgatcctcccaactcggtctc

SEQ ID NO: 1664798 - DNA, 25 bp, Homo sapien
cctcgtgatcctcccaactcggtct

SEQ ID NO: 1664799 - DNA, 25 bp, Homo sapien
ccagggtcgggtagggcagcagttt

SEQ ID NO: 1664800 - DNA, 25 bp, Homo sapien
cccgagaaacccaactggaatccag

SEQ ID NO: 1664801 - DNA, 25 bp, Homo sapien
gagaaacccaactggaatccagggc

SEQ ID NO: 1664802 - DNA, 25 bp, Homo sapien
gcagcagtttgtctggaccccgaga

SEQ ID NO: 1664803 - DNA, 25 bp, Homo sapien
ccagccctggcccctccccttgagt

SEQ ID NO: 1664804 - DNA, 25 bp, Homo sapien
cagccctggcccctccccttgagtc

SEQ ID NO: 1664805 - DNA, 25 bp, Homo sapien
atcccgtggcactcgccgcctcttc

SEQ ID NO: 1664806 - DNA, 25 bp, Homo sapien
tgctcggcgtccatcccgtggcact

SEQ ID NO: 1664807 - DNA, 25 bp, Homo sapien
gagtcagcgcatttcctgctcggcg

SEQ ID NO: 1664808 - DNA, 25 bp, Homo sapien
ctctggagtcagcgcatttcctgct

SEQ ID NO: 1664809 - DNA, 25 bp, Homo sapien
tctctggaggctcattctccgcatt

SEQ ID NO: 1664810 - DNA, 25 bp, Homo sapien
aggagtccttctgggcggggacagt

SEQ ID NO: 1664811 - DNA, 25 bp, Homo sapien
tttctctggaggctcattctccgca

SEQ ID NO: 1664812 - DNA, 25 bp, Homo sapien
tctggaggctcattctccgcattgc

SEQ ID NO: 1664813 - DNA, 25 bp, Homo sapien
gtgggggcatccgtgccctggctgc

SEQ ID NO: 1664814 - DNA, 25 bp, Homo sapien
gggtgggggcatccgtgccctggct

SEQ ID NO: 1664815 - DNA, 25 bp, Homo sapien
tggcccggtagtcatccccgtagga

SEQ ID NO: 1664816 - DNA, 25 bp, Homo sapien
gtcatccccgtaggagtccagcact

SEQ ID NO: 1664817 - DNA, 25 bp, Homo sapien
aactggctggcccggtagtcatccc

SEQ ID NO: 1664818 - DNA, 25 bp, Homo sapien
gtagtcatccccgtaggagtccagc

SEQ ID NO: 1664819 - DNA, 25 bp, Homo sapien
aacggaataacttatctcctagcgg

SEQ ID NO: 1664820 - DNA, 25 bp, Homo sapien
accaacggaataacttatctcctag

SEQ ID NO: 1664821 - DNA, 25 bp, Homo sapien
gagaagccaccaacggaataactta

SEQ ID NO: 1664822 - DNA, 25 bp, Homo sapien
gccaccaacggaataacttatctcc

SEQ ID NO: 1664823 - DNA, 25 bp, Homo sapien
gaagtagtgacaccagacgatttct

SEQ ID NO: 1664824 - DNA, 25 bp, Homo sapien
gagtacagaacgctcctcctaatga

SEQ ID NO: 1664825 - DNA, 25 bp, Homo sapien
caattgatggaatgcctcctctgca

SEQ ID NO: 1664826 - DNA, 25 bp, Homo sapien
gcctccagagttccttaaggttcaa

SEQ ID NO: 1664827 - DNA, 25 bp, Homo sapien
caagaaggaacagccggaaaggcag

SEQ ID NO: 1664828 - DNA, 25 bp, Homo sapien
taagtgaaaatctcacctgtggcca

SEQ ID NO: 1664829 - DNA, 25 bp, Homo sapien
gcacaggtacggacagaggaaccct

SEQ ID NO: 1664830 - DNA, 25 bp, Homo sapien
gactcagcaacgtggagccattcct

SEQ ID NO: 1664831 - DNA, 25 bp, Homo sapien
cgagttatcctctgcacctgatgga

SEQ ID NO: 1664832 - DNA, 25 bp, Homo sapien
ctccgagttatcctctgcacctgat

SEQ ID NO: 1664833 - DNA, 25 bp, Homo sapien
tgcagcctccgagttatcctctgca

SEQ ID NO: 1664834 - DNA, 25 bp, Homo sapien
gctgcagcctccgagttatcctctg

SEQ ID NO: 1664835 - DNA, 25 bp, Homo sapien
tgctcgatctcccggcagcgccgac

SEQ ID NO: 1664836 - DNA, 25 bp, Homo sapien
ctgctcgatctcccggcagcgccga

SEQ ID NO: 1664837 - DNA, 25 bp, Homo sapien
tggccaccaaataggggaggcaacg

SEQ ID NO: 1664838 - DNA, 25 bp, Homo sapien
tcttcatctcgctcccggagccctg

SEQ ID NO: 1664839 - DNA, 25 bp, Homo sapien
tgcgatttaattcccgctggcgccg

SEQ ID NO: 1664840 - DNA, 25 bp, Homo sapien
aactctgagcctggcggcgctgaga

SEQ ID NO: 1664841 - DNA, 25 bp, Homo sapien
ctcctagtctgtcagatccagcagt

SEQ ID NO: 1664842 - DNA, 25 bp, Homo sapien
atcaggctcagcagccgaggacggc

SEQ ID NO: 1664843 - DNA, 25 bp, Homo sapien
caatctgtaggttaagccgttcgca

SEQ ID NO: 1664844 - DNA, 25 bp, Homo sapien
cagagcttccgacctcttcaatctg

SEQ ID NO: 1664845 - DNA, 25 bp, Homo sapien
gcaaaactacttgtcccatcaggct

SEQ ID NO: 1664846 - DNA, 25 bp, Homo sapien
aaaggccttgctttcttgtctaacg

SEQ ID NO: 1664847 - DNA, 25 bp, Homo sapien
cacgtccaccccgaatccctgctta

SEQ ID NO: 1664848 - DNA, 25 bp, Homo sapien
tttcttgtctaacgccgcaaccagt

SEQ ID NO: 1664849 - DNA, 25 bp, Homo sapien
tcctgtttccggcttcgcttcggcc

SEQ ID NO: 1664850 - DNA, 25 bp, Homo sapien
cacagcgggacgtgagtccctttcc

SEQ ID NO: 1664851 - DNA, 25 bp, Homo sapien
ttagcaggatcggtccacagcggga

SEQ ID NO: 1664852 - DNA, 25 bp, Homo sapien
tcttcttgtctcgacgccccgtcgt

SEQ ID NO: 1664853 - DNA, 25 bp, Homo sapien
gtcgtccggccacagcgattctctg

SEQ ID NO: 1664854 - DNA, 25 bp, Homo sapien
tcacacccggtgtctggttgaggag

SEQ ID NO: 1664855 - DNA, 25 bp, Homo sapien
gatatccggagagagaatcctgcag

SEQ ID NO: 1664856 - DNA, 25 bp, Homo sapien
tgcagagttccagatgccaggccaa

SEQ ID NO: 1664857 - DNA, 25 bp, Homo sapien
cagacagctatcagtggtggtacca

SEQ ID NO: 1664858 - DNA, 25 bp, Homo sapien
tggaggccgcgcctgaataccgcgt

SEQ ID NO: 1664859 - DNA, 25 bp, Homo sapien
taccgcgtcatcgtggatgccaaca

SEQ ID NO: 1664860 - DNA, 25 bp, Homo sapien
gaccagtggaggccgcgcctgaata

SEQ ID NO: 1664861 - DNA, 25 bp, Homo sapien
cgcgcctgaataccgcgtcatcgtg

SEQ ID NO: 1664862 - DNA, 25 bp, Homo sapien
gctgaaataagaaggaagtgcgttc

SEQ ID NO: 1664863 - DNA, 25 bp, Homo sapien
acctgcctcacggtgcgaggtgact

SEQ ID NO: 1664864 - DNA, 25 bp, Homo sapien
gcagctcacgttttacagaccagaa

SEQ ID NO: 1664865 - DNA, 25 bp, Homo sapien
tcgcgtatgagtctgaggagcactc

SEQ ID NO: 1664866 - DNA, 25 bp, Homo sapien
gatttgcactccgacttgacgcagg

SEQ ID NO: 1664867 - DNA, 25 bp, Homo sapien
catctacgagtatgtggagtcccgg

SEQ ID NO: 1664868 - DNA, 25 bp, Homo sapien
tgacatccgaaggttgacacagggc

SEQ ID NO: 1664869 - DNA, 25 bp, Homo sapien
gattaggctggagctacacacgcag

SEQ ID NO: 1664870 - DNA, 25 bp, Homo sapien
gagatcaccgcccagtatgggctag

SEQ ID NO: 1664871 - DNA, 25 bp, Homo sapien
ttctgaagggctaggatcgggttct

SEQ ID NO: 1664872 - DNA, 25 bp, Homo sapien
ccaaggtggcttcccactgaaggga

SEQ ID NO: 1664873 - DNA, 25 bp, Homo sapien
aatgactgcgtgtgtccaaggtggc

SEQ ID NO: 1664874 - DNA, 25 bp, Homo sapien
gagggagtgtaaactctcgtttcac

SEQ ID NO: 1664875 - DNA, 25 bp, Homo sapien
ccctatgcagtaagaggcttttctg

SEQ ID NO: 1664876 - DNA, 25 bp, Homo sapien
tcacattcttgttccccctatgcag

SEQ ID NO: 1664877 - DNA, 25 bp, Homo sapien
cctgagctctggtgtccaggccctt

SEQ ID NO: 1664878 - DNA, 25 bp, Homo sapien
ttccgtcaccaataaaatgtccctg

SEQ ID NO: 1664879 - DNA, 25 bp, Homo sapien
gattaaatgctaggctgtgcatcct

SEQ ID NO: 1664880 - DNA, 25 bp, Homo sapien
tccattctctagaacaagggtgaca

SEQ ID NO: 1664881 - DNA, 25 bp, Homo sapien
cactgcctcgaggtctttgtgaaga

SEQ ID NO: 1664882 - DNA, 25 bp, Homo sapien
cccgttctggcagctggcttcggtg

SEQ ID NO: 1664883 - DNA, 25 bp, Homo sapien
gccccgttctggcagctggcttcgg

SEQ ID NO: 1664884 - DNA, 25 bp, Homo sapien
agctggcttcggtggaacctctgcg

SEQ ID NO: 1664885 - DNA, 25 bp, Homo sapien
tctggcagctggcttcggtggaacc

SEQ ID NO: 1664886 - DNA, 25 bp, Homo sapien
tttgagtaccgctacctggaggacc

SEQ ID NO: 1664887 - DNA, 25 bp, Homo sapien
tagttttatatgacggctggcagca

SEQ ID NO: 1664888 - DNA, 25 bp, Homo sapien
gaattgtcccctttgtctgttggtc

SEQ ID NO: 1664889 - DNA, 25 bp, Homo sapien
gacacatccacagccctaagaattg

SEQ ID NO: 1664890 - DNA, 25 bp, Homo sapien
ggtcatccgtctcgtcttcttccgg

SEQ ID NO: 1664891 - DNA, 25 bp, Homo sapien
gttgaattgggagttgtaccgccgc

SEQ ID NO: 1664892 - DNA, 25 bp, Homo sapien
tcttccggctgaccctcctgtagtg

SEQ ID NO: 1664893 - DNA, 25 bp, Homo sapien
tccgcagacgttcagctcgaagctg

SEQ ID NO: 1664894 - DNA, 25 bp, Homo sapien
gcccaggtatgtcaggatgcccaga

SEQ ID NO: 1664895 - DNA, 25 bp, Homo sapien
gttgagtctgtgcctccgctgcact

SEQ ID NO: 1664896 - DNA, 25 bp, Homo sapien
ctgcatctcccgcagagggtccaga

SEQ ID NO: 1664897 - DNA, 25 bp, Homo sapien
tccttgggtcgctgcttctcagacc

SEQ ID NO: 1664898 - DNA, 25 bp, Homo sapien
tcgcttttcttcctcgtactcttta

SEQ ID NO: 1664899 - DNA, 25 bp, Homo sapien
ttattgcctctgatcactcctttcc

SEQ ID NO: 1664900 - DNA, 25 bp, Homo sapien
caagctcaggcagtgagttctgatg

SEQ ID NO: 1664901 - DNA, 25 bp, Homo sapien
agctcccgaaacaggtccacagggc

SEQ ID NO: 1664902 - DNA, 25 bp, Homo sapien
ggcgacattgtccttgttccggacg

SEQ ID NO: 1664903 - DNA, 25 bp, Homo sapien
ccgcacgcgggcgacattgtccttg

SEQ ID NO: 1664904 - DNA, 25 bp, Homo sapien
cattgtccttgttccggacgtgcca

SEQ ID NO: 1664905 - DNA, 25 bp, Homo sapien
ttgttccggacgtgccagctcttct

SEQ ID NO: 1664906 - DNA, 25 bp, Homo sapien
ttcttgtccctacttcgaccgcgga

SEQ ID NO: 1664907 - DNA, 25 bp, Homo sapien
cttccgattggcgagaggatgcccc

SEQ ID NO: 1664908 - DNA, 25 bp, Homo sapien
cgtcgtagctgtccagggactggca

SEQ ID NO: 1664909 - DNA, 25 bp, Homo sapien
cgaccgcggattggttccgaattag

SEQ ID NO: 1664910 - DNA, 25 bp, Homo sapien
ctagcaaccgcctcttgtcacagat

SEQ ID NO: 1664911 - DNA, 25 bp, Homo sapien
tcacagcgaatgctaggcgttcggc

SEQ ID NO: 1664912 - DNA, 25 bp, Homo sapien
ttcggctcgtggtatcccctagcaa

SEQ ID NO: 1664913 - DNA, 25 bp, Homo sapien
ttggctgagacgccctttatcacag

SEQ ID NO: 1664914 - DNA, 25 bp, Homo sapien
ccagatgcggccgtcgattggccga

SEQ ID NO: 1664915 - DNA, 25 bp, Homo sapien
cgtcgattggccgacatgaccgaca

SEQ ID NO: 1664916 - DNA, 25 bp, Homo sapien
taagttggcccgcccctgatgctac

SEQ ID NO: 1664917 - DNA, 25 bp, Homo sapien
gaccgacaagtctccttgcggaaga

SEQ ID NO: 1664918 - DNA, 25 bp, Homo sapien
ttcaggacgcagatttcaaagcgcg

SEQ ID NO: 1664919 - DNA, 25 bp, Homo sapien
tcctgccccgctgtagccctgcccc

SEQ ID NO: 1664920 - DNA, 25 bp, Homo sapien
ccccaccttcaggacgcagatttca

SEQ ID NO: 1664921 - DNA, 25 bp, Homo sapien
ccaccttcaggacgcagatttcaaa

SEQ ID NO: 1664922 - DNA, 25 bp, Homo sapien
tattgatacaaggaagatcacccga

SEQ ID NO: 1664923 - DNA, 25 bp, Homo sapien
gatcacccgagagtcaggacgtggc

SEQ ID NO: 1664924 - DNA, 25 bp, Homo sapien
tacagatgttgtgacctaggcttac

SEQ ID NO: 1664925 - DNA, 25 bp, Homo sapien
ctggaagggcgtggagtcttctcca

SEQ ID NO: 1664926 - DNA, 25 bp, Homo sapien
aagagccggtttggtggaggtcagc

SEQ ID NO: 1664927 - DNA, 25 bp, Homo sapien
tcaaagagccggtttggtggaggtc

SEQ ID NO: 1664928 - DNA, 25 bp, Homo sapien
ccggtttggtggaggtcagcgccac

SEQ ID NO: 1664929 - DNA, 25 bp, Homo sapien
agccggtttggtggaggtcagcgcc

SEQ ID NO: 1664930 - DNA, 25 bp, Homo sapien
cgccgtgccaggaagactttattct

SEQ ID NO: 1664931 - DNA, 25 bp, Homo sapien
cgcgccgtgccaggaagactttatt

SEQ ID NO: 1664932 - DNA, 25 bp, Homo sapien
agcgcgccgtgccaggaagacttta

SEQ ID NO: 1664933 - DNA, 25 bp, Homo sapien
gcgcgccgtgccaggaagactttat

SEQ ID NO: 1664934 - DNA, 25 bp, Homo sapien
atgaggcgtccgtaggagttagcca

SEQ ID NO: 1664935 - DNA, 25 bp, Homo sapien
agccacagtgtacgccatcaggatg

SEQ ID NO: 1664936 - DNA, 25 bp, Homo sapien
gctcagagatgaggcgtccgtagga

SEQ ID NO: 1664937 - DNA, 25 bp, Homo sapien
aggagttagccagagccacagtgta

SEQ ID NO: 1664938 - DNA, 25 bp, Homo sapien
ctgaaggagacaggaacggaagcca

SEQ ID NO: 1664939 - DNA, 25 bp, Homo sapien
tcctgacacgctcttccattatatc

SEQ ID NO: 1664940 - DNA, 25 bp, Homo sapien
tccattatatccaaacgtctggctc

SEQ ID NO: 1664941 - DNA, 25 bp, Homo sapien
aggaacggaagccactcctgacacg

SEQ ID NO: 1664942 - DNA, 25 bp, Homo sapien
gatctgggcccagatggacgactgc

SEQ ID NO: 1664943 - DNA, 25 bp, Homo sapien
accacaaagcttagaaggcgggatc

SEQ ID NO: 1664944 - DNA, 25 bp, Homo sapien
tctgggcccagatggacgactgccc

SEQ ID NO: 1664945 - DNA, 25 bp, Homo sapien
ccccggaatggaccacaaagcttag

SEQ ID NO: 1664946 - DNA, 25 bp, Homo sapien
acaggctgggctcacatagtgccag

SEQ ID NO: 1664947 - DNA, 25 bp, Homo sapien
aggctgggctcacatagtgccagga

SEQ ID NO: 1664948 - DNA, 25 bp, Homo sapien
ctgaagtcaagacaggctgggctca

SEQ ID NO: 1664949 - DNA, 25 bp, Homo sapien
tcaagacaggctgggctcacatagt

SEQ ID NO: 1664950 - DNA, 25 bp, Homo sapien
cgcggaggcccggaaggtgcgggca

SEQ ID NO: 1664951 - DNA, 25 bp, Homo sapien
gggaacgctggagatggccagaccc

SEQ ID NO: 1664952 - DNA, 25 bp, Homo sapien
aacgctggagatggccagacccagg

SEQ ID NO: 1664953 - DNA, 25 bp, Homo sapien
aggcccggaaggtgcgggcagccgg

SEQ ID NO: 1664954 - DNA, 25 bp, Homo sapien
ttttccgaaccaggagtctgagccc

SEQ ID NO: 1664955 - DNA, 25 bp, Homo sapien
cagatgcagtagtctgtcctccaac

SEQ ID NO: 1664956 - DNA, 25 bp, Homo sapien
tataagtcagaatgccctagacccc

SEQ ID NO: 1664957 - DNA, 25 bp, Homo sapien
tctctcaggaccgagtaatccaggc

SEQ ID NO: 1664958 - DNA, 25 bp, Homo sapien
ttcttcaggtagaaaagcagcagga

SEQ ID NO: 1664959 - DNA, 25 bp, Homo sapien
cttcttcaggtagaaaagcagcagg

SEQ ID NO: 1664960 - DNA, 25 bp, Homo sapien
tcttcaggtagaaaagcagcaggaa

SEQ ID NO: 1664961 - DNA, 25 bp, Homo sapien
cttcaggtagaaaagcagcaggaac

SEQ ID NO: 1664962 - DNA, 25 bp, Homo sapien
gcaggggcagtaaagggcagaaaaa

SEQ ID NO: 1664963 - DNA, 25 bp, Homo sapien
ttgaccgtgttaagcaggggcagta

SEQ ID NO: 1664964 - DNA, 25 bp, Homo sapien
accgtgttaagcaggggcagtaaag

SEQ ID NO: 1664965 - DNA, 25 bp, Homo sapien
agcaggggcagtaaagggcagaaaa

SEQ ID NO: 1664966 - DNA, 25 bp, Homo sapien
ccagaccaccgtctgcgcgtagatg

SEQ ID NO: 1664967 - DNA, 25 bp, Homo sapien
cgtctgcgcgtagatgagccccagc

SEQ ID NO: 1664968 - DNA, 25 bp, Homo sapien
agcacctcgtcgggcacctggaact

SEQ ID NO: 1664969 - DNA, 25 bp, Homo sapien
tgggtccccgccagacgacccagcg

SEQ ID NO: 1664970 - DNA, 25 bp, Homo sapien
gactagaagggacccagatgtcgcc

SEQ ID NO: 1664971 - DNA, 25 bp, Homo sapien
gcccgccaataggaagcatgcgtat

SEQ ID NO: 1664972 - DNA, 25 bp, Homo sapien
cgggactttcaggactccacgtgga

SEQ ID NO: 1664973 - DNA, 25 bp, Homo sapien
tctgcggacctagggcaagcaaagg

SEQ ID NO: 1664974 - DNA, 25 bp, Homo sapien
tgagcagcgcgactgccaagacagt

SEQ ID NO: 1664975 - DNA, 25 bp, Homo sapien
agcagcgcgactgccaagacagtca

SEQ ID NO: 1664976 - DNA, 25 bp, Homo sapien
gatgagcagcgcgactgccaagaca

SEQ ID NO: 1664977 - DNA, 25 bp, Homo sapien
gcgcgactgccaagacagtcagcag

SEQ ID NO: 1664978 - DNA, 25 bp, Homo sapien
tctccgcccaaaccaagagtctgga

SEQ ID NO: 1664979 - DNA, 25 bp, Homo sapien
agaccctgtcaatactttctctggg

SEQ ID NO: 1664980 - DNA, 25 bp, Homo sapien
gagtctccacatcgcaagcctatga

SEQ ID NO: 1664981 - DNA, 25 bp, Homo sapien
cctggaggcccacgcgtccgagtct

SEQ ID NO: 1664982 - DNA, 25 bp, Homo sapien
ggaggcgaggcgaagaaacacggtc

SEQ ID NO: 1664983 - DNA, 25 bp, Homo sapien
tgtagccacaggttttgcagtcctc

SEQ ID NO: 1664984 - DNA, 25 bp, Homo sapien
gagtcgcccccacaagtgatctgat

SEQ ID NO: 1664985 - DNA, 25 bp, Homo sapien
gcagtcctcagcctcggagtcgccc

SEQ ID NO: 1664986 - DNA, 25 bp, Homo sapien
ttctcagtggaacgcgcccgcattc

SEQ ID NO: 1664987 - DNA, 25 bp, Homo sapien
gggactacagaagccactaccgccg

SEQ ID NO: 1664988 - DNA, 25 bp, Homo sapien
cagagaatgggccctgacccggtac

SEQ ID NO: 1664989 - DNA, 25 bp, Homo sapien
actaccgccgggctaatattcgtat

SEQ ID NO: 1664990 - DNA, 25 bp, Homo sapien
cagcgccaacatccctctgaccgcc

SEQ ID NO: 1664991 - DNA, 25 bp, Homo sapien
ctgtcagcgccaacatccctctgac

SEQ ID NO: 1664992 - DNA, 25 bp, Homo sapien
gtcagcgccaacatccctctgaccg

SEQ ID NO: 1664993 - DNA, 25 bp, Homo sapien
gcgccaacatccctctgaccgcccc

SEQ ID NO: 1664994 - DNA, 25 bp, Homo sapien
cattcccagccatccccgtgaggct

SEQ ID NO: 1664995 - DNA, 25 bp, Homo sapien
tcccagccatccccgtgaggctgga

SEQ ID NO: 1664996 - DNA, 25 bp, Homo sapien
ccagccatccccgtgaggctggaac

SEQ ID NO: 1664997 - DNA, 25 bp, Homo sapien
attcccagccatccccgtgaggctg

SEQ ID NO: 1664998 - DNA, 25 bp, Homo sapien
ttgaccccagcgatgaagatggacg

SEQ ID NO: 1664999 - DNA, 25 bp, Homo sapien
aacgatctggcgactccgagtgtag

SEQ ID NO: 1665000 - DNA, 25 bp, Homo sapien
gatggacggaaggtaattcacccca

SEQ ID NO: 1665001 - DNA, 25 bp, Homo sapien
cgagtgtagccctccagtggagcaa

SEQ ID NO: 1665002 - DNA, 25 bp, Homo sapien
tggcaactcctggacaaggggcatc

SEQ ID NO: 1665003 - DNA, 25 bp, Homo sapien
gtggcaactcctggacaaggggcat

SEQ ID NO: 1665004 - DNA, 25 bp, Homo sapien
gcaactcctggacaaggggcatctc

SEQ ID NO: 1665005 - DNA, 25 bp, Homo sapien
ggcaactcctggacaaggggcatct

SEQ ID NO: 1665006 - DNA, 25 bp, Homo sapien
ggcttgctggcccagcgtccgcacc

SEQ ID NO: 1665007 - DNA, 25 bp, Homo sapien
ccgtagcccagtagacgccatagaa

SEQ ID NO: 1665008 - DNA, 25 bp, Homo sapien
agtagacgccatagaaggctgcccc

SEQ ID NO: 1665009 - DNA, 25 bp, Homo sapien
acggtgcaccccgtagcccagtaga

SEQ ID NO: 1665010 - DNA, 25 bp, Homo sapien
agatgcccgcttggactccatttcc

SEQ ID NO: 1665011 - DNA, 25 bp, Homo sapien
aggagagatgcccgcttggactcca

SEQ ID NO: 1665012 - DNA, 25 bp, Homo sapien
gcaggagagatgcccgcttggactc

SEQ ID NO: 1665013 - DNA, 25 bp, Homo sapien
gagagatgcccgcttggactccatt

SEQ ID NO: 1665014 - DNA, 25 bp, Homo sapien
tgcagaccccgctccctaatcgcac

SEQ ID NO: 1665015 - DNA, 25 bp, Homo sapien
ttgcagaccccgctccctaatcgca

SEQ ID NO: 1665016 - DNA, 25 bp, Homo sapien
gttgcagaccccgctccctaatcgc

SEQ ID NO: 1665017 - DNA, 25 bp, Homo sapien
agttgcagaccccgctccctaatcg

SEQ ID NO: 1665018 - DNA, 25 bp, Homo sapien
gtacaagatgatgcgctggcgcagc

SEQ ID NO: 1665019 - DNA, 25 bp, Homo sapien
tggacgtccccgcagagaccgaagt

SEQ ID NO: 1665020 - DNA, 25 bp, Homo sapien
ggcgcagccgcacgtggacgtcccc

SEQ ID NO: 1665021 - DNA, 25 bp, Homo sapien
ttcgtacaagatgatgcgctggcgc

SEQ ID NO: 1665022 - DNA, 25 bp, Homo sapien
gctgtagctggtcagagcctcggac

SEQ ID NO: 1665023 - DNA, 25 bp, Homo sapien
agaacacccggtggctgtagctggt

SEQ ID NO: 1665024 - DNA, 25 bp, Homo sapien
tgtagctggtcagagcctcggactc

SEQ ID NO: 1665025 - DNA, 25 bp, Homo sapien
ccaggccgagaacacccggtggctg

SEQ ID NO: 1665026 - DNA, 25 bp, Homo sapien
cgggtagaagccatagaagagaggg

SEQ ID NO: 1665027 - DNA, 25 bp, Homo sapien
gcgggtagaagccatagaagagagg

SEQ ID NO: 1665028 - DNA, 25 bp, Homo sapien
ggttcgtgtcattgaaggcactggg

SEQ ID NO: 1665029 - DNA, 25 bp, Homo sapien
gaggttcgtgtcattgaaggcactg

SEQ ID NO: 1665030 - DNA, 25 bp, Homo sapien
tttgaggttcgtgtcattgaaggca

SEQ ID NO: 1665031 - DNA, 25 bp, Homo sapien
ttgaggttcgtgtcattgaaggcac

SEQ ID NO: 1665032 - DNA, 25 bp, Homo sapien
agaagtaggactccgtgccggcgcc

SEQ ID NO: 1665033 - DNA, 25 bp, Homo sapien
ttataggagccgcagggcgaggaga

SEQ ID NO: 1665034 - DNA, 25 bp, Homo sapien
ggcagcagcgtcatgcaggccatga

SEQ ID NO: 1665035 - DNA, 25 bp, Homo sapien
cacgttaagaaggagcaggaagcgc

SEQ ID NO: 1665036 - DNA, 25 bp, Homo sapien
atcctcttcagtgtccacgcccagg

SEQ ID NO: 1665037 - DNA, 25 bp, Homo sapien
ccccgatcctcttcagtgtccacgc

SEQ ID NO: 1665038 - DNA, 25 bp, Homo sapien
tcctcttcagtgtccacgcccaggg

SEQ ID NO: 1665039 - DNA, 25 bp, Homo sapien
cgatcctcttcagtgtccacgccca

SEQ ID NO: 1665040 - DNA, 25 bp, Homo sapien
tctccttggacctccgaagtagccg

SEQ ID NO: 1665041 - DNA, 25 bp, Homo sapien
gcccatcggtccgtcttagttccag

SEQ ID NO: 1665042 - DNA, 25 bp, Homo sapien
tgcaggcttcgcaagccttcctttg

SEQ ID NO: 1665043 - DNA, 25 bp, Homo sapien
agagccatagaccacctggtccctg

SEQ ID NO: 1665044 - DNA, 25 bp, Homo sapien
ttactcaggccgcagtatagtggct

SEQ ID NO: 1665045 - DNA, 25 bp, Homo sapien
ctatgttactcaggccgcagtatag

SEQ ID NO: 1665046 - DNA, 25 bp, Homo sapien
tcaggccgcagtatagtggctatat

SEQ ID NO: 1665047 - DNA, 25 bp, Homo sapien
gccgcagtatagtggctatattcac

SEQ ID NO: 1665048 - DNA, 25 bp, Homo sapien
ctcggtaccgaagggtggcagcact

SEQ ID NO: 1665049 - DNA, 25 bp, Homo sapien
ttcagcacagaagacagcgatgggc

SEQ ID NO: 1665050 - DNA, 25 bp, Homo sapien
gggcagctcgttcagcacagaagac

SEQ ID NO: 1665051 - DNA, 25 bp, Homo sapien
gctctgtctgggtgacttctgtgaa

SEQ ID NO: 1665052 - DNA, 25 bp, Homo sapien
ccccaggcttctgattccaaggtcg

SEQ ID NO: 1665053 - DNA, 25 bp, Homo sapien
aggcttctgattccaaggtcgggtt

SEQ ID NO: 1665054 - DNA, 25 bp, Homo sapien
gccagccaccccctagaggagcccc

SEQ ID NO: 1665055 - DNA, 25 bp, Homo sapien
caccccctagaggagccccaggctt

SEQ ID NO: 1665056 - DNA, 25 bp, Homo sapien
caggctgggctgtctctagtggcca

SEQ ID NO: 1665057 - DNA, 25 bp, Homo sapien
aggctgggctgtctctagtggccac

SEQ ID NO: 1665058 - DNA, 25 bp, Homo sapien
gctgggctgtctctagtggccacca

SEQ ID NO: 1665059 - DNA, 25 bp, Homo sapien
cccaggctgggctgtctctagtggc

SEQ ID NO: 1665060 - DNA, 25 bp, Homo sapien
cggagggagtaaggtacacttcctg

SEQ ID NO: 1665061 - DNA, 25 bp, Homo sapien
tgacctgtcataggccaagcgatga

SEQ ID NO: 1665062 - DNA, 25 bp, Homo sapien
tcagttgcaggcagggtatttagct

SEQ ID NO: 1665063 - DNA, 25 bp, Homo sapien
ggttcacagaattcccgggaccagc

SEQ ID NO: 1665064 - DNA, 25 bp, Homo sapien
tctgcaatattggtgcgatgagcta

SEQ ID NO: 1665065 - DNA, 25 bp, Homo sapien
tgggatgctgccttccgccggctgg

SEQ ID NO: 1665066 - DNA, 25 bp, Homo sapien
tgggctgggatgctgccttccgccg

SEQ ID NO: 1665067 - DNA, 25 bp, Homo sapien
gggctgggatgctgccttccgccgg

SEQ ID NO: 1665068 - DNA, 25 bp, Homo sapien
ggatgctgccttccgccggctgggg

SEQ ID NO: 1665069 - DNA, 25 bp, Homo sapien
gcccagtaccgaagggtgtcggcca

SEQ ID NO: 1665070 - DNA, 25 bp, Homo sapien
catgtagtcataggcgcgcatcttc

SEQ ID NO: 1665071 - DNA, 25 bp, Homo sapien
aggaaccagtgcacccagtcccagg

SEQ ID NO: 1665072 - DNA, 25 bp, Homo sapien
cagcacgaagcccatgcacatgtag

SEQ ID NO: 1665073 - DNA, 25 bp, Homo sapien
gagtcaggacctacgagtccaggtc

SEQ ID NO: 1665074 - DNA, 25 bp, Homo sapien
ggagtcaggacctacgagtccaggt

SEQ ID NO: 1665075 - DNA, 25 bp, Homo sapien
gtcaggacctacgagtccaggtccc

SEQ ID NO: 1665076 - DNA, 25 bp, Homo sapien
tgggagtcaggacctacgagtccag

SEQ ID NO: 1665077 - DNA, 25 bp, Homo sapien
cactcgagaaatattggaagaatga

SEQ ID NO: 1665078 - DNA, 25 bp, Homo sapien
taaaaatgaatacacagcacgcact

SEQ ID NO: 1665079 - DNA, 25 bp, Homo sapien
taacagtgtcaagcacagagtctcc

SEQ ID NO: 1665080 - DNA, 25 bp, Homo sapien
taaaggctgcacagataacagtgtc

SEQ ID NO: 1665081 - DNA, 25 bp, Homo sapien
ggcatgctgccactataattagagg

SEQ ID NO: 1665082 - DNA, 25 bp, Homo sapien
ggaacgattttacaccggcatgctg

SEQ ID NO: 1665083 - DNA, 25 bp, Homo sapien
caggaaggctggctattgagtccac

SEQ ID NO: 1665084 - DNA, 25 bp, Homo sapien
caacacttgaggcaactaagaggtc

SEQ ID NO: 1665085 - DNA, 25 bp, Homo sapien
tcttgtagatatactgcgccagcca

SEQ ID NO: 1665086 - DNA, 25 bp, Homo sapien
cataggaacgggcaggtgcgctctt

SEQ ID NO: 1665087 - DNA, 25 bp, Homo sapien
gatgttgcggatggtctcatagtca

SEQ ID NO: 1665088 - DNA, 25 bp, Homo sapien
tagtcatactccaaggaagccgcct

SEQ ID NO: 1665089 - DNA, 25 bp, Homo sapien
ggtgacccaccactagcaaaggatg

SEQ ID NO: 1665090 - DNA, 25 bp, Homo sapien
catcctttaggagtgaggaccgagc

SEQ ID NO: 1665091 - DNA, 25 bp, Homo sapien
cagtatattcagagaagccgccaag

SEQ ID NO: 1665092 - DNA, 25 bp, Homo sapien
aattgtcggacactgcagttgccag

SEQ ID NO: 1665093 - DNA, 25 bp, Homo sapien
ctgctgggtcttgggaagcctccct

SEQ ID NO: 1665094 - DNA, 25 bp, Homo sapien
ggcagagccagcccttggaggtggg

SEQ ID NO: 1665095 - DNA, 25 bp, Homo sapien
gctgggtcttgggaagcctccctcg

SEQ ID NO: 1665096 - DNA, 25 bp, Homo sapien
gggtcttgggaagcctccctcgcgc

SEQ ID NO: 1665097 - DNA, 25 bp, Homo sapien
cagccagtccaggtaggtgcggtag

SEQ ID NO: 1665098 - DNA, 25 bp, Homo sapien
aatccaggccacgtagaagcgcatg

SEQ ID NO: 1665099 - DNA, 25 bp, Homo sapien
cgtagaaggcgtcctcgcgcacggc

SEQ ID NO: 1665100 - DNA, 25 bp, Homo sapien
gtaggccccaaagccggcggcaatg

SEQ ID NO: 1665101 - DNA, 25 bp, Homo sapien
tgtcatgattcccacgtagcagtag

SEQ ID NO: 1665102 - DNA, 25 bp, Homo sapien
gattcccacgtagcagtagctgtag

SEQ ID NO: 1665103 - DNA, 25 bp, Homo sapien
atgattcccacgtagcagtagctgt

SEQ ID NO: 1665104 - DNA, 25 bp, Homo sapien
tcatgattcccacgtagcagtagct

SEQ ID NO: 1665105 - DNA, 25 bp, Homo sapien
tggacttcactggccaggctcacca

SEQ ID NO: 1665106 - DNA, 25 bp, Homo sapien
ggacttcactggccaggctcaccag

SEQ ID NO: 1665107 - DNA, 25 bp, Homo sapien
ctggacttcactggccaggctcacc

SEQ ID NO: 1665108 - DNA, 25 bp, Homo sapien
ccaaggtccaccctatatcaataga

SEQ ID NO: 1665109 - DNA, 25 bp, Homo sapien
tagatcatttcaaggtgggtggctc

SEQ ID NO: 1665110 - DNA, 25 bp, Homo sapien
gctgaatatgttgtactctccaccc

SEQ ID NO: 1665111 - DNA, 25 bp, Homo sapien
cagtagaaatccctggctggagaca

SEQ ID NO: 1665112 - DNA, 25 bp, Homo sapien
caggagataggagaaagtccaggcc

SEQ ID NO: 1665113 - DNA, 25 bp, Homo sapien
aacaggagataggagaaagtccagg

SEQ ID NO: 1665114 - DNA, 25 bp, Homo sapien
acaggagataggagaaagtccaggc

SEQ ID NO: 1665115 - DNA, 25 bp, Homo sapien
gcaaaagcaggaggcgcactgtgtt

SEQ ID NO: 1665116 - DNA, 25 bp, Homo sapien
ggcaaaagcaggaggcgcactgtgt

SEQ ID NO: 1665117 - DNA, 25 bp, Homo sapien
gggcacagaagtctcggccttggcc

SEQ ID NO: 1665118 - DNA, 25 bp, Homo sapien
gttgggcacagaagtctcggccttg

SEQ ID NO: 1665119 - DNA, 25 bp, Homo sapien
gcctgaatgagggcccaggtcccga

SEQ ID NO: 1665120 - DNA, 25 bp, Homo sapien
atggtgaccagagaatgcaaagtgt

SEQ ID NO: 1665121 - DNA, 25 bp, Homo sapien
tggtgaccagagaatgcaaagtgtg

SEQ ID NO: 1665122 - DNA, 25 bp, Homo sapien
cccaggtcccgaggatggtgaccag

SEQ ID NO: 1665123 - DNA, 25 bp, Homo sapien
gaaccactagatacgtccattcttc

SEQ ID NO: 1665124 - DNA, 25 bp, Homo sapien
taagaagaaccactagatacgtcca

SEQ ID NO: 1665125 - DNA, 25 bp, Homo sapien
gatacgtccattcttcaggcgacat

SEQ ID NO: 1665126 - DNA, 25 bp, Homo sapien
gggatggagataagaagaaccacta

SEQ ID NO: 1665127 - DNA, 25 bp, Homo sapien
agccccgagttccaacgcgcctccg

SEQ ID NO: 1665128 - DNA, 25 bp, Homo sapien
atccccggcagagccacaggcggtt

SEQ ID NO: 1665129 - DNA, 25 bp, Homo sapien
agagccacaggcggttgcgccagcc

SEQ ID NO: 1665130 - DNA, 25 bp, Homo sapien
aggcggttgcgccagccccgagttc

SEQ ID NO: 1665131 - DNA, 25 bp, Homo sapien
agtcccagcccgcttgccgccgcag

SEQ ID NO: 1665132 - DNA, 25 bp, Homo sapien
tcccagcccgcttgccgccgcagct

SEQ ID NO: 1665133 - DNA, 25 bp, Homo sapien
gtcccagcccgcttgccgccgcagc

SEQ ID NO: 1665134 - DNA, 25 bp, Homo sapien
ccagcccgcttgccgccgcagctcc

SEQ ID NO: 1665135 - DNA, 25 bp, Homo sapien
tcccccgcccagcgcgcccccgcgc

SEQ ID NO: 1665136 - DNA, 25 bp, Homo sapien
cccgcccagcgcgcccccgcgccgc

SEQ ID NO: 1665137 - DNA, 25 bp, Homo sapien
ccccgcccagcgcgcccccgcgccg

SEQ ID NO: 1665138 - DNA, 25 bp, Homo sapien
ctcccccgcccagcgcgcccccgcg

SEQ ID NO: 1665139 - DNA, 25 bp, Homo sapien
gcaacgggattcgagtccaggtcca

SEQ ID NO: 1665140 - DNA, 25 bp, Homo sapien
ccttcgggcacaatcgggagcttga

SEQ ID NO: 1665141 - DNA, 25 bp, Homo sapien
aaacttcggctcacttcggcaatag

SEQ ID NO: 1665142 - DNA, 25 bp, Homo sapien
tcggcaatagtcgagaacggagagc

SEQ ID NO: 1665143 - DNA, 25 bp, Homo sapien
tctccgcggttagtttttgattcca

SEQ ID NO: 1665144 - DNA, 25 bp, Homo sapien
cagggtttaagtctcaggaggtctc

SEQ ID NO: 1665145 - DNA, 25 bp, Homo sapien
tcacactgtgagcttcccgagaatg

SEQ ID NO: 1665146 - DNA, 25 bp, Homo sapien
tgattccaggttttcgaacactaca

SEQ ID NO: 1665147 - DNA, 25 bp, Homo sapien
tggtgacgtggcatttgaatccagg

SEQ ID NO: 1665148 - DNA, 25 bp, Homo sapien
cagcagcgtagggaagacaactgaa

SEQ ID NO: 1665149 - DNA, 25 bp, Homo sapien
gaaacttgtcgaaggcactgcagct

SEQ ID NO: 1665150 - DNA, 25 bp, Homo sapien
caagcttatgaggtaggcgctacca

SEQ ID NO: 1665151 - DNA, 25 bp, Homo sapien
aggtcaggcgttggagaccaggagt

SEQ ID NO: 1665152 - DNA, 25 bp, Homo sapien
tgaggtcaggcgttggagaccagga

SEQ ID NO: 1665153 - DNA, 25 bp, Homo sapien
gaggtcaggcgttggagaccaggag

SEQ ID NO: 1665154 - DNA, 25 bp, Homo sapien
ggtcaggcgttggagaccaggagtt

SEQ ID NO: 1665155 - DNA, 25 bp, Homo sapien
tctgacgtgcgtggtgcgtgaaaac

SEQ ID NO: 1665156 - DNA, 25 bp, Homo sapien
aggttagcacgccgctctagcccag

SEQ ID NO: 1665157 - DNA, 25 bp, Homo sapien
gaaggaaggttctccctacttctca

SEQ ID NO: 1665158 - DNA, 25 bp, Homo sapien
gccagccaacgcctcttctgattgg

SEQ ID NO: 1665159 - DNA, 25 bp, Homo sapien
tgtgctgttgaaaactattgtcttc

SEQ ID NO: 1665160 - DNA, 25 bp, Homo sapien
ttcaataaatgtgggcctgagtgca

SEQ ID NO: 1665161 - DNA, 25 bp, Homo sapien
tcttggtgcattggcccagtggagc

SEQ ID NO: 1665162 - DNA, 25 bp, Homo sapien
cagtggagcctcagcagtaggacat

SEQ ID NO: 1665163 - DNA, 25 bp, Homo sapien
ctagtttcaaagcttgtgatgcggt

SEQ ID NO: 1665164 - DNA, 25 bp, Homo sapien
tttcaaagcttgtgatgcggttgat

SEQ ID NO: 1665165 - DNA, 25 bp, Homo sapien
tcacagaatttgcttgctagtttca

SEQ ID NO: 1665166 - DNA, 25 bp, Homo sapien
cttgctagtttcaaagcttgtgatg

SEQ ID NO: 1665167 - DNA, 25 bp, Homo sapien
tgggagttgaggtatgcggttctgg

SEQ ID NO: 1665168 - DNA, 25 bp, Homo sapien
tagctcacaattgcggagctccacg

SEQ ID NO: 1665169 - DNA, 25 bp, Homo sapien
ctgggtgtagctcacaattgcggag

SEQ ID NO: 1665170 - DNA, 25 bp, Homo sapien
caattgcggagctccacggcagcct

SEQ ID NO: 1665171 - DNA, 25 bp, Homo sapien
ttgtgtccaccgcagcatctgtgct

SEQ ID NO: 1665172 - DNA, 25 bp, Homo sapien
ggcattgtgtccaccgcagcatctg

SEQ ID NO: 1665173 - DNA, 25 bp, Homo sapien
cattgtgtccaccgcagcatctgtg

SEQ ID NO: 1665174 - DNA, 25 bp, Homo sapien
atggcccagggggacgtccaggagg

SEQ ID NO: 1665175 - DNA, 25 bp, Homo sapien
gcctcagcagccttaacttcttgtg

SEQ ID NO: 1665176 - DNA, 25 bp, Homo sapien
aacttcttgtgttcaaggaatcctc

SEQ ID NO: 1665177 - DNA, 25 bp, Homo sapien
cccatgtcataagttcgatgtataa

SEQ ID NO: 1665178 - DNA, 25 bp, Homo sapien
cacaatgctgatctgactgactcga

SEQ ID NO: 1665179 - DNA, 25 bp, Homo sapien
gagtcaggtgagtcccacaagttcc

SEQ ID NO: 1665180 - DNA, 25 bp, Homo sapien
tattagtcatctttgagtcaggtga

SEQ ID NO: 1665181 - DNA, 25 bp, Homo sapien
ttattaactcattgattgttgagaa

SEQ ID NO: 1665182 - DNA, 25 bp, Homo sapien
tttccaaaatgggacgatattagtc

SEQ ID NO: 1665183 - DNA, 25 bp, Homo sapien
cagctgggcgtaggtcacatcctgg

SEQ ID NO: 1665184 - DNA, 25 bp, Homo sapien
gcagctgggcgtaggtcacatcctg

SEQ ID NO: 1665185 - DNA, 25 bp, Homo sapien
agctgtgcagctgggcgtaggtcac

SEQ ID NO: 1665186 - DNA, 25 bp, Homo sapien
gggagagtgagaggtaaggaacgtg

SEQ ID NO: 1665187 - DNA, 25 bp, Homo sapien
ctgcagcgggggagagtgagaggta

SEQ ID NO: 1665188 - DNA, 25 bp, Homo sapien
gagagtgagaggtaaggaacgtggt

SEQ ID NO: 1665189 - DNA, 25 bp, Homo sapien
agtgagaggtaaggaacgtggtggg

SEQ ID NO: 1665190 - DNA, 25 bp, Homo sapien
tcctaggactggagtgtttcaccgg

SEQ ID NO: 1665191 - DNA, 25 bp, Homo sapien
tccaggaattccccagacagtgagg

SEQ ID NO: 1665192 - DNA, 25 bp, Homo sapien
gaggccatttctctcctaggactgg

SEQ ID NO: 1665193 - DNA, 25 bp, Homo sapien
actggagtgtttcaccggggcatac

SEQ ID NO: 1665194 - DNA, 25 bp, Homo sapien
tcactctgaccttgcccatttggct

SEQ ID NO: 1665195 - DNA, 25 bp, Homo sapien
ctaaggccgtggagggtctggccgc

SEQ ID NO: 1665196 - DNA, 25 bp, Homo sapien
gatggaatctcagggacgccctaag

SEQ ID NO: 1665197 - DNA, 25 bp, Homo sapien
ggtgatccgattacatccctttcct

SEQ ID NO: 1665198 - DNA, 25 bp, Homo sapien
caaccagacggccaaacagaggatg

SEQ ID NO: 1665199 - DNA, 25 bp, Homo sapien
acaaggaggggtccaccgtgacgat

SEQ ID NO: 1665200 - DNA, 25 bp, Homo sapien
cagacggccaaacagaggatgagga

SEQ ID NO: 1665201 - DNA, 25 bp, Homo sapien
gctctaacaaccagacggccaaaca

SEQ ID NO: 1665202 - DNA, 25 bp, Homo sapien
accctgtcctcagactgtgtgtcct

SEQ ID NO: 1665203 - DNA, 25 bp, Homo sapien
cctgtcctcagactgtgtgtccttc

SEQ ID NO: 1665204 - DNA, 25 bp, Homo sapien
tgactgtccagctccaccctgtcct

SEQ ID NO: 1665205 - DNA, 25 bp, Homo sapien
ccaccctgtcctcagactgtgtgtc

SEQ ID NO: 1665206 - DNA, 25 bp, Homo sapien
catttgtcccctctcttcctcttac

SEQ ID NO: 1665207 - DNA, 25 bp, Homo sapien
cccatttgtcccctctcttcctctt

SEQ ID NO: 1665208 - DNA, 25 bp, Homo sapien
ccatttgtcccctctcttcctctta

SEQ ID NO: 1665209 - DNA, 25 bp, Homo sapien
ccccatttgtcccctctcttcctct

SEQ ID NO: 1665210 - DNA, 25 bp, Homo sapien
agaggttttcttcctggacgtcagc

SEQ ID NO: 1665211 - DNA, 25 bp, Homo sapien
ggttttcttcctggacgtcagcagc

SEQ ID NO: 1665212 - DNA, 25 bp, Homo sapien
gaggttttcttcctggacgtcagca

SEQ ID NO: 1665213 - DNA, 25 bp, Homo sapien
tttcttcctggacgtcagcagctgg

SEQ ID NO: 1665214 - DNA, 25 bp, Homo sapien
tgtccttgggctctgtctccgcagc

SEQ ID NO: 1665215 - DNA, 25 bp, Homo sapien
ctcctcagcaggcccctgtccttgg

SEQ ID NO: 1665216 - DNA, 25 bp, Homo sapien
tctccgcagcccctgcaggacgctg

SEQ ID NO: 1665217 - DNA, 25 bp, Homo sapien
cgcagcccctgcaggacgctggaaa

SEQ ID NO: 1665218 - DNA, 25 bp, Homo sapien
cgagaccccaatcaaaacctccagg

SEQ ID NO: 1665219 - DNA, 25 bp, Homo sapien
ccaatcaaaacctccaggtatcttc

SEQ ID NO: 1665220 - DNA, 25 bp, Homo sapien
tgtgtttgctgtgacgctgacgtcg

SEQ ID NO: 1665221 - DNA, 25 bp, Homo sapien
tgtgacgctgacgtcggaggaggag

SEQ ID NO: 1665222 - DNA, 25 bp, Homo sapien
ttgacatgaggacgtcaggagtggg

SEQ ID NO: 1665223 - DNA, 25 bp, Homo sapien
ctgtgtgcaggcgcgagccaggtct

SEQ ID NO: 1665224 - DNA, 25 bp, Homo sapien
acatgaggacgtcaggagtgggaat

SEQ ID NO: 1665225 - DNA, 25 bp, Homo sapien
tgtgtgcaggcgcgagccaggtctt

SEQ ID NO: 1665226 - DNA, 25 bp, Homo sapien
attctgagggcctgaccctgggggg

SEQ ID NO: 1665227 - DNA, 25 bp, Homo sapien
ttaaggggctggtcctcaggacctc

SEQ ID NO: 1665228 - DNA, 25 bp, Homo sapien
tggagggcggccctgtgggtgggag

SEQ ID NO: 1665229 - DNA, 25 bp, Homo sapien
tgtggagggcggccctgtgggtggg

SEQ ID NO: 1665230 - DNA, 25 bp, Homo sapien
tgggaggctggagcctccagagtgt

SEQ ID NO: 1665231 - DNA, 25 bp, Homo sapien
ggtgggaggctggagcctccagagt

SEQ ID NO: 1665232 - DNA, 25 bp, Homo sapien
tgagaccacgagctccaggggctca

SEQ ID NO: 1665233 - DNA, 25 bp, Homo sapien
ctgagaccacgagctccaggggctc

SEQ ID NO: 1665234 - DNA, 25 bp, Homo sapien
gggggttggagctgtatgagccgta

SEQ ID NO: 1665235 - DNA, 25 bp, Homo sapien
gggttggagctgtatgagccgtagc

SEQ ID NO: 1665236 - DNA, 25 bp, Homo sapien
gttggagctgtatgagccgtagcac

SEQ ID NO: 1665237 - DNA, 25 bp, Homo sapien
tgagacagcaggtgggggttggagc

SEQ ID NO: 1665238 - DNA, 25 bp, Homo sapien
aagtgtcaaactgccaccatgactg

SEQ ID NO: 1665239 - DNA, 25 bp, Homo sapien
gtgtcaaactgccaccatgactgac

SEQ ID NO: 1665240 - DNA, 25 bp, Homo sapien
tcaaactgccaccatgactgacaca

SEQ ID NO: 1665241 - DNA, 25 bp, Homo sapien
caaactgccaccatgactgacacag

SEQ ID NO: 1665242 - DNA, 25 bp, Homo sapien
gtagcacctgtactggcccccattg

SEQ ID NO: 1665243 - DNA, 25 bp, Homo sapien
ggcgctggaggaagtcacgttcccc

SEQ ID NO: 1665244 - DNA, 25 bp, Homo sapien
gaacaaatctgttgtagccgacatc

SEQ ID NO: 1665245 - DNA, 25 bp, Homo sapien
gagaggttgtgtgcaccgtagcacc

SEQ ID NO: 1665246 - DNA, 25 bp, Homo sapien
agccaaactccccacaacctgtcag

SEQ ID NO: 1665247 - DNA, 25 bp, Homo sapien
cagattcagtcaccagccaaactcc

SEQ ID NO: 1665248 - DNA, 25 bp, Homo sapien
tccctcatgccttcagcccgtcctt

SEQ ID NO: 1665249 - DNA, 25 bp, Homo sapien
tgaacgtggtcgagggctcctcctc

SEQ ID NO: 1665250 - DNA, 25 bp, Homo sapien
gagggcagaatctccagggggtcac

SEQ ID NO: 1665251 - DNA, 25 bp, Homo sapien
tccgggggagctggtgttctccttc

SEQ ID NO: 1665252 - DNA, 25 bp, Homo sapien
aaatggtgatatcccttctgtgagc

SEQ ID NO: 1665253 - DNA, 25 bp, Homo sapien
gaacaaaatggtgatatcccttctg

SEQ ID NO: 1665254 - DNA, 25 bp, Homo sapien
tccttcatcagaacaaaatggtgat

SEQ ID NO: 1665255 - DNA, 25 bp, Homo sapien
gcaccgtgttaaatggggctcccac

SEQ ID NO: 1665256 - DNA, 25 bp, Homo sapien
ctaggagagaaagaggcaccgtgtt

SEQ ID NO: 1665257 - DNA, 25 bp, Homo sapien
agggagacgcccctgagagccgacc

SEQ ID NO: 1665258 - DNA, 25 bp, Homo sapien
tgggctgtgagagggagacgcccct

SEQ ID NO: 1665259 - DNA, 25 bp, Homo sapien
cagcctgcagagctgtaatagtggc

SEQ ID NO: 1665260 - DNA, 25 bp, Homo sapien
cagagctgtaatagtggcagcggta

SEQ ID NO: 1665261 - DNA, 25 bp, Homo sapien
gtaatagtggcagcggtatctccct

SEQ ID NO: 1665262 - DNA, 25 bp, Homo sapien
cttgggttccagtgggttatttctg

SEQ ID NO: 1665263 - DNA, 25 bp, Homo sapien
tagatggaaatcagaggctggatcc

SEQ ID NO: 1665264 - DNA, 25 bp, Homo sapien
ctagatggaaatcagaggctggatc

SEQ ID NO: 1665265 - DNA, 25 bp, Homo sapien
agatggaaatcagaggctggatccc

SEQ ID NO: 1665266 - DNA, 25 bp, Homo sapien
cgggtcctggggcccagactcagcc

SEQ ID NO: 1665267 - DNA, 25 bp, Homo sapien
gcctgcacgcgggtcctggggccca

SEQ ID NO: 1665268 - DNA, 25 bp, Homo sapien
ctgcacgcgggtcctggggcccaga

SEQ ID NO: 1665269 - DNA, 25 bp, Homo sapien
ctgcctgcacgcgggtcctggggcc

SEQ ID NO: 1665270 - DNA, 25 bp, Homo sapien
gtgagggcgggcgtcatggcgtctc

SEQ ID NO: 1665271 - DNA, 25 bp, Homo sapien
gggcgtcatggcgtctcctcccggt

SEQ ID NO: 1665272 - DNA, 25 bp, Homo sapien
gcagggctgtgagggcgggcgtcat

SEQ ID NO: 1665273 - DNA, 25 bp, Homo sapien
atggcgtctcctcccggtgaccccg

SEQ ID NO: 1665274 - DNA, 25 bp, Homo sapien
gcagagggatgagccctcagtgctg

SEQ ID NO: 1665275 - DNA, 25 bp, Homo sapien
gggatgagccctcagtgctggcagg

SEQ ID NO: 1665276 - DNA, 25 bp, Homo sapien
gagggatgagccctcagtgctggca

SEQ ID NO: 1665277 - DNA, 25 bp, Homo sapien
ctgcagagggatgagccctcagtgc

SEQ ID NO: 1665278 - DNA, 25 bp, Homo sapien
cacaggttctccataggttgtccat

SEQ ID NO: 1665279 - DNA, 25 bp, Homo sapien
gatctcaataggttctccacaggtt

SEQ ID NO: 1665280 - DNA, 25 bp, Homo sapien
gaaaagtgctcgaatctccatagga

SEQ ID NO: 1665281 - DNA, 25 bp, Homo sapien
tctatagaatctccatgggccctcc

SEQ ID NO: 1665282 - DNA, 25 bp, Homo sapien
agggaccagccggcatcctctacat

SEQ ID NO: 1665283 - DNA, 25 bp, Homo sapien
agggcctccgtaagttcttcacagg

SEQ ID NO: 1665284 - DNA, 25 bp, Homo sapien
gccggcatcctctacatcccaagat

SEQ ID NO: 1665285 - DNA, 25 bp, Homo sapien
cacagggcctccgtaagttcttcac

SEQ ID NO: 1665286 - DNA, 25 bp, Homo sapien
aatgaccacgtggtgatagtggtta

SEQ ID NO: 1665287 - DNA, 25 bp, Homo sapien
accacgtggtgatagtggttatgga

SEQ ID NO: 1665288 - DNA, 25 bp, Homo sapien
cgtggtgatagtggttatggatttc

SEQ ID NO: 1665289 - DNA, 25 bp, Homo sapien
gaaatgaccacgtggtgatagtggt

SEQ ID NO: 1665290 - DNA, 25 bp, Homo sapien
tcactcacgcggaagctacaaaagt

SEQ ID NO: 1665291 - DNA, 25 bp, Homo sapien
tgagagctcagtagggtgaccatag

SEQ ID NO: 1665292 - DNA, 25 bp, Homo sapien
gcactatggaaagccgacgctggtg

SEQ ID NO: 1665293 - DNA, 25 bp, Homo sapien
gaaggaaattgtaccatgttcagca

SEQ ID NO: 1665294 - DNA, 25 bp, Homo sapien
tgaaagtcagcgttccagtgcccgc

SEQ ID NO: 1665295 - DNA, 25 bp, Homo sapien
gcacggcctcgtagtatcccttggt

SEQ ID NO: 1665296 - DNA, 25 bp, Homo sapien
tgttgtgtaatatgagcagcagtcc

SEQ ID NO: 1665297 - DNA, 25 bp, Homo sapien
tattggatcgttacacattgcatgg

SEQ ID NO: 1665298 - DNA, 25 bp, Homo sapien
ggaatgatcgacagatagtccagaa

SEQ ID NO: 1665299 - DNA, 25 bp, Homo sapien
aacacatgagggtgggagactgcca

SEQ ID NO: 1665300 - DNA, 25 bp, Homo sapien
tccctctcttcaggaatgatcgaca

SEQ ID NO: 1665301 - DNA, 25 bp, Homo sapien
tagtccagaaagcataggctgtaga

SEQ ID NO: 1665302 - DNA, 25 bp, Homo sapien
ccttctgggatcatcagatctgtcc

SEQ ID NO: 1665303 - DNA, 25 bp, Homo sapien
acagtgtgtggcctgaaatctcacc

SEQ ID NO: 1665304 - DNA, 25 bp, Homo sapien
gctgaagggtgcattgtcctctccg

SEQ ID NO: 1665305 - DNA, 25 bp, Homo sapien
tggaggtcctagattgtcctccaga

SEQ ID NO: 1665306 - DNA, 25 bp, Homo sapien
taacagaatcccgaggaacaccagg

SEQ ID NO: 1665307 - DNA, 25 bp, Homo sapien
tcccggctgcatcttgggggtttct

SEQ ID NO: 1665308 - DNA, 25 bp, Homo sapien
cggctgcatcttgggggtttctctg

SEQ ID NO: 1665309 - DNA, 25 bp, Homo sapien
tgctgagcctcaaataacagaatcc

SEQ ID NO: 1665310 - DNA, 25 bp, Homo sapien
atgagattctccactgtgtaatcct

SEQ ID NO: 1665311 - DNA, 25 bp, Homo sapien
tggagggcggccctgtgggtgggag

SEQ ID NO: 1665312 - DNA, 25 bp, Homo sapien
tgtggagggcggccctgtgggtggg

SEQ ID NO: 1665313 - DNA, 25 bp, Homo sapien
tgggaggctggagcctccagagtgt

SEQ ID NO: 1665314 - DNA, 25 bp, Homo sapien
ggtgggaggctggagcctccagagt

SEQ ID NO: 1665315 - DNA, 25 bp, Homo sapien
tgagaccatgagttccaggggctca

SEQ ID NO: 1665316 - DNA, 25 bp, Homo sapien
ctgagaccatgagttccaggggctc

SEQ ID NO: 1665317 - DNA, 25 bp, Homo sapien
gggggttggagctgtatgagccgta

SEQ ID NO: 1665318 - DNA, 25 bp, Homo sapien
gggttggagctgtatgagccgtagc

SEQ ID NO: 1665319 - DNA, 25 bp, Homo sapien
aaagacagcaggtgggggttggagc

SEQ ID NO: 1665320 - DNA, 25 bp, Homo sapien
gttggagctgtatgagccgtagcac

SEQ ID NO: 1665321 - DNA, 25 bp, Homo sapien
aagtgtcaaaataaccccgtgactg

SEQ ID NO: 1665322 - DNA, 25 bp, Homo sapien
gtcaaaataaccccgtgactgacac

SEQ ID NO: 1665323 - DNA, 25 bp, Homo sapien
gtgtcaaaataaccccgtgactgac

SEQ ID NO: 1665324 - DNA, 25 bp, Homo sapien
tgtcaaaataaccccgtgactgaca

SEQ ID NO: 1665325 - DNA, 25 bp, Homo sapien
gctgggggccgaccactcggaggag

SEQ ID NO: 1665326 - DNA, 25 bp, Homo sapien
tgggggccgaccactcggaggagag

SEQ ID NO: 1665327 - DNA, 25 bp, Homo sapien
ggtcgctgggggccgaccactcgga

SEQ ID NO: 1665328 - DNA, 25 bp, Homo sapien
tcgctgggggccgaccactcggagg

SEQ ID NO: 1665329 - DNA, 25 bp, Homo sapien
ccctccttatacagaacaaatctgt

SEQ ID NO: 1665330 - DNA, 25 bp, Homo sapien
gagggcagaatctccagggggtcac

SEQ ID NO: 1665331 - DNA, 25 bp, Homo sapien
aaatggtgatatcccttctgtgagc

SEQ ID NO: 1665332 - DNA, 25 bp, Homo sapien
tccgggggagctggtgttctccttc

SEQ ID NO: 1665333 - DNA, 25 bp, Homo sapien
gaacaaaatggtgatatcccttctg

SEQ ID NO: 1665334 - DNA, 25 bp, Homo sapien
tccttcatcagaacaaaatggtgat

SEQ ID NO: 1665335 - DNA, 25 bp, Homo sapien
agggagacgcccctgagagccgacc

SEQ ID NO: 1665336 - DNA, 25 bp, Homo sapien
ctaggagagaaagaggcaccgtgtt

SEQ ID NO: 1665337 - DNA, 25 bp, Homo sapien
gcaccgtgttaaatggggctcccac

SEQ ID NO: 1665338 - DNA, 25 bp, Homo sapien
tgggctgtgagagggagacgcccct

SEQ ID NO: 1665339 - DNA, 25 bp, Homo sapien
cagcctgcagagctgtaatagtggc

SEQ ID NO: 1665340 - DNA, 25 bp, Homo sapien
cagagctgtaatagtggcagcggta

SEQ ID NO: 1665341 - DNA, 25 bp, Homo sapien
gtaatagtggcagcggtatctccct

SEQ ID NO: 1665342 - DNA, 25 bp, Homo sapien
cttgggttccagtgggttatttctg

SEQ ID NO: 1665343 - DNA, 25 bp, Homo sapien
ctagatggaaatcagaggctggatc

SEQ ID NO: 1665344 - DNA, 25 bp, Homo sapien
tagatggaaatcagaggctggatcc

SEQ ID NO: 1665345 - DNA, 25 bp, Homo sapien
agatggaaatcagaggctggatccc

SEQ ID NO: 1665346 - DNA, 25 bp, Homo sapien
cgggtcctggggcccagactcagcc

SEQ ID NO: 1665347 - DNA, 25 bp, Homo sapien
gcctgcacgcgggtcctggggccca

SEQ ID NO: 1665348 - DNA, 25 bp, Homo sapien
ctgcacgcgggtcctggggcccaga

SEQ ID NO: 1665349 - DNA, 25 bp, Homo sapien
ctgcctgcacgcgggtcctggggcc

SEQ ID NO: 1665350 - DNA, 25 bp, Homo sapien
agcttttgaggtctcctgatggacc

SEQ ID NO: 1665351 - DNA, 25 bp, Homo sapien
ctggaagagagttccctgtgaggca

SEQ ID NO: 1665352 - DNA, 25 bp, Homo sapien
ctgtgaggcatttgccctgaagcct

SEQ ID NO: 1665353 - DNA, 25 bp, Homo sapien
gggttcctccaagactcggatctcc

SEQ ID NO: 1665354 - DNA, 25 bp, Homo sapien
gcagggctgtgagggcgggcgtcat

SEQ ID NO: 1665355 - DNA, 25 bp, Homo sapien
gcagagcagggctgtgagggcgggc

SEQ ID NO: 1665356 - DNA, 25 bp, Homo sapien
agagcagggctgtgagggcgggcgt

SEQ ID NO: 1665357 - DNA, 25 bp, Homo sapien
caaggcagagcagggctgtgagggc

SEQ ID NO: 1665358 - DNA, 25 bp, Homo sapien
gcgtctccttccggtgaccccgcgc

SEQ ID NO: 1665359 - DNA, 25 bp, Homo sapien
cgtctccttccggtgaccccgcgct

SEQ ID NO: 1665360 - DNA, 25 bp, Homo sapien
gcagagggatgagccctcagtgctg

SEQ ID NO: 1665361 - DNA, 25 bp, Homo sapien
tgcagagggatgagccctcagtgct

SEQ ID NO: 1665362 - DNA, 25 bp, Homo sapien
agagggatgagccctcagtgctggc

SEQ ID NO: 1665363 - DNA, 25 bp, Homo sapien
ctgcagagggatgagccctcagtgc

SEQ ID NO: 1665364 - DNA, 25 bp, Homo sapien
gttttcttcttggatgtcagcagct

SEQ ID NO: 1665365 - DNA, 25 bp, Homo sapien
tttcttcttggatgtcagcagctgg

SEQ ID NO: 1665366 - DNA, 25 bp, Homo sapien
tgaggttttcttcttggatgtcagc

SEQ ID NO: 1665367 - DNA, 25 bp, Homo sapien
tcttcttggatgtcagcagctgggc

SEQ ID NO: 1665368 - DNA, 25 bp, Homo sapien
gcccaagaggtgagtagctgaacat

SEQ ID NO: 1665369 - DNA, 25 bp, Homo sapien
cgatgtctagcaatagcccaagagg

SEQ ID NO: 1665370 - DNA, 25 bp, Homo sapien
tcattccttcgaggacaagacacag

SEQ ID NO: 1665371 - DNA, 25 bp, Homo sapien
taactaaggactagggcgcatccct

SEQ ID NO: 1665372 - DNA, 25 bp, Homo sapien
ttctaattcattcgctcatttgtag

SEQ ID NO: 1665373 - DNA, 25 bp, Homo sapien
tttccgatttcatcatttaatgtgt

SEQ ID NO: 1665374 - DNA, 25 bp, Homo sapien
tgtaatatttacattatcattccaa

SEQ ID NO: 1665375 - DNA, 25 bp, Homo sapien
ttttccgatttcatcatttaatgtg

SEQ ID NO: 1665376 - DNA, 25 bp, Homo sapien
tccaaatttataccatgctctaatt

SEQ ID NO: 1665377 - DNA, 25 bp, Homo sapien
gtctccttctgttgagtatgagatc

SEQ ID NO: 1665378 - DNA, 25 bp, Homo sapien
tgccttctggagtctctgagtctcc

SEQ ID NO: 1665379 - DNA, 25 bp, Homo sapien
tttctcagctcattgatttattgag

SEQ ID NO: 1665380 - DNA, 25 bp, Homo sapien
tgttgagtatgagatctgggtcccc

SEQ ID NO: 1665381 - DNA, 25 bp, Homo sapien
ggaggaggctcagttgcctcccgtc

SEQ ID NO: 1665382 - DNA, 25 bp, Homo sapien
gaggaggctcagttgcctcccgtct

SEQ ID NO: 1665383 - DNA, 25 bp, Homo sapien
gtccaggaattccccagacagtggg

SEQ ID NO: 1665384 - DNA, 25 bp, Homo sapien
atacgtcactgcctgggggtcttca

SEQ ID NO: 1665385 - DNA, 25 bp, Homo sapien
catacgtcactgcctgggggtcttc

SEQ ID NO: 1665386 - DNA, 25 bp, Homo sapien
ggcatacgtcactgcctgggggtct

SEQ ID NO: 1665387 - DNA, 25 bp, Homo sapien
gcatacgtcactgcctgggggtctt

SEQ ID NO: 1665388 - DNA, 25 bp, Homo sapien
aagtcctgcaggattagatctggca

SEQ ID NO: 1665389 - DNA, 25 bp, Homo sapien
tcctggacacgatgcatttatttgc

SEQ ID NO: 1665390 - DNA, 25 bp, Homo sapien
ccaccgtgacgatgctgagagccgg

SEQ ID NO: 1665391 - DNA, 25 bp, Homo sapien
tcgtccatcagaggatcgtgtgccc

SEQ ID NO: 1665392 - DNA, 25 bp, Homo sapien
ggctgtgtgtccttcacggcagcat

SEQ ID NO: 1665393 - DNA, 25 bp, Homo sapien
catctccaccccgtccttgggctgt

SEQ ID NO: 1665394 - DNA, 25 bp, Homo sapien
tccaccccgtccttgggctgtgtgt

SEQ ID NO: 1665395 - DNA, 25 bp, Homo sapien
gcatccatctccaccccgtccttgg

SEQ ID NO: 1665396 - DNA, 25 bp, Homo sapien
ttcgtctcctgggaaggttctctga

SEQ ID NO: 1665397 - DNA, 25 bp, Homo sapien
cctgaggtcccacagtgtgggttca

SEQ ID NO: 1665398 - DNA, 25 bp, Homo sapien
acagtgtgggttcagaccacctccc

SEQ ID NO: 1665399 - DNA, 25 bp, Homo sapien
ccttgccctgttcccactagggtgg

SEQ ID NO: 1665400 - DNA, 25 bp, Homo sapien
tcctcctggatgtcagcaactgggc

SEQ ID NO: 1665401 - DNA, 25 bp, Homo sapien
gaatttcctcctggatgtcagcaac

SEQ ID NO: 1665402 - DNA, 25 bp, Homo sapien
ctggatgtcagcaactgggctggcc

SEQ ID NO: 1665403 - DNA, 25 bp, Homo sapien
tgagaatttcctcctggatgtcagc

SEQ ID NO: 1665404 - DNA, 25 bp, Homo sapien
tgagagggctgtgcgggtggatggg

SEQ ID NO: 1665405 - DNA, 25 bp, Homo sapien
cagtgagagggctgtgcgggtggat

SEQ ID NO: 1665406 - DNA, 25 bp, Homo sapien
cgggtggatgggagtcttgggtctt

SEQ ID NO: 1665407 - DNA, 25 bp, Homo sapien
gtcttgggtcttcatgcagaattac

SEQ ID NO: 1665408 - DNA, 25 bp, Homo sapien
tccttgggctctggccccgcagccc

SEQ ID NO: 1665409 - DNA, 25 bp, Homo sapien
ctgcaggccctggtccttgggctct

SEQ ID NO: 1665410 - DNA, 25 bp, Homo sapien
gtccttgggctctggccccgcagcc

SEQ ID NO: 1665411 - DNA, 25 bp, Homo sapien
ctcttctgcaggccctggtccttgg

SEQ ID NO: 1665412 - DNA, 25 bp, Homo sapien
tgggagaattcgaaccagctgccct

SEQ ID NO: 1665413 - DNA, 25 bp, Homo sapien
actcgagcggaaagaaggaaacctg

SEQ ID NO: 1665414 - DNA, 25 bp, Homo sapien
tggcactgaggctttaaatacgtcg

SEQ ID NO: 1665415 - DNA, 25 bp, Homo sapien
gaagaatcaagcacttccacacatg

SEQ ID NO: 1665416 - DNA, 25 bp, Homo sapien
agcaggacgaaggccactgagaccc

SEQ ID NO: 1665417 - DNA, 25 bp, Homo sapien
cagcaggacgaaggccactgagacc

SEQ ID NO: 1665418 - DNA, 25 bp, Homo sapien
gcgagctaggtctttccttcatgag

SEQ ID NO: 1665419 - DNA, 25 bp, Homo sapien
tgattttgcttacgcctcgcagcag

SEQ ID NO: 1665420 - DNA, 25 bp, Homo sapien
ctgaagaatcccatcaatgcaggcc

SEQ ID NO: 1665421 - DNA, 25 bp, Homo sapien
cctcacagcagttgtgcaacatggg

SEQ ID NO: 1665422 - DNA, 25 bp, Homo sapien
cgtgggggtgaggggctggtcctca

SEQ ID NO: 1665423 - DNA, 25 bp, Homo sapien
cactctggggatccaaccccgtggg

SEQ ID NO: 1665424 - DNA, 25 bp, Homo sapien
tgggggtgaggggctggtcctcagg

SEQ ID NO: 1665425 - DNA, 25 bp, Homo sapien
ggggtgaggggctggtcctcagggc

SEQ ID NO: 1665426 - DNA, 25 bp, Homo sapien
gctcccgcttgagtctttgagggga

SEQ ID NO: 1665427 - DNA, 25 bp, Homo sapien
agaccacgctccctccgagcccaga

SEQ ID NO: 1665428 - DNA, 25 bp, Homo sapien
gaataggatcctcggggagactcag

SEQ ID NO: 1665429 - DNA, 25 bp, Homo sapien
tctttgaggggaataggatcctcgg

SEQ ID NO: 1665430 - DNA, 25 bp, Homo sapien
gagcctgtaggtgagaggctgggat

SEQ ID NO: 1665431 - DNA, 25 bp, Homo sapien
ggagcctgtaggtgagaggctggga

SEQ ID NO: 1665432 - DNA, 25 bp, Homo sapien
gcgaggcgctttggtgctgagtgag

SEQ ID NO: 1665433 - DNA, 25 bp, Homo sapien
tgctgagtgaggaaacccgtccctc

SEQ ID NO: 1665434 - DNA, 25 bp, Homo sapien
cgctttggtgctgagtgaggaaacc

SEQ ID NO: 1665435 - DNA, 25 bp, Homo sapien
agcacagaaagggagcgaggcgctt

SEQ ID NO: 1665436 - DNA, 25 bp, Homo sapien
tgggggtaactagggctggacagca

SEQ ID NO: 1665437 - DNA, 25 bp, Homo sapien
ccacgagctcctgggggtaactagg

SEQ ID NO: 1665438 - DNA, 25 bp, Homo sapien
ggtaggacctgattgcgctgtagca

SEQ ID NO: 1665439 - DNA, 25 bp, Homo sapien
acctgattgcgctgtagcatcggta

SEQ ID NO: 1665440 - DNA, 25 bp, Homo sapien
gcctggtgtctataagactggtact

SEQ ID NO: 1665441 - DNA, 25 bp, Homo sapien
ctcatggagaattcagcctggtgtc

SEQ ID NO: 1665442 - DNA, 25 bp, Homo sapien
aagaaagtgtctatctgatgccatg

SEQ ID NO: 1665443 - DNA, 25 bp, Homo sapien
gactggtactttgactttagacaca

SEQ ID NO: 1665444 - DNA, 25 bp, Homo sapien
ggcagggcctgtgcggagcctgggt

SEQ ID NO: 1665445 - DNA, 25 bp, Homo sapien
ctgggtccctgactgaacccgctgg

SEQ ID NO: 1665446 - DNA, 25 bp, Homo sapien
ctcatcccggccatcactaattgga

SEQ ID NO: 1665447 - DNA, 25 bp, Homo sapien
tcactaattggattcccccggcagg

SEQ ID NO: 1665448 - DNA, 25 bp, Homo sapien
cgatcaggatgtccagggggtcgct

SEQ ID NO: 1665449 - DNA, 25 bp, Homo sapien
gaccacctaggggagaggttgtgtg

SEQ ID NO: 1665450 - DNA, 25 bp, Homo sapien
tgcgatcaggatgtccagggggtcg

SEQ ID NO: 1665451 - DNA, 25 bp, Homo sapien
gggagaggttgtgtgcaccgtagca

SEQ ID NO: 1665452 - DNA, 25 bp, Homo sapien
gagccctggacgaggtcatgttccc

SEQ ID NO: 1665453 - DNA, 25 bp, Homo sapien
atagccgacatcagagcgacactgc

SEQ ID NO: 1665454 - DNA, 25 bp, Homo sapien
cagaacgaatatgtcatagccgaca

SEQ ID NO: 1665455 - DNA, 25 bp, Homo sapien
cacgacagagccctgcgggatcagg

SEQ ID NO: 1665456 - DNA, 25 bp, Homo sapien
caacaagaacaaacgtgagaagtcc

SEQ ID NO: 1665457 - DNA, 25 bp, Homo sapien
gagcttctgtgagtacagggtcctg

SEQ ID NO: 1665458 - DNA, 25 bp, Homo sapien
gagaagtccgtccagtgtatcacac

SEQ ID NO: 1665459 - DNA, 25 bp, Homo sapien
actggggttcgaccacacctgaggg

SEQ ID NO: 1665460 - DNA, 25 bp, Homo sapien
gtctcatagtagcagcggtatcgcc

SEQ ID NO: 1665461 - DNA, 25 bp, Homo sapien
cctgcaggggtctcatagtagcagc

SEQ ID NO: 1665462 - DNA, 25 bp, Homo sapien
agcctgcaggggtctcatagtagca

SEQ ID NO: 1665463 - DNA, 25 bp, Homo sapien
caggggtctcatagtagcagcggta

SEQ ID NO: 1665464 - DNA, 25 bp, Homo sapien
gtcatacaccgtggatggaatgtgg

SEQ ID NO: 1665465 - DNA, 25 bp, Homo sapien
cactgtcatacaccgtggatggaat

SEQ ID NO: 1665466 - DNA, 25 bp, Homo sapien
tgtcatacaccgtggatggaatgtg

SEQ ID NO: 1665467 - DNA, 25 bp, Homo sapien
ctgcactgtcatacaccgtggatgg

SEQ ID NO: 1665468 - DNA, 25 bp, Homo sapien
ttctgtctcttccgggcccatggga

SEQ ID NO: 1665469 - DNA, 25 bp, Homo sapien
tgggttctgtctcttccgggcccat

SEQ ID NO: 1665470 - DNA, 25 bp, Homo sapien
gttctgtctcttccgggcccatggg

SEQ ID NO: 1665471 - DNA, 25 bp, Homo sapien
gggttctgtctcttccgggcccatg

SEQ ID NO: 1665472 - DNA, 25 bp, Homo sapien
ggtactcctcagtctccaggggccc

SEQ ID NO: 1665473 - DNA, 25 bp, Homo sapien
acggtactcctcagtctccaggggc

SEQ ID NO: 1665474 - DNA, 25 bp, Homo sapien
tatccagacggtactcctcagtctc

SEQ ID NO: 1665475 - DNA, 25 bp, Homo sapien
cttatccagacggtactcctcagtc

SEQ ID NO: 1665476 - DNA, 25 bp, Homo sapien
gacaccagagggtcacgggcttccc

SEQ ID NO: 1665477 - DNA, 25 bp, Homo sapien
ctgacaccagagggtcacgggcttc

SEQ ID NO: 1665478 - DNA, 25 bp, Homo sapien
tgacaccagagggtcacgggcttcc

SEQ ID NO: 1665479 - DNA, 25 bp, Homo sapien
cagagggtcacgggcttcccccgag

SEQ ID NO: 1665480 - DNA, 25 bp, Homo sapien
tatcacagaggctggctcagcccag

SEQ ID NO: 1665481 - DNA, 25 bp, Homo sapien
tcagcccagagggtgggtttgggga

SEQ ID NO: 1665482 - DNA, 25 bp, Homo sapien
atcacagaggctggctcagcccaga

SEQ ID NO: 1665483 - DNA, 25 bp, Homo sapien
ggctcagcccagagggtgggtttgg

SEQ ID NO: 1665484 - DNA, 25 bp, Homo sapien
ccccatcagtcagcccagaacagct

SEQ ID NO: 1665485 - DNA, 25 bp, Homo sapien
caggaccctccagacgtccccatca

SEQ ID NO: 1665486 - DNA, 25 bp, Homo sapien
gacgtccccatcagtcagcccagaa

SEQ ID NO: 1665487 - DNA, 25 bp, Homo sapien
cagctgcccggggttgggcccttgt

SEQ ID NO: 1665488 - DNA, 25 bp, Homo sapien
ctgcctgcacgcaggtcctggggcc

SEQ ID NO: 1665489 - DNA, 25 bp, Homo sapien
gcacgcaggtcctggggcccacact

SEQ ID NO: 1665490 - DNA, 25 bp, Homo sapien
acgcaggtcctggggcccacactca

SEQ ID NO: 1665491 - DNA, 25 bp, Homo sapien
gcctgcacgcaggtcctggggccca

SEQ ID NO: 1665492 - DNA, 25 bp, Homo sapien
tgtgagggatttgcccctggaagcc

SEQ ID NO: 1665493 - DNA, 25 bp, Homo sapien
tccctcggagcctctgatagaccag

SEQ ID NO: 1665494 - DNA, 25 bp, Homo sapien
cctcggagcctctgatagaccagat

SEQ ID NO: 1665495 - DNA, 25 bp, Homo sapien
ccctgtgagggatttgcccctggaa

SEQ ID NO: 1665496 - DNA, 25 bp, Homo sapien
tagaccagagcctcgctttagagtg

SEQ ID NO: 1665497 - DNA, 25 bp, Homo sapien
gcctcgctttagagtgagctccctc

SEQ ID NO: 1665498 - DNA, 25 bp, Homo sapien
cagagcctcgctttagagtgagctc

SEQ ID NO: 1665499 - DNA, 25 bp, Homo sapien
ctgatagaccagagcctcgctttag

SEQ ID NO: 1665500 - DNA, 25 bp, Homo sapien
gaggcaaatcaggactgagagggtg

SEQ ID NO: 1665501 - DNA, 25 bp, Homo sapien
cgaggcaaatcaggactgagagggt

SEQ ID NO: 1665502 - DNA, 25 bp, Homo sapien
acaaaaacacgcagagtgtggactg

SEQ ID NO: 1665503 - DNA, 25 bp, Homo sapien
ctgtgcaggcggatgagaccacggt

SEQ ID NO: 1665504 - DNA, 25 bp, Homo sapien
aggacacaaaaacacgcagagtgtg

SEQ ID NO: 1665505 - DNA, 25 bp, Homo sapien
gacacaaaaacacgcagagtgtgga

SEQ ID NO: 1665506 - DNA, 25 bp, Homo sapien
tttgttaatatccttgtgcagctgc

SEQ ID NO: 1665507 - DNA, 25 bp, Homo sapien
aaatgcttcatgaaatttgttaata

SEQ ID NO: 1665508 - DNA, 25 bp, Homo sapien
ttaatatccttgtgcagctgccatg

SEQ ID NO: 1665509 - DNA, 25 bp, Homo sapien
atgcttcatgaaatttgttaatatc

SEQ ID NO: 1665510 - DNA, 25 bp, Homo sapien
catggcatccagccctggagatgct

SEQ ID NO: 1665511 - DNA, 25 bp, Homo sapien
gccctggagatgcttcaggaaagtt

SEQ ID NO: 1665512 - DNA, 25 bp, Homo sapien
gcttcaggaaagttgcaggtccatg

SEQ ID NO: 1665513 - DNA, 25 bp, Homo sapien
gatgcttcaggaaagttgcaggtcc

SEQ ID NO: 1665514 - DNA, 25 bp, Homo sapien
aagccaacgtcattcatttcctagt

SEQ ID NO: 1665515 - DNA, 25 bp, Homo sapien
tctaaattccttatacgaaagccaa

SEQ ID NO: 1665516 - DNA, 25 bp, Homo sapien
ggagttgatacgatgggaacatttt

SEQ ID NO: 1665517 - DNA, 25 bp, Homo sapien
gctcaatgtagttaggatttatgac

SEQ ID NO: 1665518 - DNA, 25 bp, Homo sapien
tatttcgactgcagaatcaagtgag

SEQ ID NO: 1665519 - DNA, 25 bp, Homo sapien
agtgagtcccaaagttcccagcatc

SEQ ID NO: 1665520 - DNA, 25 bp, Homo sapien
tcaagtgagtcccaaagttcccagc

SEQ ID NO: 1665521 - DNA, 25 bp, Homo sapien
tagggatattagttatttcgactgc

SEQ ID NO: 1665522 - DNA, 25 bp, Homo sapien
cagctgggcgtaggtcacatcctgg

SEQ ID NO: 1665523 - DNA, 25 bp, Homo sapien
gcagctgggcgtaggtcacatcctg

SEQ ID NO: 1665524 - DNA, 25 bp, Homo sapien
agctgtgcagctgggcgtaggtcac

SEQ ID NO: 1665525 - DNA, 25 bp, Homo sapien
ccaccccatcttcaggctgtgtgtc

SEQ ID NO: 1665526 - DNA, 25 bp, Homo sapien
atctccaccccatcttcaggctgtg

SEQ ID NO: 1665527 - DNA, 25 bp, Homo sapien
ccgagtgtccatctccaccccatct

SEQ ID NO: 1665528 - DNA, 25 bp, Homo sapien
tccaccccatcttcaggctgtgtgt

SEQ ID NO: 1665529 - DNA, 25 bp, Homo sapien
gaggttttcttcctgggcgtcggca

SEQ ID NO: 1665530 - DNA, 25 bp, Homo sapien
ggttttcttcctgggcgtcggcagc

SEQ ID NO: 1665531 - DNA, 25 bp, Homo sapien
ttcttcctgggcgtcggcagctggg

SEQ ID NO: 1665532 - DNA, 25 bp, Homo sapien
ttttcttcctgggcgtcggcagctg

SEQ ID NO: 1665533 - DNA, 25 bp, Homo sapien
tgttggaaatcagcctttctctggg

SEQ ID NO: 1665534 - DNA, 25 bp, Homo sapien
caggatgttggaaatcagcctttct

SEQ ID NO: 1665535 - DNA, 25 bp, Homo sapien
cccctgcaggatgttggaaatcagc

SEQ ID NO: 1665536 - DNA, 25 bp, Homo sapien
cctgcaggatgttggaaatcagcct

SEQ ID NO: 1665537 - DNA, 25 bp, Homo sapien
aagatgccgatcacaacccccaggt

SEQ ID NO: 1665538 - DNA, 25 bp, Homo sapien
gacggccaccaagatgccgatcaca

SEQ ID NO: 1665539 - DNA, 25 bp, Homo sapien
ccctgacgtcgatgtcggaggatga

SEQ ID NO: 1665540 - DNA, 25 bp, Homo sapien
agtgtttgccctgacgtcgatgtcg

SEQ ID NO: 1665541 - DNA, 25 bp, Homo sapien
tgcagggaaagagcctgaccgtcct

SEQ ID NO: 1665542 - DNA, 25 bp, Homo sapien
tgcaggtgactgctggaccttctgt

SEQ ID NO: 1665543 - DNA, 25 bp, Homo sapien
gaatcgagtcttggagtcttccctg

SEQ ID NO: 1665544 - DNA, 25 bp, Homo sapien
gtctgacctgcagcccttgttcctg

SEQ ID NO: 1665545 - DNA, 25 bp, Homo sapien
agtgggggtgaggggctggtcctca

SEQ ID NO: 1665546 - DNA, 25 bp, Homo sapien
cactttggggatccgacccagtggg

SEQ ID NO: 1665547 - DNA, 25 bp, Homo sapien
ggggtgaggggctggtcctcagggc

SEQ ID NO: 1665548 - DNA, 25 bp, Homo sapien
ccagtgggggtgaggggctggtcct

SEQ ID NO: 1665549 - DNA, 25 bp, Homo sapien
aggtgtggagatgggaccggtgggt

SEQ ID NO: 1665550 - DNA, 25 bp, Homo sapien
attcagcctggtacttaggatattc

SEQ ID NO: 1665551 - DNA, 25 bp, Homo sapien
ttcagcctggtacttaggatattcg

SEQ ID NO: 1665552 - DNA, 25 bp, Homo sapien
tcagcctggtacttaggatattcgt

SEQ ID NO: 1665553 - DNA, 25 bp, Homo sapien
agcctggtacttaggatattcgtgt

SEQ ID NO: 1665554 - DNA, 25 bp, Homo sapien
tcgctgggggccgagcactcagagg

SEQ ID NO: 1665555 - DNA, 25 bp, Homo sapien
cagaggagaggttgtgtgcaccgta

SEQ ID NO: 1665556 - DNA, 25 bp, Homo sapien
tgggggccgagcactcagaggagag

SEQ ID NO: 1665557 - DNA, 25 bp, Homo sapien
ggccgagcactcagaggagaggttg

SEQ ID NO: 1665558 - DNA, 25 bp, Homo sapien
gacacactggagggtcaggctttcc

SEQ ID NO: 1665559 - DNA, 25 bp, Homo sapien
tgccggccagggagctggcgaaggt

SEQ ID NO: 1665560 - DNA, 25 bp, Homo sapien
gaacaaatctgtcatagccgacatc

SEQ ID NO: 1665561 - DNA, 25 bp, Homo sapien
aggacccggctgcactgagagtgat

SEQ ID NO: 1665562 - DNA, 25 bp, Homo sapien
tgtgcgaccacctgcgattcgggct

SEQ ID NO: 1665563 - DNA, 25 bp, Homo sapien
agtcataaccatagcacctgtgcga

SEQ ID NO: 1665564 - DNA, 25 bp, Homo sapien
aagccgccaaatgccacctgtgact

SEQ ID NO: 1665565 - DNA, 25 bp, Homo sapien
ggtgaagaccacacatagggagagt

SEQ ID NO: 1665566 - DNA, 25 bp, Homo sapien
ggtcacccttcctcctgaggtcacc

SEQ ID NO: 1665567 - DNA, 25 bp, Homo sapien
actggagggtcacccttcctcctga

SEQ ID NO: 1665568 - DNA, 25 bp, Homo sapien
gagggtcacccttcctcctgaggtc

SEQ ID NO: 1665569 - DNA, 25 bp, Homo sapien
gctgggctgagagggtgggttttgg

SEQ ID NO: 1665570 - DNA, 25 bp, Homo sapien
ctgtaatactgacagccatatcgcc

SEQ ID NO: 1665571 - DNA, 25 bp, Homo sapien
caccgagcgcggctgtaatactgac

SEQ ID NO: 1665572 - DNA, 25 bp, Homo sapien
cgcggctgtaatactgacagccata

SEQ ID NO: 1665573 - DNA, 25 bp, Homo sapien
tgagctcagaccaccgagcgcggct

SEQ ID NO: 1665574 - DNA, 25 bp, Homo sapien
ctggtcgtatccgtgtaatccaaga

SEQ ID NO: 1665575 - DNA, 25 bp, Homo sapien
tgacaactgagggtgacgggactcc

SEQ ID NO: 1665576 - DNA, 25 bp, Homo sapien
gggcttcaaggctcccctgacaact

SEQ ID NO: 1665577 - DNA, 25 bp, Homo sapien
tatccgtgtaatccaagatgctgat

SEQ ID NO: 1665578 - DNA, 25 bp, Homo sapien
ctgtctgcacgtgggtcctggggcc

SEQ ID NO: 1665579 - DNA, 25 bp, Homo sapien
tgggtcctggggcccagactcagcc

SEQ ID NO: 1665580 - DNA, 25 bp, Homo sapien
gtctgcacgtgggtcctggggccca

SEQ ID NO: 1665581 - DNA, 25 bp, Homo sapien
cgtgggtcctggggcccagactcag

SEQ ID NO: 1665582 - DNA, 25 bp, Homo sapien
gatcaggactgtgacgatgggggtc

SEQ ID NO: 1665583 - DNA, 25 bp, Homo sapien
tcaggactgtgacgatgggggtcat

SEQ ID NO: 1665584 - DNA, 25 bp, Homo sapien
cgagacagatcaggactgtgacgat

SEQ ID NO: 1665585 - DNA, 25 bp, Homo sapien
agacagatcaggactgtgacgatgg

SEQ ID NO: 1665586 - DNA, 25 bp, Homo sapien
ctgccctgctctgcggatggatgag

SEQ ID NO: 1665587 - DNA, 25 bp, Homo sapien
tgctctgcggatggatgagccctcg

SEQ ID NO: 1665588 - DNA, 25 bp, Homo sapien
ccctgctctgcggatggatgagccc

SEQ ID NO: 1665589 - DNA, 25 bp, Homo sapien
ctctgcggatggatgagccctcggt

SEQ ID NO: 1665590 - DNA, 25 bp, Homo sapien
gtgcttcttgtgtctgcccttcctg

SEQ ID NO: 1665591 - DNA, 25 bp, Homo sapien
cgagagccgggatgtagcagcaaat

SEQ ID NO: 1665592 - DNA, 25 bp, Homo sapien
aaatagaactggtgcttcttgtgtc

SEQ ID NO: 1665593 - DNA, 25 bp, Homo sapien
ctgcccttcctgatgagggtagcag

SEQ ID NO: 1665594 - DNA, 25 bp, Homo sapien
tcagatcagcagagaagcatctcgc

SEQ ID NO: 1665595 - DNA, 25 bp, Homo sapien
tggggtctgaattgttttgtgatgg

SEQ ID NO: 1665596 - DNA, 25 bp, Homo sapien
ttggggtctgaattgttttgtgatg

SEQ ID NO: 1665597 - DNA, 25 bp, Homo sapien
ggggtctgaattgttttgtgatggg

SEQ ID NO: 1665598 - DNA, 25 bp, Homo sapien
ggtgttgaataattcttcaagttgg

SEQ ID NO: 1665599 - DNA, 25 bp, Homo sapien
ataattcttcaaatgtccacccagg

SEQ ID NO: 1665600 - DNA, 25 bp, Homo sapien
tacttcacatatacattgttaaagg

SEQ ID NO: 1665601 - DNA, 25 bp, Homo sapien
tgcccagcgtcatcacggcaagcat

SEQ ID NO: 1665602 - DNA, 25 bp, Homo sapien
cagccttggagtcggacttgttttg

SEQ ID NO: 1665603 - DNA, 25 bp, Homo sapien
cttggagtcggacttgttttgtggt

SEQ ID NO: 1665604 - DNA, 25 bp, Homo sapien
ggtgggctgagggtctcagctgctc

SEQ ID NO: 1665605 - DNA, 25 bp, Homo sapien
gccttggagtcggacttgttttgtg

SEQ ID NO: 1665606 - DNA, 25 bp, Homo sapien
cattcattattgtcccagagctctg

SEQ ID NO: 1665607 - DNA, 25 bp, Homo sapien
tcattcattattgtcccagagctct

SEQ ID NO: 1665608 - DNA, 25 bp, Homo sapien
attcattattgtcccagagctctgc

SEQ ID NO: 1665609 - DNA, 25 bp, Homo sapien
tgagtgagccgtagcacctgtaggt

SEQ ID NO: 1665610 - DNA, 25 bp, Homo sapien
tagcacctgtaggtccccgcgtggg

SEQ ID NO: 1665611 - DNA, 25 bp, Homo sapien
tgagccgtagcacctgtaggtcccc

SEQ ID NO: 1665612 - DNA, 25 bp, Homo sapien
tcacaggactcatggggaattcagc

SEQ ID NO: 1665613 - DNA, 25 bp, Homo sapien
gcgctttgattttagacgcagcggg

SEQ ID NO: 1665614 - DNA, 25 bp, Homo sapien
tgagattggcgctttgattttagac

SEQ ID NO: 1665615 - DNA, 25 bp, Homo sapien
ctggtacttatgagattggcgcttt

SEQ ID NO: 1665616 - DNA, 25 bp, Homo sapien
ggtacttatgagattggcgctttga

SEQ ID NO: 1665617 - DNA, 25 bp, Homo sapien
tcaggatgtccagggggtcgctggg

SEQ ID NO: 1665618 - DNA, 25 bp, Homo sapien
caggatgtccagggggtcgctgggg

SEQ ID NO: 1665619 - DNA, 25 bp, Homo sapien
ggatgtccagggggtcgctgggggc

SEQ ID NO: 1665620 - DNA, 25 bp, Homo sapien
atgtccagggggtcgctgggggccg

SEQ ID NO: 1665621 - DNA, 25 bp, Homo sapien
aagtcacgtccccactccttgtaca

SEQ ID NO: 1665622 - DNA, 25 bp, Homo sapien
agtcacgtccccactccttgtacag

SEQ ID NO: 1665623 - DNA, 25 bp, Homo sapien
cacatagggagcgcgcgagtcataa

SEQ ID NO: 1665624 - DNA, 25 bp, Homo sapien
agggagcgcgcgagtcataaccata

SEQ ID NO: 1665625 - DNA, 25 bp, Homo sapien
atagggagcgcgcgagtcataacca

SEQ ID NO: 1665626 - DNA, 25 bp, Homo sapien
ggagcgcgcgagtcataaccatagc

SEQ ID NO: 1665627 - DNA, 25 bp, Homo sapien
ggatggtcacattccctcctgaggt

SEQ ID NO: 1665628 - DNA, 25 bp, Homo sapien
tggtcacattccctcctgaggtcac

SEQ ID NO: 1665629 - DNA, 25 bp, Homo sapien
catcaaatgccacctgtgagtcaca

SEQ ID NO: 1665630 - DNA, 25 bp, Homo sapien
gtgagtcacactggatggtcacatt

SEQ ID NO: 1665631 - DNA, 25 bp, Homo sapien
tgtcaccaccagctccagggggtca

SEQ ID NO: 1665632 - DNA, 25 bp, Homo sapien
ctgtcaccaccagctccagggggtc

SEQ ID NO: 1665633 - DNA, 25 bp, Homo sapien
cagtgtggctgccatagatacagca

SEQ ID NO: 1665634 - DNA, 25 bp, Homo sapien
ggctgccatagatacagcaataccg

SEQ ID NO: 1665635 - DNA, 25 bp, Homo sapien
agatacagcaataccgccctgcatg

SEQ ID NO: 1665636 - DNA, 25 bp, Homo sapien
catagatacagcaataccgccctgc

SEQ ID NO: 1665637 - DNA, 25 bp, Homo sapien
atagatggtactcctgcgtctccag

SEQ ID NO: 1665638 - DNA, 25 bp, Homo sapien
tagatggtactcctgcgtctccagg

SEQ ID NO: 1665639 - DNA, 25 bp, Homo sapien
atggtactcctgcgtctccaggctc

SEQ ID NO: 1665640 - DNA, 25 bp, Homo sapien
gatggtactcctgcgtctccaggct

SEQ ID NO: 1665641 - DNA, 25 bp, Homo sapien
tcagcccagagggtgggcttgggga

SEQ ID NO: 1665642 - DNA, 25 bp, Homo sapien
cttgggtgatcacagagcctggctc

SEQ ID NO: 1665643 - DNA, 25 bp, Homo sapien
ggctcagcccagagggtgggcttgg

SEQ ID NO: 1665644 - DNA, 25 bp, Homo sapien
agcctggctcagcccagagggtggg

SEQ ID NO: 1665645 - DNA, 25 bp, Homo sapien
gtgggtcctggggtccaggctcagc

SEQ ID NO: 1665646 - DNA, 25 bp, Homo sapien
ctgcctgcacgtgggtcctggggtc

SEQ ID NO: 1665647 - DNA, 25 bp, Homo sapien
tgggtcctggggtccaggctcagcc

SEQ ID NO: 1665648 - DNA, 25 bp, Homo sapien
cacgtgggtcctggggtccaggctc

SEQ ID NO: 1665649 - DNA, 25 bp, Homo sapien
tcaggaccgtgaggatgggggtcat

SEQ ID NO: 1665650 - DNA, 25 bp, Homo sapien
atcaggaccgtgaggatgggggtca

SEQ ID NO: 1665651 - DNA, 25 bp, Homo sapien
gacagatcaggaccgtgaggatggg

SEQ ID NO: 1665652 - DNA, 25 bp, Homo sapien
cgagacagatcaggaccgtgaggat

SEQ ID NO: 1665653 - DNA, 25 bp, Homo sapien
tgcactgctctgtggatggatgagc

SEQ ID NO: 1665654 - DNA, 25 bp, Homo sapien
ggcgtctcctcccactgcactgctc

SEQ ID NO: 1665655 - DNA, 25 bp, Homo sapien
cactgctctgtggatggatgagccc

SEQ ID NO: 1665656 - DNA, 25 bp, Homo sapien
ctctgtggatggatgagccctcggt

SEQ ID NO: 1665657 - DNA, 25 bp, Homo sapien
tggcaggacagaggacacacagggt

SEQ ID NO: 1665658 - DNA, 25 bp, Homo sapien
cagaggacacacagggtgtggacac

SEQ ID NO: 1665659 - DNA, 25 bp, Homo sapien
ctggcaggacagaggacacacaggg

SEQ ID NO: 1665660 - DNA, 25 bp, Homo sapien
ggacagaggacacacagggtgtgga

SEQ ID NO: 1665661 - DNA, 25 bp, Homo sapien
gatccttcagggaagatgcaggtcc

SEQ ID NO: 1665662 - DNA, 25 bp, Homo sapien
catggcagtcgtccctccagccctg

SEQ ID NO: 1665663 - DNA, 25 bp, Homo sapien
ggagatccttcagggaagatgcagg

SEQ ID NO: 1665664 - DNA, 25 bp, Homo sapien
ccttcagggaagatgcaggtccatg

SEQ ID NO: 1665665 - DNA, 25 bp, Homo sapien
ctgcagggtggactcagatcagcag

SEQ ID NO: 1665666 - DNA, 25 bp, Homo sapien
ttggccgtccctctgcaccttaatc

SEQ ID NO: 1665667 - DNA, 25 bp, Homo sapien
ggtgcccattgcatccttggccgtc

SEQ ID NO: 1665668 - DNA, 25 bp, Homo sapien
cttggccgtccctctgcaccttaat

SEQ ID NO: 1665669 - DNA, 25 bp, Homo sapien
tcctcggtgcccattgcatccttgg

SEQ ID NO: 1665670 - DNA, 25 bp, Homo sapien
ggtcactgtgccctgaccggcctgt

SEQ ID NO: 1665671 - DNA, 25 bp, Homo sapien
tgataataacagtgacagttctctg

SEQ ID NO: 1665672 - DNA, 25 bp, Homo sapien
gcctgtggcactttgataataacag

SEQ ID NO: 1665673 - DNA, 25 bp, Homo sapien
agcaccaggggggtcactgtgccct

SEQ ID NO: 1665674 - DNA, 25 bp, Homo sapien
cacatgggtcctgaagctcagactc

SEQ ID NO: 1665675 - DNA, 25 bp, Homo sapien
catgggtcctgaagctcagactcag

SEQ ID NO: 1665676 - DNA, 25 bp, Homo sapien
ctgcctgcacatgggtcctgaagct

SEQ ID NO: 1665677 - DNA, 25 bp, Homo sapien
tgcacatgggtcctgaagctcagac

SEQ ID NO: 1665678 - DNA, 25 bp, Homo sapien
ccagtcatctcatccgtcgtggaga

SEQ ID NO: 1665679 - DNA, 25 bp, Homo sapien
gccagtcatctcatccgtcgtggag

SEQ ID NO: 1665680 - DNA, 25 bp, Homo sapien
tcatccgtcgtggagatgcttcagg

SEQ ID NO: 1665681 - DNA, 25 bp, Homo sapien
tcatctcatccgtcgtggagatgct

SEQ ID NO: 1665682 - DNA, 25 bp, Homo sapien
gaagtgagtccatgagggtgaggag

SEQ ID NO: 1665683 - DNA, 25 bp, Homo sapien
aagtgagtccatgagggtgaggagc

SEQ ID NO: 1665684 - DNA, 25 bp, Homo sapien
tgaagtgagtccatgagggtgagga

SEQ ID NO: 1665685 - DNA, 25 bp, Homo sapien
atgaagtgagtccatgagggtgagg

SEQ ID NO: 1665686 - DNA, 25 bp, Homo sapien
gaacctcctaggaccatcagattcg

SEQ ID NO: 1665687 - DNA, 25 bp, Homo sapien
agaccagtgtctctgcactcaaaca

SEQ ID NO: 1665688 - DNA, 25 bp, Homo sapien
cagacagtccagatggcataggcct

SEQ ID NO: 1665689 - DNA, 25 bp, Homo sapien
ggctccagcattcaatggtgcattg

SEQ ID NO: 1665690 - DNA, 25 bp, Homo sapien
cctgaaatatcagaatcccaaggac

SEQ ID NO: 1665691 - DNA, 25 bp, Homo sapien
ccaatcctgaaatatcagaatccca

SEQ ID NO: 1665692 - DNA, 25 bp, Homo sapien
gccaatcctgaaatatcagaatccc

SEQ ID NO: 1665693 - DNA, 25 bp, Homo sapien
gaaatatcagaatcccaaggaccac

SEQ ID NO: 1665694 - DNA, 25 bp, Homo sapien
cccagggcacccatatcatcttgac

SEQ ID NO: 1665695 - DNA, 25 bp, Homo sapien
cagaggtcagggcagatcagtatca

SEQ ID NO: 1665696 - DNA, 25 bp, Homo sapien
ctgaccctctgtgccagttccataa

SEQ ID NO: 1665697 - DNA, 25 bp, Homo sapien
agttccataactgagagcatctcct

SEQ ID NO: 1665698 - DNA, 25 bp, Homo sapien
tgttttgtgacggactgaggttatc

SEQ ID NO: 1665699 - DNA, 25 bp, Homo sapien
gacggactgaggttatcagctgctc

SEQ ID NO: 1665700 - DNA, 25 bp, Homo sapien
tgtgacggactgaggttatcagctg

SEQ ID NO: 1665701 - DNA, 25 bp, Homo sapien
gacttgttttgtgacggactgaggt

SEQ ID NO: 1665702 - DNA, 25 bp, Homo sapien
tgaagtgacaaaaattgatatgcgg

SEQ ID NO: 1665703 - DNA, 25 bp, Homo sapien
aatatacatgaatcaaatacttcac

SEQ ID NO: 1665704 - DNA, 25 bp, Homo sapien
ttgatatgcggtttagaaataaaaa

SEQ ID NO: 1665705 - DNA, 25 bp, Homo sapien
atttggggagatcagttgaaagata

SEQ ID NO: 1665706 - DNA, 25 bp, Homo sapien
agctgcatggtttttagtagaaaat

SEQ ID NO: 1665707 - DNA, 25 bp, Homo sapien
tctcataatattgtggcttcgtctc

SEQ ID NO: 1665708 - DNA, 25 bp, Homo sapien
aatctgaaacgcttcgtgtgacatg

SEQ ID NO: 1665709 - DNA, 25 bp, Homo sapien
cactcatcccgcaggatagggtagg

SEQ ID NO: 1665710 - DNA, 25 bp, Homo sapien
agctgcccctcttggctttctaacc

SEQ ID NO: 1665711 - DNA, 25 bp, Homo sapien
tgcagctgcccctcttggctttcta

SEQ ID NO: 1665712 - DNA, 25 bp, Homo sapien
ctgcagctgcccctcttggctttct

SEQ ID NO: 1665713 - DNA, 25 bp, Homo sapien
gcagctgcccctcttggctttctaa

SEQ ID NO: 1665714 - DNA, 25 bp, Homo sapien
cagaccaggtcttagggtgagtgat

SEQ ID NO: 1665715 - DNA, 25 bp, Homo sapien
aagagcagaccaggtcttagggtga

SEQ ID NO: 1665716 - DNA, 25 bp, Homo sapien
tggcaagagcagaccaggtcttagg

SEQ ID NO: 1665717 - DNA, 25 bp, Homo sapien
ttggcaagagcagaccaggtcttag

SEQ ID NO: 1665718 - DNA, 25 bp, Homo sapien
tctgtcctccttgtagagagcaaac

SEQ ID NO: 1665719 - DNA, 25 bp, Homo sapien
gtctgtcctccttgtagagagcaaa

SEQ ID NO: 1665720 - DNA, 25 bp, Homo sapien
caacatcagagtgatactggagggt

SEQ ID NO: 1665721 - DNA, 25 bp, Homo sapien
ctgtcatagccaacatcagagtgat

SEQ ID NO: 1665722 - DNA, 25 bp, Homo sapien
agtgatactggagggtcaggttctc

SEQ ID NO: 1665723 - DNA, 25 bp, Homo sapien
ctccagggaccacaacagggccctg

SEQ ID NO: 1665724 - DNA, 25 bp, Homo sapien
tttgtgtccctaggatttctgtgtt

SEQ ID NO: 1665725 - DNA, 25 bp, Homo sapien
ctcaccctgaatttgtgtccctagg

SEQ ID NO: 1665726 - DNA, 25 bp, Homo sapien
ttgtgtccctaggatttctgtgttc

SEQ ID NO: 1665727 - DNA, 25 bp, Homo sapien
tcctcaccctgaatttgtgtcccta

SEQ ID NO: 1665728 - DNA, 25 bp, Homo sapien
gctgccctgcctgtaaagctctcca

SEQ ID NO: 1665729 - DNA, 25 bp, Homo sapien
gggctgccctgcctgtaaagctctc

SEQ ID NO: 1665730 - DNA, 25 bp, Homo sapien
tgccctgcctgtaaagctctccaca

SEQ ID NO: 1665731 - DNA, 25 bp, Homo sapien
ccctgcctgtaaagctctccacaac

SEQ ID NO: 1665732 - DNA, 25 bp, Homo sapien
cctgaattgtactagagaagactgt

SEQ ID NO: 1665733 - DNA, 25 bp, Homo sapien
ctgaattgtactagagaagactgtg

SEQ ID NO: 1665734 - DNA, 25 bp, Homo sapien
tgaattgtactagagaagactgtgg

SEQ ID NO: 1665735 - DNA, 25 bp, Homo sapien
ccctgaattgtactagagaagactg

SEQ ID NO: 1665736 - DNA, 25 bp, Homo sapien
ttctgaccatacctgcaggatatgc

SEQ ID NO: 1665737 - DNA, 25 bp, Homo sapien
ctgggttctgaccatacctgcagga

SEQ ID NO: 1665738 - DNA, 25 bp, Homo sapien
ggttctgaccatacctgcaggatat

SEQ ID NO: 1665739 - DNA, 25 bp, Homo sapien
tgggttctgaccatacctgcaggat

SEQ ID NO: 1665740 - DNA, 25 bp, Homo sapien
agagccatagcatctgagcatccac

SEQ ID NO: 1665741 - DNA, 25 bp, Homo sapien
gcgagagccatagcatctgagcatc

SEQ ID NO: 1665742 - DNA, 25 bp, Homo sapien
ctgcgagagccatagcatctgagca

SEQ ID NO: 1665743 - DNA, 25 bp, Homo sapien
gagagccatagcatctgagcatcca

SEQ ID NO: 1665744 - DNA, 25 bp, Homo sapien
cgaatctcagccgtgagccacactg

SEQ ID NO: 1665745 - DNA, 25 bp, Homo sapien
gaacctgtcgaatctcagccgtgag

SEQ ID NO: 1665746 - DNA, 25 bp, Homo sapien
tgtcgaatctcagccgtgagccaca

SEQ ID NO: 1665747 - DNA, 25 bp, Homo sapien
ccaaggtccaggagagcttgtggtc

SEQ ID NO: 1665748 - DNA, 25 bp, Homo sapien
gagctgggaccccagagtgtcctct

SEQ ID NO: 1665749 - DNA, 25 bp, Homo sapien
gagagaaggaggcaccgtgttaaat

SEQ ID NO: 1665750 - DNA, 25 bp, Homo sapien
tgggctgtgaaagggagacacccct

SEQ ID NO: 1665751 - DNA, 25 bp, Homo sapien
gcaccgtgttaaatggggctcccac

SEQ ID NO: 1665752 - DNA, 25 bp, Homo sapien
agggctgtagtagtaacagcggtat

SEQ ID NO: 1665753 - DNA, 25 bp, Homo sapien
cctgcagggctgtagtagtaacagc

SEQ ID NO: 1665754 - DNA, 25 bp, Homo sapien
ctgcagggctgtagtagtaacagcg

SEQ ID NO: 1665755 - DNA, 25 bp, Homo sapien
ctctttaaccagacggtattcctgg

SEQ ID NO: 1665756 - DNA, 25 bp, Homo sapien
cctctttaaccagacggtattcctg

SEQ ID NO: 1665757 - DNA, 25 bp, Homo sapien
taaccagacggtattcctgggcctc

SEQ ID NO: 1665758 - DNA, 25 bp, Homo sapien
cgtgggtcctggggcccagactcag

SEQ ID NO: 1665759 - DNA, 25 bp, Homo sapien
ctgcctgcacgtgggtcctggggcc

SEQ ID NO: 1665760 - DNA, 25 bp, Homo sapien
gcctgcacgtgggtcctggggccca

SEQ ID NO: 1665761 - DNA, 25 bp, Homo sapien
tgggtcctggggcccagactcagcc

SEQ ID NO: 1665762 - DNA, 25 bp, Homo sapien
cactggctgcagctgtgcagatgga

SEQ ID NO: 1665763 - DNA, 25 bp, Homo sapien
tggctgcagctgtgcagatggatga

SEQ ID NO: 1665764 - DNA, 25 bp, Homo sapien
gcagctgtgcagatggatgagacca

SEQ ID NO: 1665765 - DNA, 25 bp, Homo sapien
ggcgtctcctcccactggctgcagc

SEQ ID NO: 1665766 - DNA, 25 bp, Homo sapien
cagtgatttttcagccctggagatg

SEQ ID NO: 1665767 - DNA, 25 bp, Homo sapien
gtcagtgatttttcagccctggaga

SEQ ID NO: 1665768 - DNA, 25 bp, Homo sapien
gtgatttttcagccctggagatgct

SEQ ID NO: 1665769 - DNA, 25 bp, Homo sapien
ggtcagtgatttttcagccctggag

SEQ ID NO: 1665770 - DNA, 25 bp, Homo sapien
gaagatgcaggtccatgccacaggc

SEQ ID NO: 1665771 - DNA, 25 bp, Homo sapien
aaagtagaaccgtgacactcgggcg

SEQ ID NO: 1665772 - DNA, 25 bp, Homo sapien
tcctgcagacgccaggaaagaggta

SEQ ID NO: 1665773 - DNA, 25 bp, Homo sapien
gccaggaaagaggtacttctcagcc

SEQ ID NO: 1665774 - DNA, 25 bp, Homo sapien
cactcgggcgtcactgacaatgaac

SEQ ID NO: 1665775 - DNA, 25 bp, Homo sapien
caaaatatcagctagagcatgagag

SEQ ID NO: 1665776 - DNA, 25 bp, Homo sapien
caatgacaaaatatcagctagagca

SEQ ID NO: 1665777 - DNA, 25 bp, Homo sapien
acaatgacaaaatatcagctagagc

SEQ ID NO: 1665778 - DNA, 25 bp, Homo sapien
tgacaaaatatcagctagagcatga

SEQ ID NO: 1665779 - DNA, 25 bp, Homo sapien
cttgtatctatgcaggacgaggacc

SEQ ID NO: 1665780 - DNA, 25 bp, Homo sapien
gttgcggctgcgaacatgttggact

SEQ ID NO: 1665781 - DNA, 25 bp, Homo sapien
ggagacacatatacgggagacacat

SEQ ID NO: 1665782 - DNA, 25 bp, Homo sapien
tttcatgagatgttctgcgggagag

SEQ ID NO: 1665783 - DNA, 25 bp, Homo sapien
catacagcgatcttcctggataggg

SEQ ID NO: 1665784 - DNA, 25 bp, Homo sapien
ctattacatacagcgatcttcctgg

SEQ ID NO: 1665785 - DNA, 25 bp, Homo sapien
cctggatagggtgaggagcagtatc

SEQ ID NO: 1665786 - DNA, 25 bp, Homo sapien
tgcaactattacatacagcgatctt

SEQ ID NO: 1665787 - DNA, 25 bp, Homo sapien
tccagcagcggtctgaatgagaaag

SEQ ID NO: 1665788 - DNA, 25 bp, Homo sapien
cactgtctgagggatccctttagag

SEQ ID NO: 1665789 - DNA, 25 bp, Homo sapien
gatactggggtgaagcttcatggcc

SEQ ID NO: 1665790 - DNA, 25 bp, Homo sapien
ggtttcaatccaaaagccgccactg

SEQ ID NO: 1665791 - DNA, 25 bp, Homo sapien
agggaatatccctcaggcagctgtc

SEQ ID NO: 1665792 - DNA, 25 bp, Homo sapien
cagggaatatccctcaggcagctgt

SEQ ID NO: 1665793 - DNA, 25 bp, Homo sapien
ctgaagggtgttctgacttcctcac

SEQ ID NO: 1665794 - DNA, 25 bp, Homo sapien
tgagttccgaccacacctgaagggt

SEQ ID NO: 1665795 - DNA, 25 bp, Homo sapien
gactgtccactagggtgttgctgag

SEQ ID NO: 1665796 - DNA, 25 bp, Homo sapien
cctgaagggtgttcctgttattgcc

SEQ ID NO: 1665797 - DNA, 25 bp, Homo sapien
gcttcagggagtcgttgagttccga

SEQ ID NO: 1665798 - DNA, 25 bp, Homo sapien
aggcagagaagcacgaacaccgtga

SEQ ID NO: 1665799 - DNA, 25 bp, Homo sapien
gaggcagagaagcacgaacaccgtg

SEQ ID NO: 1665800 - DNA, 25 bp, Homo sapien
caggtatggagaaggagcctatggg

SEQ ID NO: 1665801 - DNA, 25 bp, Homo sapien
gaaaggtgtattacctgaaagtgga

SEQ ID NO: 1665802 - DNA, 25 bp, Homo sapien
gatagtcccagtaatacacattaga

SEQ ID NO: 1665803 - DNA, 25 bp, Homo sapien
gttatgagctgaagagatagtccca

SEQ ID NO: 1665804 - DNA, 25 bp, Homo sapien
gggtgaagccttacatcatagggaa

SEQ ID NO: 1665805 - DNA, 25 bp, Homo sapien
tcttctacagacacccagacatctt

SEQ ID NO: 1665806 - DNA, 25 bp, Homo sapien
atcttctacagacacccagacatct

SEQ ID NO: 1665807 - DNA, 25 bp, Homo sapien
ccccttgatattctcagcagacact

SEQ ID NO: 1665808 - DNA, 25 bp, Homo sapien
gatattctcagcagacacttcccca

SEQ ID NO: 1665809 - DNA, 25 bp, Homo sapien
tctgaagggtgcattgtcctttctg

SEQ ID NO: 1665810 - DNA, 25 bp, Homo sapien
ttgtcctttctgctgtttgcctcct

SEQ ID NO: 1665811 - DNA, 25 bp, Homo sapien
tctgctgtttgcctcctggctgcac

SEQ ID NO: 1665812 - DNA, 25 bp, Homo sapien
tcctttctgctgtttgcctcctggc

SEQ ID NO: 1665813 - DNA, 25 bp, Homo sapien
aaataacagaatcccgaggaacagc

SEQ ID NO: 1665814 - DNA, 25 bp, Homo sapien
gctgtgctgagcctcaaataacaga

SEQ ID NO: 1665815 - DNA, 25 bp, Homo sapien
ctcaaataacagaatcccgaggaac

SEQ ID NO: 1665816 - DNA, 25 bp, Homo sapien
tgagcctcaaataacagaatcccga

SEQ ID NO: 1665817 - DNA, 25 bp, Homo sapien
atgagattctccactgtgtaatcct

SEQ ID NO: 1665818 - DNA, 25 bp, Homo sapien
gacttcttttgtgctggattgaggg

SEQ ID NO: 1665819 - DNA, 25 bp, Homo sapien
tctgacttcttttgtgctggattga

SEQ ID NO: 1665820 - DNA, 25 bp, Homo sapien
gctggattgagggtctcagttgctc

SEQ ID NO: 1665821 - DNA, 25 bp, Homo sapien
ttcttttgtgctggattgagggtct

SEQ ID NO: 1665822 - DNA, 25 bp, Homo sapien
acccctttgagctcagagtggacag

SEQ ID NO: 1665823 - DNA, 25 bp, Homo sapien
gaacccctttgagctcagagtggac

SEQ ID NO: 1665824 - DNA, 25 bp, Homo sapien
aacccctttgagctcagagtggaca

SEQ ID NO: 1665825 - DNA, 25 bp, Homo sapien
agtgaacatcgggtcccatgactga

SEQ ID NO: 1665826 - DNA, 25 bp, Homo sapien
aacatcgggtcccatgactgacaca

SEQ ID NO: 1665827 - DNA, 25 bp, Homo sapien
tgaacatcgggtcccatgactgaca

SEQ ID NO: 1665828 - DNA, 25 bp, Homo sapien
gtgaacatcgggtcccatgactgac

SEQ ID NO: 1665829 - DNA, 25 bp, Homo sapien
agggtcagattctctccgggggtca

SEQ ID NO: 1665830 - DNA, 25 bp, Homo sapien
gtgtatctgatgtagccgacatcag

SEQ ID NO: 1665831 - DNA, 25 bp, Homo sapien
tgtacagagtgtatctgatgtagcc

SEQ ID NO: 1665832 - DNA, 25 bp, Homo sapien
ttctctccgggggtcacgacagggc

SEQ ID NO: 1665833 - DNA, 25 bp, Homo sapien
tcaggagggagggcttcctagacac

SEQ ID NO: 1665834 - DNA, 25 bp, Homo sapien
aggagggagggcttcctagacacgc

SEQ ID NO: 1665835 - DNA, 25 bp, Homo sapien
ggtcaggagggagggcttcctagac

SEQ ID NO: 1665836 - DNA, 25 bp, Homo sapien
ctgcagggtcaggagggagggcttc

SEQ ID NO: 1665837 - DNA, 25 bp, Homo sapien
tggtgccctgactttgtataaggaa

SEQ ID NO: 1665838 - DNA, 25 bp, Homo sapien
taaggaaaagctacggcttcctcac

SEQ ID NO: 1665839 - DNA, 25 bp, Homo sapien
gccctgactttgtataaggaaaagc

SEQ ID NO: 1665840 - DNA, 25 bp, Homo sapien
ataaggaaaagctacggcttcctca

SEQ ID NO: 1665841 - DNA, 25 bp, Homo sapien
gggtgttgttttcatagccgtagca

SEQ ID NO: 1665842 - DNA, 25 bp, Homo sapien
catctgaatgtacccctgttgctga

SEQ ID NO: 1665843 - DNA, 25 bp, Homo sapien
actgggttccgaccacacgtatggg

SEQ ID NO: 1665844 - DNA, 25 bp, Homo sapien
ttcctcaatcagagtgaacctgccc

SEQ ID NO: 1665845 - DNA, 25 bp, Homo sapien
agggcttggcagtgcggacagggtg

SEQ ID NO: 1665846 - DNA, 25 bp, Homo sapien
ggcagtgcggacagggtgggtctgc

SEQ ID NO: 1665847 - DNA, 25 bp, Homo sapien
gggcttggcagtgcggacagggtgg

SEQ ID NO: 1665848 - DNA, 25 bp, Homo sapien
gcagtgcggacagggtgggtctgct

SEQ ID NO: 1665849 - DNA, 25 bp, Homo sapien
ggttatgccaggtgatcacgggacc

SEQ ID NO: 1665850 - DNA, 25 bp, Homo sapien
gatagtaacagtgatatcgccctgc

SEQ ID NO: 1665851 - DNA, 25 bp, Homo sapien
tatgtgcctcgacattgagtttccc

SEQ ID NO: 1665852 - DNA, 25 bp, Homo sapien
cgggacctggctcggcccacaggat

SEQ ID NO: 1665853 - DNA, 25 bp, Homo sapien
cgggtcctggggcccaggctcagcc

SEQ ID NO: 1665854 - DNA, 25 bp, Homo sapien
gcctgcacccgggtcctggggccca

SEQ ID NO: 1665855 - DNA, 25 bp, Homo sapien
ctgcctgcacccgggtcctggggcc

SEQ ID NO: 1665856 - DNA, 25 bp, Homo sapien
cccgggtcctggggcccaggctcag

SEQ ID NO: 1665857 - DNA, 25 bp, Homo sapien
tgactaaggcatggctatggattgg

SEQ ID NO: 1665858 - DNA, 25 bp, Homo sapien
gtctctctcctagactagggtctct

SEQ ID NO: 1665859 - DNA, 25 bp, Homo sapien
agatttgcctccgaagcctgagcag

SEQ ID NO: 1665860 - DNA, 25 bp, Homo sapien
ccctgggatgccctaattgactaag

SEQ ID NO: 1665861 - DNA, 25 bp, Homo sapien
gcaggcttgtgagaatgagggtcat

SEQ ID NO: 1665862 - DNA, 25 bp, Homo sapien
gagcaggcttgtgagaatgagggtc

SEQ ID NO: 1665863 - DNA, 25 bp, Homo sapien
aagaagagcaggcttgtgagaatga

SEQ ID NO: 1665864 - DNA, 25 bp, Homo sapien
caaagaagagcaggcttgtgagaat

SEQ ID NO: 1665865 - DNA, 25 bp, Homo sapien
cagacacatggtgtgcgggcacacg

SEQ ID NO: 1665866 - DNA, 25 bp, Homo sapien
gtgtggccacggtgcccgtagacac

SEQ ID NO: 1665867 - DNA, 25 bp, Homo sapien
acggtgcccgtagacacagacagac

SEQ ID NO: 1665868 - DNA, 25 bp, Homo sapien
cagacagacacatggtgtgcgggca

SEQ ID NO: 1665869 - DNA, 25 bp, Homo sapien
tggttcagctggggagctatatttc

SEQ ID NO: 1665870 - DNA, 25 bp, Homo sapien
tggtggttcagctggggagctatat

SEQ ID NO: 1665871 - DNA, 25 bp, Homo sapien
gtggtggttcagctggggagctata

SEQ ID NO: 1665872 - DNA, 25 bp, Homo sapien
ggtggttcagctggggagctatatt

SEQ ID NO: 1665873 - DNA, 25 bp, Homo sapien
cacagatcctgagggtggatggatg

SEQ ID NO: 1665874 - DNA, 25 bp, Homo sapien
gagggaggacgcagatcctgaggat

SEQ ID NO: 1665875 - DNA, 25 bp, Homo sapien
ggtcaccgggtaatctttctctcaa

SEQ ID NO: 1665876 - DNA, 25 bp, Homo sapien
ccattggacggcaggtgtgtaagca

SEQ ID NO: 1665877 - DNA, 25 bp, Homo sapien
taagcaggagccaagagtgaaacac

SEQ ID NO: 1665878 - DNA, 25 bp, Homo sapien
tgcttcccagatcctacaagaaagg

SEQ ID NO: 1665879 - DNA, 25 bp, Homo sapien
cgcacagcaatgttcccagatctca

SEQ ID NO: 1665880 - DNA, 25 bp, Homo sapien
ccactaatatgtcaagaaacaacag

SEQ ID NO: 1665881 - DNA, 25 bp, Homo sapien
gaacttcctggacttccttacactg

SEQ ID NO: 1665882 - DNA, 25 bp, Homo sapien
tgcagcaggagggacatcttctccg

SEQ ID NO: 1665883 - DNA, 25 bp, Homo sapien
cctacaggtagggtggatactcaga

SEQ ID NO: 1665884 - DNA, 25 bp, Homo sapien
gattaacccaaatgagattctgccg

SEQ ID NO: 1665885 - DNA, 25 bp, Homo sapien
cagaaatgcctcaaccaacagcagg

SEQ ID NO: 1665886 - DNA, 25 bp, Homo sapien
ccaatgtgaagtcctaagatgagca

SEQ ID NO: 1665887 - DNA, 25 bp, Homo sapien
tctctagaaacagccagggaactgt

SEQ ID NO: 1665888 - DNA, 25 bp, Homo sapien
gagctgctcgattgtagaagggacc

SEQ ID NO: 1665889 - DNA, 25 bp, Homo sapien
ggctaacgaaccttctggatgctgg

SEQ ID NO: 1665890 - DNA, 25 bp, Homo sapien
gcagacacctaggacaagcttggag

SEQ ID NO: 1665891 - DNA, 25 bp, Homo sapien
tgtgtgagggcccagtggtccagct

SEQ ID NO: 1665892 - DNA, 25 bp, Homo sapien
tacgtgatggactcggccatgggct

SEQ ID NO: 1665893 - DNA, 25 bp, Homo sapien
tgcatacgtgatggactcggccatg

SEQ ID NO: 1665894 - DNA, 25 bp, Homo sapien
gtctggcaacggctgcatacgtgat

SEQ ID NO: 1665895 - DNA, 25 bp, Homo sapien
gaggtgtccgtctctctgtccttct

SEQ ID NO: 1665896 - DNA, 25 bp, Homo sapien
cgaggtgtccgtctctctgtccttc

SEQ ID NO: 1665897 - DNA, 25 bp, Homo sapien
tcaggaagtccattgactgtggcct

SEQ ID NO: 1665898 - DNA, 25 bp, Homo sapien
tagaacatcaacagccaggtcaggc

SEQ ID NO: 1665899 - DNA, 25 bp, Homo sapien
ctctctagaacatcaacagccaggt

SEQ ID NO: 1665900 - DNA, 25 bp, Homo sapien
ctgctgtcctctctagaacatcaac

SEQ ID NO: 1665901 - DNA, 25 bp, Homo sapien
gtcctctctagaacatcaacagcca

SEQ ID NO: 1665902 - DNA, 25 bp, Homo sapien
aggtccaggagtcattcccaggggc

SEQ ID NO: 1665903 - DNA, 25 bp, Homo sapien
gaggtccaggagtcattcccagggg

SEQ ID NO: 1665904 - DNA, 25 bp, Homo sapien
tgggtggaggtccaggagtcattcc

SEQ ID NO: 1665905 - DNA, 25 bp, Homo sapien
gtggaggtccaggagtcattcccag

SEQ ID NO: 1665906 - DNA, 25 bp, Homo sapien
gctgtggcttctgctcctcgtcctt

SEQ ID NO: 1665907 - DNA, 25 bp, Homo sapien
tggcttctgctcctcgtccttgctt

SEQ ID NO: 1665908 - DNA, 25 bp, Homo sapien
tgtggcttctgctcctcgtccttgc

SEQ ID NO: 1665909 - DNA, 25 bp, Homo sapien
gcttctgctcctcgtccttgcttct

SEQ ID NO: 1665910 - DNA, 25 bp, Homo sapien
gaggaagaccactgagaccccgatg

SEQ ID NO: 1665911 - DNA, 25 bp, Homo sapien
agctttcaggccttgggaagcaggt

SEQ ID NO: 1665912 - DNA, 25 bp, Homo sapien
cctgctttatctgattctggcgatg

SEQ ID NO: 1665913 - DNA, 25 bp, Homo sapien
gagaccccgatgagaatatacagat

SEQ ID NO: 1665914 - DNA, 25 bp, Homo sapien
taccacacacacgtcacgtgcgttt

SEQ ID NO: 1665915 - DNA, 25 bp, Homo sapien
cgtcacgtgcgtttcatagacttac

SEQ ID NO: 1665916 - DNA, 25 bp, Homo sapien
cacgtcacgtgcgtttcatagactt

SEQ ID NO: 1665917 - DNA, 25 bp, Homo sapien
acacacgtcacgtgcgtttcataga

SEQ ID NO: 1665918 - DNA, 25 bp, Homo sapien
gggacacagactgccattggcagag

SEQ ID NO: 1665919 - DNA, 25 bp, Homo sapien
tcttaggtaaataatagtcctgcag

SEQ ID NO: 1665920 - DNA, 25 bp, Homo sapien
gcaggaatctgatcaaccccaaagc

SEQ ID NO: 1665921 - DNA, 25 bp, Homo sapien
tacagggatcgttatccccttcttc

SEQ ID NO: 1665922 - DNA, 25 bp, Homo sapien
ttgtccgacggcctctgcgtgggtc

SEQ ID NO: 1665923 - DNA, 25 bp, Homo sapien
ttgtgactgttgtccgacggcctct

SEQ ID NO: 1665924 - DNA, 25 bp, Homo sapien
actgttgtccgacggcctctgcgtg

SEQ ID NO: 1665925 - DNA, 25 bp, Homo sapien
tgactgttgtccgacggcctctgcg

SEQ ID NO: 1665926 - DNA, 25 bp, Homo sapien
gaagaatccaagtcccgatgtgctc

SEQ ID NO: 1665927 - DNA, 25 bp, Homo sapien
tctgattttatctgccctcgcggca

SEQ ID NO: 1665928 - DNA, 25 bp, Homo sapien
aatggcatgagaagctggctgcacc

SEQ ID NO: 1665929 - DNA, 25 bp, Homo sapien
cagatacagcgcgtttcctgggcgt

SEQ ID NO: 1665930 - DNA, 25 bp, Homo sapien
ttatatttgatataaacctatgatt

SEQ ID NO: 1665931 - DNA, 25 bp, Homo sapien
tatatttgatataaacctatgatta

SEQ ID NO: 1665932 - DNA, 25 bp, Homo sapien
tatttgatataaacctatgattaaa

SEQ ID NO: 1665933 - DNA, 25 bp, Homo sapien
aattatgtaatcttgacatatacat

SEQ ID NO: 1665934 - DNA, 25 bp, Homo sapien
ttgaagttcacaagacgggaggcca

SEQ ID NO: 1665935 - DNA, 25 bp, Homo sapien
catcaaatccggaggcttcagtgcc

SEQ ID NO: 1665936 - DNA, 25 bp, Homo sapien
cacaagacgggaggccatttctcct

SEQ ID NO: 1665937 - DNA, 25 bp, Homo sapien
tggtgcatcaaatccggaggcttca

SEQ ID NO: 1665938 - DNA, 25 bp, Homo sapien
cattgctgctatggtctctgtgagc

SEQ ID NO: 1665939 - DNA, 25 bp, Homo sapien
gctggacccggaacagcatccgcag

SEQ ID NO: 1665940 - DNA, 25 bp, Homo sapien
gcattagcgacctcccagagcttgg

SEQ ID NO: 1665941 - DNA, 25 bp, Homo sapien
ggtgtcggtgccttcccgtggcctc

SEQ ID NO: 1665942 - DNA, 25 bp, Homo sapien
ccgggctctgtgtccggggagtccg

SEQ ID NO: 1665943 - DNA, 25 bp, Homo sapien
ctctgtgtccggggagtccgggcct

SEQ ID NO: 1665944 - DNA, 25 bp, Homo sapien
tgtccggggagtccgggcctccaga

SEQ ID NO: 1665945 - DNA, 25 bp, Homo sapien
tgtgtccggggagtccgggcctcca

SEQ ID NO: 1665946 - DNA, 25 bp, Homo sapien
tccaggacatctcgggctgagcaca

SEQ ID NO: 1665947 - DNA, 25 bp, Homo sapien
tgtggtcacataccaaaggttttcc

SEQ ID NO: 1665948 - DNA, 25 bp, Homo sapien
gaccatcacgcaatcccagacaatg

SEQ ID NO: 1665949 - DNA, 25 bp, Homo sapien
tcgagactcctgagaaaacgaggca

SEQ ID NO: 1665950 - DNA, 25 bp, Homo sapien
actctgctcagaccatttagggggc

SEQ ID NO: 1665951 - DNA, 25 bp, Homo sapien
aggtagtcactctgctcagaccatt

SEQ ID NO: 1665952 - DNA, 25 bp, Homo sapien
ctgactcagatggactagcttgaga

SEQ ID NO: 1665953 - DNA, 25 bp, Homo sapien
tgactcagatggactagcttgagac

SEQ ID NO: 1665954 - DNA, 25 bp, Homo sapien
gactcagatggactagcttgagaca

SEQ ID NO: 1665955 - DNA, 25 bp, Homo sapien
cccagggggatcacggtgcctggct

SEQ ID NO: 1665956 - DNA, 25 bp, Homo sapien
tgtatgtggatctactctccctctc

SEQ ID NO: 1665957 - DNA, 25 bp, Homo sapien
tatcattgtatgtggatctactctc

SEQ ID NO: 1665958 - DNA, 25 bp, Homo sapien
cttcagtatcattgtatgtggatct

SEQ ID NO: 1665959 - DNA, 25 bp, Homo sapien
aagacgggacgaaggcatgacttac

SEQ ID NO: 1665960 - DNA, 25 bp, Homo sapien
catacgtcataatatcacactgtac

SEQ ID NO: 1665961 - DNA, 25 bp, Homo sapien
ggtgagggttggttatgcattttac

SEQ ID NO: 1665962 - DNA, 25 bp, Homo sapien
tagggtatatttaaagggatctctc

SEQ ID NO: 1665963 - DNA, 25 bp, Homo sapien
tgtggatggtctgggccaggcagag

SEQ ID NO: 1665964 - DNA, 25 bp, Homo sapien
cctcctgcgtgtggatggtctgggc

SEQ ID NO: 1665965 - DNA, 25 bp, Homo sapien
tcctgcgtgtggatggtctgggcca

SEQ ID NO: 1665966 - DNA, 25 bp, Homo sapien
tgcgtgtggatggtctgggccaggc

SEQ ID NO: 1665967 - DNA, 25 bp, Homo sapien
ccttacggggctgctgtcaaaaggg

SEQ ID NO: 1665968 - DNA, 25 bp, Homo sapien
gggcattcagcatttcataacgacc

SEQ ID NO: 1665969 - DNA, 25 bp, Homo sapien
atttcataacgaccaagccaaccct

SEQ ID NO: 1665970 - DNA, 25 bp, Homo sapien
agccaaccctcctcgacatcactgt

SEQ ID NO: 1665971 - DNA, 25 bp, Homo sapien
ctaggcccaggagggcggtggggtg

SEQ ID NO: 1665972 - DNA, 25 bp, Homo sapien
caaccaattgacttggacgccgtcc

SEQ ID NO: 1665973 - DNA, 25 bp, Homo sapien
tgaaaaatgtcgcttaccctaaatg

SEQ ID NO: 1665974 - DNA, 25 bp, Homo sapien
tgaggcgcaccaatgcaaggacaga

SEQ ID NO: 1665975 - DNA, 25 bp, Homo sapien
agttaacggtcgcagctcttgggca

SEQ ID NO: 1665976 - DNA, 25 bp, Homo sapien
tctcatggttgcaaggaatactaca

SEQ ID NO: 1665977 - DNA, 25 bp, Homo sapien
aacacagtggctcctgagaatgact

SEQ ID NO: 1665978 - DNA, 25 bp, Homo sapien
tgaacatgaggccaaaacacagtgg

SEQ ID NO: 1665979 - DNA, 25 bp, Homo sapien
gaattctgacagctgtgaaaccacc

SEQ ID NO: 1665980 - DNA, 25 bp, Homo sapien
tggctggcagaatcgacatccgtct

SEQ ID NO: 1665981 - DNA, 25 bp, Homo sapien
caaggtcacagaacacatgggcagt

SEQ ID NO: 1665982 - DNA, 25 bp, Homo sapien
aaacgttacttgatgtgggatgcac

SEQ ID NO: 1665983 - DNA, 25 bp, Homo sapien
ctaacgttctttgcctgtgctggga

SEQ ID NO: 1665984 - DNA, 25 bp, Homo sapien
tgtggtcgccgtaatgatctcaagc

SEQ ID NO: 1665985 - DNA, 25 bp, Homo sapien
tctgagtctagaatgcccggaggtc

SEQ ID NO: 1665986 - DNA, 25 bp, Homo sapien
tcaagcttggacctcgtggacagac

SEQ ID NO: 1665987 - DNA, 25 bp, Homo sapien
tcggccaaagggaagcgtctacaga

SEQ ID NO: 1665988 - DNA, 25 bp, Homo sapien
gatgaacttggctttccacgggctg

SEQ ID NO: 1665989 - DNA, 25 bp, Homo sapien
cctgggctccgatggtggatgaact

SEQ ID NO: 1665990 - DNA, 25 bp, Homo sapien
tgtcctgaatattagccttggcagc

SEQ ID NO: 1665991 - DNA, 25 bp, Homo sapien
tgatcatcttcataggattcccgac

SEQ ID NO: 1665992 - DNA, 25 bp, Homo sapien
cagatcctcggaacagtattttaac

SEQ ID NO: 1665993 - DNA, 25 bp, Homo sapien
ctgtggagagaccagatcctcggaa

SEQ ID NO: 1665994 - DNA, 25 bp, Homo sapien
tggagagaccagatcctcggaacag

SEQ ID NO: 1665995 - DNA, 25 bp, Homo sapien
gagaccagatcctcggaacagtatt

SEQ ID NO: 1665996 - DNA, 25 bp, Homo sapien
tcccttgcacttttgtaaatatagt

SEQ ID NO: 1665997 - DNA, 25 bp, Homo sapien
tagtgttctctcatcgatgtaccta

SEQ ID NO: 1665998 - DNA, 25 bp, Homo sapien
gatgtacctatttggtgtgtatgta

SEQ ID NO: 1665999 - DNA, 25 bp, Homo sapien
tatttaaggtgggtcaccgaggctg

SEQ ID NO: 1666000 - DNA, 25 bp, Homo sapien
gctgccgcagtgaccttggcaaagt

SEQ ID NO: 1666001 - DNA, 25 bp, Homo sapien
ggaatgttgagtctgcacaagccag

SEQ ID NO: 1666002 - DNA, 25 bp, Homo sapien
ccaacagaactcatcaggcccagaa

SEQ ID NO: 1666003 - DNA, 25 bp, Homo sapien
tatgatggacagctgcgacgttttc

SEQ ID NO: 1666004 - DNA, 25 bp, Homo sapien
ctggagaagttctccagaaaagaat

SEQ ID NO: 1666005 - DNA, 25 bp, Homo sapien
cagaaaagaatcagcatctagagtc

SEQ ID NO: 1666006 - DNA, 25 bp, Homo sapien
tccagaaaagaatcagcatctagag

SEQ ID NO: 1666007 - DNA, 25 bp, Homo sapien
gaaaagaatcagcatctagagtctc

SEQ ID NO: 1666008 - DNA, 25 bp, Homo sapien
gcttgggcagacaatgccgtcccgc

SEQ ID NO: 1666009 - DNA, 25 bp, Homo sapien
tgggcagacaatgccgtcccgccgt

SEQ ID NO: 1666010 - DNA, 25 bp, Homo sapien
ttgggcagacaatgccgtcccgccg

SEQ ID NO: 1666011 - DNA, 25 bp, Homo sapien
aggcttgggcagacaatgccgtccc

SEQ ID NO: 1666012 - DNA, 25 bp, Homo sapien
cacagtctaatgtggagggcacacc

SEQ ID NO: 1666013 - DNA, 25 bp, Homo sapien
cagtttgtcacaatggaaggctcac

SEQ ID NO: 1666014 - DNA, 25 bp, Homo sapien
acaatatacaaccttcgatgggcca

SEQ ID NO: 1666015 - DNA, 25 bp, Homo sapien
gagactcagtcccaaccgtcttgtg

SEQ ID NO: 1666016 - DNA, 25 bp, Homo sapien
acaaaagcaacgtccaggtagagca

SEQ ID NO: 1666017 - DNA, 25 bp, Homo sapien
aacaaaagcaacgtccaggtagagc

SEQ ID NO: 1666018 - DNA, 25 bp, Homo sapien
atggtccctgtacaggtggctgaga

SEQ ID NO: 1666019 - DNA, 25 bp, Homo sapien
tggagaagacctcttcattggaagc

SEQ ID NO: 1666020 - DNA, 25 bp, Homo sapien
ggcatcattatcacatgcatgccac

SEQ ID NO: 1666021 - DNA, 25 bp, Homo sapien
gctgaggagtcccacgacgtgctgt

SEQ ID NO: 1666022 - DNA, 25 bp, Homo sapien
gaggagtcccacgacgtgctgtcca

SEQ ID NO: 1666023 - DNA, 25 bp, Homo sapien
tcccacgacgtgctgtccataagct

SEQ ID NO: 1666024 - DNA, 25 bp, Homo sapien
cgacgtgctgtccataagctgaaga

SEQ ID NO: 1666025 - DNA, 25 bp, Homo sapien
ttcctgccctaaaagatgaccctgc

SEQ ID NO: 1666026 - DNA, 25 bp, Homo sapien
agacagcggacctgataacggtggc

SEQ ID NO: 1666027 - DNA, 25 bp, Homo sapien
gtcatcgggagggtaggtctactct

SEQ ID NO: 1666028 - DNA, 25 bp, Homo sapien
cagagcaggtgaatatgtcccagat

SEQ ID NO: 1666029 - DNA, 25 bp, Homo sapien
tgtctacgccatcgcatggatctga

SEQ ID NO: 1666030 - DNA, 25 bp, Homo sapien
taagtacgcccggtgcaatgctggg

SEQ ID NO: 1666031 - DNA, 25 bp, Homo sapien
ctgtggcctaggcagaaactgggct

SEQ ID NO: 1666032 - DNA, 25 bp, Homo sapien
tacccaagagggatttgtctacgcc

SEQ ID NO: 1666033 - DNA, 25 bp, Homo sapien
catgtcatgtatctgggtagggaaa

SEQ ID NO: 1666034 - DNA, 25 bp, Homo sapien
gagtttaagcaggagatcataaaac

SEQ ID NO: 1666035 - DNA, 25 bp, Homo sapien
gattgaaaaacataccgtaaagtca

SEQ ID NO: 1666036 - DNA, 25 bp, Homo sapien
tgtatgttaacagttatgatgcaga

SEQ ID NO: 1666037 - DNA, 25 bp, Homo sapien
tcgagttggtgcttggtgacccaca

SEQ ID NO: 1666038 - DNA, 25 bp, Homo sapien
tagagctgcctgttacaacgatacc

SEQ ID NO: 1666039 - DNA, 25 bp, Homo sapien
agcttatcattcaaggcaccccagg

SEQ ID NO: 1666040 - DNA, 25 bp, Homo sapien
tacagacatgactgacacgcttggt

SEQ ID NO: 1666041 - DNA, 25 bp, Homo sapien
catacaaaagtaacgagtgctcgac

SEQ ID NO: 1666042 - DNA, 25 bp, Homo sapien
tactgtactccatacgttccaaaag

SEQ ID NO: 1666043 - DNA, 25 bp, Homo sapien
aggaaaatagggcacatcatgagga

SEQ ID NO: 1666044 - DNA, 25 bp, Homo sapien
cattcaactgaaacggacccaggag

SEQ ID NO: 1666045 - DNA, 25 bp, Homo sapien
gaacagtatcataaggctgggcgtg

SEQ ID NO: 1666046 - DNA, 25 bp, Homo sapien
aacaaaagtgaagacaaggccaggc

SEQ ID NO: 1666047 - DNA, 25 bp, Homo sapien
caacctagaattcgatactcactga

SEQ ID NO: 1666048 - DNA, 25 bp, Homo sapien
gagaaaatcttgacaacagccagat

SEQ ID NO: 1666049 - DNA, 25 bp, Homo sapien
aaactatttgcaagagacctatctc

SEQ ID NO: 1666050 - DNA, 25 bp, Homo sapien
ctatttgcaagagacctatctcatg

SEQ ID NO: 1666051 - DNA, 25 bp, Homo sapien
tatttgcaagagacctatctcatga

SEQ ID NO: 1666052 - DNA, 25 bp, Homo sapien
aactatttgcaagagacctatctca

SEQ ID NO: 1666053 - DNA, 25 bp, Homo sapien
atggactatagtgggactttgcctg

SEQ ID NO: 1666054 - DNA, 25 bp, Homo sapien
actttgcctgatgatcctgtcagcc

SEQ ID NO: 1666055 - DNA, 25 bp, Homo sapien
tagtgggactttgcctgatgatcct

SEQ ID NO: 1666056 - DNA, 25 bp, Homo sapien
tctccctaatatactccctttcaat

SEQ ID NO: 1666057 - DNA, 25 bp, Homo sapien
gagactctgtctcaaaaaaacaaaa

SEQ ID NO: 1666058 - DNA, 25 bp, Homo sapien
tgagactctgtctcaaaaaaacaaa

SEQ ID NO: 1666059 - DNA, 25 bp, Homo sapien
actacatacctattagaatgccaaa

SEQ ID NO: 1666060 - DNA, 25 bp, Homo sapien
aaaaacaagacaccactacatacct

SEQ ID NO: 1666061 - DNA, 25 bp, Homo sapien
ggtctctcataatcctaaacatact

SEQ ID NO: 1666062 - DNA, 25 bp, Homo sapien
cagtgtggtggtctctcataatcct

SEQ ID NO: 1666063 - DNA, 25 bp, Homo sapien
ggtggtctctcataatcctaaacat

SEQ ID NO: 1666064 - DNA, 25 bp, Homo sapien
tgtggtggtctctcataatcctaaa

SEQ ID NO: 1666065 - DNA, 25 bp, Homo sapien
tcctggacggaaacagatggcactc

SEQ ID NO: 1666066 - DNA, 25 bp, Homo sapien
ccagattcatttgctagggaagccc

SEQ ID NO: 1666067 - DNA, 25 bp, Homo sapien
cactcaaaaggtggcgcgcagttca

SEQ ID NO: 1666068 - DNA, 25 bp, Homo sapien
taaaatgttcatgcgtaagtgcgtg

SEQ ID NO: 1666069 - DNA, 25 bp, Homo sapien
tctggaatctagtgtgggtcaagcc

SEQ ID NO: 1666070 - DNA, 25 bp, Homo sapien
catgatgggccccatgaatggtggc

SEQ ID NO: 1666071 - DNA, 25 bp, Homo sapien
tcatggtcacagcatagtttggagc

SEQ ID NO: 1666072 - DNA, 25 bp, Homo sapien
tcagcctggaggtttggagactcat

SEQ ID NO: 1666073 - DNA, 25 bp, Homo sapien
tttcactccactaatgctgtctcag

SEQ ID NO: 1666074 - DNA, 25 bp, Homo sapien
ttcgagcttgcactccggtacccga

SEQ ID NO: 1666075 - DNA, 25 bp, Homo sapien
caggctcatctgtgtccgcctttca

SEQ ID NO: 1666076 - DNA, 25 bp, Homo sapien
tctttcgagcttgcactccggtacc

SEQ ID NO: 1666077 - DNA, 25 bp, Homo sapien
tttgtgtgtgtgtttatttaagtta

SEQ ID NO: 1666078 - DNA, 25 bp, Homo sapien
ttgccttctcttttctttgtgtgtg

SEQ ID NO: 1666079 - DNA, 25 bp, Homo sapien
tctttgtgtgtgtgtttatttaagt

SEQ ID NO: 1666080 - DNA, 25 bp, Homo sapien
tgtgtgtgtgtttatttaagttatt

SEQ ID NO: 1666081 - DNA, 25 bp, Homo sapien
cactgagcaccatttggaagcttga

SEQ ID NO: 1666082 - DNA, 25 bp, Homo sapien
caaacagctggactgtcaggctgct

SEQ ID NO: 1666083 - DNA, 25 bp, Homo sapien
tcttctgccatgtaactggaggatg

SEQ ID NO: 1666084 - DNA, 25 bp, Homo sapien
gagcgtgcacgctcctgctttgtct

SEQ ID NO: 1666085 - DNA, 25 bp, Homo sapien
ctccctatacggcacagccagagtg

SEQ ID NO: 1666086 - DNA, 25 bp, Homo sapien
ctgtcctccctatacggcacagcca

SEQ ID NO: 1666087 - DNA, 25 bp, Homo sapien
atacggcacagccagagtgtctgca

SEQ ID NO: 1666088 - DNA, 25 bp, Homo sapien
tcactccaggcggatctcagccagg

SEQ ID NO: 1666089 - DNA, 25 bp, Homo sapien
gactgtagtgtactcagcccctcgg

SEQ ID NO: 1666090 - DNA, 25 bp, Homo sapien
cacacagcacatgcgggcccaggag

SEQ ID NO: 1666091 - DNA, 25 bp, Homo sapien
agcctctggctcagcacttgtgcca

SEQ ID NO: 1666092 - DNA, 25 bp, Homo sapien
tgtgccatgctttccagtgtgggag

SEQ ID NO: 1666093 - DNA, 25 bp, Homo sapien
gccacgtggaccaggtattcctggg

SEQ ID NO: 1666094 - DNA, 25 bp, Homo sapien
tcaggtgtaggttctgagagggcac

SEQ ID NO: 1666095 - DNA, 25 bp, Homo sapien
gagggcccgtctcagagctccaatg

SEQ ID NO: 1666096 - DNA, 25 bp, Homo sapien
caggctcggtcaccatgagggccac

SEQ ID NO: 1666097 - DNA, 25 bp, Homo sapien
gcggccttgtgctccctcgcttggg

SEQ ID NO: 1666098 - DNA, 25 bp, Homo sapien
gtcactccggcgaggcgtcctcttg

SEQ ID NO: 1666099 - DNA, 25 bp, Homo sapien
cctcggtgttcggtgcgtccaggat

SEQ ID NO: 1666100 - DNA, 25 bp, Homo sapien
ccagagccaaagacgaggtcggtgc

SEQ ID NO: 1666101 - DNA, 25 bp, Homo sapien
cacacccagaaagcggtcgacgtag

SEQ ID NO: 1666102 - DNA, 25 bp, Homo sapien
gctggtcccagcaaaaggcgctgaa

SEQ ID NO: 1666103 - DNA, 25 bp, Homo sapien
gtcgacgtagcccaccgagaagtcg

SEQ ID NO: 1666104 - DNA, 25 bp, Homo sapien
ccatggaagcggaagaagcgcacgc

SEQ ID NO: 1666105 - DNA, 25 bp, Homo sapien
agcggcagcggccttccaggaagaa

SEQ ID NO: 1666106 - DNA, 25 bp, Homo sapien
ggggcttcctgcggcaactccggct

SEQ ID NO: 1666107 - DNA, 25 bp, Homo sapien
ccgtggcgggggcttcctgcggcaa

SEQ ID NO: 1666108 - DNA, 25 bp, Homo sapien
ccaggaagaagcggcaggccggcgg

SEQ ID NO: 1666109 - DNA, 25 bp, Homo sapien
cacggagggcggctccccatggatg

SEQ ID NO: 1666110 - DNA, 25 bp, Homo sapien
atggatgcaccgagcctcacccgac

SEQ ID NO: 1666111 - DNA, 25 bp, Homo sapien
ctcacccgacagtggcgtcagcggc

SEQ ID NO: 1666112 - DNA, 25 bp, Homo sapien
gcgtgccctcgcgaggactctggcc

SEQ ID NO: 1666113 - DNA, 25 bp, Homo sapien
ggccgtttatgtatacagaagtggg

SEQ ID NO: 1666114 - DNA, 25 bp, Homo sapien
ccgggcacacaccttggccgtttat

SEQ ID NO: 1666115 - DNA, 25 bp, Homo sapien
cacaccttggccgtttatgtataca

SEQ ID NO: 1666116 - DNA, 25 bp, Homo sapien
ccttggccgtttatgtatacagaag

SEQ ID NO: 1666117 - DNA, 25 bp, Homo sapien
tcgttcagctcgaggtccgcgttgg

SEQ ID NO: 1666118 - DNA, 25 bp, Homo sapien
ttccgcgtcgggcttggcggcagcc

SEQ ID NO: 1666119 - DNA, 25 bp, Homo sapien
tgacgcccagcaccgcgtccagcat

SEQ ID NO: 1666120 - DNA, 25 bp, Homo sapien
ctagaggccgatgacgtcgttcagc

SEQ ID NO: 1666121 - DNA, 25 bp, Homo sapien
agcagcgggtcggcaggcgagggcg

SEQ ID NO: 1666122 - DNA, 25 bp, Homo sapien
cgtggcggctcaggaacgaggtgtc

SEQ ID NO: 1666123 - DNA, 25 bp, Homo sapien
ccgccgtggcggctcaggaacgagg

SEQ ID NO: 1666124 - DNA, 25 bp, Homo sapien
tcaggaacgaggtgtccccgaaggc

SEQ ID NO: 1666125 - DNA, 25 bp, Homo sapien
cggctcaggaacgaggtgtccccga

SEQ ID NO: 1666126 - DNA, 25 bp, Homo sapien
acagggcgccgcgatcaggccgctt

SEQ ID NO: 1666127 - DNA, 25 bp, Homo sapien
ccgagcggcgcggagatggacaggg

SEQ ID NO: 1666128 - DNA, 25 bp, Homo sapien
cagcgtgtgccggaagtcgccgagc

SEQ ID NO: 1666129 - DNA, 25 bp, Homo sapien
gcgccgcgatcaggccgcttcttgg

SEQ ID NO: 1666130 - DNA, 25 bp, Homo sapien
tcgcagccacgcgactgctcaaagg

SEQ ID NO: 1666131 - DNA, 25 bp, Homo sapien
agccacgcgactgctcaaaggacga

SEQ ID NO: 1666132 - DNA, 25 bp, Homo sapien
acgcgactgctcaaaggacgatggg

SEQ ID NO: 1666133 - DNA, 25 bp, Homo sapien
ccacgcgactgctcaaaggacgatg

SEQ ID NO: 1666134 - DNA, 25 bp, Homo sapien
tgggtatccataggggtcccagaac

SEQ ID NO: 1666135 - DNA, 25 bp, Homo sapien
atatgcaaatactagggcatttata

SEQ ID NO: 1666136 - DNA, 25 bp, Homo sapien
tgcatatttgggtatccataggggt

SEQ ID NO: 1666137 - DNA, 25 bp, Homo sapien
tatttgggtatccataggggtccca

SEQ ID NO: 1666138 - DNA, 25 bp, Homo sapien
cgtggtagatactctgattccttcc

SEQ ID NO: 1666139 - DNA, 25 bp, Homo sapien
tgtgtgccagtaagcccggccaata

SEQ ID NO: 1666140 - DNA, 25 bp, Homo sapien
ggtgtgtgccagtaagcccggccaa

SEQ ID NO: 1666141 - DNA, 25 bp, Homo sapien
cttacttgtcttacaacgtggtaga

SEQ ID NO: 1666142 - DNA, 25 bp, Homo sapien
aagccagctctagggaactccagtg

SEQ ID NO: 1666143 - DNA, 25 bp, Homo sapien
tgcctcttgactcgtggacagctct

SEQ ID NO: 1666144 - DNA, 25 bp, Homo sapien
tatgctcaatggagtcacacctcgg

SEQ ID NO: 1666145 - DNA, 25 bp, Homo sapien
ttcttgtgcgatcccaaactggctt

SEQ ID NO: 1666146 - DNA, 25 bp, Homo sapien
tggttccctggctccgagtccgcct

SEQ ID NO: 1666147 - DNA, 25 bp, Homo sapien
gcgggcgcgcgctcacgactccagc

SEQ ID NO: 1666148 - DNA, 25 bp, Homo sapien
actccagctctagcccggacccctg

SEQ ID NO: 1666149 - DNA, 25 bp, Homo sapien
ctcacgactccagctctagcccgga

SEQ ID NO: 1666150 - DNA, 25 bp, Homo sapien
gcctctaggagttaaaggactagaa

SEQ ID NO: 1666151 - DNA, 25 bp, Homo sapien
cccaggcagagagggttttggcaca

SEQ ID NO: 1666152 - DNA, 25 bp, Homo sapien
aggcagaagcggaatcaccgcccag

SEQ ID NO: 1666153 - DNA, 25 bp, Homo sapien
tgcaccgggagctaaagtgtcagcc

SEQ ID NO: 1666154 - DNA, 25 bp, Homo sapien
ggcgaaggcagcgtcgccgtctcct

SEQ ID NO: 1666155 - DNA, 25 bp, Homo sapien
ctccaggttggtgttcagattcccc

SEQ ID NO: 1666156 - DNA, 25 bp, Homo sapien
aggtggcccatcgaaggtcgtatat

SEQ ID NO: 1666157 - DNA, 25 bp, Homo sapien
agcgtcgccgtctccttcaagtctg

SEQ ID NO: 1666158 - DNA, 25 bp, Homo sapien
gttggagcttcttaaggatttgagc

SEQ ID NO: 1666159 - DNA, 25 bp, Homo sapien
gcggttggagcttcttaaggatttg

SEQ ID NO: 1666160 - DNA, 25 bp, Homo sapien
tatttccatgcctgcggttggagct

SEQ ID NO: 1666161 - DNA, 25 bp, Homo sapien
ttatttccatgcctgcggttggagc

SEQ ID NO: 1666162 - DNA, 25 bp, Homo sapien
ctttttcacatctatgacacccgct

SEQ ID NO: 1666163 - DNA, 25 bp, Homo sapien
cacatctatgacacccgctatgtct

SEQ ID NO: 1666164 - DNA, 25 bp, Homo sapien
ctatgacacccgctatgtcttggta

SEQ ID NO: 1666165 - DNA, 25 bp, Homo sapien
gacacccgctatgtcttggtaaacc

SEQ ID NO: 1666166 - DNA, 25 bp, Homo sapien
gtctctccacagcgcaggctggagg

SEQ ID NO: 1666167 - DNA, 25 bp, Homo sapien
cctggttgaagcaattctccctgcc

SEQ ID NO: 1666168 - DNA, 25 bp, Homo sapien
tcaacctcccaggtagctaggatta

SEQ ID NO: 1666169 - DNA, 25 bp, Homo sapien
aacctctgcctccctggttgaagca

SEQ ID NO: 1666170 - DNA, 25 bp, Homo sapien
caatggctcggtcttggcttactgc

SEQ ID NO: 1666171 - DNA, 25 bp, Homo sapien
tgcagaacccttgcatagccggcgt

SEQ ID NO: 1666172 - DNA, 25 bp, Homo sapien
tgttgaaccacgtgaactgcaggtg

SEQ ID NO: 1666173 - DNA, 25 bp, Homo sapien
agcagccccttggacattcacctgg

SEQ ID NO: 1666174 - DNA, 25 bp, Homo sapien
catctcacgtgtttcccggaacagc

SEQ ID NO: 1666175 - DNA, 25 bp, Homo sapien
atctttctgttctgcgttctctcat

SEQ ID NO: 1666176 - DNA, 25 bp, Homo sapien
cctctgtcttcgctcagggccccag

SEQ ID NO: 1666177 - DNA, 25 bp, Homo sapien
tctgttctgcgttctctcatcatgg

SEQ ID NO: 1666178 - DNA, 25 bp, Homo sapien
ccacggggtggctgttgacggaatc

SEQ ID NO: 1666179 - DNA, 25 bp, Homo sapien
tgtttaggcactataaccttcttca

SEQ ID NO: 1666180 - DNA, 25 bp, Homo sapien
gcagcctctccttatgatgtcctgg

SEQ ID NO: 1666181 - DNA, 25 bp, Homo sapien
ttcatttccggcaggtccttggtcc

SEQ ID NO: 1666182 - DNA, 25 bp, Homo sapien
tcctgggattcctgtatccacttct

SEQ ID NO: 1666183 - DNA, 25 bp, Homo sapien
gttcgtggtgaatgtagtactggat

SEQ ID NO: 1666184 - DNA, 25 bp, Homo sapien
tgaatgtagtactggatggatcctg

SEQ ID NO: 1666185 - DNA, 25 bp, Homo sapien
ttagacttcaggttcgtggtgaatg

SEQ ID NO: 1666186 - DNA, 25 bp, Homo sapien
ctgttgatgacaaagccatgggggc

SEQ ID NO: 1666187 - DNA, 25 bp, Homo sapien
cttctttacactggttccaggattt

SEQ ID NO: 1666188 - DNA, 25 bp, Homo sapien
gccatttcttgctgaagaagtagcc

SEQ ID NO: 1666189 - DNA, 25 bp, Homo sapien
gaagaagtagccttcatggtcacag

SEQ ID NO: 1666190 - DNA, 25 bp, Homo sapien
aagtagccttcatggtcacagtctg

SEQ ID NO: 1666191 - DNA, 25 bp, Homo sapien
tcttgctgaagaagtagccttcatg

SEQ ID NO: 1666192 - DNA, 25 bp, Homo sapien
gagacccatgggctgactgaaggtg

SEQ ID NO: 1666193 - DNA, 25 bp, Homo sapien
aagttcagctcagaaaaacggctcc

SEQ ID NO: 1666194 - DNA, 25 bp, Homo sapien
agaaaaacggctccagcatttccca

SEQ ID NO: 1666195 - DNA, 25 bp, Homo sapien
ggaaagttcagctcagaaaaacggc

SEQ ID NO: 1666196 - DNA, 25 bp, Homo sapien
tggccctcacactcccatgtccttc

SEQ ID NO: 1666197 - DNA, 25 bp, Homo sapien
ctgctgatgtccaggaagaaaactt

SEQ ID NO: 1666198 - DNA, 25 bp, Homo sapien
tcccatgtccttccccgggtccagc

SEQ ID NO: 1666199 - DNA, 25 bp, Homo sapien
agcccagctgctgatgtccaggaag

SEQ ID NO: 1666200 - DNA, 25 bp, Homo sapien
tcataaagggtttctcccacggctg

SEQ ID NO: 1666201 - DNA, 25 bp, Homo sapien
tgtcagctcaagattgtgcccagca

SEQ ID NO: 1666202 - DNA, 25 bp, Homo sapien
tgaaggggattgttgccgctgctcc

SEQ ID NO: 1666203 - DNA, 25 bp, Homo sapien
aactcagtgtcagctcaagattgtg

SEQ ID NO: 1666204 - DNA, 25 bp, Homo sapien
ggttcacgacagcaggctcagaggt

SEQ ID NO: 1666205 - DNA, 25 bp, Homo sapien
actgtgatgagtggggttcacgaca

SEQ ID NO: 1666206 - DNA, 25 bp, Homo sapien
ttcacgacagcaggctcagaggtga

SEQ ID NO: 1666207 - DNA, 25 bp, Homo sapien
agtggggttcacgacagcaggctca

SEQ ID NO: 1666208 - DNA, 25 bp, Homo sapien
ggtcctcgggattctgctatttgag

SEQ ID NO: 1666209 - DNA, 25 bp, Homo sapien
ttctgctatttgaggctcagcacag

SEQ ID NO: 1666210 - DNA, 25 bp, Homo sapien
tcatccgcatgggtgtggctggctt

SEQ ID NO: 1666211 - DNA, 25 bp, Homo sapien
gtcctggtggtcctcgggattctgc

SEQ ID NO: 1666212 - DNA, 25 bp, Homo sapien
tgctctggtccacggcatgtgacac

SEQ ID NO: 1666213 - DNA, 25 bp, Homo sapien
ctgtgtgctctggtccacggcatgt

SEQ ID NO: 1666214 - DNA, 25 bp, Homo sapien
tggtccacggcatgtgacacagtct

SEQ ID NO: 1666215 - DNA, 25 bp, Homo sapien
tccacggcatgtgacacagtcttcc

SEQ ID NO: 1666216 - DNA, 25 bp, Homo sapien
tagcggacgccagctgagtgtttaa

SEQ ID NO: 1666217 - DNA, 25 bp, Homo sapien
ggctttgaacctctggaatcaggga

SEQ ID NO: 1666218 - DNA, 25 bp, Homo sapien
agcagttttgcttcgagagtacaca

SEQ ID NO: 1666219 - DNA, 25 bp, Homo sapien
ttttcctagacccagtagcggacgc

SEQ ID NO: 1666220 - DNA, 25 bp, Homo sapien
tgagatccacaaggagacactgggc

SEQ ID NO: 1666221 - DNA, 25 bp, Homo sapien
gcagctctgtcactggacggtttgg

SEQ ID NO: 1666222 - DNA, 25 bp, Homo sapien
aaagcttcgggtagaacacccagtg

SEQ ID NO: 1666223 - DNA, 25 bp, Homo sapien
acggtttggtgcactcccttgaggg

SEQ ID NO: 1666224 - DNA, 25 bp, Homo sapien
catcactccgcatactaacatctgt

SEQ ID NO: 1666225 - DNA, 25 bp, Homo sapien
gtggaatgatggaatcaagacagtt

SEQ ID NO: 1666226 - DNA, 25 bp, Homo sapien
gatggaatcaagacagttaacatgt

SEQ ID NO: 1666227 - DNA, 25 bp, Homo sapien
gacagttaacatgtccatcactccg

SEQ ID NO: 1666228 - DNA, 25 bp, Homo sapien
cctgatagaggaaataggaatggtg

SEQ ID NO: 1666229 - DNA, 25 bp, Homo sapien
taggaatggtgtctagatacagggc

SEQ ID NO: 1666230 - DNA, 25 bp, Homo sapien
tggtgtctagatacagggccaggtc

SEQ ID NO: 1666231 - DNA, 25 bp, Homo sapien
gaaataggaatggtgtctagataca

SEQ ID NO: 1666232 - DNA, 25 bp, Homo sapien
taatggcaactggtacttaggacat

SEQ ID NO: 1666233 - DNA, 25 bp, Homo sapien
ggtggctgcatgctgcactttggtt

SEQ ID NO: 1666234 - DNA, 25 bp, Homo sapien
tggctgtacgtctctgaaaaccttc

SEQ ID NO: 1666235 - DNA, 25 bp, Homo sapien
gatgattgcaaaacggtacactttc

SEQ ID NO: 1666236 - DNA, 25 bp, Homo sapien
cacaaccacctctcactgagctttc

SEQ ID NO: 1666237 - DNA, 25 bp, Homo sapien
tcacaaccacctctcactgagcttt

SEQ ID NO: 1666238 - DNA, 25 bp, Homo sapien
tctgaactgagggtgagaaaatcaa

SEQ ID NO: 1666239 - DNA, 25 bp, Homo sapien
ccttgttcaccagagagcctcaggg

SEQ ID NO: 1666240 - DNA, 25 bp, Homo sapien
gaaagcccaagcacttgcaggtgag

SEQ ID NO: 1666241 - DNA, 25 bp, Homo sapien
tggctactggtgctccaacaggaag

SEQ ID NO: 1666242 - DNA, 25 bp, Homo sapien
ccaggtcccctggtgaaatcagaag

SEQ ID NO: 1666243 - DNA, 25 bp, Homo sapien
ggtcccatgatgcaagaccttgcag

SEQ ID NO: 1666244 - DNA, 25 bp, Homo sapien
ggacactttgcacctcattggagag

SEQ ID NO: 1666245 - DNA, 25 bp, Homo sapien
acagtcatcctgcaatgttggtcag

SEQ ID NO: 1666246 - DNA, 25 bp, Homo sapien
tcgagtgacccactgcttgtttctg

SEQ ID NO: 1666247 - DNA, 25 bp, Homo sapien
tacgagtggtcaaactcgagtgacc

SEQ ID NO: 1666248 - DNA, 25 bp, Homo sapien
ctacagatgcttcggctctttccgt

SEQ ID NO: 1666249 - DNA, 25 bp, Homo sapien
cgtgactctccatacgagtggtcaa

SEQ ID NO: 1666250 - DNA, 25 bp, Homo sapien
ccactgggcctcatgcaaggtagaa

SEQ ID NO: 1666251 - DNA, 25 bp, Homo sapien
aatttccaggaagccgtgttccgct

SEQ ID NO: 1666252 - DNA, 25 bp, Homo sapien
agccgtgttccgctcttgagcgagc

SEQ ID NO: 1666253 - DNA, 25 bp, Homo sapien
tgttccgctcttgagcgagcaccca

SEQ ID NO: 1666254 - DNA, 25 bp, Homo sapien
gatgtggtcaacatgtaaactgcat

SEQ ID NO: 1666255 - DNA, 25 bp, Homo sapien
catcctgtgcgctgctgagctgagc

SEQ ID NO: 1666256 - DNA, 25 bp, Homo sapien
cctcccatgatgtggtcaacatgta

SEQ ID NO: 1666257 - DNA, 25 bp, Homo sapien
actgcatgggcagggcgccaaataa

SEQ ID NO: 1666258 - DNA, 25 bp, Homo sapien
ctggattggcgatatgggcctggat

SEQ ID NO: 1666259 - DNA, 25 bp, Homo sapien
cctggattggcgatatgggcctatg

SEQ ID NO: 1666260 - DNA, 25 bp, Homo sapien
gatatgggcctggagtggagataca

SEQ ID NO: 1666261 - DNA, 25 bp, Homo sapien
tatgatggaaatatcggcctggagt

SEQ ID NO: 1666262 - DNA, 25 bp, Homo sapien
tgggtctctgcacagccgacagccc

SEQ ID NO: 1666263 - DNA, 25 bp, Homo sapien
tgagtttaacttcagtccaggaagg

SEQ ID NO: 1666264 - DNA, 25 bp, Homo sapien
ctggagtggagatatgggcttgtgg

SEQ ID NO: 1666265 - DNA, 25 bp, Homo sapien
ggcactgagggtgagtttaacttca

SEQ ID NO: 1666266 - DNA, 25 bp, Homo sapien
gtggctgctgtcactccaccagaag

SEQ ID NO: 1666267 - DNA, 25 bp, Homo sapien
agaagaggtgggaaaccacagccat

SEQ ID NO: 1666268 - DNA, 25 bp, Homo sapien
tgctgtcactccaccagaagaggtg

SEQ ID NO: 1666269 - DNA, 25 bp, Homo sapien
ttcagcgtttccatgacggtagggg

SEQ ID NO: 1666270 - DNA, 25 bp, Homo sapien
aataacatcctgtgcgctgctgagc

SEQ ID NO: 1666271 - DNA, 25 bp, Homo sapien
gatgtggtcaacatgtaaactgcat

SEQ ID NO: 1666272 - DNA, 25 bp, Homo sapien
aatttccaggaagccgtgttccgct

SEQ ID NO: 1666273 - DNA, 25 bp, Homo sapien
ccactgggcctcatgcaaggtagaa

SEQ ID NO: 1666274 - DNA, 25 bp, Homo sapien
tcttgcgcaggggccatgctagttt

SEQ ID NO: 1666275 - DNA, 25 bp, Homo sapien
attcttgcgcaggggccatgctagt

SEQ ID NO: 1666276 - DNA, 25 bp, Homo sapien
tgcgcaggggccatgctagttttct

SEQ ID NO: 1666277 - DNA, 25 bp, Homo sapien
acgaatttgcgtgtcattcttgcgc

SEQ ID NO: 1666278 - DNA, 25 bp, Homo sapien
ccgacaagagagtcagcgaaggggg

SEQ ID NO: 1666279 - DNA, 25 bp, Homo sapien
caagagagtcagcgaagggggatag

SEQ ID NO: 1666280 - DNA, 25 bp, Homo sapien
gacaagagagtcagcgaagggggat

SEQ ID NO: 1666281 - DNA, 25 bp, Homo sapien
tccgacaagagagtcagcgaagggg

SEQ ID NO: 1666282 - DNA, 25 bp, Homo sapien
tgttaacatgtgaccctctgacctg

SEQ ID NO: 1666283 - DNA, 25 bp, Homo sapien
aattcgtagagcgatcccaggctgc

SEQ ID NO: 1666284 - DNA, 25 bp, Homo sapien
taagacatcttagagacccgaatcc

SEQ ID NO: 1666285 - DNA, 25 bp, Homo sapien
ccctgtgagaaagtacatagcgtca

SEQ ID NO: 1666286 - DNA, 25 bp, Homo sapien
ttgcaatcaatagtcagcttgggat

SEQ ID NO: 1666287 - DNA, 25 bp, Homo sapien
caaggatccagttctttgtcttaga

SEQ ID NO: 1666288 - DNA, 25 bp, Homo sapien
gagtatcttcaaggatccagttctt

SEQ ID NO: 1666289 - DNA, 25 bp, Homo sapien
agagcttaattatgccactcttcca

SEQ ID NO: 1666290 - DNA, 25 bp, Homo sapien
tcttccacaaatgattctggcccag

SEQ ID NO: 1666291 - DNA, 25 bp, Homo sapien
gctgacaatagaaaggcatgaggga

SEQ ID NO: 1666292 - DNA, 25 bp, Homo sapien
tgaggagagcagatccaagatgctg

SEQ ID NO: 1666293 - DNA, 25 bp, Homo sapien
gagcagatccaagatgctgacaata

SEQ ID NO: 1666294 - DNA, 25 bp, Homo sapien
tagaaaggcatgagggagcagctcc

SEQ ID NO: 1666295 - DNA, 25 bp, Homo sapien
aggcttcttggagcgcctctgagag

SEQ ID NO: 1666296 - DNA, 25 bp, Homo sapien
tggttgatactcaagtccaggtttg

SEQ ID NO: 1666297 - DNA, 25 bp, Homo sapien
gtttggattctctaatgcctgacag

SEQ ID NO: 1666298 - DNA, 25 bp, Homo sapien
gaatccacaatccacgagctatctg

SEQ ID NO: 1666299 - DNA, 25 bp, Homo sapien
ctacagccaagcttggttatgctgc

SEQ ID NO: 1666300 - DNA, 25 bp, Homo sapien
cagcttcttgctgacaaccaagaca

SEQ ID NO: 1666301 - DNA, 25 bp, Homo sapien
gtcagcttcttgctgacaaccaaga

SEQ ID NO: 1666302 - DNA, 25 bp, Homo sapien
ttcttgctgacaaccaagacagcag

SEQ ID NO: 1666303 - DNA, 25 bp, Homo sapien
gcttcttgctgacaaccaagacagc

SEQ ID NO: 1666304 - DNA, 25 bp, Homo sapien
gacgcaggtgcttcagggactggtt

SEQ ID NO: 1666305 - DNA, 25 bp, Homo sapien
actggttggctttgaggacatagaa

SEQ ID NO: 1666306 - DNA, 25 bp, Homo sapien
tggtcttgtacagcaacatggcacc

SEQ ID NO: 1666307 - DNA, 25 bp, Homo sapien
caggaagtgttttgggcgtgtcatg

SEQ ID NO: 1666308 - DNA, 25 bp, Homo sapien
aaagcaagacagaagtcccggtacg

SEQ ID NO: 1666309 - DNA, 25 bp, Homo sapien
catttatgatttctgagcaggtcac

SEQ ID NO: 1666310 - DNA, 25 bp, Homo sapien
gtgcgttcccactcgatgtgccctg

SEQ ID NO: 1666311 - DNA, 25 bp, Homo sapien
tcaggtgcgtgagggtcttcttccc

SEQ ID NO: 1666312 - DNA, 25 bp, Homo sapien
tgcagatgacaggtgctacgggtta

SEQ ID NO: 1666313 - DNA, 25 bp, Homo sapien
gaagagtcactcaggaagctttgtt

SEQ ID NO: 1666314 - DNA, 25 bp, Homo sapien
caaagaatccgcacagaagagtcac

SEQ ID NO: 1666315 - DNA, 25 bp, Homo sapien
tgctacgggttacgtggtcacaaag

SEQ ID NO: 1666316 - DNA, 25 bp, Homo sapien
aatctgtccagaggcgaagagagcg

SEQ ID NO: 1666317 - DNA, 25 bp, Homo sapien
gaagagagcgaagatcctgccgagc

SEQ ID NO: 1666318 - DNA, 25 bp, Homo sapien
gttcggaatggttaggtaagtgcac

SEQ ID NO: 1666319 - DNA, 25 bp, Homo sapien
cctgccgagcccagttcggaatggt

SEQ ID NO: 1666320 - DNA, 25 bp, Homo sapien
tgggactttcagctcatcaaggcca

SEQ ID NO: 1666321 - DNA, 25 bp, Homo sapien
tagaacgcgtatctgagcgtcgggc

SEQ ID NO: 1666322 - DNA, 25 bp, Homo sapien
tcaggtcggtcacggataagggctt

SEQ ID NO: 1666323 - DNA, 25 bp, Homo sapien
tctcggtggaacacggacatctgcg

SEQ ID NO: 1666324 - DNA, 25 bp, Homo sapien
ttatctatttcttgcacctgtccgt

SEQ ID NO: 1666325 - DNA, 25 bp, Homo sapien
cccagctcaggattatctatttctt

SEQ ID NO: 1666326 - DNA, 25 bp, Homo sapien
ctggctttgctaactccgagtcttc

SEQ ID NO: 1666327 - DNA, 25 bp, Homo sapien
gctaactccgagtcttcttctgcat

SEQ ID NO: 1666328 - DNA, 25 bp, Homo sapien
caagatgttcacagtcgcattcctt

SEQ ID NO: 1666329 - DNA, 25 bp, Homo sapien
tacacaattccgtgagattcatctc

SEQ ID NO: 1666330 - DNA, 25 bp, Homo sapien
ggtcttctgtagcacgtcttcgagg

SEQ ID NO: 1666331 - DNA, 25 bp, Homo sapien
ccaattttctgaggaggtgttgacc

SEQ ID NO: 1666332 - DNA, 25 bp, Homo sapien
cgagtatgagaccttaggttaaggc

SEQ ID NO: 1666333 - DNA, 25 bp, Homo sapien
agtgctccgagtatgagaccttagg

SEQ ID NO: 1666334 - DNA, 25 bp, Homo sapien
tgagaccttaggttaaggctgaaga

SEQ ID NO: 1666335 - DNA, 25 bp, Homo sapien
tgctccgagtatgagaccttaggtt

SEQ ID NO: 1666336 - DNA, 25 bp, Homo sapien
tcaggtcaggtcttgcttccagcct

SEQ ID NO: 1666337 - DNA, 25 bp, Homo sapien
tccctcaggtcaggtcttgcttcca

SEQ ID NO: 1666338 - DNA, 25 bp, Homo sapien
aggtcttgcttccagcctgtgtttc

SEQ ID NO: 1666339 - DNA, 25 bp, Homo sapien
ggtcaggtcttgcttccagcctgtg

SEQ ID NO: 1666340 - DNA, 25 bp, Homo sapien
gtgaatgttcctgaaacccgccgga

SEQ ID NO: 1666341 - DNA, 25 bp, Homo sapien
agtgacacaaggcaaggattcttgg

SEQ ID NO: 1666342 - DNA, 25 bp, Homo sapien
cacaaggcaaggattcttggtatgc

SEQ ID NO: 1666343 - DNA, 25 bp, Homo sapien
ccaatagcgctcacacagacatggt

SEQ ID NO: 1666344 - DNA, 25 bp, Homo sapien
ggctaatgttcgtcctacagggcca

SEQ ID NO: 1666345 - DNA, 25 bp, Homo sapien
tccccaggcaacaaagaggtgtgct

SEQ ID NO: 1666346 - DNA, 25 bp, Homo sapien
tcagggatgaaatcgtgggagccaa

SEQ ID NO: 1666347 - DNA, 25 bp, Homo sapien
gccaaagctatcttcttgcactcag

SEQ ID NO: 1666348 - DNA, 25 bp, Homo sapien
gggtggacagcaatattgcagtaca

SEQ ID NO: 1666349 - DNA, 25 bp, Homo sapien
gtcaagaaatgcctaaacgctataa

SEQ ID NO: 1666350 - DNA, 25 bp, Homo sapien
tatagaactttaccttgagaagacc

SEQ ID NO: 1666351 - DNA, 25 bp, Homo sapien
cttggcccagtggtacagttttaca

SEQ ID NO: 1666352 - DNA, 25 bp, Homo sapien
cagagtcaaccctgagagctgggaa

SEQ ID NO: 1666353 - DNA, 25 bp, Homo sapien
tgcaagacccgttctgagagacgaa

SEQ ID NO: 1666354 - DNA, 25 bp, Homo sapien
gaaccttagagatccgtctggagcc

SEQ ID NO: 1666355 - DNA, 25 bp, Homo sapien
gacaaagtcaggcttcgtcacccga

SEQ ID NO: 1666356 - DNA, 25 bp, Homo sapien
tgtgaacatcctgtcggcctccatc

SEQ ID NO: 1666357 - DNA, 25 bp, Homo sapien
cataacccgcggctgtgaacatcct

SEQ ID NO: 1666358 - DNA, 25 bp, Homo sapien
gcggctgtgaacatcctgtcggcct

SEQ ID NO: 1666359 - DNA, 25 bp, Homo sapien
cccgcggctgtgaacatcctgtcgg

SEQ ID NO: 1666360 - DNA, 25 bp, Homo sapien
cagaaaccccgccaggattattagg

SEQ ID NO: 1666361 - DNA, 25 bp, Homo sapien
ccccgaggcatatccggaccaggtt

SEQ ID NO: 1666362 - DNA, 25 bp, Homo sapien
aggttgcccttggtgtagtactggc

SEQ ID NO: 1666363 - DNA, 25 bp, Homo sapien
attattaggatcacagccccgaggc

SEQ ID NO: 1666364 - DNA, 25 bp, Homo sapien
actggcggtgatactcctagaagtc

SEQ ID NO: 1666365 - DNA, 25 bp, Homo sapien
ggactggcggtgatactcctagaag

SEQ ID NO: 1666366 - DNA, 25 bp, Homo sapien
ctggcggtgatactcctagaagtct

SEQ ID NO: 1666367 - DNA, 25 bp, Homo sapien
gactggcggtgatactcctagaagt

SEQ ID NO: 1666368 - DNA, 25 bp, Homo sapien
tcagttcagcggtggcttctgagaa

SEQ ID NO: 1666369 - DNA, 25 bp, Homo sapien
cgtttgtgaatgagacggtcagttc

SEQ ID NO: 1666370 - DNA, 25 bp, Homo sapien
tgaagacttcgtttgtgaatgagac

SEQ ID NO: 1666371 - DNA, 25 bp, Homo sapien
agacggtcagttcagcggtggcttc

SEQ ID NO: 1666372 - DNA, 25 bp, Homo sapien
attccccttttgagatatctaggct

SEQ ID NO: 1666373 - DNA, 25 bp, Homo sapien
cccgtggttccctatatcctctaga

SEQ ID NO: 1666374 - DNA, 25 bp, Homo sapien
tccccttttgagatatctaggctcc

SEQ ID NO: 1666375 - DNA, 25 bp, Homo sapien
tcctctagatatctccattcccctt

SEQ ID NO: 1666376 - DNA, 25 bp, Homo sapien
tgttggtaaccggctgggggtcaca

SEQ ID NO: 1666377 - DNA, 25 bp, Homo sapien
tctgttggtaaccggctgggggtca

SEQ ID NO: 1666378 - DNA, 25 bp, Homo sapien
aggtggttctgttggtaaccggctg

SEQ ID NO: 1666379 - DNA, 25 bp, Homo sapien
ttggtaaccggctgggggtcacaga

SEQ ID NO: 1666380 - DNA, 25 bp, Homo sapien
tgtacagagcaaattggtcaaagcc

SEQ ID NO: 1666381 - DNA, 25 bp, Homo sapien
tctctcgggattcttgtagggcgca

SEQ ID NO: 1666382 - DNA, 25 bp, Homo sapien
caaagccataccgagtctgacactg

SEQ ID NO: 1666383 - DNA, 25 bp, Homo sapien
caccgtgatgatgggaaaactagcc

SEQ ID NO: 1666384 - DNA, 25 bp, Homo sapien
ccgggatgaagaggactgcctgatc

SEQ ID NO: 1666385 - DNA, 25 bp, Homo sapien
tggcaccggagggtcactggcttct

SEQ ID NO: 1666386 - DNA, 25 bp, Homo sapien
agcggtagcgtccagccagacttct

SEQ ID NO: 1666387 - DNA, 25 bp, Homo sapien
cagaggcttccgttctggtaggagc

SEQ ID NO: 1666388 - DNA, 25 bp, Homo sapien
tggagggagggcttggggagcggtc

SEQ ID NO: 1666389 - DNA, 25 bp, Homo sapien
ctggagggagggcttggggagcggt

SEQ ID NO: 1666390 - DNA, 25 bp, Homo sapien
gctggcacacgccccagacacagcc

SEQ ID NO: 1666391 - DNA, 25 bp, Homo sapien
cgctggcacacgccccagacacagc

SEQ ID NO: 1666392 - DNA, 25 bp, Homo sapien
tttgtaggtttccatgcgacgctgt

SEQ ID NO: 1666393 - DNA, 25 bp, Homo sapien
aggtttccatgcgacgctgtaccat

SEQ ID NO: 1666394 - DNA, 25 bp, Homo sapien
gtaggtttccatgcgacgctgtacc

SEQ ID NO: 1666395 - DNA, 25 bp, Homo sapien
tgtaggtttccatgcgacgctgtac

SEQ ID NO: 1666396 - DNA, 25 bp, Homo sapien
agacagaagagggcggtcggggatg

SEQ ID NO: 1666397 - DNA, 25 bp, Homo sapien
acagaagagggcggtcggggatgga

SEQ ID NO: 1666398 - DNA, 25 bp, Homo sapien
ggttcctcagccctgtcctgagctc

SEQ ID NO: 1666399 - DNA, 25 bp, Homo sapien
gttcctcagccctgtcctgagctct

SEQ ID NO: 1666400 - DNA, 25 bp, Homo sapien
ggtatatacacacaaggtaatatca

SEQ ID NO: 1666401 - DNA, 25 bp, Homo sapien
attagctgggcgttaaattagccgg

SEQ ID NO: 1666402 - DNA, 25 bp, Homo sapien
ggtaatatcaaccagccttaactaa

SEQ ID NO: 1666403 - DNA, 25 bp, Homo sapien
tcaaccagccttaactaaaagaata

SEQ ID NO: 1666404 - DNA, 25 bp, Homo sapien
gttgatatctaaaaacctccctgcc

SEQ ID NO: 1666405 - DNA, 25 bp, Homo sapien
tatgtgcacttacaggtggttaaaa

SEQ ID NO: 1666406 - DNA, 25 bp, Homo sapien
cggccagtgccgttgacttgtatgt

SEQ ID NO: 1666407 - DNA, 25 bp, Homo sapien
gaacgagtggtttcatgcttatccc

SEQ ID NO: 1666408 - DNA, 25 bp, Homo sapien
tttggagaagcgctcagacgcgaca

SEQ ID NO: 1666409 - DNA, 25 bp, Homo sapien
tacgttgcctctgaatcacgccagg

SEQ ID NO: 1666410 - DNA, 25 bp, Homo sapien
gatgatgtaactgtcaccccgggtg

SEQ ID NO: 1666411 - DNA, 25 bp, Homo sapien
tatcaaactcaaacgctaggagggc

SEQ ID NO: 1666412 - DNA, 25 bp, Homo sapien
agcacacagcaagctcacgcacgtg

SEQ ID NO: 1666413 - DNA, 25 bp, Homo sapien
tatttacaccctggagtggtccgct

SEQ ID NO: 1666414 - DNA, 25 bp, Homo sapien
cctcttgggctgaacctgtaacttg

SEQ ID NO: 1666415 - DNA, 25 bp, Homo sapien
cgcacgtggttgttggtgtgattct

SEQ ID NO: 1666416 - DNA, 25 bp, Homo sapien
cattcacccatgcacagaggaaaaa

SEQ ID NO: 1666417 - DNA, 25 bp, Homo sapien
ttgttcagctcatgggcattcaccc

SEQ ID NO: 1666418 - DNA, 25 bp, Homo sapien
gccctggtgataaactgatgccttg

SEQ ID NO: 1666419 - DNA, 25 bp, Homo sapien
aagccatgagttgcctttgttcagc

SEQ ID NO: 1666420 - DNA, 25 bp, Homo sapien
tcgctgtaccacaccatcatgggag

SEQ ID NO: 1666421 - DNA, 25 bp, Homo sapien
catgccatagccagacaacagctcg

SEQ ID NO: 1666422 - DNA, 25 bp, Homo sapien
gggacccaagaatccaccaagtgtc

SEQ ID NO: 1666423 - DNA, 25 bp, Homo sapien
tcctgacgtggcctgcaagtgcacg

SEQ ID NO: 1666424 - DNA, 25 bp, Homo sapien
tcctgggtctcccggctcaggtagt

SEQ ID NO: 1666425 - DNA, 25 bp, Homo sapien
tgtcctcggtctggaggcgccatcc

SEQ ID NO: 1666426 - DNA, 25 bp, Homo sapien
gaagctgcgggcatggcggacagct

SEQ ID NO: 1666427 - DNA, 25 bp, Homo sapien
gcgggcatggcggacagctgtcctc

SEQ ID NO: 1666428 - DNA, 25 bp, Homo sapien
cagctcggggctcttgaccagcagc

SEQ ID NO: 1666429 - DNA, 25 bp, Homo sapien
agtactttccggaaacatccgccag

SEQ ID NO: 1666430 - DNA, 25 bp, Homo sapien
tgagtccatcgaagtactttccgga

SEQ ID NO: 1666431 - DNA, 25 bp, Homo sapien
gggccttctgtttgagtccatcgaa

SEQ ID NO: 1666432 - DNA, 25 bp, Homo sapien
gcatttagtccacactcgctcagag

SEQ ID NO: 1666433 - DNA, 25 bp, Homo sapien
acagggcatttagtccacactcgct

SEQ ID NO: 1666434 - DNA, 25 bp, Homo sapien
gcaatcagcccacagggcatttagt

SEQ ID NO: 1666435 - DNA, 25 bp, Homo sapien
gtccacactcgctcagagagaagga

SEQ ID NO: 1666436 - DNA, 25 bp, Homo sapien
cttgaacctgggaggtggaagttgc

SEQ ID NO: 1666437 - DNA, 25 bp, Homo sapien
cagtgagtggagatcatgccattgt

SEQ ID NO: 1666438 - DNA, 25 bp, Homo sapien
cagctacttggagacaggagaatcg

SEQ ID NO: 1666439 - DNA, 25 bp, Homo sapien
cccagctacttggagacaggagaat

SEQ ID NO: 1666440 - DNA, 25 bp, Homo sapien
aggtgagtcctattaaggcctgcac

SEQ ID NO: 1666441 - DNA, 25 bp, Homo sapien
aacaggctcagaggggtaacagctc

SEQ ID NO: 1666442 - DNA, 25 bp, Homo sapien
taaggcctgcactctgcagatgaag

SEQ ID NO: 1666443 - DNA, 25 bp, Homo sapien
tcagaggggtaacagctcttcccca

SEQ ID NO: 1666444 - DNA, 25 bp, Homo sapien
tctgtgcctcagaagacgtaggcga

SEQ ID NO: 1666445 - DNA, 25 bp, Homo sapien
ggtggagggctccacgtggagaccc

SEQ ID NO: 1666446 - DNA, 25 bp, Homo sapien
caggtcaacggaggaaagggacctg

SEQ ID NO: 1666447 - DNA, 25 bp, Homo sapien
gagacacggttttctcatccgccag

SEQ ID NO: 1666448 - DNA, 25 bp, Homo sapien
tgcagggcgttgacagtcacaccag

SEQ ID NO: 1666449 - DNA, 25 bp, Homo sapien
aaggtggagccatggatgcccgtgt

SEQ ID NO: 1666450 - DNA, 25 bp, Homo sapien
ggatgcccgtgtgtctgcccagctc

SEQ ID NO: 1666451 - DNA, 25 bp, Homo sapien
agggcgttgacagtcacaccagagc

SEQ ID NO: 1666452 - DNA, 25 bp, Homo sapien
gaaggacatctgatccaggcagact

SEQ ID NO: 1666453 - DNA, 25 bp, Homo sapien
tcctcagaagaacgatcgattagtg

SEQ ID NO: 1666454 - DNA, 25 bp, Homo sapien
ggcagactagaccacctgggatgaa

SEQ ID NO: 1666455 - DNA, 25 bp, Homo sapien
tctgttctggatccaccgtttggcc

SEQ ID NO: 1666456 - DNA, 25 bp, Homo sapien
cgtctgccagttcaagtcgtcaaag

SEQ ID NO: 1666457 - DNA, 25 bp, Homo sapien
gtcgtcaaagtctatgtgcccagca

SEQ ID NO: 1666458 - DNA, 25 bp, Homo sapien
ggtgttatacttcctcgtctgccag

SEQ ID NO: 1666459 - DNA, 25 bp, Homo sapien
cagcagcaagtttgtcaagagaaag

SEQ ID NO: 1666460 - DNA, 25 bp, Homo sapien
catcacacccgcgttgttgattaga

SEQ ID NO: 1666461 - DNA, 25 bp, Homo sapien
ccaggtggttaacgccaaactgcat

SEQ ID NO: 1666462 - DNA, 25 bp, Homo sapien
cgaagccgtcctcggtggtccagtg

SEQ ID NO: 1666463 - DNA, 25 bp, Homo sapien
gattagaatgtccactcgctcctcc

SEQ ID NO: 1666464 - DNA, 25 bp, Homo sapien
cacgtctgagggtgtaagccactgg

SEQ ID NO: 1666465 - DNA, 25 bp, Homo sapien
gctcgggttccgtaacaaagtgcca

SEQ ID NO: 1666466 - DNA, 25 bp, Homo sapien
taaaatgcgctgaaccacagggcct

SEQ ID NO: 1666467 - DNA, 25 bp, Homo sapien
ggattatggcccgtctcacaggtca

SEQ ID NO: 1666468 - DNA, 25 bp, Homo sapien
gatcgtgaattaggtgtccagcgcg

SEQ ID NO: 1666469 - DNA, 25 bp, Homo sapien
ggtgtccagcgcgtaacacacagac

SEQ ID NO: 1666470 - DNA, 25 bp, Homo sapien
gaattcataatgctcccgaagtggt

SEQ ID NO: 1666471 - DNA, 25 bp, Homo sapien
cacccgtcatgaataccagctctgg

SEQ ID NO: 1666472 - DNA, 25 bp, Homo sapien
gaatttctgagcttaggcaattcgc

SEQ ID NO: 1666473 - DNA, 25 bp, Homo sapien
atttctgagcttaggcaattcgccc

SEQ ID NO: 1666474 - DNA, 25 bp, Homo sapien
tcgaatttctgagcttaggcaattc

SEQ ID NO: 1666475 - DNA, 25 bp, Homo sapien
aatttctgagcttaggcaattcgcc

SEQ ID NO: 1666476 - DNA, 25 bp, Homo sapien
gacatggtgattgagggtctccccg

SEQ ID NO: 1666477 - DNA, 25 bp, Homo sapien
cttcaatgatctttgctgcaaactc

SEQ ID NO: 1666478 - DNA, 25 bp, Homo sapien
ccaagtccaggtgccgggcgttgac

SEQ ID NO: 1666479 - DNA, 25 bp, Homo sapien
ctcggatagacttgagggaagccaa

SEQ ID NO: 1666480 - DNA, 25 bp, Homo sapien
ctcggcaggccaggatgatgttgcc

SEQ ID NO: 1666481 - DNA, 25 bp, Homo sapien
cggcaggccaggatgatgttgcctc

SEQ ID NO: 1666482 - DNA, 25 bp, Homo sapien
tcggcaggccaggatgatgttgcct

SEQ ID NO: 1666483 - DNA, 25 bp, Homo sapien
gatgaccgtcttcccagggatggtg

SEQ ID NO: 1666484 - DNA, 25 bp, Homo sapien
gggcaagccccaccggtgacatagt

SEQ ID NO: 1666485 - DNA, 25 bp, Homo sapien
ccgatgcctgtgttggcacccgtca

SEQ ID NO: 1666486 - DNA, 25 bp, Homo sapien
ttccaaggcggtctgcttcccgatg

SEQ ID NO: 1666487 - DNA, 25 bp, Homo sapien
accgtgcccagcgccgacagcggca

SEQ ID NO: 1666488 - DNA, 25 bp, Homo sapien
ctaccgtgcccagcgccgacagcgg

SEQ ID NO: 1666489 - DNA, 25 bp, Homo sapien
ccgtgcccagcgccgacagcggcag

SEQ ID NO: 1666490 - DNA, 25 bp, Homo sapien
acggcggcgcctgctaccgtgccca

SEQ ID NO: 1666491 - DNA, 25 bp, Homo sapien
ggggtcggcgcggagcttgctgcac

SEQ ID NO: 1666492 - DNA, 25 bp, Homo sapien
ctccgaggaagagcgcgcgacgcag

SEQ ID NO: 1666493 - DNA, 25 bp, Homo sapien
cgcgtccggaactgggctgcgaggg

SEQ ID NO: 1666494 - DNA, 25 bp, Homo sapien
cagccgcctgggtagctccgaggaa

SEQ ID NO: 1666495 - DNA, 25 bp, Homo sapien
tgggattggtggtttcaggagcctg

SEQ ID NO: 1666496 - DNA, 25 bp, Homo sapien
gggcctatggtttgttcgaatgacg

SEQ ID NO: 1666497 - DNA, 25 bp, Homo sapien
cacacttgccgcagcgtataaggcg

SEQ ID NO: 1666498 - DNA, 25 bp, Homo sapien
gacctatgagcatcggtcctgagcg

SEQ ID NO: 1666499 - DNA, 25 bp, Homo sapien
gagtgaaataggttcgaatcccacc

SEQ ID NO: 1666500 - DNA, 25 bp, Homo sapien
tcacagcgagtgtatctgatcacca

SEQ ID NO: 1666501 - DNA, 25 bp, Homo sapien
ggatctagtagcctgtgggtaccca

SEQ ID NO: 1666502 - DNA, 25 bp, Homo sapien
gccctgcacagagatatcttccctg

SEQ ID NO: 1666503 - DNA, 25 bp, Homo sapien
catcttcttatatgagccctgccat

SEQ ID NO: 1666504 - DNA, 25 bp, Homo sapien
agaattcaacccaatctaactagga

SEQ ID NO: 1666505 - DNA, 25 bp, Homo sapien
agaccttagtcaatggccgggcacg

SEQ ID NO: 1666506 - DNA, 25 bp, Homo sapien
gagccctgccataatggagattata

SEQ ID NO: 1666507 - DNA, 25 bp, Homo sapien
gccgagattgccctactgcattcca

SEQ ID NO: 1666508 - DNA, 25 bp, Homo sapien
gagccgagattgccctactgcattc

SEQ ID NO: 1666509 - DNA, 25 bp, Homo sapien
ccgaagcaggagcatcacttgaact

SEQ ID NO: 1666510 - DNA, 25 bp, Homo sapien
ctcgggaggtggaggttgcagtgag

SEQ ID NO: 1666511 - DNA, 25 bp, Homo sapien
taccgctgaagagtgttgagccaag

SEQ ID NO: 1666512 - DNA, 25 bp, Homo sapien
ggcgggagccatcagtaaaaggacc

SEQ ID NO: 1666513 - DNA, 25 bp, Homo sapien
tgagcagacaccacgcaaacaggtg

SEQ ID NO: 1666514 - DNA, 25 bp, Homo sapien
catgtgagccggcaagatttccctc

SEQ ID NO: 1666515 - DNA, 25 bp, Homo sapien
cagctgggaaggggacccgcctggg

SEQ ID NO: 1666516 - DNA, 25 bp, Homo sapien
ttcagctgggaaggggacccgcctg

SEQ ID NO: 1666517 - DNA, 25 bp, Homo sapien
tcagctgggaaggggacccgcctgg

SEQ ID NO: 1666518 - DNA, 25 bp, Homo sapien
cctctaggctgctacggtcactgct

SEQ ID NO: 1666519 - DNA, 25 bp, Homo sapien
ccattagagtaagcattcggccacc

SEQ ID NO: 1666520 - DNA, 25 bp, Homo sapien
tgggaactctagacactcagggatg

SEQ ID NO: 1666521 - DNA, 25 bp, Homo sapien
tccctcgtcgtacacttagagctgc

SEQ ID NO: 1666522 - DNA, 25 bp, Homo sapien
taggacatcctgaaccacgtgttcg

SEQ ID NO: 1666523 - DNA, 25 bp, Homo sapien
ttgtatcgaggctgcagaagtcggc

SEQ ID NO: 1666524 - DNA, 25 bp, Homo sapien
tataggtgctcaggttcagggcttc

SEQ ID NO: 1666525 - DNA, 25 bp, Homo sapien
tggttttggaactcgggagccctga

SEQ ID NO: 1666526 - DNA, 25 bp, Homo sapien
gacagtctacggaaagcgctagcag

SEQ ID NO: 1666527 - DNA, 25 bp, Homo sapien
ccatcccggtggacagacttaacga

SEQ ID NO: 1666528 - DNA, 25 bp, Homo sapien
gcattgtaatatgcggcccagccta

SEQ ID NO: 1666529 - DNA, 25 bp, Homo sapien
tgaaggatggccaatctgctccggc

SEQ ID NO: 1666530 - DNA, 25 bp, Homo sapien
gatccttgcacttcttggtcctcag

SEQ ID NO: 1666531 - DNA, 25 bp, Homo sapien
tgcacatggaccctatatacaggcc

SEQ ID NO: 1666532 - DNA, 25 bp, Homo sapien
ggctggcgggactcttggcacattc

SEQ ID NO: 1666533 - DNA, 25 bp, Homo sapien
tggtgcctgtgctttatctcgaaaa

SEQ ID NO: 1666534 - DNA, 25 bp, Homo sapien
gatgacgcggatcaacgctgcattc

SEQ ID NO: 1666535 - DNA, 25 bp, Homo sapien
ttgtcagcgcggaggtcagacaggg

SEQ ID NO: 1666536 - DNA, 25 bp, Homo sapien
tccttgaggcgctggttgtcagcgc

SEQ ID NO: 1666537 - DNA, 25 bp, Homo sapien
gagtttgctgatgacgcggatcaac

SEQ ID NO: 1666538 - DNA, 25 bp, Homo sapien
tctgcccacagcccccacagccccc

SEQ ID NO: 1666539 - DNA, 25 bp, Homo sapien
cctctgcccacagcccccacagccc

SEQ ID NO: 1666540 - DNA, 25 bp, Homo sapien
tgcccacagcccccacagcccccac

SEQ ID NO: 1666541 - DNA, 25 bp, Homo sapien
cctcggccctctgcccacagccccc

SEQ ID NO: 1666542 - DNA, 25 bp, Homo sapien
tgcggccttgcgttccagggccctg

SEQ ID NO: 1666543 - DNA, 25 bp, Homo sapien
gctctgcggccttgcgttccagggc

SEQ ID NO: 1666544 - DNA, 25 bp, Homo sapien
tcctccagctctgcggccttgcgtt

SEQ ID NO: 1666545 - DNA, 25 bp, Homo sapien
tccagctctgcggccttgcgttcca

SEQ ID NO: 1666546 - DNA, 25 bp, Homo sapien
tccaaacttagggatgtgaggctgg

SEQ ID NO: 1666547 - DNA, 25 bp, Homo sapien
aagggcaatgtggctcccttggtcc

SEQ ID NO: 1666548 - DNA, 25 bp, Homo sapien
gccagctgggaagggcaatgtggct

SEQ ID NO: 1666549 - DNA, 25 bp, Homo sapien
ctcccttggtccaaacttagggatg

SEQ ID NO: 1666550 - DNA, 25 bp, Homo sapien
tggcctctcagcgaagcgttcttgc

SEQ ID NO: 1666551 - DNA, 25 bp, Homo sapien
ggctggcctctcagcgaagcgttct

SEQ ID NO: 1666552 - DNA, 25 bp, Homo sapien
gggctggcctctcagcgaagcgttc

SEQ ID NO: 1666553 - DNA, 25 bp, Homo sapien
gctggcctctcagcgaagcgttctt

SEQ ID NO: 1666554 - DNA, 25 bp, Homo sapien
gccagccgcagcgtggtctcggtca

SEQ ID NO: 1666555 - DNA, 25 bp, Homo sapien
gaagccgctcgttctccctgcgcag

SEQ ID NO: 1666556 - DNA, 25 bp, Homo sapien
ccagccgcagcgtggtctcggtcag

SEQ ID NO: 1666557 - DNA, 25 bp, Homo sapien
tcggtcagggcctcgcgaagccgct

SEQ ID NO: 1666558 - DNA, 25 bp, Homo sapien
tcaggtagaggagggtcaggtggag

SEQ ID NO: 1666559 - DNA, 25 bp, Homo sapien
gggtcaggtagaggagggtcaggtg

SEQ ID NO: 1666560 - DNA, 25 bp, Homo sapien
tgggggtcaggtagaggagggtcag

SEQ ID NO: 1666561 - DNA, 25 bp, Homo sapien
gggtcaggtggaggatggggcgatg

SEQ ID NO: 1666562 - DNA, 25 bp, Homo sapien
gccccgacggaggggtgggatcgca

SEQ ID NO: 1666563 - DNA, 25 bp, Homo sapien
agcaggcaaagccccgacggagggg

SEQ ID NO: 1666564 - DNA, 25 bp, Homo sapien
caggcaaagccccgacggaggggtg

SEQ ID NO: 1666565 - DNA, 25 bp, Homo sapien
tcaggttctgggttgaggtcccgct

SEQ ID NO: 1666566 - DNA, 25 bp, Homo sapien
gtcctaaagcctccgtctggctctt

SEQ ID NO: 1666567 - DNA, 25 bp, Homo sapien
gttctgggttgaggtcccgctgcca

SEQ ID NO: 1666568 - DNA, 25 bp, Homo sapien
ctgggttgaggtcccgctgccaccg

SEQ ID NO: 1666569 - DNA, 25 bp, Homo sapien
caggggaggagcgcgcgtcaggggc

SEQ ID NO: 1666570 - DNA, 25 bp, Homo sapien
ggcaggggaggagcgcgcgtcaggg

SEQ ID NO: 1666571 - DNA, 25 bp, Homo sapien
ggggcaggggaggagcgcgcgtcag

SEQ ID NO: 1666572 - DNA, 25 bp, Homo sapien
gggaggagcgcgcgtcaggggccgg

SEQ ID NO: 1666573 - DNA, 25 bp, Homo sapien
tggctgcggtcagccggctccgcct

SEQ ID NO: 1666574 - DNA, 25 bp, Homo sapien
tcctggctgcggtcagccggctccg

SEQ ID NO: 1666575 - DNA, 25 bp, Homo sapien
tggactcctggctgcggtcagccgg

SEQ ID NO: 1666576 - DNA, 25 bp, Homo sapien
gactcctggctgcggtcagccggct

SEQ ID NO: 1666577 - DNA, 25 bp, Homo sapien
accagctcggccccacctgagcccc

SEQ ID NO: 1666578 - DNA, 25 bp, Homo sapien
cagctcggccccacctgagcccctc

SEQ ID NO: 1666579 - DNA, 25 bp, Homo sapien
gcaccagctcggccccacctgagcc

SEQ ID NO: 1666580 - DNA, 25 bp, Homo sapien
tgcaccagctcggccccacctgagc

SEQ ID NO: 1666581 - DNA, 25 bp, Homo sapien
tttccgaccttgcggtgctccctgg

SEQ ID NO: 1666582 - DNA, 25 bp, Homo sapien
cctccactcctttccgaccttgcgg

SEQ ID NO: 1666583 - DNA, 25 bp, Homo sapien
cactcctttccgaccttgcggtgct

SEQ ID NO: 1666584 - DNA, 25 bp, Homo sapien
cgaccttgcggtgctccctggccgc

SEQ ID NO: 1666585 - DNA, 25 bp, Homo sapien
ctgcggtcccggaccctgcccgtcg

SEQ ID NO: 1666586 - DNA, 25 bp, Homo sapien
agggctgtcagagttctccactcca

SEQ ID NO: 1666587 - DNA, 25 bp, Homo sapien
agttctccactccagggacgcgggg

SEQ ID NO: 1666588 - DNA, 25 bp, Homo sapien
agagttctccactccagggacgcgg

SEQ ID NO: 1666589 - DNA, 25 bp, Homo sapien
tctgggcagggctgtcagagttctc

SEQ ID NO: 1666590 - DNA, 25 bp, Homo sapien
caggctctgcgccggcttctctgac

SEQ ID NO: 1666591 - DNA, 25 bp, Homo sapien
cggcttctctgactctggggccttc

SEQ ID NO: 1666592 - DNA, 25 bp, Homo sapien
gctctgcgccggcttctctgactct

SEQ ID NO: 1666593 - DNA, 25 bp, Homo sapien
ggcttctctgactctggggccttcc

SEQ ID NO: 1666594 - DNA, 25 bp, Homo sapien
tctgcctccttcaggtctgtaagag

SEQ ID NO: 1666595 - DNA, 25 bp, Homo sapien
gcctccttcaggtctgtaagagtca

SEQ ID NO: 1666596 - DNA, 25 bp, Homo sapien
ccttcaggtctgtaagagtcacacc

SEQ ID NO: 1666597 - DNA, 25 bp, Homo sapien
ctccttcaggtctgtaagagtcaca

SEQ ID NO: 1666598 - DNA, 25 bp, Homo sapien
acctccgagactggcgcatgagacg

SEQ ID NO: 1666599 - DNA, 25 bp, Homo sapien
ttttctctgggattccgactcctca

SEQ ID NO: 1666600 - DNA, 25 bp, Homo sapien
ccgactcctcatcccgcacaggcat

SEQ ID NO: 1666601 - DNA, 25 bp, Homo sapien
catgagacgggagcgagcttttctc

SEQ ID NO: 1666602 - DNA, 25 bp, Homo sapien
ctgtggggacgtttggcttcgctgg

SEQ ID NO: 1666603 - DNA, 25 bp, Homo sapien
ggacgtttggcttcgctggggattc

SEQ ID NO: 1666604 - DNA, 25 bp, Homo sapien
agtccgctgggggcgccgtggaggc

SEQ ID NO: 1666605 - DNA, 25 bp, Homo sapien
tttggcttcgctggggattcaggct

SEQ ID NO: 1666606 - DNA, 25 bp, Homo sapien
aggcgaggagttctccaagcaagga

SEQ ID NO: 1666607 - DNA, 25 bp, Homo sapien
agggaggcgaggagttctccaagca

SEQ ID NO: 1666608 - DNA, 25 bp, Homo sapien
cgaggagttctccaagcaaggagga

SEQ ID NO: 1666609 - DNA, 25 bp, Homo sapien
gcaaggaggaggcttggtgacctca

SEQ ID NO: 1666610 - DNA, 25 bp, Homo sapien
tacccaggtgcattgtgtgccggca

SEQ ID NO: 1666611 - DNA, 25 bp, Homo sapien
tatctgggccacaacagagtcagag

SEQ ID NO: 1666612 - DNA, 25 bp, Homo sapien
tacgcaaccggtcagaaggataaag

SEQ ID NO: 1666613 - DNA, 25 bp, Homo sapien
catgaaaagaccagcacactacgca

SEQ ID NO: 1666614 - DNA, 25 bp, Homo sapien
taattctggcaagacggagctcctt

SEQ ID NO: 1666615 - DNA, 25 bp, Homo sapien
ggacagagggctccggcagcttcgg

SEQ ID NO: 1666616 - DNA, 25 bp, Homo sapien
gggtaattctggcaagacggagctc

SEQ ID NO: 1666617 - DNA, 25 bp, Homo sapien
attctggcaagacggagctccttgg

SEQ ID NO: 1666618 - DNA, 25 bp, Homo sapien
gctgtccgcctttcagggggaccca

SEQ ID NO: 1666619 - DNA, 25 bp, Homo sapien
tcaggaggccaaagcgcctggagaa

SEQ ID NO: 1666620 - DNA, 25 bp, Homo sapien
gagtggaggtcccttccagccagga

SEQ ID NO: 1666621 - DNA, 25 bp, Homo sapien
caccagaactccctgtcttcaggag

SEQ ID NO: 1666622 - DNA, 25 bp, Homo sapien
gagacgccattgagggttctgggtt

SEQ ID NO: 1666623 - DNA, 25 bp, Homo sapien
ggaggagacgccattgagggttctg

SEQ ID NO: 1666624 - DNA, 25 bp, Homo sapien
gaggagacgccattgagggttctgg

SEQ ID NO: 1666625 - DNA, 25 bp, Homo sapien
ggagacgccattgagggttctgggt

SEQ ID NO: 1666626 - DNA, 25 bp, Homo sapien
ctgtgatgtgggaacaccgggcagg

SEQ ID NO: 1666627 - DNA, 25 bp, Homo sapien
agattcagagaacccgacccctcct

SEQ ID NO: 1666628 - DNA, 25 bp, Homo sapien
gatgccagttgcctctagattcaga

SEQ ID NO: 1666629 - DNA, 25 bp, Homo sapien
atgtgggaacaccgggcaggtcaca

SEQ ID NO: 1666630 - DNA, 25 bp, Homo sapien
gggaaatcttctcgcgactgctcag

SEQ ID NO: 1666631 - DNA, 25 bp, Homo sapien
tcttctcgcgactgctcagacgaca

SEQ ID NO: 1666632 - DNA, 25 bp, Homo sapien
gactgctcagacgacacacagagct

SEQ ID NO: 1666633 - DNA, 25 bp, Homo sapien
ctggagggaaatcttctcgcgactg

SEQ ID NO: 1666634 - DNA, 25 bp, Homo sapien
cttctgtgtttgctgctagagggcg

SEQ ID NO: 1666635 - DNA, 25 bp, Homo sapien
gctctgggaagcttctttttggttc

SEQ ID NO: 1666636 - DNA, 25 bp, Homo sapien
ctgtgtttgctgctagagggcgctt

SEQ ID NO: 1666637 - DNA, 25 bp, Homo sapien
tcctggccccggctctgggaagctt

SEQ ID NO: 1666638 - DNA, 25 bp, Homo sapien
cttcacccctaccccgcgcagttcg

SEQ ID NO: 1666639 - DNA, 25 bp, Homo sapien
accccgcgcagttcgcagttcacca

SEQ ID NO: 1666640 - DNA, 25 bp, Homo sapien
ccctaccccgcgcagttcgcagttc

SEQ ID NO: 1666641 - DNA, 25 bp, Homo sapien
ccgcgcagttcgcagttcaccaccg

SEQ ID NO: 1666642 - DNA, 25 bp, Homo sapien
gcagttcaccaccgtcttcgcccct

SEQ ID NO: 1666643 - DNA, 25 bp, Homo sapien
ctgcagttcaccaccgtcttcgccc

SEQ ID NO: 1666644 - DNA, 25 bp, Homo sapien
acaggctcagtacttcctcatcggc

SEQ ID NO: 1666645 - DNA, 25 bp, Homo sapien
cagttcctccaacaggctcagtact

SEQ ID NO: 1666646 - DNA, 25 bp, Homo sapien
atcggccaggtcacagggacgctgc

SEQ ID NO: 1666647 - DNA, 25 bp, Homo sapien
cagtacttcctcatcggccaggtca

SEQ ID NO: 1666648 - DNA, 25 bp, Homo sapien
tccacgccccagtgtgccgctgcgt

SEQ ID NO: 1666649 - DNA, 25 bp, Homo sapien
tgcccccgccatgctcggccagcag

SEQ ID NO: 1666650 - DNA, 25 bp, Homo sapien
gtgccgctgcgtgcaggggagtcca

SEQ ID NO: 1666651 - DNA, 25 bp, Homo sapien
cgcatgggtcagtgagtccatgccc

SEQ ID NO: 1666652 - DNA, 25 bp, Homo sapien
tgggtcgtagccagcctgaaggagc

SEQ ID NO: 1666653 - DNA, 25 bp, Homo sapien
ctgggtcgtagccagcctgaaggag

SEQ ID NO: 1666654 - DNA, 25 bp, Homo sapien
ggtcgtagccagcctgaaggagcaa

SEQ ID NO: 1666655 - DNA, 25 bp, Homo sapien
gtcgtagccagcctgaaggagcaac

SEQ ID NO: 1666656 - DNA, 25 bp, Homo sapien
tcatcacctcaatgtagcccttggc

SEQ ID NO: 1666657 - DNA, 25 bp, Homo sapien
aattcctcttctgcccgcttggctg

SEQ ID NO: 1666658 - DNA, 25 bp, Homo sapien
gcacctcgtgtcatgaaggagcaat

SEQ ID NO: 1666659 - DNA, 25 bp, Homo sapien
ttcagccagcacctcgtgtcatgaa

SEQ ID NO: 1666660 - DNA, 25 bp, Homo sapien
gagaaggaacacaaatctatcaaaa

SEQ ID NO: 1666661 - DNA, 25 bp, Homo sapien
attccctttatgtgaagtgtacaaa

SEQ ID NO: 1666662 - DNA, 25 bp, Homo sapien
tatacctgggaagagatcgcaaggg

SEQ ID NO: 1666663 - DNA, 25 bp, Homo sapien
aagttaaaagctgatgattctatac

SEQ ID NO: 1666664 - DNA, 25 bp, Homo sapien
tcccagaaagacctgcggcagggtt

SEQ ID NO: 1666665 - DNA, 25 bp, Homo sapien
gcaagcccaggactttagaagacat

SEQ ID NO: 1666666 - DNA, 25 bp, Homo sapien
ttctcatcctgtgcgtgtgctgggc

SEQ ID NO: 1666667 - DNA, 25 bp, Homo sapien
gaaagacaatcctaggaagcagggt

SEQ ID NO: 1666668 - DNA, 25 bp, Homo sapien
tcggcgggcgatctccgccttcagc

SEQ ID NO: 1666669 - DNA, 25 bp, Homo sapien
gcgggcgatctccgccttcagcagc

SEQ ID NO: 1666670 - DNA, 25 bp, Homo sapien
ggcgggcgatctccgccttcagcag

SEQ ID NO: 1666671 - DNA, 25 bp, Homo sapien
ctcggcgggcgatctccgccttcag

SEQ ID NO: 1666672 - DNA, 25 bp, Homo sapien
ggcggcgatgttggccccgtggctc

SEQ ID NO: 1666673 - DNA, 25 bp, Homo sapien
tccccgtcactgttgacggcggcga

SEQ ID NO: 1666674 - DNA, 25 bp, Homo sapien
cgtcactgttgacggcggcgatgtt

SEQ ID NO: 1666675 - DNA, 25 bp, Homo sapien
gcaggtccccgtcactgttgacggc

SEQ ID NO: 1666676 - DNA, 25 bp, Homo sapien
ctggtcagggctgagggtccaggcc

SEQ ID NO: 1666677 - DNA, 25 bp, Homo sapien
cctgcccggccctcccttgcctcac

SEQ ID NO: 1666678 - DNA, 25 bp, Homo sapien
ggctggtcagggctgagggtccagg

SEQ ID NO: 1666679 - DNA, 25 bp, Homo sapien
tcagggctgagggtccaggccccca

SEQ ID NO: 1666680 - DNA, 25 bp, Homo sapien
cacctccaggttctcatcaatgcag

SEQ ID NO: 1666681 - DNA, 25 bp, Homo sapien
ggcgatatctaggtagccacaggag

SEQ ID NO: 1666682 - DNA, 25 bp, Homo sapien
tggttcacagtggcgccctgctcca

SEQ ID NO: 1666683 - DNA, 25 bp, Homo sapien
gtgcagtggcgtccagccctcgttg

SEQ ID NO: 1666684 - DNA, 25 bp, Homo sapien
ggggtgggaaacagccgtcagccgc

SEQ ID NO: 1666685 - DNA, 25 bp, Homo sapien
ggtgggaaacagccgtcagccgcac

SEQ ID NO: 1666686 - DNA, 25 bp, Homo sapien
gggtgggaaacagccgtcagccgca

SEQ ID NO: 1666687 - DNA, 25 bp, Homo sapien
atactctgcaggaacgaagccgtgg

SEQ ID NO: 1666688 - DNA, 25 bp, Homo sapien
gggaaaatgacccaacagcctctgg

SEQ ID NO: 1666689 - DNA, 25 bp, Homo sapien
taagatacgcctggttgcccagtgg

SEQ ID NO: 1666690 - DNA, 25 bp, Homo sapien
catggtacctgttagacacggcaaa

SEQ ID NO: 1666691 - DNA, 25 bp, Homo sapien
caaagctgcccatctggaggaggcg

SEQ ID NO: 1666692 - DNA, 25 bp, Homo sapien
gctgcccatctggaggaggcgggag

SEQ ID NO: 1666693 - DNA, 25 bp, Homo sapien
ctctccaaagctgcccatctggagg

SEQ ID NO: 1666694 - DNA, 25 bp, Homo sapien
tccaaagctgcccatctggaggagg

SEQ ID NO: 1666695 - DNA, 25 bp, Homo sapien
aaactcgggctgtgaaggggccgca

SEQ ID NO: 1666696 - DNA, 25 bp, Homo sapien
gaaactcgggctgtgaaggggccgc

SEQ ID NO: 1666697 - DNA, 25 bp, Homo sapien
gcaaggagagcaatgggcctttccc

SEQ ID NO: 1666698 - DNA, 25 bp, Homo sapien
tttcaaggacctgcccagtacaggc

SEQ ID NO: 1666699 - DNA, 25 bp, Homo sapien
gatgaactcggctcgtttatttcca

SEQ ID NO: 1666700 - DNA, 25 bp, Homo sapien
tccacccagttgtcatggcgatagg

SEQ ID NO: 1666701 - DNA, 25 bp, Homo sapien
caagtggttgataaacccacgtggg

SEQ ID NO: 1666702 - DNA, 25 bp, Homo sapien
cacgtaacctgagaagggaatccct

SEQ ID NO: 1666703 - DNA, 25 bp, Homo sapien
caggtaaaactgacgcacggaggaa

SEQ ID NO: 1666704 - DNA, 25 bp, Homo sapien
taggacgcaccattctcacaaaggg

SEQ ID NO: 1666705 - DNA, 25 bp, Homo sapien
taccccgaagagtgagtttgccaag

SEQ ID NO: 1666706 - DNA, 25 bp, Homo sapien
agacggccgcgtcagagcagctcag

SEQ ID NO: 1666707 - DNA, 25 bp, Homo sapien
tgggagagggtagcgcagggtggcc

SEQ ID NO: 1666708 - DNA, 25 bp, Homo sapien
cagacggccgcgtcagagcagctca

SEQ ID NO: 1666709 - DNA, 25 bp, Homo sapien
actgagaaccgggcaggtcacgcat

SEQ ID NO: 1666710 - DNA, 25 bp, Homo sapien
gcagggcgctgataccgtcggcgtt

SEQ ID NO: 1666711 - DNA, 25 bp, Homo sapien
atcagacgcgcctcgtccaggtcgc

SEQ ID NO: 1666712 - DNA, 25 bp, Homo sapien
tggtggagtccagcacggcgcgggc

SEQ ID NO: 1666713 - DNA, 25 bp, Homo sapien
ggcggcgcgctcgaagcggacggtg

SEQ ID NO: 1666714 - DNA, 25 bp, Homo sapien
agccgccgggccatcctctccggac

SEQ ID NO: 1666715 - DNA, 25 bp, Homo sapien
gccagccgccgggccatcctctccg

SEQ ID NO: 1666716 - DNA, 25 bp, Homo sapien
ccgccgggccatcctctccggacat

SEQ ID NO: 1666717 - DNA, 25 bp, Homo sapien
cagccgccgggccatcctctccgga

SEQ ID NO: 1666718 - DNA, 25 bp, Homo sapien
gcccgcccgcccagcgagcgagcga

SEQ ID NO: 1666719 - DNA, 25 bp, Homo sapien
cgcccgcccgcccagcgagcgagcg

SEQ ID NO: 1666720 - DNA, 25 bp, Homo sapien
cgcaccgcccgcccgcccagcgagc

SEQ ID NO: 1666721 - DNA, 25 bp, Homo sapien
accgcccgcccgcccagcgagcgag

SEQ ID NO: 1666722 - DNA, 25 bp, Homo sapien
tcatttgtgcatcatatctggagga

SEQ ID NO: 1666723 - DNA, 25 bp, Homo sapien
catttgtgcatcatatctggaggag

SEQ ID NO: 1666724 - DNA, 25 bp, Homo sapien
gaaccatctttatggtgcagactaa

SEQ ID NO: 1666725 - DNA, 25 bp, Homo sapien
gcagttccaaggttaagcaccaaca

SEQ ID NO: 1666726 - DNA, 25 bp, Homo sapien
tgtggatgttctaacttcacctgct

SEQ ID NO: 1666727 - DNA, 25 bp, Homo sapien
ctgttaccattgagagcaaagagca

SEQ ID NO: 1666728 - DNA, 25 bp, Homo sapien
tgattattggtgacactctttcaag

SEQ ID NO: 1666729 - DNA, 25 bp, Homo sapien
taataagaagtcaattaaccaggag

SEQ ID NO: 1666730 - DNA, 25 bp, Homo sapien
agtcaattaaccaggagagaccagc

SEQ ID NO: 1666731 - DNA, 25 bp, Homo sapien
caagtaacttgttggtaataagaag

SEQ ID NO: 1666732 - DNA, 25 bp, Homo sapien
caagctaccgatgggacaaacactc

SEQ ID NO: 1666733 - DNA, 25 bp, Homo sapien
tatttcaagctaccgatgggacaaa

SEQ ID NO: 1666734 - DNA, 25 bp, Homo sapien
gggagcgtttatttcaagctaccga

SEQ ID NO: 1666735 - DNA, 25 bp, Homo sapien
gcgtttatttcaagctaccgatggg

SEQ ID NO: 1666736 - DNA, 25 bp, Homo sapien
ttccagcggcctccaacgcggccct

SEQ ID NO: 1666737 - DNA, 25 bp, Homo sapien
tccagcggcctccaacgcggccctt

SEQ ID NO: 1666738 - DNA, 25 bp, Homo sapien
tttgggggcgagtgcagggtgttca

SEQ ID NO: 1666739 - DNA, 25 bp, Homo sapien
cacctcttttgggttctatgactgg

SEQ ID NO: 1666740 - DNA, 25 bp, Homo sapien
ctcgctgacatgtgggagctgatat

SEQ ID NO: 1666741 - DNA, 25 bp, Homo sapien
gccctcaattcaggaagcccattcc

SEQ ID NO: 1666742 - DNA, 25 bp, Homo sapien
tgatgcggttgtacagcacgttgat

SEQ ID NO: 1666743 - DNA, 25 bp, Homo sapien
aacttctgggcgtggctgatgcggt

SEQ ID NO: 1666744 - DNA, 25 bp, Homo sapien
ggctgatgcggttgtacagcacgtt

SEQ ID NO: 1666745 - DNA, 25 bp, Homo sapien
acttctgggcgtggctgatgcggtt

SEQ ID NO: 1666746 - DNA, 25 bp, Homo sapien
tgctgtttcagcttcgccatcaggt

SEQ ID NO: 1666747 - DNA, 25 bp, Homo sapien
ctggtggatccagtccgacagctcc

SEQ ID NO: 1666748 - DNA, 25 bp, Homo sapien
agctggtggatccagtccgacagct

SEQ ID NO: 1666749 - DNA, 25 bp, Homo sapien
cttcgccatcaggtcgaacttctca

SEQ ID NO: 1666750 - DNA, 25 bp, Homo sapien
agggcaggagggctgtgatggaggc

SEQ ID NO: 1666751 - DNA, 25 bp, Homo sapien
aggagggctgtgatggaggcagcca

SEQ ID NO: 1666752 - DNA, 25 bp, Homo sapien
ggcaggagggctgtgatggaggcag

SEQ ID NO: 1666753 - DNA, 25 bp, Homo sapien
caggagggctgtgatggaggcagcc

SEQ ID NO: 1666754 - DNA, 25 bp, Homo sapien
tttacatgaaccatgtgcacaggaa

SEQ ID NO: 1666755 - DNA, 25 bp, Homo sapien
gcccggccaacaatactttacatga

SEQ ID NO: 1666756 - DNA, 25 bp, Homo sapien
caatactttacatgaaccatgtgca

SEQ ID NO: 1666757 - DNA, 25 bp, Homo sapien
ggccaacaatactttacatgaacca

SEQ ID NO: 1666758 - DNA, 25 bp, Homo sapien
tgttcctcccccatgtagtcaatgt

SEQ ID NO: 1666759 - DNA, 25 bp, Homo sapien
agaggatgcgcaccttcatctcccg

SEQ ID NO: 1666760 - DNA, 25 bp, Homo sapien
ccagaggcttcttacgctcggagag

SEQ ID NO: 1666761 - DNA, 25 bp, Homo sapien
tgccgcttaccacgcttctgttctg

SEQ ID NO: 1666762 - DNA, 25 bp, Homo sapien
gaccaggtagccgccaaaatgggcc

SEQ ID NO: 1666763 - DNA, 25 bp, Homo sapien
tgaccaggtagccgccaaaatgggc

SEQ ID NO: 1666764 - DNA, 25 bp, Homo sapien
ttgaccaggtagccgccaaaatggg

SEQ ID NO: 1666765 - DNA, 25 bp, Homo sapien
cttgaccaggtagccgccaaaatgg

SEQ ID NO: 1666766 - DNA, 25 bp, Homo sapien
tggactcccctgtaggactgaggga

SEQ ID NO: 1666767 - DNA, 25 bp, Homo sapien
ggttaacctcatggactcccctgta

SEQ ID NO: 1666768 - DNA, 25 bp, Homo sapien
tcatggactcccctgtaggactgag

SEQ ID NO: 1666769 - DNA, 25 bp, Homo sapien
taacctcatggactcccctgtagga

SEQ ID NO: 1666770 - DNA, 25 bp, Homo sapien
tgacgttcgcgttccttctcagttc

SEQ ID NO: 1666771 - DNA, 25 bp, Homo sapien
gttgctcggctctctctgaccggcg

SEQ ID NO: 1666772 - DNA, 25 bp, Homo sapien
ctcagttctgaagcgctgttgctcg

SEQ ID NO: 1666773 - DNA, 25 bp, Homo sapien
cgccagcttagcctgacgttcgcgt

SEQ ID NO: 1666774 - DNA, 25 bp, Homo sapien
ccttcttccgctgctcgaaatgtac

SEQ ID NO: 1666775 - DNA, 25 bp, Homo sapien
aatgcgctccttcaaggcaaccagc

SEQ ID NO: 1666776 - DNA, 25 bp, Homo sapien
tgctcgaaatgtacatcgatgagtg

SEQ ID NO: 1666777 - DNA, 25 bp, Homo sapien
atgtacatcgatgagtgtctgcagc

SEQ ID NO: 1666778 - DNA, 25 bp, Homo sapien
gcctgcggaggggtctcttgtcact

SEQ ID NO: 1666779 - DNA, 25 bp, Homo sapien
ggccggcgccttttcatgattgaca

SEQ ID NO: 1666780 - DNA, 25 bp, Homo sapien
aagactagcaactgcgcctgcggag

SEQ ID NO: 1666781 - DNA, 25 bp, Homo sapien
aaggccccttaaagactagcaactg

SEQ ID NO: 1666782 - DNA, 25 bp, Homo sapien
gaagtcaacgcgctccccttctggg

SEQ ID NO: 1666783 - DNA, 25 bp, Homo sapien
cccttctgggatctttggcgggatc

SEQ ID NO: 1666784 - DNA, 25 bp, Homo sapien
agtcaacgcgctccccttctgggat

SEQ ID NO: 1666785 - DNA, 25 bp, Homo sapien
ttggcgggatcaaaggaggcaccac

SEQ ID NO: 1666786 - DNA, 25 bp, Homo sapien
agagaccatgagtggcccgacctcc

SEQ ID NO: 1666787 - DNA, 25 bp, Homo sapien
acagagaccatgagtggcccgacct

SEQ ID NO: 1666788 - DNA, 25 bp, Homo sapien
aaacacagagaccatgagtggcccg

SEQ ID NO: 1666789 - DNA, 25 bp, Homo sapien
acacagagaccatgagtggcccgac

SEQ ID NO: 1666790 - DNA, 25 bp, Homo sapien
gctcctgaacgtggagggtcccagc

SEQ ID NO: 1666791 - DNA, 25 bp, Homo sapien
acctccgggatgtgccgtccagtga

SEQ ID NO: 1666792 - DNA, 25 bp, Homo sapien
cccgggaggctcctgaacgtggagg

SEQ ID NO: 1666793 - DNA, 25 bp, Homo sapien
cacctcccacctccgggatgtgccg

SEQ ID NO: 1666794 - DNA, 25 bp, Homo sapien
tctgtaaagattcctccagactggg

SEQ ID NO: 1666795 - DNA, 25 bp, Homo sapien
cagacaaggttggaggcgaagataa

SEQ ID NO: 1666796 - DNA, 25 bp, Homo sapien
gggtggtgcttctccgcaaacatcc

SEQ ID NO: 1666797 - DNA, 25 bp, Homo sapien
gcaaacatccaacccttctgtaaag

SEQ ID NO: 1666798 - DNA, 25 bp, Homo sapien
ggctctgccaccggctccggctctt

SEQ ID NO: 1666799 - DNA, 25 bp, Homo sapien
gggcacagaagagaaggcgttagga

SEQ ID NO: 1666800 - DNA, 25 bp, Homo sapien
ggcacagaagagaaggcgttaggag

SEQ ID NO: 1666801 - DNA, 25 bp, Homo sapien
tggagatgggggcacagaagagaag

SEQ ID NO: 1666802 - DNA, 25 bp, Homo sapien
tgggggcacagaagagaaggcgtta

SEQ ID NO: 1666803 - DNA, 25 bp, Homo sapien
gcctcggctgcgatgggcacgttcc

SEQ ID NO: 1666804 - DNA, 25 bp, Homo sapien
cagtctctgctggacgggggtccct

SEQ ID NO: 1666805 - DNA, 25 bp, Homo sapien
ggcctcggctgcgatgggcacgttc

SEQ ID NO: 1666806 - DNA, 25 bp, Homo sapien
tctggcctcggctgcgatgggcacg

SEQ ID NO: 1666807 - DNA, 25 bp, Homo sapien
cccttccccgccaaagtgccacact

SEQ ID NO: 1666808 - DNA, 25 bp, Homo sapien
ttccccgccaaagtgccacactcct

SEQ ID NO: 1666809 - DNA, 25 bp, Homo sapien
cgccaaagtgccacactcctcgcct

SEQ ID NO: 1666810 - DNA, 25 bp, Homo sapien
aaagtgccacactcctcgcctcccc

SEQ ID NO: 1666811 - DNA, 25 bp, Homo sapien
attcctgctcctcggtgtccgacat

SEQ ID NO: 1666812 - DNA, 25 bp, Homo sapien
tcctcatattcctgctcctcggtgt

SEQ ID NO: 1666813 - DNA, 25 bp, Homo sapien
tcatattcctgctcctcggtgtccg

SEQ ID NO: 1666814 - DNA, 25 bp, Homo sapien
atattcctgctcctcggtgtccgac

SEQ ID NO: 1666815 - DNA, 25 bp, Homo sapien
aggagggggcgacctagactcctgg

SEQ ID NO: 1666816 - DNA, 25 bp, Homo sapien
aaggagggggcgacctagactcctg

SEQ ID NO: 1666817 - DNA, 25 bp, Homo sapien
caaggagggggcgacctagactcct

SEQ ID NO: 1666818 - DNA, 25 bp, Homo sapien
taggtgtggtcctggcacagccagg

SEQ ID NO: 1666819 - DNA, 25 bp, Homo sapien
cttggtaggtgtggtcctggcacag

SEQ ID NO: 1666820 - DNA, 25 bp, Homo sapien
tggtaggtgtggtcctggcacagcc

SEQ ID NO: 1666821 - DNA, 25 bp, Homo sapien
gtgtggtcctggcacagccaggagg

SEQ ID NO: 1666822 - DNA, 25 bp, Homo sapien
ctctgcaccatttctccacacccga

SEQ ID NO: 1666823 - DNA, 25 bp, Homo sapien
ctgcaccatttctccacacccgaca

SEQ ID NO: 1666824 - DNA, 25 bp, Homo sapien
tgcaccatttctccacacccgacat

SEQ ID NO: 1666825 - DNA, 25 bp, Homo sapien
tctgcaccatttctccacacccgac

SEQ ID NO: 1666826 - DNA, 25 bp, Homo sapien
ttcctttgctcaaacacaagcctgg

SEQ ID NO: 1666827 - DNA, 25 bp, Homo sapien
gagggcactgaagctccggggagtt

SEQ ID NO: 1666828 - DNA, 25 bp, Homo sapien
atcttgaggctgagccttgctgagg

SEQ ID NO: 1666829 - DNA, 25 bp, Homo sapien
agggcactgaagctccggggagttt

SEQ ID NO: 1666830 - DNA, 25 bp, Homo sapien
ggtggtctcggtctttgtgtttctg

SEQ ID NO: 1666831 - DNA, 25 bp, Homo sapien
ctggtggtctcggtctttgtgtttc

SEQ ID NO: 1666832 - DNA, 25 bp, Homo sapien
tctctggtggtctcggtctttgtgt

SEQ ID NO: 1666833 - DNA, 25 bp, Homo sapien
tctgtctctggtggtctcggtcttt

SEQ ID NO: 1666834 - DNA, 25 bp, Homo sapien
gctcagagagaagctttattcctca

SEQ ID NO: 1666835 - DNA, 25 bp, Homo sapien
cagagagaagctttattcctcaggg

SEQ ID NO: 1666836 - DNA, 25 bp, Homo sapien
ctcagagagaagctttattcctcag

SEQ ID NO: 1666837 - DNA, 25 bp, Homo sapien
tcagagagaagctttattcctcagg

SEQ ID NO: 1666838 - DNA, 25 bp, Homo sapien
ccctcctcagggcaggggcagtagg

SEQ ID NO: 1666839 - DNA, 25 bp, Homo sapien
cagggcaggggcagtaggcaggaag

SEQ ID NO: 1666840 - DNA, 25 bp, Homo sapien
ctcagggcaggggcagtaggcagga

SEQ ID NO: 1666841 - DNA, 25 bp, Homo sapien
gggcaggggcagtaggcaggaaggc

SEQ ID NO: 1666842 - DNA, 25 bp, Homo sapien
tttcttgcggccctccattccactc

SEQ ID NO: 1666843 - DNA, 25 bp, Homo sapien
cagtgcatcgatgttcttgcgccag

SEQ ID NO: 1666844 - DNA, 25 bp, Homo sapien
tccattccactcagtgcatcgatgt

SEQ ID NO: 1666845 - DNA, 25 bp, Homo sapien
catcgatgttcttgcgccagtctcc

SEQ ID NO: 1666846 - DNA, 25 bp, Homo sapien
agcagcgcctgcatcatggcatctg

SEQ ID NO: 1666847 - DNA, 25 bp, Homo sapien
cagagatcctcactctccgcagggt

SEQ ID NO: 1666848 - DNA, 25 bp, Homo sapien
aacttgcctcgaaggtcaaagatct

SEQ ID NO: 1666849 - DNA, 25 bp, Homo sapien
cagggtgggccgcttaaacttgcct

SEQ ID NO: 1666850 - DNA, 25 bp, Homo sapien
taccagtctcttcccggcttaggct

SEQ ID NO: 1666851 - DNA, 25 bp, Homo sapien
tccatcctacactccttttttattc

SEQ ID NO: 1666852 - DNA, 25 bp, Homo sapien
cttccagtaccgaggccttaccagt

SEQ ID NO: 1666853 - DNA, 25 bp, Homo sapien
taggcttctaatcctggaactgaat

SEQ ID NO: 1666854 - DNA, 25 bp, Homo sapien
aaggtacccgagctgcccatgcgtc

SEQ ID NO: 1666855 - DNA, 25 bp, Homo sapien
cgaaggtacccgagctgcccatgcg

SEQ ID NO: 1666856 - DNA, 25 bp, Homo sapien
cccgaaggtacccgagctgcccatg

SEQ ID NO: 1666857 - DNA, 25 bp, Homo sapien
ggtacccgagctgcccatgcgtccc

SEQ ID NO: 1666858 - DNA, 25 bp, Homo sapien
gcctctatgtcgtatctctcttcat

SEQ ID NO: 1666859 - DNA, 25 bp, Homo sapien
atccaccttgtccacacgggcgtgg

SEQ ID NO: 1666860 - DNA, 25 bp, Homo sapien
ggtgacttttgcctctatgtcgtat

SEQ ID NO: 1666861 - DNA, 25 bp, Homo sapien
gggcgtggagctgtcggcacaagtc

SEQ ID NO: 1666862 - DNA, 25 bp, Homo sapien
cagcccggccaactccagcggctgg

SEQ ID NO: 1666863 - DNA, 25 bp, Homo sapien
tggcagcgggtgctcagagcgcgcc

SEQ ID NO: 1666864 - DNA, 25 bp, Homo sapien
gcagcgggtgctcagagcgcgcccc

SEQ ID NO: 1666865 - DNA, 25 bp, Homo sapien
ctggcagcgggtgctcagagcgcgc

SEQ ID NO: 1666866 - DNA, 25 bp, Homo sapien
aggcgtggggaaccgcctctgccct

SEQ ID NO: 1666867 - DNA, 25 bp, Homo sapien
ccagtttggtctccactgttccaag

SEQ ID NO: 1666868 - DNA, 25 bp, Homo sapien
ctgcccttctaaaccctccagtttg

SEQ ID NO: 1666869 - DNA, 25 bp, Homo sapien
ggcttcaggataaagaccaggcgtg

SEQ ID NO: 1666870 - DNA, 25 bp, Homo sapien
agctgcaattttctcgaggcggaga

SEQ ID NO: 1666871 - DNA, 25 bp, Homo sapien
caattttctcgaggcggagatctta

SEQ ID NO: 1666872 - DNA, 25 bp, Homo sapien
ttctcgaggcggagatcttagattt

SEQ ID NO: 1666873 - DNA, 25 bp, Homo sapien
tgcaattttctcgaggcggagatct

SEQ ID NO: 1666874 - DNA, 25 bp, Homo sapien
atcatggagggggattcggagacga

SEQ ID NO: 1666875 - DNA, 25 bp, Homo sapien
aaggatcatggagggggattcggag

SEQ ID NO: 1666876 - DNA, 25 bp, Homo sapien
ggatcatggagggggattcggagac

SEQ ID NO: 1666877 - DNA, 25 bp, Homo sapien
ggaaggatcatggagggggattcgg

SEQ ID NO: 1666878 - DNA, 25 bp, Homo sapien
gctccgtggcataagcgcggtagtt

SEQ ID NO: 1666879 - DNA, 25 bp, Homo sapien
cggtagttggaggagcggcgtctga

SEQ ID NO: 1666880 - DNA, 25 bp, Homo sapien
taagcgcggtagttggaggagcggc

SEQ ID NO: 1666881 - DNA, 25 bp, Homo sapien
cttggcgtgcggctccgtggcataa

SEQ ID NO: 1666882 - DNA, 25 bp, Homo sapien
ctggtgcagggcgaggttccctagc

SEQ ID NO: 1666883 - DNA, 25 bp, Homo sapien
cagggtcccagggaccgtcagtctc

SEQ ID NO: 1666884 - DNA, 25 bp, Homo sapien
gcagcggacttagaatggtatcagc

SEQ ID NO: 1666885 - DNA, 25 bp, Homo sapien
tgagactcagtgtcagatcctaggc

SEQ ID NO: 1666886 - DNA, 25 bp, Homo sapien
taaaattgaggactctagcagcgga

SEQ ID NO: 1666887 - DNA, 25 bp, Homo sapien
ttgctttacttgaaccatctgggtg

SEQ ID NO: 1666888 - DNA, 25 bp, Homo sapien
gactccagttttggagtctgactca

SEQ ID NO: 1666889 - DNA, 25 bp, Homo sapien
actccagttttggagtctgactcac

SEQ ID NO: 1666890 - DNA, 25 bp, Homo sapien
tcagactccagttttggagtctgac

SEQ ID NO: 1666891 - DNA, 25 bp, Homo sapien
agactccagttttggagtctgactc

SEQ ID NO: 1666892 - DNA, 25 bp, Homo sapien
agttgggcggagccaaggccccctg

SEQ ID NO: 1666893 - DNA, 25 bp, Homo sapien
gttgggcggagccaaggccccctga

SEQ ID NO: 1666894 - DNA, 25 bp, Homo sapien
ttgggcggagccaaggccccctgag

SEQ ID NO: 1666895 - DNA, 25 bp, Homo sapien
aacctggagactcagagggcagctg

SEQ ID NO: 1666896 - DNA, 25 bp, Homo sapien
ctctgagagtgaacctggagactca

SEQ ID NO: 1666897 - DNA, 25 bp, Homo sapien
tgagagtgaacctggagactcagag

SEQ ID NO: 1666898 - DNA, 25 bp, Homo sapien
agtgaacctggagactcagagggca

SEQ ID NO: 1666899 - DNA, 25 bp, Homo sapien
ggtcaggccctcaagggctgggttg

SEQ ID NO: 1666900 - DNA, 25 bp, Homo sapien
tcaggccctcaagggctgggttgct

SEQ ID NO: 1666901 - DNA, 25 bp, Homo sapien
gcggagttccgggttccacagctgg

SEQ ID NO: 1666902 - DNA, 25 bp, Homo sapien
gagttccgggttccacagctgggac

SEQ ID NO: 1666903 - DNA, 25 bp, Homo sapien
ccccggtctgtggagcaaatccagc

SEQ ID NO: 1666904 - DNA, 25 bp, Homo sapien
acgtgcgaaggtctctgaaggcctg

SEQ ID NO: 1666905 - DNA, 25 bp, Homo sapien
ttgcagaaacgtgcgaaggtctctg

SEQ ID NO: 1666906 - DNA, 25 bp, Homo sapien
gcctggccccggtctgtggagcaaa

SEQ ID NO: 1666907 - DNA, 25 bp, Homo sapien
cgggtgttgaatccctgcagctgct

SEQ ID NO: 1666908 - DNA, 25 bp, Homo sapien
agctgctcctgccgcacgtccacca

SEQ ID NO: 1666909 - DNA, 25 bp, Homo sapien
ccgggtgttgaatccctgcagctgc

SEQ ID NO: 1666910 - DNA, 25 bp, Homo sapien
tgctcctgccgcacgtccaccaggt

SEQ ID NO: 1666911 - DNA, 25 bp, Homo sapien
acaatcaagttccctccgggtgcca

SEQ ID NO: 1666912 - DNA, 25 bp, Homo sapien
agttccctccgggtgccacacaggc

SEQ ID NO: 1666913 - DNA, 25 bp, Homo sapien
aatcaagttccctccgggtgccaca

SEQ ID NO: 1666914 - DNA, 25 bp, Homo sapien
ccacaatcaagttccctccgggtgc

SEQ ID NO: 1666915 - DNA, 25 bp, Homo sapien
tcagctccaaatccggagggaggat

SEQ ID NO: 1666916 - DNA, 25 bp, Homo sapien
attcagctccaaatccggagggagg

SEQ ID NO: 1666917 - DNA, 25 bp, Homo sapien
gattcagctccaaatccggagggag

SEQ ID NO: 1666918 - DNA, 25 bp, Homo sapien
ttcagctccaaatccggagggagga

SEQ ID NO: 1666919 - DNA, 25 bp, Homo sapien
caggaagtggacggtgaaagattcc

SEQ ID NO: 1666920 - DNA, 25 bp, Homo sapien
ctggaatcggccgttgtagcagctc

SEQ ID NO: 1666921 - DNA, 25 bp, Homo sapien
ccgttgtagcagctcttgtggtgga

SEQ ID NO: 1666922 - DNA, 25 bp, Homo sapien
tagaggagctggaatcggccgttgt

SEQ ID NO: 1666923 - DNA, 25 bp, Homo sapien
gctccgggcttccctccgcgtgctg

SEQ ID NO: 1666924 - DNA, 25 bp, Homo sapien
ggcttccctccgcgtgctgctgctc

SEQ ID NO: 1666925 - DNA, 25 bp, Homo sapien
cgggcttccctccgcgtgctgctgc

SEQ ID NO: 1666926 - DNA, 25 bp, Homo sapien
gtcccccccggtggctctcgcgcgc

SEQ ID NO: 1666927 - DNA, 25 bp, Homo sapien
agcagctccgtcacgttgtgttgag

SEQ ID NO: 1666928 - DNA, 25 bp, Homo sapien
cagctccgtcacgttgtgttgagtg

SEQ ID NO: 1666929 - DNA, 25 bp, Homo sapien
gagcagctccgtcacgttgtgttga

SEQ ID NO: 1666930 - DNA, 25 bp, Homo sapien
gctccgtcacgttgtgttgagtgat

SEQ ID NO: 1666931 - DNA, 25 bp, Homo sapien
gtccgcaggaggctctcgtcgtccg

SEQ ID NO: 1666932 - DNA, 25 bp, Homo sapien
ttcgatgccgaaggccacgaagggc

SEQ ID NO: 1666933 - DNA, 25 bp, Homo sapien
gactggctggccgttgctcgtccgc

SEQ ID NO: 1666934 - DNA, 25 bp, Homo sapien
cacgaagggccccgtggcgatgtcc

SEQ ID NO: 1666935 - DNA, 25 bp, Homo sapien
tccggttgggcacatgataggcgct

SEQ ID NO: 1666936 - DNA, 25 bp, Homo sapien
tagctcaggaggcgaccggacgcca

SEQ ID NO: 1666937 - DNA, 25 bp, Homo sapien
aaaggcgacgcctgtgtcccgccag

SEQ ID NO: 1666938 - DNA, 25 bp, Homo sapien
taggcgctggagtccctgagttcaa

SEQ ID NO: 1666939 - DNA, 25 bp, Homo sapien
accgcgccgggcgtcgtagcgggag

SEQ ID NO: 1666940 - DNA, 25 bp, Homo sapien
gcccagaagcggaatacggcctcca

SEQ ID NO: 1666941 - DNA, 25 bp, Homo sapien
ccgcggtcatgcagcttcatgcgca

SEQ ID NO: 1666942 - DNA, 25 bp, Homo sapien
agcccaggtagtggcgcaggcgcga

SEQ ID NO: 1666943 - DNA, 25 bp, Homo sapien
gattctaattgaccctctcttccat

SEQ ID NO: 1666944 - DNA, 25 bp, Homo sapien
tgggagtcggggaactgggattcga

SEQ ID NO: 1666945 - DNA, 25 bp, Homo sapien
ccaggcacgcggtgggacagaggaa

SEQ ID NO: 1666946 - DNA, 25 bp, Homo sapien
gatgcagggagagcggattctaatt

SEQ ID NO: 1666947 - DNA, 25 bp, Homo sapien
cttgagggcgcggaggctgagccag

SEQ ID NO: 1666948 - DNA, 25 bp, Homo sapien
gtgcgccagcaggtcggcctgggca

SEQ ID NO: 1666949 - DNA, 25 bp, Homo sapien
aaggcggccactggcgggcgcagca

SEQ ID NO: 1666950 - DNA, 25 bp, Homo sapien
gtcgggctcggggaccaggtgcgcc

SEQ ID NO: 1666951 - DNA, 25 bp, Homo sapien
gatcagcatgtgtcgggccacagct

SEQ ID NO: 1666952 - DNA, 25 bp, Homo sapien
cttctccggttcctccagggctagg

SEQ ID NO: 1666953 - DNA, 25 bp, Homo sapien
gccacagcttccagattattctcca

SEQ ID NO: 1666954 - DNA, 25 bp, Homo sapien
tgaagatcagcatgtgtcgggccac

SEQ ID NO: 1666955 - DNA, 25 bp, Homo sapien
ctccctcaaggactcgggaatctgg

SEQ ID NO: 1666956 - DNA, 25 bp, Homo sapien
ccctcaaggactcgggaatctgggc

SEQ ID NO: 1666957 - DNA, 25 bp, Homo sapien
tccctcaaggactcgggaatctggg

SEQ ID NO: 1666958 - DNA, 25 bp, Homo sapien
tgtgcactgtatcggcctgggagtc

SEQ ID NO: 1666959 - DNA, 25 bp, Homo sapien
tgcgaggccagaacttcgctcggga

SEQ ID NO: 1666960 - DNA, 25 bp, Homo sapien
gggttgctgtgcactgtatcggcct

SEQ ID NO: 1666961 - DNA, 25 bp, Homo sapien
ttcgctcgggacagggtccgcagca

SEQ ID NO: 1666962 - DNA, 25 bp, Homo sapien
tggcagagcgtccaccgtagcatcc

SEQ ID NO: 1666963 - DNA, 25 bp, Homo sapien
gtggttggcagagcgtccaccgtag

SEQ ID NO: 1666964 - DNA, 25 bp, Homo sapien
gttggcagagcgtccaccgtagcat

SEQ ID NO: 1666965 - DNA, 25 bp, Homo sapien
ggttggcagagcgtccaccgtagca

SEQ ID NO: 1666966 - DNA, 25 bp, Homo sapien
gcaggtccagcgccggggacaggcc

SEQ ID NO: 1666967 - DNA, 25 bp, Homo sapien
cagcgccggggacaggccccaccag

SEQ ID NO: 1666968 - DNA, 25 bp, Homo sapien
caggtccagcgccggggacaggccc

SEQ ID NO: 1666969 - DNA, 25 bp, Homo sapien
tcgcccctttgcctccacatgatac

SEQ ID NO: 1666970 - DNA, 25 bp, Homo sapien
cgcccctcacttctcgcccctttgc

SEQ ID NO: 1666971 - DNA, 25 bp, Homo sapien
acttctcgcccctttgcctccacat

SEQ ID NO: 1666972 - DNA, 25 bp, Homo sapien
cccctcacttctcgcccctttgcct

SEQ ID NO: 1666973 - DNA, 25 bp, Homo sapien
ggacccgcggcactccacaaccgct

SEQ ID NO: 1666974 - DNA, 25 bp, Homo sapien
actgtggacccgcggcactccacaa

SEQ ID NO: 1666975 - DNA, 25 bp, Homo sapien
gtggacccgcggcactccacaaccg

SEQ ID NO: 1666976 - DNA, 25 bp, Homo sapien
gacccgcggcactccacaaccgctg

SEQ ID NO: 1666977 - DNA, 25 bp, Homo sapien
cttttcgaggaatcaagcaatggaa

SEQ ID NO: 1666978 - DNA, 25 bp, Homo sapien
acgcggttgtcatgacgacggcgcc

SEQ ID NO: 1666979 - DNA, 25 bp, Homo sapien
agagggcgtgtggacgcggttgtca

SEQ ID NO: 1666980 - DNA, 25 bp, Homo sapien
gagaagagggcgtgtggacgcggtt

SEQ ID NO: 1666981 - DNA, 25 bp, Homo sapien
cgtgtggacgcggttgtcatgacga

SEQ ID NO: 1666982 - DNA, 25 bp, Homo sapien
taccaggaagcttaggagcaagtaa

SEQ ID NO: 1666983 - DNA, 25 bp, Homo sapien
tatgggatgagataaggtagaagcc

SEQ ID NO: 1666984 - DNA, 25 bp, Homo sapien
gtagtaacataaagggctgtcttca

SEQ ID NO: 1666985 - DNA, 25 bp, Homo sapien
actttcccgattggctaccaggaag

SEQ ID NO: 1666986 - DNA, 25 bp, Homo sapien
gagtaggaggcagcattcgttgaaa

SEQ ID NO: 1666987 - DNA, 25 bp, Homo sapien
ctagaaacagagtaggaggcagcat

SEQ ID NO: 1666988 - DNA, 25 bp, Homo sapien
cgttgaaagaacaatgaggtcagat

SEQ ID NO: 1666989 - DNA, 25 bp, Homo sapien
ggaggcagcattcgttgaaagaaca

SEQ ID NO: 1666990 - DNA, 25 bp, Homo sapien
aaatcgatgtgagtcatgggtgagc

SEQ ID NO: 1666991 - DNA, 25 bp, Homo sapien
gctttcaggacgaacagcactcaca

SEQ ID NO: 1666992 - DNA, 25 bp, Homo sapien
cgagcgcccattcctggaaacgagg

SEQ ID NO: 1666993 - DNA, 25 bp, Homo sapien
gacaagcaagggagttctcgcggac

SEQ ID NO: 1666994 - DNA, 25 bp, Homo sapien
gcatctgggtgtgtccgcgagggtc

SEQ ID NO: 1666995 - DNA, 25 bp, Homo sapien
gagggtaaccgtcagaggaagctta

SEQ ID NO: 1666996 - DNA, 25 bp, Homo sapien
ggaaagttgtcgtgattggcatcgt

SEQ ID NO: 1666997 - DNA, 25 bp, Homo sapien
gaatatttatttggccccaggagca

SEQ ID NO: 1666998 - DNA, 25 bp, Homo sapien
cgggggccgcagcgagtgccactgg

SEQ ID NO: 1666999 - DNA, 25 bp, Homo sapien
agcagcctcactcggtccgggggcc

SEQ ID NO: 1667000 - DNA, 25 bp, Homo sapien
tgtcgtagtccagcacggtcagctc

SEQ ID NO: 1667001 - DNA, 25 bp, Homo sapien
cctcccgatggcctcgttcttgccc

SEQ ID NO: 1667002 - DNA, 25 bp, Homo sapien
ttgcccagcttgtcgtagtccagca

SEQ ID NO: 1667003 - DNA, 25 bp, Homo sapien
cgttcttgcccagcttgtcgtagtc

SEQ ID NO: 1667004 - DNA, 25 bp, Homo sapien
cctgcgcagccaggtttctaaggaa

SEQ ID NO: 1667005 - DNA, 25 bp, Homo sapien
taagagccgcaaagctgcagaactt

SEQ ID NO: 1667006 - DNA, 25 bp, Homo sapien
ttttcacggctgagggtacctctcg

SEQ ID NO: 1667007 - DNA, 25 bp, Homo sapien
aatgaaccctcaggactcggttgcg

SEQ ID NO: 1667008 - DNA, 25 bp, Homo sapien
agctgaaagcttcgttgtaataggg

SEQ ID NO: 1667009 - DNA, 25 bp, Homo sapien
cagggcacctcgaagctgaaagctt

SEQ ID NO: 1667010 - DNA, 25 bp, Homo sapien
tggacttggtcacagggcacctcga

SEQ ID NO: 1667011 - DNA, 25 bp, Homo sapien
tcttccgcacctttttgccgccctg

SEQ ID NO: 1667012 - DNA, 25 bp, Homo sapien
tccaggacgatgacggtgagcttcc

SEQ ID NO: 1667013 - DNA, 25 bp, Homo sapien
gtttttagcctccaggacgatgacg

SEQ ID NO: 1667014 - DNA, 25 bp, Homo sapien
agtcctcctacgtccatcttcttca

SEQ ID NO: 1667015 - DNA, 25 bp, Homo sapien
gacgatgacggtgagcttcccggcc

SEQ ID NO: 1667016 - DNA, 25 bp, Homo sapien
cccaggtccacggagctcataggga

SEQ ID NO: 1667017 - DNA, 25 bp, Homo sapien
agagaagcggtcgaagtcgtacacc

SEQ ID NO: 1667018 - DNA, 25 bp, Homo sapien
tccccgatggcgtcattgcgagaga

SEQ ID NO: 1667019 - DNA, 25 bp, Homo sapien
cgaagtcgtacaccgccatgaccag

SEQ ID NO: 1667020 - DNA, 25 bp, Homo sapien
cttgaaggcgaaggtctccccaaag

SEQ ID NO: 1667021 - DNA, 25 bp, Homo sapien
aaggctgccaatcccattgcttgca

SEQ ID NO: 1667022 - DNA, 25 bp, Homo sapien
caaagtgagggttcagcgtctgccg

SEQ ID NO: 1667023 - DNA, 25 bp, Homo sapien
gaggagccaccaagatccaaggctg

SEQ ID NO: 1667024 - DNA, 25 bp, Homo sapien
gaagtcataatccagggagtactgc

SEQ ID NO: 1667025 - DNA, 25 bp, Homo sapien
ggagtactgcagtcgtcctagctca

SEQ ID NO: 1667026 - DNA, 25 bp, Homo sapien
tggccactctggaagtcataatcca

SEQ ID NO: 1667027 - DNA, 25 bp, Homo sapien
ccctggcccggatggtgctggctcc

SEQ ID NO: 1667028 - DNA, 25 bp, Homo sapien
gaagtcttcccctgatagcagtatc

SEQ ID NO: 1667029 - DNA, 25 bp, Homo sapien
tgatagcagtatccatcaggctcag

SEQ ID NO: 1667030 - DNA, 25 bp, Homo sapien
ggtcccttgggctatacctgagctc

SEQ ID NO: 1667031 - DNA, 25 bp, Homo sapien
cttgggctatacctgagctctcaca

SEQ ID NO: 1667032 - DNA, 25 bp, Homo sapien
tctggtctcagttaactctgtccct

SEQ ID NO: 1667033 - DNA, 25 bp, Homo sapien
tgcagctattgtgagaaatgactct

SEQ ID NO: 1667034 - DNA, 25 bp, Homo sapien
ctgtccctcaggtctcagtgcagaa

SEQ ID NO: 1667035 - DNA, 25 bp, Homo sapien
gctccaacttggactagaatgtcct

SEQ ID NO: 1667036 - DNA, 25 bp, Homo sapien
ttgtctatgtaactctggcccagcc

SEQ ID NO: 1667037 - DNA, 25 bp, Homo sapien
tgaaggtggacctgggcttgggcct

SEQ ID NO: 1667038 - DNA, 25 bp, Homo sapien
gaggcctgagaccagcacgatggtg

SEQ ID NO: 1667039 - DNA, 25 bp, Homo sapien
cagctcttccggtagagacagaaac

SEQ ID NO: 1667040 - DNA, 25 bp, Homo sapien
ttccagtccaggatgacgacccggg

SEQ ID NO: 1667041 - DNA, 25 bp, Homo sapien
agccggattttccagcccgcctgcc

SEQ ID NO: 1667042 - DNA, 25 bp, Homo sapien
ttaccccatttcgttcgcattccag

SEQ ID NO: 1667043 - DNA, 25 bp, Homo sapien
ctgcccgagtacacccgtccgaatc

SEQ ID NO: 1667044 - DNA, 25 bp, Homo sapien
tgcgactggagtcgggaggcgtgtc

SEQ ID NO: 1667045 - DNA, 25 bp, Homo sapien
cgtgtcgggcgatggaggccccggg

SEQ ID NO: 1667046 - DNA, 25 bp, Homo sapien
ggcgtgtcgggcgatggaggccccg

SEQ ID NO: 1667047 - DNA, 25 bp, Homo sapien
ctgggccgtggctgatgcgactgga

SEQ ID NO: 1667048 - DNA, 25 bp, Homo sapien
cagccaccgcgagtcatgctgggag

SEQ ID NO: 1667049 - DNA, 25 bp, Homo sapien
gggtgtccaggacctagttccatcc

SEQ ID NO: 1667050 - DNA, 25 bp, Homo sapien
gagttgtagtatcagcctccccgca

SEQ ID NO: 1667051 - DNA, 25 bp, Homo sapien
gcctttgcgcgaacagccgcgcaga

SEQ ID NO: 1667052 - DNA, 25 bp, Homo sapien
atcccgctgacttctgcctcgtcct

SEQ ID NO: 1667053 - DNA, 25 bp, Homo sapien
ccccacaggcatcccgctgacttct

SEQ ID NO: 1667054 - DNA, 25 bp, Homo sapien
caggcatcccgctgacttctgcctc

SEQ ID NO: 1667055 - DNA, 25 bp, Homo sapien
ggccccacaggcatcccgctgactt

SEQ ID NO: 1667056 - DNA, 25 bp, Homo sapien
tagcccgactgggatcctgaggtcc

SEQ ID NO: 1667057 - DNA, 25 bp, Homo sapien
ctttcctctagggatgcggatgcgg

SEQ ID NO: 1667058 - DNA, 25 bp, Homo sapien
caacgggttgttgccaggacaacgg

SEQ ID NO: 1667059 - DNA, 25 bp, Homo sapien
tgtcttctccatacctgtctcgcgt

SEQ ID NO: 1667060 - DNA, 25 bp, Homo sapien
agccgcggagcggagcaggatcccg

SEQ ID NO: 1667061 - DNA, 25 bp, Homo sapien
gacactcccgggagacgccgaggcg

SEQ ID NO: 1667062 - DNA, 25 bp, Homo sapien
ctgctcggcggctggacgggacact

SEQ ID NO: 1667063 - DNA, 25 bp, Homo sapien
tcccgggtgctgatcgcggagctct

SEQ ID NO: 1667064 - DNA, 25 bp, Homo sapien
gaaaccagagtttgggataccagcc

SEQ ID NO: 1667065 - DNA, 25 bp, Homo sapien
taggactcatctgaagcccaccaga

SEQ ID NO: 1667066 - DNA, 25 bp, Homo sapien
ttcagggaaccaggaatccagatcc

SEQ ID NO: 1667067 - DNA, 25 bp, Homo sapien
tccctccgaccccagattatagaag

SEQ ID NO: 1667068 - DNA, 25 bp, Homo sapien
tggcggccacgttctcgtagatgag

SEQ ID NO: 1667069 - DNA, 25 bp, Homo sapien
tcatacgggacttccttctcggctg

SEQ ID NO: 1667070 - DNA, 25 bp, Homo sapien
ggaaccgcaggatgcactgatgcag

SEQ ID NO: 1667071 - DNA, 25 bp, Homo sapien
ggttttcgacatcctcatacgggac

SEQ ID NO: 1667072 - DNA, 25 bp, Homo sapien
ctgccggagcaggacgtccagggca

SEQ ID NO: 1667073 - DNA, 25 bp, Homo sapien
atcaacggccgactctctctcatct

SEQ ID NO: 1667074 - DNA, 25 bp, Homo sapien
cttacaaagctgaagggcccaagga

SEQ ID NO: 1667075 - DNA, 25 bp, Homo sapien
aatgagggttcctgtgcgacccacg

SEQ ID NO: 1667076 - DNA, 25 bp, Homo sapien
gcagtgcacaatgggtgggcctccc

SEQ ID NO: 1667077 - DNA, 25 bp, Homo sapien
ggaacgccgtgatccggccaggcct

SEQ ID NO: 1667078 - DNA, 25 bp, Homo sapien
cctggtagtggaattggcgcacaga

SEQ ID NO: 1667079 - DNA, 25 bp, Homo sapien
agccactgccgaagcatcctccaga

SEQ ID NO: 1667080 - DNA, 25 bp, Homo sapien
ggctgcgagtccagaggccagtaat

SEQ ID NO: 1667081 - DNA, 25 bp, Homo sapien
ctgcgagtccagaggccagtaatgc

SEQ ID NO: 1667082 - DNA, 25 bp, Homo sapien
ttacccgcaggtgcccatgggtgca

SEQ ID NO: 1667083 - DNA, 25 bp, Homo sapien
cacctaccagggttacccgcaggtg

SEQ ID NO: 1667084 - DNA, 25 bp, Homo sapien
gagtggggaacaggtctacactgaa

SEQ ID NO: 1667085 - DNA, 25 bp, Homo sapien
ccaaatgtgaaccagcagatgggct

SEQ ID NO: 1667086 - DNA, 25 bp, Homo sapien
gtctgtggggtctgctttaggcccc

SEQ ID NO: 1667087 - DNA, 25 bp, Homo sapien
ctacactgaagacgcctggggttac

SEQ ID NO: 1667088 - DNA, 25 bp, Homo sapien
cacaccaggcgccagaagtcaccca

SEQ ID NO: 1667089 - DNA, 25 bp, Homo sapien
gcgccagaagtcacccactgtctgt

SEQ ID NO: 1667090 - DNA, 25 bp, Homo sapien
ggaccctgggttgcaatgaactcct

SEQ ID NO: 1667091 - DNA, 25 bp, Homo sapien
ccaggcgccagaagtcacccactgt

SEQ ID NO: 1667092 - DNA, 25 bp, Homo sapien
tcatggatgggcttcaggggcaccc

SEQ ID NO: 1667093 - DNA, 25 bp, Homo sapien
gcctggctcctcatggatgggcttc

SEQ ID NO: 1667094 - DNA, 25 bp, Homo sapien
gatgtagtcagagcctggctcctca

SEQ ID NO: 1667095 - DNA, 25 bp, Homo sapien
tggctcctcatggatgggcttcagg

SEQ ID NO: 1667096 - DNA, 25 bp, Homo sapien
tttctgtagcggttcttggcgttgt

SEQ ID NO: 1667097 - DNA, 25 bp, Homo sapien
ctgtagcggttcttggcgttgttct

SEQ ID NO: 1667098 - DNA, 25 bp, Homo sapien
gcagcacatttctgtagcggttctt

SEQ ID NO: 1667099 - DNA, 25 bp, Homo sapien
cacatttctgtagcggttcttggcg

SEQ ID NO: 1667100 - DNA, 25 bp, Homo sapien
aagccgaagccaccatctgagactg

SEQ ID NO: 1667101 - DNA, 25 bp, Homo sapien
agccgaagccaccatctgagactgg

SEQ ID NO: 1667102 - DNA, 25 bp, Homo sapien
gaagccgaagccaccatctgagact

SEQ ID NO: 1667103 - DNA, 25 bp, Homo sapien
ccgaagccaccatctgagactggct

SEQ ID NO: 1667104 - DNA, 25 bp, Homo sapien
aaaaccacagttgctgtccctctca

SEQ ID NO: 1667105 - DNA, 25 bp, Homo sapien
tcttcctgacgtggtcagcgaagtc

SEQ ID NO: 1667106 - DNA, 25 bp, Homo sapien
ctcattcttcctgacgtggtcagcg

SEQ ID NO: 1667107 - DNA, 25 bp, Homo sapien
cctgacgtggtcagcgaagtcttca

SEQ ID NO: 1667108 - DNA, 25 bp, Homo sapien
ctaaagaccagatccctgagttctg

SEQ ID NO: 1667109 - DNA, 25 bp, Homo sapien
gaccagatccctgagttctggtttc

SEQ ID NO: 1667110 - DNA, 25 bp, Homo sapien
aagaccagatccctgagttctggtt

SEQ ID NO: 1667111 - DNA, 25 bp, Homo sapien
tggtttctgctgcttcttcttattc

SEQ ID NO: 1667112 - DNA, 25 bp, Homo sapien
tgcccacaaaggctccggcaatgac

SEQ ID NO: 1667113 - DNA, 25 bp, Homo sapien
cccacaaaggctccggcaatgaccc

SEQ ID NO: 1667114 - DNA, 25 bp, Homo sapien
gcaggcccacgaggatgagaaacag

SEQ ID NO: 1667115 - DNA, 25 bp, Homo sapien
atgcccacaaaggctccggcaatga

SEQ ID NO: 1667116 - DNA, 25 bp, Homo sapien
tctcgtcttagggtaggctcaagcc

SEQ ID NO: 1667117 - DNA, 25 bp, Homo sapien
tggtggtgtctatgggtgctctcag

SEQ ID NO: 1667118 - DNA, 25 bp, Homo sapien
ggctcaagcctatggcccatcttca

SEQ ID NO: 1667119 - DNA, 25 bp, Homo sapien
tcccaagatctgtcattagatgtct

SEQ ID NO: 1667120 - DNA, 25 bp, Homo sapien
cagcctccccacatgaagatctgtc

SEQ ID NO: 1667121 - DNA, 25 bp, Homo sapien
tcccagatggtcgtgatggtggctg

SEQ ID NO: 1667122 - DNA, 25 bp, Homo sapien
aagatctgtcctgggagccccgctg

SEQ ID NO: 1667123 - DNA, 25 bp, Homo sapien
agagtgagacacgaccttcattccg

SEQ ID NO: 1667124 - DNA, 25 bp, Homo sapien
tcaaaggcctcgtagcctccctggg

SEQ ID NO: 1667125 - DNA, 25 bp, Homo sapien
aagttgactccatagcccgctgagg

SEQ ID NO: 1667126 - DNA, 25 bp, Homo sapien
atagcccgctgaggtgctgacacag

SEQ ID NO: 1667127 - DNA, 25 bp, Homo sapien
gggcaggaccagatcaagttgactc

SEQ ID NO: 1667128 - DNA, 25 bp, Homo sapien
gcagtgccatccaaggtggctttcc

SEQ ID NO: 1667129 - DNA, 25 bp, Homo sapien
gaggtcagcagtgccatccaaggtg

SEQ ID NO: 1667130 - DNA, 25 bp, Homo sapien
ggaagcaagaggtcagcagtgccat

SEQ ID NO: 1667131 - DNA, 25 bp, Homo sapien
caagaggtcagcagtgccatccaag

SEQ ID NO: 1667132 - DNA, 25 bp, Homo sapien
tggagatctgtgacctcattgggag

SEQ ID NO: 1667133 - DNA, 25 bp, Homo sapien
gcccacacggtgaaattgtacaacg

SEQ ID NO: 1667134 - DNA, 25 bp, Homo sapien
tggacccagtatacgtacaactgag

SEQ ID NO: 1667135 - DNA, 25 bp, Homo sapien
agaggctctgcgtggaactggctac

SEQ ID NO: 1667136 - DNA, 25 bp, Homo sapien
gctgccagcttccagttcctttagg

SEQ ID NO: 1667137 - DNA, 25 bp, Homo sapien
ctgcagtgagggtgctgttatagcc

SEQ ID NO: 1667138 - DNA, 25 bp, Homo sapien
ctgtccagcgcaaagcaatggtgct

SEQ ID NO: 1667139 - DNA, 25 bp, Homo sapien
tcctctcggcccagacggtgaggtg

SEQ ID NO: 1667140 - DNA, 25 bp, Homo sapien
ttgtgtttcgggtctctgtgccacc

SEQ ID NO: 1667141 - DNA, 25 bp, Homo sapien
gttggtctgagtctccatatggagg

SEQ ID NO: 1667142 - DNA, 25 bp, Homo sapien
gtctccagtgtactctacccagtag

SEQ ID NO: 1667143 - DNA, 25 bp, Homo sapien
gaatgtgtacaaggttccgggctca

SEQ ID NO: 1667144 - DNA, 25 bp, Homo sapien
cagggcgatggagctgttggtctga

SEQ ID NO: 1667145 - DNA, 25 bp, Homo sapien
ctgtggtggcatttcgagtctcccg

SEQ ID NO: 1667146 - DNA, 25 bp, Homo sapien
caaccccgtaggtggagttctgtgg

SEQ ID NO: 1667147 - DNA, 25 bp, Homo sapien
agtctcccgggagctgttgattcca

SEQ ID NO: 1667148 - DNA, 25 bp, Homo sapien
ctgtggcactagtgacaatctccac

SEQ ID NO: 1667149 - DNA, 25 bp, Homo sapien
ggcactagtgacaatctccacagag

SEQ ID NO: 1667150 - DNA, 25 bp, Homo sapien
tccagtgcactgaacgcagtaggtc

SEQ ID NO: 1667151 - DNA, 25 bp, Homo sapien
tgaacgcagtaggtcgagttctgtg

SEQ ID NO: 1667152 - DNA, 25 bp, Homo sapien
cctcttggtgcaggaaggtacattc

SEQ ID NO: 1667153 - DNA, 25 bp, Homo sapien
gactatggaatagaaatccgctacg

SEQ ID NO: 1667154 - DNA, 25 bp, Homo sapien
tgagtacctggctcaatgtggccca

SEQ ID NO: 1667155 - DNA, 25 bp, Homo sapien
cagctggaggtaccatggacattca

SEQ ID NO: 1667156 - DNA, 25 bp, Homo sapien
accatctccagtgtactcaaccccg

SEQ ID NO: 1667157 - DNA, 25 bp, Homo sapien
ctgtggtggcatttcgagtctcccg

SEQ ID NO: 1667158 - DNA, 25 bp, Homo sapien
caaccccgtaggtggagttctgtgg

SEQ ID NO: 1667159 - DNA, 25 bp, Homo sapien
agtctcccgggagctgttgattcca

SEQ ID NO: 1667160 - DNA, 25 bp, Homo sapien
gtcagggcgatggagctgttggtct

SEQ ID NO: 1667161 - DNA, 25 bp, Homo sapien
cagggcgatggagctgttggtctga

SEQ ID NO: 1667162 - DNA, 25 bp, Homo sapien
agggcgatggagctgttggtctgag

SEQ ID NO: 1667163 - DNA, 25 bp, Homo sapien
tcagggcgatggagctgttggtctg

SEQ ID NO: 1667164 - DNA, 25 bp, Homo sapien
cactgtgtttctatccaactaaaga

SEQ ID NO: 1667165 - DNA, 25 bp, Homo sapien
gaacctgtcgcattttgtcagctct

SEQ ID NO: 1667166 - DNA, 25 bp, Homo sapien
gaaaattgaaattctcacgtgtggc

SEQ ID NO: 1667167 - DNA, 25 bp, Homo sapien
ttttatgtggctgatagaaaattga

SEQ ID NO: 1667168 - DNA, 25 bp, Homo sapien
aaaaataaagcagtggctgcctctt

SEQ ID NO: 1667169 - DNA, 25 bp, Homo sapien
taaaaataaagcagtggctgcctct

SEQ ID NO: 1667170 - DNA, 25 bp, Homo sapien
aaataaagcagtggctgcctcttac

SEQ ID NO: 1667171 - DNA, 25 bp, Homo sapien
aataaaaataaagcagtggctgcct

SEQ ID NO: 1667172 - DNA, 25 bp, Homo sapien
gtgccgccgtctccagtacactgaa

SEQ ID NO: 1667173 - DNA, 25 bp, Homo sapien
gtttcgagtctctgttgtgccgccg

SEQ ID NO: 1667174 - DNA, 25 bp, Homo sapien
ttggagttctgtgagtctaggccat

SEQ ID NO: 1667175 - DNA, 25 bp, Homo sapien
tgtggcagtagtgacagtccccaca

SEQ ID NO: 1667176 - DNA, 25 bp, Homo sapien
ccctggcccctgtccagctgcacag

SEQ ID NO: 1667177 - DNA, 25 bp, Homo sapien
tggcccctgtccagctgcacaggcc

SEQ ID NO: 1667178 - DNA, 25 bp, Homo sapien
cgccctggcccctgtccagctgcac

SEQ ID NO: 1667179 - DNA, 25 bp, Homo sapien
aggcgccctggcccctgtccagctg

SEQ ID NO: 1667180 - DNA, 25 bp, Homo sapien
agcagcaccaggttcccccagaccc

SEQ ID NO: 1667181 - DNA, 25 bp, Homo sapien
gcagcaccaggttcccccagacccc

SEQ ID NO: 1667182 - DNA, 25 bp, Homo sapien
ccacctgctggactttacactcaag

SEQ ID NO: 1667183 - DNA, 25 bp, Homo sapien
tccacctgctggactttacactcaa

SEQ ID NO: 1667184 - DNA, 25 bp, Homo sapien
aggagtcccaggcctagtccttcca

SEQ ID NO: 1667185 - DNA, 25 bp, Homo sapien
ggagtcccaggcctagtccttccac

SEQ ID NO: 1667186 - DNA, 25 bp, Homo sapien
tgcctctagctctgacactggagat

SEQ ID NO: 1667187 - DNA, 25 bp, Homo sapien
caggtaccgggtgccgcgccccact

SEQ ID NO: 1667188 - DNA, 25 bp, Homo sapien
ctccctcaccgctgcctctagctct

SEQ ID NO: 1667189 - DNA, 25 bp, Homo sapien
tgtcccccgaaatctccctctgcac

SEQ ID NO: 1667190 - DNA, 25 bp, Homo sapien
gagagcgttgcttggtgtatgtaat

SEQ ID NO: 1667191 - DNA, 25 bp, Homo sapien
gaagcaccaagagagcgttgcttgg

SEQ ID NO: 1667192 - DNA, 25 bp, Homo sapien
ggtgtatgtaatgataccatctcta

SEQ ID NO: 1667193 - DNA, 25 bp, Homo sapien
ctgtgtgatgagaagcaccaagaga

SEQ ID NO: 1667194 - DNA, 25 bp, Homo sapien
tcattgcaggtgaaccagtccagac

SEQ ID NO: 1667195 - DNA, 25 bp, Homo sapien
ggttttccagcttgctcgctcctca

SEQ ID NO: 1667196 - DNA, 25 bp, Homo sapien
tccagacccccatccaggttttcca

SEQ ID NO: 1667197 - DNA, 25 bp, Homo sapien
attgcaggtgaaccagtccagaccc

SEQ ID NO: 1667198 - DNA, 25 bp, Homo sapien
ttgaaagatccaggaagtgacaggg

SEQ ID NO: 1667199 - DNA, 25 bp, Homo sapien
gttgccgtgtttccgctgaatccag

SEQ ID NO: 1667200 - DNA, 25 bp, Homo sapien
gggttctcctagatccatgctcgca

SEQ ID NO: 1667201 - DNA, 25 bp, Homo sapien
gggcctgactcatcaacttgtaaga

SEQ ID NO: 1667202 - DNA, 25 bp, Homo sapien
gcccgggggctactgccctctgaat

SEQ ID NO: 1667203 - DNA, 25 bp, Homo sapien
ctgcccgggggctactgccctctga

SEQ ID NO: 1667204 - DNA, 25 bp, Homo sapien
gggggctactgccctctgaatcaat

SEQ ID NO: 1667205 - DNA, 25 bp, Homo sapien
ccgggggctactgccctctgaatca

SEQ ID NO: 1667206 - DNA, 25 bp, Homo sapien
cctcagtcctgcgtgcggcacgtag

SEQ ID NO: 1667207 - DNA, 25 bp, Homo sapien
gtagtgctcactgggcgtctgtgta

SEQ ID NO: 1667208 - DNA, 25 bp, Homo sapien
gggaccctacgttgacacccatggc

SEQ ID NO: 1667209 - DNA, 25 bp, Homo sapien
cagggaccctacgttgacacccatg

SEQ ID NO: 1667210 - DNA, 25 bp, Homo sapien
tgtcagtaactacgaaagcctaagg

SEQ ID NO: 1667211 - DNA, 25 bp, Homo sapien
taaggtacgtataccatcactcagc

SEQ ID NO: 1667212 - DNA, 25 bp, Homo sapien
tcagcgattccactgctaggcagac

SEQ ID NO: 1667213 - DNA, 25 bp, Homo sapien
gaaaaaacttcctgtgtgctccaaa

SEQ ID NO: 1667214 - DNA, 25 bp, Homo sapien
caccacacccggctagttttgtatt

SEQ ID NO: 1667215 - DNA, 25 bp, Homo sapien
ttcaagcaattctacaggcatgcac

SEQ ID NO: 1667216 - DNA, 25 bp, Homo sapien
cacaggcaccctgatgtctgaggag

SEQ ID NO: 1667217 - DNA, 25 bp, Homo sapien
ctgttgacctcatgcttctgggccc

SEQ ID NO: 1667218 - DNA, 25 bp, Homo sapien
ccacatgctggggtactgcgtccct

SEQ ID NO: 1667219 - DNA, 25 bp, Homo sapien
ccgtggcctctgtgagcgtctggct

SEQ ID NO: 1667220 - DNA, 25 bp, Homo sapien
tagatggaagtctgccggtctgggc

SEQ ID NO: 1667221 - DNA, 25 bp, Homo sapien
tgtagacatgctcaggacgtccctg

SEQ ID NO: 1667222 - DNA, 25 bp, Homo sapien
gcagtgtgacgtgcttgtgttcccg

SEQ ID NO: 1667223 - DNA, 25 bp, Homo sapien
tctgtctgctttggcggctgacatg

SEQ ID NO: 1667224 - DNA, 25 bp, Homo sapien
gcggcaaacagaagacggaatccca

SEQ ID NO: 1667225 - DNA, 25 bp, Homo sapien
ctgcggcaaacagaagacggaatcc

SEQ ID NO: 1667226 - DNA, 25 bp, Homo sapien
gcaaacagaagacggaatcccacgg

SEQ ID NO: 1667227 - DNA, 25 bp, Homo sapien
cagaagacggaatcccacggccctt

SEQ ID NO: 1667228 - DNA, 25 bp, Homo sapien
gcaggatggaggctgatggggtcac

SEQ ID NO: 1667229 - DNA, 25 bp, Homo sapien
gatggaggctgatggggtcactaac

SEQ ID NO: 1667230 - DNA, 25 bp, Homo sapien
ctagacgtgcaggatggaggctgat

SEQ ID NO: 1667231 - DNA, 25 bp, Homo sapien
caggatggaggctgatggggtcact

SEQ ID NO: 1667232 - DNA, 25 bp, Homo sapien
tgtggcctctgtcgtggtcccgagg

SEQ ID NO: 1667233 - DNA, 25 bp, Homo sapien
tggcctctgtcgtggtcccgagggc

SEQ ID NO: 1667234 - DNA, 25 bp, Homo sapien
tgctgtggcctctgtcgtggtcccg

SEQ ID NO: 1667235 - DNA, 25 bp, Homo sapien
gctgtggcctctgtcgtggtcccga

SEQ ID NO: 1667236 - DNA, 25 bp, Homo sapien
gggaatcagacccacggtggtctga

SEQ ID NO: 1667237 - DNA, 25 bp, Homo sapien
ggaatcagacccacggtggtctgac

SEQ ID NO: 1667238 - DNA, 25 bp, Homo sapien
ggggaatcagacccacggtggtctg

SEQ ID NO: 1667239 - DNA, 25 bp, Homo sapien
gctgctgagtcccaccccgcctcat

SEQ ID NO: 1667240 - DNA, 25 bp, Homo sapien
ctgcaggatcgggatgaaggctgct

SEQ ID NO: 1667241 - DNA, 25 bp, Homo sapien
tgcaggatcgggatgaaggctgctg

SEQ ID NO: 1667242 - DNA, 25 bp, Homo sapien
tgagagggatgtgcgcagcacctcc

SEQ ID NO: 1667243 - DNA, 25 bp, Homo sapien
cagccaccccggcttgggagggaag

SEQ ID NO: 1667244 - DNA, 25 bp, Homo sapien
gatgtgcgcagcacctccgagagtc

SEQ ID NO: 1667245 - DNA, 25 bp, Homo sapien
gatggagccggcgttttgccccttg

SEQ ID NO: 1667246 - DNA, 25 bp, Homo sapien
tgagaagtcagatgaaaggtcgtcg

SEQ ID NO: 1667247 - DNA, 25 bp, Homo sapien
cagatgaaaggtcgtcgggggacca

SEQ ID NO: 1667248 - DNA, 25 bp, Homo sapien
ctttagagaaacacgaatcagatca

SEQ ID NO: 1667249 - DNA, 25 bp, Homo sapien
gatcatgagaaagcagacctctgag

SEQ ID NO: 1667250 - DNA, 25 bp, Homo sapien
taacagcaacatctacggttccaca

SEQ ID NO: 1667251 - DNA, 25 bp, Homo sapien
gaggcctctcctacggtaacagcaa

SEQ ID NO: 1667252 - DNA, 25 bp, Homo sapien
gaaccttctgctgtcattaaccgcg

SEQ ID NO: 1667253 - DNA, 25 bp, Homo sapien
taaccgcgatggtttatcacaatca

SEQ ID NO: 1667254 - DNA, 25 bp, Homo sapien
agctggaacccagtagtggacttgg

SEQ ID NO: 1667255 - DNA, 25 bp, Homo sapien
gaattccgcaaatcgtcctcaaacg

SEQ ID NO: 1667256 - DNA, 25 bp, Homo sapien
tcttcagccagaagcgacggcggca

SEQ ID NO: 1667257 - DNA, 25 bp, Homo sapien
tggacttggaattccgcaaatcgtc

SEQ ID NO: 1667258 - DNA, 25 bp, Homo sapien
ctgcagacaggcgtcaggaagcttc

SEQ ID NO: 1667259 - DNA, 25 bp, Homo sapien
gcttcgctgctgagggtatttctca

SEQ ID NO: 1667260 - DNA, 25 bp, Homo sapien
cagacaggcgtcaggaagcttcgct

SEQ ID NO: 1667261 - DNA, 25 bp, Homo sapien
caggcgtcaggaagcttcgctgctg

SEQ ID NO: 1667262 - DNA, 25 bp, Homo sapien
gagagggcctgaacaccggcccttc

SEQ ID NO: 1667263 - DNA, 25 bp, Homo sapien
aggagagggcctgaacaccggccct

SEQ ID NO: 1667264 - DNA, 25 bp, Homo sapien
gaggagagggcctgaacaccggccc

SEQ ID NO: 1667265 - DNA, 25 bp, Homo sapien
agggcctgaacaccggcccttcaag

SEQ ID NO: 1667266 - DNA, 25 bp, Homo sapien
cagtcttgggcaccgggctcctgag

SEQ ID NO: 1667267 - DNA, 25 bp, Homo sapien
agtcagtcttgggcaccgggctcct

SEQ ID NO: 1667268 - DNA, 25 bp, Homo sapien
tcagtcttgggcaccgggctcctga

SEQ ID NO: 1667269 - DNA, 25 bp, Homo sapien
tcagtcagtcttgggcaccgggctc

SEQ ID NO: 1667270 - DNA, 25 bp, Homo sapien
aagccgaaggcccagacgtagagga

SEQ ID NO: 1667271 - DNA, 25 bp, Homo sapien
gccatcaggatcagcccataggctg

SEQ ID NO: 1667272 - DNA, 25 bp, Homo sapien
cataggctgccaccggcaggaccat

SEQ ID NO: 1667273 - DNA, 25 bp, Homo sapien
catcagagagcgtgaagagcagcgc

SEQ ID NO: 1667274 - DNA, 25 bp, Homo sapien
tgcaggtctccccacatgcagtgtc

SEQ ID NO: 1667275 - DNA, 25 bp, Homo sapien
taagagaaggaccatcccagagcac

SEQ ID NO: 1667276 - DNA, 25 bp, Homo sapien
cacgggcatctggaaagcgtcacag

SEQ ID NO: 1667277 - DNA, 25 bp, Homo sapien
gctgggctacaagcacctgacacgt

SEQ ID NO: 1667278 - DNA, 25 bp, Homo sapien
aggcagaagtacacgcagcaggaga

SEQ ID NO: 1667279 - DNA, 25 bp, Homo sapien
acagctggtcctcgggaatccagag

SEQ ID NO: 1667280 - DNA, 25 bp, Homo sapien
gcaggcacttgaccagggcagcgaa

SEQ ID NO: 1667281 - DNA, 25 bp, Homo sapien
ggccagatgaggcaagcgtccccca

SEQ ID NO: 1667282 - DNA, 25 bp, Homo sapien
ggggagctactgagccgaaacccag

SEQ ID NO: 1667283 - DNA, 25 bp, Homo sapien
gagtggggagctactgagccgaaac

SEQ ID NO: 1667284 - DNA, 25 bp, Homo sapien
gggagctactgagccgaaacccagc

SEQ ID NO: 1667285 - DNA, 25 bp, Homo sapien
gtggggagctactgagccgaaaccc

SEQ ID NO: 1667286 - DNA, 25 bp, Homo sapien
agctgtacaggctggacccattcag

SEQ ID NO: 1667287 - DNA, 25 bp, Homo sapien
ccggctgctggggttccagggccct

SEQ ID NO: 1667288 - DNA, 25 bp, Homo sapien
tgtacaggctggacccattcaggga

SEQ ID NO: 1667289 - DNA, 25 bp, Homo sapien
agggcccaaccaactcaaggacagc

SEQ ID NO: 1667290 - DNA, 25 bp, Homo sapien
gctgagcagtgagtcttcagggtct

SEQ ID NO: 1667291 - DNA, 25 bp, Homo sapien
ctgggctgagcagtgagtcttcagg

SEQ ID NO: 1667292 - DNA, 25 bp, Homo sapien
gtcttcagggtctgccccgctttgc

SEQ ID NO: 1667293 - DNA, 25 bp, Homo sapien
tctgccccgctttgccagcgtccat

SEQ ID NO: 1667294 - DNA, 25 bp, Homo sapien
gggagggctcatggttacacgttaa

SEQ ID NO: 1667295 - DNA, 25 bp, Homo sapien
catggttacacgttaacccaaggag

SEQ ID NO: 1667296 - DNA, 25 bp, Homo sapien
gccccagagcgacctaatctgggag

SEQ ID NO: 1667297 - DNA, 25 bp, Homo sapien
gcctgatagccccagagcgacctaa

SEQ ID NO: 1667298 - DNA, 25 bp, Homo sapien
tatctgcctggggaggttaggccca

SEQ ID NO: 1667299 - DNA, 25 bp, Homo sapien
aagagatggggtgcagaattccaac

SEQ ID NO: 1667300 - DNA, 25 bp, Homo sapien
gctgataaagcactgttggcactgg

SEQ ID NO: 1667301 - DNA, 25 bp, Homo sapien
caccccatcatgggaagcgggagag

SEQ ID NO: 1667302 - DNA, 25 bp, Homo sapien
tacacttctaccttctacctgaaag

SEQ ID NO: 1667303 - DNA, 25 bp, Homo sapien
ggtggcttctatcctctgcccaagg

SEQ ID NO: 1667304 - DNA, 25 bp, Homo sapien
agacctactgggcgccagtacccag

SEQ ID NO: 1667305 - DNA, 25 bp, Homo sapien
gatttgagcctgtcggtggcttcta

SEQ ID NO: 1667306 - DNA, 25 bp, Homo sapien
aaggctgtgctttggagccgccagc

SEQ ID NO: 1667307 - DNA, 25 bp, Homo sapien
tgaaatagaagctcggcacaaacgc

SEQ ID NO: 1667308 - DNA, 25 bp, Homo sapien
ccagctcccgctgggacggaacagg

SEQ ID NO: 1667309 - DNA, 25 bp, Homo sapien
caaggtcacttggcaacagggctgg

SEQ ID NO: 1667310 - DNA, 25 bp, Homo sapien
tctaggaggcaacgctccaaaactt

SEQ ID NO: 1667311 - DNA, 25 bp, Homo sapien
taggaggcaacgctccaaaacttct

SEQ ID NO: 1667312 - DNA, 25 bp, Homo sapien
ggcaacgctccaaaacttctcttct

SEQ ID NO: 1667313 - DNA, 25 bp, Homo sapien
tattctaggaggcaacgctccaaaa

SEQ ID NO: 1667314 - DNA, 25 bp, Homo sapien
gacggaagatttggccgccgctgcc

SEQ ID NO: 1667315 - DNA, 25 bp, Homo sapien
gggccatcgtgggacccgccctgcc

SEQ ID NO: 1667316 - DNA, 25 bp, Homo sapien
ggaggacggaagatttggccgccgc

SEQ ID NO: 1667317 - DNA, 25 bp, Homo sapien
ggagatccacgggaggacggaagat

SEQ ID NO: 1667318 - DNA, 25 bp, Homo sapien
ggcagagccattgggtatcggagga

SEQ ID NO: 1667319 - DNA, 25 bp, Homo sapien
gggtatcggaggaggcgtgagggcc

SEQ ID NO: 1667320 - DNA, 25 bp, Homo sapien
cattgggtatcggaggaggcgtgag

SEQ ID NO: 1667321 - DNA, 25 bp, Homo sapien
caggcccttccggggcagagccatt

SEQ ID NO: 1667322 - DNA, 25 bp, Homo sapien
ccttctgtggtctgggggggctggt

SEQ ID NO: 1667323 - DNA, 25 bp, Homo sapien
ggacagaggtagaggggtctctggt

SEQ ID NO: 1667324 - DNA, 25 bp, Homo sapien
ctgggacagaggtagaggggtctct

SEQ ID NO: 1667325 - DNA, 25 bp, Homo sapien
agaggtagaggggtctctggttgca

SEQ ID NO: 1667326 - DNA, 25 bp, Homo sapien
gacagaggtagaggggtctctggtt

SEQ ID NO: 1667327 - DNA, 25 bp, Homo sapien
gtccccgatgctaaccaaggcctgg

SEQ ID NO: 1667328 - DNA, 25 bp, Homo sapien
tgaaggtccccgatgctaaccaagg

SEQ ID NO: 1667329 - DNA, 25 bp, Homo sapien
ggtggcctgaaggtccccgatgcta

SEQ ID NO: 1667330 - DNA, 25 bp, Homo sapien
aacggatcccgtggaaggtggcctg

SEQ ID NO: 1667331 - DNA, 25 bp, Homo sapien
gctgaggggggtgtggggtcctgag

SEQ ID NO: 1667332 - DNA, 25 bp, Homo sapien
cttctgtggcttcctgaggtgctga

SEQ ID NO: 1667333 - DNA, 25 bp, Homo sapien
tgaggggggtgtggggtcctgagac

SEQ ID NO: 1667334 - DNA, 25 bp, Homo sapien
ttcctgaggtgctgaggggggtgtg

SEQ ID NO: 1667335 - DNA, 25 bp, Homo sapien
ggctggtcggggcatctgtaggcac

SEQ ID NO: 1667336 - DNA, 25 bp, Homo sapien
actcgggggctggtcggggcatctg

SEQ ID NO: 1667337 - DNA, 25 bp, Homo sapien
gctggtcggggcatctgtaggcact

SEQ ID NO: 1667338 - DNA, 25 bp, Homo sapien
tcgggggctggtcggggcatctgta

SEQ ID NO: 1667339 - DNA, 25 bp, Homo sapien
ctccacgggctgcacagccaatgcc

SEQ ID NO: 1667340 - DNA, 25 bp, Homo sapien
tccacgggctgcacagccaatgccc

SEQ ID NO: 1667341 - DNA, 25 bp, Homo sapien
acgggctgcacagccaatgccctcc

SEQ ID NO: 1667342 - DNA, 25 bp, Homo sapien
ccctccacgggctgcacagccaatg

SEQ ID NO: 1667343 - DNA, 25 bp, Homo sapien
ctgccccagaaaccacctcgtcagc

SEQ ID NO: 1667344 - DNA, 25 bp, Homo sapien
ccccagaaaccacctcgtcagctag

SEQ ID NO: 1667345 - DNA, 25 bp, Homo sapien
tgccccagaaaccacctcgtcagct

SEQ ID NO: 1667346 - DNA, 25 bp, Homo sapien
gccccagaaaccacctcgtcagcta

SEQ ID NO: 1667347 - DNA, 25 bp, Homo sapien
gacaggcaggtcacagaagggtcca

SEQ ID NO: 1667348 - DNA, 25 bp, Homo sapien
atgacaggcaggtcacagaagggtc

SEQ ID NO: 1667349 - DNA, 25 bp, Homo sapien
cagcccaaggagagcgggctgggat

SEQ ID NO: 1667350 - DNA, 25 bp, Homo sapien
cagcccagggtcagcccaaggagag

SEQ ID NO: 1667351 - DNA, 25 bp, Homo sapien
taagctttaacaacgagggtgcact

SEQ ID NO: 1667352 - DNA, 25 bp, Homo sapien
agagggagttctgagccaacggcaa

SEQ ID NO: 1667353 - DNA, 25 bp, Homo sapien
cagaatgcggccgtaaggagaccgt

SEQ ID NO: 1667354 - DNA, 25 bp, Homo sapien
gcaacctacgtgctgatcaaccggg

SEQ ID NO: 1667355 - DNA, 25 bp, Homo sapien
tcctttttacacaggtgccaagatg

SEQ ID NO: 1667356 - DNA, 25 bp, Homo sapien
aaagagagggctaagtcaagatgct

SEQ ID NO: 1667357 - DNA, 25 bp, Homo sapien
gcagtgacacacttgtgcaccaaca

SEQ ID NO: 1667358 - DNA, 25 bp, Homo sapien
caggtgccaagatgattcagtggag

SEQ ID NO: 1667359 - DNA, 25 bp, Homo sapien
caggacaactttaccctcagaaggg

SEQ ID NO: 1667360 - DNA, 25 bp, Homo sapien
catctacagggttagaagccaggac

SEQ ID NO: 1667361 - DNA, 25 bp, Homo sapien
ggaaggatatccattggccacacac

SEQ ID NO: 1667362 - DNA, 25 bp, Homo sapien
cagaacaagcaattcagctgcagct

SEQ ID NO: 1667363 - DNA, 25 bp, Homo sapien
acacacaccaatgcaggttccttat

SEQ ID NO: 1667364 - DNA, 25 bp, Homo sapien
tgaaagtgcccccaactaatacaca

SEQ ID NO: 1667365 - DNA, 25 bp, Homo sapien
ggccctgccgtgtggtggaagcttg

SEQ ID NO: 1667366 - DNA, 25 bp, Homo sapien
caccaatgcaggttccttattttct

SEQ ID NO: 1667367 - DNA, 25 bp, Homo sapien
gatgcggtccttgtagcatatctca

SEQ ID NO: 1667368 - DNA, 25 bp, Homo sapien
tggatgcggtccttgtagcatatct

SEQ ID NO: 1667369 - DNA, 25 bp, Homo sapien
ttctccatcagactcccctgagccc

SEQ ID NO: 1667370 - DNA, 25 bp, Homo sapien
gctggatgcggtccttgtagcatat

SEQ ID NO: 1667371 - DNA, 25 bp, Homo sapien
gttctcatcgtcagcattgagggag

SEQ ID NO: 1667372 - DNA, 25 bp, Homo sapien
tcatggcctgcctctcggagagaag

SEQ ID NO: 1667373 - DNA, 25 bp, Homo sapien
gaactcatgtaacaggaggcagaca

SEQ ID NO: 1667374 - DNA, 25 bp, Homo sapien
cagatacaagtaggcgcgcctgctg

SEQ ID NO: 1667375 - DNA, 25 bp, Homo sapien
tggaacccctaaggctagctccagg

SEQ ID NO: 1667376 - DNA, 25 bp, Homo sapien
cattgaagccgaagtggtcaatgaa

SEQ ID NO: 1667377 - DNA, 25 bp, Homo sapien
tcatgcgctgcatctggaagtccat

SEQ ID NO: 1667378 - DNA, 25 bp, Homo sapien
ctcatcattgaagccgaagtggtca

SEQ ID NO: 1667379 - DNA, 25 bp, Homo sapien
gcagaggtcatgcgctgcatctgga

SEQ ID NO: 1667380 - DNA, 25 bp, Homo sapien
actccttgagccggtcgtcctcatc

SEQ ID NO: 1667381 - DNA, 25 bp, Homo sapien
tgagccggtcgtcctcatcgtcact

SEQ ID NO: 1667382 - DNA, 25 bp, Homo sapien
tccttgagccggtcgtcctcatcgt

SEQ ID NO: 1667383 - DNA, 25 bp, Homo sapien
gagccggtcgtcctcatcgtcactg

SEQ ID NO: 1667384 - DNA, 25 bp, Homo sapien
cccgatacgaaggcttcccactgct

SEQ ID NO: 1667385 - DNA, 25 bp, Homo sapien
gccccgatacgaaggcttcccactg

SEQ ID NO: 1667386 - DNA, 25 bp, Homo sapien
ccccgatacgaaggcttcccactgc

SEQ ID NO: 1667387 - DNA, 25 bp, Homo sapien
cttctccgtgttctgcaccagggca

SEQ ID NO: 1667388 - DNA, 25 bp, Homo sapien
acccatgtagcctttccgagggcct

SEQ ID NO: 1667389 - DNA, 25 bp, Homo sapien
ggtgacccatgtagcctttccgagg

SEQ ID NO: 1667390 - DNA, 25 bp, Homo sapien
caggtgacccatgtagcctttccga

SEQ ID NO: 1667391 - DNA, 25 bp, Homo sapien
gatccgctccaccaggcggcactgc

SEQ ID NO: 1667392 - DNA, 25 bp, Homo sapien
gttctcctcccaggacgtcaggatc

SEQ ID NO: 1667393 - DNA, 25 bp, Homo sapien
ggatccgctccaccaggcggcactg

SEQ ID NO: 1667394 - DNA, 25 bp, Homo sapien
tcccaggacgtcaggatccgctcca

SEQ ID NO: 1667395 - DNA, 25 bp, Homo sapien
tgtttcatccgcgtttctccctggc

SEQ ID NO: 1667396 - DNA, 25 bp, Homo sapien
tgcatgcactaacggacacacacat

SEQ ID NO: 1667397 - DNA, 25 bp, Homo sapien
tcagctcaagtcaggagcccactgc

SEQ ID NO: 1667398 - DNA, 25 bp, Homo sapien
caacaaacacttgtgggaggaagga

SEQ ID NO: 1667399 - DNA, 25 bp, Homo sapien
tggtgctcacgcatccctctacttg

SEQ ID NO: 1667400 - DNA, 25 bp, Homo sapien
catccctctacttgggcatgcaaga

SEQ ID NO: 1667401 - DNA, 25 bp, Homo sapien
caacagggttttggatgggcgtctc

SEQ ID NO: 1667402 - DNA, 25 bp, Homo sapien
aacagggttttggatgggcgtctca

SEQ ID NO: 1667403 - DNA, 25 bp, Homo sapien
gtccagtgccaggagctcgtgcgtc

SEQ ID NO: 1667404 - DNA, 25 bp, Homo sapien
cccatgtcatctgtagcggctccag

SEQ ID NO: 1667405 - DNA, 25 bp, Homo sapien
actggccaggagcttgaccacgtgc

SEQ ID NO: 1667406 - DNA, 25 bp, Homo sapien
ggctgcatcattggcgctcagggca

SEQ ID NO: 1667407 - DNA, 25 bp, Homo sapien
gctgttcacggtcacggactcggac

SEQ ID NO: 1667408 - DNA, 25 bp, Homo sapien
cgtagggcgtgcaaggcgcccacac

SEQ ID NO: 1667409 - DNA, 25 bp, Homo sapien
ctgaagaagctgttcacggtcacgg

SEQ ID NO: 1667410 - DNA, 25 bp, Homo sapien
tagggcgtgcaaggcgcccacactg

SEQ ID NO: 1667411 - DNA, 25 bp, Homo sapien
atgttgcttaagagctgctcaatcg

SEQ ID NO: 1667412 - DNA, 25 bp, Homo sapien
tgctccccctcgaacatgttgctta

SEQ ID NO: 1667413 - DNA, 25 bp, Homo sapien
acctggatcccactgacgatgacag

SEQ ID NO: 1667414 - DNA, 25 bp, Homo sapien
ttaagagctgctcaatcgtctcctg

SEQ ID NO: 1667415 - DNA, 25 bp, Homo sapien
gggcccagggcttccccaagtcagc

SEQ ID NO: 1667416 - DNA, 25 bp, Homo sapien
cccagggcttccccaagtcagctcc

SEQ ID NO: 1667417 - DNA, 25 bp, Homo sapien
cagggcttccccaagtcagctcccc

SEQ ID NO: 1667418 - DNA, 25 bp, Homo sapien
gcaggggtcagggtgaggggccagg

SEQ ID NO: 1667419 - DNA, 25 bp, Homo sapien
cttggatcatctgctcccggctcag

SEQ ID NO: 1667420 - DNA, 25 bp, Homo sapien
tcacacagggactgggatgcgttgg

SEQ ID NO: 1667421 - DNA, 25 bp, Homo sapien
tgtcctggacttggatcatctgctc

SEQ ID NO: 1667422 - DNA, 25 bp, Homo sapien
cagggactgggatgcgttggaatgt

SEQ ID NO: 1667423 - DNA, 25 bp, Homo sapien
gaccatccagggaaaaatggtcacc

SEQ ID NO: 1667424 - DNA, 25 bp, Homo sapien
acaggtgaggatcctggtcgggcca

SEQ ID NO: 1667425 - DNA, 25 bp, Homo sapien
ctcccatgagctgaccatccaggga

SEQ ID NO: 1667426 - DNA, 25 bp, Homo sapien
tgagctgaccatccagggaaaaatg

SEQ ID NO: 1667427 - DNA, 25 bp, Homo sapien
ggacgatcttctcctcgttgagcca

SEQ ID NO: 1667428 - DNA, 25 bp, Homo sapien
attctcatccttcgacgggtggatc

SEQ ID NO: 1667429 - DNA, 25 bp, Homo sapien
gtggatctgctcaatcagccgctgg

SEQ ID NO: 1667430 - DNA, 25 bp, Homo sapien
caatcagccgctggacgatcttctc

SEQ ID NO: 1667431 - DNA, 25 bp, Homo sapien
catgatggccgaggtgccaatgtgc

SEQ ID NO: 1667432 - DNA, 25 bp, Homo sapien
gaggtccatgatggccgaggtgcca

SEQ ID NO: 1667433 - DNA, 25 bp, Homo sapien
aagtcatccttcttccgaagaaagg

SEQ ID NO: 1667434 - DNA, 25 bp, Homo sapien
ccttcttccgaagaaaggacacgag

SEQ ID NO: 1667435 - DNA, 25 bp, Homo sapien
tcttgcggttgatgaggatgcccat

SEQ ID NO: 1667436 - DNA, 25 bp, Homo sapien
ctggtctgtcttgcggttgatgagg

SEQ ID NO: 1667437 - DNA, 25 bp, Homo sapien
ctgtcttgcggttgatgaggatgcc

SEQ ID NO: 1667438 - DNA, 25 bp, Homo sapien
ggtctgtcttgcggttgatgaggat

SEQ ID NO: 1667439 - DNA, 25 bp, Homo sapien
tagagccggttcagaagggactcat

SEQ ID NO: 1667440 - DNA, 25 bp, Homo sapien
cagggcatcattgatctggggcaca

SEQ ID NO: 1667441 - DNA, 25 bp, Homo sapien
aggaagccgtagagccggttcagaa

SEQ ID NO: 1667442 - DNA, 25 bp, Homo sapien
gcatcattgatctggggcacatctg

SEQ ID NO: 1667443 - DNA, 25 bp, Homo sapien
ccccaagacaagctggtcctgaagc

SEQ ID NO: 1667444 - DNA, 25 bp, Homo sapien
cagggtgacgcagaaacaagggccc

SEQ ID NO: 1667445 - DNA, 25 bp, Homo sapien
caaactttcacacggtgcctgacgg

SEQ ID NO: 1667446 - DNA, 25 bp, Homo sapien
gcttcacttgcaaccccgtatgctg

SEQ ID NO: 1667447 - DNA, 25 bp, Homo sapien
caaactggagtttactgacactgac

SEQ ID NO: 1667448 - DNA, 25 bp, Homo sapien
gaatttgtggctgccgtgacccgtg

SEQ ID NO: 1667449 - DNA, 25 bp, Homo sapien
aaccagccgggcatgtcgtcacatg

SEQ ID NO: 1667450 - DNA, 25 bp, Homo sapien
tgcacccggtgagctgtgaggcctt

SEQ ID NO: 1667451 - DNA, 25 bp, Homo sapien
ccaggccaccattgcttgcaggtgg

SEQ ID NO: 1667452 - DNA, 25 bp, Homo sapien
ctcaccgctatctggcggctcctgg

SEQ ID NO: 1667453 - DNA, 25 bp, Homo sapien
tgcggttgacgaccttgcactcctg

SEQ ID NO: 1667454 - DNA, 25 bp, Homo sapien
gcttgtgtgcaggtcaaacttccaa

SEQ ID NO: 1667455 - DNA, 25 bp, Homo sapien
cgccgcgtcagacgccccagggagt

SEQ ID NO: 1667456 - DNA, 25 bp, Homo sapien
ccacaggggctgagtgcccaccttg

SEQ ID NO: 1667457 - DNA, 25 bp, Homo sapien
ctgcaggcatagacacaaccagcgc

SEQ ID NO: 1667458 - DNA, 25 bp, Homo sapien
agtccccactggacgaggcactgac

SEQ ID NO: 1667459 - DNA, 25 bp, Homo sapien
actcccaatattccttctaaggttg

SEQ ID NO: 1667460 - DNA, 25 bp, Homo sapien
atattccttctaaggttgggtgtgg

SEQ ID NO: 1667461 - DNA, 25 bp, Homo sapien
ccagactcccaatattccttctaag

SEQ ID NO: 1667462 - DNA, 25 bp, Homo sapien
caatctaggttcacctcaaccttca

SEQ ID NO: 1667463 - DNA, 25 bp, Homo sapien
cctttcaggcgggtgtctatggtca

SEQ ID NO: 1667464 - DNA, 25 bp, Homo sapien
gagttcaaggctgggcaaacgagca

SEQ ID NO: 1667465 - DNA, 25 bp, Homo sapien
cattcgaggcctggataagcacgcc

SEQ ID NO: 1667466 - DNA, 25 bp, Homo sapien
tgagcaagcattgcaggacgtgcct

SEQ ID NO: 1667467 - DNA, 25 bp, Homo sapien
gctcctcgcactcggggctcatcgg

SEQ ID NO: 1667468 - DNA, 25 bp, Homo sapien
cggctcctcgcactcggggctcatc

SEQ ID NO: 1667469 - DNA, 25 bp, Homo sapien
cactcggggctcatcggggcgcccc

SEQ ID NO: 1667470 - DNA, 25 bp, Homo sapien
tcctcgcactcggggctcatcgggg

SEQ ID NO: 1667471 - DNA, 25 bp, Homo sapien
cggtttccacagtccaaccgagcgc

SEQ ID NO: 1667472 - DNA, 25 bp, Homo sapien
tccgcggtccaaacgggccgcagag

SEQ ID NO: 1667473 - DNA, 25 bp, Homo sapien
cgacggaagccgaggcctacttcct

SEQ ID NO: 1667474 - DNA, 25 bp, Homo sapien
aaagccgctcaatctccgggctctg

SEQ ID NO: 1667475 - DNA, 25 bp, Homo sapien
aaagagcaacacttttattattctt

SEQ ID NO: 1667476 - DNA, 25 bp, Homo sapien
ccccatgcaccctccaaaggagatg

SEQ ID NO: 1667477 - DNA, 25 bp, Homo sapien
agagcaacacttttattattcttcc

SEQ ID NO: 1667478 - DNA, 25 bp, Homo sapien
cccccatgcaccctccaaaggagat

SEQ ID NO: 1667479 - DNA, 25 bp, Homo sapien
gctggtgcctttctcagcgcccctt

SEQ ID NO: 1667480 - DNA, 25 bp, Homo sapien
gactgcacagagacgggctggcaca

SEQ ID NO: 1667481 - DNA, 25 bp, Homo sapien
acaccctgggtccaggcacctaggc

SEQ ID NO: 1667482 - DNA, 25 bp, Homo sapien
taggccctgcgatcccttgggagag

SEQ ID NO: 1667483 - DNA, 25 bp, Homo sapien
gaaacaggtctgtagcagcttttca

SEQ ID NO: 1667484 - DNA, 25 bp, Homo sapien
ccatgctgtcgtccgctgggctgga

SEQ ID NO: 1667485 - DNA, 25 bp, Homo sapien
tccatgctgtcgtccgctgggctgg

SEQ ID NO: 1667486 - DNA, 25 bp, Homo sapien
ttccggctcccgacactcgcgcaca

SEQ ID NO: 1667487 - DNA, 25 bp, Homo sapien
agttccggctcccgacactcgcgca

SEQ ID NO: 1667488 - DNA, 25 bp, Homo sapien
cccagttccggctcccgacactcgc

SEQ ID NO: 1667489 - DNA, 25 bp, Homo sapien
aggcccagttccggctcccgacact

SEQ ID NO: 1667490 - DNA, 25 bp, Homo sapien
tgtgctctgtccgcaccagggccac

SEQ ID NO: 1667491 - DNA, 25 bp, Homo sapien
ggctgtgctctgtccgcaccagggc

SEQ ID NO: 1667492 - DNA, 25 bp, Homo sapien
cacgtgctcgtggaaggggctgtgc

SEQ ID NO: 1667493 - DNA, 25 bp, Homo sapien
ggaatgctgatttgaccttgagctt

SEQ ID NO: 1667494 - DNA, 25 bp, Homo sapien
ttgtgttcagggtggcccaccagca

SEQ ID NO: 1667495 - DNA, 25 bp, Homo sapien
aggaatgctgatttgaccttgagct

SEQ ID NO: 1667496 - DNA, 25 bp, Homo sapien
ccgtccaggcggaggaactgcagca

SEQ ID NO: 1667497 - DNA, 25 bp, Homo sapien
gcagaaacaggtataacagtggttt

SEQ ID NO: 1667498 - DNA, 25 bp, Homo sapien
tacctggtgaacgatgtgactgtct

SEQ ID NO: 1667499 - DNA, 25 bp, Homo sapien
ccaccaagatgacctaaagacttct

SEQ ID NO: 1667500 - DNA, 25 bp, Homo sapien
tctctgccctttgtggccgagctgc

SEQ ID NO: 1667501 - DNA, 25 bp, Homo sapien
tcctggatggctgccacgttctgac

SEQ ID NO: 1667502 - DNA, 25 bp, Homo sapien
acgttctgactgcacgtgccgatga

SEQ ID NO: 1667503 - DNA, 25 bp, Homo sapien
ttgacgcgcaccgtgtcgcaggcgt

SEQ ID NO: 1667504 - DNA, 25 bp, Homo sapien
agccgcagcagcttacgcagggcac

SEQ ID NO: 1667505 - DNA, 25 bp, Homo sapien
tctgcccggataagacggggagaca

SEQ ID NO: 1667506 - DNA, 25 bp, Homo sapien
ctgcggattggagcaggagttctct

SEQ ID NO: 1667507 - DNA, 25 bp, Homo sapien
ttaaaagccatcctgcggattggag

SEQ ID NO: 1667508 - DNA, 25 bp, Homo sapien
ccatcctgcggattggagcaggagt

SEQ ID NO: 1667509 - DNA, 25 bp, Homo sapien
tgtgcctggtgttgtgcgggcctgg

SEQ ID NO: 1667510 - DNA, 25 bp, Homo sapien
gcctggtgttgtgcgggcctggggg

SEQ ID NO: 1667511 - DNA, 25 bp, Homo sapien
ttactctgtgcctggtgttgtgcgg

SEQ ID NO: 1667512 - DNA, 25 bp, Homo sapien
ctggtgttgtgcgggcctgggggtt

SEQ ID NO: 1667513 - DNA, 25 bp, Homo sapien
cggaaggcagccgacatggcctcct

SEQ ID NO: 1667514 - DNA, 25 bp, Homo sapien
ggctgtgacagcactcggaggcagc

SEQ ID NO: 1667515 - DNA, 25 bp, Homo sapien
ctgtgacagcactcggaggcagctc

SEQ ID NO: 1667516 - DNA, 25 bp, Homo sapien
gcctcggaaggcagccgacatggcc

SEQ ID NO: 1667517 - DNA, 25 bp, Homo sapien
ctgcagcaagccttggaggttgcgt

SEQ ID NO: 1667518 - DNA, 25 bp, Homo sapien
gctcttcagagcccgcggtgatggc

SEQ ID NO: 1667519 - DNA, 25 bp, Homo sapien
cactcatcggttctggaggagggtc

SEQ ID NO: 1667520 - DNA, 25 bp, Homo sapien
agcccgcggtgatggccatctgcag

SEQ ID NO: 1667521 - DNA, 25 bp, Homo sapien
gcaggcggctcccccttgagccttc

SEQ ID NO: 1667522 - DNA, 25 bp, Homo sapien
ccaggggcaggcggctcccccttga

SEQ ID NO: 1667523 - DNA, 25 bp, Homo sapien
gggcaggcggctcccccttgagcct

SEQ ID NO: 1667524 - DNA, 25 bp, Homo sapien
aggcggctcccccttgagccttcgt

SEQ ID NO: 1667525 - DNA, 25 bp, Homo sapien
gaagaagggaagaatgtgttagagg

SEQ ID NO: 1667526 - DNA, 25 bp, Homo sapien
agaaggtggtcaccgctgaagcagc

SEQ ID NO: 1667527 - DNA, 25 bp, Homo sapien
tcaccgctgaagcagctctggcgtc

SEQ ID NO: 1667528 - DNA, 25 bp, Homo sapien
ctctggcgtcctgatgggtcgattc

SEQ ID NO: 1667529 - DNA, 25 bp, Homo sapien
gggagctcggcgaccccccatgacc

SEQ ID NO: 1667530 - DNA, 25 bp, Homo sapien
gagaaggcggcgtttcaggggagct

SEQ ID NO: 1667531 - DNA, 25 bp, Homo sapien
caggacccttccccaaagtcataag

SEQ ID NO: 1667532 - DNA, 25 bp, Homo sapien
cagcccacttaaccacagccccttt

SEQ ID NO: 1667533 - DNA, 25 bp, Homo sapien
ggcgccggaataaggcggatctcac

SEQ ID NO: 1667534 - DNA, 25 bp, Homo sapien
tcctctccgaagaggggcgccggaa

SEQ ID NO: 1667535 - DNA, 25 bp, Homo sapien
tagcaacaagcccgccctttggtct

SEQ ID NO: 1667536 - DNA, 25 bp, Homo sapien
ggtctccttagcaacaagtcttctc

SEQ ID NO: 1667537 - DNA, 25 bp, Homo sapien
aaagtcgtccgcacctgactctgct

SEQ ID NO: 1667538 - DNA, 25 bp, Homo sapien
tacagacaaagtcgtccgcacctga

SEQ ID NO: 1667539 - DNA, 25 bp, Homo sapien
cctacagacaaagtcgtccgcacct

SEQ ID NO: 1667540 - DNA, 25 bp, Homo sapien
agacaaagtcgtccgcacctgactc

SEQ ID NO: 1667541 - DNA, 25 bp, Homo sapien
aacttcgtgccgtggttgcggctga

SEQ ID NO: 1667542 - DNA, 25 bp, Homo sapien
gctgaagctgcttgcccgactctta

SEQ ID NO: 1667543 - DNA, 25 bp, Homo sapien
atacgcacggtttcacccggaagtg

SEQ ID NO: 1667544 - DNA, 25 bp, Homo sapien
tttcacccggaagtgccaggcgtac

SEQ ID NO: 1667545 - DNA, 25 bp, Homo sapien
tggcgggatactgcactcggccccg

SEQ ID NO: 1667546 - DNA, 25 bp, Homo sapien
tcacgctcaagtagctggtcaaagc

SEQ ID NO: 1667547 - DNA, 25 bp, Homo sapien
agttttcgcacctcagcgagtcccg

SEQ ID NO: 1667548 - DNA, 25 bp, Homo sapien
cgatacttttgcaagctccacccct

SEQ ID NO: 1667549 - DNA, 25 bp, Homo sapien
gcacatgcttgtggacctgctacag

SEQ ID NO: 1667550 - DNA, 25 bp, Homo sapien
agagcacatgcttgtggacctgcta

SEQ ID NO: 1667551 - DNA, 25 bp, Homo sapien
catgcttgtggacctgctacagtgg

SEQ ID NO: 1667552 - DNA, 25 bp, Homo sapien
atgcttgtggacctgctacagtggg

SEQ ID NO: 1667553 - DNA, 25 bp, Homo sapien
ctatgacgagcacagagaatatatg

SEQ ID NO: 1667554 - DNA, 25 bp, Homo sapien
acgagcacagagaatatatgggggt

SEQ ID NO: 1667555 - DNA, 25 bp, Homo sapien
tatgacgagcacagagaatatatgg

SEQ ID NO: 1667556 - DNA, 25 bp, Homo sapien
tgacgagcacagagaatatatgggg

SEQ ID NO: 1667557 - DNA, 25 bp, Homo sapien
cggagagacggggcgacggccgcag

SEQ ID NO: 1667558 - DNA, 25 bp, Homo sapien
gagagacggggcgacggccgcaggg

SEQ ID NO: 1667559 - DNA, 25 bp, Homo sapien
ggagagacggggcgacggccgcagg

SEQ ID NO: 1667560 - DNA, 25 bp, Homo sapien
agagacggggcgacggccgcagggg

SEQ ID NO: 1667561 - DNA, 25 bp, Homo sapien
acaagttgcagcatgcaccgggcca

SEQ ID NO: 1667562 - DNA, 25 bp, Homo sapien
tgcctgctgtgtactagtatctgca

SEQ ID NO: 1667563 - DNA, 25 bp, Homo sapien
cccacagcatgatagaaagtctttg

SEQ ID NO: 1667564 - DNA, 25 bp, Homo sapien
aaagtctttgctatccttgctctgg

SEQ ID NO: 1667565 - DNA, 25 bp, Homo sapien
gaaagatttatcgtggccagaggcc

SEQ ID NO: 1667566 - DNA, 25 bp, Homo sapien
gagatgtccagcttgacgccagagt

SEQ ID NO: 1667567 - DNA, 25 bp, Homo sapien
ctttcaccggcgcaagatgcagggt

SEQ ID NO: 1667568 - DNA, 25 bp, Homo sapien
tggattacctcccattggcccgtgg

SEQ ID NO: 1667569 - DNA, 25 bp, Homo sapien
gggcactgggattggccccatcttt

SEQ ID NO: 1667570 - DNA, 25 bp, Homo sapien
cagtggctcatcttgctgggtgcgg

SEQ ID NO: 1667571 - DNA, 25 bp, Homo sapien
ggcaaggcccgggtcagggtgcctg

SEQ ID NO: 1667572 - DNA, 25 bp, Homo sapien
tggcctctcgattcctgggtgccca

SEQ ID NO: 1667573 - DNA, 25 bp, Homo sapien
gctgggccacggctgaacacacagg

SEQ ID NO: 1667574 - DNA, 25 bp, Homo sapien
ggccacggctgaacacacagggtgc

SEQ ID NO: 1667575 - DNA, 25 bp, Homo sapien
tgggccacggctgaacacacagggt

SEQ ID NO: 1667576 - DNA, 25 bp, Homo sapien
gccacggctgaacacacagggtgca

SEQ ID NO: 1667577 - DNA, 25 bp, Homo sapien
ggctaagagaccgaagagcgcgaac

SEQ ID NO: 1667578 - DNA, 25 bp, Homo sapien
gaagagcgcgaacagcagcatggcc

SEQ ID NO: 1667579 - DNA, 25 bp, Homo sapien
agcgagcaggcgtggaggacgatca

SEQ ID NO: 1667580 - DNA, 25 bp, Homo sapien
cgcagagacgctacgcagcgagcag

SEQ ID NO: 1667581 - DNA, 25 bp, Homo sapien
tgccccagggtcaagggccacactg

SEQ ID NO: 1667582 - DNA, 25 bp, Homo sapien
ctgccccagggtcaagggccacact

SEQ ID NO: 1667583 - DNA, 25 bp, Homo sapien
gggcctcgccttggtctccgatgct

SEQ ID NO: 1667584 - DNA, 25 bp, Homo sapien
gcgtgcacccccgttactattgcaa

SEQ ID NO: 1667585 - DNA, 25 bp, Homo sapien
ctccagccggtctccatctcaagct

SEQ ID NO: 1667586 - DNA, 25 bp, Homo sapien
tctcaagctgcttgcacatgctttc

SEQ ID NO: 1667587 - DNA, 25 bp, Homo sapien
agccctctcctcatgtcttgtgcct

SEQ ID NO: 1667588 - DNA, 25 bp, Homo sapien
cctctcctcatgtcttgtgcctttc

SEQ ID NO: 1667589 - DNA, 25 bp, Homo sapien
tctggttctcgcaccctgctagctc

SEQ ID NO: 1667590 - DNA, 25 bp, Homo sapien
ctcctctggttctcgcaccctgcta

SEQ ID NO: 1667591 - DNA, 25 bp, Homo sapien
aggaaggcccctgccaagtgcgtag

SEQ ID NO: 1667592 - DNA, 25 bp, Homo sapien
ggagctgcagccagaagtagacgtt

SEQ ID NO: 1667593 - DNA, 25 bp, Homo sapien
gacgttacccaagatgaaggcaagg

SEQ ID NO: 1667594 - DNA, 25 bp, Homo sapien
gccaagtgcgtaggccgctggttct

SEQ ID NO: 1667595 - DNA, 25 bp, Homo sapien
cgtcctggaagtcaacgaagtccta

SEQ ID NO: 1667596 - DNA, 25 bp, Homo sapien
gagacaataagcctatggccacggg

SEQ ID NO: 1667597 - DNA, 25 bp, Homo sapien
gaagtcctacatacaaacagcctcg

SEQ ID NO: 1667598 - DNA, 25 bp, Homo sapien
tcagagagcaaaggaatccagccgg

SEQ ID NO: 1667599 - DNA, 25 bp, Homo sapien
taacggacaatgcagatccacgcgg

SEQ ID NO: 1667600 - DNA, 25 bp, Homo sapien
gctggttaggccaccttctgacgcc

SEQ ID NO: 1667601 - DNA, 25 bp, Homo sapien
cccggagctggtggtaacggacaat

SEQ ID NO: 1667602 - DNA, 25 bp, Homo sapien
cacagaagacccgtccataggatca

SEQ ID NO: 1667603 - DNA, 25 bp, Homo sapien
gagcagctcccatattgagcacctg

SEQ ID NO: 1667604 - DNA, 25 bp, Homo sapien
ccagagcagctcccatattgagcac

SEQ ID NO: 1667605 - DNA, 25 bp, Homo sapien
cagagcagctcccatattgagcacc

SEQ ID NO: 1667606 - DNA, 25 bp, Homo sapien
agagcagctcccatattgagcacct

SEQ ID NO: 1667607 - DNA, 25 bp, Homo sapien
ggcaatccaagctagggcctccact

SEQ ID NO: 1667608 - DNA, 25 bp, Homo sapien
tcctgggcaatccaagctagggcct

SEQ ID NO: 1667609 - DNA, 25 bp, Homo sapien
catcctgggcaatccaagctagggc

SEQ ID NO: 1667610 - DNA, 25 bp, Homo sapien
tgggcaatccaagctagggcctcca

SEQ ID NO: 1667611 - DNA, 25 bp, Homo sapien
ccacagtcctgttggtcactgcaat

SEQ ID NO: 1667612 - DNA, 25 bp, Homo sapien
gtcctgttggtcactgcaatggcaa

SEQ ID NO: 1667613 - DNA, 25 bp, Homo sapien
gtccacagtcctgttggtcactgca

SEQ ID NO: 1667614 - DNA, 25 bp, Homo sapien
cctgttggtcactgcaatggcaaaa

SEQ ID NO: 1667615 - DNA, 25 bp, Homo sapien
atccagacgccagagatagcccaga

SEQ ID NO: 1667616 - DNA, 25 bp, Homo sapien
atcagcgacaggtagccccacatgc

SEQ ID NO: 1667617 - DNA, 25 bp, Homo sapien
acaggcatcagcgacaggtagcccc

SEQ ID NO: 1667618 - DNA, 25 bp, Homo sapien
ccacatgccgggctctgcaggtgaa

SEQ ID NO: 1667619 - DNA, 25 bp, Homo sapien
agaaccagccctcaaggagggccca

SEQ ID NO: 1667620 - DNA, 25 bp, Homo sapien
ctgtaggggtctgatctgattggcc

SEQ ID NO: 1667621 - DNA, 25 bp, Homo sapien
agattgtggccccaaccactaggcc

SEQ ID NO: 1667622 - DNA, 25 bp, Homo sapien
actaggccccgcttggctctcaggc

SEQ ID NO: 1667623 - DNA, 25 bp, Homo sapien
gatgctcacctctccaagatccctg

SEQ ID NO: 1667624 - DNA, 25 bp, Homo sapien
tggagatgctcacctctccaagatc

SEQ ID NO: 1667625 - DNA, 25 bp, Homo sapien
tccaggacctcctggagatgctcac

SEQ ID NO: 1667626 - DNA, 25 bp, Homo sapien
gctcacctctccaagatccctgggg

SEQ ID NO: 1667627 - DNA, 25 bp, Homo sapien
ctggcattcggggtggggctcaggc

SEQ ID NO: 1667628 - DNA, 25 bp, Homo sapien
gggctggcattcggggtggggctca

SEQ ID NO: 1667629 - DNA, 25 bp, Homo sapien
gaagaagggctggcattcggggtgg

SEQ ID NO: 1667630 - DNA, 25 bp, Homo sapien
aagggctggcattcggggtggggct

SEQ ID NO: 1667631 - DNA, 25 bp, Homo sapien
cggccacgggtaggttgggtgtctg

SEQ ID NO: 1667632 - DNA, 25 bp, Homo sapien
ccacgggtaggttgggtgtctggag

SEQ ID NO: 1667633 - DNA, 25 bp, Homo sapien
gccacgggtaggttgggtgtctgga

SEQ ID NO: 1667634 - DNA, 25 bp, Homo sapien
cacgggtaggttgggtgtctggagc

SEQ ID NO: 1667635 - DNA, 25 bp, Homo sapien
acgggccatcggtgtcccagcatga

SEQ ID NO: 1667636 - DNA, 25 bp, Homo sapien
catgatgttttcacgggccatcggt

SEQ ID NO: 1667637 - DNA, 25 bp, Homo sapien
ggccatcggtgtcccagcatgagtc

SEQ ID NO: 1667638 - DNA, 25 bp, Homo sapien
gttttcacgggccatcggtgtccca

SEQ ID NO: 1667639 - DNA, 25 bp, Homo sapien
tctcctctagctgctccatggcaag

SEQ ID NO: 1667640 - DNA, 25 bp, Homo sapien
ctgtctcctctagctgctccatggc

SEQ ID NO: 1667641 - DNA, 25 bp, Homo sapien
tgtctcctctagctgctccatggca

SEQ ID NO: 1667642 - DNA, 25 bp, Homo sapien
tcctctagctgctccatggcaagtc

SEQ ID NO: 1667643 - DNA, 25 bp, Homo sapien
tggatactcccaaaacgcaacggtg

SEQ ID NO: 1667644 - DNA, 25 bp, Homo sapien
ttcatatcgcgggaaggtcccacag

SEQ ID NO: 1667645 - DNA, 25 bp, Homo sapien
gggcttgtctcaaaagtccccactc

SEQ ID NO: 1667646 - DNA, 25 bp, Homo sapien
agttacgtttgcctctaggattgag

SEQ ID NO: 1667647 - DNA, 25 bp, Homo sapien
tgttataagcagcacccttggcggt

SEQ ID NO: 1667648 - DNA, 25 bp, Homo sapien
gagacccatactctcctaggagtgg

SEQ ID NO: 1667649 - DNA, 25 bp, Homo sapien
ccttctcgcgcttctcaatgagatg

SEQ ID NO: 1667650 - DNA, 25 bp, Homo sapien
ggtcaacatcgtttagcaagcagag

SEQ ID NO: 1667651 - DNA, 25 bp, Homo sapien
ccaggctgcaggtatcaggaagctc

SEQ ID NO: 1667652 - DNA, 25 bp, Homo sapien
gtggccacagcgagacccatatgag

SEQ ID NO: 1667653 - DNA, 25 bp, Homo sapien
aacaagcttactgtggaggtggacg

SEQ ID NO: 1667654 - DNA, 25 bp, Homo sapien
catatgagcacctcagcggtggccc

SEQ ID NO: 1667655 - DNA, 25 bp, Homo sapien
tcagctgaggactcatgggtggaca

SEQ ID NO: 1667656 - DNA, 25 bp, Homo sapien
tgttgccacagctcttagacaaaga

SEQ ID NO: 1667657 - DNA, 25 bp, Homo sapien
agctcttagacaaagagggcagcgg

SEQ ID NO: 1667658 - DNA, 25 bp, Homo sapien
tgggtggacattggaatttccagga

SEQ ID NO: 1667659 - DNA, 25 bp, Homo sapien
atttacatgcacattttttataggg

SEQ ID NO: 1667660 - DNA, 25 bp, Homo sapien
cattttttatagggggttcagagcg

SEQ ID NO: 1667661 - DNA, 25 bp, Homo sapien
ttgagagtatatatttacatgcaca

SEQ ID NO: 1667662 - DNA, 25 bp, Homo sapien
tgttgagagtatatatttacatgca

SEQ ID NO: 1667663 - DNA, 25 bp, Homo sapien
aaaaactagtggtgagccgggtgca

SEQ ID NO: 1667664 - DNA, 25 bp, Homo sapien
ttcaccaaggtagctcaaggacagg

SEQ ID NO: 1667665 - DNA, 25 bp, Homo sapien
gaaacaaggaactcgaaggctggtg

SEQ ID NO: 1667666 - DNA, 25 bp, Homo sapien
tgagaaccccatcatacacgtggag

SEQ ID NO: 1667667 - DNA, 25 bp, Homo sapien
gagaccaagatctcagaggtggcgt

SEQ ID NO: 1667668 - DNA, 25 bp, Homo sapien
gaagccctcctgtagttgagtccac

SEQ ID NO: 1667669 - DNA, 25 bp, Homo sapien
gggtgacctcaccaacttagctcca

SEQ ID NO: 1667670 - DNA, 25 bp, Homo sapien
gacgttgcatgaacaggaagccctc

SEQ ID NO: 1667671 - DNA, 25 bp, Homo sapien
caggtcaagaagcttgtctagggtc

SEQ ID NO: 1667672 - DNA, 25 bp, Homo sapien
aggctgactggtctcacggctccct

SEQ ID NO: 1667673 - DNA, 25 bp, Homo sapien
tcataggaccgcttcagtcagagga

SEQ ID NO: 1667674 - DNA, 25 bp, Homo sapien
gaaccctagggctttgtcaagcggc

SEQ ID NO: 1667675 - DNA, 25 bp, Homo sapien
tagctcagggagtacccgttgggaa

SEQ ID NO: 1667676 - DNA, 25 bp, Homo sapien
cgtagctgtcaacgcgaggcatcta

SEQ ID NO: 1667677 - DNA, 25 bp, Homo sapien
ggctcgtagctgtcaacgcgaggca

SEQ ID NO: 1667678 - DNA, 25 bp, Homo sapien
ggctggctcgtagctgtcaacgcga

SEQ ID NO: 1667679 - DNA, 25 bp, Homo sapien
accctgggctggctcgtagctgtca

SEQ ID NO: 1667680 - DNA, 25 bp, Homo sapien
caaaaagatgcaggatcactgcatc

SEQ ID NO: 1667681 - DNA, 25 bp, Homo sapien
ccggggctccgcgagacaaaaagat

SEQ ID NO: 1667682 - DNA, 25 bp, Homo sapien
gacaaaaagatgcaggatcactgca

SEQ ID NO: 1667683 - DNA, 25 bp, Homo sapien
tcttcagaggaagccgcgctggggc

SEQ ID NO: 1667684 - DNA, 25 bp, Homo sapien
ttgccggcgaaaatcccgttcttga

SEQ ID NO: 1667685 - DNA, 25 bp, Homo sapien
gaaaatcccgttcttgatctgctcg

SEQ ID NO: 1667686 - DNA, 25 bp, Homo sapien
tcagattttgccggcgaaaatcccg

SEQ ID NO: 1667687 - DNA, 25 bp, Homo sapien
tgatctgctcgttccagctctccac

SEQ ID NO: 1667688 - DNA, 25 bp, Homo sapien
tggtacacgcggaaatagtactcgc

SEQ ID NO: 1667689 - DNA, 25 bp, Homo sapien
ctggtcttgaggcagcggtggtagt

SEQ ID NO: 1667690 - DNA, 25 bp, Homo sapien
tactcgcagggctgcgtgctcttcc

SEQ ID NO: 1667691 - DNA, 25 bp, Homo sapien
gcacagcgagtggtacacgcggaaa

SEQ ID NO: 1667692 - DNA, 25 bp, Homo sapien
gggccctcccagttcttcgctgctt

SEQ ID NO: 1667693 - DNA, 25 bp, Homo sapien
ctgccgtcccttgtcacaccctgct

SEQ ID NO: 1667694 - DNA, 25 bp, Homo sapien
tccgcgggacttagggtgggagtgc

SEQ ID NO: 1667695 - DNA, 25 bp, Homo sapien
tcctcccataacctggctgagcagg

SEQ ID NO: 1667696 - DNA, 25 bp, Homo sapien
gtagcagttacggatctggttctgg

SEQ ID NO: 1667697 - DNA, 25 bp, Homo sapien
ttctggtagcagttacggatctggt

SEQ ID NO: 1667698 - DNA, 25 bp, Homo sapien
gaagttctggtagcagttacggatc

SEQ ID NO: 1667699 - DNA, 25 bp, Homo sapien
ccaggaagttctggtagcagttacg

SEQ ID NO: 1667700 - DNA, 25 bp, Homo sapien
tcgaagggcggcgtcgaccatttcc

SEQ ID NO: 1667701 - DNA, 25 bp, Homo sapien
gcgcgggtcgaagggcggcgtcgac

SEQ ID NO: 1667702 - DNA, 25 bp, Homo sapien
gaagcgcgggtcgaagggcggcgtc

SEQ ID NO: 1667703 - DNA, 25 bp, Homo sapien
gtcgaagggcggcgtcgaccatttc

SEQ ID NO: 1667704 - DNA, 25 bp, Homo sapien
cagcctgacgttggcggccactgga

SEQ ID NO: 1667705 - DNA, 25 bp, Homo sapien
cgttggcggccactggatctgctgt

SEQ ID NO: 1667706 - DNA, 25 bp, Homo sapien
ctgacgttggcggccactggatctg

SEQ ID NO: 1667707 - DNA, 25 bp, Homo sapien
gacgttggcggccactggatctgct

SEQ ID NO: 1667708 - DNA, 25 bp, Homo sapien
tgagtccgcggggtgcggtcccacc

SEQ ID NO: 1667709 - DNA, 25 bp, Homo sapien
tcccacccgggtcaggagaaacgca

SEQ ID NO: 1667710 - DNA, 25 bp, Homo sapien
ctgagtccgcggggtgcggtcccac

SEQ ID NO: 1667711 - DNA, 25 bp, Homo sapien
cccgcggccggattggctaggacgc

SEQ ID NO: 1667712 - DNA, 25 bp, Homo sapien
gattggctaggacgcccgagcccca

SEQ ID NO: 1667713 - DNA, 25 bp, Homo sapien
ccaatgggagccgtcgtgcaccgcg

SEQ ID NO: 1667714 - DNA, 25 bp, Homo sapien
agccaatgggagccgtcgtgcaccg

SEQ ID NO: 1667715 - DNA, 25 bp, Homo sapien
tgcacacaggcaccgaggtgcgact

SEQ ID NO: 1667716 - DNA, 25 bp, Homo sapien
gtgcacacaggcaccgaggtgcgac

SEQ ID NO: 1667717 - DNA, 25 bp, Homo sapien
ttcctacagtcggtgcgcacagaac

SEQ ID NO: 1667718 - DNA, 25 bp, Homo sapien
taatctctgcgaagttgggcggctc

SEQ ID NO: 1667719 - DNA, 25 bp, Homo sapien
catagttctggtatctaccagaggg

SEQ ID NO: 1667720 - DNA, 25 bp, Homo sapien
tcaacattccgcttcctacagtcgg

SEQ ID NO: 1667721 - DNA, 25 bp, Homo sapien
ctggacagtttccaactgaggttaa

SEQ ID NO: 1667722 - DNA, 25 bp, Homo sapien
gttaagcccccgcatccggccactc

SEQ ID NO: 1667723 - DNA, 25 bp, Homo sapien
cccgcatccggccactcggagtgct

SEQ ID NO: 1667724 - DNA, 25 bp, Homo sapien
gacagtttccaactgaggttaagcc

SEQ ID NO: 1667725 - DNA, 25 bp, Homo sapien
cagaaggttcaagacgcccgattcc

SEQ ID NO: 1667726 - DNA, 25 bp, Homo sapien
aggttcaagacgcccgattcctcct

SEQ ID NO: 1667727 - DNA, 25 bp, Homo sapien
ttcaagacgcccgattcctcctgta

SEQ ID NO: 1667728 - DNA, 25 bp, Homo sapien
gaaggttcaagacgcccgattcctc

SEQ ID NO: 1667729 - DNA, 25 bp, Homo sapien
agtttcaagttctaagagcatgggc

SEQ ID NO: 1667730 - DNA, 25 bp, Homo sapien
agagcatgggcaaaagaatttctga

SEQ ID NO: 1667731 - DNA, 25 bp, Homo sapien
ttctaagagcatgggcaaaagaatt

SEQ ID NO: 1667732 - DNA, 25 bp, Homo sapien
caagttctaagagcatgggcaaaag

SEQ ID NO: 1667733 - DNA, 25 bp, Homo sapien
agtcctcccacggtgaggcggtcag

SEQ ID NO: 1667734 - DNA, 25 bp, Homo sapien
gagcgaaagggcaccttgggtggcc

SEQ ID NO: 1667735 - DNA, 25 bp, Homo sapien
tgggcttggagcgaaagggcacctt

SEQ ID NO: 1667736 - DNA, 25 bp, Homo sapien
gggcgatggccgtaagtcctcccac

SEQ ID NO: 1667737 - DNA, 25 bp, Homo sapien
ccaaagcggatttcgagggctgctc

SEQ ID NO: 1667738 - DNA, 25 bp, Homo sapien
tccttggatctcacgccaggcaggt

SEQ ID NO: 1667739 - DNA, 25 bp, Homo sapien
tctcttcaagcttcgcccagtgggc

SEQ ID NO: 1667740 - DNA, 25 bp, Homo sapien
gaagccatcattgacgtggccgacg

SEQ ID NO: 1667741 - DNA, 25 bp, Homo sapien
gtcaaaatcgccagggagcttcccc

SEQ ID NO: 1667742 - DNA, 25 bp, Homo sapien
ccccgtgaggcaggcgggctcagcg

SEQ ID NO: 1667743 - DNA, 25 bp, Homo sapien
ctgttggcaacacgtcaaaatcgcc

SEQ ID NO: 1667744 - DNA, 25 bp, Homo sapien
ggctcagcgccatctggtattcggt

SEQ ID NO: 1667745 - DNA, 25 bp, Homo sapien
agagtccatgaggtcttccgtgtcc

SEQ ID NO: 1667746 - DNA, 25 bp, Homo sapien
actggtcaacaaggaacggtgcctt

SEQ ID NO: 1667747 - DNA, 25 bp, Homo sapien
tgtcctgatgccacaggcacgggtc

SEQ ID NO: 1667748 - DNA, 25 bp, Homo sapien
tacaagatgtgacaaggccagatgg

SEQ ID NO: 1667749 - DNA, 25 bp, Homo sapien
gctggtcttctctggatgggggagc

SEQ ID NO: 1667750 - DNA, 25 bp, Homo sapien
gttggcggtgctggaaatgatgctg

SEQ ID NO: 1667751 - DNA, 25 bp, Homo sapien
gatgggggagccgtctgagcccttt

SEQ ID NO: 1667752 - DNA, 25 bp, Homo sapien
gccctttggggcaggaaccagagcc

SEQ ID NO: 1667753 - DNA, 25 bp, Homo sapien
caggcaagcggatttgggtgtgagt

SEQ ID NO: 1667754 - DNA, 25 bp, Homo sapien
aggcaagcggatttgggtgtgagtt

SEQ ID NO: 1667755 - DNA, 25 bp, Homo sapien
ctgtcggggcgggggtctgagtggg

SEQ ID NO: 1667756 - DNA, 25 bp, Homo sapien
tgtcggggcgggggtctgagtggga

SEQ ID NO: 1667757 - DNA, 25 bp, Homo sapien
tgctccagctgcgaccagatgaggg

SEQ ID NO: 1667758 - DNA, 25 bp, Homo sapien
cacggcctgagacttgaaactgcgc

SEQ ID NO: 1667759 - DNA, 25 bp, Homo sapien
acagagtcgcccacggcctgagact

SEQ ID NO: 1667760 - DNA, 25 bp, Homo sapien
tcttcctgacgtcagcatgctccag

SEQ ID NO: 1667761 - DNA, 25 bp, Homo sapien
ccaccgtcttatgcggaaagttgcg

SEQ ID NO: 1667762 - DNA, 25 bp, Homo sapien
cagccaccgtcttatgcggaaagtt

SEQ ID NO: 1667763 - DNA, 25 bp, Homo sapien
tgagcagccaccgtcttatgcggaa

SEQ ID NO: 1667764 - DNA, 25 bp, Homo sapien
gagcagccaccgtcttatgcggaaa

SEQ ID NO: 1667765 - DNA, 25 bp, Homo sapien
ctgcatgtctgctgatgggctggtc

SEQ ID NO: 1667766 - DNA, 25 bp, Homo sapien
caggggggccgtgcgcgtggtcctg

SEQ ID NO: 1667767 - DNA, 25 bp, Homo sapien
tccaggtgggagccggctcctgaag

SEQ ID NO: 1667768 - DNA, 25 bp, Homo sapien
ttcggccagcggcatatccaggggg

SEQ ID NO: 1667769 - DNA, 25 bp, Homo sapien
ggtggaggcaggcgcttcggccagc

SEQ ID NO: 1667770 - DNA, 25 bp, Homo sapien
acctcgttgtcaggggcgtccaggg

SEQ ID NO: 1667771 - DNA, 25 bp, Homo sapien
gcccgagaccaggcgcagcttcagg

SEQ ID NO: 1667772 - DNA, 25 bp, Homo sapien
gagaccaggcgcagcttcaggcgcc

SEQ ID NO: 1667773 - DNA, 25 bp, Homo sapien
ccaggtagtactggcggcccgagac

SEQ ID NO: 1667774 - DNA, 25 bp, Homo sapien
tcggcgggctggccgatcagcaaga

SEQ ID NO: 1667775 - DNA, 25 bp, Homo sapien
ctggtcagcacgaggccggagcagt

SEQ ID NO: 1667776 - DNA, 25 bp, Homo sapien
gcacgaggccggagcagtccctgtc

SEQ ID NO: 1667777 - DNA, 25 bp, Homo sapien
cgggctggccgatcagcaagatgtc

SEQ ID NO: 1667778 - DNA, 25 bp, Homo sapien
ctgtgattcacgaacactgggcccc

SEQ ID NO: 1667779 - DNA, 25 bp, Homo sapien
gttctgtgattcacgaacactgggc

SEQ ID NO: 1667780 - DNA, 25 bp, Homo sapien
tggttctgtgattcacgaacactgg

SEQ ID NO: 1667781 - DNA, 25 bp, Homo sapien
ggccagccggttggttctgtgattc

SEQ ID NO: 1667782 - DNA, 25 bp, Homo sapien
tctcaagatcccccagcacgggggg

SEQ ID NO: 1667783 - DNA, 25 bp, Homo sapien
cagcacggggggccttgcttcccct

SEQ ID NO: 1667784 - DNA, 25 bp, Homo sapien
tgactgctaaatcccgttccctctc

SEQ ID NO: 1667785 - DNA, 25 bp, Homo sapien
gctaaatcccgttccctctcaagat

SEQ ID NO: 1667786 - DNA, 25 bp, Homo sapien
gaacatgggcagcggacggaggggc

SEQ ID NO: 1667787 - DNA, 25 bp, Homo sapien
tcgaacatgggcagcggacggaggg

SEQ ID NO: 1667788 - DNA, 25 bp, Homo sapien
tctcgaacatgggcagcggacggag

SEQ ID NO: 1667789 - DNA, 25 bp, Homo sapien
ctcgaacatgggcagcggacggagg

SEQ ID NO: 1667790 - DNA, 25 bp, Homo sapien
tctggagggtcttttgcagctcccc

SEQ ID NO: 1667791 - DNA, 25 bp, Homo sapien
gagggtcttttgcagctcccccaga

SEQ ID NO: 1667792 - DNA, 25 bp, Homo sapien
gtcttttgcagctcccccagaacag

SEQ ID NO: 1667793 - DNA, 25 bp, Homo sapien
ccttctggagggtcttttgcagctc

SEQ ID NO: 1667794 - DNA, 25 bp, Homo sapien
gggtgccctggagcggctcaaggca

SEQ ID NO: 1667795 - DNA, 25 bp, Homo sapien
cacctcctgtttcgaagccagatca

SEQ ID NO: 1667796 - DNA, 25 bp, Homo sapien
gctcaaggcacctcctgtttcgaag

SEQ ID NO: 1667797 - DNA, 25 bp, Homo sapien
ctggagcggctcaaggcacctcctg

SEQ ID NO: 1667798 - DNA, 25 bp, Homo sapien
ttagggacccagaacccaggcgtgc

SEQ ID NO: 1667799 - DNA, 25 bp, Homo sapien
tggtggatgggtactggtttaggga

SEQ ID NO: 1667800 - DNA, 25 bp, Homo sapien
gtggctgtggtggatgggtactggt

SEQ ID NO: 1667801 - DNA, 25 bp, Homo sapien
agggacccagaacccaggcgtgcag

SEQ ID NO: 1667802 - DNA, 25 bp, Homo sapien
ctcagcgttacagagcgtggagatg

SEQ ID NO: 1667803 - DNA, 25 bp, Homo sapien
cagccttgacccgtggggcttcacg

SEQ ID NO: 1667804 - DNA, 25 bp, Homo sapien
ctgggagactcgggcctccgccatg

SEQ ID NO: 1667805 - DNA, 25 bp, Homo sapien
cacgggtgcctggagctcagcgtta

SEQ ID NO: 1667806 - DNA, 25 bp, Homo sapien
ttttgccatgtctcgcaggccggtc

SEQ ID NO: 1667807 - DNA, 25 bp, Homo sapien
taatgaaccatcttgaccttgcagc

SEQ ID NO: 1667808 - DNA, 25 bp, Homo sapien
cagtttgctatggtgaacacagcca

SEQ ID NO: 1667809 - DNA, 25 bp, Homo sapien
cacagagctgtctgggtgaccgacc

SEQ ID NO: 1667810 - DNA, 25 bp, Homo sapien
gacacatttaattccctgttctctg

SEQ ID NO: 1667811 - DNA, 25 bp, Homo sapien
tctgtctcacaaaggtttctcacat

SEQ ID NO: 1667812 - DNA, 25 bp, Homo sapien
atgtatgacacatttaattccctgt

SEQ ID NO: 1667813 - DNA, 25 bp, Homo sapien
tttaattccctgttctctgtctcac

SEQ ID NO: 1667814 - DNA, 25 bp, Homo sapien
cacccctgctcctgaaataaataag

SEQ ID NO: 1667815 - DNA, 25 bp, Homo sapien
ctggctttggaaggacggtggtggc

SEQ ID NO: 1667816 - DNA, 25 bp, Homo sapien
acggaaggactgtctctaactaggg

SEQ ID NO: 1667817 - DNA, 25 bp, Homo sapien
tgtttcgcccccagtactgaaataa

SEQ ID NO: 1667818 - DNA, 25 bp, Homo sapien
cctcacggcccagtcaagtgtcagg

SEQ ID NO: 1667819 - DNA, 25 bp, Homo sapien
ccagtcaagtgtcaggtgcagcccc

SEQ ID NO: 1667820 - DNA, 25 bp, Homo sapien
acggcccagtcaagtgtcaggtgca

SEQ ID NO: 1667821 - DNA, 25 bp, Homo sapien
agcagcagtcccctcacggcccagt

SEQ ID NO: 1667822 - DNA, 25 bp, Homo sapien
gctgcagctgaatcggggctgcata

SEQ ID NO: 1667823 - DNA, 25 bp, Homo sapien
agctgcagctgaatcggggctgcat

SEQ ID NO: 1667824 - DNA, 25 bp, Homo sapien
gaatcggggctgcatattcacaggg

SEQ ID NO: 1667825 - DNA, 25 bp, Homo sapien
gctgaatcggggctgcatattcaca

SEQ ID NO: 1667826 - DNA, 25 bp, Homo sapien
tcaggacgggcttccagagctgagt

SEQ ID NO: 1667827 - DNA, 25 bp, Homo sapien
ctggagtcaggacgggcttccagag

SEQ ID NO: 1667828 - DNA, 25 bp, Homo sapien
tcaggctgtggggttccgaaaatgg

SEQ ID NO: 1667829 - DNA, 25 bp, Homo sapien
tggggttccgaaaatggaggctgga

SEQ ID NO: 1667830 - DNA, 25 bp, Homo sapien
tgcacgtgccgcaggtaggacagta

SEQ ID NO: 1667831 - DNA, 25 bp, Homo sapien
gtaggacagtaggtccgctcgcagc

SEQ ID NO: 1667832 - DNA, 25 bp, Homo sapien
agccactgcacgtgccgcaggtagg

SEQ ID NO: 1667833 - DNA, 25 bp, Homo sapien
aggtccgctcgcagccttgtcagca

SEQ ID NO: 1667834 - DNA, 25 bp, Homo sapien
tccaggttgtggtccccgtcagctg

SEQ ID NO: 1667835 - DNA, 25 bp, Homo sapien
ggaatccaggttgtggtccccgtca

SEQ ID NO: 1667836 - DNA, 25 bp, Homo sapien
gcagggaatccaggttgtggtcccc

SEQ ID NO: 1667837 - DNA, 25 bp, Homo sapien
ggtgggcagggaatccaggttgtgg

SEQ ID NO: 1667838 - DNA, 25 bp, Homo sapien
ggagagagcgggtcaggagcacggt

SEQ ID NO: 1667839 - DNA, 25 bp, Homo sapien
ctgtccagctcggcccgagggtctg

SEQ ID NO: 1667840 - DNA, 25 bp, Homo sapien
gccagctgccgcgtgtccgccagga

SEQ ID NO: 1667841 - DNA, 25 bp, Homo sapien
gcacgaccaggaccaggcggcaaac

SEQ ID NO: 1667842 - DNA, 25 bp, Homo sapien
gctgccgggggagccccgagggtca

SEQ ID NO: 1667843 - DNA, 25 bp, Homo sapien
tgtccgctgccgggggagccccgag

SEQ ID NO: 1667844 - DNA, 25 bp, Homo sapien
cttccctgtccgctgccgggggagc

SEQ ID NO: 1667845 - DNA, 25 bp, Homo sapien
cgggggagccccgagggtcagctgg

SEQ ID NO: 1667846 - DNA, 25 bp, Homo sapien
ggggaggggaggcatgtgccctgag

SEQ ID NO: 1667847 - DNA, 25 bp, Homo sapien
gggaggggaggcatgtgccctgagc

SEQ ID NO: 1667848 - DNA, 25 bp, Homo sapien
ctggggaggggaggcatgtgccctg

SEQ ID NO: 1667849 - DNA, 25 bp, Homo sapien
tggggaggggaggcatgtgccctga

SEQ ID NO: 1667850 - DNA, 25 bp, Homo sapien
gcgaggggcagaggtaccaagccat

SEQ ID NO: 1667851 - DNA, 25 bp, Homo sapien
agcgaggggcagaggtaccaagcca

SEQ ID NO: 1667852 - DNA, 25 bp, Homo sapien
agggggcctgcttccggctgagtca

SEQ ID NO: 1667853 - DNA, 25 bp, Homo sapien
ggtctccgcccctcagggggcctgc

SEQ ID NO: 1667854 - DNA, 25 bp, Homo sapien
cctgcttccggctgagtcagtgtgg

SEQ ID NO: 1667855 - DNA, 25 bp, Homo sapien
gggcctgcttccggctgagtcagtg

SEQ ID NO: 1667856 - DNA, 25 bp, Homo sapien
gctggggtgatgtcctgtaaggcct

SEQ ID NO: 1667857 - DNA, 25 bp, Homo sapien
tgatgtcctgtaaggcctcttccca

SEQ ID NO: 1667858 - DNA, 25 bp, Homo sapien
tggggtgatgtcctgtaaggcctct

SEQ ID NO: 1667859 - DNA, 25 bp, Homo sapien
gggtgatgtcctgtaaggcctcttc

SEQ ID NO: 1667860 - DNA, 25 bp, Homo sapien
gtgacatatgggaccgggagagctg

SEQ ID NO: 1667861 - DNA, 25 bp, Homo sapien
ggggccaggcggccatcgatagccc

SEQ ID NO: 1667862 - DNA, 25 bp, Homo sapien
ccaggcggccatcgatagccccaac

SEQ ID NO: 1667863 - DNA, 25 bp, Homo sapien
catatgggaccgggagagctgtggg

SEQ ID NO: 1667864 - DNA, 25 bp, Homo sapien
tctgcctgcgtctccggtgctgcta

SEQ ID NO: 1667865 - DNA, 25 bp, Homo sapien
tctccggtgctgctaccgcaatggg

SEQ ID NO: 1667866 - DNA, 25 bp, Homo sapien
taccgcaatggggtctgctaccacc

SEQ ID NO: 1667867 - DNA, 25 bp, Homo sapien
gggtctgctaccaccagcgtccaga

SEQ ID NO: 1667868 - DNA, 25 bp, Homo sapien
atctgcttgttctggcgagtgggcc

SEQ ID NO: 1667869 - DNA, 25 bp, Homo sapien
catatgcccggtttcctggcgggtc

SEQ ID NO: 1667870 - DNA, 25 bp, Homo sapien
tgacatgtccaagtccgtctcgctg

SEQ ID NO: 1667871 - DNA, 25 bp, Homo sapien
aagcgccgggacgtgctgcatatgc

SEQ ID NO: 1667872 - DNA, 25 bp, Homo sapien
tcaggtgtggccaggcccacctggg

SEQ ID NO: 1667873 - DNA, 25 bp, Homo sapien
caggtgtggccaggcccacctgggt

SEQ ID NO: 1667874 - DNA, 25 bp, Homo sapien
aggtgtggccaggcccacctgggtg

SEQ ID NO: 1667875 - DNA, 25 bp, Homo sapien
ctcaggtgtggccaggcccacctgg

SEQ ID NO: 1667876 - DNA, 25 bp, Homo sapien
agggggtacagggagcgtccgtctg

SEQ ID NO: 1667877 - DNA, 25 bp, Homo sapien
agctgcacatctcagtctggtcctg

SEQ ID NO: 1667878 - DNA, 25 bp, Homo sapien
ccacggatgtaggggcagctgcaca

SEQ ID NO: 1667879 - DNA, 25 bp, Homo sapien
gagcgtccgtctggccacggatgta

SEQ ID NO: 1667880 - DNA, 25 bp, Homo sapien
tcccatccctgttccgggctctctg

SEQ ID NO: 1667881 - DNA, 25 bp, Homo sapien
cccatccctgttccgggctctctgc

SEQ ID NO: 1667882 - DNA, 25 bp, Homo sapien
cccgtgcggggggcctaactgtgtg

SEQ ID NO: 1667883 - DNA, 25 bp, Homo sapien
gcctaactgtgtgactcgaccccca

SEQ ID NO: 1667884 - DNA, 25 bp, Homo sapien
aactgtgtgactcgacccccacact

SEQ ID NO: 1667885 - DNA, 25 bp, Homo sapien
tgtgtgactcgacccccacacttcc

SEQ ID NO: 1667886 - DNA, 25 bp, Homo sapien
cgggcccggcctcgagcgtggcgag

SEQ ID NO: 1667887 - DNA, 25 bp, Homo sapien
gcccggcctcgagcgtggcgagctg

SEQ ID NO: 1667888 - DNA, 25 bp, Homo sapien
ccggcctcgagcgtggcgagctgca

SEQ ID NO: 1667889 - DNA, 25 bp, Homo sapien
ggcctcgagcgtggcgagctgcagg

SEQ ID NO: 1667890 - DNA, 25 bp, Homo sapien
ccgagggccgcaggccgtagtcgcg

SEQ ID NO: 1667891 - DNA, 25 bp, Homo sapien
cgagatctcgatgttgccggtgtac

SEQ ID NO: 1667892 - DNA, 25 bp, Homo sapien
agctcctggcgcgagatctcgatgt

SEQ ID NO: 1667893 - DNA, 25 bp, Homo sapien
agcggcgggagagcttgcgcgccag

SEQ ID NO: 1667894 - DNA, 25 bp, Homo sapien
ggccgcgcacctgcagctgcgcgaa

SEQ ID NO: 1667895 - DNA, 25 bp, Homo sapien
aggtccccgaagtcgcggccgcgca

SEQ ID NO: 1667896 - DNA, 25 bp, Homo sapien
ctgcgaggcgcacaccgctggcgcc

SEQ ID NO: 1667897 - DNA, 25 bp, Homo sapien
agcagcgcgcccgagtagatgagca

SEQ ID NO: 1667898 - DNA, 25 bp, Homo sapien
agataacgctgaggtatgggtccca

SEQ ID NO: 1667899 - DNA, 25 bp, Homo sapien
gggtggccctgacaacggatcataa

SEQ ID NO: 1667900 - DNA, 25 bp, Homo sapien
cgaatattcccgagcgttgagcgaa

SEQ ID NO: 1667901 - DNA, 25 bp, Homo sapien
cacccagggaggtcacatatggcca

SEQ ID NO: 1667902 - DNA, 25 bp, Homo sapien
tattcctcttgatcaggaaactgga

SEQ ID NO: 1667903 - DNA, 25 bp, Homo sapien
tcctcttgatcaggaaactggagca

SEQ ID NO: 1667904 - DNA, 25 bp, Homo sapien
tgcttattcctcttgatcaggaaac

SEQ ID NO: 1667905 - DNA, 25 bp, Homo sapien
tctgcttattcctcttgatcaggaa

SEQ ID NO: 1667906 - DNA, 25 bp, Homo sapien
ctgcttattcctcttgatcaggaaa

SEQ ID NO: 1667907 - DNA, 25 bp, Homo sapien
gtctgcttattcctcttgatcagga

SEQ ID NO: 1667908 - DNA, 25 bp, Homo sapien
gtttcctgatcaagaggaataagca

SEQ ID NO: 1667909 - DNA, 25 bp, Homo sapien
tcctgatcaagaggaataagcagac

SEQ ID NO: 1667910 - DNA, 25 bp, Homo sapien
tccagtttcctgatcaagaggaata

SEQ ID NO: 1667911 - DNA, 25 bp, Homo sapien
tttcctgatcaagaggaataagcag

SEQ ID NO: 1667912 - DNA, 25 bp, Homo sapien
ttcctgatcaagaggaataagcaga

SEQ ID NO: 1667913 - DNA, 25 bp, Homo sapien
tgctccagtttcctgatcaagagga

SEQ ID NO: 1667914 - DNA, 25 bp, Homo sapien
cttgcggtgaatcagtccgttgtag

SEQ ID NO: 1667915 - DNA, 25 bp, Homo sapien
tcagtccgttgtagcggaaggaatt

SEQ ID NO: 1667916 - DNA, 25 bp, Homo sapien
ttgccgtcggctgccggctccacgc

SEQ ID NO: 1667917 - DNA, 25 bp, Homo sapien
tagcggaaggaattgcgggccttca

SEQ ID NO: 1667918 - DNA, 25 bp, Homo sapien
cggtgaatcagtccgttgtagcgga

SEQ ID NO: 1667919 - DNA, 25 bp, Homo sapien
gaatcagtccgttgtagcggaagga

SEQ ID NO: 1667920 - DNA, 25 bp, Homo sapien
cgcccacagtcttgcggtgaatcag

SEQ ID NO: 1667921 - DNA, 25 bp, Homo sapien
acgcccacagtcttgcggtgaatca

SEQ ID NO: 1667922 - DNA, 25 bp, Homo sapien
cacgcccacagtcttgcggtgaatc

SEQ ID NO: 1667923 - DNA, 25 bp, Homo sapien
tgattcaccgcaagactgtgggcgt

SEQ ID NO: 1667924 - DNA, 25 bp, Homo sapien
gattcaccgcaagactgtgggcgtg

SEQ ID NO: 1667925 - DNA, 25 bp, Homo sapien
ctgattcaccgcaagactgtgggcg

SEQ ID NO: 1667926 - DNA, 25 bp, Homo sapien
gcgtggagccggcagccgacggcaa

SEQ ID NO: 1667927 - DNA, 25 bp, Homo sapien
gctacaacggactgattcaccgcaa

SEQ ID NO: 1667928 - DNA, 25 bp, Homo sapien
ttgaaggcccgcaattccttccgct

SEQ ID NO: 1667929 - DNA, 25 bp, Homo sapien
tccgctacaacggactgattcaccg

SEQ ID NO: 1667930 - DNA, 25 bp, Homo sapien
aattccttccgctacaacggactga

SEQ ID NO: 1667931 - DNA, 25 bp, Homo sapien
ccttccgctacaacggactgattca

SEQ ID NO: 1667932 - DNA, 25 bp, Homo sapien
tcctgtggggctgtgagctttccca

SEQ ID NO: 1667933 - DNA, 25 bp, Homo sapien
tctcttgtagccagttactagaata

SEQ ID NO: 1667934 - DNA, 25 bp, Homo sapien
tcctgcccgtgtttgtgaatatcat

SEQ ID NO: 1667935 - DNA, 25 bp, Homo sapien
tggcgctgcccaggaatggtatcaa

SEQ ID NO: 1667936 - DNA, 25 bp, Homo sapien
ttatttcagtgggttccgaggccca

SEQ ID NO: 1667937 - DNA, 25 bp, Homo sapien
gattgtcactggaggcaagggctca

SEQ ID NO: 1667938 - DNA, 25 bp, Homo sapien
aaatggttgacgataaacgcagagc

SEQ ID NO: 1667939 - DNA, 25 bp, Homo sapien
caagggctcaaggaagggtcagacc

SEQ ID NO: 1667940 - DNA, 25 bp, Homo sapien
agaaaaacaaatccaggtcccagtg

SEQ ID NO: 1667941 - DNA, 25 bp, Homo sapien
gaaaaacaaatccaggtcccagtgc

SEQ ID NO: 1667942 - DNA, 25 bp, Homo sapien
cccagccataatttaaataacttag

SEQ ID NO: 1667943 - DNA, 25 bp, Homo sapien
taaataacttagagacagagttgga

SEQ ID NO: 1667944 - DNA, 25 bp, Homo sapien
ccccgtggatctctgtgagcagacg

SEQ ID NO: 1667945 - DNA, 25 bp, Homo sapien
agcgcccgcttcttgtccgtctttt

SEQ ID NO: 1667946 - DNA, 25 bp, Homo sapien
cgcctcctcgttgagtgcagactcg

SEQ ID NO: 1667947 - DNA, 25 bp, Homo sapien
tcttatcgcgctcgccagcatgctt

SEQ ID NO: 1667948 - DNA, 25 bp, Homo sapien
gtgggaagaggctcagggtcacagt

SEQ ID NO: 1667949 - DNA, 25 bp, Homo sapien
aggctcagggtcacagtgggtcggg

SEQ ID NO: 1667950 - DNA, 25 bp, Homo sapien
tcagggtcacagtgggtcgggcaac

SEQ ID NO: 1667951 - DNA, 25 bp, Homo sapien
aagaggctcagggtcacagtgggtc

SEQ ID NO: 1667952 - DNA, 25 bp, Homo sapien
tgggttggaccacacacaagagggc

SEQ ID NO: 1667953 - DNA, 25 bp, Homo sapien
tctggttcaacgagtgaggcctgca

SEQ ID NO: 1667954 - DNA, 25 bp, Homo sapien
tcccaaaaggacacgatgccatagg

SEQ ID NO: 1667955 - DNA, 25 bp, Homo sapien
cacacctgcgtgttggactctaaag

SEQ ID NO: 1667956 - DNA, 25 bp, Homo sapien
ggcaaaatcacctctggctgagaaa

SEQ ID NO: 1667957 - DNA, 25 bp, Homo sapien
ctagcagcaagtaggcctggagctc

SEQ ID NO: 1667958 - DNA, 25 bp, Homo sapien
ctgacaatgcataataccccttggg

SEQ ID NO: 1667959 - DNA, 25 bp, Homo sapien
tggagccatctcgtacgctgcagga

SEQ ID NO: 1667960 - DNA, 25 bp, Homo sapien
tcgttgcatagtaaggtgctcctgg

SEQ ID NO: 1667961 - DNA, 25 bp, Homo sapien
cactcgttgcatagtaaggtgctcc

SEQ ID NO: 1667962 - DNA, 25 bp, Homo sapien
tcctgggcacttctcaacagtactt

SEQ ID NO: 1667963 - DNA, 25 bp, Homo sapien
acttctcaacagtacttgggtgtcc

SEQ ID NO: 1667964 - DNA, 25 bp, Homo sapien
gagtttcatgcggaacagacctcca

SEQ ID NO: 1667965 - DNA, 25 bp, Homo sapien
tttcatgcggaacagacctccagca

SEQ ID NO: 1667966 - DNA, 25 bp, Homo sapien
gcggaacagacctccagcatatggg

SEQ ID NO: 1667967 - DNA, 25 bp, Homo sapien
agcaggagtttcatgcggaacagac

SEQ ID NO: 1667968 - DNA, 25 bp, Homo sapien
ccttgatgccatcgggtgggtctgc

SEQ ID NO: 1667969 - DNA, 25 bp, Homo sapien
cctcgttgggaaagaccttgatgcc

SEQ ID NO: 1667970 - DNA, 25 bp, Homo sapien
tccttgtacaccaggcggatgatgt

SEQ ID NO: 1667971 - DNA, 25 bp, Homo sapien
tgggtctgcggtcagtgtcgtcacc

SEQ ID NO: 1667972 - DNA, 25 bp, Homo sapien
tccccagtggttccacgtaggccag

SEQ ID NO: 1667973 - DNA, 25 bp, Homo sapien
gagcatccttgaaaccccggctcag

SEQ ID NO: 1667974 - DNA, 25 bp, Homo sapien
cgtaggccagagatctactctctcc

SEQ ID NO: 1667975 - DNA, 25 bp, Homo sapien
ttgctcctggtaacacccatgggcg

SEQ ID NO: 1667976 - DNA, 25 bp, Homo sapien
cttcctgcgttcttcggtccgccgg

SEQ ID NO: 1667977 - DNA, 25 bp, Homo sapien
ttcctgcgttcttcggtccgccggc

SEQ ID NO: 1667978 - DNA, 25 bp, Homo sapien
tcctgcgttcttcggtccgccggcc

SEQ ID NO: 1667979 - DNA, 25 bp, Homo sapien
caaactatggtcagaagcgagggaa

SEQ ID NO: 1667980 - DNA, 25 bp, Homo sapien
gttccttggttttcgacgcgctcgc

SEQ ID NO: 1667981 - DNA, 25 bp, Homo sapien
gacgtcagcgcgcacgttccttggt

SEQ ID NO: 1667982 - DNA, 25 bp, Homo sapien
gcgcaccactgcctctttataaccg

SEQ ID NO: 1667983 - DNA, 25 bp, Homo sapien
catgggccaatgactgatagagacc

SEQ ID NO: 1667984 - DNA, 25 bp, Homo sapien
tgcaaatgaagtgtgcgctgccgcc

SEQ ID NO: 1667985 - DNA, 25 bp, Homo sapien
gactacatttttctatgaggcgcca

SEQ ID NO: 1667986 - DNA, 25 bp, Homo sapien
ttaaacgcgtgatggaaggcgctcg

SEQ ID NO: 1667987 - DNA, 25 bp, Homo sapien
caaggcagagacttcttgagtgcac

SEQ ID NO: 1667988 - DNA, 25 bp, Homo sapien
tcgcaaatccctgagcacaaggcag

SEQ ID NO: 1667989 - DNA, 25 bp, Homo sapien
aatcctgcttcgcaaatccctgagc

SEQ ID NO: 1667990 - DNA, 25 bp, Homo sapien
cttgtaatgactgtacaaccaacac

SEQ ID NO: 1667991 - DNA, 25 bp, Homo sapien
tgtgccaactgaatagggacagggc

SEQ ID NO: 1667992 - DNA, 25 bp, Homo sapien
gaagtctcagatgacgaggtcccag

SEQ ID NO: 1667993 - DNA, 25 bp, Homo sapien
tccaaaaaataccaagtcgcagctc

SEQ ID NO: 1667994 - DNA, 25 bp, Homo sapien
gggaattgtcagtacacacctgctc

SEQ ID NO: 1667995 - DNA, 25 bp, Homo sapien
ttctggggaagtcacagttggcctg

SEQ ID NO: 1667996 - DNA, 25 bp, Homo sapien
gaagtcacagttggcctgagcagtg

SEQ ID NO: 1667997 - DNA, 25 bp, Homo sapien
ggggaagtcacagttggcctgagca

SEQ ID NO: 1667998 - DNA, 25 bp, Homo sapien
tcaagctggctcctttctggggaag

SEQ ID NO: 1667999 - DNA, 25 bp, Homo sapien
aatatggcctgttgtgctggttccc

SEQ ID NO: 1668000 - DNA, 25 bp, Homo sapien
gcactggacctcatggatcacggat

SEQ ID NO: 1668001 - DNA, 25 bp, Homo sapien
gaacaactgtaagtaccatgcggcc

SEQ ID NO: 1668002 - DNA, 25 bp, Homo sapien
tactagtggatggtgacagacagca

SEQ ID NO: 1668003 - DNA, 25 bp, Homo sapien
gggagtcttggcagatggtgacacc

SEQ ID NO: 1668004 - DNA, 25 bp, Homo sapien
ctatggggagtcttggcagatggtg

SEQ ID NO: 1668005 - DNA, 25 bp, Homo sapien
tcttggcagatggtgacaccattag

SEQ ID NO: 1668006 - DNA, 25 bp, Homo sapien
agtcttggcagatggtgacaccatt

SEQ ID NO: 1668007 - DNA, 25 bp, Homo sapien
gaagatgataccatagttgtgggtc

SEQ ID NO: 1668008 - DNA, 25 bp, Homo sapien
gatgataccatagttgtgggtcata

SEQ ID NO: 1668009 - DNA, 25 bp, Homo sapien
aagatgataccatagttgtgggtca

SEQ ID NO: 1668010 - DNA, 25 bp, Homo sapien
gaagaagatgataccatagttgtgg

SEQ ID NO: 1668011 - DNA, 25 bp, Homo sapien
tatgggacacctatgagtgccagaa

SEQ ID NO: 1668012 - DNA, 25 bp, Homo sapien
tggtgacaccaccaataccgatggc

SEQ ID NO: 1668013 - DNA, 25 bp, Homo sapien
gaccatcatctctggaggaggccct

SEQ ID NO: 1668014 - DNA, 25 bp, Homo sapien
gcaagagtaggtgtaccccaagcac

SEQ ID NO: 1668015 - DNA, 25 bp, Homo sapien
cacatagcatctgggcgacatcaca

SEQ ID NO: 1668016 - DNA, 25 bp, Homo sapien
tgccctgccttctacaacatggtgg

SEQ ID NO: 1668017 - DNA, 25 bp, Homo sapien
agcagtggaggcatctctttgtgcc

SEQ ID NO: 1668018 - DNA, 25 bp, Homo sapien
gtggaggcatctctttgtgccatct

SEQ ID NO: 1668019 - DNA, 25 bp, Homo sapien
aggtcccagagtgggtggtcatctc

SEQ ID NO: 1668020 - DNA, 25 bp, Homo sapien
agagtgggtggtcatctctggtgat

SEQ ID NO: 1668021 - DNA, 25 bp, Homo sapien
tcccagagtgggtggtcatctctgg

SEQ ID NO: 1668022 - DNA, 25 bp, Homo sapien
agtgggtggtcatctctggtgatga

SEQ ID NO: 1668023 - DNA, 25 bp, Homo sapien
acggtccctctgatgacgtcatagg

SEQ ID NO: 1668024 - DNA, 25 bp, Homo sapien
ggaagaggcacggtccctctgatga

SEQ ID NO: 1668025 - DNA, 25 bp, Homo sapien
cctctgatgacgtcatagggcaagg

SEQ ID NO: 1668026 - DNA, 25 bp, Homo sapien
ctgatgacgtcatagggcaaggcac

SEQ ID NO: 1668027 - DNA, 25 bp, Homo sapien
cgacgtgtcccaggaagatggcttt

SEQ ID NO: 1668028 - DNA, 25 bp, Homo sapien
cacaatcggtgaggcattttcccct

SEQ ID NO: 1668029 - DNA, 25 bp, Homo sapien
cgatgatgccaaaagaggccttgga

SEQ ID NO: 1668030 - DNA, 25 bp, Homo sapien
tatgtctagtgaggacacaatcggt

SEQ ID NO: 1668031 - DNA, 25 bp, Homo sapien
gttattataccacaagaaggaagcc

SEQ ID NO: 1668032 - DNA, 25 bp, Homo sapien
tgtgatgacctcatgggaacgaggc

SEQ ID NO: 1668033 - DNA, 25 bp, Homo sapien
tgtcatggaacaaggcgtcgtctct

SEQ ID NO: 1668034 - DNA, 25 bp, Homo sapien
cctctgaggacaccatagaacatgg

SEQ ID NO: 1668035 - DNA, 25 bp, Homo sapien
ttttgctagtgatgacctcatgagc

SEQ ID NO: 1668036 - DNA, 25 bp, Homo sapien
gctagtgatgacctcatgagccggc

SEQ ID NO: 1668037 - DNA, 25 bp, Homo sapien
tgatgacctcatgagccggcctctt

SEQ ID NO: 1668038 - DNA, 25 bp, Homo sapien
tagtgatgacctcatgagccggcct

SEQ ID NO: 1668039 - DNA, 25 bp, Homo sapien
gtggtggtgggcgtgcaggctggac

SEQ ID NO: 1668040 - DNA, 25 bp, Homo sapien
gccggctgcggcgagccgtgcaggg

SEQ ID NO: 1668041 - DNA, 25 bp, Homo sapien
ccggcgtcggacatccaggccggct

SEQ ID NO: 1668042 - DNA, 25 bp, Homo sapien
cagcaggttggagtgcgaggcggcc

SEQ ID NO: 1668043 - DNA, 25 bp, Homo sapien
cagcgcggggctgcgcgggggcgac

SEQ ID NO: 1668044 - DNA, 25 bp, Homo sapien
gggcagcgcggggctgcgcgggggc

SEQ ID NO: 1668045 - DNA, 25 bp, Homo sapien
ggtcggggggcagcgcggggctgcg

SEQ ID NO: 1668046 - DNA, 25 bp, Homo sapien
tcggggggcagcgcggggctgcgcg

SEQ ID NO: 1668047 - DNA, 25 bp, Homo sapien
aactcgtagcgcgaacggccaccat

SEQ ID NO: 1668048 - DNA, 25 bp, Homo sapien
gccccaggcctccatgcgatagccg

SEQ ID NO: 1668049 - DNA, 25 bp, Homo sapien
gcgcgcgcggcagcgtgaactcgta

SEQ ID NO: 1668050 - DNA, 25 bp, Homo sapien
tgctcgcgactctggcgcagggcct

SEQ ID NO: 1668051 - DNA, 25 bp, Homo sapien
ttgagggaagagtagcggttcagct

SEQ ID NO: 1668052 - DNA, 25 bp, Homo sapien
tttcacggcagcctcgtaggacggg

SEQ ID NO: 1668053 - DNA, 25 bp, Homo sapien
caggacagcgtggagtagtgcaagg

SEQ ID NO: 1668054 - DNA, 25 bp, Homo sapien
gttgtggaaggaccgagagcaggac

SEQ ID NO: 1668055 - DNA, 25 bp, Homo sapien
ctgggcggcggcaaggctcgccagt

SEQ ID NO: 1668056 - DNA, 25 bp, Homo sapien
tccctcagacccaggcgtccaggcc

SEQ ID NO: 1668057 - DNA, 25 bp, Homo sapien
ctcctccctcagacccaggcgtcca

SEQ ID NO: 1668058 - DNA, 25 bp, Homo sapien
tcagacccaggcgtccaggccccca

SEQ ID NO: 1668059 - DNA, 25 bp, Homo sapien
tcctccctcagacccaggcgtccag

SEQ ID NO: 1668060 - DNA, 25 bp, Homo sapien
ccagcccctcctccctcagacccag

SEQ ID NO: 1668061 - DNA, 25 bp, Homo sapien
caggcccccagcccctcctccctca

SEQ ID NO: 1668062 - DNA, 25 bp, Homo sapien
gcccccagcccctcctccctcagac

SEQ ID NO: 1668063 - DNA, 25 bp, Homo sapien
cccagcccctcctccctcagaccca

SEQ ID NO: 1668064 - DNA, 25 bp, Homo sapien
gggctgttgacgttgaggtgcaggt

SEQ ID NO: 1668065 - DNA, 25 bp, Homo sapien
tgttgacgttgaggtgcaggtagct

SEQ ID NO: 1668066 - DNA, 25 bp, Homo sapien
cttggggctgttgacgttgaggtgc

SEQ ID NO: 1668067 - DNA, 25 bp, Homo sapien
ccagtgtggcggcgtggtgcttggg

SEQ ID NO: 1668068 - DNA, 25 bp, Homo sapien
tgttgtagaggttcttgggcgtcct

SEQ ID NO: 1668069 - DNA, 25 bp, Homo sapien
ggtcttcacggtgttgtagaggttc

SEQ ID NO: 1668070 - DNA, 25 bp, Homo sapien
ggtcagggagctgcttcgggcccgg

SEQ ID NO: 1668071 - DNA, 25 bp, Homo sapien
ggcatgctgtcgggaccgccgatcc

SEQ ID NO: 1668072 - DNA, 25 bp, Homo sapien
gtggcagagaggtggtcaaaggcct

SEQ ID NO: 1668073 - DNA, 25 bp, Homo sapien
aggtggcagagaggtggtcaaaggc

SEQ ID NO: 1668074 - DNA, 25 bp, Homo sapien
aaaggtggcagagaggtggtcaaag

SEQ ID NO: 1668075 - DNA, 25 bp, Homo sapien
ctaaaggtggcagagaggtggtcaa

SEQ ID NO: 1668076 - DNA, 25 bp, Homo sapien
cacggccagggcgaagctgatgacc

SEQ ID NO: 1668077 - DNA, 25 bp, Homo sapien
gcacgggacgccttgctgaaggcca

SEQ ID NO: 1668078 - DNA, 25 bp, Homo sapien
tgaaggccactttggcgccgacgcc

SEQ ID NO: 1668079 - DNA, 25 bp, Homo sapien
gcacgttgatatcccggtgcgcccg

SEQ ID NO: 1668080 - DNA, 25 bp, Homo sapien
cgtgtcgtagttggagcaggaggcc

SEQ ID NO: 1668081 - DNA, 25 bp, Homo sapien
gccaggcgcatgtgacggtgctcac

SEQ ID NO: 1668082 - DNA, 25 bp, Homo sapien
aggcctgcgccaggcgcatgtgacg

SEQ ID NO: 1668083 - DNA, 25 bp, Homo sapien
gtggcccagcgcggcgtgtcgtagt

SEQ ID NO: 1668084 - DNA, 25 bp, Homo sapien
tgccacagcagaagcggtaggagcc

SEQ ID NO: 1668085 - DNA, 25 bp, Homo sapien
ccggtgctgcagttgaaggtggcgt

SEQ ID NO: 1668086 - DNA, 25 bp, Homo sapien
cagaagcggtaggagccggtgctgc

SEQ ID NO: 1668087 - DNA, 25 bp, Homo sapien
tgaaggtggcgtcgtactggcccat

SEQ ID NO: 1668088 - DNA, 25 bp, Homo sapien
gcttgcagggggtcgcactgggccg

SEQ ID NO: 1668089 - DNA, 25 bp, Homo sapien
tcgtggcgttggacgggcgcgccct

SEQ ID NO: 1668090 - DNA, 25 bp, Homo sapien
tggcctggccggcgctagaggccag

SEQ ID NO: 1668091 - DNA, 25 bp, Homo sapien
gggccggtcctggtgccgttggcgc

SEQ ID NO: 1668092 - DNA, 25 bp, Homo sapien
tcccagcgcaaaatagactctcgtt

SEQ ID NO: 1668093 - DNA, 25 bp, Homo sapien
ctgcggcgggagctgtgtgttccca

SEQ ID NO: 1668094 - DNA, 25 bp, Homo sapien
tgtgtgttcccagcgcaaaatagac

SEQ ID NO: 1668095 - DNA, 25 bp, Homo sapien
gcgcaaaatagactctcgttgccat

SEQ ID NO: 1668096 - DNA, 25 bp, Homo sapien
tttccgggagcagctgtccaatggg

SEQ ID NO: 1668097 - DNA, 25 bp, Homo sapien
ggcttccactgaggtccgggtgaca

SEQ ID NO: 1668098 - DNA, 25 bp, Homo sapien
ggtggatcgcaccactcttgggatc

SEQ ID NO: 1668099 - DNA, 25 bp, Homo sapien
catatatgtttattctgcgagtccg

SEQ ID NO: 1668100 - DNA, 25 bp, Homo sapien
cgctgtctggggcgggctccttgat

SEQ ID NO: 1668101 - DNA, 25 bp, Homo sapien
gtccgctgtctggggcgggctcctt

SEQ ID NO: 1668102 - DNA, 25 bp, Homo sapien
ctggggcgggctccttgatgagttt

SEQ ID NO: 1668103 - DNA, 25 bp, Homo sapien
gtctggggcgggctccttgatgagt

SEQ ID NO: 1668104 - DNA, 25 bp, Homo sapien
tctcggaccttctggctagcagctg

SEQ ID NO: 1668105 - DNA, 25 bp, Homo sapien
catggatgacaaatctgagggacac

SEQ ID NO: 1668106 - DNA, 25 bp, Homo sapien
tacacgtgactggttgagctcctca

SEQ ID NO: 1668107 - DNA, 25 bp, Homo sapien
tcaggaagcgtctagggtcccgatc

SEQ ID NO: 1668108 - DNA, 25 bp, Homo sapien
ggtgctcggtgaatgtcccacagag

SEQ ID NO: 1668109 - DNA, 25 bp, Homo sapien
taaactgccgatctgatatggccag

SEQ ID NO: 1668110 - DNA, 25 bp, Homo sapien
gaacactgtgagtgcctgatgcccc

SEQ ID NO: 1668111 - DNA, 25 bp, Homo sapien
tgggctctgactcctgcgtgaagac

SEQ ID NO: 1668112 - DNA, 25 bp, Homo sapien
actctgtctcatgcgggccagagcc

SEQ ID NO: 1668113 - DNA, 25 bp, Homo sapien
agaatgagcccttcgctggtggaga

SEQ ID NO: 1668114 - DNA, 25 bp, Homo sapien
accactctgtctcatgcgggccaga

SEQ ID NO: 1668115 - DNA, 25 bp, Homo sapien
gctgcagaatgagcccttcgctggt

SEQ ID NO: 1668116 - DNA, 25 bp, Homo sapien
agtctggacacccagacacgcaggc

SEQ ID NO: 1668117 - DNA, 25 bp, Homo sapien
ggaaggttggtgtggacgccgcagt

SEQ ID NO: 1668118 - DNA, 25 bp, Homo sapien
cttcctgggagcccctgatggcccc

SEQ ID NO: 1668119 - DNA, 25 bp, Homo sapien
gtggacgccgcagtctggacaccca

SEQ ID NO: 1668120 - DNA, 25 bp, Homo sapien
cagcccccggtctaggaggtccagg

SEQ ID NO: 1668121 - DNA, 25 bp, Homo sapien
cgtccaccaccacatggacctgcag

SEQ ID NO: 1668122 - DNA, 25 bp, Homo sapien
tccaccaccacatggacctgcagcc

SEQ ID NO: 1668123 - DNA, 25 bp, Homo sapien
ctgcgtgaggagcaggcgtccacca

SEQ ID NO: 1668124 - DNA, 25 bp, Homo sapien
ctgtgggtagagagaggtcagggcc

SEQ ID NO: 1668125 - DNA, 25 bp, Homo sapien
agagaggtcagggccaaccccggat

SEQ ID NO: 1668126 - DNA, 25 bp, Homo sapien
gagaggtcagggccaaccccggata

SEQ ID NO: 1668127 - DNA, 25 bp, Homo sapien
tagagagaggtcagggccaaccccg

SEQ ID NO: 1668128 - DNA, 25 bp, Homo sapien
gaagtggaggtttctggtcagggaa

SEQ ID NO: 1668129 - DNA, 25 bp, Homo sapien
tcaggaggggatccaagataggatg

SEQ ID NO: 1668130 - DNA, 25 bp, Homo sapien
gagggaggctcggatcagaggaagg

SEQ ID NO: 1668131 - DNA, 25 bp, Homo sapien
tctggtcagggaaggaggttctatt

SEQ ID NO: 1668132 - DNA, 25 bp, Homo sapien
agctggggccgactgtccagctcct

SEQ ID NO: 1668133 - DNA, 25 bp, Homo sapien
caggcctgtgcctcaatgccacaga

SEQ ID NO: 1668134 - DNA, 25 bp, Homo sapien
tggccagcggccgaaggccctcagt

SEQ ID NO: 1668135 - DNA, 25 bp, Homo sapien
caggtcttggccagcggccgaaggc

SEQ ID NO: 1668136 - DNA, 25 bp, Homo sapien
atgactggcacctcaagcagccggg

SEQ ID NO: 1668137 - DNA, 25 bp, Homo sapien
cttgtgggtactgctccgtcagcat

SEQ ID NO: 1668138 - DNA, 25 bp, Homo sapien
gtactgctccgtcagcatgactggc

SEQ ID NO: 1668139 - DNA, 25 bp, Homo sapien
cagcatgactggcacctcaagcagc

SEQ ID NO: 1668140 - DNA, 25 bp, Homo sapien
cggaacttctcctgcatgtcacaca

SEQ ID NO: 1668141 - DNA, 25 bp, Homo sapien
ggaacaggacagaggatcctgggag

SEQ ID NO: 1668142 - DNA, 25 bp, Homo sapien
cagccactgagacgatctgtgggaa

SEQ ID NO: 1668143 - DNA, 25 bp, Homo sapien
taggcgatgttgtggcggaacttct

SEQ ID NO: 1668144 - DNA, 25 bp, Homo sapien
accacggagcgtgcgatcccgtttt

SEQ ID NO: 1668145 - DNA, 25 bp, Homo sapien
tcagccataggaaagaagggggacc

SEQ ID NO: 1668146 - DNA, 25 bp, Homo sapien
aacacaaagaccacggagcgtgcga

SEQ ID NO: 1668147 - DNA, 25 bp, Homo sapien
acaaagaccacggagcgtgcgatcc

SEQ ID NO: 1668148 - DNA, 25 bp, Homo sapien
ctgggtagttaggacactgttgttc

SEQ ID NO: 1668149 - DNA, 25 bp, Homo sapien
ttgaatggaaactccctctgaaaca

SEQ ID NO: 1668150 - DNA, 25 bp, Homo sapien
cgcacctggccttgagctgctattt

SEQ ID NO: 1668151 - DNA, 25 bp, Homo sapien
gcaccatatctcaagtttaaaaacg

SEQ ID NO: 1668152 - DNA, 25 bp, Homo sapien
tctcggacggccaccgctgaggcct

SEQ ID NO: 1668153 - DNA, 25 bp, Homo sapien
tcggctctcggacggccaccgctga

SEQ ID NO: 1668154 - DNA, 25 bp, Homo sapien
gcaccctcacctctcggctctcgga

SEQ ID NO: 1668155 - DNA, 25 bp, Homo sapien
tcacctctcggctctcggacggcca

SEQ ID NO: 1668156 - DNA, 25 bp, Homo sapien
cagcaggtcgttctgccaatggaga

SEQ ID NO: 1668157 - DNA, 25 bp, Homo sapien
tgattagctcgcaaaggcgccgtgg

SEQ ID NO: 1668158 - DNA, 25 bp, Homo sapien
tgccggcaaggctgtcagtctcaag

SEQ ID NO: 1668159 - DNA, 25 bp, Homo sapien
caatccgcatatgcagctgctttgc

SEQ ID NO: 1668160 - DNA, 25 bp, Homo sapien
gcagggggccgcagaaatgtgggac

SEQ ID NO: 1668161 - DNA, 25 bp, Homo sapien
tcgggagccacgagatcagcctctt

SEQ ID NO: 1668162 - DNA, 25 bp, Homo sapien
cccagtcgggagccacgagatcagc

SEQ ID NO: 1668163 - DNA, 25 bp, Homo sapien
gggagccacgagatcagcctcttcc

SEQ ID NO: 1668164 - DNA, 25 bp, Homo sapien
cccaggtcgcgatgggacagacccg

SEQ ID NO: 1668165 - DNA, 25 bp, Homo sapien
acccggcgctggcaggggagcatca

SEQ ID NO: 1668166 - DNA, 25 bp, Homo sapien
ctggcccaggtcgcgatgggacaga

SEQ ID NO: 1668167 - DNA, 25 bp, Homo sapien
cgatgggacagacccggcgctggca

SEQ ID NO: 1668168 - DNA, 25 bp, Homo sapien
aatgttgtcaaagaggtcgagggta

SEQ ID NO: 1668169 - DNA, 25 bp, Homo sapien
gggcagcgagactcaggctggcgct

SEQ ID NO: 1668170 - DNA, 25 bp, Homo sapien
ctggggtgagcgcaatgttgtcaaa

SEQ ID NO: 1668171 - DNA, 25 bp, Homo sapien
ggtgtccagggcagcgagactcagg

SEQ ID NO: 1668172 - DNA, 25 bp, Homo sapien
tgcagggcccgcagcatgtgggcgg

SEQ ID NO: 1668173 - DNA, 25 bp, Homo sapien
aaccttctgtggttgggccgcctct

SEQ ID NO: 1668174 - DNA, 25 bp, Homo sapien
agggcccgcagcatgtgggcggccg

SEQ ID NO: 1668175 - DNA, 25 bp, Homo sapien
ccttctgtggttgggccgcctcttg

SEQ ID NO: 1668176 - DNA, 25 bp, Homo sapien
ggtggtctggagtaactccccacaa

SEQ ID NO: 1668177 - DNA, 25 bp, Homo sapien
tctggagtaactccccacaatattg

SEQ ID NO: 1668178 - DNA, 25 bp, Homo sapien
cagggtggtctggagtaactcccca

SEQ ID NO: 1668179 - DNA, 25 bp, Homo sapien
tggtctggagtaactccccacaata

SEQ ID NO: 1668180 - DNA, 25 bp, Homo sapien
ccaggcaccccgggctggggaggag

SEQ ID NO: 1668181 - DNA, 25 bp, Homo sapien
ggaggggcaggggactctggaggcc

SEQ ID NO: 1668182 - DNA, 25 bp, Homo sapien
ggcaggggactctggaggcccaggc

SEQ ID NO: 1668183 - DNA, 25 bp, Homo sapien
tctggaggcccaggcaccccgggct

SEQ ID NO: 1668184 - DNA, 25 bp, Homo sapien
tcaaatgcagcgattgagcgtggag

SEQ ID NO: 1668185 - DNA, 25 bp, Homo sapien
ggtgcctggagatggccaattaagg

SEQ ID NO: 1668186 - DNA, 25 bp, Homo sapien
gagatggccaattaagggaacaaag

SEQ ID NO: 1668187 - DNA, 25 bp, Homo sapien
aggcgaggccgccagtaagtcaaat

SEQ ID NO: 1668188 - DNA, 25 bp, Homo sapien
acgtacacgttgactgctacccctg

SEQ ID NO: 1668189 - DNA, 25 bp, Homo sapien
catggcacgtacacgttgactgcta

SEQ ID NO: 1668190 - DNA, 25 bp, Homo sapien
ggcacgtacacgttgactgctaccc

SEQ ID NO: 1668191 - DNA, 25 bp, Homo sapien
cagccatggcacgtacacgttgact

SEQ ID NO: 1668192 - DNA, 25 bp, Homo sapien
gcctggtgtggctggtgtctgtgtt

SEQ ID NO: 1668193 - DNA, 25 bp, Homo sapien
tgggcctggtgtggctggtgtctgt

SEQ ID NO: 1668194 - DNA, 25 bp, Homo sapien
tgtgctgaaccactgcacaggtggg

SEQ ID NO: 1668195 - DNA, 25 bp, Homo sapien
gctcaacactaccactgtgctgaac

SEQ ID NO: 1668196 - DNA, 25 bp, Homo sapien
tattgagcaccttgctttactgagc

SEQ ID NO: 1668197 - DNA, 25 bp, Homo sapien
tttgttgaggacctgcacttccagg

SEQ ID NO: 1668198 - DNA, 25 bp, Homo sapien
tttgcaggccttgctacagctggaa

SEQ ID NO: 1668199 - DNA, 25 bp, Homo sapien
tctcctgtctcctgtcattgagaac

SEQ ID NO: 1668200 - DNA, 25 bp, Homo sapien
tgagcacgtggctctaccgagggac

SEQ ID NO: 1668201 - DNA, 25 bp, Homo sapien
tctggatgagcgtgcacgaagcaca

SEQ ID NO: 1668202 - DNA, 25 bp, Homo sapien
tacaaccgtggtgcatggaaggatt

SEQ ID NO: 1668203 - DNA, 25 bp, Homo sapien
gaaactgcgtttaatgaccctcaga

SEQ ID NO: 1668204 - DNA, 25 bp, Homo sapien
agatccaccgtagcgtgcacaccgg

SEQ ID NO: 1668205 - DNA, 25 bp, Homo sapien
gcctgcgggccttcatctgcggcca

SEQ ID NO: 1668206 - DNA, 25 bp, Homo sapien
ccgactgtcccaaggccttcaagcg

SEQ ID NO: 1668207 - DNA, 25 bp, Homo sapien
ccagtgcggcctggccttcaagtgg

SEQ ID NO: 1668208 - DNA, 25 bp, Homo sapien
gagcttcacgcagagcaccaacctg

SEQ ID NO: 1668209 - DNA, 25 bp, Homo sapien
ttcacgcagagcaccaacctgcggc

SEQ ID NO: 1668210 - DNA, 25 bp, Homo sapien
acgcagagcaccaacctgcggcagc

SEQ ID NO: 1668211 - DNA, 25 bp, Homo sapien
ggaagagcttcacgcagagcaccaa

SEQ ID NO: 1668212 - DNA, 25 bp, Homo sapien
ccaccgccacgtgcacactggcgag

SEQ ID NO: 1668213 - DNA, 25 bp, Homo sapien
caaggccttccgcaacacgtcgtgc

SEQ ID NO: 1668214 - DNA, 25 bp, Homo sapien
accagcgcacgcactcggcggagcg

SEQ ID NO: 1668215 - DNA, 25 bp, Homo sapien
aagagcttcgcgcagacctccaacc

SEQ ID NO: 1668216 - DNA, 25 bp, Homo sapien
tttgagacactccagacggacgagg

SEQ ID NO: 1668217 - DNA, 25 bp, Homo sapien
caacctgctggttgttcagagcggg

SEQ ID NO: 1668218 - DNA, 25 bp, Homo sapien
cagctgaggagttgctcactggccc

SEQ ID NO: 1668219 - DNA, 25 bp, Homo sapien
gggccgatggcgaacagactcgact

SEQ ID NO: 1668220 - DNA, 25 bp, Homo sapien
tctgtccacccgtcagcagtgtgaa

SEQ ID NO: 1668221 - DNA, 25 bp, Homo sapien
gaagctacagactgacagccagggc

SEQ ID NO: 1668222 - DNA, 25 bp, Homo sapien
tgatgatcgcctactgtctgcgggt

SEQ ID NO: 1668223 - DNA, 25 bp, Homo sapien
tacacgctggtgagggaattcagca

SEQ ID NO: 1668224 - DNA, 25 bp, Homo sapien
tcagtccaggtgatgcttacagcca

SEQ ID NO: 1668225 - DNA, 25 bp, Homo sapien
gcaccgctgagaaatgggagagcca

SEQ ID NO: 1668226 - DNA, 25 bp, Homo sapien
agttctctccgtgtctcagtccagg

SEQ ID NO: 1668227 - DNA, 25 bp, Homo sapien
taacactgaacgagcatgcactggc

SEQ ID NO: 1668228 - DNA, 25 bp, Homo sapien
aagcgaggcctcactgagcgactgc

SEQ ID NO: 1668229 - DNA, 25 bp, Homo sapien
cacctgcactggtaccagggcatgg

SEQ ID NO: 1668230 - DNA, 25 bp, Homo sapien
catggtcgactctaaagaactgggt

SEQ ID NO: 1668231 - DNA, 25 bp, Homo sapien
caaaggctacacagactatgacgat

SEQ ID NO: 1668232 - DNA, 25 bp, Homo sapien
cctctctcggcttagaggtcgtgga

SEQ ID NO: 1668233 - DNA, 25 bp, Homo sapien
ctcctctctcggcttagaggtcgtg

SEQ ID NO: 1668234 - DNA, 25 bp, Homo sapien
tcctcctctctcggcttagaggtcg

SEQ ID NO: 1668235 - DNA, 25 bp, Homo sapien
tctctcggcttagaggtcgtggaag

SEQ ID NO: 1668236 - DNA, 25 bp, Homo sapien
tgatagtatttactccacagtaaaa

SEQ ID NO: 1668237 - DNA, 25 bp, Homo sapien
tgctaaacatgctaatgaccaccgg

SEQ ID NO: 1668238 - DNA, 25 bp, Homo sapien
caccggagtcttcagcaagtcatag

SEQ ID NO: 1668239 - DNA, 25 bp, Homo sapien
gacagtaatggagtttgctgcgtca

SEQ ID NO: 1668240 - DNA, 25 bp, Homo sapien
agcaaaattactaaggccaggtacg

SEQ ID NO: 1668241 - DNA, 25 bp, Homo sapien
ctcttctccccaatgatccctactc

SEQ ID NO: 1668242 - DNA, 25 bp, Homo sapien
ccgcgttgttgactcccctcttctc

SEQ ID NO: 1668243 - DNA, 25 bp, Homo sapien
ctccccaatgatccctactccagga

SEQ ID NO: 1668244 - DNA, 25 bp, Homo sapien
cccgcgttgttgactcccctcttct

SEQ ID NO: 1668245 - DNA, 25 bp, Homo sapien
cttggggtcactccacaggagcaca

SEQ ID NO: 1668246 - DNA, 25 bp, Homo sapien
aacctggattcgaaggctccttggg

SEQ ID NO: 1668247 - DNA, 25 bp, Homo sapien
gctccaggcaacacctcggtggcca

SEQ ID NO: 1668248 - DNA, 25 bp, Homo sapien
ggtcagaggccccaactctatggct

SEQ ID NO: 1668249 - DNA, 25 bp, Homo sapien
gaggccaggagttgacacccacctg

SEQ ID NO: 1668250 - DNA, 25 bp, Homo sapien
aggagttgacacccacctgggcaac

SEQ ID NO: 1668251 - DNA, 25 bp, Homo sapien
ttgaggccaggagttgacacccacc

SEQ ID NO: 1668252 - DNA, 25 bp, Homo sapien
ggccaggagttgacacccacctggg

SEQ ID NO: 1668253 - DNA, 25 bp, Homo sapien
ggggcgccccaggtgctccctgatg

SEQ ID NO: 1668254 - DNA, 25 bp, Homo sapien
gggcgccccaggtgctccctgatgg

SEQ ID NO: 1668255 - DNA, 25 bp, Homo sapien
tggcccgacgcctgccagatgagga

SEQ ID NO: 1668256 - DNA, 25 bp, Homo sapien
tccagggcgggctgaatgggcaggc

SEQ ID NO: 1668257 - DNA, 25 bp, Homo sapien
ggtcgcacaccaggacgttctccgg

SEQ ID NO: 1668258 - DNA, 25 bp, Homo sapien
agtcggtcagcttgaagcgccggca

SEQ ID NO: 1668259 - DNA, 25 bp, Homo sapien
tgccgtaggccgtcacgatggctga

SEQ ID NO: 1668260 - DNA, 25 bp, Homo sapien
aagctgtaggagtgtgccgactcga

SEQ ID NO: 1668261 - DNA, 25 bp, Homo sapien
cagaactcgtacaggaagccacgga

SEQ ID NO: 1668262 - DNA, 25 bp, Homo sapien
gtgccgactcgatgccaatgccgta

SEQ ID NO: 1668263 - DNA, 25 bp, Homo sapien
tgaccagaaggacgcggccatagca

SEQ ID NO: 1668264 - DNA, 25 bp, Homo sapien
gagctcctctaatgtcaggccgccc

SEQ ID NO: 1668265 - DNA, 25 bp, Homo sapien
tgagcactcagcgtcatcatgtcct

SEQ ID NO: 1668266 - DNA, 25 bp, Homo sapien
agctcgtccacctcggctcggacca

SEQ ID NO: 1668267 - DNA, 25 bp, Homo sapien
ggcccttcctcagactgtttgccgg

SEQ ID NO: 1668268 - DNA, 25 bp, Homo sapien
cttcctcagactgtttgccgggcat

SEQ ID NO: 1668269 - DNA, 25 bp, Homo sapien
cctccgccggcccttcctcagactg

SEQ ID NO: 1668270 - DNA, 25 bp, Homo sapien
cgccggcccttcctcagactgtttg

SEQ ID NO: 1668271 - DNA, 25 bp, Homo sapien
gttctggaccctccgctgggtgctg

SEQ ID NO: 1668272 - DNA, 25 bp, Homo sapien
gtttccagttctggaccctccgctg

SEQ ID NO: 1668273 - DNA, 25 bp, Homo sapien
tagttcatccccgtcctgcaggcgt

SEQ ID NO: 1668274 - DNA, 25 bp, Homo sapien
tgcaggcgtgaacctccacaagcca

SEQ ID NO: 1668275 - DNA, 25 bp, Homo sapien
ggggacggagctgggacaatcacaa

SEQ ID NO: 1668276 - DNA, 25 bp, Homo sapien
gggacggagctgggacaatcacaat

SEQ ID NO: 1668277 - DNA, 25 bp, Homo sapien
ggacggagctgggacaatcacaatc

SEQ ID NO: 1668278 - DNA, 25 bp, Homo sapien
tcttgtgacatggacagcgggagcc

SEQ ID NO: 1668279 - DNA, 25 bp, Homo sapien
tcagatcttgtgacatggacagcgg

SEQ ID NO: 1668280 - DNA, 25 bp, Homo sapien
catggacagcgggagccacggaagg

SEQ ID NO: 1668281 - DNA, 25 bp, Homo sapien
gtgacatggacagcgggagccacgg

SEQ ID NO: 1668282 - DNA, 25 bp, Homo sapien
gtctcgggatccaggtccagaagcc

SEQ ID NO: 1668283 - DNA, 25 bp, Homo sapien
gggctcctagtctcgggatccaggt

SEQ ID NO: 1668284 - DNA, 25 bp, Homo sapien
gctgggggcgcaaactggtcccagg

SEQ ID NO: 1668285 - DNA, 25 bp, Homo sapien
tcctagtctcgggatccaggtccag

SEQ ID NO: 1668286 - DNA, 25 bp, Homo sapien
tgccacgtcccaagggaaacaggca

SEQ ID NO: 1668287 - DNA, 25 bp, Homo sapien
tctggccgggtcagacccaggtctc

SEQ ID NO: 1668288 - DNA, 25 bp, Homo sapien
cacggctgcagaccgggtcgaagac

SEQ ID NO: 1668289 - DNA, 25 bp, Homo sapien
tcgaagaccagcacgttgtcaggtt

SEQ ID NO: 1668290 - DNA, 25 bp, Homo sapien
tttcctgcagcatcccgctgaggtc

SEQ ID NO: 1668291 - DNA, 25 bp, Homo sapien
tgcagcatcccgctgaggtccccac

SEQ ID NO: 1668292 - DNA, 25 bp, Homo sapien
cctttcctgcagcatcccgctgagg

SEQ ID NO: 1668293 - DNA, 25 bp, Homo sapien
cctgcagcatcccgctgaggtcccc

SEQ ID NO: 1668294 - DNA, 25 bp, Homo sapien
aaatcccgacgcaggagcttcagag

SEQ ID NO: 1668295 - DNA, 25 bp, Homo sapien
caggaaggtgcttctcaggaccaaa

SEQ ID NO: 1668296 - DNA, 25 bp, Homo sapien
actcctgggcgaaggcaaaatagcg

SEQ ID NO: 1668297 - DNA, 25 bp, Homo sapien
gcgcgtactcctgggcgaaggcaaa

SEQ ID NO: 1668298 - DNA, 25 bp, Homo sapien
gggcaaggagcacgcggccgtagga

SEQ ID NO: 1668299 - DNA, 25 bp, Homo sapien
gtcaccctgctggtcgtcagctcca

SEQ ID NO: 1668300 - DNA, 25 bp, Homo sapien
cccctggtgaggctgggcaaggagc

SEQ ID NO: 1668301 - DNA, 25 bp, Homo sapien
ggtactggtcccgaaggctcctcac

SEQ ID NO: 1668302 - DNA, 25 bp, Homo sapien
gaggttaggggtcactgccacagag

SEQ ID NO: 1668303 - DNA, 25 bp, Homo sapien
agaggttaggggtcactgccacaga

SEQ ID NO: 1668304 - DNA, 25 bp, Homo sapien
gagaggttaggggtcactgccacag

SEQ ID NO: 1668305 - DNA, 25 bp, Homo sapien
aggttaggggtcactgccacagagg

SEQ ID NO: 1668306 - DNA, 25 bp, Homo sapien
ggaggccctgcgctccatctcaggg

SEQ ID NO: 1668307 - DNA, 25 bp, Homo sapien
tgggtccccatcctcaggggtctcg

SEQ ID NO: 1668308 - DNA, 25 bp, Homo sapien
cgctccatctcagggcttcctgatg

SEQ ID NO: 1668309 - DNA, 25 bp, Homo sapien
ccccatcctcaggggtctcggaggc

SEQ ID NO: 1668310 - DNA, 25 bp, Homo sapien
actatgtccagctcaaattcagagg

SEQ ID NO: 1668311 - DNA, 25 bp, Homo sapien
tcactgttcccctattctattaaaa

SEQ ID NO: 1668312 - DNA, 25 bp, Homo sapien
atcactatgtccagctcaaattcag

SEQ ID NO: 1668313 - DNA, 25 bp, Homo sapien
aaggggattactcaaaagtgtgagc

SEQ ID NO: 1668314 - DNA, 25 bp, Homo sapien
ccggcttccccttgggcaccagtct

SEQ ID NO: 1668315 - DNA, 25 bp, Homo sapien
tatgaagccttctcccacgaagaag

SEQ ID NO: 1668316 - DNA, 25 bp, Homo sapien
gaagaagccccgagcactctcgctg

SEQ ID NO: 1668317 - DNA, 25 bp, Homo sapien
cagctccagcctggttggtatgaag

SEQ ID NO: 1668318 - DNA, 25 bp, Homo sapien
ctttcagaggaaggtattggactcc

SEQ ID NO: 1668319 - DNA, 25 bp, Homo sapien
taaacggaaatagccacgtgtgtct

SEQ ID NO: 1668320 - DNA, 25 bp, Homo sapien
cacagggcagcggtgacgatgatct

SEQ ID NO: 1668321 - DNA, 25 bp, Homo sapien
ttgactgagtaaggcgcggagcttc

SEQ ID NO: 1668322 - DNA, 25 bp, Homo sapien
caaggacagacctttgctcactggg

SEQ ID NO: 1668323 - DNA, 25 bp, Homo sapien
cactccttagtgtcaagggcgtgaa

SEQ ID NO: 1668324 - DNA, 25 bp, Homo sapien
ccaagtcgtcctgccttaagacaca

SEQ ID NO: 1668325 - DNA, 25 bp, Homo sapien
gagcggttcctaaccagcatcaggg

SEQ ID NO: 1668326 - DNA, 25 bp, Homo sapien
ccccagcccgcgcaggtgagccttg

SEQ ID NO: 1668327 - DNA, 25 bp, Homo sapien
cccgcgcaggtgagccttgctgtct

SEQ ID NO: 1668328 - DNA, 25 bp, Homo sapien
cagcccgcgcaggtgagccttgctg

SEQ ID NO: 1668329 - DNA, 25 bp, Homo sapien
ccgcgcaggtgagccttgctgtcta

SEQ ID NO: 1668330 - DNA, 25 bp, Homo sapien
ttcctcctccatctcgaaggctgag

SEQ ID NO: 1668331 - DNA, 25 bp, Homo sapien
tctcgaaggctgagtggtcttggct

SEQ ID NO: 1668332 - DNA, 25 bp, Homo sapien
tcctccatctcgaaggctgagtggt

SEQ ID NO: 1668333 - DNA, 25 bp, Homo sapien
gctgagtggtcttggctgtcgaaac

SEQ ID NO: 1668334 - DNA, 25 bp, Homo sapien
cttaatgtttgcgaggggcagcggg

SEQ ID NO: 1668335 - DNA, 25 bp, Homo sapien
cttccttaatgtttgcgaggggcag

SEQ ID NO: 1668336 - DNA, 25 bp, Homo sapien
taatgtttgcgaggggcagcgggag

SEQ ID NO: 1668337 - DNA, 25 bp, Homo sapien
tccttaatgtttgcgaggggcagcg

SEQ ID NO: 1668338 - DNA, 25 bp, Homo sapien
tctccagctctgcgcggtggcagcg

SEQ ID NO: 1668339 - DNA, 25 bp, Homo sapien
ctctccagctctgcgcggtggcagc

SEQ ID NO: 1668340 - DNA, 25 bp, Homo sapien
tccagctctgcgcggtggcagcgct

SEQ ID NO: 1668341 - DNA, 25 bp, Homo sapien
cctctccagctctgcgcggtggcag

SEQ ID NO: 1668342 - DNA, 25 bp, Homo sapien
ggcgcgctcccgagtgggtcacccc

SEQ ID NO: 1668343 - DNA, 25 bp, Homo sapien
tgggtcaccccgtgctgccgcaggt

SEQ ID NO: 1668344 - DNA, 25 bp, Homo sapien
tgaactcccgctggcagcgcacgca

SEQ ID NO: 1668345 - DNA, 25 bp, Homo sapien
ccgctggcagcgcacgcactggaag

SEQ ID NO: 1668346 - DNA, 25 bp, Homo sapien
cgtcgcctccgttctgcccttctcc

SEQ ID NO: 1668347 - DNA, 25 bp, Homo sapien
gcggcgtcgcctccgttctgccctt

SEQ ID NO: 1668348 - DNA, 25 bp, Homo sapien
ggcgtcgcctccgttctgcccttct

SEQ ID NO: 1668349 - DNA, 25 bp, Homo sapien
ggcggcgtcgcctccgttctgccct

SEQ ID NO: 1668350 - DNA, 25 bp, Homo sapien
tccggccccttggctgagttccgtg

SEQ ID NO: 1668351 - DNA, 25 bp, Homo sapien
cctccggccccttggctgagttccg

SEQ ID NO: 1668352 - DNA, 25 bp, Homo sapien
ggccccttggctgagttccgtgcac

SEQ ID NO: 1668353 - DNA, 25 bp, Homo sapien
cggccccttggctgagttccgtgca

SEQ ID NO: 1668354 - DNA, 25 bp, Homo sapien
ggtaggaggcgaggcggaaggccag

SEQ ID NO: 1668355 - DNA, 25 bp, Homo sapien
cgcggcggtgctggcggaggtagga

SEQ ID NO: 1668356 - DNA, 25 bp, Homo sapien
gggccgtggacgcggcggtgctggc

SEQ ID NO: 1668357 - DNA, 25 bp, Homo sapien
aggcgaggcggaaggccaggccgca

SEQ ID NO: 1668358 - DNA, 25 bp, Homo sapien
ggcacacgaaagggcggtcggtgga

SEQ ID NO: 1668359 - DNA, 25 bp, Homo sapien
ctgggcacacgaaagggcggtcggt

SEQ ID NO: 1668360 - DNA, 25 bp, Homo sapien
cacacgaaagggcggtcggtggagt

SEQ ID NO: 1668361 - DNA, 25 bp, Homo sapien
cacgaaagggcggtcggtggagtgg

SEQ ID NO: 1668362 - DNA, 25 bp, Homo sapien
ctcgcccttggtggcgaaggcttcg

SEQ ID NO: 1668363 - DNA, 25 bp, Homo sapien
acagcagcgtccagtctgcctggag

SEQ ID NO: 1668364 - DNA, 25 bp, Homo sapien
aaggcttcgcggcagcgcagacaca

SEQ ID NO: 1668365 - DNA, 25 bp, Homo sapien
cgcagacacgggtgcgccttgagct

SEQ ID NO: 1668366 - DNA, 25 bp, Homo sapien
gcgggtggaggaggctgcggatcca

SEQ ID NO: 1668367 - DNA, 25 bp, Homo sapien
ctgccacggccacggccccgaccac

SEQ ID NO: 1668368 - DNA, 25 bp, Homo sapien
ctaggggctccagcgccccccctgc

SEQ ID NO: 1668369 - DNA, 25 bp, Homo sapien
cctcggccacggtgaggtgggctgc

SEQ ID NO: 1668370 - DNA, 25 bp, Homo sapien
aggctgggctcggtgtcactgccta

SEQ ID NO: 1668371 - DNA, 25 bp, Homo sapien
cggccaaacgcggacggtggtggcg

SEQ ID NO: 1668372 - DNA, 25 bp, Homo sapien
gctcggtgtcactgcctaagccttc

SEQ ID NO: 1668373 - DNA, 25 bp, Homo sapien
cacggccggccaaacgcggacggtg

SEQ ID NO: 1668374 - DNA, 25 bp, Homo sapien
ctgggaagccggaagcgggaggacg

SEQ ID NO: 1668375 - DNA, 25 bp, Homo sapien
agaaacctattctggagcagaaaag

SEQ ID NO: 1668376 - DNA, 25 bp, Homo sapien
tcagaaacctattctggagcagaaa

SEQ ID NO: 1668377 - DNA, 25 bp, Homo sapien
aacctattctggagcagaaaaggca

SEQ ID NO: 1668378 - DNA, 25 bp, Homo sapien
ctcagaaacctattctggagcagaa

SEQ ID NO: 1668379 - DNA, 25 bp, Homo sapien
tcagcctcgcgaggtccctattcat

SEQ ID NO: 1668380 - DNA, 25 bp, Homo sapien
gcctcgcgaggtccctattcattac

SEQ ID NO: 1668381 - DNA, 25 bp, Homo sapien
ctattcattactccctggccggcgg

SEQ ID NO: 1668382 - DNA, 25 bp, Homo sapien
gaggtccctattcattactccctgg

SEQ ID NO: 1668383 - DNA, 25 bp, Homo sapien
taaagaattgcgtggaccggtccac

SEQ ID NO: 1668384 - DNA, 25 bp, Homo sapien
gatcagtccattctactgggcaagg

SEQ ID NO: 1668385 - DNA, 25 bp, Homo sapien
tagggtcgatccattccacagtcgg

SEQ ID NO: 1668386 - DNA, 25 bp, Homo sapien
gaaagaccaacggatgctacggaga

SEQ ID NO: 1668387 - DNA, 25 bp, Homo sapien
tgctgagcgtgatgaagcccttgcc

SEQ ID NO: 1668388 - DNA, 25 bp, Homo sapien
tcggagcagccgaagatcttcttgc

SEQ ID NO: 1668389 - DNA, 25 bp, Homo sapien
gcggaacagcttctcgcactcggag

SEQ ID NO: 1668390 - DNA, 25 bp, Homo sapien
gcactcgtggcggaagaacttgccg

SEQ ID NO: 1668391 - DNA, 25 bp, Homo sapien
cgcggccgacgcaaagaaggtcccg

SEQ ID NO: 1668392 - DNA, 25 bp, Homo sapien
cactggtacagggtgtcttccgagg

SEQ ID NO: 1668393 - DNA, 25 bp, Homo sapien
tcccgcagtcgcactggtacagggt

SEQ ID NO: 1668394 - DNA, 25 bp, Homo sapien
cgacgcaaagaaggtcccgcagtcg

SEQ ID NO: 1668395 - DNA, 25 bp, Homo sapien
agccccccgagcttgggcacgccgc

SEQ ID NO: 1668396 - DNA, 25 bp, Homo sapien
cagccccccgagcttgggcacgccg

SEQ ID NO: 1668397 - DNA, 25 bp, Homo sapien
ccgagcttgggcacgccgccccccg

SEQ ID NO: 1668398 - DNA, 25 bp, Homo sapien
cgagcttgggcacgccgccccccgc

SEQ ID NO: 1668399 - DNA, 25 bp, Homo sapien
gaagccagaggagcgtcgcccgcct

SEQ ID NO: 1668400 - DNA, 25 bp, Homo sapien
cagcgcgggcgcgttgaagtcgcgc

SEQ ID NO: 1668401 - DNA, 25 bp, Homo sapien
ttgaagtcgcgctcgcagcgcgggc

SEQ ID NO: 1668402 - DNA, 25 bp, Homo sapien
ggccctgcaggtcgtgcgtcagctt

SEQ ID NO: 1668403 - DNA, 25 bp, Homo sapien
ccaggcagcagtagggtttctcacc

SEQ ID NO: 1668404 - DNA, 25 bp, Homo sapien
agcgtgaggagaagcggagctcgca

SEQ ID NO: 1668405 - DNA, 25 bp, Homo sapien
ccacattgcagcagacggagcaggg

SEQ ID NO: 1668406 - DNA, 25 bp, Homo sapien
gagcagggcgcactcaaggcgggca

SEQ ID NO: 1668407 - DNA, 25 bp, Homo sapien
gctgtatttccagggtccggcactc

SEQ ID NO: 1668408 - DNA, 25 bp, Homo sapien
gtatttccagggtccggcactctcc

SEQ ID NO: 1668409 - DNA, 25 bp, Homo sapien
tgtatttccagggtccggcactctc

SEQ ID NO: 1668410 - DNA, 25 bp, Homo sapien
cagggtccggcactctccagacttc

SEQ ID NO: 1668411 - DNA, 25 bp, Homo sapien
gatgtgaagtcctgaaccaaggcag

SEQ ID NO: 1668412 - DNA, 25 bp, Homo sapien
gaaagaccatcggtagatgcctggt

SEQ ID NO: 1668413 - DNA, 25 bp, Homo sapien
gaggacagccaagtgtgaaagacca

SEQ ID NO: 1668414 - DNA, 25 bp, Homo sapien
accctggttgtgcaagtgtctggca

SEQ ID NO: 1668415 - DNA, 25 bp, Homo sapien
cagcaggccggtggagtcgcggaac

SEQ ID NO: 1668416 - DNA, 25 bp, Homo sapien
caggtctgagcggtagcggaagctc

SEQ ID NO: 1668417 - DNA, 25 bp, Homo sapien
tgaagctgtgcttgaaacccttgcc

SEQ ID NO: 1668418 - DNA, 25 bp, Homo sapien
agcgcaggtggttggctaggttgaa

SEQ ID NO: 1668419 - DNA, 25 bp, Homo sapien
ggcagcggcgggcggtgctggtgca

SEQ ID NO: 1668420 - DNA, 25 bp, Homo sapien
agcggcgggcggtgctggtgcaggg

SEQ ID NO: 1668421 - DNA, 25 bp, Homo sapien
gcggcagcggcgggcggtgctggtg

SEQ ID NO: 1668422 - DNA, 25 bp, Homo sapien
cagcggcgggcggtgctggtgcagg

SEQ ID NO: 1668423 - DNA, 25 bp, Homo sapien
ggtggcggggaatacagtggtatgt

SEQ ID NO: 1668424 - DNA, 25 bp, Homo sapien
atacagtggtatgtgggggctctct

SEQ ID NO: 1668425 - DNA, 25 bp, Homo sapien
ccagaattactcctgtaacatcaga

SEQ ID NO: 1668426 - DNA, 25 bp, Homo sapien
cactccacggagtgtttttaagcct

SEQ ID NO: 1668427 - DNA, 25 bp, Homo sapien
cacgcctgtggcaaaatcttcctaa

SEQ ID NO: 1668428 - DNA, 25 bp, Homo sapien
tgaccacttagcgaatgggagggca

SEQ ID NO: 1668429 - DNA, 25 bp, Homo sapien
gcaaagacgcaacaagtaagctgtt

SEQ ID NO: 1668430 - DNA, 25 bp, Homo sapien
gattcctccttaagtcctaccatga

SEQ ID NO: 1668431 - DNA, 25 bp, Homo sapien
tattatcccgtaagttcctcctgga

SEQ ID NO: 1668432 - DNA, 25 bp, Homo sapien
tgctacgtgcccacttaagctggtg

SEQ ID NO: 1668433 - DNA, 25 bp, Homo sapien
ctttacccaaccagcctcaatgagt

SEQ ID NO: 1668434 - DNA, 25 bp, Homo sapien
tcaaaccccacctctttgcctaaga

SEQ ID NO: 1668435 - DNA, 25 bp, Homo sapien
ttccttccacccctcaatccagggc

SEQ ID NO: 1668436 - DNA, 25 bp, Homo sapien
cagggcctacccaccattccttctg

SEQ ID NO: 1668437 - DNA, 25 bp, Homo sapien
tgcccctaaaaggtgcagccctggg

SEQ ID NO: 1668438 - DNA, 25 bp, Homo sapien
tcgctcgtacggagcgttggtcctg

SEQ ID NO: 1668439 - DNA, 25 bp, Homo sapien
gggccaggcgagtccacctcgctcg

SEQ ID NO: 1668440 - DNA, 25 bp, Homo sapien
ggcgagtccacctcgctcgtacgga

SEQ ID NO: 1668441 - DNA, 25 bp, Homo sapien
acctccctctgggcgccgacatttt

SEQ ID NO: 1668442 - DNA, 25 bp, Homo sapien
cctctgggcgccgacattttgggca

SEQ ID NO: 1668443 - DNA, 25 bp, Homo sapien
tccctctgggcgccgacattttggg

SEQ ID NO: 1668444 - DNA, 25 bp, Homo sapien
tctgggcgccgacattttgggcagc

SEQ ID NO: 1668445 - DNA, 25 bp, Homo sapien
cggtgagtgacggggtgcgtggccc

SEQ ID NO: 1668446 - DNA, 25 bp, Homo sapien
tgagtgacggggtgcgtggcccggg

SEQ ID NO: 1668447 - DNA, 25 bp, Homo sapien
gtgagtgacggggtgcgtggcccgg

SEQ ID NO: 1668448 - DNA, 25 bp, Homo sapien
ccggtgagtgacggggtgcgtggcc

SEQ ID NO: 1668449 - DNA, 25 bp, Homo sapien
acgttcattcgtaaacactggttga

SEQ ID NO: 1668450 - DNA, 25 bp, Homo sapien
gaaggaagctttggtctcaaaaggc

SEQ ID NO: 1668451 - DNA, 25 bp, Homo sapien
aattatctagcctttgtcagctcta

SEQ ID NO: 1668452 - DNA, 25 bp, Homo sapien
tgagggcactgggataaattatcta

SEQ ID NO: 1668453 - DNA, 25 bp, Homo sapien
tggccctgccactagttaacaatgt

SEQ ID NO: 1668454 - DNA, 25 bp, Homo sapien
gatgggtggagcaatgcatgtttcc

SEQ ID NO: 1668455 - DNA, 25 bp, Homo sapien
ttgggaccgaggatagacatgcttt

SEQ ID NO: 1668456 - DNA, 25 bp, Homo sapien
gagaaataccgaaagacagcatgtg

SEQ ID NO: 1668457 - DNA, 25 bp, Homo sapien
tacgctgatagaaactgtgattccc

SEQ ID NO: 1668458 - DNA, 25 bp, Homo sapien
tatgtacggagtgcttacagagtgc

SEQ ID NO: 1668459 - DNA, 25 bp, Homo sapien
gagtcctccctcctaattacgctga

SEQ ID NO: 1668460 - DNA, 25 bp, Homo sapien
ggcatgtgctttgtggtccccaggt

SEQ ID NO: 1668461 - DNA, 25 bp, Homo sapien
gaaagacgttctgctgcggcatctg

SEQ ID NO: 1668462 - DNA, 25 bp, Homo sapien
caagaccttcggcttcatcgagaac

SEQ ID NO: 1668463 - DNA, 25 bp, Homo sapien
gcgaatccttccacttgagcaagca

SEQ ID NO: 1668464 - DNA, 25 bp, Homo sapien
gagcaagcatcacgtggtgcacacg

SEQ ID NO: 1668465 - DNA, 25 bp, Homo sapien
tcaagaaacaccgcctggcgcacaa

SEQ ID NO: 1668466 - DNA, 25 bp, Homo sapien
gcctggcgcacaaggccgagaacct

SEQ ID NO: 1668467 - DNA, 25 bp, Homo sapien
cgccaacacctacggcctcaagaaa

SEQ ID NO: 1668468 - DNA, 25 bp, Homo sapien
ggatgcctgaccgaggggttcccat

SEQ ID NO: 1668469 - DNA, 25 bp, Homo sapien
tcaggaactgacttaacatgccccg

SEQ ID NO: 1668470 - DNA, 25 bp, Homo sapien
gaaacagatgaattggacgtgcccc

SEQ ID NO: 1668471 - DNA, 25 bp, Homo sapien
caacagggacttactgaggatttgc

SEQ ID NO: 1668472 - DNA, 25 bp, Homo sapien
tgcagttttgatgccgggcgcctct

SEQ ID NO: 1668473 - DNA, 25 bp, Homo sapien
ttcagtacagaaacttgaagatgag

SEQ ID NO: 1668474 - DNA, 25 bp, Homo sapien
aacatggtgaaccatcctttctact

SEQ ID NO: 1668475 - DNA, 25 bp, Homo sapien
tgaaccatcctttctactaaaagta

SEQ ID NO: 1668476 - DNA, 25 bp, Homo sapien
tcagtacagaaacttgaagatgagg

SEQ ID NO: 1668477 - DNA, 25 bp, Homo sapien
tatgtgttctcagttgcctccgaag

SEQ ID NO: 1668478 - DNA, 25 bp, Homo sapien
gaagtgcccaggctctgtcgtgaca

SEQ ID NO: 1668479 - DNA, 25 bp, Homo sapien
gataacctggtgagtgtcttctgcc

SEQ ID NO: 1668480 - DNA, 25 bp, Homo sapien
gaggctcaagtgctctcagcggtga

SEQ ID NO: 1668481 - DNA, 25 bp, Homo sapien
tccaccttcaccttcgcggtctccc

SEQ ID NO: 1668482 - DNA, 25 bp, Homo sapien
ctactggtcggcctccaccttcacc

SEQ ID NO: 1668483 - DNA, 25 bp, Homo sapien
gcctccaccttcaccttcgcggtct

SEQ ID NO: 1668484 - DNA, 25 bp, Homo sapien
tactggtcggcctccaccttcacct

SEQ ID NO: 1668485 - DNA, 25 bp, Homo sapien
gctccccgacccctcagccgccgac

SEQ ID NO: 1668486 - DNA, 25 bp, Homo sapien
ctccccgacccctcagccgccgacg

SEQ ID NO: 1668487 - DNA, 25 bp, Homo sapien
tccccgacccctcagccgccgacga

SEQ ID NO: 1668488 - DNA, 25 bp, Homo sapien
ccgctccccgacccctcagccgccg

SEQ ID NO: 1668489 - DNA, 25 bp, Homo sapien
ctggtgcttgcggaagttggaggag

SEQ ID NO: 1668490 - DNA, 25 bp, Homo sapien
ccggcccgtggaagtgggtgcgctg

SEQ ID NO: 1668491 - DNA, 25 bp, Homo sapien
aaggtgcggtcgcagagcgtgcagc

SEQ ID NO: 1668492 - DNA, 25 bp, Homo sapien
gccagtgtggatgcgggcgtggccg

SEQ ID NO: 1668493 - DNA, 25 bp, Homo sapien
gtgcacgcgctcgtggtctcgcatg

SEQ ID NO: 1668494 - DNA, 25 bp, Homo sapien
gcaatggtatggccgctcgccagtg

SEQ ID NO: 1668495 - DNA, 25 bp, Homo sapien
ccgcaatggtatggccgctcgccag

SEQ ID NO: 1668496 - DNA, 25 bp, Homo sapien
tgcacgcgctcgtggtctcgcatgt

SEQ ID NO: 1668497 - DNA, 25 bp, Homo sapien
ttggcgcagaacctgcaggcaaaag

SEQ ID NO: 1668498 - DNA, 25 bp, Homo sapien
aagggcttggcgcagaacctgcagg

SEQ ID NO: 1668499 - DNA, 25 bp, Homo sapien
gcttggcgcagaacctgcaggcaaa

SEQ ID NO: 1668500 - DNA, 25 bp, Homo sapien
ctgaggagcggcggaagggcttggc

SEQ ID NO: 1668501 - DNA, 25 bp, Homo sapien
ccgctgtgtccggaggcctccgaga

SEQ ID NO: 1668502 - DNA, 25 bp, Homo sapien
gcctctgttctgcaacggccgctgt

SEQ ID NO: 1668503 - DNA, 25 bp, Homo sapien
gggcctctgttctgcaacggccgct

SEQ ID NO: 1668504 - DNA, 25 bp, Homo sapien
tctgttctgcaacggccgctgtgtc

SEQ ID NO: 1668505 - DNA, 25 bp, Homo sapien
gcaagctgtagtgcgcgcgcaggct

SEQ ID NO: 1668506 - DNA, 25 bp, Homo sapien
gggcagctgtggccgcacacgtggc

SEQ ID NO: 1668507 - DNA, 25 bp, Homo sapien
gctcccccgtgtgcaagctgtagtg

SEQ ID NO: 1668508 - DNA, 25 bp, Homo sapien
agcaggggcgccaaggccttgaagg

SEQ ID NO: 1668509 - DNA, 25 bp, Homo sapien
agcgtggtgtccgtcaccttcacca

SEQ ID NO: 1668510 - DNA, 25 bp, Homo sapien
tggccatgttcgtggaacagcagct

SEQ ID NO: 1668511 - DNA, 25 bp, Homo sapien
aggccggcagtcatcaggcaccagg

SEQ ID NO: 1668512 - DNA, 25 bp, Homo sapien
agctcggaaaccagccggaaggcag

SEQ ID NO: 1668513 - DNA, 25 bp, Homo sapien
agtggctcctgggatcgcgactccg

SEQ ID NO: 1668514 - DNA, 25 bp, Homo sapien
tcgcgactccggagtcggtgagctc

SEQ ID NO: 1668515 - DNA, 25 bp, Homo sapien
tcctgggatcgcgactccggagtcg

SEQ ID NO: 1668516 - DNA, 25 bp, Homo sapien
tccggagtcggtgagctccgactct

SEQ ID NO: 1668517 - DNA, 25 bp, Homo sapien
tcactccagagcttatatatccaga

SEQ ID NO: 1668518 - DNA, 25 bp, Homo sapien
gatatcatttccctccatcacatag

SEQ ID NO: 1668519 - DNA, 25 bp, Homo sapien
cctccatcacatagccttgcagagg

SEQ ID NO: 1668520 - DNA, 25 bp, Homo sapien
ctttaggttatctttagagctggat

SEQ ID NO: 1668521 - DNA, 25 bp, Homo sapien
gcaacagctgttgatctgggaagca

SEQ ID NO: 1668522 - DNA, 25 bp, Homo sapien
agtgttgcataactcagtctccagg

SEQ ID NO: 1668523 - DNA, 25 bp, Homo sapien
aatgctttgacacaaggttctgaag

SEQ ID NO: 1668524 - DNA, 25 bp, Homo sapien
gagggtctggctaacgtgtaatgct

SEQ ID NO: 1668525 - DNA, 25 bp, Homo sapien
cagcagtgacggcattcttaagagt

SEQ ID NO: 1668526 - DNA, 25 bp, Homo sapien
tccggacgtgaaagtttgctgcgta

SEQ ID NO: 1668527 - DNA, 25 bp, Homo sapien
actgcggccgcttccggacgtgaaa

SEQ ID NO: 1668528 - DNA, 25 bp, Homo sapien
ttgctgcgtagggatagggagaccg

SEQ ID NO: 1668529 - DNA, 25 bp, Homo sapien
cactgtattatttcccgaggggaga

SEQ ID NO: 1668530 - DNA, 25 bp, Homo sapien
aagaggagggcggaaagccttgagg

SEQ ID NO: 1668531 - DNA, 25 bp, Homo sapien
ttggaaactgagaggccctgcgaag

SEQ ID NO: 1668532 - DNA, 25 bp, Homo sapien
gatgaatagtggaccttgagaagag

SEQ ID NO: 1668533 - DNA, 25 bp, Homo sapien
caaattctaggctgagaaactcgga

SEQ ID NO: 1668534 - DNA, 25 bp, Homo sapien
ccgggagaatgttatgcatggtgct

SEQ ID NO: 1668535 - DNA, 25 bp, Homo sapien
agaaactcggacttggtcctgaggg

SEQ ID NO: 1668536 - DNA, 25 bp, Homo sapien
gcatggtgctgaagttgcattcaac

SEQ ID NO: 1668537 - DNA, 25 bp, Homo sapien
tttcgacgccggagtccttcgcatg

SEQ ID NO: 1668538 - DNA, 25 bp, Homo sapien
aaagcctggccttcgctgcgcttcg

SEQ ID NO: 1668539 - DNA, 25 bp, Homo sapien
gcgcttcggtgtcgccacatgcctt

SEQ ID NO: 1668540 - DNA, 25 bp, Homo sapien
gtgctgccgcgtgtgcagctctcca

SEQ ID NO: 1668541 - DNA, 25 bp, Homo sapien
gtgatagtggggatgctttccattt

SEQ ID NO: 1668542 - DNA, 25 bp, Homo sapien
ctccggaggccatggacccaccgcc

SEQ ID NO: 1668543 - DNA, 25 bp, Homo sapien
taacaagcagtgatagtggggatgc

SEQ ID NO: 1668544 - DNA, 25 bp, Homo sapien
aagggtaacaagcagtgatagtggg

SEQ ID NO: 1668545 - DNA, 25 bp, Homo sapien
ggagtgcgcccgtgtctttgccagc

SEQ ID NO: 1668546 - DNA, 25 bp, Homo sapien
tcatcgacgccaatggggtccccta

SEQ ID NO: 1668547 - DNA, 25 bp, Homo sapien
tcgcaagggctacagctgcccggag

SEQ ID NO: 1668548 - DNA, 25 bp, Homo sapien
agagccaccgcgtgtcgcactcgga

SEQ ID NO: 1668549 - DNA, 25 bp, Homo sapien
ggtgccgagaactaggacctcgtcc

SEQ ID NO: 1668550 - DNA, 25 bp, Homo sapien
cagaacgacttttacgcaggcgcag

SEQ ID NO: 1668551 - DNA, 25 bp, Homo sapien
aaaagtcgaagctgtccccggagag

SEQ ID NO: 1668552 - DNA, 25 bp, Homo sapien
gttgtaagggaaatctcgcgcacgc

SEQ ID NO: 1668553 - DNA, 25 bp, Homo sapien
cagctcaacgagaataaacaaggtg

SEQ ID NO: 1668554 - DNA, 25 bp, Homo sapien
ttcgacgagttcgagcggcagctca

SEQ ID NO: 1668555 - DNA, 25 bp, Homo sapien
gatgcctcgacgtgaacttttgttt

SEQ ID NO: 1668556 - DNA, 25 bp, Homo sapien
tcgttcacgtgacgtccccagcgtt

SEQ ID NO: 1668557 - DNA, 25 bp, Homo sapien
tggaatccagcagtacagtcatagc

SEQ ID NO: 1668558 - DNA, 25 bp, Homo sapien
ctttaacattaagaaggactatcat

SEQ ID NO: 1668559 - DNA, 25 bp, Homo sapien
gctccaagcatggttgaggaatagc

SEQ ID NO: 1668560 - DNA, 25 bp, Homo sapien
atcattttatgcagttgcccactgc

SEQ ID NO: 1668561 - DNA, 25 bp, Homo sapien
tagccaacagatgtcttcacgctgg

SEQ ID NO: 1668562 - DNA, 25 bp, Homo sapien
gatggcctatactgctcccgggttg

SEQ ID NO: 1668563 - DNA, 25 bp, Homo sapien
tgggcaccgggctctttgaagcgcc

SEQ ID NO: 1668564 - DNA, 25 bp, Homo sapien
tttggcctgggcaagcgatgcttcc

SEQ ID NO: 1668565 - DNA, 25 bp, Homo sapien
gggtcagccggttccagattcagtt

SEQ ID NO: 1668566 - DNA, 25 bp, Homo sapien
gattcagttgcagaggagcatcccc

SEQ ID NO: 1668567 - DNA, 25 bp, Homo sapien
tcatgacctgtgtcggagcgttctc

SEQ ID NO: 1668568 - DNA, 25 bp, Homo sapien
gaattgctgaccacaccatgcagga

SEQ ID NO: 1668569 - DNA, 25 bp, Homo sapien
ctctgggtgggatcacatggaaagg

SEQ ID NO: 1668570 - DNA, 25 bp, Homo sapien
atggaaaggggaggcgagccgagcc

SEQ ID NO: 1668571 - DNA, 25 bp, Homo sapien
tccccacagggtcatagctcctggg

SEQ ID NO: 1668572 - DNA, 25 bp, Homo sapien
gaaaggggaggcgagccgagcctcc

SEQ ID NO: 1668573 - DNA, 25 bp, Homo sapien
gcaggcaggcccttcgtttgtgctg

SEQ ID NO: 1668574 - DNA, 25 bp, Homo sapien
cagcttcccttagtgtgcctaaaga

SEQ ID NO: 1668575 - DNA, 25 bp, Homo sapien
tgtatgtggcttggtgattacccag

SEQ ID NO: 1668576 - DNA, 25 bp, Homo sapien
tcccaagtctgtgcccgagttgctt

SEQ ID NO: 1668577 - DNA, 25 bp, Homo sapien
gaccatagaatgtccattggttggg

SEQ ID NO: 1668578 - DNA, 25 bp, Homo sapien
gaagaaaagggaccatagaatgtcc

SEQ ID NO: 1668579 - DNA, 25 bp, Homo sapien
tttttccagattctctgcatgtgca

SEQ ID NO: 1668580 - DNA, 25 bp, Homo sapien
aaagggaccatagaatgtccattgg

SEQ ID NO: 1668581 - DNA, 25 bp, Homo sapien
tgctagaacacttagggagtacctc

SEQ ID NO: 1668582 - DNA, 25 bp, Homo sapien
gacgactacttcagggtgttcccca

SEQ ID NO: 1668583 - DNA, 25 bp, Homo sapien
atagaggtgccaggtgaaggtccca

SEQ ID NO: 1668584 - DNA, 25 bp, Homo sapien
aagtatccggattgtggtgcctaca

SEQ ID NO: 1668585 - DNA, 25 bp, Homo sapien
gatcttgtattcctcgtcaatccaa

SEQ ID NO: 1668586 - DNA, 25 bp, Homo sapien
aggtccatgtgaaatggtcagatgg

SEQ ID NO: 1668587 - DNA, 25 bp, Homo sapien
tcagaggagcacacccctgatcttg

SEQ ID NO: 1668588 - DNA, 25 bp, Homo sapien
tcgtcaatccaaggtccatgtgaaa

SEQ ID NO: 1668589 - DNA, 25 bp, Homo sapien
cctataggataggaagcctctgatt

SEQ ID NO: 1668590 - DNA, 25 bp, Homo sapien
gcctctctacattctgatgtctacc

SEQ ID NO: 1668591 - DNA, 25 bp, Homo sapien
catctgatgttcatatgccctggca

SEQ ID NO: 1668592 - DNA, 25 bp, Homo sapien
tttttacacagtattgcctctctac

SEQ ID NO: 1668593 - DNA, 25 bp, Homo sapien
ttgcatatttatgggcaacgtaagt

SEQ ID NO: 1668594 - DNA, 25 bp, Homo sapien
tctcacctggtgcaactgtgtctcc

SEQ ID NO: 1668595 - DNA, 25 bp, Homo sapien
actgtgtctccgagggacttctgac

SEQ ID NO: 1668596 - DNA, 25 bp, Homo sapien
tgggcaacgtaagtagaagatgttt

SEQ ID NO: 1668597 - DNA, 25 bp, Homo sapien
cagtcgaggttcaggctcctcagtg

SEQ ID NO: 1668598 - DNA, 25 bp, Homo sapien
cagtgttttgcaggcgatgagtgct

SEQ ID NO: 1668599 - DNA, 25 bp, Homo sapien
gcacgggtgatcggacacgtttgca

SEQ ID NO: 1668600 - DNA, 25 bp, Homo sapien
tgcatcagcatccaaggcaatccag

SEQ ID NO: 1668601 - DNA, 25 bp, Homo sapien
atcggaagtaaggaaacagcccatc

SEQ ID NO: 1668602 - DNA, 25 bp, Homo sapien
tgcacataactgtctgacaccagtg

SEQ ID NO: 1668603 - DNA, 25 bp, Homo sapien
agcagcaatgtccttacaggaatcg

SEQ ID NO: 1668604 - DNA, 25 bp, Homo sapien
caggaatcggaagtaaggaaacagc

SEQ ID NO: 1668605 - DNA, 25 bp, Homo sapien
gagggacagggacttactgcacaag

SEQ ID NO: 1668606 - DNA, 25 bp, Homo sapien
tgcttcagcgctgcacacagagatg

SEQ ID NO: 1668607 - DNA, 25 bp, Homo sapien
tatcttccagggcatttgagcccag

SEQ ID NO: 1668608 - DNA, 25 bp, Homo sapien
gagatgccactccattatcttccag

SEQ ID NO: 1668609 - DNA, 25 bp, Homo sapien
caaacttcactggagatgtcacact

SEQ ID NO: 1668610 - DNA, 25 bp, Homo sapien
agggcttcacacagcaacgtcattc

SEQ ID NO: 1668611 - DNA, 25 bp, Homo sapien
acttcactggagatgtcacactttc

SEQ ID NO: 1668612 - DNA, 25 bp, Homo sapien
tcattccttcgtccctcaagggatt

SEQ ID NO: 1668613 - DNA, 25 bp, Homo sapien
cagatgagggttgtgaagaactgcc

SEQ ID NO: 1668614 - DNA, 25 bp, Homo sapien
ggatgtttcagcgtctcacacaggt

SEQ ID NO: 1668615 - DNA, 25 bp, Homo sapien
tcagctcttctatcttgcacattgg

SEQ ID NO: 1668616 - DNA, 25 bp, Homo sapien
gaggctagtgccgtacaggctcaga

SEQ ID NO: 1668617 - DNA, 25 bp, Homo sapien
gagccagcgctttgcaaagaatcgc

SEQ ID NO: 1668618 - DNA, 25 bp, Homo sapien
tcgccagggagggatcatcaaggct

SEQ ID NO: 1668619 - DNA, 25 bp, Homo sapien
taatgaacattgagcaaagctcccg

SEQ ID NO: 1668620 - DNA, 25 bp, Homo sapien
ttcggagtttacaaacaggctgagc

SEQ ID NO: 1668621 - DNA, 25 bp, Homo sapien
gatattctccacacacatgcgaagt

SEQ ID NO: 1668622 - DNA, 25 bp, Homo sapien
ggaaagctatggcttccctatcagc

SEQ ID NO: 1668623 - DNA, 25 bp, Homo sapien
acaaaccaatgaatagttcctggaa

SEQ ID NO: 1668624 - DNA, 25 bp, Homo sapien
catgcgaagtgtcgttaaatgttga

SEQ ID NO: 1668625 - DNA, 25 bp, Homo sapien
agctgggttatgcttccaatggccg

SEQ ID NO: 1668626 - DNA, 25 bp, Homo sapien
aacatggcggcacaaaactcttgga

SEQ ID NO: 1668627 - DNA, 25 bp, Homo sapien
ccaatggccgggttaggatcgtctt

SEQ ID NO: 1668628 - DNA, 25 bp, Homo sapien
tagtcgggctctgttcaccttaggt

SEQ ID NO: 1668629 - DNA, 25 bp, Homo sapien
tggcacaagataaacagcggcccat

SEQ ID NO: 1668630 - DNA, 25 bp, Homo sapien
acaagataaacagcggcccattatc

SEQ ID NO: 1668631 - DNA, 25 bp, Homo sapien
taaacagcggcccattatctctcac

SEQ ID NO: 1668632 - DNA, 25 bp, Homo sapien
gcacaagataaacagcggcccatta

SEQ ID NO: 1668633 - DNA, 25 bp, Homo sapien
aattgaagactttcagggctttgct

SEQ ID NO: 1668634 - DNA, 25 bp, Homo sapien
actttcagggctttgctcttctcac

SEQ ID NO: 1668635 - DNA, 25 bp, Homo sapien
agactttcagggctttgctcttctc

SEQ ID NO: 1668636 - DNA, 25 bp, Homo sapien
aaaattgaagactttcagggctttg

SEQ ID NO: 1668637 - DNA, 25 bp, Homo sapien
gaccacagtgtgtcgtctagccgca

SEQ ID NO: 1668638 - DNA, 25 bp, Homo sapien
tagaaatgctcagggacgtgaagac

SEQ ID NO: 1668639 - DNA, 25 bp, Homo sapien
cagtaagctggtctctgcgataccg

SEQ ID NO: 1668640 - DNA, 25 bp, Homo sapien
gataattggcattggctgccgctgc

SEQ ID NO: 1668641 - DNA, 25 bp, Homo sapien
aggttcagtgttacctcccatgcct

SEQ ID NO: 1668642 - DNA, 25 bp, Homo sapien
tccaaaggttgtttgaggagctcct

SEQ ID NO: 1668643 - DNA, 25 bp, Homo sapien
ccttcagataccacaacaagccaaa

SEQ ID NO: 1668644 - DNA, 25 bp, Homo sapien
tttcctattgatctgtagaaacagg

SEQ ID NO: 1668645 - DNA, 25 bp, Homo sapien
atcgccccaggattgtgaactgagg

SEQ ID NO: 1668646 - DNA, 25 bp, Homo sapien
tcgccccaggattgtgaactgaggt

SEQ ID NO: 1668647 - DNA, 25 bp, Homo sapien
taatactcttgagacagtgtaggaa

SEQ ID NO: 1668648 - DNA, 25 bp, Homo sapien
tcttgcatcccagtcacggtagtaa

SEQ ID NO: 1668649 - DNA, 25 bp, Homo sapien
taggaaaattatagtcctaattctc

SEQ ID NO: 1668650 - DNA, 25 bp, Homo sapien
taaatactgtttacgtacaacatga

SEQ ID NO: 1668651 - DNA, 25 bp, Homo sapien
atttgacgttctcatggctgcagac

SEQ ID NO: 1668652 - DNA, 25 bp, Homo sapien
tgtatttgacgttctcatggctgca

SEQ ID NO: 1668653 - DNA, 25 bp, Homo sapien
ctagatgctgtatttgacgttctca

SEQ ID NO: 1668654 - DNA, 25 bp, Homo sapien
gatgctgtatttgacgttctcatgg

SEQ ID NO: 1668655 - DNA, 25 bp, Homo sapien
cagtcatcagcaactgctgggtttg

SEQ ID NO: 1668656 - DNA, 25 bp, Homo sapien
taggtattattgaacctggctgaga

SEQ ID NO: 1668657 - DNA, 25 bp, Homo sapien
tgtgttcaggccagttaatggaagc

SEQ ID NO: 1668658 - DNA, 25 bp, Homo sapien
caggtgtcacaccaatttctctgcc

SEQ ID NO: 1668659 - DNA, 25 bp, Homo sapien
cttaagtacacaatctgggctgatc

SEQ ID NO: 1668660 - DNA, 25 bp, Homo sapien
cactggttaacatgcactcttctag

SEQ ID NO: 1668661 - DNA, 25 bp, Homo sapien
tgggctgatcaagctctcaagaagt

SEQ ID NO: 1668662 - DNA, 25 bp, Homo sapien
gaacagaggcaagagatcgacagca

SEQ ID NO: 1668663 - DNA, 25 bp, Homo sapien
atatattgacagatatcgctgctaa

SEQ ID NO: 1668664 - DNA, 25 bp, Homo sapien
gctgctaaagaaacagccagacaga

SEQ ID NO: 1668665 - DNA, 25 bp, Homo sapien
gacagatatcgctgctaaagaaaca

SEQ ID NO: 1668666 - DNA, 25 bp, Homo sapien
caatattcaccaacatgcagttggg

SEQ ID NO: 1668667 - DNA, 25 bp, Homo sapien
catgtcgcctattctggggagccca

SEQ ID NO: 1668668 - DNA, 25 bp, Homo sapien
gggagcccatgctcccgtaccccta

SEQ ID NO: 1668669 - DNA, 25 bp, Homo sapien
cgtgctttcatgtcgcctattctgg

SEQ ID NO: 1668670 - DNA, 25 bp, Homo sapien
gtacccctatcacccatgatgccat

SEQ ID NO: 1668671 - DNA, 25 bp, Homo sapien
tttttaagcgattcacacacaggtc

SEQ ID NO: 1668672 - DNA, 25 bp, Homo sapien
ttggaaacagcaagggaaacgtcac

SEQ ID NO: 1668673 - DNA, 25 bp, Homo sapien
tccaagggcgctgcagcaattttca

SEQ ID NO: 1668674 - DNA, 25 bp, Homo sapien
gaaacgtcacatgcaacactccgta

SEQ ID NO: 1668675 - DNA, 25 bp, Homo sapien
gcccacgggcgcctcgatgccttct

SEQ ID NO: 1668676 - DNA, 25 bp, Homo sapien
acgcccacgggcgcctcgatgcctt

SEQ ID NO: 1668677 - DNA, 25 bp, Homo sapien
ccacgggcgcctcgatgccttctac

SEQ ID NO: 1668678 - DNA, 25 bp, Homo sapien
acgggcgcctcgatgccttctactg

SEQ ID NO: 1668679 - DNA, 25 bp, Homo sapien
tcagcggattgctggataaggtcag

SEQ ID NO: 1668680 - DNA, 25 bp, Homo sapien
gatttcttcacattcgctggctcgc

SEQ ID NO: 1668681 - DNA, 25 bp, Homo sapien
ccactgatgaggagagaggcgattt

SEQ ID NO: 1668682 - DNA, 25 bp, Homo sapien
tcacacagtatgttcatcccgtcgc

SEQ ID NO: 1668683 - DNA, 25 bp, Homo sapien
ggcgtgagccgtcgcgttggcctgt

SEQ ID NO: 1668684 - DNA, 25 bp, Homo sapien
gcgtgagccgtcgcgttggcctgtg

SEQ ID NO: 1668685 - DNA, 25 bp, Homo sapien
gtgagccgtcgcgttggcctgtgta

SEQ ID NO: 1668686 - DNA, 25 bp, Homo sapien
gagccgtcgcgttggcctgtgtatt

SEQ ID NO: 1668687 - DNA, 25 bp, Homo sapien
ccagaagcagtcgagacataggaca

SEQ ID NO: 1668688 - DNA, 25 bp, Homo sapien
gatactcaggtatgtcaggctccga

SEQ ID NO: 1668689 - DNA, 25 bp, Homo sapien
catgtgggctcgtgcaggatgtcat

SEQ ID NO: 1668690 - DNA, 25 bp, Homo sapien
ccgattacgagccaaagccttgagt

SEQ ID NO: 1668691 - DNA, 25 bp, Homo sapien
tagaatgctccagggctttagacag

SEQ ID NO: 1668692 - DNA, 25 bp, Homo sapien
tctgaaataccattaaggtcattgt

SEQ ID NO: 1668693 - DNA, 25 bp, Homo sapien
tgtcaaagatatgcagctcccggag

SEQ ID NO: 1668694 - DNA, 25 bp, Homo sapien
gagtgtgcgaagtttacagctagaa

SEQ ID NO: 1668695 - DNA, 25 bp, Homo sapien
tctctccagtagacaaggctcttca

SEQ ID NO: 1668696 - DNA, 25 bp, Homo sapien
gatctctctccagtagacaaggctc

SEQ ID NO: 1668697 - DNA, 25 bp, Homo sapien
tctctctccagtagacaaggctctt

SEQ ID NO: 1668698 - DNA, 25 bp, Homo sapien
tccagtagacaaggctcttcatttg

SEQ ID NO: 1668699 - DNA, 25 bp, Homo sapien
gcaatggctgtacaaaactcctgga

SEQ ID NO: 1668700 - DNA, 25 bp, Homo sapien
aatattcgcggcctgcaacacagag

SEQ ID NO: 1668701 - DNA, 25 bp, Homo sapien
gttgctcggcaaaagaatattcgcg

SEQ ID NO: 1668702 - DNA, 25 bp, Homo sapien
tatggtgcgtcaacttttccgggtc

SEQ ID NO: 1668703 - DNA, 25 bp, Homo sapien
gaatcataggctaattgaagtatgt

SEQ ID NO: 1668704 - DNA, 25 bp, Homo sapien
ctggtagaatcataggctaattgaa

SEQ ID NO: 1668705 - DNA, 25 bp, Homo sapien
gctaattgaagtatgtagaacacat

SEQ ID NO: 1668706 - DNA, 25 bp, Homo sapien
cataggctaattgaagtatgtagaa

SEQ ID NO: 1668707 - DNA, 25 bp, Homo sapien
ttttctcctcatgacagctttgcat

SEQ ID NO: 1668708 - DNA, 25 bp, Homo sapien
aaaagtgtgactttcccattgcagc

SEQ ID NO: 1668709 - DNA, 25 bp, Homo sapien
ccaaaagtgtgactttcccattgca

SEQ ID NO: 1668710 - DNA, 25 bp, Homo sapien
caaaagtgtgactttcccattgcag

SEQ ID NO: 1668711 - DNA, 25 bp, Homo sapien
gaaatcaagaatcttgcgtgccaga

SEQ ID NO: 1668712 - DNA, 25 bp, Homo sapien
gagattctctagataccacagcagg

SEQ ID NO: 1668713 - DNA, 25 bp, Homo sapien
tactgtccctcataagagattggca

SEQ ID NO: 1668714 - DNA, 25 bp, Homo sapien
gattggcaacacgttagccagttct

SEQ ID NO: 1668715 - DNA, 25 bp, Homo sapien
tcagagaagggattttgaggcacaa

SEQ ID NO: 1668716 - DNA, 25 bp, Homo sapien
aatatcgtgaaaatggccatactgc

SEQ ID NO: 1668717 - DNA, 25 bp, Homo sapien
aggaagaatcaatatcgtgaaaatg

SEQ ID NO: 1668718 - DNA, 25 bp, Homo sapien
ggaagaacatttcatgctcatgggt

SEQ ID NO: 1668719 - DNA, 25 bp, Homo sapien
tggaagaacatttcatgctcatggg

SEQ ID NO: 1668720 - DNA, 25 bp, Homo sapien
tctgatttcatactgtgacatagga

SEQ ID NO: 1668721 - DNA, 25 bp, Homo sapien
ctttttgcctagtgatggcttctta

SEQ ID NO: 1668722 - DNA, 25 bp, Homo sapien
tgtgacataggatcattcaaggaaa

SEQ ID NO: 1668723 - DNA, 25 bp, Homo sapien
ttccataagctttttgcctagtgat

SEQ ID NO: 1668724 - DNA, 25 bp, Homo sapien
gtgcctgcccggtgattagccagct

SEQ ID NO: 1668725 - DNA, 25 bp, Homo sapien
agctgactcctctcttgattggcca

SEQ ID NO: 1668726 - DNA, 25 bp, Homo sapien
tccttggctggtcgaaagcaaacaa

SEQ ID NO: 1668727 - DNA, 25 bp, Homo sapien
cagcgggaagaaaaaggcggtgcct

SEQ ID NO: 1668728 - DNA, 25 bp, Homo sapien
gaaatactgctgcacctgcgtgttt

SEQ ID NO: 1668729 - DNA, 25 bp, Homo sapien
gcccagatgccccaattgtctttct

SEQ ID NO: 1668730 - DNA, 25 bp, Homo sapien
ctttcttcacccaggactaaacagg

SEQ ID NO: 1668731 - DNA, 25 bp, Homo sapien
tgcacctgcgtgtttctgcccagat

SEQ ID NO: 1668732 - DNA, 25 bp, Homo sapien
ctgattaggagacggtccacacccc

SEQ ID NO: 1668733 - DNA, 25 bp, Homo sapien
gagacggtccacaccccgtttatga

SEQ ID NO: 1668734 - DNA, 25 bp, Homo sapien
gacggtccacaccccgtttatgatg

SEQ ID NO: 1668735 - DNA, 25 bp, Homo sapien
cggtccacaccccgtttatgatgtt

SEQ ID NO: 1668736 - DNA, 25 bp, Homo sapien
catagtgcacctgttcactgggaca

SEQ ID NO: 1668737 - DNA, 25 bp, Homo sapien
aaggcctccgtcaccactcttattt

SEQ ID NO: 1668738 - DNA, 25 bp, Homo sapien
cttatttcaacatagtgcacctgtt

SEQ ID NO: 1668739 - DNA, 25 bp, Homo sapien
caagataaacaaggcctccgtcacc

SEQ ID NO: 1668740 - DNA, 25 bp, Homo sapien
gccacacgaacattcttcaaggagt

SEQ ID NO: 1668741 - DNA, 25 bp, Homo sapien
gcagaaagatgttgtgccacacgaa

SEQ ID NO: 1668742 - DNA, 25 bp, Homo sapien
cccaactctccaaatgaaccatttt

SEQ ID NO: 1668743 - DNA, 25 bp, Homo sapien
tcaaggagtttagcatgtaggaagg

SEQ ID NO: 1668744 - DNA, 25 bp, Homo sapien
gcttccagccgccaatcattaagga

SEQ ID NO: 1668745 - DNA, 25 bp, Homo sapien
tcattaaggaccaggaaggcgtgga

SEQ ID NO: 1668746 - DNA, 25 bp, Homo sapien
caagggagcaattcgttggccaatc

SEQ ID NO: 1668747 - DNA, 25 bp, Homo sapien
ggcggtgggcgtttcgcttcacata

SEQ ID NO: 1668748 - DNA, 25 bp, Homo sapien
ttcttgaggctgatcgatcacagcc

SEQ ID NO: 1668749 - DNA, 25 bp, Homo sapien
ggctgatcgatcacagccaggcctc

SEQ ID NO: 1668750 - DNA, 25 bp, Homo sapien
gaggctgatcgatcacagccaggcc

SEQ ID NO: 1668751 - DNA, 25 bp, Homo sapien
ttgaggctgatcgatcacagccagg

SEQ ID NO: 1668752 - DNA, 25 bp, Homo sapien
gaacgccctgtgtttataaggtgcc

SEQ ID NO: 1668753 - DNA, 25 bp, Homo sapien
cctgtgtttataaggtgcctcccag

SEQ ID NO: 1668754 - DNA, 25 bp, Homo sapien
tagatgaacgccctgtgtttataag

SEQ ID NO: 1668755 - DNA, 25 bp, Homo sapien
cagttagtggggtagatgaacgccc

SEQ ID NO: 1668756 - DNA, 25 bp, Homo sapien
taattctccttatggtgctgaccat

SEQ ID NO: 1668757 - DNA, 25 bp, Homo sapien
tacgaggctgcggtgtaatttacga

SEQ ID NO: 1668758 - DNA, 25 bp, Homo sapien
gcggtgtaatttccaaagctgcggt

SEQ ID NO: 1668759 - DNA, 25 bp, Homo sapien
tgcggtgtaatttccaaagctgcgg

SEQ ID NO: 1668760 - DNA, 25 bp, Homo sapien
cccgaggctgcggtgtaatttccga

SEQ ID NO: 1668761 - DNA, 25 bp, Homo sapien
tccgtggctgcggtgtaatgtccga

SEQ ID NO: 1668762 - DNA, 25 bp, Homo sapien
tacgaggctgcggtgtaatgtccgt

SEQ ID NO: 1668763 - DNA, 25 bp, Homo sapien
ccgaggctgcggtgtaatgtccgtg

SEQ ID NO: 1668764 - DNA, 25 bp, Homo sapien
ctgcggtgtaatttacgaggctgcg

SEQ ID NO: 1668765 - DNA, 25 bp, Homo sapien
cgtggctgcggtgtaatttaccgag

SEQ ID NO: 1668766 - DNA, 25 bp, Homo sapien
ccgtggctgcggtgtaatttaccga

SEQ ID NO: 1668767 - DNA, 25 bp, Homo sapien
gtggctgcggtgtaatttaccgagg

SEQ ID NO: 1668768 - DNA, 25 bp, Homo sapien
tggctgcggtgtaatttaccgaggc

SEQ ID NO: 1668769 - DNA, 25 bp, Homo sapien
taacacctgcggtagaggatacagt

SEQ ID NO: 1668770 - DNA, 25 bp, Homo sapien
tgcaagagcaattaacacctgcggt

SEQ ID NO: 1668771 - DNA, 25 bp, Homo sapien
gagcaattaacacctgcggtagagg

SEQ ID NO: 1668772 - DNA, 25 bp, Homo sapien
gtagaggatacagtgaactgaggtt

SEQ ID NO: 1668773 - DNA, 25 bp, Homo sapien
gattatatctttcacctgcatccaa

SEQ ID NO: 1668774 - DNA, 25 bp, Homo sapien
tctgtgggcactggattatatcttt

SEQ ID NO: 1668775 - DNA, 25 bp, Homo sapien
aatccagtaactattatgcggggca

SEQ ID NO: 1668776 - DNA, 25 bp, Homo sapien
gcagtctgtgggcactggattatat

SEQ ID NO: 1668777 - DNA, 25 bp, Homo sapien
ggtcccgttccttctgactgaggga

SEQ ID NO: 1668778 - DNA, 25 bp, Homo sapien
ctgaagggtcccgttccttctgact

SEQ ID NO: 1668779 - DNA, 25 bp, Homo sapien
aagggtcccgttccttctgactgag

SEQ ID NO: 1668780 - DNA, 25 bp, Homo sapien
cccgttccttctgactgagggaggc

SEQ ID NO: 1668781 - DNA, 25 bp, Homo sapien
aacagggtcccattctacctccatg

SEQ ID NO: 1668782 - DNA, 25 bp, Homo sapien
ttacgatggttttgtattaacctga

SEQ ID NO: 1668783 - DNA, 25 bp, Homo sapien
taaacagggtcccattctacctcca

SEQ ID NO: 1668784 - DNA, 25 bp, Homo sapien
taacctgaatattattcctgtaaac

SEQ ID NO: 1668785 - DNA, 25 bp, Homo sapien
cattaaaatcccacgcacacttgag

SEQ ID NO: 1668786 - DNA, 25 bp, Homo sapien
caccaccacttgtcttcaaggtcat

SEQ ID NO: 1668787 - DNA, 25 bp, Homo sapien
cacacttgagtttcagacagagctc

SEQ ID NO: 1668788 - DNA, 25 bp, Homo sapien
aggtctgtatctcctctctcactac

SEQ ID NO: 1668789 - DNA, 25 bp, Homo sapien
ttctgcagcctgcatgtcgactttt

SEQ ID NO: 1668790 - DNA, 25 bp, Homo sapien
tttctgcagcctgcatgtcgacttt

SEQ ID NO: 1668791 - DNA, 25 bp, Homo sapien
ccaattcattgcctagaaggttcag

SEQ ID NO: 1668792 - DNA, 25 bp, Homo sapien
cagttgtcagattgcatttcgccaa

SEQ ID NO: 1668793 - DNA, 25 bp, Homo sapien
gattgaccaggctcttactgctgct

SEQ ID NO: 1668794 - DNA, 25 bp, Homo sapien
tcttgacaccatcagtatccaattc

SEQ ID NO: 1668795 - DNA, 25 bp, Homo sapien
tgtgcaatgcacgatgtggtttcag

SEQ ID NO: 1668796 - DNA, 25 bp, Homo sapien
tgcaatgcacgatgtggtttcagag

SEQ ID NO: 1668797 - DNA, 25 bp, Homo sapien
tgtgtgcaatgcacgatgtggtttc

SEQ ID NO: 1668798 - DNA, 25 bp, Homo sapien
caagtgtgtgcaatgcacgatgtgg

SEQ ID NO: 1668799 - DNA, 25 bp, Homo sapien
gccctctcttgtgaaagaacaacct

SEQ ID NO: 1668800 - DNA, 25 bp, Homo sapien
cattatgattatggctgagggcatt

SEQ ID NO: 1668801 - DNA, 25 bp, Homo sapien
agccctctcttgtgaaagaacaacc

SEQ ID NO: 1668802 - DNA, 25 bp, Homo sapien
tcacattatgattatggctgagggc

SEQ ID NO: 1668803 - DNA, 25 bp, Homo sapien
aagtgcttgcaagcgggtgctgcca

SEQ ID NO: 1668804 - DNA, 25 bp, Homo sapien
caggttaccatctgggcgacccaag

SEQ ID NO: 1668805 - DNA, 25 bp, Homo sapien
aggctctgcaggttaccatctgggc

SEQ ID NO: 1668806 - DNA, 25 bp, Homo sapien
ttctgcaggagagcatctgacaagt

SEQ ID NO: 1668807 - DNA, 25 bp, Homo sapien
gaaacaaggctaggtcctgacagct

SEQ ID NO: 1668808 - DNA, 25 bp, Homo sapien
gattaaatcccaggcacaatcgagt

SEQ ID NO: 1668809 - DNA, 25 bp, Homo sapien
tcagggccgcacacaatagctttat

SEQ ID NO: 1668810 - DNA, 25 bp, Homo sapien
cagctggctgccgacaagttgcatt

SEQ ID NO: 1668811 - DNA, 25 bp, Homo sapien
atcagagagatcattgtctcccagg

SEQ ID NO: 1668812 - DNA, 25 bp, Homo sapien
ctccttcaggggacacgttggtagc

SEQ ID NO: 1668813 - DNA, 25 bp, Homo sapien
ttggtagcgtggaggactccctcag

SEQ ID NO: 1668814 - DNA, 25 bp, Homo sapien
ccctcaggcttctcacatcagagag

SEQ ID NO: 1668815 - DNA, 25 bp, Homo sapien
gagctgacaaatctggtaggtaagg

SEQ ID NO: 1668816 - DNA, 25 bp, Homo sapien
gaaagagctgacaaatctggtaggt

SEQ ID NO: 1668817 - DNA, 25 bp, Homo sapien
gctgacaaatctggtaggtaaggcc

SEQ ID NO: 1668818 - DNA, 25 bp, Homo sapien
acaaatctggtaggtaaggccacag

SEQ ID NO: 1668819 - DNA, 25 bp, Homo sapien
caataatgaggtcctgcagaaccca

SEQ ID NO: 1668820 - DNA, 25 bp, Homo sapien
tgaagttcagatgggtcagcttgct

SEQ ID NO: 1668821 - DNA, 25 bp, Homo sapien
cccactcaggagttaccgatttgca

SEQ ID NO: 1668822 - DNA, 25 bp, Homo sapien
gaggttgcaagctgagtgtctcaaa

SEQ ID NO: 1668823 - DNA, 25 bp, Homo sapien
tttcagtgcaagacagagacccttc

SEQ ID NO: 1668824 - DNA, 25 bp, Homo sapien
agacccttcacagaggaagcatgaa

SEQ ID NO: 1668825 - DNA, 25 bp, Homo sapien
tgtgaccaacgtagagcaaatgctg

SEQ ID NO: 1668826 - DNA, 25 bp, Homo sapien
catgaagtttgctgttactcaggtc

SEQ ID NO: 1668827 - DNA, 25 bp, Homo sapien
cagaaagccttagcttatttaacct

SEQ ID NO: 1668828 - DNA, 25 bp, Homo sapien
taaccttttacagtgctttaggcaa

SEQ ID NO: 1668829 - DNA, 25 bp, Homo sapien
cctttcaaggatgtgactgctaaca

SEQ ID NO: 1668830 - DNA, 25 bp, Homo sapien
ccagaatttccaagtccctttcaag

SEQ ID NO: 1668831 - DNA, 25 bp, Homo sapien
ctcgtgtaggcagtgaaaaagtcgt

SEQ ID NO: 1668832 - DNA, 25 bp, Homo sapien
gaatgtgaaattggagagaggcact

SEQ ID NO: 1668833 - DNA, 25 bp, Homo sapien
gatacgacccaacatcttctttgtg

SEQ ID NO: 1668834 - DNA, 25 bp, Homo sapien
tctttgtgaagtcttcctcctggga

SEQ ID NO: 1668835 - DNA, 25 bp, Homo sapien
tattaggatccagtaggcgctgcag

SEQ ID NO: 1668836 - DNA, 25 bp, Homo sapien
gatcgtaatacctcaccttcggctg

SEQ ID NO: 1668837 - DNA, 25 bp, Homo sapien
gatcgtgatcagtaaggtagccagg

SEQ ID NO: 1668838 - DNA, 25 bp, Homo sapien
tgcttcagacaggaacatacggtcc

SEQ ID NO: 1668839 - DNA, 25 bp, Homo sapien
ttctctctgtattttcttctgtggt

SEQ ID NO: 1668840 - DNA, 25 bp, Homo sapien
gttctctctgtattttcttctgtgg

SEQ ID NO: 1668841 - DNA, 25 bp, Homo sapien
ctatcaggttttcctcacttcctcg

SEQ ID NO: 1668842 - DNA, 25 bp, Homo sapien
agctatcaggttttcctcacttcct

SEQ ID NO: 1668843 - DNA, 25 bp, Homo sapien
tatcaggttttcctcacttcctcga

SEQ ID NO: 1668844 - DNA, 25 bp, Homo sapien
tcaggttttcctcacttcctcgaaa

SEQ ID NO: 1668845 - DNA, 25 bp, Homo sapien
tctcagagtgacaatctccataggg

SEQ ID NO: 1668846 - DNA, 25 bp, Homo sapien
tacaaaaactacagatgcctattaa

SEQ ID NO: 1668847 - DNA, 25 bp, Homo sapien
gacaatctccatagggccactggta

SEQ ID NO: 1668848 - DNA, 25 bp, Homo sapien
gggccactggtacaaaaactacaga

SEQ ID NO: 1668849 - DNA, 25 bp, Homo sapien
gaagcagacaccagtgtgtgagaac

SEQ ID NO: 1668850 - DNA, 25 bp, Homo sapien
caagtccagaagcagacaccagtgt

SEQ ID NO: 1668851 - DNA, 25 bp, Homo sapien
ttatttaacaaaagcaccaagtcca

SEQ ID NO: 1668852 - DNA, 25 bp, Homo sapien
atttaacaaaagcaccaagtccaga

SEQ ID NO: 1668853 - DNA, 25 bp, Homo sapien
gcttcctctagcatctctggttctt

SEQ ID NO: 1668854 - DNA, 25 bp, Homo sapien
ctagctcgtctagttcttcttggtt

SEQ ID NO: 1668855 - DNA, 25 bp, Homo sapien
tggcatccctgggtctgcatattcc

SEQ ID NO: 1668856 - DNA, 25 bp, Homo sapien
ggtttggatcttggcatccctgggt

SEQ ID NO: 1668857 - DNA, 25 bp, Homo sapien
tgtttcttcttctagctcgtctagt

SEQ ID NO: 1668858 - DNA, 25 bp, Homo sapien
gatatgaaaataccccagagtgaaa

SEQ ID NO: 1668859 - DNA, 25 bp, Homo sapien
gaaataaacattgacgatgagatat

SEQ ID NO: 1668860 - DNA, 25 bp, Homo sapien
tgacgatgagatatgaaaatacccc

SEQ ID NO: 1668861 - DNA, 25 bp, Homo sapien
taaacattgacgatgagatatgaaa

SEQ ID NO: 1668862 - DNA, 25 bp, Homo sapien
tcctgggttggatcttgcagctctt

SEQ ID NO: 1668863 - DNA, 25 bp, Homo sapien
ctgggttggatcttgcagctcttgg

SEQ ID NO: 1668864 - DNA, 25 bp, Homo sapien
ttcctgggttggatcttgcagctct

SEQ ID NO: 1668865 - DNA, 25 bp, Homo sapien
cctgggttggatcttgcagctcttg

SEQ ID NO: 1668866 - DNA, 25 bp, Homo sapien
tcattgtctggaagatgccgaggac

SEQ ID NO: 1668867 - DNA, 25 bp, Homo sapien
aagatgccgaggaccactttccatg

SEQ ID NO: 1668868 - DNA, 25 bp, Homo sapien
gccgaggaccactttccatgcctga

SEQ ID NO: 1668869 - DNA, 25 bp, Homo sapien
tttcatctcggctctaactttctca

SEQ ID NO: 1668870 - DNA, 25 bp, Homo sapien
ggacagattcaaagggtcggcagct

SEQ ID NO: 1668871 - DNA, 25 bp, Homo sapien
tcaagtttgcccaggggatacgcgg

SEQ ID NO: 1668872 - DNA, 25 bp, Homo sapien
tcaaagggtcggcagctctcaagtt

SEQ ID NO: 1668873 - DNA, 25 bp, Homo sapien
tcggcagctctcaagtttgcccagg

SEQ ID NO: 1668874 - DNA, 25 bp, Homo sapien
gatccagggccatcaggtaaggcag

SEQ ID NO: 1668875 - DNA, 25 bp, Homo sapien
gggccgaccagaagtccatcagctg

SEQ ID NO: 1668876 - DNA, 25 bp, Homo sapien
tcctccagctgatactgatccaggg

SEQ ID NO: 1668877 - DNA, 25 bp, Homo sapien
ggggcaggtgattacagaaaagttc

SEQ ID NO: 1668878 - DNA, 25 bp, Homo sapien
aagtgtgtgcgatcaacttttgctc

SEQ ID NO: 1668879 - DNA, 25 bp, Homo sapien
gctcctaatcgaagaaggaagtgtg

SEQ ID NO: 1668880 - DNA, 25 bp, Homo sapien
agatggaaagctcctaatcgaagaa

SEQ ID NO: 1668881 - DNA, 25 bp, Homo sapien
gaaggaagtgtgtgcgatcaacttt

SEQ ID NO: 1668882 - DNA, 25 bp, Homo sapien
aacctttgtgaatataaaactcata

SEQ ID NO: 1668883 - DNA, 25 bp, Homo sapien
cctttgtgaatataaaactcataca

SEQ ID NO: 1668884 - DNA, 25 bp, Homo sapien
tgtctgaagacacatcatcataacc

SEQ ID NO: 1668885 - DNA, 25 bp, Homo sapien
gacacatcatcataacctttgtgaa

SEQ ID NO: 1668886 - DNA, 25 bp, Homo sapien
cagataattgggtaagtcgccagca

SEQ ID NO: 1668887 - DNA, 25 bp, Homo sapien
tcatacgggttgaatgaagggtcca

SEQ ID NO: 1668888 - DNA, 25 bp, Homo sapien
gaagggtccatcatcgatctttggg

SEQ ID NO: 1668889 - DNA, 25 bp, Homo sapien
gatgaagctgtgttcggcctttgcc

SEQ ID NO: 1668890 - DNA, 25 bp, Homo sapien
gtgtccaacagtgctgatgaccaca

SEQ ID NO: 1668891 - DNA, 25 bp, Homo sapien
ctggtgtccaacagtgctgatgacc

SEQ ID NO: 1668892 - DNA, 25 bp, Homo sapien
gctggtgtccaacagtgctgatgac

SEQ ID NO: 1668893 - DNA, 25 bp, Homo sapien
tgctgatgaccacagcggtgtgtcc

SEQ ID NO: 1668894 - DNA, 25 bp, Homo sapien
cagggtcccagctatcagccatatc

SEQ ID NO: 1668895 - DNA, 25 bp, Homo sapien
ccagggtcccagctatcagccatat

SEQ ID NO: 1668896 - DNA, 25 bp, Homo sapien
gatttggtccgattcttcctgctgc

SEQ ID NO: 1668897 - DNA, 25 bp, Homo sapien
ctgttgggatccaaacgcacattcc

SEQ ID NO: 1668898 - DNA, 25 bp, Homo sapien
cacagggtatgggtcggatttggtc

SEQ ID NO: 1668899 - DNA, 25 bp, Homo sapien
cctgctgcattggtacagtagcaga

SEQ ID NO: 1668900 - DNA, 25 bp, Homo sapien
tccttcgcagggagccgcaaccacg

SEQ ID NO: 1668901 - DNA, 25 bp, Homo sapien
cagccccgtgaacgacccaggtagg

SEQ ID NO: 1668902 - DNA, 25 bp, Homo sapien
ggacgtgcgccctttgcagtcagag

SEQ ID NO: 1668903 - DNA, 25 bp, Homo sapien
agggagccgcaaccacgggaccagc

SEQ ID NO: 1668904 - DNA, 25 bp, Homo sapien
caggcctgggacaaacgggcacccg

SEQ ID NO: 1668905 - DNA, 25 bp, Homo sapien
gggaaggaacgactcgagctctaag

SEQ ID NO: 1668906 - DNA, 25 bp, Homo sapien
ctctaaggatgggacccggaaggca

SEQ ID NO: 1668907 - DNA, 25 bp, Homo sapien
ctctgctacccggaatccaggaggg

SEQ ID NO: 1668908 - DNA, 25 bp, Homo sapien
ccctctctgggatcctctaaagggc

SEQ ID NO: 1668909 - DNA, 25 bp, Homo sapien
tcttccctctctgggatcctctaaa

SEQ ID NO: 1668910 - DNA, 25 bp, Homo sapien
ggttctcttccctctctgggatcct

SEQ ID NO: 1668911 - DNA, 25 bp, Homo sapien
tggttctcttccctctctgggatcc

SEQ ID NO: 1668912 - DNA, 25 bp, Homo sapien
gggtctcttggtcttgcacgtcgtc

SEQ ID NO: 1668913 - DNA, 25 bp, Homo sapien
gcggagaagtgaacgggccctaata

SEQ ID NO: 1668914 - DNA, 25 bp, Homo sapien
cgccccggacaactgaggaagagca

SEQ ID NO: 1668915 - DNA, 25 bp, Homo sapien
tcgcaggccgataacttaggaaggg

SEQ ID NO: 1668916 - DNA, 25 bp, Homo sapien
ttcccgcactccagacacacgtacg

SEQ ID NO: 1668917 - DNA, 25 bp, Homo sapien
tcttcttgtgtctccggagcgcggc

SEQ ID NO: 1668918 - DNA, 25 bp, Homo sapien
agctgctgcagaccgagggcgcgcc

SEQ ID NO: 1668919 - DNA, 25 bp, Homo sapien
cgcactccacgcagatgtgggccgg

SEQ ID NO: 1668920 - DNA, 25 bp, Homo sapien
ttgcccccgcgcccgccatggctgc

SEQ ID NO: 1668921 - DNA, 25 bp, Homo sapien
gcctttgcccccgcgcccgccatgg

SEQ ID NO: 1668922 - DNA, 25 bp, Homo sapien
tgcccccgcgcccgccatggctgcc

SEQ ID NO: 1668923 - DNA, 25 bp, Homo sapien
gcggcctttgcccccgcgcccgcca

SEQ ID NO: 1668924 - DNA, 25 bp, Homo sapien
tgatgccctcgccatcgcccacggg

SEQ ID NO: 1668925 - DNA, 25 bp, Homo sapien
gggatggcgatctcgccgtccgccg

SEQ ID NO: 1668926 - DNA, 25 bp, Homo sapien
ggcgcgcccaccacgatgatgccct

SEQ ID NO: 1668927 - DNA, 25 bp, Homo sapien
ttggcccgccggacgctagccgcca

SEQ ID NO: 1668928 - DNA, 25 bp, Homo sapien
caggccccgacagctccgggtgcag

SEQ ID NO: 1668929 - DNA, 25 bp, Homo sapien
ggtgacgcgcgaggctcttgggctg

SEQ ID NO: 1668930 - DNA, 25 bp, Homo sapien
gcagccgcaggtgacgcgcgaggct

SEQ ID NO: 1668931 - DNA, 25 bp, Homo sapien
caggtgacgcgcgaggctcttgggc

SEQ ID NO: 1668932 - DNA, 25 bp, Homo sapien
ctgaagccgcggccgcagcgcgggc

SEQ ID NO: 1668933 - DNA, 25 bp, Homo sapien
gaagccgcggccgcagcgcgggcac

SEQ ID NO: 1668934 - DNA, 25 bp, Homo sapien
tgaagccgcggccgcagcgcgggca

SEQ ID NO: 1668935 - DNA, 25 bp, Homo sapien
ggcttgaggccgctgtgcgagcgcc

SEQ ID NO: 1668936 - DNA, 25 bp, Homo sapien
tgaggccgctgtgcgagcgccggtg

SEQ ID NO: 1668937 - DNA, 25 bp, Homo sapien
ttgaggccgctgtgcgagcgccggt

SEQ ID NO: 1668938 - DNA, 25 bp, Homo sapien
gaagggcttgaggccgctgtgcgag

SEQ ID NO: 1668939 - DNA, 25 bp, Homo sapien
cgcactccaagcaggcgtagggctt

SEQ ID NO: 1668940 - DNA, 25 bp, Homo sapien
gtcagcttggaccagtggctaaagc

SEQ ID NO: 1668941 - DNA, 25 bp, Homo sapien
tgccgcgtcagcttggaccagtggc

SEQ ID NO: 1668942 - DNA, 25 bp, Homo sapien
gcgtcagcttggaccagtggctaaa

SEQ ID NO: 1668943 - DNA, 25 bp, Homo sapien
ctggtgccgcgtcagcttggaccag

SEQ ID NO: 1668944 - DNA, 25 bp, Homo sapien
gttgcagatgtagggggcgggcggc

SEQ ID NO: 1668945 - DNA, 25 bp, Homo sapien
tggggcggggacagcttggtgggag

SEQ ID NO: 1668946 - DNA, 25 bp, Homo sapien
gtcgtcatcatccatgatgaggatg

SEQ ID NO: 1668947 - DNA, 25 bp, Homo sapien
tcatcatccatgatgaggatgtcca

SEQ ID NO: 1668948 - DNA, 25 bp, Homo sapien
cgtcatcatccatgatgaggatgtc

SEQ ID NO: 1668949 - DNA, 25 bp, Homo sapien
gtcatcatccatgatgaggatgtcc

SEQ ID NO: 1668950 - DNA, 25 bp, Homo sapien
tctagaacaatgccccagacacaga

SEQ ID NO: 1668951 - DNA, 25 bp, Homo sapien
ctagaacaatgccccagacacagaa

SEQ ID NO: 1668952 - DNA, 25 bp, Homo sapien
ctctagaacaatgccccagacacag

SEQ ID NO: 1668953 - DNA, 25 bp, Homo sapien
cctggacacctggtcctgagccagg

SEQ ID NO: 1668954 - DNA, 25 bp, Homo sapien
agaggggccgcagggcttgaatgca

SEQ ID NO: 1668955 - DNA, 25 bp, Homo sapien
ggcaaaggttccactaggcagaggg

SEQ ID NO: 1668956 - DNA, 25 bp, Homo sapien
cgcagggcttgaatgcagccctgga

SEQ ID NO: 1668957 - DNA, 25 bp, Homo sapien
tggtgtcacattcgggctccaggaa

SEQ ID NO: 1668958 - DNA, 25 bp, Homo sapien
gagcgatggtgtcacattcgggctc

SEQ ID NO: 1668959 - DNA, 25 bp, Homo sapien
cacattcgggctccaggaagacaat

SEQ ID NO: 1668960 - DNA, 25 bp, Homo sapien
ttcgggctccaggaagacaatcctg

SEQ ID NO: 1668961 - DNA, 25 bp, Homo sapien
ccacgctggcaaacacgcaaggaag

SEQ ID NO: 1668962 - DNA, 25 bp, Homo sapien
acgctggcaaacacgcaaggaaggg

SEQ ID NO: 1668963 - DNA, 25 bp, Homo sapien
ctggcaaacacgcaaggaagggcca

SEQ ID NO: 1668964 - DNA, 25 bp, Homo sapien
aacaccctcccagatgccacgctgg

SEQ ID NO: 1668965 - DNA, 25 bp, Homo sapien
catcggcgccacagagaacatatta

SEQ ID NO: 1668966 - DNA, 25 bp, Homo sapien
aacatttatgcactgcccggagcgg

SEQ ID NO: 1668967 - DNA, 25 bp, Homo sapien
caaaaacgcttatgctcaggcctcc

SEQ ID NO: 1668968 - DNA, 25 bp, Homo sapien
cactgtatgagaaagtgccgggccg

SEQ ID NO: 1668969 - DNA, 25 bp, Homo sapien
atcctacagacacatgagatggcgg

SEQ ID NO: 1668970 - DNA, 25 bp, Homo sapien
actgggataccccatagacgcaggg

SEQ ID NO: 1668971 - DNA, 25 bp, Homo sapien
ttcagccccacggagaatcctggtt

SEQ ID NO: 1668972 - DNA, 25 bp, Homo sapien
cccatagaaattcaggactaaagtt

SEQ ID NO: 1668973 - DNA, 25 bp, Homo sapien
gccgcaaggtgatgccgcccgggtg

SEQ ID NO: 1668974 - DNA, 25 bp, Homo sapien
aaggtgatgccgcccgggtgattac

SEQ ID NO: 1668975 - DNA, 25 bp, Homo sapien
ttacggccgcaaggtgatgccgccc

SEQ ID NO: 1668976 - DNA, 25 bp, Homo sapien
tacggccgcaaggtgatgccgcccg

SEQ ID NO: 1668977 - DNA, 25 bp, Homo sapien
gggtgatatggccacccgggtgata

SEQ ID NO: 1668978 - DNA, 25 bp, Homo sapien
ggtgatggagcctaggtgatatggc

SEQ ID NO: 1668979 - DNA, 25 bp, Homo sapien
atggccacccgggtgatacggccgc

SEQ ID NO: 1668980 - DNA, 25 bp, Homo sapien
atgccgccagggtgatacggccgct

SEQ ID NO: 1668981 - DNA, 25 bp, Homo sapien
ctaggtgataaggcggcaccagaga

SEQ ID NO: 1668982 - DNA, 25 bp, Homo sapien
cacagcaggacactgccggagcttc

SEQ ID NO: 1668983 - DNA, 25 bp, Homo sapien
ggcacagcaggacactgccggagct

SEQ ID NO: 1668984 - DNA, 25 bp, Homo sapien
tgataaggcggcaccagagagaagt

SEQ ID NO: 1668985 - DNA, 25 bp, Homo sapien
gcgtgcgcagcccatctttgacagc

SEQ ID NO: 1668986 - DNA, 25 bp, Homo sapien
gcgaacgccggacaccagagcagct

SEQ ID NO: 1668987 - DNA, 25 bp, Homo sapien
tttgacagccgagcaagggcgtcac

SEQ ID NO: 1668988 - DNA, 25 bp, Homo sapien
ccacacgggagttacgcgaacgccg

SEQ ID NO: 1668989 - DNA, 25 bp, Homo sapien
aacgctgtggaaagagaaccacagt

SEQ ID NO: 1668990 - DNA, 25 bp, Homo sapien
tgtggaaagagaaccacagtgggca

SEQ ID NO: 1668991 - DNA, 25 bp, Homo sapien
taaaacgctgtggaaagagaaccac

SEQ ID NO: 1668992 - DNA, 25 bp, Homo sapien
tctaaaacgctgtggaaagagaacc

SEQ ID NO: 1668993 - DNA, 25 bp, Homo sapien
caggcccgcctggaatcatagcaga

SEQ ID NO: 1668994 - DNA, 25 bp, Homo sapien
catcatagtttctaccccgggacca

SEQ ID NO: 1668995 - DNA, 25 bp, Homo sapien
tatgggacgactcagctatgccagc

SEQ ID NO: 1668996 - DNA, 25 bp, Homo sapien
gagggattcatcacactgcgtccac

SEQ ID NO: 1668997 - DNA, 25 bp, Homo sapien
tgggttctcgtgactggccatctgc

SEQ ID NO: 1668998 - DNA, 25 bp, Homo sapien
cggagaccaggcttcttcccgcagc

SEQ ID NO: 1668999 - DNA, 25 bp, Homo sapien
gtcctcagaatccagcggccccgga

SEQ ID NO: 1669000 - DNA, 25 bp, Homo sapien
cctcagaatccagcggccccggaga

SEQ ID NO: 1669001 - DNA, 25 bp, Homo sapien
gcagaccccggcgtgacaggcacag

SEQ ID NO: 1669002 - DNA, 25 bp, Homo sapien
gtgacaggcacagcgcccggcagac

SEQ ID NO: 1669003 - DNA, 25 bp, Homo sapien
agaactggcctggagctagcctggc

SEQ ID NO: 1669004 - DNA, 25 bp, Homo sapien
tggcctggagctagcctggccgctc

SEQ ID NO: 1669005 - DNA, 25 bp, Homo sapien
tggctctgacctccgctgcagagag

SEQ ID NO: 1669006 - DNA, 25 bp, Homo sapien
ctggctctgacctccgctgcagaga

SEQ ID NO: 1669007 - DNA, 25 bp, Homo sapien
gctctgacctccgctgcagagagga

SEQ ID NO: 1669008 - DNA, 25 bp, Homo sapien
tctgacctccgctgcagagaggaag

SEQ ID NO: 1669009 - DNA, 25 bp, Homo sapien
tcacttttctgtgcgactctgcagg

SEQ ID NO: 1669010 - DNA, 25 bp, Homo sapien
tccacatgaattggggtcagctccc

SEQ ID NO: 1669011 - DNA, 25 bp, Homo sapien
agcactcatccacatgaattggggt

SEQ ID NO: 1669012 - DNA, 25 bp, Homo sapien
gtcacttttctgtgcgactctgcag

SEQ ID NO: 1669013 - DNA, 25 bp, Homo sapien
cgcctgccgagcaaggacgaatgaa

SEQ ID NO: 1669014 - DNA, 25 bp, Homo sapien
tgccggccagaatccccgtaattac

SEQ ID NO: 1669015 - DNA, 25 bp, Homo sapien
attacccgcctgatcaaaggccacg

SEQ ID NO: 1669016 - DNA, 25 bp, Homo sapien
aaggacgaatgaatgggcctcctgc

SEQ ID NO: 1669017 - DNA, 25 bp, Homo sapien
gcagcggcgactcagaccctggggt

SEQ ID NO: 1669018 - DNA, 25 bp, Homo sapien
ggcagcggcgactcagaccctgggg

SEQ ID NO: 1669019 - DNA, 25 bp, Homo sapien
ccagctgagttgagtgcctaggcca

SEQ ID NO: 1669020 - DNA, 25 bp, Homo sapien
cacggttttctcctgagggtgtggc

SEQ ID NO: 1669021 - DNA, 25 bp, Homo sapien
caagcctccatctacgtggaatgag

SEQ ID NO: 1669022 - DNA, 25 bp, Homo sapien
ggaatagccacacatctctgtagtg

SEQ ID NO: 1669023 - DNA, 25 bp, Homo sapien
gcttcgcggacctctttggtttcca

SEQ ID NO: 1669024 - DNA, 25 bp, Homo sapien
aggcctggcccgctgtctgggcttc

SEQ ID NO: 1669025 - DNA, 25 bp, Homo sapien
cgtggttggttggatccgggagcac

SEQ ID NO: 1669026 - DNA, 25 bp, Homo sapien
gcagcaataaacaccagaagctgaa

SEQ ID NO: 1669027 - DNA, 25 bp, Homo sapien
atctccgctcaccgcaacgtccccc

SEQ ID NO: 1669028 - DNA, 25 bp, Homo sapien
cgctcaccgcaacgtccccctccca

SEQ ID NO: 1669029 - DNA, 25 bp, Homo sapien
ctccgctcaccgcaacgtccccctc

SEQ ID NO: 1669030 - DNA, 25 bp, Homo sapien
ctcaccgcaacgtccccctcccagt

SEQ ID NO: 1669031 - DNA, 25 bp, Homo sapien
cccgagcctccagagatgaaccaaa

SEQ ID NO: 1669032 - DNA, 25 bp, Homo sapien
aacccaacccgagcctccagagatg

SEQ ID NO: 1669033 - DNA, 25 bp, Homo sapien
ccataaacccaacccgagcctccag

SEQ ID NO: 1669034 - DNA, 25 bp, Homo sapien
aacccgagcctccagagatgaacca

SEQ ID NO: 1669035 - DNA, 25 bp, Homo sapien
tttgcgccgtcaaggccaaataggc

SEQ ID NO: 1669036 - DNA, 25 bp, Homo sapien
caaataggctgcagacgacgctttc

SEQ ID NO: 1669037 - DNA, 25 bp, Homo sapien
tagttccagtgttggcgaagacgcc

SEQ ID NO: 1669038 - DNA, 25 bp, Homo sapien
gccacgcggtgacaaacaggagtaa

SEQ ID NO: 1669039 - DNA, 25 bp, Homo sapien
gggtgaggccggggcttcatgggga

SEQ ID NO: 1669040 - DNA, 25 bp, Homo sapien
tgaggccggggcttcatggggagtt

SEQ ID NO: 1669041 - DNA, 25 bp, Homo sapien
tgggagttgtagttcggggtgaggc

SEQ ID NO: 1669042 - DNA, 25 bp, Homo sapien
gccggggcttcatggggagttgttg

SEQ ID NO: 1669043 - DNA, 25 bp, Homo sapien
gagctggacttggtcactgccccag

SEQ ID NO: 1669044 - DNA, 25 bp, Homo sapien
gtgaagagctggacttggtcactgc

SEQ ID NO: 1669045 - DNA, 25 bp, Homo sapien
tttcttgggagcaggccttgtgctg

SEQ ID NO: 1669046 - DNA, 25 bp, Homo sapien
atggccccaccgacccagtgaagag

SEQ ID NO: 1669047 - DNA, 25 bp, Homo sapien
gggtgtagtgacctgtgatcacctc

SEQ ID NO: 1669048 - DNA, 25 bp, Homo sapien
cccagggtgtagtgacctgtgatca

SEQ ID NO: 1669049 - DNA, 25 bp, Homo sapien
caaacagggtcagcttgatggcctg

SEQ ID NO: 1669050 - DNA, 25 bp, Homo sapien
ctgagattgcaaacagggtcagctt

SEQ ID NO: 1669051 - DNA, 25 bp, Homo sapien
aggtggcggtgcccgtgaagcagga

SEQ ID NO: 1669052 - DNA, 25 bp, Homo sapien
ttccgccgcttccacctgggcgacg

SEQ ID NO: 1669053 - DNA, 25 bp, Homo sapien
ggaacagttcctgagcgcgctgccc

SEQ ID NO: 1669054 - DNA, 25 bp, Homo sapien
tggactccccgtggcaccgcttccg

SEQ ID NO: 1669055 - DNA, 25 bp, Homo sapien
aagagtcagagcagtcgcgtgttcc

SEQ ID NO: 1669056 - DNA, 25 bp, Homo sapien
tcagtagtggcactctcccatggct

SEQ ID NO: 1669057 - DNA, 25 bp, Homo sapien
aagagtggtccaggccacgagagca

SEQ ID NO: 1669058 - DNA, 25 bp, Homo sapien
cacgcagagacctctgagaagagtg

SEQ ID NO: 1669059 - DNA, 25 bp, Homo sapien
tagacagctgacatctggaggcgct

SEQ ID NO: 1669060 - DNA, 25 bp, Homo sapien
atagacagctgacatctggaggcgc

SEQ ID NO: 1669061 - DNA, 25 bp, Homo sapien
gaccgtggtgtatagacagctgaca

SEQ ID NO: 1669062 - DNA, 25 bp, Homo sapien
ctagtgggagctgaccgtggtgtat

SEQ ID NO: 1669063 - DNA, 25 bp, Homo sapien
attggggtttcttggcatctggtgt

SEQ ID NO: 1669064 - DNA, 25 bp, Homo sapien
tttcttggcatctggtgtgtggaaa

SEQ ID NO: 1669065 - DNA, 25 bp, Homo sapien
tctgcattttgttaaggagcttgca

SEQ ID NO: 1669066 - DNA, 25 bp, Homo sapien
gcttgcactttatccaaagggcagg

SEQ ID NO: 1669067 - DNA, 25 bp, Homo sapien
ttggtcttcctggttggtgccgtcc

SEQ ID NO: 1669068 - DNA, 25 bp, Homo sapien
gtaacatctgtcagctcagaaagcc

SEQ ID NO: 1669069 - DNA, 25 bp, Homo sapien
tcaggtgacgcttgaatgtccccag

SEQ ID NO: 1669070 - DNA, 25 bp, Homo sapien
tgcgctggtgaacgttcaggttccc

SEQ ID NO: 1669071 - DNA, 25 bp, Homo sapien
gatgtggacctgactctggaatcac

SEQ ID NO: 1669072 - DNA, 25 bp, Homo sapien
tatatgtcatctggtaacattggag

SEQ ID NO: 1669073 - DNA, 25 bp, Homo sapien
ttgtggccctgtaaggtggactcgt

SEQ ID NO: 1669074 - DNA, 25 bp, Homo sapien
ctcttgtggccctgtaaggtggact

SEQ ID NO: 1669075 - DNA, 25 bp, Homo sapien
cgcttttggcagacgtcacacatgt

SEQ ID NO: 1669076 - DNA, 25 bp, Homo sapien
gactcgtgggcgaaccgcttttggc

SEQ ID NO: 1669077 - DNA, 25 bp, Homo sapien
tccgacagagatcacattgaaaggg

SEQ ID NO: 1669078 - DNA, 25 bp, Homo sapien
gagatcacattgaaagggtctgtct

SEQ ID NO: 1669079 - DNA, 25 bp, Homo sapien
agaagcgcttccgacagagatcaca

SEQ ID NO: 1669080 - DNA, 25 bp, Homo sapien
ctgcaagaagcgcttccgacagaga

SEQ ID NO: 1669081 - DNA, 25 bp, Homo sapien
cctcctgtggatgcttagctgggaa

SEQ ID NO: 1669082 - DNA, 25 bp, Homo sapien
gtgacctcctgtggatgcttagctg

SEQ ID NO: 1669083 - DNA, 25 bp, Homo sapien
tggatgcttagctgggaaaaatact

SEQ ID NO: 1669084 - DNA, 25 bp, Homo sapien
tcctgtggatgcttagctgggaaaa

SEQ ID NO: 1669085 - DNA, 25 bp, Homo sapien
ctctccacaacgcaggcagaaggtg

SEQ ID NO: 1669086 - DNA, 25 bp, Homo sapien
ctccacaacgcaggcagaaggtgtg

SEQ ID NO: 1669087 - DNA, 25 bp, Homo sapien
tctccacaacgcaggcagaaggtgt

SEQ ID NO: 1669088 - DNA, 25 bp, Homo sapien
ccaaggtctgcttgggtctcggaga

SEQ ID NO: 1669089 - DNA, 25 bp, Homo sapien
ctgttacgtcaatactcttgtgtag

SEQ ID NO: 1669090 - DNA, 25 bp, Homo sapien
tacgtcaatactcttgtgtagcaga

SEQ ID NO: 1669091 - DNA, 25 bp, Homo sapien
tactcttgtgtagcagaaagtcctc

SEQ ID NO: 1669092 - DNA, 25 bp, Homo sapien
caatactcttgtgtagcagaaagtc

SEQ ID NO: 1669093 - DNA, 25 bp, Homo sapien
ctttgccgagcaagttgactataga

SEQ ID NO: 1669094 - DNA, 25 bp, Homo sapien
tccccggatgcatctggttcacaga

SEQ ID NO: 1669095 - DNA, 25 bp, Homo sapien
ctgagttcagcataagatattcttt

SEQ ID NO: 1669096 - DNA, 25 bp, Homo sapien
tctcgacatctgagttcagcataag

SEQ ID NO: 1669097 - DNA, 25 bp, Homo sapien
gggcatggagatcatgaactgctcc

SEQ ID NO: 1669098 - DNA, 25 bp, Homo sapien
tgttatttcgtagcaggtcctccag

SEQ ID NO: 1669099 - DNA, 25 bp, Homo sapien
tctttgcagctctgcacaccgttca

SEQ ID NO: 1669100 - DNA, 25 bp, Homo sapien
gttatttcgtagcaggtcctccagg

SEQ ID NO: 1669101 - DNA, 25 bp, Homo sapien
ggtcgggcctcagccacagatggca

SEQ ID NO: 1669102 - DNA, 25 bp, Homo sapien
acagatggcacagctcagtgagttt

SEQ ID NO: 1669103 - DNA, 25 bp, Homo sapien
cagcatgtccaggatctgctctttg

SEQ ID NO: 1669104 - DNA, 25 bp, Homo sapien
tggaggtcgggcctcagccacagat

SEQ ID NO: 1669105 - DNA, 25 bp, Homo sapien
gtctcagggttcctgtcgtgatttc

SEQ ID NO: 1669106 - DNA, 25 bp, Homo sapien
ccaagtctcagggttcctgtcgtga

SEQ ID NO: 1669107 - DNA, 25 bp, Homo sapien
cagggttcctgtcgtgatttccaag

SEQ ID NO: 1669108 - DNA, 25 bp, Homo sapien
tcagggttcctgtcgtgatttccaa

SEQ ID NO: 1669109 - DNA, 25 bp, Homo sapien
agtgtctgacccagggctgttgcag

SEQ ID NO: 1669110 - DNA, 25 bp, Homo sapien
tggagtgtctgacccagggctgttg

SEQ ID NO: 1669111 - DNA, 25 bp, Homo sapien
ctggggacgccacagaccgtggagt

SEQ ID NO: 1669112 - DNA, 25 bp, Homo sapien
ggacgccacagaccgtggagtgtct

SEQ ID NO: 1669113 - DNA, 25 bp, Homo sapien
ctccttcccggcttctgcctccgac

SEQ ID NO: 1669114 - DNA, 25 bp, Homo sapien
ccgtgattggtttagggccacagag

SEQ ID NO: 1669115 - DNA, 25 bp, Homo sapien
cgcgtttccggttccctgcgccgcg

SEQ ID NO: 1669116 - DNA, 25 bp, Homo sapien
tccacggtgctgagtccaatgctag

SEQ ID NO: 1669117 - DNA, 25 bp, Homo sapien
aacaatgttgttcgatgggcaggaa

SEQ ID NO: 1669118 - DNA, 25 bp, Homo sapien
ttactccagaacatgtggtcaggtg

SEQ ID NO: 1669119 - DNA, 25 bp, Homo sapien
gcctttgcacaatgatcccctagag

SEQ ID NO: 1669120 - DNA, 25 bp, Homo sapien
cgggcattgggacgggccatgcgga

SEQ ID NO: 1669121 - DNA, 25 bp, Homo sapien
tcttctcctcgatgatgactccagc

SEQ ID NO: 1669122 - DNA, 25 bp, Homo sapien
gccgggcattgggacgggccatgcg

SEQ ID NO: 1669123 - DNA, 25 bp, Homo sapien
ccgggcattgggacgggccatgcgg

SEQ ID NO: 1669124 - DNA, 25 bp, Homo sapien
cggatgcgtttggagcggggctcct

SEQ ID NO: 1669125 - DNA, 25 bp, Homo sapien
ccggggaagcggatgcgtttggagc

SEQ ID NO: 1669126 - DNA, 25 bp, Homo sapien
gaagcggatgcgtttggagcggggc

SEQ ID NO: 1669127 - DNA, 25 bp, Homo sapien
cttcccggggaagcggatgcgtttg

SEQ ID NO: 1669128 - DNA, 25 bp, Homo sapien
tcggatccgcagaaatgccggcgtc

SEQ ID NO: 1669129 - DNA, 25 bp, Homo sapien
ggatccgcagaaatgccggcgtccg

SEQ ID NO: 1669130 - DNA, 25 bp, Homo sapien
ctcggatccgcagaaatgccggcgt

SEQ ID NO: 1669131 - DNA, 25 bp, Homo sapien
atccgcagaaatgccggcgtccggg

SEQ ID NO: 1669132 - DNA, 25 bp, Homo sapien
cgccttggcttgcccggcctggcgc

SEQ ID NO: 1669133 - DNA, 25 bp, Homo sapien
gcgccttggcttgcccggcctggcg

SEQ ID NO: 1669134 - DNA, 25 bp, Homo sapien
ggcgcctgcggatcttctgggccgg

SEQ ID NO: 1669135 - DNA, 25 bp, Homo sapien
gcccggcctggcgcctgcggatctt

SEQ ID NO: 1669136 - DNA, 25 bp, Homo sapien
cttcgagatcgtgccgttccggctg

SEQ ID NO: 1669137 - DNA, 25 bp, Homo sapien
cggggcttcgagatcgtgccgttcc

SEQ ID NO: 1669138 - DNA, 25 bp, Homo sapien
gtgccgttccggctgggcgccgtgg

SEQ ID NO: 1669139 - DNA, 25 bp, Homo sapien
gaagcggggcttcgagatcgtgccg

SEQ ID NO: 1669140 - DNA, 25 bp, Homo sapien
cgaggggaaggtccctgcgcgcgcg

SEQ ID NO: 1669141 - DNA, 25 bp, Homo sapien
ggggaaggtccctgcgcgcgcgcac

SEQ ID NO: 1669142 - DNA, 25 bp, Homo sapien
cagaggggagccaccgaggggaagg

SEQ ID NO: 1669143 - DNA, 25 bp, Homo sapien
gagccaccgaggggaaggtccctgc

SEQ ID NO: 1669144 - DNA, 25 bp, Homo sapien
ttgtgtaaacactaaggaggcctca

SEQ ID NO: 1669145 - DNA, 25 bp, Homo sapien
gaatccagcctatttgggaagggac

SEQ ID NO: 1669146 - DNA, 25 bp, Homo sapien
aattgtcaccaagaggatcctaggg

SEQ ID NO: 1669147 - DNA, 25 bp, Homo sapien
cgctccagtcagttcaaaggtgcca

SEQ ID NO: 1669148 - DNA, 25 bp, Homo sapien
cagacgcccttgcatgtgtcaaatg

SEQ ID NO: 1669149 - DNA, 25 bp, Homo sapien
tggcaattcatatctagggcactcc

SEQ ID NO: 1669150 - DNA, 25 bp, Homo sapien
gtgcagaaggcatagaccggattat

SEQ ID NO: 1669151 - DNA, 25 bp, Homo sapien
tatttactcaaacatcctggcaatt

SEQ ID NO: 1669152 - DNA, 25 bp, Homo sapien
gaggctaataagctgcatgaagcgc

SEQ ID NO: 1669153 - DNA, 25 bp, Homo sapien
tgaattcatcccagcttgtcccggg

SEQ ID NO: 1669154 - DNA, 25 bp, Homo sapien
tcagccgactgaaggctcttggaca

SEQ ID NO: 1669155 - DNA, 25 bp, Homo sapien
tggtggcgtcttaacaatttcagcc

SEQ ID NO: 1669156 - DNA, 25 bp, Homo sapien
tctccacaacgcaggcagaaggtgt

SEQ ID NO: 1669157 - DNA, 25 bp, Homo sapien
ctctccacaacgcaggcagaaggtg

SEQ ID NO: 1669158 - DNA, 25 bp, Homo sapien
ctccacaacgcaggcagaaggtgtg

SEQ ID NO: 1669159 - DNA, 25 bp, Homo sapien
ccaaggtctgcttgggtctcagaga

SEQ ID NO: 1669160 - DNA, 25 bp, Homo sapien
tcagtcctgggttctcttccctgtt

SEQ ID NO: 1669161 - DNA, 25 bp, Homo sapien
ttttccttcagatccttctccaagg

SEQ ID NO: 1669162 - DNA, 25 bp, Homo sapien
gggatgtcagtcctgggttctcttc

SEQ ID NO: 1669163 - DNA, 25 bp, Homo sapien
ctgttacgtcaatactcttgtgtag

SEQ ID NO: 1669164 - DNA, 25 bp, Homo sapien
caatactcttgtgtagcagaaagtc

SEQ ID NO: 1669165 - DNA, 25 bp, Homo sapien
tactcttgtgtagcagaaagtcctc

SEQ ID NO: 1669166 - DNA, 25 bp, Homo sapien
tacgtcaatactcttgtgtagcaga

SEQ ID NO: 1669167 - DNA, 25 bp, Homo sapien
cctggacgcatctggttcaccgagg

SEQ ID NO: 1669168 - DNA, 25 bp, Homo sapien
atctggttcaccgaggaggcccgtt

SEQ ID NO: 1669169 - DNA, 25 bp, Homo sapien
catctcgatatctgagtcctgcaca

SEQ ID NO: 1669170 - DNA, 25 bp, Homo sapien
aggcccgttggctggacacgtcttt

SEQ ID NO: 1669171 - DNA, 25 bp, Homo sapien
gggcatggagatcatgaactgctcc

SEQ ID NO: 1669172 - DNA, 25 bp, Homo sapien
tgttatttcgtagcaggtcctccag

SEQ ID NO: 1669173 - DNA, 25 bp, Homo sapien
tctttgcagctctgcacaccgttca

SEQ ID NO: 1669174 - DNA, 25 bp, Homo sapien
gttatttcgtagcaggtcctccagg

SEQ ID NO: 1669175 - DNA, 25 bp, Homo sapien
ggtcgggcctcagccacagatggca

SEQ ID NO: 1669176 - DNA, 25 bp, Homo sapien
acagatggcacagctcagtgagttt

SEQ ID NO: 1669177 - DNA, 25 bp, Homo sapien
tggaggtcgggcctcagccacagat

SEQ ID NO: 1669178 - DNA, 25 bp, Homo sapien
cagcatgtccaggatctgctctttg

SEQ ID NO: 1669179 - DNA, 25 bp, Homo sapien
gaaatctcagggtccacgtcgtgat

SEQ ID NO: 1669180 - DNA, 25 bp, Homo sapien
tgagaaatctcagggtccacgtcgt

SEQ ID NO: 1669181 - DNA, 25 bp, Homo sapien
cagggtccacgtcgtgatttccaag

SEQ ID NO: 1669182 - DNA, 25 bp, Homo sapien
ttcacgtgagaaatctcagggtcca

SEQ ID NO: 1669183 - DNA, 25 bp, Homo sapien
ggatgccatagaccgtggcagctcc

SEQ ID NO: 1669184 - DNA, 25 bp, Homo sapien
gatgccatagaccgtggcagctcca

SEQ ID NO: 1669185 - DNA, 25 bp, Homo sapien
aggatgccatagaccgtggcagctc

SEQ ID NO: 1669186 - DNA, 25 bp, Homo sapien
atgccatagaccgtggcagctccaa

SEQ ID NO: 1669187 - DNA, 25 bp, Homo sapien
tatctaattgatacctatctacaca

SEQ ID NO: 1669188 - DNA, 25 bp, Homo sapien
tttcctcagtaatagattcactgtt

SEQ ID NO: 1669189 - DNA, 25 bp, Homo sapien
cagtagctggtatctaattgatacc

SEQ ID NO: 1669190 - DNA, 25 bp, Homo sapien
agctcttccagtagctggtatctaa

SEQ ID NO: 1669191 - DNA, 25 bp, Homo sapien
tctgcctccgaccttctcggtctgg

SEQ ID NO: 1669192 - DNA, 25 bp, Homo sapien
gtctgggatgcgctctccaaccggc

SEQ ID NO: 1669193 - DNA, 25 bp, Homo sapien
tctatttatggagaagcgggactcc

SEQ ID NO: 1669194 - DNA, 25 bp, Homo sapien
caggccgcgtttccggttccctgcg

SEQ ID NO: 1669195 - DNA, 25 bp, Homo sapien
taatcggcgttgattatggttccca

SEQ ID NO: 1669196 - DNA, 25 bp, Homo sapien
agagtccattttacgtaatcggcgt

SEQ ID NO: 1669197 - DNA, 25 bp, Homo sapien
ccattttacgtaatcggcgttgatt

SEQ ID NO: 1669198 - DNA, 25 bp, Homo sapien
tacgtaatcggcgttgattatggtt

SEQ ID NO: 1669199 - DNA, 25 bp, Homo sapien
taacaaggatgcaaatgcggagcca

SEQ ID NO: 1669200 - DNA, 25 bp, Homo sapien
gtttcaagtggatgcactgtaacaa

SEQ ID NO: 1669201 - DNA, 25 bp, Homo sapien
tgcggagccaccctcagaataacat

SEQ ID NO: 1669202 - DNA, 25 bp, Homo sapien
tatcagcatgtgtgttaacagtccc

SEQ ID NO: 1669203 - DNA, 25 bp, Homo sapien
gccactgcatcctgtattgtttgta

SEQ ID NO: 1669204 - DNA, 25 bp, Homo sapien
agcaattctgccgtcttggccgccg

SEQ ID NO: 1669205 - DNA, 25 bp, Homo sapien
ttgtttgtattaggctttattagta

SEQ ID NO: 1669206 - DNA, 25 bp, Homo sapien
ttctgccgtcttggccgccggagta

SEQ ID NO: 1669207 - DNA, 25 bp, Homo sapien
agtgtgaggctaaatttggtggttc

SEQ ID NO: 1669208 - DNA, 25 bp, Homo sapien
agtattacataaactttggttgcta

SEQ ID NO: 1669209 - DNA, 25 bp, Homo sapien
tcaggaggagaccaatgttttcatc

SEQ ID NO: 1669210 - DNA, 25 bp, Homo sapien
gatggttcactcgatctgacatttt

SEQ ID NO: 1669211 - DNA, 25 bp, Homo sapien
tacagtgaccatctaagtaaacaag

SEQ ID NO: 1669212 - DNA, 25 bp, Homo sapien
tccacaaccaactgcaagaaactgt

SEQ ID NO: 1669213 - DNA, 25 bp, Homo sapien
ggaagccctgagctagaagatattt

SEQ ID NO: 1669214 - DNA, 25 bp, Homo sapien
tactttcttgagagaagcttgggaa

SEQ ID NO: 1669215 - DNA, 25 bp, Homo sapien
agcctcccagtatcccaagtaactg

SEQ ID NO: 1669216 - DNA, 25 bp, Homo sapien
tgtggttgtatgtatcgatagttca

SEQ ID NO: 1669217 - DNA, 25 bp, Homo sapien
gtatgtatcgatagttcatcctttt

SEQ ID NO: 1669218 - DNA, 25 bp, Homo sapien
ggttgtatgtatcgatagttcatcc

SEQ ID NO: 1669219 - DNA, 25 bp, Homo sapien
ggaatagccctccaatgtgccagga

SEQ ID NO: 1669220 - DNA, 25 bp, Homo sapien
agctttggcctacatgagacggtga

SEQ ID NO: 1669221 - DNA, 25 bp, Homo sapien
catagagacacttggtagagactcc

SEQ ID NO: 1669222 - DNA, 25 bp, Homo sapien
cattttaagggcaagcgctgagctc

SEQ ID NO: 1669223 - DNA, 25 bp, Homo sapien
caaggaattgcgaaaatcaccattt

SEQ ID NO: 1669224 - DNA, 25 bp, Homo sapien
taatagtattatgcttctatgagcc

SEQ ID NO: 1669225 - DNA, 25 bp, Homo sapien
taagtgttttacaaccttcacctca

SEQ ID NO: 1669226 - DNA, 25 bp, Homo sapien
gatttcataagaacctctgagatga

SEQ ID NO: 1669227 - DNA, 25 bp, Homo sapien
tatcctgtatgtaatgttgagccat

SEQ ID NO: 1669228 - DNA, 25 bp, Homo sapien
cctgtatgtaatgttgagccatgga

SEQ ID NO: 1669229 - DNA, 25 bp, Homo sapien
tatgtaatgttgagccatggaagga

SEQ ID NO: 1669230 - DNA, 25 bp, Homo sapien
atgttgagccatggaaggatttgga

SEQ ID NO: 1669231 - DNA, 25 bp, Homo sapien
tactatcattctcacggcggagccc

SEQ ID NO: 1669232 - DNA, 25 bp, Homo sapien
accaagtgggtgtaagagggcccag

SEQ ID NO: 1669233 - DNA, 25 bp, Homo sapien
gagggcccagggaaagcagacaaag

SEQ ID NO: 1669234 - DNA, 25 bp, Homo sapien
cccatatttaatagagaaccaagtg

SEQ ID NO: 1669235 - DNA, 25 bp, Homo sapien
tgtttccctgtagaagcctcagatg

SEQ ID NO: 1669236 - DNA, 25 bp, Homo sapien
cagaagcattggtgtggctgagcca

SEQ ID NO: 1669237 - DNA, 25 bp, Homo sapien
ctaggatagatgtgaaggaactgac

SEQ ID NO: 1669238 - DNA, 25 bp, Homo sapien
tgcccctgtgggtgtaatggcccct

SEQ ID NO: 1669239 - DNA, 25 bp, Homo sapien
gcacaatgactaaaagcaagaccca

SEQ ID NO: 1669240 - DNA, 25 bp, Homo sapien
aaatccagctcttgctcaaccatgt

SEQ ID NO: 1669241 - DNA, 25 bp, Homo sapien
tattcttcacccagttatctcagct

SEQ ID NO: 1669242 - DNA, 25 bp, Homo sapien
tattctatttgaggatccaatccag

SEQ ID NO: 1669243 - DNA, 25 bp, Homo sapien
ccggccaaaggttatctttattgat

SEQ ID NO: 1669244 - DNA, 25 bp, Homo sapien
ggccaaaggttatctttattgatat

SEQ ID NO: 1669245 - DNA, 25 bp, Homo sapien
ctgtgcccggccaaaggttatcttt

SEQ ID NO: 1669246 - DNA, 25 bp, Homo sapien
gatatttaccttattgtaaattcaa

SEQ ID NO: 1669247 - DNA, 25 bp, Homo sapien
aacatcgtgtgtgagccttgaaaac

SEQ ID NO: 1669248 - DNA, 25 bp, Homo sapien
gaaacagagtgtggtctatgcatac

SEQ ID NO: 1669249 - DNA, 25 bp, Homo sapien
gaaggtaatcctagcatgcatccat

SEQ ID NO: 1669250 - DNA, 25 bp, Homo sapien
gagttactcagcaattccgctctag

SEQ ID NO: 1669251 - DNA, 25 bp, Homo sapien
gtctcggctcgccatgacatctgcc

SEQ ID NO: 1669252 - DNA, 25 bp, Homo sapien
gcacggtctcggctcgccatgacat

SEQ ID NO: 1669253 - DNA, 25 bp, Homo sapien
acggtctcggctcgccatgacatct

SEQ ID NO: 1669254 - DNA, 25 bp, Homo sapien
ggtctcggctcgccatgacatctgc

SEQ ID NO: 1669255 - DNA, 25 bp, Homo sapien
gttggcatcttgtgagagccttcct

SEQ ID NO: 1669256 - DNA, 25 bp, Homo sapien
agtccaagattgaggggttggcatc

SEQ ID NO: 1669257 - DNA, 25 bp, Homo sapien
gtgagagccttcctgttgtgtcatc

SEQ ID NO: 1669258 - DNA, 25 bp, Homo sapien
tgaggggttggcatcttgtgagagc

SEQ ID NO: 1669259 - DNA, 25 bp, Homo sapien
catatattacatgctgattcttaca

SEQ ID NO: 1669260 - DNA, 25 bp, Homo sapien
aacctccagtgcagttgaaaattca

SEQ ID NO: 1669261 - DNA, 25 bp, Homo sapien
gtacacactcaaaccataacacata

SEQ ID NO: 1669262 - DNA, 25 bp, Homo sapien
gaaagttgagcccttgtgacctaaa

SEQ ID NO: 1669263 - DNA, 25 bp, Homo sapien
tcttcaatacgtagcaagcctcgcc

SEQ ID NO: 1669264 - DNA, 25 bp, Homo sapien
taccgagaaaggtgttgcgagctcc

SEQ ID NO: 1669265 - DNA, 25 bp, Homo sapien
caatatctgatctcaaagggctggt

SEQ ID NO: 1669266 - DNA, 25 bp, Homo sapien
cacagagagttcattcatcatccca

SEQ ID NO: 1669267 - DNA, 25 bp, Homo sapien
cgcctggccttgctatgattgatag

SEQ ID NO: 1669268 - DNA, 25 bp, Homo sapien
tgtcaccggatggtaagtgtcagga

SEQ ID NO: 1669269 - DNA, 25 bp, Homo sapien
tgaggcattatagccacacttcctg

SEQ ID NO: 1669270 - DNA, 25 bp, Homo sapien
aacctggtctttctcttgtccgcaa

SEQ ID NO: 1669271 - DNA, 25 bp, Homo sapien
tcaaagggtatctgccttttaaatc

SEQ ID NO: 1669272 - DNA, 25 bp, Homo sapien
ggtatctgccttttaaatctggaca

SEQ ID NO: 1669273 - DNA, 25 bp, Homo sapien
tataaacagcgctataatggaaatc

SEQ ID NO: 1669274 - DNA, 25 bp, Homo sapien
ggaaatccttatccagtcattgctt

SEQ ID NO: 1669275 - DNA, 25 bp, Homo sapien
gttaggtaactagatcaagactggg

SEQ ID NO: 1669276 - DNA, 25 bp, Homo sapien
tcttagccatggatcaactctcagc

SEQ ID NO: 1669277 - DNA, 25 bp, Homo sapien
tgctgcccaacaatgcccactggat

SEQ ID NO: 1669278 - DNA, 25 bp, Homo sapien
ccaagggaggtccactcttagccat

SEQ ID NO: 1669279 - DNA, 25 bp, Homo sapien
taaacgcgccttgaaaacacagtgc

SEQ ID NO: 1669280 - DNA, 25 bp, Homo sapien
caaaagcaagtgtcaggatgtccac

SEQ ID NO: 1669281 - DNA, 25 bp, Homo sapien
caaagaaagtgctgacacaggacac

SEQ ID NO: 1669282 - DNA, 25 bp, Homo sapien
tacgacatgtccacagcaggcaagt

SEQ ID NO: 1669283 - DNA, 25 bp, Homo sapien
tgaagacactacagctcagagagac

SEQ ID NO: 1669284 - DNA, 25 bp, Homo sapien
gctacacagctgagatttgacccag

SEQ ID NO: 1669285 - DNA, 25 bp, Homo sapien
tgagagagcaactgcaggagtttcc

SEQ ID NO: 1669286 - DNA, 25 bp, Homo sapien
ggttattccattcgcccaacactga

SEQ ID NO: 1669287 - DNA, 25 bp, Homo sapien
caagtctagtcataagcaagcatca

SEQ ID NO: 1669288 - DNA, 25 bp, Homo sapien
tatttcacacttcctactagcccag

SEQ ID NO: 1669289 - DNA, 25 bp, Homo sapien
cagaagcccggtaaaatcaatttga

SEQ ID NO: 1669290 - DNA, 25 bp, Homo sapien
gttcctgcccataatccaagtctag

SEQ ID NO: 1669291 - DNA, 25 bp, Homo sapien
agagaagagagcttgagcagggaac

SEQ ID NO: 1669292 - DNA, 25 bp, Homo sapien
aagagagcttgagcagggaacctcc

SEQ ID NO: 1669293 - DNA, 25 bp, Homo sapien
agaagagagcttgagcagggaacct

SEQ ID NO: 1669294 - DNA, 25 bp, Homo sapien
cagaaggtcaaaggcacgtctcaca

SEQ ID NO: 1669295 - DNA, 25 bp, Homo sapien
gagaatgccaatccctccgtaggta

SEQ ID NO: 1669296 - DNA, 25 bp, Homo sapien
ttggttgtcacgaccaggagctagg

SEQ ID NO: 1669297 - DNA, 25 bp, Homo sapien
tcaggaaaacttttagggcagcagt

SEQ ID NO: 1669298 - DNA, 25 bp, Homo sapien
ggaggtttcatacgctaaccagatg

SEQ ID NO: 1669299 - DNA, 25 bp, Homo sapien
gagtgaatcaattcttgcgaaaagt

SEQ ID NO: 1669300 - DNA, 25 bp, Homo sapien
aactgcgggaggcagggttgctcct

SEQ ID NO: 1669301 - DNA, 25 bp, Homo sapien
taatcaaggaccaagcgaactgcgg

SEQ ID NO: 1669302 - DNA, 25 bp, Homo sapien
cagtgacctagttaacctggcgaca

SEQ ID NO: 1669303 - DNA, 25 bp, Homo sapien
agcccgcaaggtcacggaaactcct

SEQ ID NO: 1669304 - DNA, 25 bp, Homo sapien
cggccaggaatcatgcagggcgcct

SEQ ID NO: 1669305 - DNA, 25 bp, Homo sapien
taaataaagctgtccctcagcacaa

SEQ ID NO: 1669306 - DNA, 25 bp, Homo sapien
cagggcgcctgcacgcatattatta

SEQ ID NO: 1669307 - DNA, 25 bp, Homo sapien
atgcgccctccctctccccaaccca

SEQ ID NO: 1669308 - DNA, 25 bp, Homo sapien
tgcgccctccctctccccaacccac

SEQ ID NO: 1669309 - DNA, 25 bp, Homo sapien
ccagtgacgtcaccgcaagggcgga

SEQ ID NO: 1669310 - DNA, 25 bp, Homo sapien
gacgtcaccgcaagggcggaaggga

SEQ ID NO: 1669311 - DNA, 25 bp, Homo sapien
ccagtccggcctccgccagtgacgt

SEQ ID NO: 1669312 - DNA, 25 bp, Homo sapien
ggcctccgccagtgacgtcaccgca

SEQ ID NO: 1669313 - DNA, 25 bp, Homo sapien
tagtgacggtcaagccacctacaac

SEQ ID NO: 1669314 - DNA, 25 bp, Homo sapien
atggtgaccgcgacacactcagaaa

SEQ ID NO: 1669315 - DNA, 25 bp, Homo sapien
cgagtcaggcatcgtggtaggacct

SEQ ID NO: 1669316 - DNA, 25 bp, Homo sapien
cgcctggatcgggaacttgtcgcat

SEQ ID NO: 1669317 - DNA, 25 bp, Homo sapien
taaaacgtgctcttgtcgctctgaa

SEQ ID NO: 1669318 - DNA, 25 bp, Homo sapien
cgtgaagcctagagattcccgagcc

SEQ ID NO: 1669319 - DNA, 25 bp, Homo sapien
tgggtctcatttccgaggccgaaaa

SEQ ID NO: 1669320 - DNA, 25 bp, Homo sapien
taaaggacgggatagagttgcacac

SEQ ID NO: 1669321 - DNA, 25 bp, Homo sapien
gacaatacattggtagaactcacta

SEQ ID NO: 1669322 - DNA, 25 bp, Homo sapien
caccagcatgctgaaggtcaggaac

SEQ ID NO: 1669323 - DNA, 25 bp, Homo sapien
ttcgttgaaagcatcaggcaggttc

SEQ ID NO: 1669324 - DNA, 25 bp, Homo sapien
cttggcttcgttgaaagcatcaggc

SEQ ID NO: 1669325 - DNA, 25 bp, Homo sapien
gaacttggcttcgttgaaagcatca

SEQ ID NO: 1669326 - DNA, 25 bp, Homo sapien
gacggagccctcattacactggata

SEQ ID NO: 1669327 - DNA, 25 bp, Homo sapien
ccagaaaggctacagcaagggaccc

SEQ ID NO: 1669328 - DNA, 25 bp, Homo sapien
tgtagccaggcatgaactgagggtc

SEQ ID NO: 1669329 - DNA, 25 bp, Homo sapien
agtagaaggcagtgacggagccctc

SEQ ID NO: 1669330 - DNA, 25 bp, Homo sapien
cttgtttacgaagggaggctctgtc

SEQ ID NO: 1669331 - DNA, 25 bp, Homo sapien
atccactttcggatcctgctttctg

SEQ ID NO: 1669332 - DNA, 25 bp, Homo sapien
ggacccatccactttcggatcctgc

SEQ ID NO: 1669333 - DNA, 25 bp, Homo sapien
agagggtcacttgggtaaaggagca

SEQ ID NO: 1669334 - DNA, 25 bp, Homo sapien
gcagaaaacacagccactgtgaaca

SEQ ID NO: 1669335 - DNA, 25 bp, Homo sapien
aaacacagccactgtgaacacagct

SEQ ID NO: 1669336 - DNA, 25 bp, Homo sapien
cacagccactgtgaacacagctgca

SEQ ID NO: 1669337 - DNA, 25 bp, Homo sapien
gaaaacacagccactgtgaacacag

SEQ ID NO: 1669338 - DNA, 25 bp, Homo sapien
ctgtgagaggaggcaggtggcaggg

SEQ ID NO: 1669339 - DNA, 25 bp, Homo sapien
acaaggagggtgtagctcagagtct

SEQ ID NO: 1669340 - DNA, 25 bp, Homo sapien
tatgggagtgttttggtgccacaca

SEQ ID NO: 1669341 - DNA, 25 bp, Homo sapien
tcagagtctggttgctggccttgac

SEQ ID NO: 1669342 - DNA, 25 bp, Homo sapien
caaactccacaaggatcagaacaga

SEQ ID NO: 1669343 - DNA, 25 bp, Homo sapien
gtagtcactctagtactgagcttgc

SEQ ID NO: 1669344 - DNA, 25 bp, Homo sapien
taacccaacacggtacatcaaagtg

SEQ ID NO: 1669345 - DNA, 25 bp, Homo sapien
tataaatgcacgtagctcattctct

SEQ ID NO: 1669346 - DNA, 25 bp, Homo sapien
gaaaacatgcagtgtgtgtagtcac

SEQ ID NO: 1669347 - DNA, 25 bp, Homo sapien
gttttcattagtataaagagccggc

SEQ ID NO: 1669348 - DNA, 25 bp, Homo sapien
ataaagagccggcttccagacaccc

SEQ ID NO: 1669349 - DNA, 25 bp, Homo sapien
tagtataaagagccggcttccagac

SEQ ID NO: 1669350 - DNA, 25 bp, Homo sapien
tcattagtataaagagccggcttcc

SEQ ID NO: 1669351 - DNA, 25 bp, Homo sapien
gtctgcatcagacttacaaaatctc

SEQ ID NO: 1669352 - DNA, 25 bp, Homo sapien
ctctaatacacatggaacatcaaca

SEQ ID NO: 1669353 - DNA, 25 bp, Homo sapien
tactctctaatacacatggaacatc

SEQ ID NO: 1669354 - DNA, 25 bp, Homo sapien
tctctaatacacatggaacatcaac

SEQ ID NO: 1669355 - DNA, 25 bp, Homo sapien
tgaaatcatatccacggtggtgcag

SEQ ID NO: 1669356 - DNA, 25 bp, Homo sapien
aagtccataatcctggacaagcttc

SEQ ID NO: 1669357 - DNA, 25 bp, Homo sapien
gcagcaagatgctgtgccccctcgc

SEQ ID NO: 1669358 - DNA, 25 bp, Homo sapien
ctggacaagcttcatgtagagtgtg

SEQ ID NO: 1669359 - DNA, 25 bp, Homo sapien
cagcaagatgctgtgccccctcgct

SEQ ID NO: 1669360 - DNA, 25 bp, Homo sapien
tcctgctttcaaattgtgggttttg

SEQ ID NO: 1669361 - DNA, 25 bp, Homo sapien
cctgctttcaaattgtgggttttga

SEQ ID NO: 1669362 - DNA, 25 bp, Homo sapien
ttccacctgctgtagtaataagact

SEQ ID NO: 1669363 - DNA, 25 bp, Homo sapien
cggatactgctccacgctgctagga

SEQ ID NO: 1669364 - DNA, 25 bp, Homo sapien
catggacaacatgatttcaggagat

SEQ ID NO: 1669365 - DNA, 25 bp, Homo sapien
cttcgccacagaccggtaagttgtc

SEQ ID NO: 1669366 - DNA, 25 bp, Homo sapien
ctcaacatcacagctcaggtaatta

SEQ ID NO: 1669367 - DNA, 25 bp, Homo sapien
tcaacatcacagctcaggtaattac

SEQ ID NO: 1669368 - DNA, 25 bp, Homo sapien
gtaagaagaaaataactcgcccatc

SEQ ID NO: 1669369 - DNA, 25 bp, Homo sapien
tcatcatcttttgccagggtaagaa

SEQ ID NO: 1669370 - DNA, 25 bp, Homo sapien
tcttcttctgaaggacttggatggt

SEQ ID NO: 1669371 - DNA, 25 bp, Homo sapien
tcagtagtgccagcaatcatcatct

SEQ ID NO: 1669372 - DNA, 25 bp, Homo sapien
tggtcaagaagtcccatgccctctg

SEQ ID NO: 1669373 - DNA, 25 bp, Homo sapien
gtcaagaagtcccatgccctctggg

SEQ ID NO: 1669374 - DNA, 25 bp, Homo sapien
ctggtcaagaagtcccatgccctct

SEQ ID NO: 1669375 - DNA, 25 bp, Homo sapien
ggtcaagaagtcccatgccctctgg

SEQ ID NO: 1669376 - DNA, 25 bp, Homo sapien
aatgtccaacggcattgataacaca

SEQ ID NO: 1669377 - DNA, 25 bp, Homo sapien
gctgcagcatccttatcatctattt

SEQ ID NO: 1669378 - DNA, 25 bp, Homo sapien
tcatctattttgcacacagagtctg

SEQ ID NO: 1669379 - DNA, 25 bp, Homo sapien
taacacacttggctttcatgtcaaa

SEQ ID NO: 1669380 - DNA, 25 bp, Homo sapien
ggacatccttgcaccatgcaccact

SEQ ID NO: 1669381 - DNA, 25 bp, Homo sapien
catccttgcaccatgcaccactcac

SEQ ID NO: 1669382 - DNA, 25 bp, Homo sapien
acatccttgcaccatgcaccactca

SEQ ID NO: 1669383 - DNA, 25 bp, Homo sapien
gacatccttgcaccatgcaccactc

SEQ ID NO: 1669384 - DNA, 25 bp, Homo sapien
gtctgtctgggtgtctgtcttctta

SEQ ID NO: 1669385 - DNA, 25 bp, Homo sapien
tctgggtgtctgtcttcttaagcaa

SEQ ID NO: 1669386 - DNA, 25 bp, Homo sapien
tttcgctgtctgtctgggtgtctgt

SEQ ID NO: 1669387 - DNA, 25 bp, Homo sapien
tgtctgtcttcttaagcaagctcac

SEQ ID NO: 1669388 - DNA, 25 bp, Homo sapien
catccatgcatcgttatgtcgtcca

SEQ ID NO: 1669389 - DNA, 25 bp, Homo sapien
atccccatatctggcagcagtcagc

SEQ ID NO: 1669390 - DNA, 25 bp, Homo sapien
cgtccatcatagtagacaattcctc

SEQ ID NO: 1669391 - DNA, 25 bp, Homo sapien
ttgactgtggcatccccatatctgg

SEQ ID NO: 1669392 - DNA, 25 bp, Homo sapien
cggtactgctcaatatccaacttca

SEQ ID NO: 1669393 - DNA, 25 bp, Homo sapien
ccggtactgctcaatatccaacttc

SEQ ID NO: 1669394 - DNA, 25 bp, Homo sapien
ggtactgctcaatatccaacttcat

SEQ ID NO: 1669395 - DNA, 25 bp, Homo sapien
gtccctggtaagtaatcatctcttt

SEQ ID NO: 1669396 - DNA, 25 bp, Homo sapien
tggtccctggtaagtaatcatctct

SEQ ID NO: 1669397 - DNA, 25 bp, Homo sapien
ggtccctggtaagtaatcatctctt

SEQ ID NO: 1669398 - DNA, 25 bp, Homo sapien
tccctggtaagtaatcatctctttc

SEQ ID NO: 1669399 - DNA, 25 bp, Homo sapien
gacggcatctagtgcacagccactt

SEQ ID NO: 1669400 - DNA, 25 bp, Homo sapien
tttgcaaagtcagtagctgagcgtc

SEQ ID NO: 1669401 - DNA, 25 bp, Homo sapien
gagcgtctctggaaggaggctccct

SEQ ID NO: 1669402 - DNA, 25 bp, Homo sapien
tcttctcctcccataacaaggatat

SEQ ID NO: 1669403 - DNA, 25 bp, Homo sapien
catagaccaggctcatttgtttcct

SEQ ID NO: 1669404 - DNA, 25 bp, Homo sapien
tgcttcaacatagaccaggctcatt

SEQ ID NO: 1669405 - DNA, 25 bp, Homo sapien
gcttcaacatagaccaggctcattt

SEQ ID NO: 1669406 - DNA, 25 bp, Homo sapien
tcaacatagaccaggctcatttgtt

SEQ ID NO: 1669407 - DNA, 25 bp, Homo sapien
tgcttatcgtagtcttgtggtacag

SEQ ID NO: 1669408 - DNA, 25 bp, Homo sapien
tttgacaattcaggctattctttgg

SEQ ID NO: 1669409 - DNA, 25 bp, Homo sapien
tctgtagttcccctggtagagatgt

SEQ ID NO: 1669410 - DNA, 25 bp, Homo sapien
tagcttgataggattggcgttgaat

SEQ ID NO: 1669411 - DNA, 25 bp, Homo sapien
ccctatagaaaagtggccaaattat

SEQ ID NO: 1669412 - DNA, 25 bp, Homo sapien
tgtagagaagaatgtaaccagcctg

SEQ ID NO: 1669413 - DNA, 25 bp, Homo sapien
cacaaaaagtcagagtgccctcttt

SEQ ID NO: 1669414 - DNA, 25 bp, Homo sapien
tctccagcaagggtttgaaactggg

SEQ ID NO: 1669415 - DNA, 25 bp, Homo sapien
tagcaattgggagcaagatgcatcc

SEQ ID NO: 1669416 - DNA, 25 bp, Homo sapien
cagtagaaaacagtgatagagcccc

SEQ ID NO: 1669417 - DNA, 25 bp, Homo sapien
gatgtcaggcgggttactttccagg

SEQ ID NO: 1669418 - DNA, 25 bp, Homo sapien
gatgattataccaggactatgggtc

SEQ ID NO: 1669419 - DNA, 25 bp, Homo sapien
ttgcagccatatttagcctgtgggc

SEQ ID NO: 1669420 - DNA, 25 bp, Homo sapien
gcctgtgggccaagatttgcctgcc

SEQ ID NO: 1669421 - DNA, 25 bp, Homo sapien
ttgcctgcccttgctctagatgact

SEQ ID NO: 1669422 - DNA, 25 bp, Homo sapien
ttgtagccgtatttagcaatatgca

SEQ ID NO: 1669423 - DNA, 25 bp, Homo sapien
caaggtagcagttgtcttagagcat

SEQ ID NO: 1669424 - DNA, 25 bp, Homo sapien
ggtgtgcaaagtgaatacccaaaaa

SEQ ID NO: 1669425 - DNA, 25 bp, Homo sapien
gcggccttcgggtcctatccaatga

SEQ ID NO: 1669426 - DNA, 25 bp, Homo sapien
cccaaaaatgaatgcaaggtagcag

SEQ ID NO: 1669427 - DNA, 25 bp, Homo sapien
caggcagcaagacgaagcaacttcg

SEQ ID NO: 1669428 - DNA, 25 bp, Homo sapien
gaccaaaagccagataagactcctg

SEQ ID NO: 1669429 - DNA, 25 bp, Homo sapien
tgcaggcttgcaacatccagaatcc

SEQ ID NO: 1669430 - DNA, 25 bp, Homo sapien
cattttaaggattgcccaggcagca

SEQ ID NO: 1669431 - DNA, 25 bp, Homo sapien
caagggagatcctagttgggtccaa

SEQ ID NO: 1669432 - DNA, 25 bp, Homo sapien
tcacattgaagtaggtgacaccttc

SEQ ID NO: 1669433 - DNA, 25 bp, Homo sapien
aaaacaccagttggattgatgggca

SEQ ID NO: 1669434 - DNA, 25 bp, Homo sapien
tatgacaaaacagggtaaagatggc

SEQ ID NO: 1669435 - DNA, 25 bp, Homo sapien
agcgagaagaaaggcagttgttact

SEQ ID NO: 1669436 - DNA, 25 bp, Homo sapien
tcagtggtgggaattacgtgatgca

SEQ ID NO: 1669437 - DNA, 25 bp, Homo sapien
agaaaggcagttgttactccatgtc

SEQ ID NO: 1669438 - DNA, 25 bp, Homo sapien
atcagtggtgggaattacgtgatgc

SEQ ID NO: 1669439 - DNA, 25 bp, Homo sapien
gtatttgtctctgaacagcatcctc

SEQ ID NO: 1669440 - DNA, 25 bp, Homo sapien
tgtctctgaacagcatcctcttaga

SEQ ID NO: 1669441 - DNA, 25 bp, Homo sapien
ctctgaacagcatcctcttagaaac

SEQ ID NO: 1669442 - DNA, 25 bp, Homo sapien
aacagcatcctcttagaaacactca

SEQ ID NO: 1669443 - DNA, 25 bp, Homo sapien
gattacacatttgccagataagcga

SEQ ID NO: 1669444 - DNA, 25 bp, Homo sapien
tattactcagattacacatttgcca

SEQ ID NO: 1669445 - DNA, 25 bp, Homo sapien
cagataagcgaaatgaattcatcct

SEQ ID NO: 1669446 - DNA, 25 bp, Homo sapien
tatcctcatgttctcatgcttgtgg

SEQ ID NO: 1669447 - DNA, 25 bp, Homo sapien
cttaagataggtacatgatacttca

SEQ ID NO: 1669448 - DNA, 25 bp, Homo sapien
ggtacatgatacttcaataaaccat

SEQ ID NO: 1669449 - DNA, 25 bp, Homo sapien
tgatggttacatgggcatacacatc

SEQ ID NO: 1669450 - DNA, 25 bp, Homo sapien
cacatcatcgtgctgtacacttaag

SEQ ID NO: 1669451 - DNA, 25 bp, Homo sapien
caaggactctagcaggttctcacag

SEQ ID NO: 1669452 - DNA, 25 bp, Homo sapien
agagctatctttacactttcgtgag

SEQ ID NO: 1669453 - DNA, 25 bp, Homo sapien
gtgcctctgcaggaaccagaacaag

SEQ ID NO: 1669454 - DNA, 25 bp, Homo sapien
agatctgagaaaagtccccagctgg

SEQ ID NO: 1669455 - DNA, 25 bp, Homo sapien
ctggtactgatatacgcttcagccc

SEQ ID NO: 1669456 - DNA, 25 bp, Homo sapien
aaaccattaggccttcgtagtagag

SEQ ID NO: 1669457 - DNA, 25 bp, Homo sapien
tctgttcttttacagcaagcacagc

SEQ ID NO: 1669458 - DNA, 25 bp, Homo sapien
tcttgcacccttaatgaggttagcc

SEQ ID NO: 1669459 - DNA, 25 bp, Homo sapien
tgtttagtgcatgaaaaacaggcca

SEQ ID NO: 1669460 - DNA, 25 bp, Homo sapien
tactacagatagagatataccatgg

SEQ ID NO: 1669461 - DNA, 25 bp, Homo sapien
tgtctggacacattaattcctctgg

SEQ ID NO: 1669462 - DNA, 25 bp, Homo sapien
taatgatgagggacccctagtttgt

SEQ ID NO: 1669463 - DNA, 25 bp, Homo sapien
tatcttagtttcttgagtaggtgcc

SEQ ID NO: 1669464 - DNA, 25 bp, Homo sapien
taattatagctttagaggaagtctt

SEQ ID NO: 1669465 - DNA, 25 bp, Homo sapien
ttaattatagctttagaggaagtct

SEQ ID NO: 1669466 - DNA, 25 bp, Homo sapien
aggatcacttaagcgcagaagatca

SEQ ID NO: 1669467 - DNA, 25 bp, Homo sapien
tcacttaagcgcagaagatcaagac

SEQ ID NO: 1669468 - DNA, 25 bp, Homo sapien
gctaacatgtacaagcaagaaccag

SEQ ID NO: 1669469 - DNA, 25 bp, Homo sapien
ggagctgtaggacctggctaacatg

SEQ ID NO: 1669470 - DNA, 25 bp, Homo sapien
ggtcaaatttcagcagtcccaaact

SEQ ID NO: 1669471 - DNA, 25 bp, Homo sapien
aggaagtggcaactctgagtcagga

SEQ ID NO: 1669472 - DNA, 25 bp, Homo sapien
gattccactgagcaacactgggaga

SEQ ID NO: 1669473 - DNA, 25 bp, Homo sapien
cactgggagatactggccatactgt

SEQ ID NO: 1669474 - DNA, 25 bp, Homo sapien
gataacaaggcatcaaaaaggcagt

SEQ ID NO: 1669475 - DNA, 25 bp, Homo sapien
cacaggagactggaaaattagcatc

SEQ ID NO: 1669476 - DNA, 25 bp, Homo sapien
gataaaggcttacctctgaatgaag

SEQ ID NO: 1669477 - DNA, 25 bp, Homo sapien
catctcttggcatgttaaactctca

SEQ ID NO: 1669478 - DNA, 25 bp, Homo sapien
tactacactgtggttagaaaatgtg

SEQ ID NO: 1669479 - DNA, 25 bp, Homo sapien
tgcctggatgtttggtagacttgaa

SEQ ID NO: 1669480 - DNA, 25 bp, Homo sapien
tcagtgtgaataacctgatgatgaa

SEQ ID NO: 1669481 - DNA, 25 bp, Homo sapien
tgtgagacccgtttgaaggccctac

SEQ ID NO: 1669482 - DNA, 25 bp, Homo sapien
tgcattctctgaggttgaacggtag

SEQ ID NO: 1669483 - DNA, 25 bp, Homo sapien
ggtagttgaatcatgactcaaggtc

SEQ ID NO: 1669484 - DNA, 25 bp, Homo sapien
tcatagggtttctcaccggtatgaa

SEQ ID NO: 1669485 - DNA, 25 bp, Homo sapien
agggtttctcaccggtatgaattct

SEQ ID NO: 1669486 - DNA, 25 bp, Homo sapien
atactttgcactcatagggtttctc

SEQ ID NO: 1669487 - DNA, 25 bp, Homo sapien
catagggtttctcaccggtatgaat

SEQ ID NO: 1669488 - DNA, 25 bp, Homo sapien
ctgatgtcgtataagagttgagcct

SEQ ID NO: 1669489 - DNA, 25 bp, Homo sapien
ttgaaccagaattgaaggcctttcc

SEQ ID NO: 1669490 - DNA, 25 bp, Homo sapien
tagtcgtgagccatatttaaaggcc

SEQ ID NO: 1669491 - DNA, 25 bp, Homo sapien
gatgttcaatcaactgtgagcttcg

SEQ ID NO: 1669492 - DNA, 25 bp, Homo sapien
gtcttttctacatttattataccca

SEQ ID NO: 1669493 - DNA, 25 bp, Homo sapien
tcttttctacatttattatacccaa

SEQ ID NO: 1669494 - DNA, 25 bp, Homo sapien
catgctggtcaaaagtgggcatttc

SEQ ID NO: 1669495 - DNA, 25 bp, Homo sapien
atgcatgctggtcaaaagtgggcat

SEQ ID NO: 1669496 - DNA, 25 bp, Homo sapien
gataaaaagtaagggatgcatgctg

SEQ ID NO: 1669497 - DNA, 25 bp, Homo sapien
catgtctgatgatcatctgatggaa

SEQ ID NO: 1669498 - DNA, 25 bp, Homo sapien
acttgaacactcaagaccataactt

SEQ ID NO: 1669499 - DNA, 25 bp, Homo sapien
aatcatcttggaaacttgaacactc

SEQ ID NO: 1669500 - DNA, 25 bp, Homo sapien
gcattcccaatcatcttggaaactt

SEQ ID NO: 1669501 - DNA, 25 bp, Homo sapien
caagaccataacttgtaaggctttc

SEQ ID NO: 1669502 - DNA, 25 bp, Homo sapien
gacttcataaacatgctgctttgga

SEQ ID NO: 1669503 - DNA, 25 bp, Homo sapien
tccttggtatcatatctggactcca

SEQ ID NO: 1669504 - DNA, 25 bp, Homo sapien
ctcccattggggtgattcgacttca

SEQ ID NO: 1669505 - DNA, 25 bp, Homo sapien
ttggaaataattccttggtatcata

SEQ ID NO: 1669506 - DNA, 25 bp, Homo sapien
ctggagggtttagactcaatgccta

SEQ ID NO: 1669507 - DNA, 25 bp, Homo sapien
gggtttagactcaatgcctattaac

SEQ ID NO: 1669508 - DNA, 25 bp, Homo sapien
aaaaaagcgaatatgtttggcttct

SEQ ID NO: 1669509 - DNA, 25 bp, Homo sapien
gaactggagggtttagactcaatgc

SEQ ID NO: 1669510 - DNA, 25 bp, Homo sapien
tgaaaatggtgagcacggtaaatct

SEQ ID NO: 1669511 - DNA, 25 bp, Homo sapien
tggtacagtggcagctattctcatg

SEQ ID NO: 1669512 - DNA, 25 bp, Homo sapien
tggatctgcaacctgcctcagtgcc

SEQ ID NO: 1669513 - DNA, 25 bp, Homo sapien
ctcatgtgtccgctagaagttagaa

SEQ ID NO: 1669514 - DNA, 25 bp, Homo sapien
tccagacaccactctctccaccatc

SEQ ID NO: 1669515 - DNA, 25 bp, Homo sapien
ctggacacaggcctccagacaccac

SEQ ID NO: 1669516 - DNA, 25 bp, Homo sapien
gacacaggcctccagacaccactct

SEQ ID NO: 1669517 - DNA, 25 bp, Homo sapien
gcctccagacaccactctctccacc

SEQ ID NO: 1669518 - DNA, 25 bp, Homo sapien
acatcaggtttggaaacggcaagac

SEQ ID NO: 1669519 - DNA, 25 bp, Homo sapien
ctaggaaggagatcacatcaggttt

SEQ ID NO: 1669520 - DNA, 25 bp, Homo sapien
gatcacatcaggtttggaaacggca

SEQ ID NO: 1669521 - DNA, 25 bp, Homo sapien
tcacatcaggtttggaaacggcaag

SEQ ID NO: 1669522 - DNA, 25 bp, Homo sapien
gcaggtgccaaccactgccattctt

SEQ ID NO: 1669523 - DNA, 25 bp, Homo sapien
caggtgccaaccactgccattcttc

SEQ ID NO: 1669524 - DNA, 25 bp, Homo sapien
ctctgagcaggtgccaaccactgcc

SEQ ID NO: 1669525 - DNA, 25 bp, Homo sapien
agggcagagtcctgcgacggtagag

SEQ ID NO: 1669526 - DNA, 25 bp, Homo sapien
aagggcagagtcctgcgacggtaga

SEQ ID NO: 1669527 - DNA, 25 bp, Homo sapien
cgatgaggcgagacgtctgcgttct

SEQ ID NO: 1669528 - DNA, 25 bp, Homo sapien
gagcgcctggaaagctccggaacct

SEQ ID NO: 1669529 - DNA, 25 bp, Homo sapien
aatgtagtctcacgccggtaaagcc

SEQ ID NO: 1669530 - DNA, 25 bp, Homo sapien
cggtaaagccacagagcgacgatga

SEQ ID NO: 1669531 - DNA, 25 bp, Homo sapien
cgcctcctcgggtccaagtgccacc

SEQ ID NO: 1669532 - DNA, 25 bp, Homo sapien
tcgggtccaagtgccaccgcggccg

SEQ ID NO: 1669533 - DNA, 25 bp, Homo sapien
ccagggcgcgcttccaccacggtac

SEQ ID NO: 1669534 - DNA, 25 bp, Homo sapien
gcccagggcgcgcttccaccacggt

SEQ ID NO: 1669535 - DNA, 25 bp, Homo sapien
tcgtgtgttcgagtccctgggttgc

SEQ ID NO: 1669536 - DNA, 25 bp, Homo sapien
tctcgcgatgtttcagggtgagccg

SEQ ID NO: 1669537 - DNA, 25 bp, Homo sapien
gcacaccgatgctgcgccatgatag

SEQ ID NO: 1669538 - DNA, 25 bp, Homo sapien
tctttaggcgtaaaggcagcagccc

SEQ ID NO: 1669539 - DNA, 25 bp, Homo sapien
gatcgtcttgcttcagccttgcaaa

SEQ ID NO: 1669540 - DNA, 25 bp, Homo sapien
gacttccagtccgtggcgaagggca

SEQ ID NO: 1669541 - DNA, 25 bp, Homo sapien
aagggctcccaagtaggacttccag

SEQ ID NO: 1669542 - DNA, 25 bp, Homo sapien
gaggttcgttgtctcacgccaaggg

SEQ ID NO: 1669543 - DNA, 25 bp, Homo sapien
acttatcatcaaacacctcgggtga

SEQ ID NO: 1669544 - DNA, 25 bp, Homo sapien
gccctgccgagcaaataatgaacgt

SEQ ID NO: 1669545 - DNA, 25 bp, Homo sapien
tgacagaagaatgcaggtcagctcc

SEQ ID NO: 1669546 - DNA, 25 bp, Homo sapien
gattctgcctgttgctccctgataa

SEQ ID NO: 1669547 - DNA, 25 bp, Homo sapien
ctgcgcaggtggaacgggtggaacg

SEQ ID NO: 1669548 - DNA, 25 bp, Homo sapien
gattctgaaggccagcggaggtggg

SEQ ID NO: 1669549 - DNA, 25 bp, Homo sapien
agggctcagctggtccgggtgggat

SEQ ID NO: 1669550 - DNA, 25 bp, Homo sapien
cagtcgaacggcctgagagggctca

SEQ ID NO: 1669551 - DNA, 25 bp, Homo sapien
tagggaaaggggcgcagcagtaact

SEQ ID NO: 1669552 - DNA, 25 bp, Homo sapien
gggaaaggggcgcagcagtaactac

SEQ ID NO: 1669553 - DNA, 25 bp, Homo sapien
agggaaaggggcgcagcagtaacta

SEQ ID NO: 1669554 - DNA, 25 bp, Homo sapien
acatcccagcatcctctgcgccgcg

SEQ ID NO: 1669555 - DNA, 25 bp, Homo sapien
gcaactgagcggcgggatctgcggc

SEQ ID NO: 1669556 - DNA, 25 bp, Homo sapien
ggggccctcggccaacatcccagca

SEQ ID NO: 1669557 - DNA, 25 bp, Homo sapien
ccgcaactgagcggcgggatctgcg

SEQ ID NO: 1669558 - DNA, 25 bp, Homo sapien
catgtccaaggtaaggaagcatttc

SEQ ID NO: 1669559 - DNA, 25 bp, Homo sapien
gcaggcctggcattttatggtttct

SEQ ID NO: 1669560 - DNA, 25 bp, Homo sapien
tccagctcgactttctcaggatact

SEQ ID NO: 1669561 - DNA, 25 bp, Homo sapien
gcctggcccgtatgttgtattctta

SEQ ID NO: 1669562 - DNA, 25 bp, Homo sapien
cctgttctaaatctgggtgaatgaa

SEQ ID NO: 1669563 - DNA, 25 bp, Homo sapien
gagatgtattcatcatttacatgta

SEQ ID NO: 1669564 - DNA, 25 bp, Homo sapien
taataagacagtttactgagatgta

SEQ ID NO: 1669565 - DNA, 25 bp, Homo sapien
tgtaggtcagttctcataaactggc

SEQ ID NO: 1669566 - DNA, 25 bp, Homo sapien
gccaagttagacgttcacaccatga

SEQ ID NO: 1669567 - DNA, 25 bp, Homo sapien
aaagtggcaccctgttttgccgaga

SEQ ID NO: 1669568 - DNA, 25 bp, Homo sapien
tatatcctcatatccgtggagatgg

SEQ ID NO: 1669569 - DNA, 25 bp, Homo sapien
tctggaagtctgagaacaggtcgcc

SEQ ID NO: 1669570 - DNA, 25 bp, Homo sapien
tcatgttgggcgaggtgtgcactct

SEQ ID NO: 1669571 - DNA, 25 bp, Homo sapien
tgtattctgatgtcgaatcagggat

SEQ ID NO: 1669572 - DNA, 25 bp, Homo sapien
aagagatgtgcgctgactaaaggcc

SEQ ID NO: 1669573 - DNA, 25 bp, Homo sapien
gatgaactccgactatatgccttcc

SEQ ID NO: 1669574 - DNA, 25 bp, Homo sapien
tgattggcggccgaaaactttacta

SEQ ID NO: 1669575 - DNA, 25 bp, Homo sapien
tgcagaataagggttgaaagccgcc

SEQ ID NO: 1669576 - DNA, 25 bp, Homo sapien
taagggatgaatgccgattgcagac

SEQ ID NO: 1669577 - DNA, 25 bp, Homo sapien
gagatattcggtggctgaaggcttt

SEQ ID NO: 1669578 - DNA, 25 bp, Homo sapien
gacttaaggccttcgcattttcagg

SEQ ID NO: 1669579 - DNA, 25 bp, Homo sapien
ggcagacattcccaacaacatgaat

SEQ ID NO: 1669580 - DNA, 25 bp, Homo sapien
tgcagccactctttcgtgtaggagc

SEQ ID NO: 1669581 - DNA, 25 bp, Homo sapien
ggactgaatttttgttgcagccact

SEQ ID NO: 1669582 - DNA, 25 bp, Homo sapien
ctgaaagacataaaggaattaaatg

SEQ ID NO: 1669583 - DNA, 25 bp, Homo sapien
agacataaaggaattaaatgtttct

SEQ ID NO: 1669584 - DNA, 25 bp, Homo sapien
tgaaagacataaaggaattaaatgt

SEQ ID NO: 1669585 - DNA, 25 bp, Homo sapien
cataaaggaattaaatgtttctcct

SEQ ID NO: 1669586 - DNA, 25 bp, Homo sapien
gaagttcctatattgctataaataa

SEQ ID NO: 1669587 - DNA, 25 bp, Homo sapien
tattaggaagttcctatattgctat

SEQ ID NO: 1669588 - DNA, 25 bp, Homo sapien
gctcctggttcagtaggctgtacaa

SEQ ID NO: 1669589 - DNA, 25 bp, Homo sapien
ctgtttgtattaggaagttcctata

SEQ ID NO: 1669590 - DNA, 25 bp, Homo sapien
ccaggtactgacaaacatccataag

SEQ ID NO: 1669591 - DNA, 25 bp, Homo sapien
aatgaccaggtactgacaaacatcc

SEQ ID NO: 1669592 - DNA, 25 bp, Homo sapien
gaccaggtactgacaaacatccata

SEQ ID NO: 1669593 - DNA, 25 bp, Homo sapien
tcaatgaccaggtactgacaaacat

SEQ ID NO: 1669594 - DNA, 25 bp, Homo sapien
ttgtcaatgaatccttgaaaagtag

SEQ ID NO: 1669595 - DNA, 25 bp, Homo sapien
tttgtcaatgaatccttgaaaagta

SEQ ID NO: 1669596 - DNA, 25 bp, Homo sapien
aataaggtgatcacatttggtctcc

SEQ ID NO: 1669597 - DNA, 25 bp, Homo sapien
tactggctctaccatccagggtgct

SEQ ID NO: 1669598 - DNA, 25 bp, Homo sapien
cacatttggtctccgaaaggaaaga

SEQ ID NO: 1669599 - DNA, 25 bp, Homo sapien
caggagcccggcgtcttcttactgg

SEQ ID NO: 1669600 - DNA, 25 bp, Homo sapien
tgtccctcaataggctggttctgga

SEQ ID NO: 1669601 - DNA, 25 bp, Homo sapien
tcaataggctggttctggattgtgg

SEQ ID NO: 1669602 - DNA, 25 bp, Homo sapien
tagacccagagtgatgcatgtccct

SEQ ID NO: 1669603 - DNA, 25 bp, Homo sapien
gagtgatgcatgtccctcaataggc

SEQ ID NO: 1669604 - DNA, 25 bp, Homo sapien
agaagtagatggctaagtccccaaa

SEQ ID NO: 1669605 - DNA, 25 bp, Homo sapien
caaatccttctgaatggggctcagc

SEQ ID NO: 1669606 - DNA, 25 bp, Homo sapien
ctaagtccccaaatgttataggtgc

SEQ ID NO: 1669607 - DNA, 25 bp, Homo sapien
caacatgacatcttcatacaaatcc

SEQ ID NO: 1669608 - DNA, 25 bp, Homo sapien
tgaaatgaaaaatcaaatgtctatt

SEQ ID NO: 1669609 - DNA, 25 bp, Homo sapien
ctgaaatgaaaaatcaaatgtctat

SEQ ID NO: 1669610 - DNA, 25 bp, Homo sapien
gaaatgaaaaatcaaatgtctattc

SEQ ID NO: 1669611 - DNA, 25 bp, Homo sapien
aatgaaaaatcaaatgtctattcac

SEQ ID NO: 1669612 - DNA, 25 bp, Homo sapien
taaacatgggagacacaaggtacca

SEQ ID NO: 1669613 - DNA, 25 bp, Homo sapien
aggtaccaagaatcattcaggaagc

SEQ ID NO: 1669614 - DNA, 25 bp, Homo sapien
ctggaggaaatggtgcacacatctt

SEQ ID NO: 1669615 - DNA, 25 bp, Homo sapien
gctggaggaaatggtgcacacatct

SEQ ID NO: 1669616 - DNA, 25 bp, Homo sapien
tttggatttcccccgtgcagaaggc

SEQ ID NO: 1669617 - DNA, 25 bp, Homo sapien
ggatttggatttcccccgtgcagaa

SEQ ID NO: 1669618 - DNA, 25 bp, Homo sapien
tggatttcccccgtgcagaaggcat

SEQ ID NO: 1669619 - DNA, 25 bp, Homo sapien
ttggatttggatttcccccgtgcag

SEQ ID NO: 1669620 - DNA, 25 bp, Homo sapien
ccccctttagggtccacactgagag

SEQ ID NO: 1669621 - DNA, 25 bp, Homo sapien
cccctttagggtccacactgagaga

SEQ ID NO: 1669622 - DNA, 25 bp, Homo sapien
tccccctttagggtccacactgaga

SEQ ID NO: 1669623 - DNA, 25 bp, Homo sapien
ggattgggaccctcttttccagcaa

SEQ ID NO: 1669624 - DNA, 25 bp, Homo sapien
ctggattgggaccctcttttccagc

SEQ ID NO: 1669625 - DNA, 25 bp, Homo sapien
attgggaccctcttttccagcaaca

SEQ ID NO: 1669626 - DNA, 25 bp, Homo sapien
tgaattccttcctgtgcaagatcca

SEQ ID NO: 1669627 - DNA, 25 bp, Homo sapien
agattaaactactggcccttggtga

SEQ ID NO: 1669628 - DNA, 25 bp, Homo sapien
ggagctcaatgtcccaactgtctag

SEQ ID NO: 1669629 - DNA, 25 bp, Homo sapien
ctttataaaacggaggcaggaggat

SEQ ID NO: 1669630 - DNA, 25 bp, Homo sapien
tggtgaccaaccctatcctgaagct

SEQ ID NO: 1669631 - DNA, 25 bp, Homo sapien
cactttttcaaggagccttccctca

SEQ ID NO: 1669632 - DNA, 25 bp, Homo sapien
ggtatgcttcacatgtatcaggtgc

SEQ ID NO: 1669633 - DNA, 25 bp, Homo sapien
aggtgccacttcttcacagcggaaa

SEQ ID NO: 1669634 - DNA, 25 bp, Homo sapien
gcggaaacacattccattgtgagca

SEQ ID NO: 1669635 - DNA, 25 bp, Homo sapien
caccggacaatgcattgaccaatgt

SEQ ID NO: 1669636 - DNA, 25 bp, Homo sapien
tctgtgggatgtgagtttgggaaaa

SEQ ID NO: 1669637 - DNA, 25 bp, Homo sapien
tactgaaccttgctgggtctttacc

SEQ ID NO: 1669638 - DNA, 25 bp, Homo sapien
tcagtcagtgctccgttaaggtaaa

SEQ ID NO: 1669639 - DNA, 25 bp, Homo sapien
tgagatgagatcatatcagtcagtg

SEQ ID NO: 1669640 - DNA, 25 bp, Homo sapien
ggtttgtgttaatgtaaaaatcatg

SEQ ID NO: 1669641 - DNA, 25 bp, Homo sapien
attacttcataataaatctgggttt

SEQ ID NO: 1669642 - DNA, 25 bp, Homo sapien
taataaatctgggtttgtgttaatg

SEQ ID NO: 1669643 - DNA, 25 bp, Homo sapien
tcatttgtgcatattacttcataat

SEQ ID NO: 1669644 - DNA, 25 bp, Homo sapien
gccacgcaccccaaatttgagaaga

SEQ ID NO: 1669645 - DNA, 25 bp, Homo sapien
gaagttgtaatgcattcatcccgca

SEQ ID NO: 1669646 - DNA, 25 bp, Homo sapien
taagcagatcagttggctttcccct

SEQ ID NO: 1669647 - DNA, 25 bp, Homo sapien
gatctgatggttctgtacagggact

SEQ ID NO: 1669648 - DNA, 25 bp, Homo sapien
caagcatccaagagaccaacgaaga

SEQ ID NO: 1669649 - DNA, 25 bp, Homo sapien
tctgagacagtaagaccagctcctc

SEQ ID NO: 1669650 - DNA, 25 bp, Homo sapien
aaagcttgcctctgccaattactgg

SEQ ID NO: 1669651 - DNA, 25 bp, Homo sapien
agactgagacccactaaaaaggctg

SEQ ID NO: 1669652 - DNA, 25 bp, Homo sapien
tcaaggcagggctgtaaacctggct

SEQ ID NO: 1669653 - DNA, 25 bp, Homo sapien
gaaaggcacaaagctatgtcctcct

SEQ ID NO: 1669654 - DNA, 25 bp, Homo sapien
tcgtcttccgagtccctgatgatag

SEQ ID NO: 1669655 - DNA, 25 bp, Homo sapien
cctcctgaggtgaggacggctggaa

SEQ ID NO: 1669656 - DNA, 25 bp, Homo sapien
aaagttctgttcttgaccccatggg

SEQ ID NO: 1669657 - DNA, 25 bp, Homo sapien
gaatgcatctcggagcttacccggg

SEQ ID NO: 1669658 - DNA, 25 bp, Homo sapien
gagctgtagctcttaaccctgtgcg

SEQ ID NO: 1669659 - DNA, 25 bp, Homo sapien
tcgcttgtcacaacccagagggagg

SEQ ID NO: 1669660 - DNA, 25 bp, Homo sapien
acaaagatagcccagtccgaagctc

SEQ ID NO: 1669661 - DNA, 25 bp, Homo sapien
gtggacaaagatagcccagtccgaa

SEQ ID NO: 1669662 - DNA, 25 bp, Homo sapien
agatagcccagtccgaagctcagag

SEQ ID NO: 1669663 - DNA, 25 bp, Homo sapien
cccagtccgaagctcagagatgcaa

SEQ ID NO: 1669664 - DNA, 25 bp, Homo sapien
gtggcgggccgagaacccacgcagg

SEQ ID NO: 1669665 - DNA, 25 bp, Homo sapien
acagcagcgaagggcgcaaacccca

SEQ ID NO: 1669666 - DNA, 25 bp, Homo sapien
gcgcaaaccccacgccgtggcgggc

SEQ ID NO: 1669667 - DNA, 25 bp, Homo sapien
ttgggcgcacaagccccgagaacca

SEQ ID NO: 1669668 - DNA, 25 bp, Homo sapien
ggctcagaccccggcggcgaccacc

SEQ ID NO: 1669669 - DNA, 25 bp, Homo sapien
cgcctgcgcactcccctccgggacc

SEQ ID NO: 1669670 - DNA, 25 bp, Homo sapien
ctgcgcactcccctccgggaccccg

SEQ ID NO: 1669671 - DNA, 25 bp, Homo sapien
gaccccggcggcgaccaccgagaca

SEQ ID NO: 1669672 - DNA, 25 bp, Homo sapien
gagtgtccgccataaagtcgtttga

SEQ ID NO: 1669673 - DNA, 25 bp, Homo sapien
cctgcacgttttgcgaagaggccca

SEQ ID NO: 1669674 - DNA, 25 bp, Homo sapien
ttcacgaggtttggagccggcctca

SEQ ID NO: 1669675 - DNA, 25 bp, Homo sapien
cccagaacgtgaggtgaagaaggct

SEQ ID NO: 1669676 - DNA, 25 bp, Homo sapien
tgaggcttcctgaactcagcatgac

SEQ ID NO: 1669677 - DNA, 25 bp, Homo sapien
cagcatgactgctccgcttggctca

SEQ ID NO: 1669678 - DNA, 25 bp, Homo sapien
ggattattttacacaggatggtcag

SEQ ID NO: 1669679 - DNA, 25 bp, Homo sapien
actgctccgcttggctcagattcca

SEQ ID NO: 1669680 - DNA, 25 bp, Homo sapien
tcttctctttcatccgatgaccttg

SEQ ID NO: 1669681 - DNA, 25 bp, Homo sapien
caggaagaagttccacatttcccaa

SEQ ID NO: 1669682 - DNA, 25 bp, Homo sapien
ccgatgaccttgaggcacatttaat

SEQ ID NO: 1669683 - DNA, 25 bp, Homo sapien
tttcatccgatgaccttgaggcaca

SEQ ID NO: 1669684 - DNA, 25 bp, Homo sapien
tggctgattatctctacactggctc

SEQ ID NO: 1669685 - DNA, 25 bp, Homo sapien
cagtaattggctgattatctctaca

SEQ ID NO: 1669686 - DNA, 25 bp, Homo sapien
tagtttcttgcccagtaattggctg

SEQ ID NO: 1669687 - DNA, 25 bp, Homo sapien
gattatctctacactggctcttatg

SEQ ID NO: 1669688 - DNA, 25 bp, Homo sapien
tgtggtcataccatgagtcatgagt

SEQ ID NO: 1669689 - DNA, 25 bp, Homo sapien
tcctctcatttgtagccagccatga

SEQ ID NO: 1669690 - DNA, 25 bp, Homo sapien
catgctactatcaggacattctttt

SEQ ID NO: 1669691 - DNA, 25 bp, Homo sapien
ccatgagtgtggtcataccatgagt

SEQ ID NO: 1669692 - DNA, 25 bp, Homo sapien
catgagacagtaagacctggacgta

SEQ ID NO: 1669693 - DNA, 25 bp, Homo sapien
taccagagatttaaccaacacctag

SEQ ID NO: 1669694 - DNA, 25 bp, Homo sapien
caagggtcattttaagaggcaggca

SEQ ID NO: 1669695 - DNA, 25 bp, Homo sapien
tcaggaatggcaggtagctaggccc

SEQ ID NO: 1669696 - DNA, 25 bp, Homo sapien
ttttgagtcatagtcaccatgtcct

SEQ ID NO: 1669697 - DNA, 25 bp, Homo sapien
ttgagtcatagtcaccatgtccttg

SEQ ID NO: 1669698 - DNA, 25 bp, Homo sapien
ctattttgagtcatagtcaccatgt

SEQ ID NO: 1669699 - DNA, 25 bp, Homo sapien
tattttgagtcatagtcaccatgtc

SEQ ID NO: 1669700 - DNA, 25 bp, Homo sapien
gccttggaattaatgacttggagaa

SEQ ID NO: 1669701 - DNA, 25 bp, Homo sapien
ccttggaattaatgacttggagaag

SEQ ID NO: 1669702 - DNA, 25 bp, Homo sapien
cttggaattaatgacttggagaaga

SEQ ID NO: 1669703 - DNA, 25 bp, Homo sapien
tttacacacgtgtattcttttcctg

SEQ ID NO: 1669704 - DNA, 25 bp, Homo sapien
acacacgtgtattcttttcctgttt

SEQ ID NO: 1669705 - DNA, 25 bp, Homo sapien
gtgtattcttttcctgtttccctca

SEQ ID NO: 1669706 - DNA, 25 bp, Homo sapien
tgtattcttttcctgtttccctcat

SEQ ID NO: 1669707 - DNA, 25 bp, Homo sapien
cagccttgatacagagcagtgggtg

SEQ ID NO: 1669708 - DNA, 25 bp, Homo sapien
tgcatgagaaatggaattctgcctt

SEQ ID NO: 1669709 - DNA, 25 bp, Homo sapien
tattgaagatgagtctcacctctgt

SEQ ID NO: 1669710 - DNA, 25 bp, Homo sapien
cagtgggtgttgtgtgagatacagt

SEQ ID NO: 1669711 - DNA, 25 bp, Homo sapien
gggttccagcgtcgactcacggagt

SEQ ID NO: 1669712 - DNA, 25 bp, Homo sapien
gaggacaatcccctcaacactaggc

SEQ ID NO: 1669713 - DNA, 25 bp, Homo sapien
tggagagaggctggcgcctgcgcga

SEQ ID NO: 1669714 - DNA, 25 bp, Homo sapien
cggagtccttcggatgagagcgtct

SEQ ID NO: 1669715 - DNA, 25 bp, Homo sapien
tctccatcaactcaggatgctgtct

SEQ ID NO: 1669716 - DNA, 25 bp, Homo sapien
tgatgtcatcaaaggacctggttcc

SEQ ID NO: 1669717 - DNA, 25 bp, Homo sapien
tgtaggtaggtagcaggtcaaggca

SEQ ID NO: 1669718 - DNA, 25 bp, Homo sapien
ccttctcaagtaacagcttcccatg

SEQ ID NO: 1669719 - DNA, 25 bp, Homo sapien
tcagtcacccttggattcagagata

SEQ ID NO: 1669720 - DNA, 25 bp, Homo sapien
gagatagaagtcatcttaattccat

SEQ ID NO: 1669721 - DNA, 25 bp, Homo sapien
tcctttctgcagcttgcggctttca

SEQ ID NO: 1669722 - DNA, 25 bp, Homo sapien
cctttctgcagcttgcggctttcag

SEQ ID NO: 1669723 - DNA, 25 bp, Homo sapien
gtatttttgagacgttaggcagccc

SEQ ID NO: 1669724 - DNA, 25 bp, Homo sapien
gaactttaagaggtcgccagggctg

SEQ ID NO: 1669725 - DNA, 25 bp, Homo sapien
ttagactatttcgacccaggacgtg

SEQ ID NO: 1669726 - DNA, 25 bp, Homo sapien
tcaagagtaaggagaccaggcgtgc

SEQ ID NO: 1669727 - DNA, 25 bp, Homo sapien
catcagagtgatcctccggactccg

SEQ ID NO: 1669728 - DNA, 25 bp, Homo sapien
cagagtgatcctccggactccggag

SEQ ID NO: 1669729 - DNA, 25 bp, Homo sapien
ggcagtgacgctcccgcaaggagct

SEQ ID NO: 1669730 - DNA, 25 bp, Homo sapien
cggtcggcagtgacgctcccgcaag

SEQ ID NO: 1669731 - DNA, 25 bp, Homo sapien
ccctgcggtcccacccctcgccgca

SEQ ID NO: 1669732 - DNA, 25 bp, Homo sapien
cacagccaagcacccttttactccg

SEQ ID NO: 1669733 - DNA, 25 bp, Homo sapien
gccctgcggtcccacccctcgccgc

SEQ ID NO: 1669734 - DNA, 25 bp, Homo sapien
agcacccttttactccggccctgcg

SEQ ID NO: 1669735 - DNA, 25 bp, Homo sapien
tgtgtagtcagagcggcctctgctt

SEQ ID NO: 1669736 - DNA, 25 bp, Homo sapien
ttggccaccacttatgcggcggctg

SEQ ID NO: 1669737 - DNA, 25 bp, Homo sapien
tgcgcgactcccagaagcctttggg

SEQ ID NO: 1669738 - DNA, 25 bp, Homo sapien
ggtgggtgtgtagtcagagcggcct

SEQ ID NO: 1669739 - DNA, 25 bp, Homo sapien
tagtgcctggattgaggtacctggc

SEQ ID NO: 1669740 - DNA, 25 bp, Homo sapien
taaccttcaggcaactcaagtgacc

SEQ ID NO: 1669741 - DNA, 25 bp, Homo sapien
tagaatggcaaagtggtcaaaggtc

SEQ ID NO: 1669742 - DNA, 25 bp, Homo sapien
gaaaataattggacctgcctcaagc

SEQ ID NO: 1669743 - DNA, 25 bp, Homo sapien
taaatctgccttctgttagccacag

SEQ ID NO: 1669744 - DNA, 25 bp, Homo sapien
aggttcaccaggcttcatgcagaag

SEQ ID NO: 1669745 - DNA, 25 bp, Homo sapien
gaaaatcctgctcatgccaagctgt

SEQ ID NO: 1669746 - DNA, 25 bp, Homo sapien
gaaggctacattatcaggttcacca

SEQ ID NO: 1669747 - DNA, 25 bp, Homo sapien
ggcactattatttcaatatcgggaa

SEQ ID NO: 1669748 - DNA, 25 bp, Homo sapien
agttagaagcacatttacaccttac

SEQ ID NO: 1669749 - DNA, 25 bp, Homo sapien
caccttacagagaaatatgactatc

SEQ ID NO: 1669750 - DNA, 25 bp, Homo sapien
tgttttgacaattggttatccaccc

SEQ ID NO: 1669751 - DNA, 25 bp, Homo sapien
tcctagcattttgcgggcactttcc

SEQ ID NO: 1669752 - DNA, 25 bp, Homo sapien
caggaacagggccaatattcagctt

SEQ ID NO: 1669753 - DNA, 25 bp, Homo sapien
tatgtgggatatgactcctaggctg

SEQ ID NO: 1669754 - DNA, 25 bp, Homo sapien
tcagctttatgaaccagtatggcca

SEQ ID NO: 1669755 - DNA, 25 bp, Homo sapien
tctggatagctcctaccaaaaacaa

SEQ ID NO: 1669756 - DNA, 25 bp, Homo sapien
tagcaggatcctaagcccattgtgc

SEQ ID NO: 1669757 - DNA, 25 bp, Homo sapien
cccattgtgcactagggtctggata

SEQ ID NO: 1669758 - DNA, 25 bp, Homo sapien
gatggatgtccagtgagacagatca

SEQ ID NO: 1669759 - DNA, 25 bp, Homo sapien
tctgaggggctcactaaaggtaatc

SEQ ID NO: 1669760 - DNA, 25 bp, Homo sapien
tctgttacaatggttttcaattgct

SEQ ID NO: 1669761 - DNA, 25 bp, Homo sapien
tgtctgttacaatggttttcaattg

SEQ ID NO: 1669762 - DNA, 25 bp, Homo sapien
attcatttctcagagtgtcttagtc

SEQ ID NO: 1669763 - DNA, 25 bp, Homo sapien
gttgtgtaaacatggagacccctcc

SEQ ID NO: 1669764 - DNA, 25 bp, Homo sapien
taaccctgaacaggacggaagctgt

SEQ ID NO: 1669765 - DNA, 25 bp, Homo sapien
ggcgtaccgtatatcagagagcagt

SEQ ID NO: 1669766 - DNA, 25 bp, Homo sapien
tcacttttctatcgcgtaggccccg

SEQ ID NO: 1669767 - DNA, 25 bp, Homo sapien
ctgcatctgaacactcggagcctgg

SEQ ID NO: 1669768 - DNA, 25 bp, Homo sapien
gagaggcctcctaatccaaccagga

SEQ ID NO: 1669769 - DNA, 25 bp, Homo sapien
ctgcgccgtgggtcgcttcagtgaa

SEQ ID NO: 1669770 - DNA, 25 bp, Homo sapien
gaagccagttctctgcgtcctgagc

SEQ ID NO: 1669771 - DNA, 25 bp, Homo sapien
tgctggatcaggcaccttactatcc

SEQ ID NO: 1669772 - DNA, 25 bp, Homo sapien
gatggacaaaaatacgtgctcttac

SEQ ID NO: 1669773 - DNA, 25 bp, Homo sapien
gaactagaggtaactgtgagacaca

SEQ ID NO: 1669774 - DNA, 25 bp, Homo sapien
cttactatccccagaacatgttggt

SEQ ID NO: 1669775 - DNA, 25 bp, Homo sapien
gagtgtcagtaacaatagctggcac

SEQ ID NO: 1669776 - DNA, 25 bp, Homo sapien
acactcagtatgctggagagagcca

SEQ ID NO: 1669777 - DNA, 25 bp, Homo sapien
gcctccccttgggattcagttggtg

SEQ ID NO: 1669778 - DNA, 25 bp, Homo sapien
tgcctgctgtatgctatgcattacc

SEQ ID NO: 1669779 - DNA, 25 bp, Homo sapien
aagaactcctcgctcacgcagcacc

SEQ ID NO: 1669780 - DNA, 25 bp, Homo sapien
agcaagaactcctcgctcacgcagc

SEQ ID NO: 1669781 - DNA, 25 bp, Homo sapien
cgttcgagtgcagcgagtgcggcaa

SEQ ID NO: 1669782 - DNA, 25 bp, Homo sapien
cttcagcaagaactcctcgctcacg

SEQ ID NO: 1669783 - DNA, 25 bp, Homo sapien
ggaagaccttcagccgcaacacgaa

SEQ ID NO: 1669784 - DNA, 25 bp, Homo sapien
gcgggaagtccttcatcaagaactc

SEQ ID NO: 1669785 - DNA, 25 bp, Homo sapien
actgtgcaccagcggatccacacgg

SEQ ID NO: 1669786 - DNA, 25 bp, Homo sapien
gcgagaagccgtacaggtgcggcca

SEQ ID NO: 1669787 - DNA, 25 bp, Homo sapien
tcaacttcagtggtcagagagggcc

SEQ ID NO: 1669788 - DNA, 25 bp, Homo sapien
cagacgttggtgtgagcagatgcat

SEQ ID NO: 1669789 - DNA, 25 bp, Homo sapien
tctgggaaccgagcaatgaacaaac

SEQ ID NO: 1669790 - DNA, 25 bp, Homo sapien
tgcaccctctgataagtaggaaccc

SEQ ID NO: 1669791 - DNA, 25 bp, Homo sapien
atcaacaatgaaaaggccagctggc

SEQ ID NO: 1669792 - DNA, 25 bp, Homo sapien
atttactgagcaagggcttactcaa

SEQ ID NO: 1669793 - DNA, 25 bp, Homo sapien
aatcaacaatgaaaaggccagctgg

SEQ ID NO: 1669794 - DNA, 25 bp, Homo sapien
actgagcaagggcttactcaataaa

SEQ ID NO: 1669795 - DNA, 25 bp, Homo sapien
atcttctgctggtccacgcgggttt

SEQ ID NO: 1669796 - DNA, 25 bp, Homo sapien
caggtgttgagtcaggcgtgggagc

SEQ ID NO: 1669797 - DNA, 25 bp, Homo sapien
tgagagcccaggtgttgagtcaggc

SEQ ID NO: 1669798 - DNA, 25 bp, Homo sapien
ggtccacgcgggtttctgccagggc

SEQ ID NO: 1669799 - DNA, 25 bp, Homo sapien
tctggtgtcggatgagcgcggagga

SEQ ID NO: 1669800 - DNA, 25 bp, Homo sapien
cctctggtgtcggatgagcgcggag

SEQ ID NO: 1669801 - DNA, 25 bp, Homo sapien
gcgtcctctggtgtcggatgagcgc

SEQ ID NO: 1669802 - DNA, 25 bp, Homo sapien
tcggatgagcgcggaggagaagctg

SEQ ID NO: 1669803 - DNA, 25 bp, Homo sapien
tataagcgaggacacgtggctgaag

SEQ ID NO: 1669804 - DNA, 25 bp, Homo sapien
tgaaggcggccccgcattgcaggca

SEQ ID NO: 1669805 - DNA, 25 bp, Homo sapien
tcaccggtgtgcacgaggcggtgct

SEQ ID NO: 1669806 - DNA, 25 bp, Homo sapien
tgggagcggttgctgaagcgcttgc

SEQ ID NO: 1669807 - DNA, 25 bp, Homo sapien
gctgcgtcaggtgcgacacctgggt

SEQ ID NO: 1669808 - DNA, 25 bp, Homo sapien
ggtgctgcgtcaggtgcgacacctg

SEQ ID NO: 1669809 - DNA, 25 bp, Homo sapien
ctgcgtcaggtgcgacacctgggtg

SEQ ID NO: 1669810 - DNA, 25 bp, Homo sapien
tgctgcgtcaggtgcgacacctggg

SEQ ID NO: 1669811 - DNA, 25 bp, Homo sapien
ggtgcgcgatctgcgcgaaggcctt

SEQ ID NO: 1669812 - DNA, 25 bp, Homo sapien
cggtgctcggccagagaggcgctct

SEQ ID NO: 1669813 - DNA, 25 bp, Homo sapien
cgcgccgcagtcctggcacgtgtag

SEQ ID NO: 1669814 - DNA, 25 bp, Homo sapien
ggtcaggtgcgcgatctgcgcgaag

SEQ ID NO: 1669815 - DNA, 25 bp, Homo sapien
ggcggatgagcgctgaggagaagcg

SEQ ID NO: 1669816 - DNA, 25 bp, Homo sapien
aggagaagcggaaggccttggcgca

SEQ ID NO: 1669817 - DNA, 25 bp, Homo sapien
gcggatgagcgctgaggagaagcgg

SEQ ID NO: 1669818 - DNA, 25 bp, Homo sapien
ctgaggagaagcggaaggccttggc

SEQ ID NO: 1669819 - DNA, 25 bp, Homo sapien
agggtcaggtgcacgctctggctga

SEQ ID NO: 1669820 - DNA, 25 bp, Homo sapien
tcaggtgcgtgacgcgcgtgaaggc

SEQ ID NO: 1669821 - DNA, 25 bp, Homo sapien
acgccaggtacgagccctggctgaa

SEQ ID NO: 1669822 - DNA, 25 bp, Homo sapien
tgctctatcagggacgagcggttgc

SEQ ID NO: 1669823 - DNA, 25 bp, Homo sapien
gtgtaagatgaacgctgaacagtag

SEQ ID NO: 1669824 - DNA, 25 bp, Homo sapien
ctggtgtaagatgaacgctgaacag

SEQ ID NO: 1669825 - DNA, 25 bp, Homo sapien
ggtgtaagatgaacgctgaacagta

SEQ ID NO: 1669826 - DNA, 25 bp, Homo sapien
tggtgtaagatgaacgctgaacagt

SEQ ID NO: 1669827 - DNA, 25 bp, Homo sapien
tcaggatgcctctccttcgggctct

SEQ ID NO: 1669828 - DNA, 25 bp, Homo sapien
acctccgggaactgctgtcgtcggg

SEQ ID NO: 1669829 - DNA, 25 bp, Homo sapien
tcccgctggcggctgtcaggatgcc

SEQ ID NO: 1669830 - DNA, 25 bp, Homo sapien
tttccacggcttcttggggcctcca

SEQ ID NO: 1669831 - DNA, 25 bp, Homo sapien
tggagggcgacgctcaagagtccct

SEQ ID NO: 1669832 - DNA, 25 bp, Homo sapien
gaattcatcgcgttcctgcatgctg

SEQ ID NO: 1669833 - DNA, 25 bp, Homo sapien
gatatggttcttgggattcggctga

SEQ ID NO: 1669834 - DNA, 25 bp, Homo sapien
ggctgctgtcttgatctcacatctt

SEQ ID NO: 1669835 - DNA, 25 bp, Homo sapien
ctgcacgctggcgagaaactcacca

SEQ ID NO: 1669836 - DNA, 25 bp, Homo sapien
tgctgaaggatttataccaattgcc

SEQ ID NO: 1669837 - DNA, 25 bp, Homo sapien
tggtgtacactggacctgcacgctg

SEQ ID NO: 1669838 - DNA, 25 bp, Homo sapien
tataccaattgcctggtgtacactg

SEQ ID NO: 1669839 - DNA, 25 bp, Homo sapien
ccaaccacacctggtcaagacaggg

SEQ ID NO: 1669840 - DNA, 25 bp, Homo sapien
cagcgtgtgcctcagcaagaggaca

SEQ ID NO: 1669841 - DNA, 25 bp, Homo sapien
agaccctgagggagtgatgatgttt

SEQ ID NO: 1669842 - DNA, 25 bp, Homo sapien
gtcacgtgtgctggtaagaacttgc

SEQ ID NO: 1669843 - DNA, 25 bp, Homo sapien
gccggcaccgcgactaaagcttgca

SEQ ID NO: 1669844 - DNA, 25 bp, Homo sapien
catcgggcccgcctggttcttagga

SEQ ID NO: 1669845 - DNA, 25 bp, Homo sapien
tggttcttaggaactacgactccca

SEQ ID NO: 1669846 - DNA, 25 bp, Homo sapien
ccgcgactaaagcttgcaaagcctg

SEQ ID NO: 1669847 - DNA, 25 bp, Homo sapien
gaaaactagagaatctataactcac

SEQ ID NO: 1669848 - DNA, 25 bp, Homo sapien
gaaactgtacagatttgatcaatct

SEQ ID NO: 1669849 - DNA, 25 bp, Homo sapien
tcttcagaagataatccaccttttg

SEQ ID NO: 1669850 - DNA, 25 bp, Homo sapien
cccatccctagggagaaaactagag

SEQ ID NO: 1669851 - DNA, 25 bp, Homo sapien
tgtgagaacagaacggcaggaatgc

SEQ ID NO: 1669852 - DNA, 25 bp, Homo sapien
gggccgttcctttctagccaagtga

SEQ ID NO: 1669853 - DNA, 25 bp, Homo sapien
ccttggagatgagttgccatggaaa

SEQ ID NO: 1669854 - DNA, 25 bp, Homo sapien
ttgcagctgtgagaacagaacggca

SEQ ID NO: 1669855 - DNA, 25 bp, Homo sapien
aacaacagggcggaaggcttcttat

SEQ ID NO: 1669856 - DNA, 25 bp, Homo sapien
tgggcaccgtgcaatttctcgaact

SEQ ID NO: 1669857 - DNA, 25 bp, Homo sapien
tcagcccaggaaatgtagagagacc

SEQ ID NO: 1669858 - DNA, 25 bp, Homo sapien
cagaatctgtgaaccattggagctg

SEQ ID NO: 1669859 - DNA, 25 bp, Homo sapien
tcacagcggtgaggatagaacagca

SEQ ID NO: 1669860 - DNA, 25 bp, Homo sapien
cacagcggtgaggatagaacagcag

SEQ ID NO: 1669861 - DNA, 25 bp, Homo sapien
acagcggtgaggatagaacagcagg

SEQ ID NO: 1669862 - DNA, 25 bp, Homo sapien
taataatctagagcaatacccgtac

SEQ ID NO: 1669863 - DNA, 25 bp, Homo sapien
tctgtgggttcactgaaggtcctac

SEQ ID NO: 1669864 - DNA, 25 bp, Homo sapien
aaggtcctacgtaaccattccaatg

SEQ ID NO: 1669865 - DNA, 25 bp, Homo sapien
tatgttgactggttaataagtaggc

SEQ ID NO: 1669866 - DNA, 25 bp, Homo sapien
ggcggtcattccagagcccaggtgc

SEQ ID NO: 1669867 - DNA, 25 bp, Homo sapien
agggcggtcattccagagcccaggt

SEQ ID NO: 1669868 - DNA, 25 bp, Homo sapien
gggcggtcattccagagcccaggtg

SEQ ID NO: 1669869 - DNA, 25 bp, Homo sapien
tagatctaggataaaacagggcaac

SEQ ID NO: 1669870 - DNA, 25 bp, Homo sapien
ctaatgtttacagagggttagattt

SEQ ID NO: 1669871 - DNA, 25 bp, Homo sapien
tatgcccaagtaaattcaataatca

SEQ ID NO: 1669872 - DNA, 25 bp, Homo sapien
gccaataaaagcaagtagatggtcc

SEQ ID NO: 1669873 - DNA, 25 bp, Homo sapien
tcaagttgttaacaaggtggggcta

SEQ ID NO: 1669874 - DNA, 25 bp, Homo sapien
gggctagtgaaaggccttctcacac

SEQ ID NO: 1669875 - DNA, 25 bp, Homo sapien
gccttctcacactcacaacactcta

SEQ ID NO: 1669876 - DNA, 25 bp, Homo sapien
acactctaggaggaagccaataatg

SEQ ID NO: 1669877 - DNA, 25 bp, Homo sapien
tacacgttcacagagattcgcacac

SEQ ID NO: 1669878 - DNA, 25 bp, Homo sapien
cagaagtcttcctaccagaatgggt

SEQ ID NO: 1669879 - DNA, 25 bp, Homo sapien
tcgcacactggacggaaggctttct

SEQ ID NO: 1669880 - DNA, 25 bp, Homo sapien
gatccgttcgtgtctcctaagggct

SEQ ID NO: 1669881 - DNA, 25 bp, Homo sapien
tccaggcgtgagataatgtcaggtt

SEQ ID NO: 1669882 - DNA, 25 bp, Homo sapien
cctcttccaggcgtgagataatgtc

SEQ ID NO: 1669883 - DNA, 25 bp, Homo sapien
atgtcaggtttagagaactggtgcc

SEQ ID NO: 1669884 - DNA, 25 bp, Homo sapien
ccattgcatatgattcctcctcttc

SEQ ID NO: 1669885 - DNA, 25 bp, Homo sapien
agtccacaagcacatcctcgaaggt

SEQ ID NO: 1669886 - DNA, 25 bp, Homo sapien
tgaagtccacaagcacatcctcgaa

SEQ ID NO: 1669887 - DNA, 25 bp, Homo sapien
aagggaactaagttcctctgggctg

SEQ ID NO: 1669888 - DNA, 25 bp, Homo sapien
ctctgagcagcactaagggaactaa

SEQ ID NO: 1669889 - DNA, 25 bp, Homo sapien
gaaatgttcctaagtgtttgaagtc

SEQ ID NO: 1669890 - DNA, 25 bp, Homo sapien
caccagaaatgttcctaagtgtttg

SEQ ID NO: 1669891 - DNA, 25 bp, Homo sapien
ccagaaatgttcctaagtgtttgaa

SEQ ID NO: 1669892 - DNA, 25 bp, Homo sapien
atgttcctaagtgtttgaagtccgg

SEQ ID NO: 1669893 - DNA, 25 bp, Homo sapien
ttaaattgatctccagtctctgata

SEQ ID NO: 1669894 - DNA, 25 bp, Homo sapien
gattcgctattgatacttatgtatg

SEQ ID NO: 1669895 - DNA, 25 bp, Homo sapien
ttatttcattaaattgatctccagt

SEQ ID NO: 1669896 - DNA, 25 bp, Homo sapien
cgattcgctattgatacttatgtat

SEQ ID NO: 1669897 - DNA, 25 bp, Homo sapien
cccatatttgataaccatgtcagag

SEQ ID NO: 1669898 - DNA, 25 bp, Homo sapien
taaggaagtccacaaattaggaaga

SEQ ID NO: 1669899 - DNA, 25 bp, Homo sapien
aattaggaagataagatccccatat

SEQ ID NO: 1669900 - DNA, 25 bp, Homo sapien
gaaatgagtatgtggtttaattaaa

SEQ ID NO: 1669901 - DNA, 25 bp, Homo sapien
gattgtctaacatctctgtgttcct

SEQ ID NO: 1669902 - DNA, 25 bp, Homo sapien
gggacagagtcctgagcaaggaaac

SEQ ID NO: 1669903 - DNA, 25 bp, Homo sapien
cttttctgcagggacagagtcctga

SEQ ID NO: 1669904 - DNA, 25 bp, Homo sapien
cagcagatggcagattgtctaacat

SEQ ID NO: 1669905 - DNA, 25 bp, Homo sapien
tcaaagcactataaggacccagtgg

SEQ ID NO: 1669906 - DNA, 25 bp, Homo sapien
cagcaacatgggtgcagctgaagcc

SEQ ID NO: 1669907 - DNA, 25 bp, Homo sapien
tagagataagtatgccctgaggtct

SEQ ID NO: 1669908 - DNA, 25 bp, Homo sapien
tattaatgccacaagcaatcccagg

SEQ ID NO: 1669909 - DNA, 25 bp, Homo sapien
gcagccattgcaaacagagctcctg

SEQ ID NO: 1669910 - DNA, 25 bp, Homo sapien
tgacaggtactgaaaatccccaaac

SEQ ID NO: 1669911 - DNA, 25 bp, Homo sapien
taaagtttgccaccatggttcctgc

SEQ ID NO: 1669912 - DNA, 25 bp, Homo sapien
gctcagaaactgtgtcagcactagt

SEQ ID NO: 1669913 - DNA, 25 bp, Homo sapien
tgttgacactattacagatagaatg

SEQ ID NO: 1669914 - DNA, 25 bp, Homo sapien
tagaatgaccacaaccatattaaca

SEQ ID NO: 1669915 - DNA, 25 bp, Homo sapien
cactattacagatagaatgaccaca

SEQ ID NO: 1669916 - DNA, 25 bp, Homo sapien
tacagatagaatgaccacaaccata

SEQ ID NO: 1669917 - DNA, 25 bp, Homo sapien
tatgcacaccaatggagacacacat

SEQ ID NO: 1669918 - DNA, 25 bp, Homo sapien
tcacaagcgtgtgcactgaaacaag

SEQ ID NO: 1669919 - DNA, 25 bp, Homo sapien
tcctctgggtatgtattatgcacac

SEQ ID NO: 1669920 - DNA, 25 bp, Homo sapien
cacagactagtgcacagatcaagat

SEQ ID NO: 1669921 - DNA, 25 bp, Homo sapien
cctagggtgcaaactgacttgtggc

SEQ ID NO: 1669922 - DNA, 25 bp, Homo sapien
tagctgaaggttggaacggacaccc

SEQ ID NO: 1669923 - DNA, 25 bp, Homo sapien
taaggatactagctcctgggcacct

SEQ ID NO: 1669924 - DNA, 25 bp, Homo sapien
ttatttacagcatgagagcctctcc

SEQ ID NO: 1669925 - DNA, 25 bp, Homo sapien
gagattggtccatgttgtgtgattc

SEQ ID NO: 1669926 - DNA, 25 bp, Homo sapien
gctacagtgaagttttgcattgctt

SEQ ID NO: 1669927 - DNA, 25 bp, Homo sapien
gttggcagccattgataggaattct

SEQ ID NO: 1669928 - DNA, 25 bp, Homo sapien
aagcggcgtcatgtactgtgtattc

SEQ ID NO: 1669929 - DNA, 25 bp, Homo sapien
ccaacactccagtcaagcttcagaa

SEQ ID NO: 1669930 - DNA, 25 bp, Homo sapien
gagtctaacataggcttagctacag

SEQ ID NO: 1669931 - DNA, 25 bp, Homo sapien
tgtatacctgctcagtcagttcctt

SEQ ID NO: 1669932 - DNA, 25 bp, Homo sapien
gatatacccatgtaaccaacactcc

SEQ ID NO: 1669933 - DNA, 25 bp, Homo sapien
gatttccagctgatgtatctaatat

SEQ ID NO: 1669934 - DNA, 25 bp, Homo sapien
gaaggttctcttgtatacctgctca

SEQ ID NO: 1669935 - DNA, 25 bp, Homo sapien
ttcctttcactcccaattgttggca

SEQ ID NO: 1669936 - DNA, 25 bp, Homo sapien
aagcaatgcaaaacttcactgtagc

SEQ ID NO: 1669937 - DNA, 25 bp, Homo sapien
gaatacacagtacatgacgccgctt

SEQ ID NO: 1669938 - DNA, 25 bp, Homo sapien
tgccaacaattgggagtgaaaggaa

SEQ ID NO: 1669939 - DNA, 25 bp, Homo sapien
atattagatacatcagctggaaatc

SEQ ID NO: 1669940 - DNA, 25 bp, Homo sapien
gaatcacacaacatggaccaatctc

SEQ ID NO: 1669941 - DNA, 25 bp, Homo sapien
agaattcctatcaatggctgccaac

SEQ ID NO: 1669942 - DNA, 25 bp, Homo sapien
aaggaactgactgagcaggtataca

SEQ ID NO: 1669943 - DNA, 25 bp, Homo sapien
tgagcaggtatacaagagaaccttc

SEQ ID NO: 1669944 - DNA, 25 bp, Homo sapien
ctgtagctaagcctatgttagactc

SEQ ID NO: 1669945 - DNA, 25 bp, Homo sapien
ttctgaagcttgactggagtgttgg

SEQ ID NO: 1669946 - DNA, 25 bp, Homo sapien
ggagtgttggttacatgggtatatc

SEQ ID NO: 1669947 - DNA, 25 bp, Homo sapien
gacaggcggtcattgaagagctgcc

SEQ ID NO: 1669948 - DNA, 25 bp, Homo sapien
catggcagtcatagtatggttcttc

SEQ ID NO: 1669949 - DNA, 25 bp, Homo sapien
tggcacgttcgatgtagcctgagca

SEQ ID NO: 1669950 - DNA, 25 bp, Homo sapien
tcatcagcttgattggcaccacctg

SEQ ID NO: 1669951 - DNA, 25 bp, Homo sapien
ctacgtttaagccctgaatcctcag

SEQ ID NO: 1669952 - DNA, 25 bp, Homo sapien
tacgtttaagccctgaatcctcaga

SEQ ID NO: 1669953 - DNA, 25 bp, Homo sapien
tagtgaggactgtgctatgaataaa

SEQ ID NO: 1669954 - DNA, 25 bp, Homo sapien
actgtgctatgaataaaggacttac

SEQ ID NO: 1669955 - DNA, 25 bp, Homo sapien
tgtttagtgaggactgtgctatgaa

SEQ ID NO: 1669956 - DNA, 25 bp, Homo sapien
gaggactgtgctatgaataaaggac

SEQ ID NO: 1669957 - DNA, 25 bp, Homo sapien
tacgtgatctgcaagttctgctggg

SEQ ID NO: 1669958 - DNA, 25 bp, Homo sapien
ctgctgggttgacgaaagattctcc

SEQ ID NO: 1669959 - DNA, 25 bp, Homo sapien
taggaggacccgtactcatagggct

SEQ ID NO: 1669960 - DNA, 25 bp, Homo sapien
aaaaggcatcgaatggccgacccag

SEQ ID NO: 1669961 - DNA, 25 bp, Homo sapien
tcagagctatgagcaaagcactccc

SEQ ID NO: 1669962 - DNA, 25 bp, Homo sapien
tgaccatgggtctcctcgctgtggg

SEQ ID NO: 1669963 - DNA, 25 bp, Homo sapien
tgtgtactcccgactgtcaaccagg

SEQ ID NO: 1669964 - DNA, 25 bp, Homo sapien
ggtttggcacggaatacactctgta

SEQ ID NO: 1669965 - DNA, 25 bp, Homo sapien
tttactgggccctgctacactgtga

SEQ ID NO: 1669966 - DNA, 25 bp, Homo sapien
gagcttccacagaggctaagctatg

SEQ ID NO: 1669967 - DNA, 25 bp, Homo sapien
gaagctctgaatggtagactctgcc

SEQ ID NO: 1669968 - DNA, 25 bp, Homo sapien
ccagcacgaactctctgatggttga

SEQ ID NO: 1669969 - DNA, 25 bp, Homo sapien
tagagctaatggtgaacgccttttc

SEQ ID NO: 1669970 - DNA, 25 bp, Homo sapien
tgaatggcccactatgaatgacaga

SEQ ID NO: 1669971 - DNA, 25 bp, Homo sapien
tcttctgagattcagtgaatggccc

SEQ ID NO: 1669972 - DNA, 25 bp, Homo sapien
ggcatcccggccatctgtaaagtca

SEQ ID NO: 1669973 - DNA, 25 bp, Homo sapien
tttccccgcgctcacgttcacgttc

SEQ ID NO: 1669974 - DNA, 25 bp, Homo sapien
ctgaaactcattaagggctgggctg

SEQ ID NO: 1669975 - DNA, 25 bp, Homo sapien
tgaaactcattaagggctgggctgg

SEQ ID NO: 1669976 - DNA, 25 bp, Homo sapien
aggtttccccgcgctcacgttcacg

SEQ ID NO: 1669977 - DNA, 25 bp, Homo sapien
tcccgatttggaactgcgtgacaca

SEQ ID NO: 1669978 - DNA, 25 bp, Homo sapien
caaggcggcactcttattgaaggtc

SEQ ID NO: 1669979 - DNA, 25 bp, Homo sapien
caattggctgtgactcggtaaagga

SEQ ID NO: 1669980 - DNA, 25 bp, Homo sapien
tcttccgatgttcagccaaggcggc

SEQ ID NO: 1669981 - DNA, 25 bp, Homo sapien
gatcttgatgagtggccctgcgtca

SEQ ID NO: 1669982 - DNA, 25 bp, Homo sapien
gggagtggccatcgtcttcagcaag

SEQ ID NO: 1669983 - DNA, 25 bp, Homo sapien
cttgggtaggcacttctcttggatc

SEQ ID NO: 1669984 - DNA, 25 bp, Homo sapien
tggccctgcgtcatgtgggagtggc

SEQ ID NO: 1669985 - DNA, 25 bp, Homo sapien
tgtcctcagcgaggtccaccacatt

SEQ ID NO: 1669986 - DNA, 25 bp, Homo sapien
ccacattttggtatgattcagcatc

SEQ ID NO: 1669987 - DNA, 25 bp, Homo sapien
caccacattttggtatgattcagca

SEQ ID NO: 1669988 - DNA, 25 bp, Homo sapien
ggtccaccacattttggtatgattc

SEQ ID NO: 1669989 - DNA, 25 bp, Homo sapien
agatcccaaagacgcatgacacata

SEQ ID NO: 1669990 - DNA, 25 bp, Homo sapien
caaagacgcatgacacatattcctt

SEQ ID NO: 1669991 - DNA, 25 bp, Homo sapien
gacgcatgacacatattccttgccc

SEQ ID NO: 1669992 - DNA, 25 bp, Homo sapien
gcatgacacatattccttgccctca

SEQ ID NO: 1669993 - DNA, 25 bp, Homo sapien
catttcaaagcttgttttcgccacc

SEQ ID NO: 1669994 - DNA, 25 bp, Homo sapien
gatcgggactcataagccctggagt

SEQ ID NO: 1669995 - DNA, 25 bp, Homo sapien
gaagggaaagatcccgcggaggcat

SEQ ID NO: 1669996 - DNA, 25 bp, Homo sapien
tgttttcgccaccacaggaagggaa

SEQ ID NO: 1669997 - DNA, 25 bp, Homo sapien
catgctctatatctcctactgggaa

SEQ ID NO: 1669998 - DNA, 25 bp, Homo sapien
gaacttcaaaaatacgagccttgga

SEQ ID NO: 1669999 - DNA, 25 bp, Homo sapien
gaagcggaatatactccaaatggag

SEQ ID NO: 1670000 - DNA, 25 bp, Homo sapien
cagaaacttcgaggccctggcactt

SEQ ID NO: 1670001 - DNA, 25 bp, Homo sapien
ggttcctggtgtgggaccagcggtc

SEQ ID NO: 1670002 - DNA, 25 bp, Homo sapien
gcggtctcgtggctccatgtctctg

SEQ ID NO: 1670003 - DNA, 25 bp, Homo sapien
ttcctggtgtgggaccagcggtctc

SEQ ID NO: 1670004 - DNA, 25 bp, Homo sapien
tgggaccagcggtctcgtggctcca

SEQ ID NO: 1670005 - DNA, 25 bp, Homo sapien
tcatgtcgtcgtcgctggtcacgtc

SEQ ID NO: 1670006 - DNA, 25 bp, Homo sapien
cttctgttccgggtcatgtcgtcgt

SEQ ID NO: 1670007 - DNA, 25 bp, Homo sapien
cgtcgctggtcacgtcactgttgtt

SEQ ID NO: 1670008 - DNA, 25 bp, Homo sapien
cgggtcatgtcgtcgtcgctggtca

SEQ ID NO: 1670009 - DNA, 25 bp, Homo sapien
tctggcccacattctcacaatagtt

SEQ ID NO: 1670010 - DNA, 25 bp, Homo sapien
tcgccaagttactatctctggccca

SEQ ID NO: 1670011 - DNA, 25 bp, Homo sapien
gaggacaccggtcgccaagttacta

SEQ ID NO: 1670012 - DNA, 25 bp, Homo sapien
ctaagaggacaccggtcgccaagtt

SEQ ID NO: 1670013 - DNA, 25 bp, Homo sapien
accaacaccccgtggagactctcac

SEQ ID NO: 1670014 - DNA, 25 bp, Homo sapien
caccaacaccccgtggagactctca

SEQ ID NO: 1670015 - DNA, 25 bp, Homo sapien
tttttgctcgcacccaaggcttgag

SEQ ID NO: 1670016 - DNA, 25 bp, Homo sapien
caaggaccaagagctcgatgatctc

SEQ ID NO: 1670017 - DNA, 25 bp, Homo sapien
cagttctccggcttttttgctcgca

SEQ ID NO: 1670018 - DNA, 25 bp, Homo sapien
tccagcagagtgacgagcttctcac

SEQ ID NO: 1670019 - DNA, 25 bp, Homo sapien
agtttgatcagggtcttccgaggcc

SEQ ID NO: 1670020 - DNA, 25 bp, Homo sapien
gaccttctcctatgatgacatccgg

SEQ ID NO: 1670021 - DNA, 25 bp, Homo sapien
tccacatagattaggttccgaaacc

SEQ ID NO: 1670022 - DNA, 25 bp, Homo sapien
gacatccggctccttagtcaagtca

SEQ ID NO: 1670023 - DNA, 25 bp, Homo sapien
gtcaacaggaaagacgcggcagcct

SEQ ID NO: 1670024 - DNA, 25 bp, Homo sapien
ctggaggaaccaaacatgagtcaac

SEQ ID NO: 1670025 - DNA, 25 bp, Homo sapien
cctgtgaccgtcagtactcagggac

SEQ ID NO: 1670026 - DNA, 25 bp, Homo sapien
gaggaaccaaacatgagtcaacagg

SEQ ID NO: 1670027 - DNA, 25 bp, Homo sapien
tgggagtccccagtaaataggcaaa

SEQ ID NO: 1670028 - DNA, 25 bp, Homo sapien
caatgcttttgggatatgggagtcc

SEQ ID NO: 1670029 - DNA, 25 bp, Homo sapien
tcacagagacctactcgaggagtta

SEQ ID NO: 1670030 - DNA, 25 bp, Homo sapien
ggctactaacttgggactgtgggca

SEQ ID NO: 1670031 - DNA, 25 bp, Homo sapien
gaccaagcagctatccacaggaaca

SEQ ID NO: 1670032 - DNA, 25 bp, Homo sapien
ttcagaccaagcagctatccacagg

SEQ ID NO: 1670033 - DNA, 25 bp, Homo sapien
tttctggaacttcagaccaagcagc

SEQ ID NO: 1670034 - DNA, 25 bp, Homo sapien
tggaacttcagaccaagcagctatc

SEQ ID NO: 1670035 - DNA, 25 bp, Homo sapien
gcagcaaaatctccttgttgttgtc

SEQ ID NO: 1670036 - DNA, 25 bp, Homo sapien
cacactgcagcaaaatctccttgtt

SEQ ID NO: 1670037 - DNA, 25 bp, Homo sapien
acactgcagcaaaatctccttgttg

SEQ ID NO: 1670038 - DNA, 25 bp, Homo sapien
gcaaaatctccttgttgttgtccat

SEQ ID NO: 1670039 - DNA, 25 bp, Homo sapien
tctcgccagtcgtctccaagaagga

SEQ ID NO: 1670040 - DNA, 25 bp, Homo sapien
tggacccagccacctagcgtttgga

SEQ ID NO: 1670041 - DNA, 25 bp, Homo sapien
tagcgtttggacctagtccctcttc

SEQ ID NO: 1670042 - DNA, 25 bp, Homo sapien
agaaggacggaagatcaagaaggca

SEQ ID NO: 1670043 - DNA, 25 bp, Homo sapien
aagtcttggtcaggcaacaacaggg

SEQ ID NO: 1670044 - DNA, 25 bp, Homo sapien
ttaagcataaatggctccgcggccg

SEQ ID NO: 1670045 - DNA, 25 bp, Homo sapien
gcaaactctttaggcacgtctcccg

SEQ ID NO: 1670046 - DNA, 25 bp, Homo sapien
tccgcggccgctaaggcaaactctt

SEQ ID NO: 1670047 - DNA, 25 bp, Homo sapien
tcagtgctgcgcagcctcgggcacg

SEQ ID NO: 1670048 - DNA, 25 bp, Homo sapien
tagcgcaccctcatggcgcccggcg

SEQ ID NO: 1670049 - DNA, 25 bp, Homo sapien
acgaacagccgcctagcgcaccctc

SEQ ID NO: 1670050 - DNA, 25 bp, Homo sapien
gcccagggtggacatctcccgcgcc

SEQ ID NO: 1670051 - DNA, 25 bp, Homo sapien
taataaacacttggcagacgtcagg

SEQ ID NO: 1670052 - DNA, 25 bp, Homo sapien
taacaggttcatgaaggcagcctcc

SEQ ID NO: 1670053 - DNA, 25 bp, Homo sapien
aaaatcacacaagcgagagggcctg

SEQ ID NO: 1670054 - DNA, 25 bp, Homo sapien
tacaatgggtaaggcctggcaccaa

SEQ ID NO: 1670055 - DNA, 25 bp, Homo sapien
gttggtcagtagaaccatggcctcc

SEQ ID NO: 1670056 - DNA, 25 bp, Homo sapien
tcagtcgagctccagtcacagagga

SEQ ID NO: 1670057 - DNA, 25 bp, Homo sapien
agagtcgcagctctcttcagtcgag

SEQ ID NO: 1670058 - DNA, 25 bp, Homo sapien
agtatttccggtcaacgaggtcgcg

SEQ ID NO: 1670059 - DNA, 25 bp, Homo sapien
gaaaccttgcgagaagtgacacacg

SEQ ID NO: 1670060 - DNA, 25 bp, Homo sapien
ttgcgagaagtgacacacgccctgt

SEQ ID NO: 1670061 - DNA, 25 bp, Homo sapien
agaagtgacacacgccctgtcctca

SEQ ID NO: 1670062 - DNA, 25 bp, Homo sapien
ctgggaaaccttgcgagaagtgaca

SEQ ID NO: 1670063 - DNA, 25 bp, Homo sapien
ggtcagaagtctgggacgtcttggg

SEQ ID NO: 1670064 - DNA, 25 bp, Homo sapien
agaagtctgggacgtcttgggtcct

SEQ ID NO: 1670065 - DNA, 25 bp, Homo sapien
ctgggacgtcttgggtccttctgcc

SEQ ID NO: 1670066 - DNA, 25 bp, Homo sapien
agtctgggacgtcttgggtccttct

SEQ ID NO: 1670067 - DNA, 25 bp, Homo sapien
ctgagttacctggccgtggaaggcc

SEQ ID NO: 1670068 - DNA, 25 bp, Homo sapien
cctgagttacctggccgtggaaggc

SEQ ID NO: 1670069 - DNA, 25 bp, Homo sapien
catatatacattgccgggtagccag

SEQ ID NO: 1670070 - DNA, 25 bp, Homo sapien
tgccgacgccaggttccagatggaa

SEQ ID NO: 1670071 - DNA, 25 bp, Homo sapien
tcctgaaagcctgctcgggccagtt

SEQ ID NO: 1670072 - DNA, 25 bp, Homo sapien
gggtagccaggcaacaccgtgcttt

SEQ ID NO: 1670073 - DNA, 25 bp, Homo sapien
cccgattgctattgaggtgcacata

SEQ ID NO: 1670074 - DNA, 25 bp, Homo sapien
caggcccgtacgtctttgcccgatt

SEQ ID NO: 1670075 - DNA, 25 bp, Homo sapien
ttcagcagcctgtgccatttcacag

SEQ ID NO: 1670076 - DNA, 25 bp, Homo sapien
ggtgcacatactttcagcagcctgt

SEQ ID NO: 1670077 - DNA, 25 bp, Homo sapien
ggttgccgccgaacaggtgattgct

SEQ ID NO: 1670078 - DNA, 25 bp, Homo sapien
aaaattccagtctccgcagctcctt

SEQ ID NO: 1670079 - DNA, 25 bp, Homo sapien
gagcaggcctgggttgccgccgaac

SEQ ID NO: 1670080 - DNA, 25 bp, Homo sapien
cctgggttgccgccgaacaggtgat

SEQ ID NO: 1670081 - DNA, 25 bp, Homo sapien
tcattcattctggatggacttacgg

SEQ ID NO: 1670082 - DNA, 25 bp, Homo sapien
cattctggatggacttacggaagag

SEQ ID NO: 1670083 - DNA, 25 bp, Homo sapien
tggatggacttacggaagagccgct

SEQ ID NO: 1670084 - DNA, 25 bp, Homo sapien
acttacggaagagccgctgcatgct

SEQ ID NO: 1670085 - DNA, 25 bp, Homo sapien
gggtttgccgtgttcacaatgccat

SEQ ID NO: 1670086 - DNA, 25 bp, Homo sapien
gtttgccgtgttcacaatgccattc

SEQ ID NO: 1670087 - DNA, 25 bp, Homo sapien
gtggggtttgccgtgttcacaatgc

SEQ ID NO: 1670088 - DNA, 25 bp, Homo sapien
ggaagttttgggtcagagtggaggc

SEQ ID NO: 1670089 - DNA, 25 bp, Homo sapien
ctgtggtccccggatggtttagact

SEQ ID NO: 1670090 - DNA, 25 bp, Homo sapien
ggtcctgggccagatatgaacattt

SEQ ID NO: 1670091 - DNA, 25 bp, Homo sapien
caggagcatccccgtggcaatatct

SEQ ID NO: 1670092 - DNA, 25 bp, Homo sapien
ctcccttggcgttggtgctgtggtc

SEQ ID NO: 1670093 - DNA, 25 bp, Homo sapien
cgtccccagtgatgcgaatccgaag

SEQ ID NO: 1670094 - DNA, 25 bp, Homo sapien
ttcagcgcgcacaagatccgcagtc

SEQ ID NO: 1670095 - DNA, 25 bp, Homo sapien
gtagcaatgacgcacttcagcgcgc

SEQ ID NO: 1670096 - DNA, 25 bp, Homo sapien
tccgcagtcgcacggctgaggttga

SEQ ID NO: 1670097 - DNA, 25 bp, Homo sapien
acacgtccagtccatgtcccttcca

SEQ ID NO: 1670098 - DNA, 25 bp, Homo sapien
tgtaaatgcgccatgggccacacgt

SEQ ID NO: 1670099 - DNA, 25 bp, Homo sapien
cacccacgtgtgtaaatgcgccatg

SEQ ID NO: 1670100 - DNA, 25 bp, Homo sapien
aggagattgggagccgccacccacg

SEQ ID NO: 1670101 - DNA, 25 bp, Homo sapien
caccaggagtaagggagaggcgtgg

SEQ ID NO: 1670102 - DNA, 25 bp, Homo sapien
gaaaccacaccaggagtaagggaga

SEQ ID NO: 1670103 - DNA, 25 bp, Homo sapien
tggaaaccacaccaggagtaaggga

SEQ ID NO: 1670104 - DNA, 25 bp, Homo sapien
accacaccaggagtaagggagaggc

SEQ ID NO: 1670105 - DNA, 25 bp, Homo sapien
tgcagggaccccataatctgtgcgt

SEQ ID NO: 1670106 - DNA, 25 bp, Homo sapien
cataatctgtgcgtttgaaaacctc

SEQ ID NO: 1670107 - DNA, 25 bp, Homo sapien
cgtttgaaaacctctgcgtgggtca

SEQ ID NO: 1670108 - DNA, 25 bp, Homo sapien
ctggtaaatgcagggaccccataat

SEQ ID NO: 1670109 - DNA, 25 bp, Homo sapien
acatgcaggctggcctgttcctttg

SEQ ID NO: 1670110 - DNA, 25 bp, Homo sapien
ggctggcctgttcctttgcaatcat

SEQ ID NO: 1670111 - DNA, 25 bp, Homo sapien
aggctggcctgttcctttgcaatca

SEQ ID NO: 1670112 - DNA, 25 bp, Homo sapien
gctggacatgcaggctggcctgttc

SEQ ID NO: 1670113 - DNA, 25 bp, Homo sapien
gtggctgcatggacctatcactcct

SEQ ID NO: 1670114 - DNA, 25 bp, Homo sapien
tggacctatcactcctgacctgttg

SEQ ID NO: 1670115 - DNA, 25 bp, Homo sapien
gacctatcactcctgacctgttgtt

SEQ ID NO: 1670116 - DNA, 25 bp, Homo sapien
tgcatggacctatcactcctgacct

SEQ ID NO: 1670117 - DNA, 25 bp, Homo sapien
gatccaacctgaatcctcttgagag

SEQ ID NO: 1670118 - DNA, 25 bp, Homo sapien
cttttacctgttgtgatgagggagg

SEQ ID NO: 1670119 - DNA, 25 bp, Homo sapien
ctggtgcccattgatccaacctgaa

SEQ ID NO: 1670120 - DNA, 25 bp, Homo sapien
gaatcctcttgagagcttttacctg

SEQ ID NO: 1670121 - DNA, 25 bp, Homo sapien
cccaacctcgttctgcacccctgaa

SEQ ID NO: 1670122 - DNA, 25 bp, Homo sapien
tcccaacctcgttctgcacccctga

SEQ ID NO: 1670123 - DNA, 25 bp, Homo sapien
ccaacctcgttctgcacccctgaat

SEQ ID NO: 1670124 - DNA, 25 bp, Homo sapien
caacctcgttctgcacccctgaatg

SEQ ID NO: 1670125 - DNA, 25 bp, Homo sapien
ccttctctggttcctggagaaattg

SEQ ID NO: 1670126 - DNA, 25 bp, Homo sapien
cttctctggttcctggagaaattgt

SEQ ID NO: 1670127 - DNA, 25 bp, Homo sapien
gggagtgcctttcagaattacacag

SEQ ID NO: 1670128 - DNA, 25 bp, Homo sapien
tttcagaattacacagcaagggtga

SEQ ID NO: 1670129 - DNA, 25 bp, Homo sapien
gagtgcctttcagaattacacagca

SEQ ID NO: 1670130 - DNA, 25 bp, Homo sapien
attacacagcaagggtgaattatac

SEQ ID NO: 1670131 - DNA, 25 bp, Homo sapien
tgatcaaggcagtcagctcgatccc

SEQ ID NO: 1670132 - DNA, 25 bp, Homo sapien
tcatctgtgacaaatttcatgcagc

SEQ ID NO: 1670133 - DNA, 25 bp, Homo sapien
gatccccgtagccttccgtgaagga

SEQ ID NO: 1670134 - DNA, 25 bp, Homo sapien
tgcagctcaaggctatcaacagcag

SEQ ID NO: 1670135 - DNA, 25 bp, Homo sapien
cagagtctgcaagaactgtgatatt

SEQ ID NO: 1670136 - DNA, 25 bp, Homo sapien
ccctgaggaagccagtatcccccat

SEQ ID NO: 1670137 - DNA, 25 bp, Homo sapien
tgcgtgtgacatggatcccagcaag

SEQ ID NO: 1670138 - DNA, 25 bp, Homo sapien
gcaagactggggtactgagtccaca

SEQ ID NO: 1670139 - DNA, 25 bp, Homo sapien
ttgtaagatgggagttcctgactgc

SEQ ID NO: 1670140 - DNA, 25 bp, Homo sapien
cctggattgtaagatgggagttcct

SEQ ID NO: 1670141 - DNA, 25 bp, Homo sapien
tccaaaatccctggcttgcattgcc

SEQ ID NO: 1670142 - DNA, 25 bp, Homo sapien
cctgggtccaaaatccctggcttgc

SEQ ID NO: 1670143 - DNA, 25 bp, Homo sapien
cttcacgccagttaacttgggagac

SEQ ID NO: 1670144 - DNA, 25 bp, Homo sapien
ggtccaaaatccctggcttgcattg

SEQ ID NO: 1670145 - DNA, 25 bp, Homo sapien
aaggcaaagactaaagaacttgcca

SEQ ID NO: 1670146 - DNA, 25 bp, Homo sapien
gcaaagactaaagaacttgccacca

SEQ ID NO: 1670147 - DNA, 25 bp, Homo sapien
caaagactaaagaacttgccaccaa

SEQ ID NO: 1670148 - DNA, 25 bp, Homo sapien
ggcaaagactaaagaacttgccacc

SEQ ID NO: 1670149 - DNA, 25 bp, Homo sapien
gatgtccttgacgaagggcaaaacc

SEQ ID NO: 1670150 - DNA, 25 bp, Homo sapien
caggcgtggaaatcacaggtttctg

SEQ ID NO: 1670151 - DNA, 25 bp, Homo sapien
caggtttctgttccgtggcagccgc

SEQ ID NO: 1670152 - DNA, 25 bp, Homo sapien
cagcaccgatgatacaaacagcctt

SEQ ID NO: 1670153 - DNA, 25 bp, Homo sapien
ctgcatctccggctccagacgccat

SEQ ID NO: 1670154 - DNA, 25 bp, Homo sapien
cctgcatctccggctccagacgcca

SEQ ID NO: 1670155 - DNA, 25 bp, Homo sapien
tccctgcatctccggctccagacgc

SEQ ID NO: 1670156 - DNA, 25 bp, Homo sapien
ctccctgcatctccggctccagacg

SEQ ID NO: 1670157 - DNA, 25 bp, Homo sapien
gtctgttcttcggagcaccgaccat

SEQ ID NO: 1670158 - DNA, 25 bp, Homo sapien
cgttgtctgttcttcggagcaccga

SEQ ID NO: 1670159 - DNA, 25 bp, Homo sapien
gctccacgcctcgttgtctgttctt

SEQ ID NO: 1670160 - DNA, 25 bp, Homo sapien
gagccttccaggatcgcacccggca

SEQ ID NO: 1670161 - DNA, 25 bp, Homo sapien
tcttgcacgttcactaagggatgaa

SEQ ID NO: 1670162 - DNA, 25 bp, Homo sapien
tggctaaactattttggaaggcttc

SEQ ID NO: 1670163 - DNA, 25 bp, Homo sapien
taattttgaaggcttgactcacaaa

SEQ ID NO: 1670164 - DNA, 25 bp, Homo sapien
tctcaaatagagtaatggctaaact

SEQ ID NO: 1670165 - DNA, 25 bp, Homo sapien
tcataggattttcccctagtgtcag

SEQ ID NO: 1670166 - DNA, 25 bp, Homo sapien
tcagttctgccatgctgcaaggaag

SEQ ID NO: 1670167 - DNA, 25 bp, Homo sapien
tgagttctcatatgtcgaaaaagag

SEQ ID NO: 1670168 - DNA, 25 bp, Homo sapien
tttgacggcttctccccattgcttg

SEQ ID NO: 1670169 - DNA, 25 bp, Homo sapien
gccaagataccttcatgctcaggag

SEQ ID NO: 1670170 - DNA, 25 bp, Homo sapien
gatgtggtttccagtcccctacacc

SEQ ID NO: 1670171 - DNA, 25 bp, Homo sapien
aggcaaatggcaattgcagtgaaga

SEQ ID NO: 1670172 - DNA, 25 bp, Homo sapien
gagaaacctctccactcatgaatta

SEQ ID NO: 1670173 - DNA, 25 bp, Homo sapien
gatactgtgataataagtcctcgct

SEQ ID NO: 1670174 - DNA, 25 bp, Homo sapien
acatttgctgagtgagtatgccgaa

SEQ ID NO: 1670175 - DNA, 25 bp, Homo sapien
gggtgacaattccaggcaaccatat

SEQ ID NO: 1670176 - DNA, 25 bp, Homo sapien
gataccactggtcattattcactgg

SEQ ID NO: 1670177 - DNA, 25 bp, Homo sapien
gagatttgacttctgcttgtaggca

SEQ ID NO: 1670178 - DNA, 25 bp, Homo sapien
tataggtcctctctccgctatgagt

SEQ ID NO: 1670179 - DNA, 25 bp, Homo sapien
caaagggtttttgacaggcatgcct

SEQ ID NO: 1670180 - DNA, 25 bp, Homo sapien
caaggtatgacctgtcagcgaaggc

SEQ ID NO: 1670181 - DNA, 25 bp, Homo sapien
ggctcctttccttgttccaacctca

SEQ ID NO: 1670182 - DNA, 25 bp, Homo sapien
caagatcacatcgggtttggtggtt

SEQ ID NO: 1670183 - DNA, 25 bp, Homo sapien
tcctccaaccatggctcctttcctt

SEQ ID NO: 1670184 - DNA, 25 bp, Homo sapien
tttccttgttccaacctcaagatca

SEQ ID NO: 1670185 - DNA, 25 bp, Homo sapien
tctctgttcgggattcagccgctgc

SEQ ID NO: 1670186 - DNA, 25 bp, Homo sapien
tacaagtttctctgttcgggattca

SEQ ID NO: 1670187 - DNA, 25 bp, Homo sapien
agtttctctgttcgggattcagccg

SEQ ID NO: 1670188 - DNA, 25 bp, Homo sapien
cctgtacaagtttctctgttcggga

SEQ ID NO: 1670189 - DNA, 25 bp, Homo sapien
ctgttcttcaccagtcagtaaagtc

SEQ ID NO: 1670190 - DNA, 25 bp, Homo sapien
tcttcaccagtcagtaaagtcttgg

SEQ ID NO: 1670191 - DNA, 25 bp, Homo sapien
caccagtcagtaaagtcttgggaag

SEQ ID NO: 1670192 - DNA, 25 bp, Homo sapien
tcagtaaagtcttgggaaggcagat

SEQ ID NO: 1670193 - DNA, 25 bp, Homo sapien
aagttgattgatttctgatgcctgt

SEQ ID NO: 1670194 - DNA, 25 bp, Homo sapien
gattgatttctgatgcctgtggtct

SEQ ID NO: 1670195 - DNA, 25 bp, Homo sapien
gcataaattagcaagttgattgatt

SEQ ID NO: 1670196 - DNA, 25 bp, Homo sapien
ttctgatgcctgtggtcttttcttc

SEQ ID NO: 1670197 - DNA, 25 bp, Homo sapien
tgaaaatgaaaaggcgtgtatactg

SEQ ID NO: 1670198 - DNA, 25 bp, Homo sapien
aaaggcgtgtatactgaaaagctac

SEQ ID NO: 1670199 - DNA, 25 bp, Homo sapien
gaaaagctacactaatgactaaaac

SEQ ID NO: 1670200 - DNA, 25 bp, Homo sapien
tatactgaaaagctacactaatgac

SEQ ID NO: 1670201 - DNA, 25 bp, Homo sapien
tcataatccagtcaagaaacaaccc

SEQ ID NO: 1670202 - DNA, 25 bp, Homo sapien
tcctcgacttctccaaaactgaatg

SEQ ID NO: 1670203 - DNA, 25 bp, Homo sapien
tatcaaaagccccacctgatcctat

SEQ ID NO: 1670204 - DNA, 25 bp, Homo sapien
taatcggccctctacccgctgtatt

SEQ ID NO: 1670205 - DNA, 25 bp, Homo sapien
cagcagaaggatagactcccaggaa

SEQ ID NO: 1670206 - DNA, 25 bp, Homo sapien
agtttcagcagaaggatagactccc

SEQ ID NO: 1670207 - DNA, 25 bp, Homo sapien
gggtccagttgatattatcaagtac

SEQ ID NO: 1670208 - DNA, 25 bp, Homo sapien
agaccgtgagacagatttggggtcc

SEQ ID NO: 1670209 - DNA, 25 bp, Homo sapien
gagaaatgagagtcactagtgaagt

SEQ ID NO: 1670210 - DNA, 25 bp, Homo sapien
atgagagtcactagtgaagttggtg

SEQ ID NO: 1670211 - DNA, 25 bp, Homo sapien
gaaatgagagtcactagtgaagttg

SEQ ID NO: 1670212 - DNA, 25 bp, Homo sapien
aaatgagagtcactagtgaagttgg

SEQ ID NO: 1670213 - DNA, 25 bp, Homo sapien
ctggagaagtaatctagatcttcga

SEQ ID NO: 1670214 - DNA, 25 bp, Homo sapien
gaagtaatctagatcttcgattttg

SEQ ID NO: 1670215 - DNA, 25 bp, Homo sapien
tcttgttctaaggacgccacaggtt

SEQ ID NO: 1670216 - DNA, 25 bp, Homo sapien
cttgttctaaggacgccacaggttc

SEQ ID NO: 1670217 - DNA, 25 bp, Homo sapien
tggaacaccgatttctttagcaagt

SEQ ID NO: 1670218 - DNA, 25 bp, Homo sapien
ttgactctggaacaccgatttcttt

SEQ ID NO: 1670219 - DNA, 25 bp, Homo sapien
tgtaggtggtacgacaccgtctggc

SEQ ID NO: 1670220 - DNA, 25 bp, Homo sapien
ccgatttctttagcaagttcttctc

SEQ ID NO: 1670221 - DNA, 25 bp, Homo sapien
cgtgcctagctcttcgattctgaaa

SEQ ID NO: 1670222 - DNA, 25 bp, Homo sapien
ttctggaatccgtgcctagctcttc

SEQ ID NO: 1670223 - DNA, 25 bp, Homo sapien
tggaatccgtgcctagctcttcgat

SEQ ID NO: 1670224 - DNA, 25 bp, Homo sapien
aagtctcagcttctggtcttttctg

SEQ ID NO: 1670225 - DNA, 25 bp, Homo sapien
gtgcgacagcgcctatgatttgttt

SEQ ID NO: 1670226 - DNA, 25 bp, Homo sapien
ttctgtgaattttgtgcgacagcgc

SEQ ID NO: 1670227 - DNA, 25 bp, Homo sapien
ttgtgcgacagcgcctatgatttgt

SEQ ID NO: 1670228 - DNA, 25 bp, Homo sapien
tcttctgtgaattttgtgcgacagc

SEQ ID NO: 1670229 - DNA, 25 bp, Homo sapien
tgtgtgaataggtgtcttcggccat

SEQ ID NO: 1670230 - DNA, 25 bp, Homo sapien
tgcaggcaagggaaatgcgtccccg

SEQ ID NO: 1670231 - DNA, 25 bp, Homo sapien
tttctgcagggcgagtatctgacct

SEQ ID NO: 1670232 - DNA, 25 bp, Homo sapien
tcctgaaaacggagaacaagatgtg

SEQ ID NO: 1670233 - DNA, 25 bp, Homo sapien
tcaaaagcccggatatcatcaccgg

SEQ ID NO: 1670234 - DNA, 25 bp, Homo sapien
ttataacacaattgtaggcactggg

SEQ ID NO: 1670235 - DNA, 25 bp, Homo sapien
gctaggtgtagcatatgttcaataa

SEQ ID NO: 1670236 - DNA, 25 bp, Homo sapien
aattcacggcaatgtggttgtttgc

SEQ ID NO: 1670237 - DNA, 25 bp, Homo sapien
atatttttaactatgcgagactgct

SEQ ID NO: 1670238 - DNA, 25 bp, Homo sapien
ccgctttgcaggtccctagtcagga

SEQ ID NO: 1670239 - DNA, 25 bp, Homo sapien
gtttgttcctgggtcgccgtcaagc

SEQ ID NO: 1670240 - DNA, 25 bp, Homo sapien
agtaggataggaatccccgccgcac

SEQ ID NO: 1670241 - DNA, 25 bp, Homo sapien
ctgtagccactgagggccccggtcg

SEQ ID NO: 1670242 - DNA, 25 bp, Homo sapien
tcttgcataaaagggcccacactgg

SEQ ID NO: 1670243 - DNA, 25 bp, Homo sapien
cctttcgagtgcaaagagtgtggga

SEQ ID NO: 1670244 - DNA, 25 bp, Homo sapien
tgggaaagcctttagcaatcggaag

SEQ ID NO: 1670245 - DNA, 25 bp, Homo sapien
cctcacgaggcacaagcggattcat

SEQ ID NO: 1670246 - DNA, 25 bp, Homo sapien
gctgttactgggtggagtttctata

SEQ ID NO: 1670247 - DNA, 25 bp, Homo sapien
tatagctgcttgaaaagaatgggtg

SEQ ID NO: 1670248 - DNA, 25 bp, Homo sapien
tctgtccagcatttctgtcagttgc

SEQ ID NO: 1670249 - DNA, 25 bp, Homo sapien
tattcaagtcagctatgtccttgct

SEQ ID NO: 1670250 - DNA, 25 bp, Homo sapien
gtcgacctctttacccattccattg

SEQ ID NO: 1670251 - DNA, 25 bp, Homo sapien
gtgtattctatttggcgctccctgg

SEQ ID NO: 1670252 - DNA, 25 bp, Homo sapien
tcagaagtttggctgtgatgtgcgt

SEQ ID NO: 1670253 - DNA, 25 bp, Homo sapien
catcagttctgtcaagcttcattca

SEQ ID NO: 1670254 - DNA, 25 bp, Homo sapien
gccttgttgtatcctcaggaaggag

SEQ ID NO: 1670255 - DNA, 25 bp, Homo sapien
tctctatgccttgttgtatcctcag

SEQ ID NO: 1670256 - DNA, 25 bp, Homo sapien
aaaaaattctctagctctctatgcc

SEQ ID NO: 1670257 - DNA, 25 bp, Homo sapien
ttgtatcctcaggaaggagtcacct

SEQ ID NO: 1670258 - DNA, 25 bp, Homo sapien
tgtttcccagaatccatcattggcc

SEQ ID NO: 1670259 - DNA, 25 bp, Homo sapien
tgaccaccactctgaaccaaaactt

SEQ ID NO: 1670260 - DNA, 25 bp, Homo sapien
gggtctgtgtcttccttccaactct

SEQ ID NO: 1670261 - DNA, 25 bp, Homo sapien
tcttggttcttgaaagttgctgtct

SEQ ID NO: 1670262 - DNA, 25 bp, Homo sapien
cagcattctgtcatactcaacagct

SEQ ID NO: 1670263 - DNA, 25 bp, Homo sapien
gcctacctgggcttttttggacaga

SEQ ID NO: 1670264 - DNA, 25 bp, Homo sapien
agaagactcaggtctcagcattctg

SEQ ID NO: 1670265 - DNA, 25 bp, Homo sapien
ccccaggtttgacgatttgctgaga

SEQ ID NO: 1670266 - DNA, 25 bp, Homo sapien
tctttcaagaaaggacctagtctgc

SEQ ID NO: 1670267 - DNA, 25 bp, Homo sapien
tatatatggctataagtggtgcgac

SEQ ID NO: 1670268 - DNA, 25 bp, Homo sapien
gtggtgcgacttgcaggtactccct

SEQ ID NO: 1670269 - DNA, 25 bp, Homo sapien
gaacttatgaacaccctagcctaga

SEQ ID NO: 1670270 - DNA, 25 bp, Homo sapien
aaattgagcaccatgttggaaaatg

SEQ ID NO: 1670271 - DNA, 25 bp, Homo sapien
tgcctgttaatataattgtctaaag

SEQ ID NO: 1670272 - DNA, 25 bp, Homo sapien
gatgtatagaaaccttacttggtcc

SEQ ID NO: 1670273 - DNA, 25 bp, Homo sapien
tagtggttgctttaagtagtataat

SEQ ID NO: 1670274 - DNA, 25 bp, Homo sapien
ttctgtatttgcactcactgagcct

SEQ ID NO: 1670275 - DNA, 25 bp, Homo sapien
ctgagttaatttgcgctgaagacac

SEQ ID NO: 1670276 - DNA, 25 bp, Homo sapien
gaatgttttacatgcgtcagctctt

SEQ ID NO: 1670277 - DNA, 25 bp, Homo sapien
ttctcatgtcgttaaccactggtca

SEQ ID NO: 1670278 - DNA, 25 bp, Homo sapien
tcaaagaatagcagtctctggcctg

SEQ ID NO: 1670279 - DNA, 25 bp, Homo sapien
tatggcgtaccttgacctcgaagag

SEQ ID NO: 1670280 - DNA, 25 bp, Homo sapien
taaagtacagactccagccaaggat

SEQ ID NO: 1670281 - DNA, 25 bp, Homo sapien
taagacaatttaggcacacggagct

SEQ ID NO: 1670282 - DNA, 25 bp, Homo sapien
gttctttccctagcacgtatgtcag

SEQ ID NO: 1670283 - DNA, 25 bp, Homo sapien
tagcttctggctacaacagagatag

SEQ ID NO: 1670284 - DNA, 25 bp, Homo sapien
tgatgggtaggtaaatgccgtgttc

SEQ ID NO: 1670285 - DNA, 25 bp, Homo sapien
tatttcggcaaagatgtgatgggta

SEQ ID NO: 1670286 - DNA, 25 bp, Homo sapien
catttccgtgtaatttctagagtac

SEQ ID NO: 1670287 - DNA, 25 bp, Homo sapien
ttacatttccgtgtaatttctagag

SEQ ID NO: 1670288 - DNA, 25 bp, Homo sapien
gtgtaatttctagagtactgggtac

SEQ ID NO: 1670289 - DNA, 25 bp, Homo sapien
tccgtgtaatttctagagtactggg

SEQ ID NO: 1670290 - DNA, 25 bp, Homo sapien
tatagaaccatggattggaggatgg

SEQ ID NO: 1670291 - DNA, 25 bp, Homo sapien
tgttggtgggatcccagtgatgtca

SEQ ID NO: 1670292 - DNA, 25 bp, Homo sapien
gacatccaagggaccactgtgttgg

SEQ ID NO: 1670293 - DNA, 25 bp, Homo sapien
tgatgtcagtagtcaagactttaga

SEQ ID NO: 1670294 - DNA, 25 bp, Homo sapien
ttcccagtgccattccatgtccctg

SEQ ID NO: 1670295 - DNA, 25 bp, Homo sapien
gctcttgggtaaaatgacacgtgtt

SEQ ID NO: 1670296 - DNA, 25 bp, Homo sapien
ccctgctcttgggtaaaatgacacg

SEQ ID NO: 1670297 - DNA, 25 bp, Homo sapien
aaatgacacgtgtttgaagtggtcc

SEQ ID NO: 1670298 - DNA, 25 bp, Homo sapien
gtcatcatggccacctacaagcctg

SEQ ID NO: 1670299 - DNA, 25 bp, Homo sapien
acatttgccttcgatgtcatcatgg

SEQ ID NO: 1670300 - DNA, 25 bp, Homo sapien
gatccctggaatcacacataagcag

SEQ ID NO: 1670301 - DNA, 25 bp, Homo sapien
tgcaatcttgagtttcctcctgaca

SEQ ID NO: 1670302 - DNA, 25 bp, Homo sapien
caagccagggaagttcactcaagca

SEQ ID NO: 1670303 - DNA, 25 bp, Homo sapien
catttacataggaatgcagggtcca

SEQ ID NO: 1670304 - DNA, 25 bp, Homo sapien
cagggcctcgggcatgcaaaatcca

SEQ ID NO: 1670305 - DNA, 25 bp, Homo sapien
gagtttggtgcaagacactgctcac

SEQ ID NO: 1670306 - DNA, 25 bp, Homo sapien
tgaataatccaaccctcctttagca

SEQ ID NO: 1670307 - DNA, 25 bp, Homo sapien
gaaactcgtgaataatccaaccctc

SEQ ID NO: 1670308 - DNA, 25 bp, Homo sapien
cctgggaaactcgtgaataatccaa

SEQ ID NO: 1670309 - DNA, 25 bp, Homo sapien
ctcactgcccattatatcccaatta

SEQ ID NO: 1670310 - DNA, 25 bp, Homo sapien
tggtgcttctcacatagccctgcag

SEQ ID NO: 1670311 - DNA, 25 bp, Homo sapien
cactaggcttcttggtgttccacaa

SEQ ID NO: 1670312 - DNA, 25 bp, Homo sapien
tattacaacctctctacgctggcat

SEQ ID NO: 1670313 - DNA, 25 bp, Homo sapien
tgcacattcagttccagccgcacta

SEQ ID NO: 1670314 - DNA, 25 bp, Homo sapien
caaggtcacgcagatattaaaccag

SEQ ID NO: 1670315 - DNA, 25 bp, Homo sapien
cagtgtgggacggtgcctacttcct

SEQ ID NO: 1670316 - DNA, 25 bp, Homo sapien
tttccctagtaggtggagaccaaga

SEQ ID NO: 1670317 - DNA, 25 bp, Homo sapien
cagaaatgacttacttcctaggtgg

SEQ ID NO: 1670318 - DNA, 25 bp, Homo sapien
ttctctgagtggtcccagtgatctg

SEQ ID NO: 1670319 - DNA, 25 bp, Homo sapien
tggcttgtggcaccatcgccctggg

SEQ ID NO: 1670320 - DNA, 25 bp, Homo sapien
tctggcttgtggcaccatcgccctg

SEQ ID NO: 1670321 - DNA, 25 bp, Homo sapien
tgggggccaagcctcattgtaaagg

SEQ ID NO: 1670322 - DNA, 25 bp, Homo sapien
gatggtcgccctgagtaatagagta

SEQ ID NO: 1670323 - DNA, 25 bp, Homo sapien
tgcccccagataggccctgtcatct

SEQ ID NO: 1670324 - DNA, 25 bp, Homo sapien
aatttgcccccagataggccctgtc

SEQ ID NO: 1670325 - DNA, 25 bp, Homo sapien
atggtcgccctgagtaatagagtaa

SEQ ID NO: 1670326 - DNA, 25 bp, Homo sapien
gtcaggggggtctcctcagcattgt

SEQ ID NO: 1670327 - DNA, 25 bp, Homo sapien
caggggggtctcctcagcattgtcc

SEQ ID NO: 1670328 - DNA, 25 bp, Homo sapien
gagtcaggggggtctcctcagcatt

SEQ ID NO: 1670329 - DNA, 25 bp, Homo sapien
agtctatttcctttgagtcaggggg

SEQ ID NO: 1670330 - DNA, 25 bp, Homo sapien
tttatttgtgcttttgttaccttga

SEQ ID NO: 1670331 - DNA, 25 bp, Homo sapien
atcccactctactagttgtctcttc

SEQ ID NO: 1670332 - DNA, 25 bp, Homo sapien
cccactctactagttgtctcttcat

SEQ ID NO: 1670333 - DNA, 25 bp, Homo sapien
tcccactctactagttgtctcttca

SEQ ID NO: 1670334 - DNA, 25 bp, Homo sapien
ttttgagttgattatcctgagagca

SEQ ID NO: 1670335 - DNA, 25 bp, Homo sapien
ttgagttgattatcctgagagcata

SEQ ID NO: 1670336 - DNA, 25 bp, Homo sapien
gagttgattatcctgagagcataga

SEQ ID NO: 1670337 - DNA, 25 bp, Homo sapien
tgattatcctgagagcatagattca

SEQ ID NO: 1670338 - DNA, 25 bp, Homo sapien
caaagtctcttatcgtaagtatagc

SEQ ID NO: 1670339 - DNA, 25 bp, Homo sapien
gctgttggatgaaaagatctgttag

SEQ ID NO: 1670340 - DNA, 25 bp, Homo sapien
agggtgttgaagtccacaagtatta

SEQ ID NO: 1670341 - DNA, 25 bp, Homo sapien
ggtcttgacccagcatcaagtcgtc

SEQ ID NO: 1670342 - DNA, 25 bp, Homo sapien
gcatagtatttttgaccgatatttt

SEQ ID NO: 1670343 - DNA, 25 bp, Homo sapien
tgtggctggctatttctacctaatt

SEQ ID NO: 1670344 - DNA, 25 bp, Homo sapien
ggattggtttgctgtgcatagtatt

SEQ ID NO: 1670345 - DNA, 25 bp, Homo sapien
cctaatttctgatggattggtttgc

SEQ ID NO: 1670346 - DNA, 25 bp, Homo sapien
ctcacaacaatctttgccttccaag

SEQ ID NO: 1670347 - DNA, 25 bp, Homo sapien
ggctcacaacaatctttgccttcca

SEQ ID NO: 1670348 - DNA, 25 bp, Homo sapien
cttgtatcctattgagggttttttg

SEQ ID NO: 1670349 - DNA, 25 bp, Homo sapien
gctcacaacaatctttgccttccaa

SEQ ID NO: 1670350 - DNA, 25 bp, Homo sapien
gcataggttgttaatggcaagggct

SEQ ID NO: 1670351 - DNA, 25 bp, Homo sapien
caagtatgatatggcctataggcag

SEQ ID NO: 1670352 - DNA, 25 bp, Homo sapien
taaaagtttgtagcagtaatggcat

SEQ ID NO: 1670353 - DNA, 25 bp, Homo sapien
tcctcagtggcctaggttgtaaaag

SEQ ID NO: 1670354 - DNA, 25 bp, Homo sapien
gatttgctccatgtggtagaattgg

SEQ ID NO: 1670355 - DNA, 25 bp, Homo sapien
gctccatgtggtagaattggaggta

SEQ ID NO: 1670356 - DNA, 25 bp, Homo sapien
gaattggaggtaggtttaccacaga

SEQ ID NO: 1670357 - DNA, 25 bp, Homo sapien
tagaattggaggtaggtttaccaca

SEQ ID NO: 1670358 - DNA, 25 bp, Homo sapien
tctgaatgctagttatttgtcagat

SEQ ID NO: 1670359 - DNA, 25 bp, Homo sapien
cttagcagtgtatcctgaagaatag

SEQ ID NO: 1670360 - DNA, 25 bp, Homo sapien
tgcaccagaccctatctgtccaaat

SEQ ID NO: 1670361 - DNA, 25 bp, Homo sapien
tttgttatcttagcagtgtatcctg

SEQ ID NO: 1670362 - DNA, 25 bp, Homo sapien
catgggaaacacatgtagacagtct

SEQ ID NO: 1670363 - DNA, 25 bp, Homo sapien
tatgcagtattaactgagagggcaa

SEQ ID NO: 1670364 - DNA, 25 bp, Homo sapien
tggcagtggcataccagatacacag

SEQ ID NO: 1670365 - DNA, 25 bp, Homo sapien
gcaaatttgtgcctgagaagctatt

SEQ ID NO: 1670366 - DNA, 25 bp, Homo sapien
gagttacagtgtacaatgcataagc

SEQ ID NO: 1670367 - DNA, 25 bp, Homo sapien
tccctggcctcctgtatactggatg

SEQ ID NO: 1670368 - DNA, 25 bp, Homo sapien
tcctgtgctataggaacagtattcg

SEQ ID NO: 1670369 - DNA, 25 bp, Homo sapien
caacacaccctagagattgtaacag

SEQ ID NO: 1670370 - DNA, 25 bp, Homo sapien
ctagaaacagcataagttgagtccc

SEQ ID NO: 1670371 - DNA, 25 bp, Homo sapien
gaggatgtgtcatattccatcaatt

SEQ ID NO: 1670372 - DNA, 25 bp, Homo sapien
ggctgtctcctaggacctctatgca

SEQ ID NO: 1670373 - DNA, 25 bp, Homo sapien
tatgcagaggacattgcccctgaaa

SEQ ID NO: 1670374 - DNA, 25 bp, Homo sapien
atcatcttctaggaagtccgtgctc

SEQ ID NO: 1670375 - DNA, 25 bp, Homo sapien
tcatcttctaggaagtccgtgctcc

SEQ ID NO: 1670376 - DNA, 25 bp, Homo sapien
tacatgtcacacacgttgagcacca

SEQ ID NO: 1670377 - DNA, 25 bp, Homo sapien
aatacatgtcacacacgttgagcac

SEQ ID NO: 1670378 - DNA, 25 bp, Homo sapien
catccaatacatgtcacacacgttg

SEQ ID NO: 1670379 - DNA, 25 bp, Homo sapien
tccaatacatgtcacacacgttgag

SEQ ID NO: 1670380 - DNA, 25 bp, Homo sapien
tgtgtgttttctctcatcatatctc

SEQ ID NO: 1670381 - DNA, 25 bp, Homo sapien
gtgtgttttctctcatcatatctca

SEQ ID NO: 1670382 - DNA, 25 bp, Homo sapien
actctgaccagtataagatggcatc

SEQ ID NO: 1670383 - DNA, 25 bp, Homo sapien
tctgaccagtataagatggcatctc

SEQ ID NO: 1670384 - DNA, 25 bp, Homo sapien
tatgcacttaggaaaactttcagcc

SEQ ID NO: 1670385 - DNA, 25 bp, Homo sapien
ttagaaattgaaccagcctggagtc

SEQ ID NO: 1670386 - DNA, 25 bp, Homo sapien
gcctggagtcttattctccacctga

SEQ ID NO: 1670387 - DNA, 25 bp, Homo sapien
gagagacccagtggttgctatgcac

SEQ ID NO: 1670388 - DNA, 25 bp, Homo sapien
caggcaagccggcatgcatatatgt

SEQ ID NO: 1670389 - DNA, 25 bp, Homo sapien
ttttgagccatgtgatagttttacc

SEQ ID NO: 1670390 - DNA, 25 bp, Homo sapien
cacagttgtcaccatggacttaggc

SEQ ID NO: 1670391 - DNA, 25 bp, Homo sapien
tgttcatgcccacagtaatcctggg

SEQ ID NO: 1670392 - DNA, 25 bp, Homo sapien
gctcacagccttttagtgaacactt

SEQ ID NO: 1670393 - DNA, 25 bp, Homo sapien
gcccagcgctcacagccttttagtg

SEQ ID NO: 1670394 - DNA, 25 bp, Homo sapien
cttgtatagttttctattgtaggca

SEQ ID NO: 1670395 - DNA, 25 bp, Homo sapien
tgtatagttttctattgtaggcaaa

SEQ ID NO: 1670396 - DNA, 25 bp, Homo sapien
tagaagtgtgctcttttggccgagc

SEQ ID NO: 1670397 - DNA, 25 bp, Homo sapien
taagctaaactcagcactgtttgag

SEQ ID NO: 1670398 - DNA, 25 bp, Homo sapien
aagaaccagctttctgtgtcattga

SEQ ID NO: 1670399 - DNA, 25 bp, Homo sapien
gggagcttagattatcattagagac

SEQ ID NO: 1670400 - DNA, 25 bp, Homo sapien
tctcagttatatgttttgcaaattg

SEQ ID NO: 1670401 - DNA, 25 bp, Homo sapien
tcttcttaacacgaaattacataac

SEQ ID NO: 1670402 - DNA, 25 bp, Homo sapien
cacgcccagctggtccaaatctttt

SEQ ID NO: 1670403 - DNA, 25 bp, Homo sapien
ctatattatagtcatttctcagtta

SEQ ID NO: 1670404 - DNA, 25 bp, Homo sapien
cagctcattgttagccggcgtgcag

SEQ ID NO: 1670405 - DNA, 25 bp, Homo sapien
tatttttcctatgcccggtccgtgc

SEQ ID NO: 1670406 - DNA, 25 bp, Homo sapien
ggatgcagggtacaaactacgttac

SEQ ID NO: 1670407 - DNA, 25 bp, Homo sapien
agatcgggtcggctttctacgcggc

SEQ ID NO: 1670408 - DNA, 25 bp, Homo sapien
ttacaccgggtagattgagacttgg

SEQ ID NO: 1670409 - DNA, 25 bp, Homo sapien
cagggtgctcactccgtcgcattat

SEQ ID NO: 1670410 - DNA, 25 bp, Homo sapien
gcataaggtgtggaacggactcgaa

SEQ ID NO: 1670411 - DNA, 25 bp, Homo sapien
gaagcagccgccttagtcttgtgag

SEQ ID NO: 1670412 - DNA, 25 bp, Homo sapien
tcaagaaaatctggttatgtcgcct

SEQ ID NO: 1670413 - DNA, 25 bp, Homo sapien
tgtgcaaattcccagccatgtagtc

SEQ ID NO: 1670414 - DNA, 25 bp, Homo sapien
tgtcgcctttaagagcaacccaagc

SEQ ID NO: 1670415 - DNA, 25 bp, Homo sapien
gcattgcactcttggtaggaacaca

SEQ ID NO: 1670416 - DNA, 25 bp, Homo sapien
atccagaaacaaatgtcatagtcaa

SEQ ID NO: 1670417 - DNA, 25 bp, Homo sapien
catagcacatacgtggacgttatgc

SEQ ID NO: 1670418 - DNA, 25 bp, Homo sapien
ggttgatcttataacaatccagaaa

SEQ ID NO: 1670419 - DNA, 25 bp, Homo sapien
tctgccattggaagtgaaatgtcat

SEQ ID NO: 1670420 - DNA, 25 bp, Homo sapien
ccttgctgatgaacctgactgaggt

SEQ ID NO: 1670421 - DNA, 25 bp, Homo sapien
gagtgagtcaactgacaagcgctgg

SEQ ID NO: 1670422 - DNA, 25 bp, Homo sapien
caggccccttgtcccgaagagaggg

SEQ ID NO: 1670423 - DNA, 25 bp, Homo sapien
tgactgaggtgggtgtcccgtccca

SEQ ID NO: 1670424 - DNA, 25 bp, Homo sapien
tggatagcagctatcttgttggatg

SEQ ID NO: 1670425 - DNA, 25 bp, Homo sapien
cacaaggattgcaatctatatacat

SEQ ID NO: 1670426 - DNA, 25 bp, Homo sapien
ggtggaatctatagtgtctttcatt

SEQ ID NO: 1670427 - DNA, 25 bp, Homo sapien
gattgcaatctatatacatcctcac

SEQ ID NO: 1670428 - DNA, 25 bp, Homo sapien
cctttttatgtgagggacctcttga

SEQ ID NO: 1670429 - DNA, 25 bp, Homo sapien
gttatattcaaacactatgcctttt

SEQ ID NO: 1670430 - DNA, 25 bp, Homo sapien
atccatggattgcagtgatcattaa

SEQ ID NO: 1670431 - DNA, 25 bp, Homo sapien
accatggatcaaaagtatttggagc

SEQ ID NO: 1670432 - DNA, 25 bp, Homo sapien
tagtgggctttcacactccagactg

SEQ ID NO: 1670433 - DNA, 25 bp, Homo sapien
tgtattccagcccaaattactcaaa

SEQ ID NO: 1670434 - DNA, 25 bp, Homo sapien
tgtcagtaccacacattttaggtgt

SEQ ID NO: 1670435 - DNA, 25 bp, Homo sapien
gactcagtgttgaggacaaggctag

SEQ ID NO: 1670436 - DNA, 25 bp, Homo sapien
cactagggatattgtctgtactgcc

SEQ ID NO: 1670437 - DNA, 25 bp, Homo sapien
tagggcatagacatcagccttggac

SEQ ID NO: 1670438 - DNA, 25 bp, Homo sapien
ccttggacagaagacatggactggc

SEQ ID NO: 1670439 - DNA, 25 bp, Homo sapien
tctaccaactggcaaagagccatgg

SEQ ID NO: 1670440 - DNA, 25 bp, Homo sapien
gagatgagatcatgcattcccaaac

SEQ ID NO: 1670441 - DNA, 25 bp, Homo sapien
tggtggaaggccacactattctggc

SEQ ID NO: 1670442 - DNA, 25 bp, Homo sapien
cactgttgatacaatttcaggcgaa

SEQ ID NO: 1670443 - DNA, 25 bp, Homo sapien
gagacaatttcaactccctgtgcag

SEQ ID NO: 1670444 - DNA, 25 bp, Homo sapien
ggactctccactagaagttctggta

SEQ ID NO: 1670445 - DNA, 25 bp, Homo sapien
ttctggtaactttagaatacagcat

SEQ ID NO: 1670446 - DNA, 25 bp, Homo sapien
ctgcaggactctccactagaagttc

SEQ ID NO: 1670447 - DNA, 25 bp, Homo sapien
agttctggtaactttagaatacagc

SEQ ID NO: 1670448 - DNA, 25 bp, Homo sapien
caactccagcctcattaaacatcgg

SEQ ID NO: 1670449 - DNA, 25 bp, Homo sapien
tctgatttagcactgggacctacgt

SEQ ID NO: 1670450 - DNA, 25 bp, Homo sapien
tatgaaactaagtctatacctttta

SEQ ID NO: 1670451 - DNA, 25 bp, Homo sapien
gaaagttcacaccagataaagaatg

SEQ ID NO: 1670452 - DNA, 25 bp, Homo sapien
gatagcattagtccacctatgaggg

SEQ ID NO: 1670453 - DNA, 25 bp, Homo sapien
tctgacagttgcctacatacttggc

SEQ ID NO: 1670454 - DNA, 25 bp, Homo sapien
gacatttattggctcgtagtttgga

SEQ ID NO: 1670455 - DNA, 25 bp, Homo sapien
gttgcagctgttaattcatcctggg

SEQ ID NO: 1670456 - DNA, 25 bp, Homo sapien
tcttaggatatcttggagccgtgtc

SEQ ID NO: 1670457 - DNA, 25 bp, Homo sapien
cagtttaggagtcagcaaagcccct

SEQ ID NO: 1670458 - DNA, 25 bp, Homo sapien
gctgaccgctatgaatggaggacca

SEQ ID NO: 1670459 - DNA, 25 bp, Homo sapien
aaaaccaagctgtagatgggccacc

SEQ ID NO: 1670460 - DNA, 25 bp, Homo sapien
gtaaggtccgcgcgcccagcattgt

SEQ ID NO: 1670461 - DNA, 25 bp, Homo sapien
ccgcgcgcccagcattgtgaggcga

SEQ ID NO: 1670462 - DNA, 25 bp, Homo sapien
aggtccgcgcgcccagcattgtgag

SEQ ID NO: 1670463 - DNA, 25 bp, Homo sapien
tttccgtaaggtccgcgcgcccagc

SEQ ID NO: 1670464 - DNA, 25 bp, Homo sapien
tgctgaacggaccagtaactgattg

SEQ ID NO: 1670465 - DNA, 25 bp, Homo sapien
ctgtttgctgaacggaccagtaact

SEQ ID NO: 1670466 - DNA, 25 bp, Homo sapien
gaacggaccagtaactgattgactg

SEQ ID NO: 1670467 - DNA, 25 bp, Homo sapien
cggaccagtaactgattgactgctc

SEQ ID NO: 1670468 - DNA, 25 bp, Homo sapien
catgaagataataggtgagacagct

SEQ ID NO: 1670469 - DNA, 25 bp, Homo sapien
taaaacagttgtcctcaggcatagg

SEQ ID NO: 1670470 - DNA, 25 bp, Homo sapien
caggcataggttcagggatgtgact

SEQ ID NO: 1670471 - DNA, 25 bp, Homo sapien
cattttgtgtaggtcagacaggtct

SEQ ID NO: 1670472 - DNA, 25 bp, Homo sapien
taagtatgaggacttccgtctggcc

SEQ ID NO: 1670473 - DNA, 25 bp, Homo sapien
ccttgctagaggcttgacagtgcta

SEQ ID NO: 1670474 - DNA, 25 bp, Homo sapien
tgtccactgttgaggcccttgctag

SEQ ID NO: 1670475 - DNA, 25 bp, Homo sapien
aactctgggtcaatatatatcagcc

SEQ ID NO: 1670476 - DNA, 25 bp, Homo sapien
tgtcagagcaagtaatccaaaggtg

SEQ ID NO: 1670477 - DNA, 25 bp, Homo sapien
tgagcgccttgtaaagagacatcca

SEQ ID NO: 1670478 - DNA, 25 bp, Homo sapien
gacgtgtgtatctcctgtaggcaaa

SEQ ID NO: 1670479 - DNA, 25 bp, Homo sapien
tatgaagtatgagacaccagcaaac

SEQ ID NO: 1670480 - DNA, 25 bp, Homo sapien
cattcagttgcacattgttaaagtg

SEQ ID NO: 1670481 - DNA, 25 bp, Homo sapien
tattgaggtattagtgacattcagt

SEQ ID NO: 1670482 - DNA, 25 bp, Homo sapien
ttgcctcaatagtttgtttgtaccc

SEQ ID NO: 1670483 - DNA, 25 bp, Homo sapien
caatcaccaaagtcatgataataaa

SEQ ID NO: 1670484 - DNA, 25 bp, Homo sapien
cagagatatctcatttacaagcaca

SEQ ID NO: 1670485 - DNA, 25 bp, Homo sapien
caagcacacctagttgttactaata

SEQ ID NO: 1670486 - DNA, 25 bp, Homo sapien
tatagtcatatattagtatacagca

SEQ ID NO: 1670487 - DNA, 25 bp, Homo sapien
tgagatttcctcagtttttaccaaa

SEQ ID NO: 1670488 - DNA, 25 bp, Homo sapien
cattacagttagtactcacatttct

SEQ ID NO: 1670489 - DNA, 25 bp, Homo sapien
gtctctaaatgtaaccacattacag

SEQ ID NO: 1670490 - DNA, 25 bp, Homo sapien
tgtgtctctaaatgtaaccacatta

SEQ ID NO: 1670491 - DNA, 25 bp, Homo sapien
taaatgtaaccacattacagttagt

SEQ ID NO: 1670492 - DNA, 25 bp, Homo sapien
tctttcttacatgtggactctccag

SEQ ID NO: 1670493 - DNA, 25 bp, Homo sapien
cccaagctggtaagtaattctcgtg

SEQ ID NO: 1670494 - DNA, 25 bp, Homo sapien
tcaagtcatcttgagtggatcactt

SEQ ID NO: 1670495 - DNA, 25 bp, Homo sapien
gatttatgctgttcaagaagcacct

SEQ ID NO: 1670496 - DNA, 25 bp, Homo sapien
ttagctctggtattagatcttcctg

SEQ ID NO: 1670497 - DNA, 25 bp, Homo sapien
tactggccatgtgtatgttgctatc

SEQ ID NO: 1670498 - DNA, 25 bp, Homo sapien
cctgaacttgtctgaaggacttaac

SEQ ID NO: 1670499 - DNA, 25 bp, Homo sapien
cctggacaagagcattactggccat

SEQ ID NO: 1670500 - DNA, 25 bp, Homo sapien
tcatggcatgacaaccagattagga

SEQ ID NO: 1670501 - DNA, 25 bp, Homo sapien
atggcatgacaaccagattaggaaa

SEQ ID NO: 1670502 - DNA, 25 bp, Homo sapien
catggcatgacaaccagattaggaa

SEQ ID NO: 1670503 - DNA, 25 bp, Homo sapien
gaactgagagatatgagtatcactc

SEQ ID NO: 1670504 - DNA, 25 bp, Homo sapien
tggcctgggtttgcaactacagttg

SEQ ID NO: 1670505 - DNA, 25 bp, Homo sapien
gctgggaaacatgaggcgaccaaca

SEQ ID NO: 1670506 - DNA, 25 bp, Homo sapien
caacacagagttggtcactatccac

SEQ ID NO: 1670507 - DNA, 25 bp, Homo sapien
tgcaggagagtctgttgctgtgatt

SEQ ID NO: 1670508 - DNA, 25 bp, Homo sapien
ctgcaggagagtctgttgctgtgat

SEQ ID NO: 1670509 - DNA, 25 bp, Homo sapien
ggagagtctgttgctgtgattgtgt

SEQ ID NO: 1670510 - DNA, 25 bp, Homo sapien
caggagagtctgttgctgtgattgt

SEQ ID NO: 1670511 - DNA, 25 bp, Homo sapien
tgtgcccaccctgtgataataaaag

SEQ ID NO: 1670512 - DNA, 25 bp, Homo sapien
ttttgctattcagtgggccattcac

SEQ ID NO: 1670513 - DNA, 25 bp, Homo sapien
tgaagcccaaactcataaaatcagg

SEQ ID NO: 1670514 - DNA, 25 bp, Homo sapien
gcttggaatccattgagaaggcaga

SEQ ID NO: 1670515 - DNA, 25 bp, Homo sapien
agcaaatatttcaatccaaaagctg

SEQ ID NO: 1670516 - DNA, 25 bp, Homo sapien
caaatatttcaatccaaaagctgcc

SEQ ID NO: 1670517 - DNA, 25 bp, Homo sapien
tcagcaaatatttcaatccaaaagc

SEQ ID NO: 1670518 - DNA, 25 bp, Homo sapien
attcagcaaatatttcaatccaaaa

SEQ ID NO: 1670519 - DNA, 25 bp, Homo sapien
ggaccatggagttagccaaggccag

SEQ ID NO: 1670520 - DNA, 25 bp, Homo sapien
gaagtatcttgtcatcagtggagac

SEQ ID NO: 1670521 - DNA, 25 bp, Homo sapien
tggctgagaatcaagtccgtgggtc

SEQ ID NO: 1670522 - DNA, 25 bp, Homo sapien
tctgaatgaggaagctaatccctga

SEQ ID NO: 1670523 - DNA, 25 bp, Homo sapien
tttgctccattgtcctagttgtata

SEQ ID NO: 1670524 - DNA, 25 bp, Homo sapien
aggctctgaggtatgaaaacctttt

SEQ ID NO: 1670525 - DNA, 25 bp, Homo sapien
ccattgtcctagttgtataatttat

SEQ ID NO: 1670526 - DNA, 25 bp, Homo sapien
tagattcccacaaaccacttgttga

SEQ ID NO: 1670527 - DNA, 25 bp, Homo sapien
gacgttttaataacagcccactgaa

SEQ ID NO: 1670528 - DNA, 25 bp, Homo sapien
caattatggagtctgctcctgggca

SEQ ID NO: 1670529 - DNA, 25 bp, Homo sapien
ccactgaacagcaaaaaccttagtg

SEQ ID NO: 1670530 - DNA, 25 bp, Homo sapien
gaacagcaaaaaccttagtgtgaaa

SEQ ID NO: 1670531 - DNA, 25 bp, Homo sapien
tgttattaactttgatagatcttat

SEQ ID NO: 1670532 - DNA, 25 bp, Homo sapien
tcctttgtgagtgtagaacccctga

SEQ ID NO: 1670533 - DNA, 25 bp, Homo sapien
aagagcctggcccatatcgcccagt

SEQ ID NO: 1670534 - DNA, 25 bp, Homo sapien
gcctggcccatatcgcccagttttt

SEQ ID NO: 1670535 - DNA, 25 bp, Homo sapien
atctgcccattgctgaagatgaggt

SEQ ID NO: 1670536 - DNA, 25 bp, Homo sapien
tatagttagggacttactacttcca

SEQ ID NO: 1670537 - DNA, 25 bp, Homo sapien
tctcctaaaaagctattcagtcatc

SEQ ID NO: 1670538 - DNA, 25 bp, Homo sapien
gtgtttgtgcgtgccctaatgttgg

SEQ ID NO: 1670539 - DNA, 25 bp, Homo sapien
aagacaatgttctgggttcccaggc

SEQ ID NO: 1670540 - DNA, 25 bp, Homo sapien
tgcagccatttcagcactagagggt

SEQ ID NO: 1670541 - DNA, 25 bp, Homo sapien
tagatacccagcctagatagatgtg

SEQ ID NO: 1670542 - DNA, 25 bp, Homo sapien
tgctgagttccctaagctgtggtca

SEQ ID NO: 1670543 - DNA, 25 bp, Homo sapien
cccttggctgctacggctggtgtca

SEQ ID NO: 1670544 - DNA, 25 bp, Homo sapien
taaacccatggactctatgaccagc

SEQ ID NO: 1670545 - DNA, 25 bp, Homo sapien
agaacttgtgtccaaccaaccagga

SEQ ID NO: 1670546 - DNA, 25 bp, Homo sapien
aggcttgaggccactttagtcagca

SEQ ID NO: 1670547 - DNA, 25 bp, Homo sapien
ctgagactcaggttcctttcacggg

SEQ ID NO: 1670548 - DNA, 25 bp, Homo sapien
tatgttaaaatcaggtactccgatc

SEQ ID NO: 1670549 - DNA, 25 bp, Homo sapien
taagcaatgcaagactacctttcct

SEQ ID NO: 1670550 - DNA, 25 bp, Homo sapien
acttcggtcagctgttggtggtgcc

SEQ ID NO: 1670551 - DNA, 25 bp, Homo sapien
tatatccatgaagggaaacctctgc

SEQ ID NO: 1670552 - DNA, 25 bp, Homo sapien
aaattcgtcccaagtgccatgtgag

SEQ ID NO: 1670553 - DNA, 25 bp, Homo sapien
tatcaggaatagaagaggttgcacc

SEQ ID NO: 1670554 - DNA, 25 bp, Homo sapien
tctggctaaaactgggtcatgctca

SEQ ID NO: 1670555 - DNA, 25 bp, Homo sapien
atgtccacccagtcaggtacccagg

SEQ ID NO: 1670556 - DNA, 25 bp, Homo sapien
accagtgaggcaactatgtgggaca

SEQ ID NO: 1670557 - DNA, 25 bp, Homo sapien
agtcaggtacccagggctcactacc

SEQ ID NO: 1670558 - DNA, 25 bp, Homo sapien
gcaacagctagggtcatgtccaccc

SEQ ID NO: 1670559 - DNA, 25 bp, Homo sapien
ctgatgtaggaaggacaaagatgcc

SEQ ID NO: 1670560 - DNA, 25 bp, Homo sapien
cagtgtccacggctctgatgtagga

SEQ ID NO: 1670561 - DNA, 25 bp, Homo sapien
cacggctctgatgtaggaaggacaa

SEQ ID NO: 1670562 - DNA, 25 bp, Homo sapien
gaaatgagacagtgtccacggctct

SEQ ID NO: 1670563 - DNA, 25 bp, Homo sapien
tacacgaacacgtcctcaaagttca

SEQ ID NO: 1670564 - DNA, 25 bp, Homo sapien
acgaacacgtcctcaaagttcacct

SEQ ID NO: 1670565 - DNA, 25 bp, Homo sapien
gaacacgtcctcaaagttcacctgc

SEQ ID NO: 1670566 - DNA, 25 bp, Homo sapien
agtacacgaacacgtcctcaaagtt

SEQ ID NO: 1670567 - DNA, 25 bp, Homo sapien
caattacttctgagttcatgggaac

SEQ ID NO: 1670568 - DNA, 25 bp, Homo sapien
cacaattacttctgagttcatggga

SEQ ID NO: 1670569 - DNA, 25 bp, Homo sapien
agggtccacaattacttctgagttc

SEQ ID NO: 1670570 - DNA, 25 bp, Homo sapien
gtccacaattacttctgagttcatg

SEQ ID NO: 1670571 - DNA, 25 bp, Homo sapien
ccatcaggcctgtggactacggaag

SEQ ID NO: 1670572 - DNA, 25 bp, Homo sapien
aaatgtccacccgaggatggtagag

SEQ ID NO: 1670573 - DNA, 25 bp, Homo sapien
cagggaagaagacactctctcacgt

SEQ ID NO: 1670574 - DNA, 25 bp, Homo sapien
aggtctgacattgcgttctggaaac

SEQ ID NO: 1670575 - DNA, 25 bp, Homo sapien
tgtgaggcgcattcagcgagtcccg

SEQ ID NO: 1670576 - DNA, 25 bp, Homo sapien
cccggctcgcaaagatgtgaggcgc

SEQ ID NO: 1670577 - DNA, 25 bp, Homo sapien
ggcccttcaagtcaaaacagactgg

SEQ ID NO: 1670578 - DNA, 25 bp, Homo sapien
cctcctggtgtctgtagtgggcagc

SEQ ID NO: 1670579 - DNA, 25 bp, Homo sapien
ccaggaggaatggagattgcttgat

SEQ ID NO: 1670580 - DNA, 25 bp, Homo sapien
cccaggaggaatggagattgcttga

SEQ ID NO: 1670581 - DNA, 25 bp, Homo sapien
caggaggaatggagattgcttgatg

SEQ ID NO: 1670582 - DNA, 25 bp, Homo sapien
gcctgcttgggaagttgtgacttca

SEQ ID NO: 1670583 - DNA, 25 bp, Homo sapien
agcccttcatgcctgcttgggaagt

SEQ ID NO: 1670584 - DNA, 25 bp, Homo sapien
tcatgcctgcttgggaagttgtgac

SEQ ID NO: 1670585 - DNA, 25 bp, Homo sapien
cccttcatgcctgcttgggaagttg

SEQ ID NO: 1670586 - DNA, 25 bp, Homo sapien
ttgggaaggccctcctgatcagctc

SEQ ID NO: 1670587 - DNA, 25 bp, Homo sapien
aagtagggaggcctttcatgctgga

SEQ ID NO: 1670588 - DNA, 25 bp, Homo sapien
cagattgcttctgtaggactgctca

SEQ ID NO: 1670589 - DNA, 25 bp, Homo sapien
gagttgcaaagttcacctatcagag

SEQ ID NO: 1670590 - DNA, 25 bp, Homo sapien
gggagctggcaattgaacatcattc

SEQ ID NO: 1670591 - DNA, 25 bp, Homo sapien
aagacagccctctgccttggagctc

SEQ ID NO: 1670592 - DNA, 25 bp, Homo sapien
tggctgtacccgtcgaatggagttt

SEQ ID NO: 1670593 - DNA, 25 bp, Homo sapien
gaaactctgaggatggcctttatga

SEQ ID NO: 1670594 - DNA, 25 bp, Homo sapien
tgctgaccctagtttgatgggtttt

SEQ ID NO: 1670595 - DNA, 25 bp, Homo sapien
tgtatgcaatatatgtcaacttttg

SEQ ID NO: 1670596 - DNA, 25 bp, Homo sapien
tttatcctgtgtatgtaataggctt

SEQ ID NO: 1670597 - DNA, 25 bp, Homo sapien
gatcaaatcgtattcttttatcctg

SEQ ID NO: 1670598 - DNA, 25 bp, Homo sapien
acccagaatactgtgcgccgagcgt

SEQ ID NO: 1670599 - DNA, 25 bp, Homo sapien
tggtcgtttttgctgcctgcgagcg

SEQ ID NO: 1670600 - DNA, 25 bp, Homo sapien
tgcgcaatacgccagaatcttccgg

SEQ ID NO: 1670601 - DNA, 25 bp, Homo sapien
ggccttagaccaatcattgcccagg

SEQ ID NO: 1670602 - DNA, 25 bp, Homo sapien
gtgaagaagggagagcgttgcgtac

SEQ ID NO: 1670603 - DNA, 25 bp, Homo sapien
acttgggggcggacctgtgtctgca

SEQ ID NO: 1670604 - DNA, 25 bp, Homo sapien
ggtcgcgagcattcggaaacttggg

SEQ ID NO: 1670605 - DNA, 25 bp, Homo sapien
aacttgggggcggacctgtgtctgc

SEQ ID NO: 1670606 - DNA, 25 bp, Homo sapien
ccggggtcgcgagcattcggaaact

SEQ ID NO: 1670607 - DNA, 25 bp, Homo sapien
tcacctagatagaagtgggaaccat

SEQ ID NO: 1670608 - DNA, 25 bp, Homo sapien
cagtaatggaggtcaaataacacca

SEQ ID NO: 1670609 - DNA, 25 bp, Homo sapien
cctaagtagtttcagacggtgtgac

SEQ ID NO: 1670610 - DNA, 25 bp, Homo sapien
tgttggtaactcttggtagggccta

SEQ ID NO: 1670611 - DNA, 25 bp, Homo sapien
taaagacaggccaacatatgagtag

SEQ ID NO: 1670612 - DNA, 25 bp, Homo sapien
gaaacacttttgtccatcttatggg

SEQ ID NO: 1670613 - DNA, 25 bp, Homo sapien
tgagtagaccattgacagaagagga

SEQ ID NO: 1670614 - DNA, 25 bp, Homo sapien
tcaatagtatcaagggactagccca

SEQ ID NO: 1670615 - DNA, 25 bp, Homo sapien
cacaggcttccattgtgagatggct

SEQ ID NO: 1670616 - DNA, 25 bp, Homo sapien
tatctcggcttctggtagccccgtg

SEQ ID NO: 1670617 - DNA, 25 bp, Homo sapien
gattaactaacatgattacctgagg

SEQ ID NO: 1670618 - DNA, 25 bp, Homo sapien
gaggttctgagggtaacgactccaa

SEQ ID NO: 1670619 - DNA, 25 bp, Homo sapien
tgaatggtcataactagtcccaccc

SEQ ID NO: 1670620 - DNA, 25 bp, Homo sapien
tacacccaaggagcaaataccattt

SEQ ID NO: 1670621 - DNA, 25 bp, Homo sapien
gtctttgcatgaccgacttgccgag

SEQ ID NO: 1670622 - DNA, 25 bp, Homo sapien
catttaactgggtgaggatccttcc

SEQ ID NO: 1670623 - DNA, 25 bp, Homo sapien
tcttctaagtatgaccacaacagtg

SEQ ID NO: 1670624 - DNA, 25 bp, Homo sapien
cctcaatcataaactgtggaaaaca

SEQ ID NO: 1670625 - DNA, 25 bp, Homo sapien
agtaagttccttccctgctcaaggg

SEQ ID NO: 1670626 - DNA, 25 bp, Homo sapien
gagctaaatgacaggtgtctcatga

SEQ ID NO: 1670627 - DNA, 25 bp, Homo sapien
gaaagaaccctttgatgacagccaa

SEQ ID NO: 1670628 - DNA, 25 bp, Homo sapien
ccagggccttaggtacaagtacagc

SEQ ID NO: 1670629 - DNA, 25 bp, Homo sapien
tagggtgtcctttatcccatggaaa

SEQ ID NO: 1670630 - DNA, 25 bp, Homo sapien
tgacagccaatatgtttctagaggg

SEQ ID NO: 1670631 - DNA, 25 bp, Homo sapien
gatagtaagatttctgctctggcca

SEQ ID NO: 1670632 - DNA, 25 bp, Homo sapien
tataggacaagcaagtgacaacctg

SEQ ID NO: 1670633 - DNA, 25 bp, Homo sapien
tctctccaaagtgactgctcatgtg

SEQ ID NO: 1670634 - DNA, 25 bp, Homo sapien
gaagggatccttacattcactgtat

SEQ ID NO: 1670635 - DNA, 25 bp, Homo sapien
tacgtgctccggtgaaaggctttcc

SEQ ID NO: 1670636 - DNA, 25 bp, Homo sapien
agaaaggcccgctcagataagactg

SEQ ID NO: 1670637 - DNA, 25 bp, Homo sapien
tatggcgaataaaagtagaccggtg

SEQ ID NO: 1670638 - DNA, 25 bp, Homo sapien
gaaccctctgatgtcgaacgagata

SEQ ID NO: 1670639 - DNA, 25 bp, Homo sapien
caggttaccaaatactgcttacggt

SEQ ID NO: 1670640 - DNA, 25 bp, Homo sapien
taaccacttcagtaggaaaatgaag

SEQ ID NO: 1670641 - DNA, 25 bp, Homo sapien
tgaagggcatcaacaaacaaaggag

SEQ ID NO: 1670642 - DNA, 25 bp, Homo sapien
gcttacggtccttgtatccttgaca

SEQ ID NO: 1670643 - DNA, 25 bp, Homo sapien
catgctctagcaggtggaccaactc

SEQ ID NO: 1670644 - DNA, 25 bp, Homo sapien
tctagcaggtggaccaactctggtt

SEQ ID NO: 1670645 - DNA, 25 bp, Homo sapien
caactctggtttgggaacccgatgc

SEQ ID NO: 1670646 - DNA, 25 bp, Homo sapien
ctgcccatgctctagcaggtggacc

SEQ ID NO: 1670647 - DNA, 25 bp, Homo sapien
tcctcagggatgagaggtgagtcat

SEQ ID NO: 1670648 - DNA, 25 bp, Homo sapien
cctcagggatgagaggtgagtcatt

SEQ ID NO: 1670649 - DNA, 25 bp, Homo sapien
tcagggatgagaggtgagtcattac

SEQ ID NO: 1670650 - DNA, 25 bp, Homo sapien
cctcctcagggatgagaggtgagtc

SEQ ID NO: 1670651 - DNA, 25 bp, Homo sapien
tgaaaccagaagcccacaggtctcc

SEQ ID NO: 1670652 - DNA, 25 bp, Homo sapien
aaaccagaagcccacaggtctccag

SEQ ID NO: 1670653 - DNA, 25 bp, Homo sapien
ctagtgaaaccagaagcccacaggt

SEQ ID NO: 1670654 - DNA, 25 bp, Homo sapien
agtgaaaccagaagcccacaggtct

SEQ ID NO: 1670655 - DNA, 25 bp, Homo sapien
cactcctcccgggtaaaggtcacag

SEQ ID NO: 1670656 - DNA, 25 bp, Homo sapien
ccagctgtctccactcctcccgggt

SEQ ID NO: 1670657 - DNA, 25 bp, Homo sapien
agctgtctccactcctcccgggtaa

SEQ ID NO: 1670658 - DNA, 25 bp, Homo sapien
ctgtctccactcctcccgggtaaag

SEQ ID NO: 1670659 - DNA, 25 bp, Homo sapien
tttgggctgacttccgtgcagggct

SEQ ID NO: 1670660 - DNA, 25 bp, Homo sapien
cactcagtctctagtcaatgtgcag

SEQ ID NO: 1670661 - DNA, 25 bp, Homo sapien
tgtcgcataggatcagaacctgtca

SEQ ID NO: 1670662 - DNA, 25 bp, Homo sapien
caggtctgaatcaactaggtctcct

SEQ ID NO: 1670663 - DNA, 25 bp, Homo sapien
taaaagccctatttcataccacaac

SEQ ID NO: 1670664 - DNA, 25 bp, Homo sapien
ccgcgggcctgcattccggacccgg

SEQ ID NO: 1670665 - DNA, 25 bp, Homo sapien
ccaccgcgggcctgcattccggacc

SEQ ID NO: 1670666 - DNA, 25 bp, Homo sapien
acaacgccgcgcaccccagaaacgg

SEQ ID NO: 1670667 - DNA, 25 bp, Homo sapien
agggactgcactgaggacgaccctg

SEQ ID NO: 1670668 - DNA, 25 bp, Homo sapien
tgaggacgaccctgaaacgccgtcc

SEQ ID NO: 1670669 - DNA, 25 bp, Homo sapien
tctaagaagcaacggcagggactgc

SEQ ID NO: 1670670 - DNA, 25 bp, Homo sapien
tgaaacgccgtccttccgctcgtcg

SEQ ID NO: 1670671 - DNA, 25 bp, Homo sapien
tgcgctgcgtccttcgtctccgcca

SEQ ID NO: 1670672 - DNA, 25 bp, Homo sapien
gcgctgcgtccttcgtctccgccat

SEQ ID NO: 1670673 - DNA, 25 bp, Homo sapien
ctgcgctgcgtccttcgtctccgcc

SEQ ID NO: 1670674 - DNA, 25 bp, Homo sapien
cgggtcctacaacggtgcggaggtg

SEQ ID NO: 1670675 - DNA, 25 bp, Homo sapien
gggcagctcccacgggctcaaaacc

SEQ ID NO: 1670676 - DNA, 25 bp, Homo sapien
tacaacggtgcggaggtgagcccca

SEQ ID NO: 1670677 - DNA, 25 bp, Homo sapien
agcacagttctgagagcgcggacca

SEQ ID NO: 1670678 - DNA, 25 bp, Homo sapien
gatcttagcggagcaagtgtacaca

SEQ ID NO: 1670679 - DNA, 25 bp, Homo sapien
taggaaatgggtcaaatctagcgtc

SEQ ID NO: 1670680 - DNA, 25 bp, Homo sapien
gagtgacccagtgacattcccatgt

SEQ ID NO: 1670681 - DNA, 25 bp, Homo sapien
tgttaaggtctcatcagcccagtct

SEQ ID NO: 1670682 - DNA, 25 bp, Homo sapien
taaacaggcatagctcgaaggccaa

SEQ ID NO: 1670683 - DNA, 25 bp, Homo sapien
cataaaggcgtttcaaggacaccta

SEQ ID NO: 1670684 - DNA, 25 bp, Homo sapien
gctgggtgcagataaagtttaactc

SEQ ID NO: 1670685 - DNA, 25 bp, Homo sapien
tatccctaggcaaaacgtacattgc

SEQ ID NO: 1670686 - DNA, 25 bp, Homo sapien
tgaagtcgtatatcccctttctgcc

SEQ ID NO: 1670687 - DNA, 25 bp, Homo sapien
ctgccaagaaattgaagagagcctc

SEQ ID NO: 1670688 - DNA, 25 bp, Homo sapien
taaatgtgttccctatgagaagact

SEQ ID NO: 1670689 - DNA, 25 bp, Homo sapien
gaggagactgtcatttatatacttc

SEQ ID NO: 1670690 - DNA, 25 bp, Homo sapien
tagtccctaacagaggcacacagga

SEQ ID NO: 1670691 - DNA, 25 bp, Homo sapien
ttgcacaaagggcagatagggctcc

SEQ ID NO: 1670692 - DNA, 25 bp, Homo sapien
cacttggtggcgctgtaggatctga

SEQ ID NO: 1670693 - DNA, 25 bp, Homo sapien
gaggtttgggcttaataggctgtcc

SEQ ID NO: 1670694 - DNA, 25 bp, Homo sapien
tatctgcctcgccttagtatgcaag

SEQ ID NO: 1670695 - DNA, 25 bp, Homo sapien
gctcagactgctcaaggaatttcct

SEQ ID NO: 1670696 - DNA, 25 bp, Homo sapien
tgaggtttaactttaggcagacggc

SEQ ID NO: 1670697 - DNA, 25 bp, Homo sapien
ggagctcctgcaagacacatatgcc

SEQ ID NO: 1670698 - DNA, 25 bp, Homo sapien
caatgttagatcttgggctgtaggg

SEQ ID NO: 1670699 - DNA, 25 bp, Homo sapien
tctggtgttcaacgagggtatagct

SEQ ID NO: 1670700 - DNA, 25 bp, Homo sapien
cactgtccacagtcgtaaggcctta

SEQ ID NO: 1670701 - DNA, 25 bp, Homo sapien
cagagtgttgtgtaaaggacttccc

SEQ ID NO: 1670702 - DNA, 25 bp, Homo sapien
caagagtggatttggacccaaaggc

SEQ ID NO: 1670703 - DNA, 25 bp, Homo sapien
catagttagcaatagcttgcggctg

SEQ ID NO: 1670704 - DNA, 25 bp, Homo sapien
tccagtgcagactctagggtgaaaa

SEQ ID NO: 1670705 - DNA, 25 bp, Homo sapien
ggagcactcacagcagcaggctttc

SEQ ID NO: 1670706 - DNA, 25 bp, Homo sapien
gtttctctgcactatgatgcttctg

SEQ ID NO: 1670707 - DNA, 25 bp, Homo sapien
tctctgcactatgatgcttctggtc

SEQ ID NO: 1670708 - DNA, 25 bp, Homo sapien
tgcacaaatgaggccttgtccatgt

SEQ ID NO: 1670709 - DNA, 25 bp, Homo sapien
tgactcatggaacaggcagcactgc

SEQ ID NO: 1670710 - DNA, 25 bp, Homo sapien
cacatgccccagtcaagtatagttc

SEQ ID NO: 1670711 - DNA, 25 bp, Homo sapien
ccgcacatgccccagtcaagtatag

SEQ ID NO: 1670712 - DNA, 25 bp, Homo sapien
ggtgaaagaccgcacatgccccagt

SEQ ID NO: 1670713 - DNA, 25 bp, Homo sapien
aagaccgcacatgccccagtcaagt

SEQ ID NO: 1670714 - DNA, 25 bp, Homo sapien
tcggtcaggtgcaaaatgtcggtca

SEQ ID NO: 1670715 - DNA, 25 bp, Homo sapien
catgtcacaggattgaatcttctgg

SEQ ID NO: 1670716 - DNA, 25 bp, Homo sapien
ctgcccaggcaaatcggtcaggtgc

SEQ ID NO: 1670717 - DNA, 25 bp, Homo sapien
aatgtcggtcaggaatgggacacac

SEQ ID NO: 1670718 - DNA, 25 bp, Homo sapien
cagaaacactttgctcaggtgtctc

SEQ ID NO: 1670719 - DNA, 25 bp, Homo sapien
tacagaaacactttgctcaggtgtc

SEQ ID NO: 1670720 - DNA, 25 bp, Homo sapien
gaaacactttgctcaggtgtctctt

SEQ ID NO: 1670721 - DNA, 25 bp, Homo sapien
tctacagaaacactttgctcaggtg

SEQ ID NO: 1670722 - DNA, 25 bp, Homo sapien
cctcatcaaggagcccccattcttc

SEQ ID NO: 1670723 - DNA, 25 bp, Homo sapien
ttcctgggagaagtaaatggccacg

SEQ ID NO: 1670724 - DNA, 25 bp, Homo sapien
atcgcggtacaggagcctctgagcc

SEQ ID NO: 1670725 - DNA, 25 bp, Homo sapien
ccagcgcagttataagtgcaaagtt

SEQ ID NO: 1670726 - DNA, 25 bp, Homo sapien
gtgtaaagcccataagtttagcttc

SEQ ID NO: 1670727 - DNA, 25 bp, Homo sapien
ctgtgtaaagcccataagtttagct

SEQ ID NO: 1670728 - DNA, 25 bp, Homo sapien
tgtgtaaagcccataagtttagctt

SEQ ID NO: 1670729 - DNA, 25 bp, Homo sapien
cgaagtcgaatccctaagcacggcc

SEQ ID NO: 1670730 - DNA, 25 bp, Homo sapien
gcgggaacccaggcacggctgccac

SEQ ID NO: 1670731 - DNA, 25 bp, Homo sapien
gatgcgcagcggggcgacccccgct

SEQ ID NO: 1670732 - DNA, 25 bp, Homo sapien
ctgatgcgcagcggggcgacccccg

SEQ ID NO: 1670733 - DNA, 25 bp, Homo sapien
tgatgcgcagcggggcgacccccgc

SEQ ID NO: 1670734 - DNA, 25 bp, Homo sapien
gcgtgggccgaggtagagaaccacc

SEQ ID NO: 1670735 - DNA, 25 bp, Homo sapien
ctgtgccggaggcagcgtttctaac

SEQ ID NO: 1670736 - DNA, 25 bp, Homo sapien
cgtttctaactcaggcggcgtgggc

SEQ ID NO: 1670737 - DNA, 25 bp, Homo sapien
gaggcagcgtttctaactcaggcgg

SEQ ID NO: 1670738 - DNA, 25 bp, Homo sapien
gagcggtgccggaagtcccgcctta

SEQ ID NO: 1670739 - DNA, 25 bp, Homo sapien
tcggagcggtgccggaagtcccgcc

SEQ ID NO: 1670740 - DNA, 25 bp, Homo sapien
tctcggagcggtgccggaagtcccg

SEQ ID NO: 1670741 - DNA, 25 bp, Homo sapien
catctcggagcggtgccggaagtcc

SEQ ID NO: 1670742 - DNA, 25 bp, Homo sapien
gtatgcaacaaacggagacaggtcc

SEQ ID NO: 1670743 - DNA, 25 bp, Homo sapien
gagacaggtccgttcctgaacgttg

SEQ ID NO: 1670744 - DNA, 25 bp, Homo sapien
cgttgattggctccgcgtctttgca

SEQ ID NO: 1670745 - DNA, 25 bp, Homo sapien
cgtctttgcagcttggcgctcggca

SEQ ID NO: 1670746 - DNA, 25 bp, Homo sapien
ggcgctaggaaaaggcgcgacacca

SEQ ID NO: 1670747 - DNA, 25 bp, Homo sapien
tccctgagattcacccggaacaagg

SEQ ID NO: 1670748 - DNA, 25 bp, Homo sapien
aacaagggctaagcggcccgcggag

SEQ ID NO: 1670749 - DNA, 25 bp, Homo sapien
caccaagagcgagacagggacttgc

SEQ ID NO: 1670750 - DNA, 25 bp, Homo sapien
tattgcaagtcgacaaacaagaaga

SEQ ID NO: 1670751 - DNA, 25 bp, Homo sapien
cattcagagacaacagaccccttgc

SEQ ID NO: 1670752 - DNA, 25 bp, Homo sapien
cagcacttgggttccagccatagcc

SEQ ID NO: 1670753 - DNA, 25 bp, Homo sapien
gggttgttatcacccaacattcaga

SEQ ID NO: 1670754 - DNA, 25 bp, Homo sapien
gaaggttcatacctggagtgccaag

SEQ ID NO: 1670755 - DNA, 25 bp, Homo sapien
gagatcctcatgtccagtacagtgg

SEQ ID NO: 1670756 - DNA, 25 bp, Homo sapien
tgagttcttgtgcaaggtcccacag

SEQ ID NO: 1670757 - DNA, 25 bp, Homo sapien
gccttcttgggtcactacggtcgag

SEQ ID NO: 1670758 - DNA, 25 bp, Homo sapien
cagtcaacatgagattgctaggcat

SEQ ID NO: 1670759 - DNA, 25 bp, Homo sapien
caagcctgtgaaaccataatcatga

SEQ ID NO: 1670760 - DNA, 25 bp, Homo sapien
gcctgaagagagagtgcagtcaaca

SEQ ID NO: 1670761 - DNA, 25 bp, Homo sapien
taacagaagtcctataggccaggga

SEQ ID NO: 1670762 - DNA, 25 bp, Homo sapien
agttattactagagacaacaagggt

SEQ ID NO: 1670763 - DNA, 25 bp, Homo sapien
gaaatgtgtgtcttgtagctcaagt

SEQ ID NO: 1670764 - DNA, 25 bp, Homo sapien
agaaatgtgtgtcttgtagctcaag

SEQ ID NO: 1670765 - DNA, 25 bp, Homo sapien
aatgaggagcgcctgtctgagtccc

SEQ ID NO: 1670766 - DNA, 25 bp, Homo sapien
tcattgcgaggacgataggagccat

SEQ ID NO: 1670767 - DNA, 25 bp, Homo sapien
tgaaccgtagtcaggcctgcaatgt

SEQ ID NO: 1670768 - DNA, 25 bp, Homo sapien
gagctggactgagcccgtagcagtc

SEQ ID NO: 1670769 - DNA, 25 bp, Homo sapien
gaggcctcaattgtgaagaactgca

SEQ ID NO: 1670770 - DNA, 25 bp, Homo sapien
gacggctctcccttgtgacatatgt

SEQ ID NO: 1670771 - DNA, 25 bp, Homo sapien
gatattttgcacctggatgaacacc

SEQ ID NO: 1670772 - DNA, 25 bp, Homo sapien
tgaacaccagggtacacaccatgga

SEQ ID NO: 1670773 - DNA, 25 bp, Homo sapien
tgcccggaagccttatgaagttgcc

SEQ ID NO: 1670774 - DNA, 25 bp, Homo sapien
gaagttgcccggaagccttatgaat

SEQ ID NO: 1670775 - DNA, 25 bp, Homo sapien
cagctgacccttaaacgacgcaggg

SEQ ID NO: 1670776 - DNA, 25 bp, Homo sapien
cgacccctgcggaattgaaaatgct

SEQ ID NO: 1670777 - DNA, 25 bp, Homo sapien
agcgccgcccaggtcagggaatcct

SEQ ID NO: 1670778 - DNA, 25 bp, Homo sapien
cgctgtggccgctcagcgtctggga

SEQ ID NO: 1670779 - DNA, 25 bp, Homo sapien
ctaggcgctgtggccgctcagcgtc

SEQ ID NO: 1670780 - DNA, 25 bp, Homo sapien
ggtcgtgcggccgtggaggacagcg

SEQ ID NO: 1670781 - DNA, 25 bp, Homo sapien
tcctattgtagtcccaccaagggtg

SEQ ID NO: 1670782 - DNA, 25 bp, Homo sapien
agaaggatcattccgcggtccaggg

SEQ ID NO: 1670783 - DNA, 25 bp, Homo sapien
tattgctctaattggcctgctgccc

SEQ ID NO: 1670784 - DNA, 25 bp, Homo sapien
tgaatgcagtgatcgtgagaaagcc

SEQ ID NO: 1670785 - DNA, 25 bp, Homo sapien
tactgatagaaggacatattctgcc

SEQ ID NO: 1670786 - DNA, 25 bp, Homo sapien
caccttagaagggattcagttgtat

SEQ ID NO: 1670787 - DNA, 25 bp, Homo sapien
tgtttttatacatcgtacattccca

SEQ ID NO: 1670788 - DNA, 25 bp, Homo sapien
cattataaaacctgatgaacccttt

SEQ ID NO: 1670789 - DNA, 25 bp, Homo sapien
taaactatcaagcaattcatggttg

SEQ ID NO: 1670790 - DNA, 25 bp, Homo sapien
taaaggcataaagtcttcagattgc

SEQ ID NO: 1670791 - DNA, 25 bp, Homo sapien
agtactgaattgtatcaactgctgc

SEQ ID NO: 1670792 - DNA, 25 bp, Homo sapien
gtaacgttgctaaactgcttgtcca

SEQ ID NO: 1670793 - DNA, 25 bp, Homo sapien
caaaacgaacttcccacattgttga

SEQ ID NO: 1670794 - DNA, 25 bp, Homo sapien
ttcagtgtgttcaccgctcactccg

SEQ ID NO: 1670795 - DNA, 25 bp, Homo sapien
gttgatttggcttattaaatctcag

SEQ ID NO: 1670796 - DNA, 25 bp, Homo sapien
tctcagattctgttcagtgtgttca

SEQ ID NO: 1670797 - DNA, 25 bp, Homo sapien
aacacagtgtgccttttgctaccac

SEQ ID NO: 1670798 - DNA, 25 bp, Homo sapien
cacatcctagcaagatacacataca

SEQ ID NO: 1670799 - DNA, 25 bp, Homo sapien
tctgttccaagtggacaggtttatg

SEQ ID NO: 1670800 - DNA, 25 bp, Homo sapien
cattacaggtattgtgtgtgctggt

SEQ ID NO: 1670801 - DNA, 25 bp, Homo sapien
caacctggaaatacacgtgtgagca

SEQ ID NO: 1670802 - DNA, 25 bp, Homo sapien
caaaagccatgggtacagagacgcg

SEQ ID NO: 1670803 - DNA, 25 bp, Homo sapien
cagttgggactaaggacacctgcta

SEQ ID NO: 1670804 - DNA, 25 bp, Homo sapien
gatggtcacgctggacattctcagt

SEQ ID NO: 1670805 - DNA, 25 bp, Homo sapien
tgttcttaaattggaaagggagaca

SEQ ID NO: 1670806 - DNA, 25 bp, Homo sapien
tttcatccatttgttcttaaattgg

SEQ ID NO: 1670807 - DNA, 25 bp, Homo sapien
tcatccatttgttcttaaattggaa

SEQ ID NO: 1670808 - DNA, 25 bp, Homo sapien
atccatttgttcttaaattggaaag

SEQ ID NO: 1670809 - DNA, 25 bp, Homo sapien
caggcaccggaagtgctgcaagcac

SEQ ID NO: 1670810 - DNA, 25 bp, Homo sapien
ccttttgccaggatcccagagagta

SEQ ID NO: 1670811 - DNA, 25 bp, Homo sapien
aattccatccaagtagaagctgtgg

SEQ ID NO: 1670812 - DNA, 25 bp, Homo sapien
tcttgtaccttaagacctgcctgga

SEQ ID NO: 1670813 - DNA, 25 bp, Homo sapien
taacgcactagtacacatgaggacc

SEQ ID NO: 1670814 - DNA, 25 bp, Homo sapien
tgagatacaactactgaaagctatt

SEQ ID NO: 1670815 - DNA, 25 bp, Homo sapien
tgaggaccgatgaaacataaatgac

SEQ ID NO: 1670816 - DNA, 25 bp, Homo sapien
caataagccacatctagaatacagc

SEQ ID NO: 1670817 - DNA, 25 bp, Homo sapien
taaatcaatagttgcctataggcag

SEQ ID NO: 1670818 - DNA, 25 bp, Homo sapien
aaataaatacgtgactatacccagg

SEQ ID NO: 1670819 - DNA, 25 bp, Homo sapien
gaaactgcgttccagggtgtaagca

SEQ ID NO: 1670820 - DNA, 25 bp, Homo sapien
tggtatatccacagaacatcatact

SEQ ID NO: 1670821 - DNA, 25 bp, Homo sapien
cattcttgaggttattcgtggccac

SEQ ID NO: 1670822 - DNA, 25 bp, Homo sapien
cgcacccggctgagattttcttact

SEQ ID NO: 1670823 - DNA, 25 bp, Homo sapien
cgtggccactgtatcagtatggtag

SEQ ID NO: 1670824 - DNA, 25 bp, Homo sapien
tcttacttgagttcccaatgggtcg

SEQ ID NO: 1670825 - DNA, 25 bp, Homo sapien
tgcctgcatagcaatgaccttgagg

SEQ ID NO: 1670826 - DNA, 25 bp, Homo sapien
tgtatcaatggcctagacctccctt

SEQ ID NO: 1670827 - DNA, 25 bp, Homo sapien
tcaatgtcaaccattccacggctgt

SEQ ID NO: 1670828 - DNA, 25 bp, Homo sapien
gaaatgttggctggatcacaaaggc

SEQ ID NO: 1670829 - DNA, 25 bp, Homo sapien
cacctgtggtgctaccctgtggaat

SEQ ID NO: 1670830 - DNA, 25 bp, Homo sapien
gctacacaatgtttgggatctccaa

SEQ ID NO: 1670831 - DNA, 25 bp, Homo sapien
tcaaaggatgtcaagtaactgctgc

SEQ ID NO: 1670832 - DNA, 25 bp, Homo sapien
gatatcaaggcatacaggacctggg

SEQ ID NO: 1670833 - DNA, 25 bp, Homo sapien
caataagaggcagttggttcccaca

SEQ ID NO: 1670834 - DNA, 25 bp, Homo sapien
gaaggctggcaaactctatcaagag

SEQ ID NO: 1670835 - DNA, 25 bp, Homo sapien
tatcaagagtcatgtgagaccaaca

SEQ ID NO: 1670836 - DNA, 25 bp, Homo sapien
cccacagttggtgatttgaaggctg

SEQ ID NO: 1670837 - DNA, 25 bp, Homo sapien
cataaatctgacatgggccctgggc

SEQ ID NO: 1670838 - DNA, 25 bp, Homo sapien
gatataggatgttcaattcaggctg

SEQ ID NO: 1670839 - DNA, 25 bp, Homo sapien
cagggcaaaaggtgcaatgcagttc

SEQ ID NO: 1670840 - DNA, 25 bp, Homo sapien
aggctgatgccaccctcataaggga

SEQ ID NO: 1670841 - DNA, 25 bp, Homo sapien
caaggtgctgcttctgatgatgaac

SEQ ID NO: 1670842 - DNA, 25 bp, Homo sapien
tcacattcatgaggtcgtactgcag

SEQ ID NO: 1670843 - DNA, 25 bp, Homo sapien
actggagctgtagggaaagaacttc

SEQ ID NO: 1670844 - DNA, 25 bp, Homo sapien
caagtgtgtgtttaccgctgaatgc

SEQ ID NO: 1670845 - DNA, 25 bp, Homo sapien
agggaaaccggaagtgagctgtgac

SEQ ID NO: 1670846 - DNA, 25 bp, Homo sapien
tgtcaagaatggtgaagggaaaccg

SEQ ID NO: 1670847 - DNA, 25 bp, Homo sapien
gaagggaaaccggaagtgagctgtg

SEQ ID NO: 1670848 - DNA, 25 bp, Homo sapien
aaatgtcaagaatggtgaagggaaa

SEQ ID NO: 1670849 - DNA, 25 bp, Homo sapien
gctctgatacagcatctggataatg

SEQ ID NO: 1670850 - DNA, 25 bp, Homo sapien
gccaaacagaacaggttgctgctct

SEQ ID NO: 1670851 - DNA, 25 bp, Homo sapien
ggcattggcaccaaaatgctcgcca

SEQ ID NO: 1670852 - DNA, 25 bp, Homo sapien
gatacagcatctggataatgtaagt

SEQ ID NO: 1670853 - DNA, 25 bp, Homo sapien
caggcatctttgagcctcatcaagg

SEQ ID NO: 1670854 - DNA, 25 bp, Homo sapien
ttaaaagagccaagttctccagcat

SEQ ID NO: 1670855 - DNA, 25 bp, Homo sapien
gagaggttaaaagagccaagttctc

SEQ ID NO: 1670856 - DNA, 25 bp, Homo sapien
ctcccaggagaagtgtacggccaca

SEQ ID NO: 1670857 - DNA, 25 bp, Homo sapien
tgaggacgggaagacgccgcactca

SEQ ID NO: 1670858 - DNA, 25 bp, Homo sapien
gggactcgagcaggcgcccctcact

SEQ ID NO: 1670859 - DNA, 25 bp, Homo sapien
ggaaggtgtgtgaggacgggaagac

SEQ ID NO: 1670860 - DNA, 25 bp, Homo sapien
cactgatggctttagaacgtgggtg

SEQ ID NO: 1670861 - DNA, 25 bp, Homo sapien
ctgagttggcgtcctcagagtggcc

SEQ ID NO: 1670862 - DNA, 25 bp, Homo sapien
gagttggcgtcctcagagtggccgc

SEQ ID NO: 1670863 - DNA, 25 bp, Homo sapien
agttggcgtcctcagagtggccgct

SEQ ID NO: 1670864 - DNA, 25 bp, Homo sapien
tgagttggcgtcctcagagtggccg

SEQ ID NO: 1670865 - DNA, 25 bp, Homo sapien
ggtccctatcccaggcctgacgtgg

SEQ ID NO: 1670866 - DNA, 25 bp, Homo sapien
caactcggcgctctgctatctctga

SEQ ID NO: 1670867 - DNA, 25 bp, Homo sapien
ccaaggcttagacgctttcgtgcag

SEQ ID NO: 1670868 - DNA, 25 bp, Homo sapien
tttcgtgcaggagggacgacgactc

SEQ ID NO: 1670869 - DNA, 25 bp, Homo sapien
tgggaactcattaaagctgtgctct

SEQ ID NO: 1670870 - DNA, 25 bp, Homo sapien
gagaaagcagatacatacacatgca

SEQ ID NO: 1670871 - DNA, 25 bp, Homo sapien
tcatgttgtacccttgctatcccag

SEQ ID NO: 1670872 - DNA, 25 bp, Homo sapien
tattagtaagcattagctgtgctct

SEQ ID NO: 1670873 - DNA, 25 bp, Homo sapien
gaaagatctggacccatgaccctca

SEQ ID NO: 1670874 - DNA, 25 bp, Homo sapien
acagaacaggcatcagggctcagaa

SEQ ID NO: 1670875 - DNA, 25 bp, Homo sapien
caggattcttattcacaagtggaca

SEQ ID NO: 1670876 - DNA, 25 bp, Homo sapien
caaactaggtatccagatgtcccca

SEQ ID NO: 1670877 - DNA, 25 bp, Homo sapien
ggtctgcccgtcacaagcatgctgg

SEQ ID NO: 1670878 - DNA, 25 bp, Homo sapien
tcccaatggcgggtaaggttcagcc

SEQ ID NO: 1670879 - DNA, 25 bp, Homo sapien
tgatggttccctcccaatggctgct

SEQ ID NO: 1670880 - DNA, 25 bp, Homo sapien
tttaaaaagtgcaacacagctgctg

SEQ ID NO: 1670881 - DNA, 25 bp, Homo sapien
taagtcaggggcattggcctaagac

SEQ ID NO: 1670882 - DNA, 25 bp, Homo sapien
attggcctaagactttcccccacat

SEQ ID NO: 1670883 - DNA, 25 bp, Homo sapien
ggcattggcctaagactttccccca

SEQ ID NO: 1670884 - DNA, 25 bp, Homo sapien
cccaccatatagtaagtcaggggca

SEQ ID NO: 1670885 - DNA, 25 bp, Homo sapien
ccctctggtgcagaacaagtgtctg

SEQ ID NO: 1670886 - DNA, 25 bp, Homo sapien
ttccggatgaattctctcccgcact

SEQ ID NO: 1670887 - DNA, 25 bp, Homo sapien
tgtctgtttccggatgaattctctc

SEQ ID NO: 1670888 - DNA, 25 bp, Homo sapien
gaacaagtgtctgtttccggatgaa

SEQ ID NO: 1670889 - DNA, 25 bp, Homo sapien
tctggtgctggtcaaagtctgtact

SEQ ID NO: 1670890 - DNA, 25 bp, Homo sapien
tgtgaactcgcctgtgctcaatcag

SEQ ID NO: 1670891 - DNA, 25 bp, Homo sapien
tgatagagtctttcacccgtgtgaa

SEQ ID NO: 1670892 - DNA, 25 bp, Homo sapien
tatgtcacatgggtgagactccagc

SEQ ID NO: 1670893 - DNA, 25 bp, Homo sapien
agtttcatgactgcacgtgatctgg

SEQ ID NO: 1670894 - DNA, 25 bp, Homo sapien
tgaagtcatatccacctggtcatac

SEQ ID NO: 1670895 - DNA, 25 bp, Homo sapien
tcttctcctcgctctagtttcatga

SEQ ID NO: 1670896 - DNA, 25 bp, Homo sapien
ggctgaagtcatatccacctggtca

SEQ ID NO: 1670897 - DNA, 25 bp, Homo sapien
ggaaagtcagaacaggtgagcagcc

SEQ ID NO: 1670898 - DNA, 25 bp, Homo sapien
ctaagggaaagtcagaacaggtgag

SEQ ID NO: 1670899 - DNA, 25 bp, Homo sapien
aagggaaagtcagaacaggtgagca

SEQ ID NO: 1670900 - DNA, 25 bp, Homo sapien
ccagcactggcccatggcaaaccac

SEQ ID NO: 1670901 - DNA, 25 bp, Homo sapien
tatgatggacttcaggtaagaaaaa

SEQ ID NO: 1670902 - DNA, 25 bp, Homo sapien
gatggacttcaggtaagaaaaataa

SEQ ID NO: 1670903 - DNA, 25 bp, Homo sapien
tgatggacttcaggtaagaaaaata

SEQ ID NO: 1670904 - DNA, 25 bp, Homo sapien
ctatgatggacttcaggtaagaaaa

SEQ ID NO: 1670905 - DNA, 25 bp, Homo sapien
ggtacaaaagtctctgagcatcatc

SEQ ID NO: 1670906 - DNA, 25 bp, Homo sapien
gaagtatacaaacacatcctcaaag

SEQ ID NO: 1670907 - DNA, 25 bp, Homo sapien
gaagctcccattcttcccgagagaa

SEQ ID NO: 1670908 - DNA, 25 bp, Homo sapien
tcatggtacaaaagtctctgagcat

SEQ ID NO: 1670909 - DNA, 25 bp, Homo sapien
atcctgctaactaacctcccaggtt

SEQ ID NO: 1670910 - DNA, 25 bp, Homo sapien
tcttgaccaatgatccccagtctac

SEQ ID NO: 1670911 - DNA, 25 bp, Homo sapien
cataaaaagtctcttgaccaatgat

SEQ ID NO: 1670912 - DNA, 25 bp, Homo sapien
ggttcccaagtcagagataccaggc

SEQ ID NO: 1670913 - DNA, 25 bp, Homo sapien
attgctgtgtgtcagggaataggaa

SEQ ID NO: 1670914 - DNA, 25 bp, Homo sapien
tgctgtgtgtcagggaataggaacg

SEQ ID NO: 1670915 - DNA, 25 bp, Homo sapien
ctgatttcaatattgctgtgtgtca

SEQ ID NO: 1670916 - DNA, 25 bp, Homo sapien
gatttcaatattgctgtgtgtcagg

SEQ ID NO: 1670917 - DNA, 25 bp, Homo sapien
agataaatacccatgctcagctgca

SEQ ID NO: 1670918 - DNA, 25 bp, Homo sapien
tctaactaacttaatgcaggcagca

SEQ ID NO: 1670919 - DNA, 25 bp, Homo sapien
tcagctgcatcatgaaaacggaaga

SEQ ID NO: 1670920 - DNA, 25 bp, Homo sapien
gacagcattctggacaaacacaaag

SEQ ID NO: 1670921 - DNA, 25 bp, Homo sapien
tagaggttgcaataagccactgcat

SEQ ID NO: 1670922 - DNA, 25 bp, Homo sapien
gaggttgcaataagccactgcatcc

SEQ ID NO: 1670923 - DNA, 25 bp, Homo sapien
gttgcaataagccactgcatcccac

SEQ ID NO: 1670924 - DNA, 25 bp, Homo sapien
ggtagaggttgcaataagccactgc

SEQ ID NO: 1670925 - DNA, 25 bp, Homo sapien
agagtgcgtcgctgtcctgggacac

SEQ ID NO: 1670926 - DNA, 25 bp, Homo sapien
gggctgcaggcactttacgattcgg

SEQ ID NO: 1670927 - DNA, 25 bp, Homo sapien
cactttacgattcggagtcggagaa

SEQ ID NO: 1670928 - DNA, 25 bp, Homo sapien
acacccacccacaccgagataggac

SEQ ID NO: 1670929 - DNA, 25 bp, Homo sapien
gttagctccgccataggaccgtggg

SEQ ID NO: 1670930 - DNA, 25 bp, Homo sapien
ctgcagagcatcagacgcgtctcgg

SEQ ID NO: 1670931 - DNA, 25 bp, Homo sapien
tctcgatcggggacgcaggcacttc

SEQ ID NO: 1670932 - DNA, 25 bp, Homo sapien
gtgggcgcggacagctgccgggagc

SEQ ID NO: 1670933 - DNA, 25 bp, Homo sapien
tcctccgcgctttcccaacacctcc

SEQ ID NO: 1670934 - DNA, 25 bp, Homo sapien
ctccgcgctttcccaacacctccac

SEQ ID NO: 1670935 - DNA, 25 bp, Homo sapien
cctccgcgctttcccaacacctcca

SEQ ID NO: 1670936 - DNA, 25 bp, Homo sapien
ctcctccgcgctttcccaacacctc

SEQ ID NO: 1670937 - DNA, 25 bp, Homo sapien
cacaagcgttacagaaccccggcca

SEQ ID NO: 1670938 - DNA, 25 bp, Homo sapien
acaagcgttacagaaccccggccag

SEQ ID NO: 1670939 - DNA, 25 bp, Homo sapien
cacacaagcgttacagaaccccggc

SEQ ID NO: 1670940 - DNA, 25 bp, Homo sapien
cccacacaagcgttacagaaccccg

SEQ ID NO: 1670941 - DNA, 25 bp, Homo sapien
tcttgggcaccttatgtaaacttac

SEQ ID NO: 1670942 - DNA, 25 bp, Homo sapien
cctattatgggcctttcagatgcta

SEQ ID NO: 1670943 - DNA, 25 bp, Homo sapien
gatagacaatgatgaaaggtacagg

SEQ ID NO: 1670944 - DNA, 25 bp, Homo sapien
tgcaaaattgagctatagtcagtct

SEQ ID NO: 1670945 - DNA, 25 bp, Homo sapien
ttctctaggtaaggcactcacactc

SEQ ID NO: 1670946 - DNA, 25 bp, Homo sapien
catgacgtgatgctggagaacctga

SEQ ID NO: 1670947 - DNA, 25 bp, Homo sapien
gagcctgggcacaggttcctctgtt

SEQ ID NO: 1670948 - DNA, 25 bp, Homo sapien
cagagatgcctttatcatgacgtga

SEQ ID NO: 1670949 - DNA, 25 bp, Homo sapien
ggagagagcccttatgaggacacca

SEQ ID NO: 1670950 - DNA, 25 bp, Homo sapien
gaatgtcatatgtccagtagctgca

SEQ ID NO: 1670951 - DNA, 25 bp, Homo sapien
tctgccctgcaagttcacactagag

SEQ ID NO: 1670952 - DNA, 25 bp, Homo sapien
tgcagagcatttgcgagggcttcac

SEQ ID NO: 1670953 - DNA, 25 bp, Homo sapien
tccgccctgcgaaatggtaacgtgg

SEQ ID NO: 1670954 - DNA, 25 bp, Homo sapien
taaagtcaagccaggacttccggcg

SEQ ID NO: 1670955 - DNA, 25 bp, Homo sapien
gcctcttctaagatgggagaccctc

SEQ ID NO: 1670956 - DNA, 25 bp, Homo sapien
gcatctggacctggagtcgccattt

SEQ ID NO: 1670957 - DNA, 25 bp, Homo sapien
ccattaaattgctagagccagtcac

SEQ ID NO: 1670958 - DNA, 25 bp, Homo sapien
gtttggctatttggaagctccccag

SEQ ID NO: 1670959 - DNA, 25 bp, Homo sapien
gggaagcgacccagagcttttatga

SEQ ID NO: 1670960 - DNA, 25 bp, Homo sapien
ccctgaccggtctccattctgaagt

SEQ ID NO: 1670961 - DNA, 25 bp, Homo sapien
tatgctgcgtctgtacctctttgtc

SEQ ID NO: 1670962 - DNA, 25 bp, Homo sapien
ggaccatccacctatgctgcgtctg

SEQ ID NO: 1670963 - DNA, 25 bp, Homo sapien
attttggcttgtcgggaccatccac

SEQ ID NO: 1670964 - DNA, 25 bp, Homo sapien
ctctttgtcaggaccgagagcgcgc

SEQ ID NO: 1670965 - DNA, 25 bp, Homo sapien
tcaaaggaagaacggagtgtaaggc

SEQ ID NO: 1670966 - DNA, 25 bp, Homo sapien
gtaccaggctgaggattgatctttg

SEQ ID NO: 1670967 - DNA, 25 bp, Homo sapien
tttccgacaccggttgatgcggtcg

SEQ ID NO: 1670968 - DNA, 25 bp, Homo sapien
gatctttgtgaggaccgtagaagcc

SEQ ID NO: 1670969 - DNA, 25 bp, Homo sapien
ctgccagtcacaaatcagacagcct

SEQ ID NO: 1670970 - DNA, 25 bp, Homo sapien
tgcagtgagctcaggtaatgccacc

SEQ ID NO: 1670971 - DNA, 25 bp, Homo sapien
ccctcacagcattcttaagatagaa

SEQ ID NO: 1670972 - DNA, 25 bp, Homo sapien
ttcataggtcaacctgaaagggtgg

SEQ ID NO: 1670973 - DNA, 25 bp, Homo sapien
tactgtcaccagtgtccatgaattc

SEQ ID NO: 1670974 - DNA, 25 bp, Homo sapien
tgttccctttagtgttactgtcacc

SEQ ID NO: 1670975 - DNA, 25 bp, Homo sapien
tatagctttttaggcaacaccaaag

SEQ ID NO: 1670976 - DNA, 25 bp, Homo sapien
tgcatccagcaaatgtatagctttt

SEQ ID NO: 1670977 - DNA, 25 bp, Homo sapien
cagccaagagggcagtagtttgatc

SEQ ID NO: 1670978 - DNA, 25 bp, Homo sapien
agccaagagggcagtagtttgatca

SEQ ID NO: 1670979 - DNA, 25 bp, Homo sapien
ccagccaagagggcagtagtttgat

SEQ ID NO: 1670980 - DNA, 25 bp, Homo sapien
cccagccaagagggcagtagtttga

SEQ ID NO: 1670981 - DNA, 25 bp, Homo sapien
ctctacctgtattactctacctggg

SEQ ID NO: 1670982 - DNA, 25 bp, Homo sapien
tgttcatggctcagatgcacctcca

SEQ ID NO: 1670983 - DNA, 25 bp, Homo sapien
caagcctttgcacctattggttcct

SEQ ID NO: 1670984 - DNA, 25 bp, Homo sapien
tatgtgatcatgacacaacatggtt

SEQ ID NO: 1670985 - DNA, 25 bp, Homo sapien
gagctaggtccctcagtgtggctgc

SEQ ID NO: 1670986 - DNA, 25 bp, Homo sapien
ctgagctaggtccctcagtgtggct

SEQ ID NO: 1670987 - DNA, 25 bp, Homo sapien
tgagctaggtccctcagtgtggctg

SEQ ID NO: 1670988 - DNA, 25 bp, Homo sapien
gagcaaaccgaatgcagaccatgtt

SEQ ID NO: 1670989 - DNA, 25 bp, Homo sapien
cagaaatccctcatcctgggccttg

SEQ ID NO: 1670990 - DNA, 25 bp, Homo sapien
gaccatgttacactctgagggctgc

SEQ ID NO: 1670991 - DNA, 25 bp, Homo sapien
gagctctcagccaacaatggtggta

SEQ ID NO: 1670992 - DNA, 25 bp, Homo sapien
gattctggcctactgtgcgtacaag

SEQ ID NO: 1670993 - DNA, 25 bp, Homo sapien
tcctgacctgagacgcacaaagtaa

SEQ ID NO: 1670994 - DNA, 25 bp, Homo sapien
gcattcagcattcagcattcagagg

SEQ ID NO: 1670995 - DNA, 25 bp, Homo sapien
caaagtcttggaaaggcttgagctc

SEQ ID NO: 1670996 - DNA, 25 bp, Homo sapien
agctgtgtggacggcagtctcaggg

SEQ ID NO: 1670997 - DNA, 25 bp, Homo sapien
tctttaacttagtagggcttgatcc

SEQ ID NO: 1670998 - DNA, 25 bp, Homo sapien
ttctttaacttagtagggcttgatc

SEQ ID NO: 1670999 - DNA, 25 bp, Homo sapien
taggcgtcatggtgtcacctcctgc

SEQ ID NO: 1671000 - DNA, 25 bp, Homo sapien
tattctggggccttaggcgtcatgg

SEQ ID NO: 1671001 - DNA, 25 bp, Homo sapien
agccctgccccttcttaatgtcttg

SEQ ID NO: 1671002 - DNA, 25 bp, Homo sapien
ccttcttaatgtcttggccttcttg

SEQ ID NO: 1671003 - DNA, 25 bp, Homo sapien
cagtcactagcctagaggcttggca

SEQ ID NO: 1671004 - DNA, 25 bp, Homo sapien
gagagggacttaacctttggcctgc

SEQ ID NO: 1671005 - DNA, 25 bp, Homo sapien
gcagatatgcctgccgcaaattgca

SEQ ID NO: 1671006 - DNA, 25 bp, Homo sapien
ttgcaagaattacgccttttcacct

SEQ ID NO: 1671007 - DNA, 25 bp, Homo sapien
aggagtggagctactgtttctttcc

SEQ ID NO: 1671008 - DNA, 25 bp, Homo sapien
ctggctgtttggctctgcgcttgct

SEQ ID NO: 1671009 - DNA, 25 bp, Homo sapien
tgcctggctgtttggctctgcgctt

SEQ ID NO: 1671010 - DNA, 25 bp, Homo sapien
tcctttgtctttgccagccacctat

SEQ ID NO: 1671011 - DNA, 25 bp, Homo sapien
ggatttctcacctctaagacatcct

SEQ ID NO: 1671012 - DNA, 25 bp, Homo sapien
gacatcctaaggaatactttaccac

SEQ ID NO: 1671013 - DNA, 25 bp, Homo sapien
aaggaatgctttaccatcccggctt

SEQ ID NO: 1671014 - DNA, 25 bp, Homo sapien
gtctgtgcacagttgtcattccatt

SEQ ID NO: 1671015 - DNA, 25 bp, Homo sapien
aactcaaatatccataaacggatga

SEQ ID NO: 1671016 - DNA, 25 bp, Homo sapien
catggcagactatacttctcagcaa

SEQ ID NO: 1671017 - DNA, 25 bp, Homo sapien
acaaattaactcatgtctacattga

SEQ ID NO: 1671018 - DNA, 25 bp, Homo sapien
atgacatttcatggcagactatact

SEQ ID NO: 1671019 - DNA, 25 bp, Homo sapien
gtattatacagcagagtaaatcaat

SEQ ID NO: 1671020 - DNA, 25 bp, Homo sapien
tggaaagtattatacagcagagtaa

SEQ ID NO: 1671021 - DNA, 25 bp, Homo sapien
aatggaaagtattatacagcagagt

SEQ ID NO: 1671022 - DNA, 25 bp, Homo sapien
aaagtattatacagcagagtaaatc

SEQ ID NO: 1671023 - DNA, 25 bp, Homo sapien
agctctcctgtgagttatgcagcca

SEQ ID NO: 1671024 - DNA, 25 bp, Homo sapien
gctctcctgtgagttatgcagccag

SEQ ID NO: 1671025 - DNA, 25 bp, Homo sapien
cagctctcctgtgagttatgcagcc

SEQ ID NO: 1671026 - DNA, 25 bp, Homo sapien
gaatacagaggtgtggctacaaaac

SEQ ID NO: 1671027 - DNA, 25 bp, Homo sapien
ttgtcacactagtaaggccttcatt

SEQ ID NO: 1671028 - DNA, 25 bp, Homo sapien
caatatccaaggagagcagaccttt

SEQ ID NO: 1671029 - DNA, 25 bp, Homo sapien
gtaaggactcttctctagtgtgaac

SEQ ID NO: 1671030 - DNA, 25 bp, Homo sapien
tatttaatgagactggactcactgc

SEQ ID NO: 1671031 - DNA, 25 bp, Homo sapien
attctccaatatttaatgagactgg

SEQ ID NO: 1671032 - DNA, 25 bp, Homo sapien
tcaggtgtgtattctccaatattta

SEQ ID NO: 1671033 - DNA, 25 bp, Homo sapien
tttaatgagactggactcactgcac

SEQ ID NO: 1671034 - DNA, 25 bp, Homo sapien
gatgacgaagtgaagagatttgcct

SEQ ID NO: 1671035 - DNA, 25 bp, Homo sapien
tctgtagggagcagtctctcgtgct

SEQ ID NO: 1671036 - DNA, 25 bp, Homo sapien
cacatatcccacacgtataaggttt

SEQ ID NO: 1671037 - DNA, 25 bp, Homo sapien
ctctcttatgaacacggaatgtaga

SEQ ID NO: 1671038 - DNA, 25 bp, Homo sapien
ggtctacaatccctgcatctgcaaa

SEQ ID NO: 1671039 - DNA, 25 bp, Homo sapien
tgcatgttaactctggtgggaaggc

SEQ ID NO: 1671040 - DNA, 25 bp, Homo sapien
tagagagggatttgtccaggccaag

SEQ ID NO: 1671041 - DNA, 25 bp, Homo sapien
tatgctaatactggaaaccactgca

SEQ ID NO: 1671042 - DNA, 25 bp, Homo sapien
gagccagatcgcaccattgcgctcc

SEQ ID NO: 1671043 - DNA, 25 bp, Homo sapien
agcctggacaacaagagcgaaactc

SEQ ID NO: 1671044 - DNA, 25 bp, Homo sapien
caacaagagcgaaactccatctcaa

SEQ ID NO: 1671045 - DNA, 25 bp, Homo sapien
tgagccagatcgcaccattgcgctc

SEQ ID NO: 1671046 - DNA, 25 bp, Homo sapien
gcctcactaaggagattccattcct

SEQ ID NO: 1671047 - DNA, 25 bp, Homo sapien
agcctcactaaggagattccattcc

SEQ ID NO: 1671048 - DNA, 25 bp, Homo sapien
ctcactaaggagattccattcctcc

SEQ ID NO: 1671049 - DNA, 25 bp, Homo sapien
gagcctcactaaggagattccattc

SEQ ID NO: 1671050 - DNA, 25 bp, Homo sapien
ggtcaggctggtctctacctccgga

SEQ ID NO: 1671051 - DNA, 25 bp, Homo sapien
caagcgagtctgctgcctcagtttc

SEQ ID NO: 1671052 - DNA, 25 bp, Homo sapien
tagagacagggtttctccatggttg

SEQ ID NO: 1671053 - DNA, 25 bp, Homo sapien
agacagggtttctccatggttggtc

SEQ ID NO: 1671054 - DNA, 25 bp, Homo sapien
gaacgcttttgtgtccacggagcca

SEQ ID NO: 1671055 - DNA, 25 bp, Homo sapien
taggatctggtaagctcaggcctcc

SEQ ID NO: 1671056 - DNA, 25 bp, Homo sapien
ggttgttccctacaggcgcctgtgg

SEQ ID NO: 1671057 - DNA, 25 bp, Homo sapien
ggattcaatctcaaagggccccaac

SEQ ID NO: 1671058 - DNA, 25 bp, Homo sapien
gcatcccacgggtgtctgaaacagg

SEQ ID NO: 1671059 - DNA, 25 bp, Homo sapien
ctcgctgctttaggacttgtgtgac

SEQ ID NO: 1671060 - DNA, 25 bp, Homo sapien
tgcagagccgtaaacaggtgccgct

SEQ ID NO: 1671061 - DNA, 25 bp, Homo sapien
ctgaaacagggatccctcccgagag

SEQ ID NO: 1671062 - DNA, 25 bp, Homo sapien
ggaaccttagcgcggccgccgccat

SEQ ID NO: 1671063 - DNA, 25 bp, Homo sapien
gggaaccttagcgcggccgccgcca

SEQ ID NO: 1671064 - DNA, 25 bp, Homo sapien
cagcgggcgccgttaaagagctgca

SEQ ID NO: 1671065 - DNA, 25 bp, Homo sapien
tgtgcaaagagaagaacgactctcg

SEQ ID NO: 1671066 - DNA, 25 bp, Homo sapien
aatggtcgctactaaagggcgccgg

SEQ ID NO: 1671067 - DNA, 25 bp, Homo sapien
cctaacgccaatggaaatggtcgct

SEQ ID NO: 1671068 - DNA, 25 bp, Homo sapien
ccaaggccgtaaagagagagattcc

SEQ ID NO: 1671069 - DNA, 25 bp, Homo sapien
ttacttgcgcacacggaaacgcctt

SEQ ID NO: 1671070 - DNA, 25 bp, Homo sapien
tggctctgccgtgctgtcatttgac

SEQ ID NO: 1671071 - DNA, 25 bp, Homo sapien
tgctgtcatttgacgcagagctttc

SEQ ID NO: 1671072 - DNA, 25 bp, Homo sapien
agggaagcctcctgacccgcacggt

SEQ ID NO: 1671073 - DNA, 25 bp, Homo sapien
cttcggaaggaaaagcccagctcca

SEQ ID NO: 1671074 - DNA, 25 bp, Homo sapien
ctcagggaagcctcctgacccgcac

SEQ ID NO: 1671075 - DNA, 25 bp, Homo sapien
ggaagcctcctgacccgcacggtgg

SEQ ID NO: 1671076 - DNA, 25 bp, Homo sapien
tgaatgccgtcagagccaatgaggg

SEQ ID NO: 1671077 - DNA, 25 bp, Homo sapien
gatacgcgtgtttgcccagtgagtg

SEQ ID NO: 1671078 - DNA, 25 bp, Homo sapien
aaagctctgcgttgaatgaatgccg

SEQ ID NO: 1671079 - DNA, 25 bp, Homo sapien
ggtcctcttgtagcggccacgttga

SEQ ID NO: 1671080 - DNA, 25 bp, Homo sapien
tacctggcagacagctaggttttct

SEQ ID NO: 1671081 - DNA, 25 bp, Homo sapien
gtacctggcagacagctaggttttc

SEQ ID NO: 1671082 - DNA, 25 bp, Homo sapien
tgagtgatgttattgggcttcctaa

SEQ ID NO: 1671083 - DNA, 25 bp, Homo sapien
cctgagtgatgttattgggcttcct

SEQ ID NO: 1671084 - DNA, 25 bp, Homo sapien
ccctgagtgatgttattgggcttcc

SEQ ID NO: 1671085 - DNA, 25 bp, Homo sapien
agtgatgttattgggcttcctaaac

SEQ ID NO: 1671086 - DNA, 25 bp, Homo sapien
ctgagagggtgtgagtgaccatcat

SEQ ID NO: 1671087 - DNA, 25 bp, Homo sapien
tggattcatgcgcacgcgtctggag

SEQ ID NO: 1671088 - DNA, 25 bp, Homo sapien
gattcatgcgcacgcgtctggaggc

SEQ ID NO: 1671089 - DNA, 25 bp, Homo sapien
catatggattcatgcgcacgcgtct

SEQ ID NO: 1671090 - DNA, 25 bp, Homo sapien
agcttcatatggattcatgcgcacg

SEQ ID NO: 1671091 - DNA, 25 bp, Homo sapien
tgcctcgggaaggtgcactcctctc

SEQ ID NO: 1671092 - DNA, 25 bp, Homo sapien
gcctcgggaaggtgcactcctctcc

SEQ ID NO: 1671093 - DNA, 25 bp, Homo sapien
gcggcggccgatgctgggtgggcgg

SEQ ID NO: 1671094 - DNA, 25 bp, Homo sapien
acagctctggctagacccttggctt

SEQ ID NO: 1671095 - DNA, 25 bp, Homo sapien
gttccacagctctggctagaccctt

SEQ ID NO: 1671096 - DNA, 25 bp, Homo sapien
tgggcgggtagcgcgacgggcggtg

SEQ ID NO: 1671097 - DNA, 25 bp, Homo sapien
ccaggatagggaccgtcatgcccat

SEQ ID NO: 1671098 - DNA, 25 bp, Homo sapien
gcactgcggtgactgaacccagaag

SEQ ID NO: 1671099 - DNA, 25 bp, Homo sapien
cccagaaggcggagaacagttgtcc

SEQ ID NO: 1671100 - DNA, 25 bp, Homo sapien
actctggagctctgtgacggcgcca

SEQ ID NO: 1671101 - DNA, 25 bp, Homo sapien
ccctttatagcagagtgccctgtga

SEQ ID NO: 1671102 - DNA, 25 bp, Homo sapien
catcttaccctttatagcagagtgc

SEQ ID NO: 1671103 - DNA, 25 bp, Homo sapien
caaaacatcttaccctttatagcag

SEQ ID NO: 1671104 - DNA, 25 bp, Homo sapien
ttatagcagagtgccctgtgaaata

SEQ ID NO: 1671105 - DNA, 25 bp, Homo sapien
caaggtagcactactggactccagc

SEQ ID NO: 1671106 - DNA, 25 bp, Homo sapien
tgagccaaggtagcactactggact

SEQ ID NO: 1671107 - DNA, 25 bp, Homo sapien
gccaaggtagcactactggactcca

SEQ ID NO: 1671108 - DNA, 25 bp, Homo sapien
agtgagccaaggtagcactactgga

SEQ ID NO: 1671109 - DNA, 25 bp, Homo sapien
aaaactgactgtaatgattcagtct

SEQ ID NO: 1671110 - DNA, 25 bp, Homo sapien
tcagtctacgtgaatttaaagagca

SEQ ID NO: 1671111 - DNA, 25 bp, Homo sapien
attataaacagtccagttatactct

SEQ ID NO: 1671112 - DNA, 25 bp, Homo sapien
gactgtaatgattcagtctacgtga

SEQ ID NO: 1671113 - DNA, 25 bp, Homo sapien
gggaccgcggtgactgaacctagaa

SEQ ID NO: 1671114 - DNA, 25 bp, Homo sapien
tctgctttaaacgacagccggtcag

SEQ ID NO: 1671115 - DNA, 25 bp, Homo sapien
aagtactttacccagaaggcgctag

SEQ ID NO: 1671116 - DNA, 25 bp, Homo sapien
tgcacgtaacgtaaggccgagactt

SEQ ID NO: 1671117 - DNA, 25 bp, Homo sapien
tctgtgtgttgtccgctgatccatc

SEQ ID NO: 1671118 - DNA, 25 bp, Homo sapien
gattaccggtctgtgtgttgtccgc

SEQ ID NO: 1671119 - DNA, 25 bp, Homo sapien
cagaactgattgacccagattaccg

SEQ ID NO: 1671120 - DNA, 25 bp, Homo sapien
agtgctgatcagtctggttggagat

SEQ ID NO: 1671121 - DNA, 25 bp, Homo sapien
gattaacccaggatttgctaccagg

SEQ ID NO: 1671122 - DNA, 25 bp, Homo sapien
tctagcttgtggtgtcctgggactc

SEQ ID NO: 1671123 - DNA, 25 bp, Homo sapien
gcaggtcagacaaccagccttaggg

SEQ ID NO: 1671124 - DNA, 25 bp, Homo sapien
tgcagaagcacttagggaacccaca

SEQ ID NO: 1671125 - DNA, 25 bp, Homo sapien
gaggacatgcttcagattatggtgg

SEQ ID NO: 1671126 - DNA, 25 bp, Homo sapien
gatctcttacttacgtcctcaattg

SEQ ID NO: 1671127 - DNA, 25 bp, Homo sapien
cataacaggacatttaatacagtag

SEQ ID NO: 1671128 - DNA, 25 bp, Homo sapien
tggtaaatcttttcagggggcagaa

SEQ ID NO: 1671129 - DNA, 25 bp, Homo sapien
ggctttaaacggcattaggtggaca

SEQ ID NO: 1671130 - DNA, 25 bp, Homo sapien
caagggaatcatgggccgttatacc

SEQ ID NO: 1671131 - DNA, 25 bp, Homo sapien
taatgtatcctagcctaacagcccg

SEQ ID NO: 1671132 - DNA, 25 bp, Homo sapien
cattcagcctggtgcatatgggcag

SEQ ID NO: 1671133 - DNA, 25 bp, Homo sapien
caagatctgcccgaatcagtgtccc

SEQ ID NO: 1671134 - DNA, 25 bp, Homo sapien
ggacctttttatgtcaggacctcag

SEQ ID NO: 1671135 - DNA, 25 bp, Homo sapien
ggacctcagcatggatacctatttg

SEQ ID NO: 1671136 - DNA, 25 bp, Homo sapien
tgatggcatttgaccagcaggccca

SEQ ID NO: 1671137 - DNA, 25 bp, Homo sapien
tgtcaggtgactgtccaaatcggta

SEQ ID NO: 1671138 - DNA, 25 bp, Homo sapien
cagagtcaggagtcttataggcacc

SEQ ID NO: 1671139 - DNA, 25 bp, Homo sapien
tacatagaccatagaccatagactc

SEQ ID NO: 1671140 - DNA, 25 bp, Homo sapien
caaatcggtagctcttgtgtgccca

SEQ ID NO: 1671141 - DNA, 25 bp, Homo sapien
gctcatcacgataggctcaaaggga

SEQ ID NO: 1671142 - DNA, 25 bp, Homo sapien
catcgtcgggtcctatgtactgggt

SEQ ID NO: 1671143 - DNA, 25 bp, Homo sapien
caagatgtggttcaattcaggctca

SEQ ID NO: 1671144 - DNA, 25 bp, Homo sapien
ggagagtcctccatgtttgacaaga

SEQ ID NO: 1671145 - DNA, 25 bp, Homo sapien
tctgcccgcctcggccttgcaaagt

SEQ ID NO: 1671146 - DNA, 25 bp, Homo sapien
ctgcccgcctcggccttgcaaagtg

SEQ ID NO: 1671147 - DNA, 25 bp, Homo sapien
gatacagggtttcactatattagcc

SEQ ID NO: 1671148 - DNA, 25 bp, Homo sapien
tagatacagggtttcactatattag

SEQ ID NO: 1671149 - DNA, 25 bp, Homo sapien
taaagaaacgtaagctcagggtgtc

SEQ ID NO: 1671150 - DNA, 25 bp, Homo sapien
ggaggtactttgcacttgaccagca

SEQ ID NO: 1671151 - DNA, 25 bp, Homo sapien
cagggtgtcacaggagccatttgtc

SEQ ID NO: 1671152 - DNA, 25 bp, Homo sapien
caggtgtttctcctaagaaggctca

SEQ ID NO: 1671153 - DNA, 25 bp, Homo sapien
ttcagtaatcatcagcgagatcaca

SEQ ID NO: 1671154 - DNA, 25 bp, Homo sapien
gatggatgttatgtgtgcagtgatt

SEQ ID NO: 1671155 - DNA, 25 bp, Homo sapien
aaatcctttagcagatatgtcagct

SEQ ID NO: 1671156 - DNA, 25 bp, Homo sapien
ttccacaccagaaacttttcactag

SEQ ID NO: 1671157 - DNA, 25 bp, Homo sapien
caacatcagcaaggtcacactggag

SEQ ID NO: 1671158 - DNA, 25 bp, Homo sapien
agaagggcagccttattagccatca

SEQ ID NO: 1671159 - DNA, 25 bp, Homo sapien
cattcaacatcagcaaggtcacact

SEQ ID NO: 1671160 - DNA, 25 bp, Homo sapien
tattagccatcagcttgttcacact

SEQ ID NO: 1671161 - DNA, 25 bp, Homo sapien
aatgaaactgctatatttgaatgca

SEQ ID NO: 1671162 - DNA, 25 bp, Homo sapien
agaatgacatgcttcttgtttttgt

SEQ ID NO: 1671163 - DNA, 25 bp, Homo sapien
aatgacatgcttcttgtttttgtct

SEQ ID NO: 1671164 - DNA, 25 bp, Homo sapien
gacaaggtggttcattggaggccag

SEQ ID NO: 1671165 - DNA, 25 bp, Homo sapien
aatacatatagattgccaggcagtg

SEQ ID NO: 1671166 - DNA, 25 bp, Homo sapien
caagaactatgagctggttatccac

SEQ ID NO: 1671167 - DNA, 25 bp, Homo sapien
cactgtacctggctgaatacttggt

SEQ ID NO: 1671168 - DNA, 25 bp, Homo sapien
caagttctaggatagccatgagctc

SEQ ID NO: 1671169 - DNA, 25 bp, Homo sapien
atgggctttcactacgttagccagg

SEQ ID NO: 1671170 - DNA, 25 bp, Homo sapien
tgggctttcactacgttagccaggc

SEQ ID NO: 1671171 - DNA, 25 bp, Homo sapien
ttatgaccacacacactgaagagta

SEQ ID NO: 1671172 - DNA, 25 bp, Homo sapien
tataggcacctaaaggcatggcact

SEQ ID NO: 1671173 - DNA, 25 bp, Homo sapien
accgcactcggcttatccctagaaa

SEQ ID NO: 1671174 - DNA, 25 bp, Homo sapien
gatgttaacagtctcagcccctaaa

SEQ ID NO: 1671175 - DNA, 25 bp, Homo sapien
aattaaagagccttcctggaaaatg

SEQ ID NO: 1671176 - DNA, 25 bp, Homo sapien
tgtaatcagggggaattaaagagcc

SEQ ID NO: 1671177 - DNA, 25 bp, Homo sapien
ttgtaatcagggggaattaaagagc

SEQ ID NO: 1671178 - DNA, 25 bp, Homo sapien
agcaaaagtttcagtactaagcaat

SEQ ID NO: 1671179 - DNA, 25 bp, Homo sapien
taaactacagtttatataagcaaaa

SEQ ID NO: 1671180 - DNA, 25 bp, Homo sapien
gggccctgtagccaaaaggctacag

SEQ ID NO: 1671181 - DNA, 25 bp, Homo sapien
tgcctggggccctgtagccaaaagg

SEQ ID NO: 1671182 - DNA, 25 bp, Homo sapien
agccactgttagtgtcgccaccgcc

SEQ ID NO: 1671183 - DNA, 25 bp, Homo sapien
gccaccgcccataaaggagctgagc

SEQ ID NO: 1671184 - DNA, 25 bp, Homo sapien
gcaagggtcaggcgcagtggctcac

SEQ ID NO: 1671185 - DNA, 25 bp, Homo sapien
tgcaagggtcaggcgcagtggctca

SEQ ID NO: 1671186 - DNA, 25 bp, Homo sapien
ctgcaagggtcaggcgcagtggctc

SEQ ID NO: 1671187 - DNA, 25 bp, Homo sapien
aagggtcaggcgcagtggctcacac

SEQ ID NO: 1671188 - DNA, 25 bp, Homo sapien
cctgacgtagagagtccaaggcctg

SEQ ID NO: 1671189 - DNA, 25 bp, Homo sapien
ggatggatcacctgacgtagagagt

SEQ ID NO: 1671190 - DNA, 25 bp, Homo sapien
tggatcacctgacgtagagagtcca

SEQ ID NO: 1671191 - DNA, 25 bp, Homo sapien
tcacctgacgtagagagtccaaggc

SEQ ID NO: 1671192 - DNA, 25 bp, Homo sapien
gaaagtactctactgtacagcaaag

SEQ ID NO: 1671193 - DNA, 25 bp, Homo sapien
aatatgcatagcttactgaatgtca

SEQ ID NO: 1671194 - DNA, 25 bp, Homo sapien
caaagtaaatcattggttgtctgga

SEQ ID NO: 1671195 - DNA, 25 bp, Homo sapien
ttacatcactcatctaacattccag

SEQ ID NO: 1671196 - DNA, 25 bp, Homo sapien
catgcattacgctgcacgtggtggc

SEQ ID NO: 1671197 - DNA, 25 bp, Homo sapien
ggtttggcaactctatactgactac

SEQ ID NO: 1671198 - DNA, 25 bp, Homo sapien
catcatatacgtagtgactggatca

SEQ ID NO: 1671199 - DNA, 25 bp, Homo sapien
gcctccacggtagcaaatattgatg

SEQ ID NO: 1671200 - DNA, 25 bp, Homo sapien
aaaatgccctgtatccagctgacct

SEQ ID NO: 1671201 - DNA, 25 bp, Homo sapien
tgggcaacagacttccctcagccgt

SEQ ID NO: 1671202 - DNA, 25 bp, Homo sapien
tacagaattctggatatcagggcat

SEQ ID NO: 1671203 - DNA, 25 bp, Homo sapien
tatccgtgctacagataaagaccac

SEQ ID NO: 1671204 - DNA, 25 bp, Homo sapien
tctgcagtgggaagtctcctgtgtg

SEQ ID NO: 1671205 - DNA, 25 bp, Homo sapien
ttgaggctccaataaaaaggctgaa

SEQ ID NO: 1671206 - DNA, 25 bp, Homo sapien
tctcatgtcaatgtttgaggctcca

SEQ ID NO: 1671207 - DNA, 25 bp, Homo sapien
catatacatctatggtgtttttctc

SEQ ID NO: 1671208 - DNA, 25 bp, Homo sapien
tgaattcgcttatgaacacagaatg

SEQ ID NO: 1671209 - DNA, 25 bp, Homo sapien
ttcgcttatgaacacagaatgtaga

SEQ ID NO: 1671210 - DNA, 25 bp, Homo sapien
gatgtgcaatgagttggtacttgtt

SEQ ID NO: 1671211 - DNA, 25 bp, Homo sapien
gaattcgcttatgaacacagaatgt

SEQ ID NO: 1671212 - DNA, 25 bp, Homo sapien
gcgtgaactcgttgatggctcctaa

SEQ ID NO: 1671213 - DNA, 25 bp, Homo sapien
taaggtgcccgattgaactaaaaga

SEQ ID NO: 1671214 - DNA, 25 bp, Homo sapien
tatgaacgcgctgatggctcctaag

SEQ ID NO: 1671215 - DNA, 25 bp, Homo sapien
tgaactcgctggtgtagaacgaggt

SEQ ID NO: 1671216 - DNA, 25 bp, Homo sapien
ctcacaggggtgggccttcttggga

SEQ ID NO: 1671217 - DNA, 25 bp, Homo sapien
tcacaggggtgggccttcttgggag

SEQ ID NO: 1671218 - DNA, 25 bp, Homo sapien
ccttcttgggagacacacctgccat

SEQ ID NO: 1671219 - DNA, 25 bp, Homo sapien
ggtgggccttcttgggagacacacc

SEQ ID NO: 1671220 - DNA, 25 bp, Homo sapien
tactctgcttagaaggtgccgcctc

SEQ ID NO: 1671221 - DNA, 25 bp, Homo sapien
tgtatataaatactctgcttagaag

SEQ ID NO: 1671222 - DNA, 25 bp, Homo sapien
tataaatactctgcttagaaggtgc

SEQ ID NO: 1671223 - DNA, 25 bp, Homo sapien
aggtgccgcctcatcttccactcca

SEQ ID NO: 1671224 - DNA, 25 bp, Homo sapien
gcctcactaaggagattccattcct

SEQ ID NO: 1671225 - DNA, 25 bp, Homo sapien
agcctcactaaggagattccattcc

SEQ ID NO: 1671226 - DNA, 25 bp, Homo sapien
gagcctcactaaggagattccattc

SEQ ID NO: 1671227 - DNA, 25 bp, Homo sapien
attatgaagtgtgccctccaaaatg

SEQ ID NO: 1671228 - DNA, 25 bp, Homo sapien
gaagtgtgccctccaaaatgggacc

SEQ ID NO: 1671229 - DNA, 25 bp, Homo sapien
atgaagtgtgccctccaaaatggga

SEQ ID NO: 1671230 - DNA, 25 bp, Homo sapien
gtgtgccctccaaaatgggacccat

SEQ ID NO: 1671231 - DNA, 25 bp, Homo sapien
gaagagctcttagcccttaatggaa

SEQ ID NO: 1671232 - DNA, 25 bp, Homo sapien
tagtctgacagcactccctgtgggc

SEQ ID NO: 1671233 - DNA, 25 bp, Homo sapien
ccctggctcatggatggcatctgta

SEQ ID NO: 1671234 - DNA, 25 bp, Homo sapien
tctgtataccaacctgaggcctggg

SEQ ID NO: 1671235 - DNA, 25 bp, Homo sapien
atcaaaatatctcctgtaggcggag

SEQ ID NO: 1671236 - DNA, 25 bp, Homo sapien
tcaaaatatctcctgtaggcggagg

SEQ ID NO: 1671237 - DNA, 25 bp, Homo sapien
caaaatatctcctgtaggcggaggt

SEQ ID NO: 1671238 - DNA, 25 bp, Homo sapien
gagccgtgaacaggcgctgctacct

SEQ ID NO: 1671239 - DNA, 25 bp, Homo sapien
tcagtgtcccaacgccggcgtccgg

SEQ ID NO: 1671240 - DNA, 25 bp, Homo sapien
cctcgctgcttttgggtgacgatga

SEQ ID NO: 1671241 - DNA, 25 bp, Homo sapien
gggcccctcccgcaagcgcctcagt

SEQ ID NO: 1671242 - DNA, 25 bp, Homo sapien
agcgtagccgcggcagccatcgaac

SEQ ID NO: 1671243 - DNA, 25 bp, Homo sapien
gaaccacgtggttttaagcagagtc

SEQ ID NO: 1671244 - DNA, 25 bp, Homo sapien
tgagcggagagcctcagcgtagccg

SEQ ID NO: 1671245 - DNA, 25 bp, Homo sapien
cacgtggttttaagcagagtcggga

SEQ ID NO: 1671246 - DNA, 25 bp, Homo sapien
gccgtcacagagctccagagtagcc

SEQ ID NO: 1671247 - DNA, 25 bp, Homo sapien
tctgggttcagtcaccacagtgcgg

SEQ ID NO: 1671248 - DNA, 25 bp, Homo sapien
acagtgcggacctagcgctcaggag

SEQ ID NO: 1671249 - DNA, 25 bp, Homo sapien
tgtgcagcggaggacaactgctccc

SEQ ID NO: 1671250 - DNA, 25 bp, Homo sapien
caacaccaatcaaaatggccgccac

SEQ ID NO: 1671251 - DNA, 25 bp, Homo sapien
accaatcaaaatggccgccaccaga

SEQ ID NO: 1671252 - DNA, 25 bp, Homo sapien
acaccaatcaaaatggccgccacca

SEQ ID NO: 1671253 - DNA, 25 bp, Homo sapien
ccaacaccaatcaaaatggccgcca

SEQ ID NO: 1671254 - DNA, 25 bp, Homo sapien
tgtagttccctaggcaacaaggagg

SEQ ID NO: 1671255 - DNA, 25 bp, Homo sapien
tccttaagatgtgcgtcctgactgg

SEQ ID NO: 1671256 - DNA, 25 bp, Homo sapien
tctacgctatcattcgaggctgagt

SEQ ID NO: 1671257 - DNA, 25 bp, Homo sapien
taaagggcgcaattcccagaggcgc

SEQ ID NO: 1671258 - DNA, 25 bp, Homo sapien
ggcctcagaaaaagatacggcttat

SEQ ID NO: 1671259 - DNA, 25 bp, Homo sapien
gacattcccctttctatattactca

SEQ ID NO: 1671260 - DNA, 25 bp, Homo sapien
gcagcttttgccgatgcacaaacgt

SEQ ID NO: 1671261 - DNA, 25 bp, Homo sapien
aaagggcggatgcactggtttctgc

SEQ ID NO: 1671262 - DNA, 25 bp, Homo sapien
gctttgcagttatgggaatcccaga

SEQ ID NO: 1671263 - DNA, 25 bp, Homo sapien
aatggcccagagtattgcagcaaag

SEQ ID NO: 1671264 - DNA, 25 bp, Homo sapien
acttttctgccggtgaagtcctgca

SEQ ID NO: 1671265 - DNA, 25 bp, Homo sapien
catctgtcagatggacataacacac

SEQ ID NO: 1671266 - DNA, 25 bp, Homo sapien
cagggacaagagatagttgaaagag

SEQ ID NO: 1671267 - DNA, 25 bp, Homo sapien
actacaagtattccatataactcac

SEQ ID NO: 1671268 - DNA, 25 bp, Homo sapien
taactcacagggacaagagatagtt

SEQ ID NO: 1671269 - DNA, 25 bp, Homo sapien
tgaaagagctcattgttaacttaaa

SEQ ID NO: 1671270 - DNA, 25 bp, Homo sapien
caagatatacagtggagggatgcac

SEQ ID NO: 1671271 - DNA, 25 bp, Homo sapien
acaattacacctcgctttattaaca

SEQ ID NO: 1671272 - DNA, 25 bp, Homo sapien
ccctatacgagtgatggcatgaatg

SEQ ID NO: 1671273 - DNA, 25 bp, Homo sapien
aaatttacaaaaggatcagcccatg

SEQ ID NO: 1671274 - DNA, 25 bp, Homo sapien
ccaacatggggacaaatcaggaaac

SEQ ID NO: 1671275 - DNA, 25 bp, Homo sapien
caggcagaccctccaacatggggac

SEQ ID NO: 1671276 - DNA, 25 bp, Homo sapien
gcagaccctccaacatggggacaaa

SEQ ID NO: 1671277 - DNA, 25 bp, Homo sapien
accctccaacatggggacaaatcag

SEQ ID NO: 1671278 - DNA, 25 bp, Homo sapien
cacaagtatggttggcagtaatccc

SEQ ID NO: 1671279 - DNA, 25 bp, Homo sapien
gatattttcagcgaggcagccaatg

SEQ ID NO: 1671280 - DNA, 25 bp, Homo sapien
ttaatctacagatgcggaagccgct

SEQ ID NO: 1671281 - DNA, 25 bp, Homo sapien
tacacggtacattcagacggaagct

SEQ ID NO: 1671282 - DNA, 25 bp, Homo sapien
ccctgcctttgaaagcaggtcatgt

SEQ ID NO: 1671283 - DNA, 25 bp, Homo sapien
agcaggtcatgttcactgagatgct

SEQ ID NO: 1671284 - DNA, 25 bp, Homo sapien
tcatgttcactgagatgctggacac

SEQ ID NO: 1671285 - DNA, 25 bp, Homo sapien
ttaagcccctgcctttgaaagcagg

SEQ ID NO: 1671286 - DNA, 25 bp, Homo sapien
gaagcttctttgtggcctggtttat

SEQ ID NO: 1671287 - DNA, 25 bp, Homo sapien
ctgaagcttctttgtggcctggttt

SEQ ID NO: 1671288 - DNA, 25 bp, Homo sapien
cacggattttgtaatctcgtaactt

SEQ ID NO: 1671289 - DNA, 25 bp, Homo sapien
actttcacggattttgtaatctcgt

SEQ ID NO: 1671290 - DNA, 25 bp, Homo sapien
agagacagacacatactcttcaggg

SEQ ID NO: 1671291 - DNA, 25 bp, Homo sapien
catcaaatacacaccgactggctaa

SEQ ID NO: 1671292 - DNA, 25 bp, Homo sapien
ttatagattctttcttgctaagtgt

SEQ ID NO: 1671293 - DNA, 25 bp, Homo sapien
gtatcaatttctatgccactttcag

SEQ ID NO: 1671294 - DNA, 25 bp, Homo sapien
ccttgctggcaagaaactaccattt

SEQ ID NO: 1671295 - DNA, 25 bp, Homo sapien
caacgggtactgagtagaggactcg

SEQ ID NO: 1671296 - DNA, 25 bp, Homo sapien
tagaaagcaagctacggtgacatct

SEQ ID NO: 1671297 - DNA, 25 bp, Homo sapien
tggtgtactcgtaatctcagctcct

SEQ ID NO: 1671298 - DNA, 25 bp, Homo sapien
tatagtcacgcagttcttattacca

SEQ ID NO: 1671299 - DNA, 25 bp, Homo sapien
tagtcacgcagttcttattaccaaa

SEQ ID NO: 1671300 - DNA, 25 bp, Homo sapien
atgagagccaggttctctagcatca

SEQ ID NO: 1671301 - DNA, 25 bp, Homo sapien
gatatgagagccaggttctctagca

SEQ ID NO: 1671302 - DNA, 25 bp, Homo sapien
tgagagccaggttctctagcatcac

SEQ ID NO: 1671303 - DNA, 25 bp, Homo sapien
tatgagagccaggttctctagcatc

SEQ ID NO: 1671304 - DNA, 25 bp, Homo sapien
ggtccccaacatagtgttgaaacta

SEQ ID NO: 1671305 - DNA, 25 bp, Homo sapien
atcagcaataagcagtaagtggaca

SEQ ID NO: 1671306 - DNA, 25 bp, Homo sapien
tggtcaattgccatcagcaataagc

SEQ ID NO: 1671307 - DNA, 25 bp, Homo sapien
ctatgtccactagtgcctttgtctc

SEQ ID NO: 1671308 - DNA, 25 bp, Homo sapien
ctccctcgctggtttaggacctggg

SEQ ID NO: 1671309 - DNA, 25 bp, Homo sapien
taggacctgggtgacgatggggtga

SEQ ID NO: 1671310 - DNA, 25 bp, Homo sapien
gagcaggagccgctccctcgctggt

SEQ ID NO: 1671311 - DNA, 25 bp, Homo sapien
aggacctgggtgacgatggggtgac

SEQ ID NO: 1671312 - DNA, 25 bp, Homo sapien
ggcgcctcggcgcagccgctgccat

SEQ ID NO: 1671313 - DNA, 25 bp, Homo sapien
tgagtcgggcgcctcggcgcagccg

SEQ ID NO: 1671314 - DNA, 25 bp, Homo sapien
ctgagtcgggcgcctcggcgcagcc

SEQ ID NO: 1671315 - DNA, 25 bp, Homo sapien
tcgggcgcctcggcgcagccgctgc

SEQ ID NO: 1671316 - DNA, 25 bp, Homo sapien
cgggagcagtggtcgccgtcacggg

SEQ ID NO: 1671317 - DNA, 25 bp, Homo sapien
gccgcctctgggcaccgaggacgat

SEQ ID NO: 1671318 - DNA, 25 bp, Homo sapien
gggcaccgaggacgattcctctcca

SEQ ID NO: 1671319 - DNA, 25 bp, Homo sapien
cctctgggcaccgaggacgattcct

SEQ ID NO: 1671320 - DNA, 25 bp, Homo sapien
cccagcactcaggggccacaaactg

SEQ ID NO: 1671321 - DNA, 25 bp, Homo sapien
ccagcactcaggggccacaaactgg

SEQ ID NO: 1671322 - DNA, 25 bp, Homo sapien
cagcactcaggggccacaaactggg

SEQ ID NO: 1671323 - DNA, 25 bp, Homo sapien
gaaatgccttctttccgagtgctca

SEQ ID NO: 1671324 - DNA, 25 bp, Homo sapien
taaaaagagcgatacccagagtcca

SEQ ID NO: 1671325 - DNA, 25 bp, Homo sapien
cccactttccatggcgctaaaaaga

SEQ ID NO: 1671326 - DNA, 25 bp, Homo sapien
tcattggctctgaccggctgtcgtt

SEQ ID NO: 1671327 - DNA, 25 bp, Homo sapien
catctgttcatactgggcatttgta

SEQ ID NO: 1671328 - DNA, 25 bp, Homo sapien
ctctccatctgttcatactgggcat

SEQ ID NO: 1671329 - DNA, 25 bp, Homo sapien
tctgttcatactgggcatttgtaaa

SEQ ID NO: 1671330 - DNA, 25 bp, Homo sapien
tccatctgttcatactgggcatttg

SEQ ID NO: 1671331 - DNA, 25 bp, Homo sapien
gcgattctcctaccgggtgtggtgg

SEQ ID NO: 1671332 - DNA, 25 bp, Homo sapien
tattgaggacttagatacagggcag

SEQ ID NO: 1671333 - DNA, 25 bp, Homo sapien
tccgcctagctcaaaacaaagggcc

SEQ ID NO: 1671334 - DNA, 25 bp, Homo sapien
cattcttagggtgtgcttgagttac

SEQ ID NO: 1671335 - DNA, 25 bp, Homo sapien
gagaccaccgtgatcaaaacgcaga

SEQ ID NO: 1671336 - DNA, 25 bp, Homo sapien
tgacgagatgggcttttattaacct

SEQ ID NO: 1671337 - DNA, 25 bp, Homo sapien
ccaagagggagttaccaattcaaca

SEQ ID NO: 1671338 - DNA, 25 bp, Homo sapien
ccacggtggctcttctgtaaggaaa

SEQ ID NO: 1671339 - DNA, 25 bp, Homo sapien
tatttacccatgacttccacggtgg

SEQ ID NO: 1671340 - DNA, 25 bp, Homo sapien
cagcctgggcagacagacggacatt

SEQ ID NO: 1671341 - DNA, 25 bp, Homo sapien
tccagcctgggcagacagacggaca

SEQ ID NO: 1671342 - DNA, 25 bp, Homo sapien
ccagcctgggcagacagacggacat

SEQ ID NO: 1671343 - DNA, 25 bp, Homo sapien
tctggccaacgaaagacaaccaagg

SEQ ID NO: 1671344 - DNA, 25 bp, Homo sapien
taagaaccctctgatcaagaagatg

SEQ ID NO: 1671345 - DNA, 25 bp, Homo sapien
aggcagatggctccgtcataaggca

SEQ ID NO: 1671346 - DNA, 25 bp, Homo sapien
taaggtcctgatccagtaagaaccc

SEQ ID NO: 1671347 - DNA, 25 bp, Homo sapien
cgatgatgttcagttagggtgccct

SEQ ID NO: 1671348 - DNA, 25 bp, Homo sapien
ccgatgtcgaaggagggaacagctt

SEQ ID NO: 1671349 - DNA, 25 bp, Homo sapien
tgatgaacacgaaacccagagctgt

SEQ ID NO: 1671350 - DNA, 25 bp, Homo sapien
caatgaggtgggacttgcccctaaa

SEQ ID NO: 1671351 - DNA, 25 bp, Homo sapien
cactctgaatgaagatagatgactc

SEQ ID NO: 1671352 - DNA, 25 bp, Homo sapien
gctgtaatgagtatctccccactga

SEQ ID NO: 1671353 - DNA, 25 bp, Homo sapien
tcctgcagcagtaatcctgagctgg

SEQ ID NO: 1671354 - DNA, 25 bp, Homo sapien
tccccactgaaagggagactcacac

SEQ ID NO: 1671355 - DNA, 25 bp, Homo sapien
ctcaacactgcttctatagggtttc

SEQ ID NO: 1671356 - DNA, 25 bp, Homo sapien
cctcaacactgcttctatagggttt

SEQ ID NO: 1671357 - DNA, 25 bp, Homo sapien
tcctcaacactgcttctatagggtt

SEQ ID NO: 1671358 - DNA, 25 bp, Homo sapien
tgcggacggtttgaactatcataca

SEQ ID NO: 1671359 - DNA, 25 bp, Homo sapien
ctggtgcggacggtttgaactatca

SEQ ID NO: 1671360 - DNA, 25 bp, Homo sapien
ggtgcggacggtttgaactatcata

SEQ ID NO: 1671361 - DNA, 25 bp, Homo sapien
ggacggtttgaactatcatacaatt

SEQ ID NO: 1671362 - DNA, 25 bp, Homo sapien
caagatcgcgccacacatttcacaa

SEQ ID NO: 1671363 - DNA, 25 bp, Homo sapien
atgctcttcttagaaggtgcctcct

SEQ ID NO: 1671364 - DNA, 25 bp, Homo sapien
tgagacactctttgtatagaaatgc

SEQ ID NO: 1671365 - DNA, 25 bp, Homo sapien
gtatagaaatgctcttcttagaagg

SEQ ID NO: 1671366 - DNA, 25 bp, Homo sapien
ctgagacactctttgtatagaaatg

SEQ ID NO: 1671367 - DNA, 25 bp, Homo sapien
ggatataagtacccagttctccagc

SEQ ID NO: 1671368 - DNA, 25 bp, Homo sapien
aggatataagtacccagttctccag

SEQ ID NO: 1671369 - DNA, 25 bp, Homo sapien
agggaggatataagtacccagttct

SEQ ID NO: 1671370 - DNA, 25 bp, Homo sapien
ggaggatataagtacccagttctcc

SEQ ID NO: 1671371 - DNA, 25 bp, Homo sapien
gtttaaactctgatcctccttcctc

SEQ ID NO: 1671372 - DNA, 25 bp, Homo sapien
tggcaggagtttaaactctgatcct

SEQ ID NO: 1671373 - DNA, 25 bp, Homo sapien
ggagtttaaactctgatcctccttc

SEQ ID NO: 1671374 - DNA, 25 bp, Homo sapien
gcaggagtttaaactctgatcctcc

SEQ ID NO: 1671375 - DNA, 25 bp, Homo sapien
ctgcagacaaatgggactgtggtaa

SEQ ID NO: 1671376 - DNA, 25 bp, Homo sapien
acatcacctcctcgccgccctcttg

SEQ ID NO: 1671377 - DNA, 25 bp, Homo sapien
ctgtggtaacatcacctcctcgccg

SEQ ID NO: 1671378 - DNA, 25 bp, Homo sapien
ggtaacatcacctcctcgccgccct

SEQ ID NO: 1671379 - DNA, 25 bp, Homo sapien
cccgacgccgggtccgggctgcaga

SEQ ID NO: 1671380 - DNA, 25 bp, Homo sapien
tcccgacgccgggtccgggctgcag

SEQ ID NO: 1671381 - DNA, 25 bp, Homo sapien
ccgacgccgggtccgggctgcagac

SEQ ID NO: 1671382 - DNA, 25 bp, Homo sapien
tgtcccgacgccgggtccgggctgc

SEQ ID NO: 1671383 - DNA, 25 bp, Homo sapien
tgtgaacagtcgccgctctctcgct

SEQ ID NO: 1671384 - DNA, 25 bp, Homo sapien
gccgctctctcgctgcttcaggatt

SEQ ID NO: 1671385 - DNA, 25 bp, Homo sapien
gctgcttcaggattcgggttaggat

SEQ ID NO: 1671386 - DNA, 25 bp, Homo sapien
tgcttcaggattcgggttaggatga

SEQ ID NO: 1671387 - DNA, 25 bp, Homo sapien
ctgagggcagggaaggcacaattac

SEQ ID NO: 1671388 - DNA, 25 bp, Homo sapien
tgagccgggagcctcagcgcggccg

SEQ ID NO: 1671389 - DNA, 25 bp, Homo sapien
ggagcctcagcgcggccgccgccat

SEQ ID NO: 1671390 - DNA, 25 bp, Homo sapien
ccgggagcctcagcgcggccgccgc

SEQ ID NO: 1671391 - DNA, 25 bp, Homo sapien
ctgagccgggagcctcagcgcggcc

SEQ ID NO: 1671392 - DNA, 25 bp, Homo sapien
ccttctgggttcagacaccgcggtt

SEQ ID NO: 1671393 - DNA, 25 bp, Homo sapien
gcggttcggacccatagctccagcg

SEQ ID NO: 1671394 - DNA, 25 bp, Homo sapien
cgttacggggcctaagatctgcctc

SEQ ID NO: 1671395 - DNA, 25 bp, Homo sapien
tcacctcacaaaccgcagaaacaca

SEQ ID NO: 1671396 - DNA, 25 bp, Homo sapien
gactggtgcacaaccaatcagaggc

SEQ ID NO: 1671397 - DNA, 25 bp, Homo sapien
gtacactccacagaagtggaatgta

SEQ ID NO: 1671398 - DNA, 25 bp, Homo sapien
gctagaattttataataccccaaga

SEQ ID NO: 1671399 - DNA, 25 bp, Homo sapien
accaagcggctcaagaaccccgatt

SEQ ID NO: 1671400 - DNA, 25 bp, Homo sapien
aaaggtcaatcagtcgttcccatgg

SEQ ID NO: 1671401 - DNA, 25 bp, Homo sapien
gaactaatccagataggaccatgcc

SEQ ID NO: 1671402 - DNA, 25 bp, Homo sapien
ccatgccaaggaagatagaggagag

SEQ ID NO: 1671403 - DNA, 25 bp, Homo sapien
ttgaagtcagtctcaggtaaagaac

SEQ ID NO: 1671404 - DNA, 25 bp, Homo sapien
tgccagttacagaaacttattacca

SEQ ID NO: 1671405 - DNA, 25 bp, Homo sapien
taactgcgatgacagaaataggtca

SEQ ID NO: 1671406 - DNA, 25 bp, Homo sapien
taccaacgactatctaataactgcg

SEQ ID NO: 1671407 - DNA, 25 bp, Homo sapien
catgaggaactaatatgataccaga

SEQ ID NO: 1671408 - DNA, 25 bp, Homo sapien
gaggtatcactctccccgtttagga

SEQ ID NO: 1671409 - DNA, 25 bp, Homo sapien
cactctccccgtttaggataattat

SEQ ID NO: 1671410 - DNA, 25 bp, Homo sapien
gaaaagggaactaatggccaggtgc

SEQ ID NO: 1671411 - DNA, 25 bp, Homo sapien
caaaaccgcaatgaggtatcactct

SEQ ID NO: 1671412 - DNA, 25 bp, Homo sapien
tgagacaaagtagtatgtacacata

SEQ ID NO: 1671413 - DNA, 25 bp, Homo sapien
tgtacacatataaacttatttgtat

SEQ ID NO: 1671414 - DNA, 25 bp, Homo sapien
tatgagacaaagtagtatgtacaca

SEQ ID NO: 1671415 - DNA, 25 bp, Homo sapien
gtacacatataaacttatttgtata

SEQ ID NO: 1671416 - DNA, 25 bp, Homo sapien
cagccctatgtgtgttacctaacct

SEQ ID NO: 1671417 - DNA, 25 bp, Homo sapien
cagtccgtaacagccctatgtgtgt

SEQ ID NO: 1671418 - DNA, 25 bp, Homo sapien
acttctcagtccgtaacagccctat

SEQ ID NO: 1671419 - DNA, 25 bp, Homo sapien
gggacacttctcagtccgtaacagc

SEQ ID NO: 1671420 - DNA, 25 bp, Homo sapien
gcaagtgaagggcttcccagatact

SEQ ID NO: 1671421 - DNA, 25 bp, Homo sapien
tccggtgtttaatgaggtgacagct

SEQ ID NO: 1671422 - DNA, 25 bp, Homo sapien
tcttcggtgtttaacgaggctagag

SEQ ID NO: 1671423 - DNA, 25 bp, Homo sapien
gaattcttcggtgcgtaataaggct

SEQ ID NO: 1671424 - DNA, 25 bp, Homo sapien
tgtaattgtttcctacatgccccgt

SEQ ID NO: 1671425 - DNA, 25 bp, Homo sapien
gaagtgtttctgtccaacatgctgc

SEQ ID NO: 1671426 - DNA, 25 bp, Homo sapien
tacagtttctgaccatggtgtgttc

SEQ ID NO: 1671427 - DNA, 25 bp, Homo sapien
tgttcaaccaagtgcaaaatctgtc

SEQ ID NO: 1671428 - DNA, 25 bp, Homo sapien
gctctgctgataaggtgcctcctca

SEQ ID NO: 1671429 - DNA, 25 bp, Homo sapien
ctgtgacacccgctgtggagaagtg

SEQ ID NO: 1671430 - DNA, 25 bp, Homo sapien
agaagtgctctgctgataaggtgcc

SEQ ID NO: 1671431 - DNA, 25 bp, Homo sapien
acacccgctgtggagaagtgctctg

SEQ ID NO: 1671432 - DNA, 25 bp, Homo sapien
ggcaggcatgaggaagtgtccccta

SEQ ID NO: 1671433 - DNA, 25 bp, Homo sapien
ccctagaggaaggaagtagaacctg

SEQ ID NO: 1671434 - DNA, 25 bp, Homo sapien
tgaggagcctcgaatctggacaatg

SEQ ID NO: 1671435 - DNA, 25 bp, Homo sapien
cagaggaggattttgcaagagccac

SEQ ID NO: 1671436 - DNA, 25 bp, Homo sapien
cagggaggttgtaagtgtcaagttc

SEQ ID NO: 1671437 - DNA, 25 bp, Homo sapien
cacatcgtggtacaggcatttctga

SEQ ID NO: 1671438 - DNA, 25 bp, Homo sapien
ccagggaggttgtaagtgtcaagtt

SEQ ID NO: 1671439 - DNA, 25 bp, Homo sapien
tggggacacatgaaaccacaaacgg

SEQ ID NO: 1671440 - DNA, 25 bp, Homo sapien
cacatgaaaccacaaacggttcctc

SEQ ID NO: 1671441 - DNA, 25 bp, Homo sapien
ggacacatgaaaccacaaacggttc

SEQ ID NO: 1671442 - DNA, 25 bp, Homo sapien
gccaggatggggacacatgaaacca

SEQ ID NO: 1671443 - DNA, 25 bp, Homo sapien
ctgggccggggccgtcagctcggcc

SEQ ID NO: 1671444 - DNA, 25 bp, Homo sapien
gcgccttctcagtcagtcacggatg

SEQ ID NO: 1671445 - DNA, 25 bp, Homo sapien
gagaggatgtccttattccgggccg

SEQ ID NO: 1671446 - DNA, 25 bp, Homo sapien
gctttctaccaagtaatcagtccag

SEQ ID NO: 1671447 - DNA, 25 bp, Homo sapien
cgccacaaggaggacaacggaagtc

SEQ ID NO: 1671448 - DNA, 25 bp, Homo sapien
ggcgggagagtgagggtcgcctcca

SEQ ID NO: 1671449 - DNA, 25 bp, Homo sapien
gggtaatgttcccacaggcgcacgg

SEQ ID NO: 1671450 - DNA, 25 bp, Homo sapien
aggcctcattggctgaaggtcgccg

SEQ ID NO: 1671451 - DNA, 25 bp, Homo sapien
cccaacgcaggccattctgggtaat

SEQ ID NO: 1671452 - DNA, 25 bp, Homo sapien
cacctccttcttggcctgagtgtac

SEQ ID NO: 1671453 - DNA, 25 bp, Homo sapien
tcacctccttcttggcctgagtgta

SEQ ID NO: 1671454 - DNA, 25 bp, Homo sapien
cagctcgtggacgtgctccatgagg

SEQ ID NO: 1671455 - DNA, 25 bp, Homo sapien
tcttcagccacttgtgtgcttgctt

SEQ ID NO: 1671456 - DNA, 25 bp, Homo sapien
ttctgccttcagctcgtggacgtgc

SEQ ID NO: 1671457 - DNA, 25 bp, Homo sapien
tcgtggacgtgctccatgaggatgt

SEQ ID NO: 1671458 - DNA, 25 bp, Homo sapien
tacaagctgggatacatttggtggt

SEQ ID NO: 1671459 - DNA, 25 bp, Homo sapien
catttggtggtcaatcttcttaact

SEQ ID NO: 1671460 - DNA, 25 bp, Homo sapien
cttcaggtacaagctgggatacatt

SEQ ID NO: 1671461 - DNA, 25 bp, Homo sapien
cttcttaacttcatgggatcttctg

SEQ ID NO: 1671462 - DNA, 25 bp, Homo sapien
catttttccagcatcgagcccggaa

SEQ ID NO: 1671463 - DNA, 25 bp, Homo sapien
atttttccagcatcgagcccggaaa

SEQ ID NO: 1671464 - DNA, 25 bp, Homo sapien
gcgcatactcatggcttcggctgca

SEQ ID NO: 1671465 - DNA, 25 bp, Homo sapien
tgcgcatactcatggcttcggctgc

SEQ ID NO: 1671466 - DNA, 25 bp, Homo sapien
cctgcgcatactcatggcttcggct

SEQ ID NO: 1671467 - DNA, 25 bp, Homo sapien
aaggacatgagaggtgagcctcttc

SEQ ID NO: 1671468 - DNA, 25 bp, Homo sapien
ctgcccatcccatgtgtgattccta

SEQ ID NO: 1671469 - DNA, 25 bp, Homo sapien
ggggctgcccatcccatgtgtgatt

SEQ ID NO: 1671470 - DNA, 25 bp, Homo sapien
gccttggtacagtgccctggccgct

SEQ ID NO: 1671471 - DNA, 25 bp, Homo sapien
ggtacagtgccctggccgctctgtc

SEQ ID NO: 1671472 - DNA, 25 bp, Homo sapien
agccgcaccgtttcactcactcttg

SEQ ID NO: 1671473 - DNA, 25 bp, Homo sapien
accttctggctcttatgaatggtgc

SEQ ID NO: 1671474 - DNA, 25 bp, Homo sapien
tctgaggaaccgtcagattgttttc

SEQ ID NO: 1671475 - DNA, 25 bp, Homo sapien
gctgctaagaacattagtgtgcagg

SEQ ID NO: 1671476 - DNA, 25 bp, Homo sapien
cagccggcacctctgtcgtctgcgt

SEQ ID NO: 1671477 - DNA, 25 bp, Homo sapien
tctttctttgatgtcctcttccata

SEQ ID NO: 1671478 - DNA, 25 bp, Homo sapien
ttccataaggttctctgggagcaag

SEQ ID NO: 1671479 - DNA, 25 bp, Homo sapien
ttattttctgggatacaggtctggc

SEQ ID NO: 1671480 - DNA, 25 bp, Homo sapien
ttttccattatgtgacgcattcttt

SEQ ID NO: 1671481 - DNA, 25 bp, Homo sapien
attatgtgacgcattctttgttttg

SEQ ID NO: 1671482 - DNA, 25 bp, Homo sapien
ttccattatgtgacgcattctttgt

SEQ ID NO: 1671483 - DNA, 25 bp, Homo sapien
ccattatgtgacgcattctttgttt

SEQ ID NO: 1671484 - DNA, 25 bp, Homo sapien
ggttatgacaaagtcctctgcctca

SEQ ID NO: 1671485 - DNA, 25 bp, Homo sapien
tagaggtaccaacagtggaattttc

SEQ ID NO: 1671486 - DNA, 25 bp, Homo sapien
gcctctttctggctatgtctggagt

SEQ ID NO: 1671487 - DNA, 25 bp, Homo sapien
tgagcatcagtgatctctcctgctg

SEQ ID NO: 1671488 - DNA, 25 bp, Homo sapien
ctggaagtaggtgcgtggactcacc

SEQ ID NO: 1671489 - DNA, 25 bp, Homo sapien
aagtgactcgagctgttgtctttcc

SEQ ID NO: 1671490 - DNA, 25 bp, Homo sapien
ttcatctcctaataacggtatcctg

SEQ ID NO: 1671491 - DNA, 25 bp, Homo sapien
cggtatcctgaggttcttataaagt

SEQ ID NO: 1671492 - DNA, 25 bp, Homo sapien
tatatcatataggagattgccatcc

SEQ ID NO: 1671493 - DNA, 25 bp, Homo sapien
tgccatcccacatatcagggcaatg

SEQ ID NO: 1671494 - DNA, 25 bp, Homo sapien
caagagcaggtctatgccgaattat

SEQ ID NO: 1671495 - DNA, 25 bp, Homo sapien
caatgctgaaggctacgctcgaaat

SEQ ID NO: 1671496 - DNA, 25 bp, Homo sapien
ttagctatgtctttcagttaatata

SEQ ID NO: 1671497 - DNA, 25 bp, Homo sapien
gaggggaatggaagtcaaaaccaga

SEQ ID NO: 1671498 - DNA, 25 bp, Homo sapien
tttagctatgtctttcagttaatat

SEQ ID NO: 1671499 - DNA, 25 bp, Homo sapien
agaggggaatggaagtcaaaaccag

SEQ ID NO: 1671500 - DNA, 25 bp, Homo sapien
ctgggtggttgtgaccgtttactgc

SEQ ID NO: 1671501 - DNA, 25 bp, Homo sapien
tggatctcgaggcagccccttgaat

SEQ ID NO: 1671502 - DNA, 25 bp, Homo sapien
gaatcccaggcaactgggttttatg

SEQ ID NO: 1671503 - DNA, 25 bp, Homo sapien
caactgggttttatgaaagaacact

SEQ ID NO: 1671504 - DNA, 25 bp, Homo sapien
gtaagcctgttatgtttccagtggg

SEQ ID NO: 1671505 - DNA, 25 bp, Homo sapien
tacggcaagcataaatgaagttggc

SEQ ID NO: 1671506 - DNA, 25 bp, Homo sapien
gaggaaaccactctgaaccttgtcc

SEQ ID NO: 1671507 - DNA, 25 bp, Homo sapien
gagtccatctgcatacggcaagcat

SEQ ID NO: 1671508 - DNA, 25 bp, Homo sapien
gatgaaaggaaatacttagctacag

SEQ ID NO: 1671509 - DNA, 25 bp, Homo sapien
tcagtattttatcccgtagatgaaa

SEQ ID NO: 1671510 - DNA, 25 bp, Homo sapien
gctacagtccagcatctgtcctcta

SEQ ID NO: 1671511 - DNA, 25 bp, Homo sapien
ggaaatacttagctacagtccagca

SEQ ID NO: 1671512 - DNA, 25 bp, Homo sapien
ttttattatcaaatctctgctatag

SEQ ID NO: 1671513 - DNA, 25 bp, Homo sapien
ctttttattatcaaatctctgctat

SEQ ID NO: 1671514 - DNA, 25 bp, Homo sapien
ttatcaaatctctgctatagaaaca

SEQ ID NO: 1671515 - DNA, 25 bp, Homo sapien
tattatcaaatctctgctatagaaa

SEQ ID NO: 1671516 - DNA, 25 bp, Homo sapien
atggacgctgacacactgggctaag

SEQ ID NO: 1671517 - DNA, 25 bp, Homo sapien
catattctactcctgggcacccaga

SEQ ID NO: 1671518 - DNA, 25 bp, Homo sapien
tgcagtgatgagtaacaatggacgc

SEQ ID NO: 1671519 - DNA, 25 bp, Homo sapien
gtgccccttaggtaggatccttcaa

SEQ ID NO: 1671520 - DNA, 25 bp, Homo sapien
gtgttgaagtagggctgagtgacca

SEQ ID NO: 1671521 - DNA, 25 bp, Homo sapien
tgttgaagtagggctgagtgaccac

SEQ ID NO: 1671522 - DNA, 25 bp, Homo sapien
gctgagtgaccactaaaggcttttc

SEQ ID NO: 1671523 - DNA, 25 bp, Homo sapien
tacagttaaaggatctttcacactg

SEQ ID NO: 1671524 - DNA, 25 bp, Homo sapien
cagtatggtttcttaggtgtacaat

SEQ ID NO: 1671525 - DNA, 25 bp, Homo sapien
taggtgtacaataagggatgaactc

SEQ ID NO: 1671526 - DNA, 25 bp, Homo sapien
ttaaaggatctttcacactgattac

SEQ ID NO: 1671527 - DNA, 25 bp, Homo sapien
cgatgagcaacaaggtgacagctct

SEQ ID NO: 1671528 - DNA, 25 bp, Homo sapien
tctaacaaggtgagccatctggcta

SEQ ID NO: 1671529 - DNA, 25 bp, Homo sapien
gatgtctaacaaggtgagccatctg

SEQ ID NO: 1671530 - DNA, 25 bp, Homo sapien
ctccgatgagcaacaaggtgacagc

SEQ ID NO: 1671531 - DNA, 25 bp, Homo sapien
ggctgagcgttctctgaatgctttg

SEQ ID NO: 1671532 - DNA, 25 bp, Homo sapien
gtgagggctgagcgttctctgaatg

SEQ ID NO: 1671533 - DNA, 25 bp, Homo sapien
gggctgagcgttctctgaatgcttt

SEQ ID NO: 1671534 - DNA, 25 bp, Homo sapien
gagggctgagcgttctctgaatgct

SEQ ID NO: 1671535 - DNA, 25 bp, Homo sapien
tgagtagtccctaaaagctttttca

SEQ ID NO: 1671536 - DNA, 25 bp, Homo sapien
atgcattctcatatgggcaataaga

SEQ ID NO: 1671537 - DNA, 25 bp, Homo sapien
agtatgcattctcatatgggcaata

SEQ ID NO: 1671538 - DNA, 25 bp, Homo sapien
tatgcattctcatatgggcaataag

SEQ ID NO: 1671539 - DNA, 25 bp, Homo sapien
taagagctccagatgaaagacgtcc

SEQ ID NO: 1671540 - DNA, 25 bp, Homo sapien
taagggctgagcgattcctaaaaac

SEQ ID NO: 1671541 - DNA, 25 bp, Homo sapien
tccgttcatgtttcgtaagggctga

SEQ ID NO: 1671542 - DNA, 25 bp, Homo sapien
gatgtccaataagatgagagttcca

SEQ ID NO: 1671543 - DNA, 25 bp, Homo sapien
cattgtatttatacgctttctctac

SEQ ID NO: 1671544 - DNA, 25 bp, Homo sapien
tatttatacgctttctctacagtac

SEQ ID NO: 1671545 - DNA, 25 bp, Homo sapien
ttcattgtatttatacgctttctct

SEQ ID NO: 1671546 - DNA, 25 bp, Homo sapien
tgtatttatacgctttctctacagt

SEQ ID NO: 1671547 - DNA, 25 bp, Homo sapien
ccaacatgaagccttgggtgttcat

SEQ ID NO: 1671548 - DNA, 25 bp, Homo sapien
gcagggtaaataggttgaatggact

SEQ ID NO: 1671549 - DNA, 25 bp, Homo sapien
ccagtttgtattcttgcagggtaaa

SEQ ID NO: 1671550 - DNA, 25 bp, Homo sapien
ggctctggttaaagatttgatggca

SEQ ID NO: 1671551 - DNA, 25 bp, Homo sapien
tatctttccaacttcatgccatggg

SEQ ID NO: 1671552 - DNA, 25 bp, Homo sapien
ctgtgctgggatcaatgctttgctt

SEQ ID NO: 1671553 - DNA, 25 bp, Homo sapien
catagctgtactctggttcatgtgg

SEQ ID NO: 1671554 - DNA, 25 bp, Homo sapien
taagttctggctaaactctgcccca

SEQ ID NO: 1671555 - DNA, 25 bp, Homo sapien
taaagtcgagactcagaatccagcc

SEQ ID NO: 1671556 - DNA, 25 bp, Homo sapien
tagatgagcacacaaggcctttagc

SEQ ID NO: 1671557 - DNA, 25 bp, Homo sapien
gagagtatcaccaagcgaggcttca

SEQ ID NO: 1671558 - DNA, 25 bp, Homo sapien
caagccaggatgttatctatgacaa

SEQ ID NO: 1671559 - DNA, 25 bp, Homo sapien
gacaagtgcgttgaggacatgcctg

SEQ ID NO: 1671560 - DNA, 25 bp, Homo sapien
aagtgcgttgaggacatgcctgctc

SEQ ID NO: 1671561 - DNA, 25 bp, Homo sapien
ctggacaagtgcgttgaggacatgc

SEQ ID NO: 1671562 - DNA, 25 bp, Homo sapien
gacatgcctgctccactgaccacgg

SEQ ID NO: 1671563 - DNA, 25 bp, Homo sapien
gagagcaggtgaccataggtctcca

SEQ ID NO: 1671564 - DNA, 25 bp, Homo sapien
agagcaggtgaccataggtctccag

SEQ ID NO: 1671565 - DNA, 25 bp, Homo sapien
cagagagcaggtgaccataggtctc

SEQ ID NO: 1671566 - DNA, 25 bp, Homo sapien
cacagagagcaggtgaccataggtc

SEQ ID NO: 1671567 - DNA, 25 bp, Homo sapien
ctgaacaaggtccagctgcccccac

SEQ ID NO: 1671568 - DNA, 25 bp, Homo sapien
agtccacggccacgtccttgaaggt

SEQ ID NO: 1671569 - DNA, 25 bp, Homo sapien
actcttcttgggtgaagtccacggc

SEQ ID NO: 1671570 - DNA, 25 bp, Homo sapien
tgcccccactcttcttgggtgaagt

SEQ ID NO: 1671571 - DNA, 25 bp, Homo sapien
ggtctcttcgaagactcttgccaaa

SEQ ID NO: 1671572 - DNA, 25 bp, Homo sapien
gctgagcaggtctcttcgaagactc

SEQ ID NO: 1671573 - DNA, 25 bp, Homo sapien
caaagctgagcaggtctcttcgaag

SEQ ID NO: 1671574 - DNA, 25 bp, Homo sapien
gagcaggtctcttcgaagactcttg

SEQ ID NO: 1671575 - DNA, 25 bp, Homo sapien
tgccccatgacaaggactgtccatc

SEQ ID NO: 1671576 - DNA, 25 bp, Homo sapien
ccatgacaaggactgtccatcctct

SEQ ID NO: 1671577 - DNA, 25 bp, Homo sapien
tgtgccccatgacaaggactgtcca

SEQ ID NO: 1671578 - DNA, 25 bp, Homo sapien
atgacaaggactgtccatcctcttt

SEQ ID NO: 1671579 - DNA, 25 bp, Homo sapien
cggagtggaaggcaccaatcatgaa

SEQ ID NO: 1671580 - DNA, 25 bp, Homo sapien
acaggacttccagcctcacagccct

SEQ ID NO: 1671581 - DNA, 25 bp, Homo sapien
gcagctgaagtagaacaggacttcc

SEQ ID NO: 1671582 - DNA, 25 bp, Homo sapien
catgaatcagatctatgcagctgaa

SEQ ID NO: 1671583 - DNA, 25 bp, Homo sapien
gcattcctgaagatctcacttagtt

SEQ ID NO: 1671584 - DNA, 25 bp, Homo sapien
cagcagtcaaatccgagtttcccac

SEQ ID NO: 1671585 - DNA, 25 bp, Homo sapien
taaaaacacacagcagtcaaatccg

SEQ ID NO: 1671586 - DNA, 25 bp, Homo sapien
gaaatcacaactcttcagacattgg

SEQ ID NO: 1671587 - DNA, 25 bp, Homo sapien
gaccagggatagcaacactgccaag

SEQ ID NO: 1671588 - DNA, 25 bp, Homo sapien
gactggttgacactaaggctccgaa

SEQ ID NO: 1671589 - DNA, 25 bp, Homo sapien
tgcacagcatcagcctaaatcgggt

SEQ ID NO: 1671590 - DNA, 25 bp, Homo sapien
ccttagctgagtgaataaccctgga

SEQ ID NO: 1671591 - DNA, 25 bp, Homo sapien
gagccgcatcaactgggatgaccag

SEQ ID NO: 1671592 - DNA, 25 bp, Homo sapien
caaactccaactgttgtaaactgga

SEQ ID NO: 1671593 - DNA, 25 bp, Homo sapien
ccagggataacctggacatcatcct

SEQ ID NO: 1671594 - DNA, 25 bp, Homo sapien
ctgttgtaaactggagagccgcatc

SEQ ID NO: 1671595 - DNA, 25 bp, Homo sapien
cacgtgccaggcaggatactgagga

SEQ ID NO: 1671596 - DNA, 25 bp, Homo sapien
ccaggcaggatactgaggacacaga

SEQ ID NO: 1671597 - DNA, 25 bp, Homo sapien
ctccacgtgccaggcaggatactga

SEQ ID NO: 1671598 - DNA, 25 bp, Homo sapien
caggcttccctccacgtgccaggca

SEQ ID NO: 1671599 - DNA, 25 bp, Homo sapien
cacaatatggcagcccacagctgac

SEQ ID NO: 1671600 - DNA, 25 bp, Homo sapien
tggtccccattctattccccagctg

SEQ ID NO: 1671601 - DNA, 25 bp, Homo sapien
agaggccacaatatggcagcccaca

SEQ ID NO: 1671602 - DNA, 25 bp, Homo sapien
cctggccactagttttctgattcct

SEQ ID NO: 1671603 - DNA, 25 bp, Homo sapien
cccatgggtcaacagctgtcatccc

SEQ ID NO: 1671604 - DNA, 25 bp, Homo sapien
ggtcaacagctgtcatcccccaaga

SEQ ID NO: 1671605 - DNA, 25 bp, Homo sapien
tgggtcaacagctgtcatcccccaa

SEQ ID NO: 1671606 - DNA, 25 bp, Homo sapien
cccaggaggcccatgggtcaacagc

SEQ ID NO: 1671607 - DNA, 25 bp, Homo sapien
aggcccacgggttgatggctgccat

SEQ ID NO: 1671608 - DNA, 25 bp, Homo sapien
caggaggcccacgggttgatggctg

SEQ ID NO: 1671609 - DNA, 25 bp, Homo sapien
cccaggaggcccacgggttgatggc

SEQ ID NO: 1671610 - DNA, 25 bp, Homo sapien
ggaggcccacgggttgatggctgcc

SEQ ID NO: 1671611 - DNA, 25 bp, Homo sapien
ctgcccaggaacacagcaaatccca

SEQ ID NO: 1671612 - DNA, 25 bp, Homo sapien
gcccaggaacacagcaaatcccaac

SEQ ID NO: 1671613 - DNA, 25 bp, Homo sapien
tgcccaggaacacagcaaatcccaa

SEQ ID NO: 1671614 - DNA, 25 bp, Homo sapien
tatgttatgcaaatttaatcccacc

SEQ ID NO: 1671615 - DNA, 25 bp, Homo sapien
gattcctgggtatgtgtataaagca

SEQ ID NO: 1671616 - DNA, 25 bp, Homo sapien
gcaacctctcgaatggattcctggg

SEQ ID NO: 1671617 - DNA, 25 bp, Homo sapien
gatttactaagcctaagcttgtgtg

SEQ ID NO: 1671618 - DNA, 25 bp, Homo sapien
gcaccggaatcagcgcgaaaacgca

SEQ ID NO: 1671619 - DNA, 25 bp, Homo sapien
tcagcgcgaaaacgcagaatgcaaa

SEQ ID NO: 1671620 - DNA, 25 bp, Homo sapien
cggaatcagcgcgaaaacgcagaat

SEQ ID NO: 1671621 - DNA, 25 bp, Homo sapien
ggagcaccggaatcagcgcgaaaac

SEQ ID NO: 1671622 - DNA, 25 bp, Homo sapien
cactgcatgtttaagggaacccgga

SEQ ID NO: 1671623 - DNA, 25 bp, Homo sapien
tttgcaccattatttgcaacttgac

SEQ ID NO: 1671624 - DNA, 25 bp, Homo sapien
aacttgacagtgaccgccgccgtca

SEQ ID NO: 1671625 - DNA, 25 bp, Homo sapien
aggtctgacgtccttcacagtgctt

SEQ ID NO: 1671626 - DNA, 25 bp, Homo sapien
gcatccttatcacctgcttccagag

SEQ ID NO: 1671627 - DNA, 25 bp, Homo sapien
tcagaagcatccttatcacctgctt

SEQ ID NO: 1671628 - DNA, 25 bp, Homo sapien
gggttattcgtcccatcaatggcct

SEQ ID NO: 1671629 - DNA, 25 bp, Homo sapien
cagagctcccgacccaaatttcctc

SEQ ID NO: 1671630 - DNA, 25 bp, Homo sapien
gcgtttggcttttgtcccgcgccga

SEQ ID NO: 1671631 - DNA, 25 bp, Homo sapien
cccaggagtgcgcttgggagctccc

SEQ ID NO: 1671632 - DNA, 25 bp, Homo sapien
caggatcggggtctgcccgcctggg

SEQ ID NO: 1671633 - DNA, 25 bp, Homo sapien
gtcccccttgaaggcggcgcagcag

SEQ ID NO: 1671634 - DNA, 25 bp, Homo sapien
cgacggcaacgacggcgcaaagccg

SEQ ID NO: 1671635 - DNA, 25 bp, Homo sapien
aaagccggcgcggaaagggcaggcg

SEQ ID NO: 1671636 - DNA, 25 bp, Homo sapien
ggagccgacgtgcagcagagttcac

SEQ ID NO: 1671637 - DNA, 25 bp, Homo sapien
ctgctggctggagaaccgacggcaa

SEQ ID NO: 1671638 - DNA, 25 bp, Homo sapien
gggagctgtagttccaggcgggcac

SEQ ID NO: 1671639 - DNA, 25 bp, Homo sapien
tgcttccccggcgtcgaccggagcg

SEQ ID NO: 1671640 - DNA, 25 bp, Homo sapien
ttccaggcgggcacttccggcgtcg

SEQ ID NO: 1671641 - DNA, 25 bp, Homo sapien
ctcagccgcggacaatggcggctgc

SEQ ID NO: 1671642 - DNA, 25 bp, Homo sapien
agttctcagcgctctcgagggatcc

SEQ ID NO: 1671643 - DNA, 25 bp, Homo sapien
ttctctgtgaagctcgacggctgag

SEQ ID NO: 1671644 - DNA, 25 bp, Homo sapien
gatggactttgttgtcccggtccca

SEQ ID NO: 1671645 - DNA, 25 bp, Homo sapien
gatccttccatttggcgttcgcaag

SEQ ID NO: 1671646 - DNA, 25 bp, Homo sapien
gagcatgggttaccagcgacgcacc

SEQ ID NO: 1671647 - DNA, 25 bp, Homo sapien
taccagcgacgcaccctgtgagttt

SEQ ID NO: 1671648 - DNA, 25 bp, Homo sapien
tgggttaccagcgacgcaccctgtg

SEQ ID NO: 1671649 - DNA, 25 bp, Homo sapien
ggttaccagcgacgcaccctgtgag

SEQ ID NO: 1671650 - DNA, 25 bp, Homo sapien
taggatctcacatcaggtccttgcc

SEQ ID NO: 1671651 - DNA, 25 bp, Homo sapien
gaaaactcagcaggactggcctctg

SEQ ID NO: 1671652 - DNA, 25 bp, Homo sapien
agatgtcacatcctggtaacagcca

SEQ ID NO: 1671653 - DNA, 25 bp, Homo sapien
tcctcaaacagggtaagtccattcc

SEQ ID NO: 1671654 - DNA, 25 bp, Homo sapien
cgggcttgggatgccggcaggaggc

SEQ ID NO: 1671655 - DNA, 25 bp, Homo sapien
aggaggcaatgactctccccaggcg

SEQ ID NO: 1671656 - DNA, 25 bp, Homo sapien
cccgcattctaggccggagaagcgg

SEQ ID NO: 1671657 - DNA, 25 bp, Homo sapien
ctaggccggagaagcgggcgggctt

SEQ ID NO: 1671658 - DNA, 25 bp, Homo sapien
ccgtcaagttgaggagagtactgaa

SEQ ID NO: 1671659 - DNA, 25 bp, Homo sapien
cataagttgaatcatggacaaggac

SEQ ID NO: 1671660 - DNA, 25 bp, Homo sapien
cagatgctcctgaactacgataggg

SEQ ID NO: 1671661 - DNA, 25 bp, Homo sapien
gttaggtccaaataagcccatggta

SEQ ID NO: 1671662 - DNA, 25 bp, Homo sapien
agcaggatgatgtaacatttggggc

SEQ ID NO: 1671663 - DNA, 25 bp, Homo sapien
ttagcaggatgatgtaacatttggg

SEQ ID NO: 1671664 - DNA, 25 bp, Homo sapien
atgatgtaacatttggggcaaagat

SEQ ID NO: 1671665 - DNA, 25 bp, Homo sapien
aggatgatgtaacatttggggcaaa

SEQ ID NO: 1671666 - DNA, 25 bp, Homo sapien
gacttgccctgtgcgctgtggtaca

SEQ ID NO: 1671667 - DNA, 25 bp, Homo sapien
ggcaggaaggttgtccagaagctgc

SEQ ID NO: 1671668 - DNA, 25 bp, Homo sapien
cttgttgaaggcgtctggcagaccc

SEQ ID NO: 1671669 - DNA, 25 bp, Homo sapien
gcagaacagcagcacgctgaaggtg

SEQ ID NO: 1671670 - DNA, 25 bp, Homo sapien
cctgaaggccaggacggaagagaca

SEQ ID NO: 1671671 - DNA, 25 bp, Homo sapien
ctgaaggccaggacggaagagacag

SEQ ID NO: 1671672 - DNA, 25 bp, Homo sapien
aggccaggacggaagagacagccat

SEQ ID NO: 1671673 - DNA, 25 bp, Homo sapien
aaggccaggacggaagagacagcca

SEQ ID NO: 1671674 - DNA, 25 bp, Homo sapien
ttgttggccccgaccacaggtgtgt

SEQ ID NO: 1671675 - DNA, 25 bp, Homo sapien
gaggtgagcggcgtgcagctgagag

SEQ ID NO: 1671676 - DNA, 25 bp, Homo sapien
ggtgagcggcgtgcagctgagagct

SEQ ID NO: 1671677 - DNA, 25 bp, Homo sapien
agagctctgttgttggccccgacca

SEQ ID NO: 1671678 - DNA, 25 bp, Homo sapien
ggtgcggcttgagtactgctcctct

SEQ ID NO: 1671679 - DNA, 25 bp, Homo sapien
gcatgagtcccagggggtcgtcaaa

SEQ ID NO: 1671680 - DNA, 25 bp, Homo sapien
cagcatgagcgccaccaaggcgagc

SEQ ID NO: 1671681 - DNA, 25 bp, Homo sapien
ctggtgcggcttgagtactgctcct

SEQ ID NO: 1671682 - DNA, 25 bp, Homo sapien
tgccacaggatcgtaatgacaccag

SEQ ID NO: 1671683 - DNA, 25 bp, Homo sapien
tctgccacaggatcgtaatgacacc

SEQ ID NO: 1671684 - DNA, 25 bp, Homo sapien
cgtctgccacaggatcgtaatgaca

SEQ ID NO: 1671685 - DNA, 25 bp, Homo sapien
ccacaggatcgtaatgacaccagcc

SEQ ID NO: 1671686 - DNA, 25 bp, Homo sapien
tctccgttggcatcaaacatgatct

SEQ ID NO: 1671687 - DNA, 25 bp, Homo sapien
tgtccatagacaacatcaaattctg

SEQ ID NO: 1671688 - DNA, 25 bp, Homo sapien
aatgcacgttcttgagaggacgaag

SEQ ID NO: 1671689 - DNA, 25 bp, Homo sapien
ttctgtaattaaatctccgttggca

SEQ ID NO: 1671690 - DNA, 25 bp, Homo sapien
atggatgacactgtagatgggcagg

SEQ ID NO: 1671691 - DNA, 25 bp, Homo sapien
tggatgacactgtagatgggcaggg

SEQ ID NO: 1671692 - DNA, 25 bp, Homo sapien
aaggatggatgacactgtagatggg

SEQ ID NO: 1671693 - DNA, 25 bp, Homo sapien
ggatggatgacactgtagatgggca

SEQ ID NO: 1671694 - DNA, 25 bp, Homo sapien
ggcctgggcgatggcatagaccact

SEQ ID NO: 1671695 - DNA, 25 bp, Homo sapien
catagaccactgtgtaggcgatgtg

SEQ ID NO: 1671696 - DNA, 25 bp, Homo sapien
taggcgatgtgtactttgctttcct

SEQ ID NO: 1671697 - DNA, 25 bp, Homo sapien
gctggaagtcccaggcatcggcaca

SEQ ID NO: 1671698 - DNA, 25 bp, Homo sapien
ggtagtgctcaaccctcagactctc

SEQ ID NO: 1671699 - DNA, 25 bp, Homo sapien
ggaaagggtagtgctcaaccctcag

SEQ ID NO: 1671700 - DNA, 25 bp, Homo sapien
aaagggtagtgctcaaccctcagac

SEQ ID NO: 1671701 - DNA, 25 bp, Homo sapien
agggtagtgctcaaccctcagactc

SEQ ID NO: 1671702 - DNA, 25 bp, Homo sapien
agctcctggacgaccagagacctgc

SEQ ID NO: 1671703 - DNA, 25 bp, Homo sapien
gcagctcaaagtcgtccccctgcgc

SEQ ID NO: 1671704 - DNA, 25 bp, Homo sapien
tggaattcaatgcagaccccagcct

SEQ ID NO: 1671705 - DNA, 25 bp, Homo sapien
aaagtcgtccccctgcgccaggacg

SEQ ID NO: 1671706 - DNA, 25 bp, Homo sapien
caagaccatcggaagtgaagcatca

SEQ ID NO: 1671707 - DNA, 25 bp, Homo sapien
agaccatcggaagtgaagcatcagc

SEQ ID NO: 1671708 - DNA, 25 bp, Homo sapien
accatcggaagtgaagcatcagctg

SEQ ID NO: 1671709 - DNA, 25 bp, Homo sapien
ccaagaccatcggaagtgaagcatc

SEQ ID NO: 1671710 - DNA, 25 bp, Homo sapien
ggaactgggtcctgtcgctgaggct

SEQ ID NO: 1671711 - DNA, 25 bp, Homo sapien
tgggaactgggtcctgtcgctgagg

SEQ ID NO: 1671712 - DNA, 25 bp, Homo sapien
ctgcatgggtggtcgtgaggtgact

SEQ ID NO: 1671713 - DNA, 25 bp, Homo sapien
tgggtggtcgtgaggtgactgagca

SEQ ID NO: 1671714 - DNA, 25 bp, Homo sapien
tctggggtctgttggatcagagact

SEQ ID NO: 1671715 - DNA, 25 bp, Homo sapien
cctcgtgtgggtgcaaaacattctc

SEQ ID NO: 1671716 - DNA, 25 bp, Homo sapien
aggatgaaactgctcggtctctggg

SEQ ID NO: 1671717 - DNA, 25 bp, Homo sapien
cagagactttaacacgctcctcgtg

SEQ ID NO: 1671718 - DNA, 25 bp, Homo sapien
ggagggtacggctctgagtacttac

SEQ ID NO: 1671719 - DNA, 25 bp, Homo sapien
gggaggatggcgtcaggctgtaggg

SEQ ID NO: 1671720 - DNA, 25 bp, Homo sapien
caggaccctccgtggtagggcctca

SEQ ID NO: 1671721 - DNA, 25 bp, Homo sapien
ccacagcaaatattaggggagggta

SEQ ID NO: 1671722 - DNA, 25 bp, Homo sapien
tggcatagacaacgccaagcatgtt

SEQ ID NO: 1671723 - DNA, 25 bp, Homo sapien
gccattggcatagacaacgccaagc

SEQ ID NO: 1671724 - DNA, 25 bp, Homo sapien
ttggcatagacaacgccaagcatgt

SEQ ID NO: 1671725 - DNA, 25 bp, Homo sapien
cattggcatagacaacgccaagcat

SEQ ID NO: 1671726 - DNA, 25 bp, Homo sapien
tgcagtcactcatgataactcagcc

SEQ ID NO: 1671727 - DNA, 25 bp, Homo sapien
tggagtggcttgagcctccgtgcct

SEQ ID NO: 1671728 - DNA, 25 bp, Homo sapien
ttcttcgctgcctctgaactggttc

SEQ ID NO: 1671729 - DNA, 25 bp, Homo sapien
caatattaactgcttgtggagtggc

SEQ ID NO: 1671730 - DNA, 25 bp, Homo sapien
gagaagctggccctgaccaccacat

SEQ ID NO: 1671731 - DNA, 25 bp, Homo sapien
cacatcccctggacagtcaaagcgg

SEQ ID NO: 1671732 - DNA, 25 bp, Homo sapien
gtggagcagtgaaatcaaacagggt

SEQ ID NO: 1671733 - DNA, 25 bp, Homo sapien
cagggtgatgttgtacaggtggaag

SEQ ID NO: 1671734 - DNA, 25 bp, Homo sapien
gagagagatcccacaagggcgggaa

SEQ ID NO: 1671735 - DNA, 25 bp, Homo sapien
agatcccacaagggcgggaagcaga

SEQ ID NO: 1671736 - DNA, 25 bp, Homo sapien
agagagagatcccacaagggcggga

SEQ ID NO: 1671737 - DNA, 25 bp, Homo sapien
agagatcccacaagggcgggaagca

SEQ ID NO: 1671738 - DNA, 25 bp, Homo sapien
tggagatagggacatccccagagct

SEQ ID NO: 1671739 - DNA, 25 bp, Homo sapien
ttacaaccccaggagatgcggctgt

SEQ ID NO: 1671740 - DNA, 25 bp, Homo sapien
caaagtgactccctaacatagtgct

SEQ ID NO: 1671741 - DNA, 25 bp, Homo sapien
tacaagaggcgaagactctcctgag

SEQ ID NO: 1671742 - DNA, 25 bp, Homo sapien
gaatgccgtcgttttgccccgcggc

SEQ ID NO: 1671743 - DNA, 25 bp, Homo sapien
gacactgtataaaacggttgcgtgt

SEQ ID NO: 1671744 - DNA, 25 bp, Homo sapien
aaaacggttgcgtgtctggaatgcc

SEQ ID NO: 1671745 - DNA, 25 bp, Homo sapien
ccgcggccccatcgtacatgcgcat

SEQ ID NO: 1671746 - DNA, 25 bp, Homo sapien
cccacattggcctaggtgttccaca

SEQ ID NO: 1671747 - DNA, 25 bp, Homo sapien
gtgccttctgctaagacctcctctt

SEQ ID NO: 1671748 - DNA, 25 bp, Homo sapien
acccatggacctctggtgccttctg

SEQ ID NO: 1671749 - DNA, 25 bp, Homo sapien
aggactctcatcagctcaggtaccc

SEQ ID NO: 1671750 - DNA, 25 bp, Homo sapien
catgggagcccgacaccatttggag

SEQ ID NO: 1671751 - DNA, 25 bp, Homo sapien
tacgctgactcgaagatggctggct

SEQ ID NO: 1671752 - DNA, 25 bp, Homo sapien
gattgtaaaaccagatgcacgagaa

SEQ ID NO: 1671753 - DNA, 25 bp, Homo sapien
gaccaagctggtagtttcccaatca

SEQ ID NO: 1671754 - DNA, 25 bp, Homo sapien
ccgctgccggcagatgtgcttatct

SEQ ID NO: 1671755 - DNA, 25 bp, Homo sapien
tctaacggaggcatctaacctgggt

SEQ ID NO: 1671756 - DNA, 25 bp, Homo sapien
agttgttggccacgggcttcctcag

SEQ ID NO: 1671757 - DNA, 25 bp, Homo sapien
taacctgggtagaccacagttgttg

SEQ ID NO: 1671758 - DNA, 25 bp, Homo sapien
gatcacctcagctgttggactctga

SEQ ID NO: 1671759 - DNA, 25 bp, Homo sapien
cctacccgtgcttcagaggcgatca

SEQ ID NO: 1671760 - DNA, 25 bp, Homo sapien
gactcggtagtagagaagtccctca

SEQ ID NO: 1671761 - DNA, 25 bp, Homo sapien
actcttcgcgccctgttggtgatga

SEQ ID NO: 1671762 - DNA, 25 bp, Homo sapien
ttctttgtgcatagcgatctcctgg

SEQ ID NO: 1671763 - DNA, 25 bp, Homo sapien
gatcccatgggcgtatctccctgag

SEQ ID NO: 1671764 - DNA, 25 bp, Homo sapien
gaacctcagtggtaagtgatgccag

SEQ ID NO: 1671765 - DNA, 25 bp, Homo sapien
tagctgatactcgtggcccctgctt

SEQ ID NO: 1671766 - DNA, 25 bp, Homo sapien
cacagagaggcaaccagcaatgctc

SEQ ID NO: 1671767 - DNA, 25 bp, Homo sapien
ggagattcgtacaggaagccaagaa

SEQ ID NO: 1671768 - DNA, 25 bp, Homo sapien
gatgtgcagcccacctgctcatggt

SEQ ID NO: 1671769 - DNA, 25 bp, Homo sapien
gcccagccagtggttacaagagaca

SEQ ID NO: 1671770 - DNA, 25 bp, Homo sapien
ctttatgagttcacccaagagatgg

SEQ ID NO: 1671771 - DNA, 25 bp, Homo sapien
tccctttatgagttcacccaagaga

SEQ ID NO: 1671772 - DNA, 25 bp, Homo sapien
cctttatgagttcacccaagagatg

SEQ ID NO: 1671773 - DNA, 25 bp, Homo sapien
tttatgagttcacccaagagatggt

SEQ ID NO: 1671774 - DNA, 25 bp, Homo sapien
tattaagacaggggcccactatgtt

SEQ ID NO: 1671775 - DNA, 25 bp, Homo sapien
atagttctctgtagcctggaactcc

SEQ ID NO: 1671776 - DNA, 25 bp, Homo sapien
atcatagttctctgtagcctggaac

SEQ ID NO: 1671777 - DNA, 25 bp, Homo sapien
tttattaagacaggggcccactatg

SEQ ID NO: 1671778 - DNA, 25 bp, Homo sapien
tacatgctccaagggtacagtgaag

SEQ ID NO: 1671779 - DNA, 25 bp, Homo sapien
cagttaagtttatgcgcagggagca

SEQ ID NO: 1671780 - DNA, 25 bp, Homo sapien
cgcccggcccatgaataagtactta

SEQ ID NO: 1671781 - DNA, 25 bp, Homo sapien
catctcccaggtgaacaggttcggc

SEQ ID NO: 1671782 - DNA, 25 bp, Homo sapien
taaacacacgcgaggtaaactagga

SEQ ID NO: 1671783 - DNA, 25 bp, Homo sapien
tgaagttgacatcacgccaagtacg

SEQ ID NO: 1671784 - DNA, 25 bp, Homo sapien
tgcgagctactccatataggtaaac

SEQ ID NO: 1671785 - DNA, 25 bp, Homo sapien
gcactggcagatcacgcactttaag

SEQ ID NO: 1671786 - DNA, 25 bp, Homo sapien
gcccagggtgtgtttacagaggtga

SEQ ID NO: 1671787 - DNA, 25 bp, Homo sapien
catggggcggcactaaatggctgca

SEQ ID NO: 1671788 - DNA, 25 bp, Homo sapien
atggctgcaggaaagccgagtcttc

SEQ ID NO: 1671789 - DNA, 25 bp, Homo sapien
gagtcttcttccacatccggcggct

SEQ ID NO: 1671790 - DNA, 25 bp, Homo sapien
ggcacaggcagaggacgtccacaaa

SEQ ID NO: 1671791 - DNA, 25 bp, Homo sapien
gaaaggcccaatgcctcgtctggga

SEQ ID NO: 1671792 - DNA, 25 bp, Homo sapien
ctccggaacgggacagcacagcggc

SEQ ID NO: 1671793 - DNA, 25 bp, Homo sapien
tcgtctgggattcacggccggcaaa

SEQ ID NO: 1671794 - DNA, 25 bp, Homo sapien
tttctccttctcgtgggtcttctgg

SEQ ID NO: 1671795 - DNA, 25 bp, Homo sapien
tcttctggtgctcggctagggccag

SEQ ID NO: 1671796 - DNA, 25 bp, Homo sapien
ccgcctgggcttcgcgggtggacgg

SEQ ID NO: 1671797 - DNA, 25 bp, Homo sapien
ccccagcgcgtagcttttctccttc

SEQ ID NO: 1671798 - DNA, 25 bp, Homo sapien
gtgcgagagccacgcgaaggcctcc

SEQ ID NO: 1671799 - DNA, 25 bp, Homo sapien
atggctgctgtggtgctccatcagg

SEQ ID NO: 1671800 - DNA, 25 bp, Homo sapien
ctgtggtgctccatcaggtgcgaga

SEQ ID NO: 1671801 - DNA, 25 bp, Homo sapien
tgctccatcaggtgcgagagccacg

SEQ ID NO: 1671802 - DNA, 25 bp, Homo sapien
gcgggacaagcccggctcgtcagcc

SEQ ID NO: 1671803 - DNA, 25 bp, Homo sapien
cccgcgggacaagcccggctcgtca

SEQ ID NO: 1671804 - DNA, 25 bp, Homo sapien
ggacaagcccggctcgtcagcccca

SEQ ID NO: 1671805 - DNA, 25 bp, Homo sapien
cttcccgcgggacaagcccggctcg

SEQ ID NO: 1671806 - DNA, 25 bp, Homo sapien
ggctgctggatgacggactgcctct

SEQ ID NO: 1671807 - DNA, 25 bp, Homo sapien
atccggtggcagagtcggactccgc

SEQ ID NO: 1671808 - DNA, 25 bp, Homo sapien
tcttggttcccagtttcgccgtgcc

SEQ ID NO: 1671809 - DNA, 25 bp, Homo sapien
gctagagacgccctcgaggctctgc

SEQ ID NO: 1671810 - DNA, 25 bp, Homo sapien
tgcacgatgcaaggagagcctgctc

SEQ ID NO: 1671811 - DNA, 25 bp, Homo sapien
tagcttggccacaagatgcacgatg

SEQ ID NO: 1671812 - DNA, 25 bp, Homo sapien
gaaaccgcgcctttggaggtctcca

SEQ ID NO: 1671813 - DNA, 25 bp, Homo sapien
aacaaggtcagagccctagcgtgag

SEQ ID NO: 1671814 - DNA, 25 bp, Homo sapien
tctttccaccaaccggagttcctca

SEQ ID NO: 1671815 - DNA, 25 bp, Homo sapien
ctggaggcagcgtcaggctgggaaa

SEQ ID NO: 1671816 - DNA, 25 bp, Homo sapien
accaaccggagttcctcagtgtcca

SEQ ID NO: 1671817 - DNA, 25 bp, Homo sapien
accggagttcctcagtgtccagcct

SEQ ID NO: 1671818 - DNA, 25 bp, Homo sapien
caggagcagcttccggtagctcttc

SEQ ID NO: 1671819 - DNA, 25 bp, Homo sapien
gagcagcttccggtagctcttcagg

SEQ ID NO: 1671820 - DNA, 25 bp, Homo sapien
cacaggagcagcttccggtagctct

SEQ ID NO: 1671821 - DNA, 25 bp, Homo sapien
cagcttccggtagctcttcaggttc

SEQ ID NO: 1671822 - DNA, 25 bp, Homo sapien
gaaacattagtcgtggctgagacct

SEQ ID NO: 1671823 - DNA, 25 bp, Homo sapien
acattagtcgtggctgagacctccc

SEQ ID NO: 1671824 - DNA, 25 bp, Homo sapien
ctgaaacattagtcgtggctgagac

SEQ ID NO: 1671825 - DNA, 25 bp, Homo sapien
aacattagtcgtggctgagacctcc

SEQ ID NO: 1671826 - DNA, 25 bp, Homo sapien
ccccttcgcaccacaaagattccgc

SEQ ID NO: 1671827 - DNA, 25 bp, Homo sapien
gaggcagcccccttcgcaccacaaa

SEQ ID NO: 1671828 - DNA, 25 bp, Homo sapien
gggactctaacccaggtgcactgca

SEQ ID NO: 1671829 - DNA, 25 bp, Homo sapien
aaagattccgccctcacgctcccac

SEQ ID NO: 1671830 - DNA, 25 bp, Homo sapien
ctgggcctcagcgctgtggacgttt

SEQ ID NO: 1671831 - DNA, 25 bp, Homo sapien
ggcctcagcgctgtggacgtttggg

SEQ ID NO: 1671832 - DNA, 25 bp, Homo sapien
gatgcctctaagctgaggccaaggc

SEQ ID NO: 1671833 - DNA, 25 bp, Homo sapien
atgcctctaagctgaggccaaggcc

SEQ ID NO: 1671834 - DNA, 25 bp, Homo sapien
agggccgtcctcttcggtctttgct

SEQ ID NO: 1671835 - DNA, 25 bp, Homo sapien
ctctgttccagaaacagggggtccg

SEQ ID NO: 1671836 - DNA, 25 bp, Homo sapien
tcttcggtctttgcttctctgaccc

SEQ ID NO: 1671837 - DNA, 25 bp, Homo sapien
gtcctcttcggtctttgcttctctg

SEQ ID NO: 1671838 - DNA, 25 bp, Homo sapien
tgagcacgcgatgctgggcaactaa

SEQ ID NO: 1671839 - DNA, 25 bp, Homo sapien
cagagaaactacaggaggaagtccc

SEQ ID NO: 1671840 - DNA, 25 bp, Homo sapien
gcctggccttcgtggaaatcctaaa

SEQ ID NO: 1671841 - DNA, 25 bp, Homo sapien
tgatttacaaagcagcgcggtggcc

SEQ ID NO: 1671842 - DNA, 25 bp, Homo sapien
gctgccaggctagctgggcactcac

SEQ ID NO: 1671843 - DNA, 25 bp, Homo sapien
taagaattgaggatgagcccgcagg

SEQ ID NO: 1671844 - DNA, 25 bp, Homo sapien
gggtccatgtgcctctcgtacactc

SEQ ID NO: 1671845 - DNA, 25 bp, Homo sapien
atcgctaagaattgaggatgagccc

SEQ ID NO: 1671846 - DNA, 25 bp, Homo sapien
tcgtacactccatcgctaagaattg

SEQ ID NO: 1671847 - DNA, 25 bp, Homo sapien
gccttccaggatcccctccccatct

SEQ ID NO: 1671848 - DNA, 25 bp, Homo sapien
tcaggcaagccatggctggcactgg

SEQ ID NO: 1671849 - DNA, 25 bp, Homo sapien
catgcttctcctctgtgacagccca

SEQ ID NO: 1671850 - DNA, 25 bp, Homo sapien
ctgagccatgcttctcctctgtgac

SEQ ID NO: 1671851 - DNA, 25 bp, Homo sapien
cggaccttatcaggcaggatgccca

SEQ ID NO: 1671852 - DNA, 25 bp, Homo sapien
tggtagacaaattcccggaaacgca

SEQ ID NO: 1671853 - DNA, 25 bp, Homo sapien
acccagggccggaccttatcaggca

SEQ ID NO: 1671854 - DNA, 25 bp, Homo sapien
gcagctctcagggtactgtgccacc

SEQ ID NO: 1671855 - DNA, 25 bp, Homo sapien
ggatggtctcgggttcttcctgctg

SEQ ID NO: 1671856 - DNA, 25 bp, Homo sapien
cagggatggtctcgggttcttcctg

SEQ ID NO: 1671857 - DNA, 25 bp, Homo sapien
ctcagggatggtctcgggttcttcc

SEQ ID NO: 1671858 - DNA, 25 bp, Homo sapien
ccccggcgtgggcagatccggcggg

SEQ ID NO: 1671859 - DNA, 25 bp, Homo sapien
tgtgactgtctagccagggacaagg

SEQ ID NO: 1671860 - DNA, 25 bp, Homo sapien
tgggctcaggtggtgccagaaccca

SEQ ID NO: 1671861 - DNA, 25 bp, Homo sapien
ccaaaacggcactggaaaatgtgac

SEQ ID NO: 1671862 - DNA, 25 bp, Homo sapien
ggtgccagggatgaccagatgccca

SEQ ID NO: 1671863 - DNA, 25 bp, Homo sapien
cggacaaggcaatggccttgcataa

SEQ ID NO: 1671864 - DNA, 25 bp, Homo sapien
caatggccttgcataaggccagggc

SEQ ID NO: 1671865 - DNA, 25 bp, Homo sapien
cttgcataaggccagggcgcagcca

SEQ ID NO: 1671866 - DNA, 25 bp, Homo sapien
aggacacggacaaggcaatggcctt

SEQ ID NO: 1671867 - DNA, 25 bp, Homo sapien
gctgtccaggcctccagtcggcctc

SEQ ID NO: 1671868 - DNA, 25 bp, Homo sapien
taaacagaacccagcgggtcacagc

SEQ ID NO: 1671869 - DNA, 25 bp, Homo sapien
aaacagaacccagcgggtcacagct

SEQ ID NO: 1671870 - DNA, 25 bp, Homo sapien
cctccagtcggcctcgggctctcat

SEQ ID NO: 1671871 - DNA, 25 bp, Homo sapien
tgtggactgtgcaaacagtgcagtt

SEQ ID NO: 1671872 - DNA, 25 bp, Homo sapien
ttggcagttgtggaccctcatgtcc

SEQ ID NO: 1671873 - DNA, 25 bp, Homo sapien
ccaggagagtaagggttcttcacag

SEQ ID NO: 1671874 - DNA, 25 bp, Homo sapien
ttcttcacaggcaggtcccttggcc

SEQ ID NO: 1671875 - DNA, 25 bp, Homo sapien
tgtcaaccagttaacgagttccctg

SEQ ID NO: 1671876 - DNA, 25 bp, Homo sapien
catgatttaatctctgagggcgggt

SEQ ID NO: 1671877 - DNA, 25 bp, Homo sapien
catatggagaagcaggatagctagg

SEQ ID NO: 1671878 - DNA, 25 bp, Homo sapien
cacgaccgtcacctacttatggcag

SEQ ID NO: 1671879 - DNA, 25 bp, Homo sapien
cgcactccacgcgaagggatgccag

SEQ ID NO: 1671880 - DNA, 25 bp, Homo sapien
tgcagggcccctcaccgatctggat

SEQ ID NO: 1671881 - DNA, 25 bp, Homo sapien
tttccctaacgctgcccactgaggc

SEQ ID NO: 1671882 - DNA, 25 bp, Homo sapien
acgcgaagggatgccagaccctcgg

SEQ ID NO: 1671883 - DNA, 25 bp, Homo sapien
tctaccctgttggggtcgctctctg

SEQ ID NO: 1671884 - DNA, 25 bp, Homo sapien
gggtcgctctctgacccccgcgctg

SEQ ID NO: 1671885 - DNA, 25 bp, Homo sapien
accctgttggggtcgctctctgacc

SEQ ID NO: 1671886 - DNA, 25 bp, Homo sapien
cgctgcatccccgggaccgacccac

SEQ ID NO: 1671887 - DNA, 25 bp, Homo sapien
cgcccggagccccagtgcgcgatgg

SEQ ID NO: 1671888 - DNA, 25 bp, Homo sapien
cccagtgcgcgatggcggccggcaa

SEQ ID NO: 1671889 - DNA, 25 bp, Homo sapien
ccagtgcgcgatggcggccggcaaa

SEQ ID NO: 1671890 - DNA, 25 bp, Homo sapien
cggagccccagtgcgcgatggcggc

SEQ ID NO: 1671891 - DNA, 25 bp, Homo sapien
ggcgcctgcgtcattttgggcacca

SEQ ID NO: 1671892 - DNA, 25 bp, Homo sapien
aatcagacgcgagtgtggcctcccg

SEQ ID NO: 1671893 - DNA, 25 bp, Homo sapien
gactcccacaatgccgcgaggctgt

SEQ ID NO: 1671894 - DNA, 25 bp, Homo sapien
acaggtgacagtgcgcatggccaat

SEQ ID NO: 1671895 - DNA, 25 bp, Homo sapien
atgaagtctctgacaaagaggaggc

SEQ ID NO: 1671896 - DNA, 25 bp, Homo sapien
cataaactcttcaacatgaagtctc

SEQ ID NO: 1671897 - DNA, 25 bp, Homo sapien
catgaagtctctgacaaagaggagg

SEQ ID NO: 1671898 - DNA, 25 bp, Homo sapien
actttcaaacaacataaactcttca

SEQ ID NO: 1671899 - DNA, 25 bp, Homo sapien
tctcagtccaatgtgtcaactctgg

SEQ ID NO: 1671900 - DNA, 25 bp, Homo sapien
tgccacagatgctcactgaatcccc

SEQ ID NO: 1671901 - DNA, 25 bp, Homo sapien
gcacagatacttgggaaaactttcc

SEQ ID NO: 1671902 - DNA, 25 bp, Homo sapien
agcgagagcacagatacttgggaaa

SEQ ID NO: 1671903 - DNA, 25 bp, Homo sapien
ctagcgagagcacagatacttggga

SEQ ID NO: 1671904 - DNA, 25 bp, Homo sapien
agagcacagatacttgggaaaactt

SEQ ID NO: 1671905 - DNA, 25 bp, Homo sapien
ctggcacaaggtcgcctgagcatgt

SEQ ID NO: 1671906 - DNA, 25 bp, Homo sapien
cactggcacaaggtcgcctgagcat

SEQ ID NO: 1671907 - DNA, 25 bp, Homo sapien
actggcacaaggtcgcctgagcatg

SEQ ID NO: 1671908 - DNA, 25 bp, Homo sapien
ggcacaaggtcgcctgagcatgtac

SEQ ID NO: 1671909 - DNA, 25 bp, Homo sapien
gtgccagatgaggcccgcgatgttc

SEQ ID NO: 1671910 - DNA, 25 bp, Homo sapien
tgccacaccgattacactcgtaggg

SEQ ID NO: 1671911 - DNA, 25 bp, Homo sapien
tgtgcttggtcagacaggagctgtc

SEQ ID NO: 1671912 - DNA, 25 bp, Homo sapien
tcctctggtgccagatgaggcccgc

SEQ ID NO: 1671913 - DNA, 25 bp, Homo sapien
tctacacccagtacatacatagggc

SEQ ID NO: 1671914 - DNA, 25 bp, Homo sapien
caaaagagctgactgttgtggttgg

SEQ ID NO: 1671915 - DNA, 25 bp, Homo sapien
gaaaagtttgacactggttacagcc

SEQ ID NO: 1671916 - DNA, 25 bp, Homo sapien
catatagggtctctttccaatgtga

SEQ ID NO: 1671917 - DNA, 25 bp, Homo sapien
tggacaataaggttggagacatcag

SEQ ID NO: 1671918 - DNA, 25 bp, Homo sapien
attctcagatggacaataaggttgg

SEQ ID NO: 1671919 - DNA, 25 bp, Homo sapien
cagatggacaataaggttggagaca

SEQ ID NO: 1671920 - DNA, 25 bp, Homo sapien
gacaataaggttggagacatcagaa

SEQ ID NO: 1671921 - DNA, 25 bp, Homo sapien
ttggtaaaggtggagccagcactga

SEQ ID NO: 1671922 - DNA, 25 bp, Homo sapien
gcttggtaaaggtggagccagcact

SEQ ID NO: 1671923 - DNA, 25 bp, Homo sapien
tgaaatgcaaaacaagggaagagtg

SEQ ID NO: 1671924 - DNA, 25 bp, Homo sapien
tgaaggtcttcccataccaattcct

SEQ ID NO: 1671925 - DNA, 25 bp, Homo sapien
cattgtgttcataaggacatgtgtc

SEQ ID NO: 1671926 - DNA, 25 bp, Homo sapien
aattcttagagagggattttccaca

SEQ ID NO: 1671927 - DNA, 25 bp, Homo sapien
tcattacaggtataagggctctctc

SEQ ID NO: 1671928 - DNA, 25 bp, Homo sapien
gatttcggtctaacggacagtccac

SEQ ID NO: 1671929 - DNA, 25 bp, Homo sapien
ggctgatggctgctctacagtcatc

SEQ ID NO: 1671930 - DNA, 25 bp, Homo sapien
ggctaggttgtccaccctggctgat

SEQ ID NO: 1671931 - DNA, 25 bp, Homo sapien
gaatttgaccgttagagcctttctg

SEQ ID NO: 1671932 - DNA, 25 bp, Homo sapien
ttagatcttcatcaaggtggctagg

SEQ ID NO: 1671933 - DNA, 25 bp, Homo sapien
cctctttgacatgaagctaggactg

SEQ ID NO: 1671934 - DNA, 25 bp, Homo sapien
gtttgaggacctctttgacatgaag

SEQ ID NO: 1671935 - DNA, 25 bp, Homo sapien
gttcacagaaacctgttgtttgagg

SEQ ID NO: 1671936 - DNA, 25 bp, Homo sapien
catgttcacagaaacctgttgtttg

SEQ ID NO: 1671937 - DNA, 25 bp, Homo sapien
tgctgtttgcctcaaatgcacctct

SEQ ID NO: 1671938 - DNA, 25 bp, Homo sapien
cccctcatagatgctctgggtcctt

SEQ ID NO: 1671939 - DNA, 25 bp, Homo sapien
gtgtgtggatgctgtttgcctcaaa

SEQ ID NO: 1671940 - DNA, 25 bp, Homo sapien
gcacctctggatttctatggagcat

SEQ ID NO: 1671941 - DNA, 25 bp, Homo sapien
cagacctctcctaatgcagataaaa

SEQ ID NO: 1671942 - DNA, 25 bp, Homo sapien
attcccagacctctcctaatgcaga

SEQ ID NO: 1671943 - DNA, 25 bp, Homo sapien
ctggtcctcacattcccagacctct

SEQ ID NO: 1671944 - DNA, 25 bp, Homo sapien
cccagacctctcctaatgcagataa

SEQ ID NO: 1671945 - DNA, 25 bp, Homo sapien
ttcaccaaattggatagttccttcc

SEQ ID NO: 1671946 - DNA, 25 bp, Homo sapien
caaattggatagttccttcccaaca

SEQ ID NO: 1671947 - DNA, 25 bp, Homo sapien
caacaccatcccaagttgatgcttc

SEQ ID NO: 1671948 - DNA, 25 bp, Homo sapien
gttgatgcttccatttgacttttgt

SEQ ID NO: 1671949 - DNA, 25 bp, Homo sapien
ctgatgcaagctccatcatcatcac

SEQ ID NO: 1671950 - DNA, 25 bp, Homo sapien
ggaaattcggagttggcaccgcact

SEQ ID NO: 1671951 - DNA, 25 bp, Homo sapien
cgtgctccacagggcgaagggagag

SEQ ID NO: 1671952 - DNA, 25 bp, Homo sapien
aaattcggagttggcaccgcactgg

SEQ ID NO: 1671953 - DNA, 25 bp, Homo sapien
tgctccacagggcgaagggagagga

SEQ ID NO: 1671954 - DNA, 25 bp, Homo sapien
cagctcgccctccgactctccgcat

SEQ ID NO: 1671955 - DNA, 25 bp, Homo sapien
gccgtagcgtcctcgtcagctcgcc

SEQ ID NO: 1671956 - DNA, 25 bp, Homo sapien
tcccgccgccgtagcgtcctcgtca

SEQ ID NO: 1671957 - DNA, 25 bp, Homo sapien
gtagcgtcctcgtcagctcgccctc

SEQ ID NO: 1671958 - DNA, 25 bp, Homo sapien
gttcccggatgcgatattccggtga

SEQ ID NO: 1671959 - DNA, 25 bp, Homo sapien
gggcgcgcagagttcccggatgcga

SEQ ID NO: 1671960 - DNA, 25 bp, Homo sapien
gcagagttcccggatgcgatattcc

SEQ ID NO: 1671961 - DNA, 25 bp, Homo sapien
gcgcgcagagttcccggatgcgata

SEQ ID NO: 1671962 - DNA, 25 bp, Homo sapien
ctgccttgagccgctgcggacgagc

SEQ ID NO: 1671963 - DNA, 25 bp, Homo sapien
gccttgagccgctgcggacgagcac

SEQ ID NO: 1671964 - DNA, 25 bp, Homo sapien
gggctgccttgagccgctgcggacg

SEQ ID NO: 1671965 - DNA, 25 bp, Homo sapien
gtgggctgccttgagccgctgcgga

SEQ ID NO: 1671966 - DNA, 25 bp, Homo sapien
gggtcccactcgtaggctgctgtgt

SEQ ID NO: 1671967 - DNA, 25 bp, Homo sapien
cgtggtctcggcagaatctcgttca

SEQ ID NO: 1671968 - DNA, 25 bp, Homo sapien
gtatatccgcttgcgagcctgcacc

SEQ ID NO: 1671969 - DNA, 25 bp, Homo sapien
ttgtctctcaggttgaccagccgta

SEQ ID NO: 1671970 - DNA, 25 bp, Homo sapien
cttcatgcggtcgtttaacgctccg

SEQ ID NO: 1671971 - DNA, 25 bp, Homo sapien
ttaacgctccgtgcacaataaccat

SEQ ID NO: 1671972 - DNA, 25 bp, Homo sapien
ggtcgtttaacgctccgtgcacaat

SEQ ID NO: 1671973 - DNA, 25 bp, Homo sapien
catgcggtcgtttaacgctccgtgc

SEQ ID NO: 1671974 - DNA, 25 bp, Homo sapien
tgatgctccatcgaaaataacccat

SEQ ID NO: 1671975 - DNA, 25 bp, Homo sapien
tgtgtgatgctccatcgaaaataac

SEQ ID NO: 1671976 - DNA, 25 bp, Homo sapien
ttgtgtgatgctccatcgaaaataa

SEQ ID NO: 1671977 - DNA, 25 bp, Homo sapien
tgtgatgctccatcgaaaataaccc

SEQ ID NO: 1671978 - DNA, 25 bp, Homo sapien
tattatgccaacaagtatctgtaac

SEQ ID NO: 1671979 - DNA, 25 bp, Homo sapien
aattattatgccaacaagtatctgt

SEQ ID NO: 1671980 - DNA, 25 bp, Homo sapien
ttaccaaattattatgccaacaagt

SEQ ID NO: 1671981 - DNA, 25 bp, Homo sapien
ccaaattattatgccaacaagtatc

SEQ ID NO: 1671982 - DNA, 25 bp, Homo sapien
tagtaaatcttctatttgatgcccc

SEQ ID NO: 1671983 - DNA, 25 bp, Homo sapien
tcttagcacaagcttgtttcagtct

SEQ ID NO: 1671984 - DNA, 25 bp, Homo sapien
cctttataatggttcacagtggctg

SEQ ID NO: 1671985 - DNA, 25 bp, Homo sapien
catcctaaatgaacaaccatggagg

SEQ ID NO: 1671986 - DNA, 25 bp, Homo sapien
actactatgcccagataatttcctg

SEQ ID NO: 1671987 - DNA, 25 bp, Homo sapien
ctatgcccagataatttcctgtatt

SEQ ID NO: 1671988 - DNA, 25 bp, Homo sapien
tactatgcccagataatttcctgta

SEQ ID NO: 1671989 - DNA, 25 bp, Homo sapien
cactactatgcccagataatttcct

SEQ ID NO: 1671990 - DNA, 25 bp, Homo sapien
gcttgtttcagtcttaagaggaacg

SEQ ID NO: 1671991 - DNA, 25 bp, Homo sapien
tgtgtgcagtacagcactgtgtgga

SEQ ID NO: 1671992 - DNA, 25 bp, Homo sapien
tcctgcaacgagtcctcagcattat

SEQ ID NO: 1671993 - DNA, 25 bp, Homo sapien
tattcacctagtttgccctcctgca

SEQ ID NO: 1671994 - DNA, 25 bp, Homo sapien
gcagaggttgctgtgagtggagatc

SEQ ID NO: 1671995 - DNA, 25 bp, Homo sapien
gagatcatgccactgcacagtgaga

SEQ ID NO: 1671996 - DNA, 25 bp, Homo sapien
agaggttgctgtgagtggagatcat

SEQ ID NO: 1671997 - DNA, 25 bp, Homo sapien
tggagatcatgccactgcacagtga

SEQ ID NO: 1671998 - DNA, 25 bp, Homo sapien
ccagagaggagtcagatctaagaca

SEQ ID NO: 1671999 - DNA, 25 bp, Homo sapien
ggtacagactgaatcatccccaaag

SEQ ID NO: 1672000 - DNA, 25 bp, Homo sapien
tgcttacgtacaaggtggaaactcc

SEQ ID NO: 1672001 - DNA, 25 bp, Homo sapien
cagacttaacagtgtggctcagcaa

SEQ ID NO: 1672002 - DNA, 25 bp, Homo sapien
caagggatgagctcttttggaacat

SEQ ID NO: 1672003 - DNA, 25 bp, Homo sapien
atgtttccatgggttgctctcccag

SEQ ID NO: 1672004 - DNA, 25 bp, Homo sapien
ttatgtttccatgggttgctctccc

SEQ ID NO: 1672005 - DNA, 25 bp, Homo sapien
caggtgtgctctttgatgtcgaaca

SEQ ID NO: 1672006 - DNA, 25 bp, Homo sapien
tctggacactgatatggggtctcct

SEQ ID NO: 1672007 - DNA, 25 bp, Homo sapien
attctggacactgatatggggtctc

SEQ ID NO: 1672008 - DNA, 25 bp, Homo sapien
actgatatggggtctccttagtgtg

SEQ ID NO: 1672009 - DNA, 25 bp, Homo sapien
ggacactgatatggggtctccttag

SEQ ID NO: 1672010 - DNA, 25 bp, Homo sapien
aggctttgccacactgattacactc

SEQ ID NO: 1672011 - DNA, 25 bp, Homo sapien
gaaggctttgccacactgattacac

SEQ ID NO: 1672012 - DNA, 25 bp, Homo sapien
gctttgccacactgattacactcat

SEQ ID NO: 1672013 - DNA, 25 bp, Homo sapien
tttgccacactgattacactcatag

SEQ ID NO: 1672014 - DNA, 25 bp, Homo sapien
cctaatgaggccagcgatattcctg

SEQ ID NO: 1672015 - DNA, 25 bp, Homo sapien
tacgcactctcgatgaaagtcttgc

SEQ ID NO: 1672016 - DNA, 25 bp, Homo sapien
tctgatgcctgatgaggtacgcact

SEQ ID NO: 1672017 - DNA, 25 bp, Homo sapien
tgacactggttgcagccatagggct

SEQ ID NO: 1672018 - DNA, 25 bp, Homo sapien
acttttaggatagctgggtaaggcg

SEQ ID NO: 1672019 - DNA, 25 bp, Homo sapien
ctaacatttgagtcaggtgcatgga

SEQ ID NO: 1672020 - DNA, 25 bp, Homo sapien
gaactctctgagacggtggaaggtc

SEQ ID NO: 1672021 - DNA, 25 bp, Homo sapien
aagctgattgcctcaagtgtccctc

SEQ ID NO: 1672022 - DNA, 25 bp, Homo sapien
cttagtggcagctgtgaaaacataa

SEQ ID NO: 1672023 - DNA, 25 bp, Homo sapien
ggcagctgtgaaaacataaactggg

SEQ ID NO: 1672024 - DNA, 25 bp, Homo sapien
gcctgggcaactatgtctctactaa

SEQ ID NO: 1672025 - DNA, 25 bp, Homo sapien
gtgaaaacataaactgggggcaggc

SEQ ID NO: 1672026 - DNA, 25 bp, Homo sapien
tggataaacgaacatcaatccatac

SEQ ID NO: 1672027 - DNA, 25 bp, Homo sapien
aagctggataaacgaacatcaatcc

SEQ ID NO: 1672028 - DNA, 25 bp, Homo sapien
ctggtaggtatctcagagtcagaaa

SEQ ID NO: 1672029 - DNA, 25 bp, Homo sapien
cagaaagctggataaacgaacatca

SEQ ID NO: 1672030 - DNA, 25 bp, Homo sapien
ggcagagggatccattcaggccagg

SEQ ID NO: 1672031 - DNA, 25 bp, Homo sapien
ttagccatttatgcccatccacacg

SEQ ID NO: 1672032 - DNA, 25 bp, Homo sapien
tcgatggttgctggacattagccat

SEQ ID NO: 1672033 - DNA, 25 bp, Homo sapien
caggtgtgtggatacttgacatcga

SEQ ID NO: 1672034 - DNA, 25 bp, Homo sapien
aggctgcagtgagctgtgatcgtgc

SEQ ID NO: 1672035 - DNA, 25 bp, Homo sapien
ctgtgatcgtgccactgcactccag

SEQ ID NO: 1672036 - DNA, 25 bp, Homo sapien
agctacttggtagcccaggagctca

SEQ ID NO: 1672037 - DNA, 25 bp, Homo sapien
cccagctacttggtagcccaggagc

SEQ ID NO: 1672038 - DNA, 25 bp, Homo sapien
gacaaaattcacactgaagaagaca

SEQ ID NO: 1672039 - DNA, 25 bp, Homo sapien
acaaaattcacactgaagaagacag

SEQ ID NO: 1672040 - DNA, 25 bp, Homo sapien
tgaaatgtttccaaaaataggtgga

SEQ ID NO: 1672041 - DNA, 25 bp, Homo sapien
tccaaaaataggtggattaatgaat

SEQ ID NO: 1672042 - DNA, 25 bp, Homo sapien
tttccaaaaataggtggattaatga

SEQ ID NO: 1672043 - DNA, 25 bp, Homo sapien
caaaaataggtggattaatgaatgg

SEQ ID NO: 1672044 - DNA, 25 bp, Homo sapien
ccatgttccgggcgattgcgcttgc

SEQ ID NO: 1672045 - DNA, 25 bp, Homo sapien
atgttccgggcgattgcgcttgcgc

SEQ ID NO: 1672046 - DNA, 25 bp, Homo sapien
gttccgggcgattgcgcttgcgcgg

SEQ ID NO: 1672047 - DNA, 25 bp, Homo sapien
agccatgttccgggcgattgcgctt

SEQ ID NO: 1672048 - DNA, 25 bp, Homo sapien
gggacaaggatgtgcgcgtgcgcgg

SEQ ID NO: 1672049 - DNA, 25 bp, Homo sapien
ctgccgggacaaggatgtgcgcgtg

SEQ ID NO: 1672050 - DNA, 25 bp, Homo sapien
tgcgcgtgcgcggagtccccgagct

SEQ ID NO: 1672051 - DNA, 25 bp, Homo sapien
gcgtgcgcggagtccccgagcttcc

SEQ ID NO: 1672052 - DNA, 25 bp, Homo sapien
catgaaggccgtatcagaccaggca

SEQ ID NO: 1672053 - DNA, 25 bp, Homo sapien
aaaaacctcattaacagacctgaag

SEQ ID NO: 1672054 - DNA, 25 bp, Homo sapien
tccgcaggttgaaatacttcacaat

SEQ ID NO: 1672055 - DNA, 25 bp, Homo sapien
gaagttaagttcagaacacactgac

SEQ ID NO: 1672056 - DNA, 25 bp, Homo sapien
ggaggcattcgcgaacgccccagtg

SEQ ID NO: 1672057 - DNA, 25 bp, Homo sapien
gggctcacattccacaactactaaa

SEQ ID NO: 1672058 - DNA, 25 bp, Homo sapien
ttccttctgagctcgggaacgtctg

SEQ ID NO: 1672059 - DNA, 25 bp, Homo sapien
tactaaatcaacaccgacacactca

SEQ ID NO: 1672060 - DNA, 25 bp, Homo sapien
tccggggaacggctcgggcggctga

SEQ ID NO: 1672061 - DNA, 25 bp, Homo sapien
tgacaccgcagtccgcgagaggcga

SEQ ID NO: 1672062 - DNA, 25 bp, Homo sapien
ttggactgtgggcaggatcgcaggc

SEQ ID NO: 1672063 - DNA, 25 bp, Homo sapien
ccctgcccggaaggcgggatctggg

SEQ ID NO: 1672064 - DNA, 25 bp, Homo sapien
cccgttctatcccgcagtggtttgg

SEQ ID NO: 1672065 - DNA, 25 bp, Homo sapien
ccgcagacgcggagcccacaggagt

SEQ ID NO: 1672066 - DNA, 25 bp, Homo sapien
tgttggctggaacccgcagccgtgt

SEQ ID NO: 1672067 - DNA, 25 bp, Homo sapien
gggagtgcaggtcatcactcccacc

SEQ ID NO: 1672068 - DNA, 25 bp, Homo sapien
ccgactagctggcatgacatgcgca

SEQ ID NO: 1672069 - DNA, 25 bp, Homo sapien
tagctggcatgacatgcgcatgtca

SEQ ID NO: 1672070 - DNA, 25 bp, Homo sapien
ctcccgactagctggcatgacatgc

SEQ ID NO: 1672071 - DNA, 25 bp, Homo sapien
gcatgacatgcgcatgtcaccacat

SEQ ID NO: 1672072 - DNA, 25 bp, Homo sapien
tggaccagagtgcttgcatgcccct

SEQ ID NO: 1672073 - DNA, 25 bp, Homo sapien
tttgacacttgtcatggacaggagg

SEQ ID NO: 1672074 - DNA, 25 bp, Homo sapien
cttgcactgactggcttggaccaga

SEQ ID NO: 1672075 - DNA, 25 bp, Homo sapien
tcactctccgtccatgttcattgct

SEQ ID NO: 1672076 - DNA, 25 bp, Homo sapien
gccaattggttatgtgaagaatagc

SEQ ID NO: 1672077 - DNA, 25 bp, Homo sapien
taagatgagtttgaagccaattggt

SEQ ID NO: 1672078 - DNA, 25 bp, Homo sapien
tctgcaggcgtttctccttaagatg

SEQ ID NO: 1672079 - DNA, 25 bp, Homo sapien
ttggttatgtgaagaatagcaatca

SEQ ID NO: 1672080 - DNA, 25 bp, Homo sapien
gaaccagtgacctttgaagatgtaa

SEQ ID NO: 1672081 - DNA, 25 bp, Homo sapien
tcgtggatgcggatggcctgtggct

SEQ ID NO: 1672082 - DNA, 25 bp, Homo sapien
gggactgctggacctcaaacagaag

SEQ ID NO: 1672083 - DNA, 25 bp, Homo sapien
agtggggactgctggacctcaaaca

SEQ ID NO: 1672084 - DNA, 25 bp, Homo sapien
caagaatttctcgtaggtgactgcg

SEQ ID NO: 1672085 - DNA, 25 bp, Homo sapien
ccatatagctgaagtcatctctaga

SEQ ID NO: 1672086 - DNA, 25 bp, Homo sapien
gtcggacctcctgcacataacaaaa

SEQ ID NO: 1672087 - DNA, 25 bp, Homo sapien
tatttcatacgtaaagtcggacctc

SEQ ID NO: 1672088 - DNA, 25 bp, Homo sapien
tggcgctaagccctacaagtgtcag

SEQ ID NO: 1672089 - DNA, 25 bp, Homo sapien
gggagcgcccatatgcatgcaacaa

SEQ ID NO: 1672090 - DNA, 25 bp, Homo sapien
gagaggccctatgtgtgtcaagact

SEQ ID NO: 1672091 - DNA, 25 bp, Homo sapien
gcaatataacatgcacaggcctgct

SEQ ID NO: 1672092 - DNA, 25 bp, Homo sapien
ctctctaaactaaggctaagaccgg

SEQ ID NO: 1672093 - DNA, 25 bp, Homo sapien
ttcccagtaagttaaggcattctta

SEQ ID NO: 1672094 - DNA, 25 bp, Homo sapien
cccggatctgtggaggctcgcctgc

SEQ ID NO: 1672095 - DNA, 25 bp, Homo sapien
gctaagaccggttgggctacattcc

SEQ ID NO: 1672096 - DNA, 25 bp, Homo sapien
aagggatgtgagttggatggttcat

SEQ ID NO: 1672097 - DNA, 25 bp, Homo sapien
aatttcacaggctaaataaacaagt

SEQ ID NO: 1672098 - DNA, 25 bp, Homo sapien
taataggatagggatgttacaaccc

SEQ ID NO: 1672099 - DNA, 25 bp, Homo sapien
cagtcccgcggttatttgtagtcct

SEQ ID NO: 1672100 - DNA, 25 bp, Homo sapien
gcaaccccagaaagggtactctgat

SEQ ID NO: 1672101 - DNA, 25 bp, Homo sapien
tctgtgtacattgatattgggcccc

SEQ ID NO: 1672102 - DNA, 25 bp, Homo sapien
gtctgggtaactgcctagcttatgt

SEQ ID NO: 1672103 - DNA, 25 bp, Homo sapien
tagactgtgtatcctttgaagtgtc

SEQ ID NO: 1672104 - DNA, 25 bp, Homo sapien
gaatcaacctttagacaacctctga

SEQ ID NO: 1672105 - DNA, 25 bp, Homo sapien
gaatccttttcacgacttacacaga

SEQ ID NO: 1672106 - DNA, 25 bp, Homo sapien
tccaaactttggcaagaaatccata

SEQ ID NO: 1672107 - DNA, 25 bp, Homo sapien
tttaagtcaacaacctgaatcaacc

SEQ ID NO: 1672108 - DNA, 25 bp, Homo sapien
tacaaagttacgctctatgcagatg

SEQ ID NO: 1672109 - DNA, 25 bp, Homo sapien
gagcaggcccaagcaaggctcaaaa

SEQ ID NO: 1672110 - DNA, 25 bp, Homo sapien
tttacaccctatgaaatagtggccc

SEQ ID NO: 1672111 - DNA, 25 bp, Homo sapien
ggctcaaaagcactggtcgcagaat

SEQ ID NO: 1672112 - DNA, 25 bp, Homo sapien
ggagaagccactgcaagatatttaa

SEQ ID NO: 1672113 - DNA, 25 bp, Homo sapien
tcctcaaatacccttcattgggctg

SEQ ID NO: 1672114 - DNA, 25 bp, Homo sapien
tttctgtttggcataggcatccctc

SEQ ID NO: 1672115 - DNA, 25 bp, Homo sapien
tccacagtgattccccagaggaacc

SEQ ID NO: 1672116 - DNA, 25 bp, Homo sapien
tgctggttgcgagggcaccaggtgt

SEQ ID NO: 1672117 - DNA, 25 bp, Homo sapien
tgagggtgctgggtgcgagggcacc

SEQ ID NO: 1672118 - DNA, 25 bp, Homo sapien
agggtgctgggtgcgagggcaccag

SEQ ID NO: 1672119 - DNA, 25 bp, Homo sapien
ggtgctggttgcgagggcaccaggt

SEQ ID NO: 1672120 - DNA, 25 bp, Homo sapien
tgagggtgctgggtgcgagggcacc

SEQ ID NO: 1672121 - DNA, 25 bp, Homo sapien
tgctgggtgcgagggcaccaggtgt

SEQ ID NO: 1672122 - DNA, 25 bp, Homo sapien
tgagggcaccaggtgtgagggtgct

SEQ ID NO: 1672123 - DNA, 25 bp, Homo sapien
tgggtgtgagggcaccaggtgtgag

SEQ ID NO: 1672124 - DNA, 25 bp, Homo sapien
tagaggctccgtatcttcaacagag

SEQ ID NO: 1672125 - DNA, 25 bp, Homo sapien
tctgaagtggcaaacggtggagccc

SEQ ID NO: 1672126 - DNA, 25 bp, Homo sapien
taaacattcttactccgggctacag

SEQ ID NO: 1672127 - DNA, 25 bp, Homo sapien
tgcaaggatcttgcccaggagggaa

SEQ ID NO: 1672128 - DNA, 25 bp, Homo sapien
tccctctggatgctccaaatggaaa

SEQ ID NO: 1672129 - DNA, 25 bp, Homo sapien
tcaaggtgttgatatggttgtgctc

SEQ ID NO: 1672130 - DNA, 25 bp, Homo sapien
tgttgatatggttgtgctccctctg

SEQ ID NO: 1672131 - DNA, 25 bp, Homo sapien
tccttctcctgttggttgcagcatt

SEQ ID NO: 1672132 - DNA, 25 bp, Homo sapien
gataccatgtttgctgatccatccc

SEQ ID NO: 1672133 - DNA, 25 bp, Homo sapien
gggactagtgttacttagtcacttc

SEQ ID NO: 1672134 - DNA, 25 bp, Homo sapien
ttgtattttgcactttaccactgat

SEQ ID NO: 1672135 - DNA, 25 bp, Homo sapien
cctttcacagcctgcatacggatta

SEQ ID NO: 1672136 - DNA, 25 bp, Homo sapien
tgagagtcatcagtgtgctagagct

SEQ ID NO: 1672137 - DNA, 25 bp, Homo sapien
ggttcatggtactcacctcagagag

SEQ ID NO: 1672138 - DNA, 25 bp, Homo sapien
gaaacctcttcagtcacagtgtgtc

SEQ ID NO: 1672139 - DNA, 25 bp, Homo sapien
gcaaccagttaagggaacaccagga

SEQ ID NO: 1672140 - DNA, 25 bp, Homo sapien
gagccgggtgcagttgccaacactt

SEQ ID NO: 1672141 - DNA, 25 bp, Homo sapien
gaatgtgaccattgcgagaaagcct

SEQ ID NO: 1672142 - DNA, 25 bp, Homo sapien
gagaaagcctttagccaacggtgtc

SEQ ID NO: 1672143 - DNA, 25 bp, Homo sapien
gtgtcaacttactaggcagcagaga

SEQ ID NO: 1672144 - DNA, 25 bp, Homo sapien
catgtgacatgaagcctggctaaat

SEQ ID NO: 1672145 - DNA, 25 bp, Homo sapien
taagcaggataagagccaatgggag

SEQ ID NO: 1672146 - DNA, 25 bp, Homo sapien
tactgcacatttaagcaggataaga

SEQ ID NO: 1672147 - DNA, 25 bp, Homo sapien
catgagccatagtgcatactattac

SEQ ID NO: 1672148 - DNA, 25 bp, Homo sapien
gtgagccgaggtctagtgccattac

SEQ ID NO: 1672149 - DNA, 25 bp, Homo sapien
agtgagccgaggtctagtgccatta

SEQ ID NO: 1672150 - DNA, 25 bp, Homo sapien
tgagccgaggtctagtgccattaca

SEQ ID NO: 1672151 - DNA, 25 bp, Homo sapien
taagtactctgtatcaaatgatcaa

SEQ ID NO: 1672152 - DNA, 25 bp, Homo sapien
taataattgtgggtattttagaata

SEQ ID NO: 1672153 - DNA, 25 bp, Homo sapien
tgcctaaagcctaggccgggaacga

SEQ ID NO: 1672154 - DNA, 25 bp, Homo sapien
agaatatatatgaaacagctatttg

SEQ ID NO: 1672155 - DNA, 25 bp, Homo sapien
tgtaggtcctatcaatatttggtgt

SEQ ID NO: 1672156 - DNA, 25 bp, Homo sapien
gtaggtcctatcaatatttggtgta

SEQ ID NO: 1672157 - DNA, 25 bp, Homo sapien
taggtcctatcaatatttggtgtat

SEQ ID NO: 1672158 - DNA, 25 bp, Homo sapien
ttgagttcccatagctccatgttcc

SEQ ID NO: 1672159 - DNA, 25 bp, Homo sapien
ggcttcacttaaggcagttgagttc

SEQ ID NO: 1672160 - DNA, 25 bp, Homo sapien
ctctggaaaactctattgtatattc

SEQ ID NO: 1672161 - DNA, 25 bp, Homo sapien
aatatgactcatccagcagcctctg

SEQ ID NO: 1672162 - DNA, 25 bp, Homo sapien
taactcgtcctgtgactttgatgcg

SEQ ID NO: 1672163 - DNA, 25 bp, Homo sapien
ttgcttcctgcccacgagtgaggcc

SEQ ID NO: 1672164 - DNA, 25 bp, Homo sapien
ctcccgcgcaagttcccgagaagag

SEQ ID NO: 1672165 - DNA, 25 bp, Homo sapien
tgatgcgtgtgcgttttaggcaccg

SEQ ID NO: 1672166 - DNA, 25 bp, Homo sapien
aattgtagcgttggccgggtgccca

SEQ ID NO: 1672167 - DNA, 25 bp, Homo sapien
cattcccgagagaatcgagcaggcc

SEQ ID NO: 1672168 - DNA, 25 bp, Homo sapien
gaaggtctgtcctcgtgttgactga

SEQ ID NO: 1672169 - DNA, 25 bp, Homo sapien
caggcgctgtccttcactgggcgat

SEQ ID NO: 1672170 - DNA, 25 bp, Homo sapien
caaaacgttgccgtgtcagctctca

SEQ ID NO: 1672171 - DNA, 25 bp, Homo sapien
tcatctctagaggttcaacaggacc

SEQ ID NO: 1672172 - DNA, 25 bp, Homo sapien
caggaccctgtggatggcccaagtt

SEQ ID NO: 1672173 - DNA, 25 bp, Homo sapien
gataacctccattcgcatagctaaa

SEQ ID NO: 1672174 - DNA, 25 bp, Homo sapien
aaacagataagaaactcctccgtgg

SEQ ID NO: 1672175 - DNA, 25 bp, Homo sapien
gaagactctatatacagcttgaata

SEQ ID NO: 1672176 - DNA, 25 bp, Homo sapien
catttcagttcacattttctaagca

SEQ ID NO: 1672177 - DNA, 25 bp, Homo sapien
ttctgttcataaaagtaatgcgagt

SEQ ID NO: 1672178 - DNA, 25 bp, Homo sapien
gataaaagcaaggtgtcaaactgta

SEQ ID NO: 1672179 - DNA, 25 bp, Homo sapien
tactggttggccagaagaattggga

SEQ ID NO: 1672180 - DNA, 25 bp, Homo sapien
ggtggaatggagatcatagccttaa

SEQ ID NO: 1672181 - DNA, 25 bp, Homo sapien
gggatcctcaaactatactaatgtg

SEQ ID NO: 1672182 - DNA, 25 bp, Homo sapien
gatggacaaaccgtgtgggtgccct

SEQ ID NO: 1672183 - DNA, 25 bp, Homo sapien
gtgggcctgttacctccagtacgag

SEQ ID NO: 1672184 - DNA, 25 bp, Homo sapien
tccatggtattcaaccgtgggcctg

SEQ ID NO: 1672185 - DNA, 25 bp, Homo sapien
aaaggtccggtggatttgctgacgt

SEQ ID NO: 1672186 - DNA, 25 bp, Homo sapien
acaaacttcactggcactggtggtg

SEQ ID NO: 1672187 - DNA, 25 bp, Homo sapien
gcacaaacttcactggcactggtgg

SEQ ID NO: 1672188 - DNA, 25 bp, Homo sapien
tggtggtggaccttcaacacctctt

SEQ ID NO: 1672189 - DNA, 25 bp, Homo sapien
cactggtggtggaccttcaacacct

SEQ ID NO: 1672190 - DNA, 25 bp, Homo sapien
tcatgtcccaggtcccgtgctcctt

SEQ ID NO: 1672191 - DNA, 25 bp, Homo sapien
tgacaaactctgtctgccgccagaa

SEQ ID NO: 1672192 - DNA, 25 bp, Homo sapien
gaatgctgggggcagtcatgtccca

SEQ ID NO: 1672193 - DNA, 25 bp, Homo sapien
ggagatgttggaggccgaaggaatg

SEQ ID NO: 1672194 - DNA, 25 bp, Homo sapien
cattcgtcgtccttcgttcggtcca

SEQ ID NO: 1672195 - DNA, 25 bp, Homo sapien
gacagtcctgcatgtgttgatgcca

SEQ ID NO: 1672196 - DNA, 25 bp, Homo sapien
tcggtccagaagcaaccgcgacagt

SEQ ID NO: 1672197 - DNA, 25 bp, Homo sapien
caggtgtgtgagtatccctcatacc

SEQ ID NO: 1672198 - DNA, 25 bp, Homo sapien
acaaatacttggcatggcccaaggt

SEQ ID NO: 1672199 - DNA, 25 bp, Homo sapien
tgacaaatacttggcatggcccaag

SEQ ID NO: 1672200 - DNA, 25 bp, Homo sapien
caaatacttggcatggcccaaggtc

SEQ ID NO: 1672201 - DNA, 25 bp, Homo sapien
aatacttggcatggcccaaggtcct

SEQ ID NO: 1672202 - DNA, 25 bp, Homo sapien
agggtcacaaatgattttgttggct

SEQ ID NO: 1672203 - DNA, 25 bp, Homo sapien
agaaaccagggtcacaaatgatttt

SEQ ID NO: 1672204 - DNA, 25 bp, Homo sapien
cagggtcacaaatgattttgttggc

SEQ ID NO: 1672205 - DNA, 25 bp, Homo sapien
gaaagaaaccagggtcacaaatgat

SEQ ID NO: 1672206 - DNA, 25 bp, Homo sapien
tcgctctattcaggcctcagcttaa

SEQ ID NO: 1672207 - DNA, 25 bp, Homo sapien
tgagttcttcgctctattcaggcct

SEQ ID NO: 1672208 - DNA, 25 bp, Homo sapien
catctgcctccccacacaataacat

SEQ ID NO: 1672209 - DNA, 25 bp, Homo sapien
tctccctgagttcttcgctctattc

SEQ ID NO: 1672210 - DNA, 25 bp, Homo sapien
gcagtatccaatctgcagtggtgct

SEQ ID NO: 1672211 - DNA, 25 bp, Homo sapien
tatcatcattgcagtatccaatctg

SEQ ID NO: 1672212 - DNA, 25 bp, Homo sapien
ggccatgcttatcatcattgcagta

SEQ ID NO: 1672213 - DNA, 25 bp, Homo sapien
aaaggcaggccatgcttatcatcat

SEQ ID NO: 1672214 - DNA, 25 bp, Homo sapien
gtacacttgagcttccggaggacgc

SEQ ID NO: 1672215 - DNA, 25 bp, Homo sapien
gcaagttggctagtctctgcggcca

SEQ ID NO: 1672216 - DNA, 25 bp, Homo sapien
cgtgctgaccaacgtcaactacaat

SEQ ID NO: 1672217 - DNA, 25 bp, Homo sapien
aggcaccgcgcctgggtacacttga

SEQ ID NO: 1672218 - DNA, 25 bp, Homo sapien
catatgtgaaccatttgacctggcg

SEQ ID NO: 1672219 - DNA, 25 bp, Homo sapien
tacaacacacaagactcagtaggcc

SEQ ID NO: 1672220 - DNA, 25 bp, Homo sapien
ccacatatcgtgtgccagaggctga

SEQ ID NO: 1672221 - DNA, 25 bp, Homo sapien
catgcagtggcctcaataaaatgtg

SEQ ID NO: 1672222 - DNA, 25 bp, Homo sapien
tttggtcgttgagacatatctgtcc

SEQ ID NO: 1672223 - DNA, 25 bp, Homo sapien
tgagcatcttcacccatttggtcgt

SEQ ID NO: 1672224 - DNA, 25 bp, Homo sapien
tcacccatttggtcgttgagacata

SEQ ID NO: 1672225 - DNA, 25 bp, Homo sapien
gttgagacatatctgtccatgtctg

SEQ ID NO: 1672226 - DNA, 25 bp, Homo sapien
atatatttcttgccagcagacttgc

SEQ ID NO: 1672227 - DNA, 25 bp, Homo sapien
aaatgccaaaggaaactcttggtag

SEQ ID NO: 1672228 - DNA, 25 bp, Homo sapien
tagtaatagagattgcacaattatt

SEQ ID NO: 1672229 - DNA, 25 bp, Homo sapien
actcttggtagaagggaaatgatac

SEQ ID NO: 1672230 - DNA, 25 bp, Homo sapien
tatagatggcaactaagcacttggg

SEQ ID NO: 1672231 - DNA, 25 bp, Homo sapien
tcagatggcacaagaggactcagag

SEQ ID NO: 1672232 - DNA, 25 bp, Homo sapien
tggactgggaggacaagaccacaaa

SEQ ID NO: 1672233 - DNA, 25 bp, Homo sapien
gagagaggacacatcaggcttgaga

SEQ ID NO: 1672234 - DNA, 25 bp, Homo sapien
cagaatccccggcacttctgaggac

SEQ ID NO: 1672235 - DNA, 25 bp, Homo sapien
tccagaatccccggcacttctgagg

SEQ ID NO: 1672236 - DNA, 25 bp, Homo sapien
gggagccagtccagaatccccggca

SEQ ID NO: 1672237 - DNA, 25 bp, Homo sapien
agtccagaatccccggcacttctga

SEQ ID NO: 1672238 - DNA, 25 bp, Homo sapien
ctgccaccaggagctccacagggtc

SEQ ID NO: 1672239 - DNA, 25 bp, Homo sapien
tgccaccaggagctccacagggtcg

SEQ ID NO: 1672240 - DNA, 25 bp, Homo sapien
tgcggaccgtcttcacggccttcgt

SEQ ID NO: 1672241 - DNA, 25 bp, Homo sapien
gcacctgtagttgccggcgtgctgg

SEQ ID NO: 1672242 - DNA, 25 bp, Homo sapien
tcgcagcgcaggacggcatctcggc

SEQ ID NO: 1672243 - DNA, 25 bp, Homo sapien
ggccccacgaagatcagctcgaggt

SEQ ID NO: 1672244 - DNA, 25 bp, Homo sapien
gcctcggtcactctgacgggtgaag

SEQ ID NO: 1672245 - DNA, 25 bp, Homo sapien
tatgtcaatagatgagggttttccc

SEQ ID NO: 1672246 - DNA, 25 bp, Homo sapien
tggaagtcccagattcgggcctgct

SEQ ID NO: 1672247 - DNA, 25 bp, Homo sapien
gaagaaatgatggagaaaacggtgc

SEQ ID NO: 1672248 - DNA, 25 bp, Homo sapien
tactggctgttcttaattctaacag

SEQ ID NO: 1672249 - DNA, 25 bp, Homo sapien
gatagatatacacatcctagtttaa

SEQ ID NO: 1672250 - DNA, 25 bp, Homo sapien
tgtcagtgggactgtgttgtctttg

SEQ ID NO: 1672251 - DNA, 25 bp, Homo sapien
gaaagcttgattggattaacaaact

SEQ ID NO: 1672252 - DNA, 25 bp, Homo sapien
gagaaaacggtgctcccagcaaagg

SEQ ID NO: 1672253 - DNA, 25 bp, Homo sapien
ctccggcctgcaagaataaaagtaa

SEQ ID NO: 1672254 - DNA, 25 bp, Homo sapien
aagggtacgacctcaagatctggag

SEQ ID NO: 1672255 - DNA, 25 bp, Homo sapien
ccagcaaagggtacgacctcaagat

SEQ ID NO: 1672256 - DNA, 25 bp, Homo sapien
cgatgaggaaatcagagggacaaac

SEQ ID NO: 1672257 - DNA, 25 bp, Homo sapien
tggagacgtcgatgaggaaatcaga

SEQ ID NO: 1672258 - DNA, 25 bp, Homo sapien
cgtcgatgaggaaatcagagggaca

SEQ ID NO: 1672259 - DNA, 25 bp, Homo sapien
ctgagtcctggagacgtcgatgagg

SEQ ID NO: 1672260 - DNA, 25 bp, Homo sapien
gaccaccacgctacacgtgacctac

SEQ ID NO: 1672261 - DNA, 25 bp, Homo sapien
tggccagtaataaaacaaggcagcc

SEQ ID NO: 1672262 - DNA, 25 bp, Homo sapien
tgaacaagaaaacctggggccagcc

SEQ ID NO: 1672263 - DNA, 25 bp, Homo sapien
ggagaaggacacatcagccgtgcgc

SEQ ID NO: 1672264 - DNA, 25 bp, Homo sapien
cgccgtcggacgcccaaggaaagag

SEQ ID NO: 1672265 - DNA, 25 bp, Homo sapien
gcttgcgtccgtgggaaataagccg

SEQ ID NO: 1672266 - DNA, 25 bp, Homo sapien
agccgaaattccaggcgtccccaga

SEQ ID NO: 1672267 - DNA, 25 bp, Homo sapien
gaccctcgaccaccgatcgcctgct

SEQ ID NO: 1672268 - DNA, 25 bp, Homo sapien
gtgcagctccaagcgctcgctgggc

SEQ ID NO: 1672269 - DNA, 25 bp, Homo sapien
cacgtagacgcagctgtagttggcg

SEQ ID NO: 1672270 - DNA, 25 bp, Homo sapien
aaaggcggcttcaggtccacgtaga

SEQ ID NO: 1672271 - DNA, 25 bp, Homo sapien
gcggagtcagccacggaaatgttgt

SEQ ID NO: 1672272 - DNA, 25 bp, Homo sapien
tccggggagaactccggcgcgggca

SEQ ID NO: 1672273 - DNA, 25 bp, Homo sapien
tgtcctcgcgcaccagggcgaagcg

SEQ ID NO: 1672274 - DNA, 25 bp, Homo sapien
aaggccctgccggactccggctccg

SEQ ID NO: 1672275 - DNA, 25 bp, Homo sapien
ctctggaaacggtgcacgcggcgcc

SEQ ID NO: 1672276 - DNA, 25 bp, Homo sapien
cagggccaccgcgttcaggtgaaag

SEQ ID NO: 1672277 - DNA, 25 bp, Homo sapien
gaggactctccatggtgcatcagca

SEQ ID NO: 1672278 - DNA, 25 bp, Homo sapien
tagcggcaggtgtagtgacctccat

SEQ ID NO: 1672279 - DNA, 25 bp, Homo sapien
tttggttgtcatgcagccggtagcg

SEQ ID NO: 1672280 - DNA, 25 bp, Homo sapien
tgcaggcagcattactaggctgccc

SEQ ID NO: 1672281 - DNA, 25 bp, Homo sapien
caatgcaggcagcattactaggctg

SEQ ID NO: 1672282 - DNA, 25 bp, Homo sapien
caggcagcattactaggctgcccca

SEQ ID NO: 1672283 - DNA, 25 bp, Homo sapien
aatgcaggcagcattactaggctgc

SEQ ID NO: 1672284 - DNA, 25 bp, Homo sapien
ctgccctccgggtggcaatcccagg

SEQ ID NO: 1672285 - DNA, 25 bp, Homo sapien
cctccgggtggcaatcccaggaaca

SEQ ID NO: 1672286 - DNA, 25 bp, Homo sapien
tccgggtggcaatcccaggaacacc

SEQ ID NO: 1672287 - DNA, 25 bp, Homo sapien
ggtggcaatcccaggaacacccttc

SEQ ID NO: 1672288 - DNA, 25 bp, Homo sapien
ccttccattctttgggcatcctctg

SEQ ID NO: 1672289 - DNA, 25 bp, Homo sapien
tttgggcatcctctgcccaaactcc

SEQ ID NO: 1672290 - DNA, 25 bp, Homo sapien
ctctgcccaaactcctttgcaacca

SEQ ID NO: 1672291 - DNA, 25 bp, Homo sapien
gcatcctctgcccaaactcctttgc

SEQ ID NO: 1672292 - DNA, 25 bp, Homo sapien
cagacccaggcaaccgtgtggccag

SEQ ID NO: 1672293 - DNA, 25 bp, Homo sapien
acccaggcaaccgtgtggccagctt

SEQ ID NO: 1672294 - DNA, 25 bp, Homo sapien
tcagacccaggcaaccgtgtggcca

SEQ ID NO: 1672295 - DNA, 25 bp, Homo sapien
agacccaggcaaccgtgtggccagc

SEQ ID NO: 1672296 - DNA, 25 bp, Homo sapien
ggatgaatgtggtcatgccccctgt

SEQ ID NO: 1672297 - DNA, 25 bp, Homo sapien
tgaatgtggtcatgccccctgtatc

SEQ ID NO: 1672298 - DNA, 25 bp, Homo sapien
tggtcatgccccctgtatcctcctc

SEQ ID NO: 1672299 - DNA, 25 bp, Homo sapien
gccccctgtatcctcctcccccagc

SEQ ID NO: 1672300 - DNA, 25 bp, Homo sapien
tcctcaatggtcacagtagcgctgg

SEQ ID NO: 1672301 - DNA, 25 bp, Homo sapien
ttccccatcggtccggtagctgcag

SEQ ID NO: 1672302 - DNA, 25 bp, Homo sapien
tcagcagaaaagtcacaccccgcag

SEQ ID NO: 1672303 - DNA, 25 bp, Homo sapien
gggtgatccaggacactggcgccat

SEQ ID NO: 1672304 - DNA, 25 bp, Homo sapien
cgagagccagggagcaggcaaggac

SEQ ID NO: 1672305 - DNA, 25 bp, Homo sapien
gagagccagggagcaggcaaggact

SEQ ID NO: 1672306 - DNA, 25 bp, Homo sapien
tgggtggggtggagttgaagagtgc

SEQ ID NO: 1672307 - DNA, 25 bp, Homo sapien
ggtggggtggagttgaagagtgctt

SEQ ID NO: 1672308 - DNA, 25 bp, Homo sapien
tgtgggtggggtggagttgaagagt

SEQ ID NO: 1672309 - DNA, 25 bp, Homo sapien
ctgtgggtggggtggagttgaagag

SEQ ID NO: 1672310 - DNA, 25 bp, Homo sapien
gaactggtgcttgatggcaggtgag

SEQ ID NO: 1672311 - DNA, 25 bp, Homo sapien
ccctgggtgtcacccgtcagcagga

SEQ ID NO: 1672312 - DNA, 25 bp, Homo sapien
cccattcttgaacagctggaagtct

SEQ ID NO: 1672313 - DNA, 25 bp, Homo sapien
tcctgtggacaagcccgagcggcag

SEQ ID NO: 1672314 - DNA, 25 bp, Homo sapien
cacaggctgggctgcgtctcataaa

SEQ ID NO: 1672315 - DNA, 25 bp, Homo sapien
cattggccaagggtttcagcagtga

SEQ ID NO: 1672316 - DNA, 25 bp, Homo sapien
agcagtgattcggactctgcccaca

SEQ ID NO: 1672317 - DNA, 25 bp, Homo sapien
gcacgtcagcgtcacattggccaag

SEQ ID NO: 1672318 - DNA, 25 bp, Homo sapien
ggctgcttctgtcactgggccccag

SEQ ID NO: 1672319 - DNA, 25 bp, Homo sapien
atatggctgcttctgtcactgggcc

SEQ ID NO: 1672320 - DNA, 25 bp, Homo sapien
tctgtcactgggccccaggtgacac

SEQ ID NO: 1672321 - DNA, 25 bp, Homo sapien
tatggctgcttctgtcactgggccc

SEQ ID NO: 1672322 - DNA, 25 bp, Homo sapien
agcaagagaaagaccacgagcatgg

SEQ ID NO: 1672323 - DNA, 25 bp, Homo sapien
agagaaagaccacgagcatggacat

SEQ ID NO: 1672324 - DNA, 25 bp, Homo sapien
gcaagagaaagaccacgagcatgga

SEQ ID NO: 1672325 - DNA, 25 bp, Homo sapien
caagagaaagaccacgagcatggac

SEQ ID NO: 1672326 - DNA, 25 bp, Homo sapien
gatggtcgcgctcactccggtgcag

SEQ ID NO: 1672327 - DNA, 25 bp, Homo sapien
tcactccggtgcagtgagtgtctgg

SEQ ID NO: 1672328 - DNA, 25 bp, Homo sapien
gcactgacctcttcccgtgtttgtc

SEQ ID NO: 1672329 - DNA, 25 bp, Homo sapien
ggtcgcgctcactccggtgcagtga

SEQ ID NO: 1672330 - DNA, 25 bp, Homo sapien
tctgcggttgccctcacatgggctg

SEQ ID NO: 1672331 - DNA, 25 bp, Homo sapien
tcttcctgaggactgtggttccttc

SEQ ID NO: 1672332 - DNA, 25 bp, Homo sapien
ttgccctcacatgggctgtctggag

SEQ ID NO: 1672333 - DNA, 25 bp, Homo sapien
tttcagactttctgcggttgccctc

SEQ ID NO: 1672334 - DNA, 25 bp, Homo sapien
caggacaggggtgagaccgtggtgc

SEQ ID NO: 1672335 - DNA, 25 bp, Homo sapien
gtgagaccgtggtgctttcacactc

SEQ ID NO: 1672336 - DNA, 25 bp, Homo sapien
cacagcctgttgggatggaacagga

SEQ ID NO: 1672337 - DNA, 25 bp, Homo sapien
acagcctgttgggatggaacaggac

SEQ ID NO: 1672338 - DNA, 25 bp, Homo sapien
gcctagctccgctacgagtgtgagg

SEQ ID NO: 1672339 - DNA, 25 bp, Homo sapien
tagctccgctacgagtgtgagggcc

SEQ ID NO: 1672340 - DNA, 25 bp, Homo sapien
cctagctccgctacgagtgtgaggg

SEQ ID NO: 1672341 - DNA, 25 bp, Homo sapien
ctccgctacgagtgtgagggcccag

SEQ ID NO: 1672342 - DNA, 25 bp, Homo sapien
gaagtcgcggctgcaataaacagtg

SEQ ID NO: 1672343 - DNA, 25 bp, Homo sapien
tagacgtgatgaagaccagctgggc

SEQ ID NO: 1672344 - DNA, 25 bp, Homo sapien
ggtgtgcacagaactcagaagtcag

SEQ ID NO: 1672345 - DNA, 25 bp, Homo sapien
cactagaaagccatagcatgcggtt

SEQ ID NO: 1672346 - DNA, 25 bp, Homo sapien
tgcccacctctgcatggacgaacct

SEQ ID NO: 1672347 - DNA, 25 bp, Homo sapien
tctgcatggacgaacctctcgccga

SEQ ID NO: 1672348 - DNA, 25 bp, Homo sapien
atggacgaacctctcgccgaagtgg

SEQ ID NO: 1672349 - DNA, 25 bp, Homo sapien
gaacctctcgccgaagtggagcctg

SEQ ID NO: 1672350 - DNA, 25 bp, Homo sapien
ctgggtggccggtggactatcgtca

SEQ ID NO: 1672351 - DNA, 25 bp, Homo sapien
cgcaccggcggcccgaaaaagtctg

SEQ ID NO: 1672352 - DNA, 25 bp, Homo sapien
agtctgggccagcagacagcgcact

SEQ ID NO: 1672353 - DNA, 25 bp, Homo sapien
ggggtaagagcccatcctacatgtc

SEQ ID NO: 1672354 - DNA, 25 bp, Homo sapien
gtgtgtccgcgacctcccgctcagg

SEQ ID NO: 1672355 - DNA, 25 bp, Homo sapien
aatgccgtgtgtccgcgacctcccg

SEQ ID NO: 1672356 - DNA, 25 bp, Homo sapien
cccgagaccccgcaatgccgtgtgt

SEQ ID NO: 1672357 - DNA, 25 bp, Homo sapien
cgagaccccgcaatgccgtgtgtcc

SEQ ID NO: 1672358 - DNA, 25 bp, Homo sapien
tgctcgttgaggttgcaacggtggc

SEQ ID NO: 1672359 - DNA, 25 bp, Homo sapien
aacggtggctgaaaggcttcccgca

SEQ ID NO: 1672360 - DNA, 25 bp, Homo sapien
gaggttgcaacggtggctgaaaggc

SEQ ID NO: 1672361 - DNA, 25 bp, Homo sapien
ttgcaacggtggctgaaaggcttcc

SEQ ID NO: 1672362 - DNA, 25 bp, Homo sapien
tctcccgtgtgcgaaagccggtggt

SEQ ID NO: 1672363 - DNA, 25 bp, Homo sapien
ttaagagctccgacttgcgcacgaa

SEQ ID NO: 1672364 - DNA, 25 bp, Homo sapien
gatcttcaggtgctcggccaggttg

SEQ ID NO: 1672365 - DNA, 25 bp, Homo sapien
actgggcgcacgcatgaggcttctc

SEQ ID NO: 1672366 - DNA, 25 bp, Homo sapien
gcactccctgcaagcgtagggcttc

SEQ ID NO: 1672367 - DNA, 25 bp, Homo sapien
tcaggccgctgtgtgtctcctggtg

SEQ ID NO: 1672368 - DNA, 25 bp, Homo sapien
atgctgcagcaagtaagagccctgg

SEQ ID NO: 1672369 - DNA, 25 bp, Homo sapien
tgcttcggccgaaggacttgccgca

SEQ ID NO: 1672370 - DNA, 25 bp, Homo sapien
tccccgcaccggcagcccggctcct

SEQ ID NO: 1672371 - DNA, 25 bp, Homo sapien
gcactccccgcaccggcagcccggc

SEQ ID NO: 1672372 - DNA, 25 bp, Homo sapien
ccgcactccccgcaccggcagcccg

SEQ ID NO: 1672373 - DNA, 25 bp, Homo sapien
ttgccgcactccccgcaccggcagc

SEQ ID NO: 1672374 - DNA, 25 bp, Homo sapien
cgaagggcgcaacgcccggtctgca

SEQ ID NO: 1672375 - DNA, 25 bp, Homo sapien
gcaacgcccggtctgcaggctcgct

SEQ ID NO: 1672376 - DNA, 25 bp, Homo sapien
cgcccggtctgcaggctcgctcctg

SEQ ID NO: 1672377 - DNA, 25 bp, Homo sapien
gggagaggcgaagggcgcaacgccc

SEQ ID NO: 1672378 - DNA, 25 bp, Homo sapien
cgtctgcggggcccagctccctgcc

SEQ ID NO: 1672379 - DNA, 25 bp, Homo sapien
tgcggggcccagctccctgccgggg

SEQ ID NO: 1672380 - DNA, 25 bp, Homo sapien
gggcccagctccctgccggggcctc

SEQ ID NO: 1672381 - DNA, 25 bp, Homo sapien
ggcccagctccctgccggggcctcc

SEQ ID NO: 1672382 - DNA, 25 bp, Homo sapien
tcagagaggcccctcgtggcagtct

SEQ ID NO: 1672383 - DNA, 25 bp, Homo sapien
gtccgccgcccccagtgtggcttgc

SEQ ID NO: 1672384 - DNA, 25 bp, Homo sapien
ctcgtggcagtcttcacattgcaga

SEQ ID NO: 1672385 - DNA, 25 bp, Homo sapien
agtgtggcttgctgccgctggccgt

SEQ ID NO: 1672386 - DNA, 25 bp, Homo sapien
gcagggtccaccctcttggggactc

SEQ ID NO: 1672387 - DNA, 25 bp, Homo sapien
tgcagggtccaccctcttggggact

SEQ ID NO: 1672388 - DNA, 25 bp, Homo sapien
ctgcagggtccaccctcttggggac

SEQ ID NO: 1672389 - DNA, 25 bp, Homo sapien
tttgtgaggaacacgatggacccgt

SEQ ID NO: 1672390 - DNA, 25 bp, Homo sapien
cacagtatgggcagcatgtccaggc

SEQ ID NO: 1672391 - DNA, 25 bp, Homo sapien
ggctgttacccaggcaatgtccaca

SEQ ID NO: 1672392 - DNA, 25 bp, Homo sapien
caagtgtcaagaaggtggagactcc

SEQ ID NO: 1672393 - DNA, 25 bp, Homo sapien
gggcccaggggagcctcttgctcct

SEQ ID NO: 1672394 - DNA, 25 bp, Homo sapien
accagctcctcttggggcctggggg

SEQ ID NO: 1672395 - DNA, 25 bp, Homo sapien
tgtcctggggaccagctcctcttgg

SEQ ID NO: 1672396 - DNA, 25 bp, Homo sapien
ggggcccaggggagcctcttgctcc

SEQ ID NO: 1672397 - DNA, 25 bp, Homo sapien
gactggccccagtgctggctcagct

SEQ ID NO: 1672398 - DNA, 25 bp, Homo sapien
ctggggtcgtgagcaggggaagcac

SEQ ID NO: 1672399 - DNA, 25 bp, Homo sapien
tgctggctcagctggggtcgtgagc

SEQ ID NO: 1672400 - DNA, 25 bp, Homo sapien
ggctcagctggggtcgtgagcaggg

SEQ ID NO: 1672401 - DNA, 25 bp, Homo sapien
tgggagcagtgtgcccaataactgc

SEQ ID NO: 1672402 - DNA, 25 bp, Homo sapien
ctcctgcgtgtaggcctggatctct

SEQ ID NO: 1672403 - DNA, 25 bp, Homo sapien
ttctcatagcagaacccccagaagc

SEQ ID NO: 1672404 - DNA, 25 bp, Homo sapien
gcctagccactgctcctgcgtgtag

SEQ ID NO: 1672405 - DNA, 25 bp, Homo sapien
catcagttccagtggactcgggaag

SEQ ID NO: 1672406 - DNA, 25 bp, Homo sapien
tcagttccagtggactcgggaagac

SEQ ID NO: 1672407 - DNA, 25 bp, Homo sapien
ttccagtggactcgggaagacctgg

SEQ ID NO: 1672408 - DNA, 25 bp, Homo sapien
cagttccagtggactcgggaagacc

SEQ ID NO: 1672409 - DNA, 25 bp, Homo sapien
gcagctgcatggcccagggtacttt

SEQ ID NO: 1672410 - DNA, 25 bp, Homo sapien
catggcccagggtactttctctgca

SEQ ID NO: 1672411 - DNA, 25 bp, Homo sapien
agctgcatggcccagggtactttct

SEQ ID NO: 1672412 - DNA, 25 bp, Homo sapien
ctgcatggcccagggtactttctct

SEQ ID NO: 1672413 - DNA, 25 bp, Homo sapien
gacacactgaggtgccatggctgct

SEQ ID NO: 1672414 - DNA, 25 bp, Homo sapien
tatcggcgtttctggcccccagtgt

SEQ ID NO: 1672415 - DNA, 25 bp, Homo sapien
acagcaaggccacgaaggtcccctc

SEQ ID NO: 1672416 - DNA, 25 bp, Homo sapien
gccatggctgcttgtaccatccctt

SEQ ID NO: 1672417 - DNA, 25 bp, Homo sapien
taggctggacaaacaaatacggagt

SEQ ID NO: 1672418 - DNA, 25 bp, Homo sapien
cgtaaggtccttcctgtcggcctca

SEQ ID NO: 1672419 - DNA, 25 bp, Homo sapien
tcgtcgtgggatagcatgtgagccc

SEQ ID NO: 1672420 - DNA, 25 bp, Homo sapien
gcacttgtccgaccagtcacgggta

SEQ ID NO: 1672421 - DNA, 25 bp, Homo sapien
cacgcgggctcgagccgcgtggaat

SEQ ID NO: 1672422 - DNA, 25 bp, Homo sapien
actaggagcggcctgaaagaggccc

SEQ ID NO: 1672423 - DNA, 25 bp, Homo sapien
agcggcctgaaagaggcccgcacgc

SEQ ID NO: 1672424 - DNA, 25 bp, Homo sapien
ctctgcgtccactaggagcggcctg

SEQ ID NO: 1672425 - DNA, 25 bp, Homo sapien
ttgggcgacgcgtcgactctcggct

SEQ ID NO: 1672426 - DNA, 25 bp, Homo sapien
ctcctcgacgcagggttcgcttggg

SEQ ID NO: 1672427 - DNA, 25 bp, Homo sapien
acaaaggcccctcctcgacgcaggg

SEQ ID NO: 1672428 - DNA, 25 bp, Homo sapien
gttcgcttgggcgacgcgtcgactc

SEQ ID NO: 1672429 - DNA, 25 bp, Homo sapien
gaggttggagcgttggctgaaggcg

SEQ ID NO: 1672430 - DNA, 25 bp, Homo sapien
tgctcgttgaggttggagcgttggc

SEQ ID NO: 1672431 - DNA, 25 bp, Homo sapien
tcgttgaggttggagcgttggctga

SEQ ID NO: 1672432 - DNA, 25 bp, Homo sapien
ggttggagcgttggctgaaggcgcg

SEQ ID NO: 1672433 - DNA, 25 bp, Homo sapien
ttgccgcactcgtcgcaagcgtaca

SEQ ID NO: 1672434 - DNA, 25 bp, Homo sapien
caggctgcagttgcgcacgaaggcc

SEQ ID NO: 1672435 - DNA, 25 bp, Homo sapien
tgaaggccttttcgcacagtgggca

SEQ ID NO: 1672436 - DNA, 25 bp, Homo sapien
cggtgctccacgaggtgcgagaaca

SEQ ID NO: 1672437 - DNA, 25 bp, Homo sapien
atccgcagggccctccacgcaaagg

SEQ ID NO: 1672438 - DNA, 25 bp, Homo sapien
gacaatagggcgaggtcgcgaggtt

SEQ ID NO: 1672439 - DNA, 25 bp, Homo sapien
gtttggccgcactcaggacacactg

SEQ ID NO: 1672440 - DNA, 25 bp, Homo sapien
gcgcttcccgcaccgggcacacgga

SEQ ID NO: 1672441 - DNA, 25 bp, Homo sapien
tggacctcacacagttgagtccggg

SEQ ID NO: 1672442 - DNA, 25 bp, Homo sapien
ggcacggccaacagtccgtgtggac

SEQ ID NO: 1672443 - DNA, 25 bp, Homo sapien
ggtggttctggatccgctccggaca

SEQ ID NO: 1672444 - DNA, 25 bp, Homo sapien
ggtcggagcgccagtccctggttgg

SEQ ID NO: 1672445 - DNA, 25 bp, Homo sapien
gtggcaagccgacactccgggtcct

SEQ ID NO: 1672446 - DNA, 25 bp, Homo sapien
cctccgtttctcagtggcaagccga

SEQ ID NO: 1672447 - DNA, 25 bp, Homo sapien
ggctccattcactgccattgtccat

SEQ ID NO: 1672448 - DNA, 25 bp, Homo sapien
tttctcagtggcaagccgacactcc

SEQ ID NO: 1672449 - DNA, 25 bp, Homo sapien
tcttctgagaggtgtgaggtgagac

SEQ ID NO: 1672450 - DNA, 25 bp, Homo sapien
ctgagaggtgtgaggtgagactcac

SEQ ID NO: 1672451 - DNA, 25 bp, Homo sapien
gtcttctgagaggtgtgaggtgaga

SEQ ID NO: 1672452 - DNA, 25 bp, Homo sapien
ttctgagaggtgtgaggtgagactc

SEQ ID NO: 1672453 - DNA, 25 bp, Homo sapien
cctcttcaaccaggtaacggtggtg

SEQ ID NO: 1672454 - DNA, 25 bp, Homo sapien
ctggccgggagatccacgctgcaga

SEQ ID NO: 1672455 - DNA, 25 bp, Homo sapien
caggtaacggtggtgctctcaaggc

SEQ ID NO: 1672456 - DNA, 25 bp, Homo sapien
aacggtggtgctctcaaggctggca

SEQ ID NO: 1672457 - DNA, 25 bp, Homo sapien
gaggacgtttgctgaccatttccag

SEQ ID NO: 1672458 - DNA, 25 bp, Homo sapien
ccccatagtggcttgagacagtgca

SEQ ID NO: 1672459 - DNA, 25 bp, Homo sapien
ctaggaaacaggacgtgcagatctt

SEQ ID NO: 1672460 - DNA, 25 bp, Homo sapien
gattctgacccttctgcctcttgtg

SEQ ID NO: 1672461 - DNA, 25 bp, Homo sapien
cacttcagagcgactggctgcagtt

SEQ ID NO: 1672462 - DNA, 25 bp, Homo sapien
tttcagccaaggacacttcagagcg

SEQ ID NO: 1672463 - DNA, 25 bp, Homo sapien
gacatcatgaccacaatggcagaaa

SEQ ID NO: 1672464 - DNA, 25 bp, Homo sapien
tcacgaagcatttaaccaagactct

SEQ ID NO: 1672465 - DNA, 25 bp, Homo sapien
ggcccggttcctgctctgctgtatg

SEQ ID NO: 1672466 - DNA, 25 bp, Homo sapien
tctgctgtatgggaggctgctggcc

SEQ ID NO: 1672467 - DNA, 25 bp, Homo sapien
ttctgcaggtcacgaaaggcctttg

SEQ ID NO: 1672468 - DNA, 25 bp, Homo sapien
aatgcagagttggacaagttctgca

SEQ ID NO: 1672469 - DNA, 25 bp, Homo sapien
ccaagggttcagcaagtaccagtcc

SEQ ID NO: 1672470 - DNA, 25 bp, Homo sapien
agtgccaagggttcagcaagtacca

SEQ ID NO: 1672471 - DNA, 25 bp, Homo sapien
agggttcagcaagtaccagtcccag

SEQ ID NO: 1672472 - DNA, 25 bp, Homo sapien
ggttcagcaagtaccagtcccaggc

SEQ ID NO: 1672473 - DNA, 25 bp, Homo sapien
gcaccatccatgctcagtgtttgcc

SEQ ID NO: 1672474 - DNA, 25 bp, Homo sapien
tagcaccctcgacagaatgtgtgtg

SEQ ID NO: 1672475 - DNA, 25 bp, Homo sapien
taacagcatcttcggattggtcccc

SEQ ID NO: 1672476 - DNA, 25 bp, Homo sapien
gagccgtcagagagcacagtactgc

SEQ ID NO: 1672477 - DNA, 25 bp, Homo sapien
taatagagactggtctagcaccctc

SEQ ID NO: 1672478 - DNA, 25 bp, Homo sapien
gcatgcagcgcggagccgtcctccc

SEQ ID NO: 1672479 - DNA, 25 bp, Homo sapien
gcggcactgagggacccgggccaca

SEQ ID NO: 1672480 - DNA, 25 bp, Homo sapien
tctctggaggcggcccgcacgggtc

SEQ ID NO: 1672481 - DNA, 25 bp, Homo sapien
acagcaagcgcaggcgggaacccgc

SEQ ID NO: 1672482 - DNA, 25 bp, Homo sapien
gcttcggttatcatagaaacagagg

SEQ ID NO: 1672483 - DNA, 25 bp, Homo sapien
cggttatcatagaaacagaggccgg

SEQ ID NO: 1672484 - DNA, 25 bp, Homo sapien
cggagaaagcggtgtagggagaggc

SEQ ID NO: 1672485 - DNA, 25 bp, Homo sapien
tgggcttcggttatcatagaaacag

SEQ ID NO: 1672486 - DNA, 25 bp, Homo sapien
tgcgccaggcccctagtccggctcc

SEQ ID NO: 1672487 - DNA, 25 bp, Homo sapien
ctgcgccaggcccctagtccggctc

SEQ ID NO: 1672488 - DNA, 25 bp, Homo sapien
gcgccaggcccctagtccggctcct

SEQ ID NO: 1672489 - DNA, 25 bp, Homo sapien
tgaaaggcctaaccacttggcaggc

SEQ ID NO: 1672490 - DNA, 25 bp, Homo sapien
cactgctactggaggagtcttgagc

SEQ ID NO: 1672491 - DNA, 25 bp, Homo sapien
gagtttgaagcaccaatgaaaggcc

SEQ ID NO: 1672492 - DNA, 25 bp, Homo sapien
ttgagcctatgtggaagaacttccc

SEQ ID NO: 1672493 - DNA, 25 bp, Homo sapien
ctcagggaatagaggcttcagcagg

SEQ ID NO: 1672494 - DNA, 25 bp, Homo sapien
cctcagggaatagaggcttcagcag

SEQ ID NO: 1672495 - DNA, 25 bp, Homo sapien
gcatcttggcccccaacacagaatc

SEQ ID NO: 1672496 - DNA, 25 bp, Homo sapien
catcttggcccccaacacagaatcc

SEQ ID NO: 1672497 - DNA, 25 bp, Homo sapien
gggtcgaaggcccacatcctcaatc

SEQ ID NO: 1672498 - DNA, 25 bp, Homo sapien
caaccccacgcacggatgaggaccc

SEQ ID NO: 1672499 - DNA, 25 bp, Homo sapien
cctgtgagagggttcgctgtctgct

SEQ ID NO: 1672500 - DNA, 25 bp, Homo sapien
tcccacgcaatagttcaggccctgt

SEQ ID NO: 1672501 - DNA, 25 bp, Homo sapien
ggcgggaccgttatatgacatcaag

SEQ ID NO: 1672502 - DNA, 25 bp, Homo sapien
caagtcaacgttccgtctcggactg

SEQ ID NO: 1672503 - DNA, 25 bp, Homo sapien
tggtctttgacccaagtcaacgttc

SEQ ID NO: 1672504 - DNA, 25 bp, Homo sapien
cggactgtttctttggccgtgaggc

SEQ ID NO: 1672505 - DNA, 25 bp, Homo sapien
ccgttatatgacatcaaggaccacg

SEQ ID NO: 1672506 - DNA, 25 bp, Homo sapien
ccgtgaggcgggaccgttatatgac

SEQ ID NO: 1672507 - DNA, 25 bp, Homo sapien
ggccaaagaaacagtccgagacgga

SEQ ID NO: 1672508 - DNA, 25 bp, Homo sapien
cgtggtccttgatgtcatataacgg

SEQ ID NO: 1672509 - DNA, 25 bp, Homo sapien
gcctcacggccaaagaaacagtccg

SEQ ID NO: 1672510 - DNA, 25 bp, Homo sapien
cgagacggaacgttgacttgggtca

SEQ ID NO: 1672511 - DNA, 25 bp, Homo sapien
gaacgttgacttgggtcaaagacca

SEQ ID NO: 1672512 - DNA, 25 bp, Homo sapien
tgatgtcatataacggtcccgcctc

SEQ ID NO: 1672513 - DNA, 25 bp, Homo sapien
cacacggcgcaggggggacacatcc

SEQ ID NO: 1672514 - DNA, 25 bp, Homo sapien
tcacacggcgcaggggggacacatc

SEQ ID NO: 1672515 - DNA, 25 bp, Homo sapien
ggttcacacggcgcaggggggacac

SEQ ID NO: 1672516 - DNA, 25 bp, Homo sapien
gttcacacggcgcaggggggacaca

SEQ ID NO: 1672517 - DNA, 25 bp, Homo sapien
ttcacacggcgcaggggggacacat

SEQ ID NO: 1672518 - DNA, 25 bp, Homo sapien
ctcccggggaccactgttgatgatg

SEQ ID NO: 1672519 - DNA, 25 bp, Homo sapien
gggaccactgttgatgatggcgttc

SEQ ID NO: 1672520 - DNA, 25 bp, Homo sapien
tcccggggaccactgttgatgatgg

SEQ ID NO: 1672521 - DNA, 25 bp, Homo sapien
ccaatgcgtgtggagtcctcccggg

SEQ ID NO: 1672522 - DNA, 25 bp, Homo sapien
aatgcgtgtggagtcctcccgggga

SEQ ID NO: 1672523 - DNA, 25 bp, Homo sapien
cctcccggggaccactgttgatgat

SEQ ID NO: 1672524 - DNA, 25 bp, Homo sapien
gaacgccatcatcaacagtggtccc

SEQ ID NO: 1672525 - DNA, 25 bp, Homo sapien
atcatcaacagtggtccccgggagg

SEQ ID NO: 1672526 - DNA, 25 bp, Homo sapien
gccatcatcaacagtggtccccggg

SEQ ID NO: 1672527 - DNA, 25 bp, Homo sapien
cccgggaggactccacacgcattgg

SEQ ID NO: 1672528 - DNA, 25 bp, Homo sapien
ccatcatcaacagtggtccccggga

SEQ ID NO: 1672529 - DNA, 25 bp, Homo sapien
catcatcaacagtggtccccgggag

SEQ ID NO: 1672530 - DNA, 25 bp, Homo sapien
gtgtcccccctgcgccgtgtgaacc

SEQ ID NO: 1672531 - DNA, 25 bp, Homo sapien
tgtgtcccccctgcgccgtgtgaac

SEQ ID NO: 1672532 - DNA, 25 bp, Homo sapien
atgtgtcccccctgcgccgtgtgaa

SEQ ID NO: 1672533 - DNA, 25 bp, Homo sapien
ggatgtgtcccccctgcgccgtgtg

SEQ ID NO: 1672534 - DNA, 25 bp, Homo sapien
gatgtgtcccccctgcgccgtgtga

SEQ ID NO: 1672535 - DNA, 25 bp, Homo sapien
ggtcttaatgttccggaaggcagcc

SEQ ID NO: 1672536 - DNA, 25 bp, Homo sapien
tgttccggaaggcagcctcacgagc

SEQ ID NO: 1672537 - DNA, 25 bp, Homo sapien
atggtcttaatgttccggaaggcag

SEQ ID NO: 1672538 - DNA, 25 bp, Homo sapien
tggtcttaatgttccggaaggcagc

SEQ ID NO: 1672539 - DNA, 25 bp, Homo sapien
aatggtcttaatgttccggaaggca

SEQ ID NO: 1672540 - DNA, 25 bp, Homo sapien
caatggtcttaatgttccggaaggc

SEQ ID NO: 1672541 - DNA, 25 bp, Homo sapien
tgccttccggaacattaagaccatt

SEQ ID NO: 1672542 - DNA, 25 bp, Homo sapien
ggctgccttccggaacattaagacc

SEQ ID NO: 1672543 - DNA, 25 bp, Homo sapien
ctgccttccggaacattaagaccat

SEQ ID NO: 1672544 - DNA, 25 bp, Homo sapien
gccttccggaacattaagaccattg

SEQ ID NO: 1672545 - DNA, 25 bp, Homo sapien
gctcgtgaggctgccttccggaaca

SEQ ID NO: 1672546 - DNA, 25 bp, Homo sapien
gctgccttccggaacattaagacca

SEQ ID NO: 1672547 - DNA, 25 bp, Homo sapien
cacacgctccagctcgtccttcttc

SEQ ID NO: 1672548 - DNA, 25 bp, Homo sapien
acacgctccagctcgtccttcttct

SEQ ID NO: 1672549 - DNA, 25 bp, Homo sapien
agaagaaggacgagctggagcgtgt

SEQ ID NO: 1672550 - DNA, 25 bp, Homo sapien
gaagaaggacgagctggagcgtgtg

SEQ ID NO: 1672551 - DNA, 25 bp, Homo sapien
tcttaatggcataggagttcgagga

SEQ ID NO: 1672552 - DNA, 25 bp, Homo sapien
taatggcataggagttcgaggagcc

SEQ ID NO: 1672553 - DNA, 25 bp, Homo sapien
atggcataggagttcgaggagccct

SEQ ID NO: 1672554 - DNA, 25 bp, Homo sapien
gctccagctcgtccttcttcttaat

SEQ ID NO: 1672555 - DNA, 25 bp, Homo sapien
tcttcttaatggcataggagttcga

SEQ ID NO: 1672556 - DNA, 25 bp, Homo sapien
ttggacttggccacacgctccagct

SEQ ID NO: 1672557 - DNA, 25 bp, Homo sapien
gggctcctcgaactcctatgccatt

SEQ ID NO: 1672558 - DNA, 25 bp, Homo sapien
agctggagcgtgtggccaagtccaa

SEQ ID NO: 1672559 - DNA, 25 bp, Homo sapien
tcctcgaactcctatgccattaaga

SEQ ID NO: 1672560 - DNA, 25 bp, Homo sapien
gaactcctatgccattaagaagaag

SEQ ID NO: 1672561 - DNA, 25 bp, Homo sapien
gaagaaggacgagctggagcgtgtg

SEQ ID NO: 1672562 - DNA, 25 bp, Homo sapien
attaagaagaaggacgagctggagc

SEQ ID NO: 1672563 - DNA, 25 bp, Homo sapien
taaggacactacaagtacatagcgc

SEQ ID NO: 1672564 - DNA, 25 bp, Homo sapien
tgctttcaaacaaagaggctgcctg

SEQ ID NO: 1672565 - DNA, 25 bp, Homo sapien
tcagaccgggatatctttggaggcc

SEQ ID NO: 1672566 - DNA, 25 bp, Homo sapien
ctaaagttgagttgcccatagggct

SEQ ID NO: 1672567 - DNA, 25 bp, Homo sapien
gaaccatggttctggtagcactgcc

SEQ ID NO: 1672568 - DNA, 25 bp, Homo sapien
gagcaaagaccaacctcagggagca

SEQ ID NO: 1672569 - DNA, 25 bp, Homo sapien
ctcttgtgatcaggcggagggacca

SEQ ID NO: 1672570 - DNA, 25 bp, Homo sapien
gcggctgaaccaaccgaaccatggt

SEQ ID NO: 1672571 - DNA, 25 bp, Homo sapien
tctcctccgccctcatagtcacggc

SEQ ID NO: 1672572 - DNA, 25 bp, Homo sapien
gtcctggaagcgttctgcaagatcc

SEQ ID NO: 1672573 - DNA, 25 bp, Homo sapien
agcgttctgcaagatcccttctcac

SEQ ID NO: 1672574 - DNA, 25 bp, Homo sapien
tcaaccgcacgtgctggcatccttg

SEQ ID NO: 1672575 - DNA, 25 bp, Homo sapien
tgaggtccaatgaagtagtgccagg

SEQ ID NO: 1672576 - DNA, 25 bp, Homo sapien
tgctccacccgtgggagagatcagg

SEQ ID NO: 1672577 - DNA, 25 bp, Homo sapien
catggaggagtctgaaatgcacatt

SEQ ID NO: 1672578 - DNA, 25 bp, Homo sapien
acaatgttaacaaatgggccgggtg

SEQ ID NO: 1672579 - DNA, 25 bp, Homo sapien
ggggcggctggccaggcagaggggc

SEQ ID NO: 1672580 - DNA, 25 bp, Homo sapien
cggggcggctggccaggcagagggg

SEQ ID NO: 1672581 - DNA, 25 bp, Homo sapien
ggctggccgggtgggggactgatcc

SEQ ID NO: 1672582 - DNA, 25 bp, Homo sapien
gcggctggccgggtgggggactgat

SEQ ID NO: 1672583 - DNA, 25 bp, Homo sapien
agcggctggccgggcagaagggctc

SEQ ID NO: 1672584 - DNA, 25 bp, Homo sapien
ggacggagcggctggccgggcagaa

SEQ ID NO: 1672585 - DNA, 25 bp, Homo sapien
tagaaaagtggcaaggctagtgacc

SEQ ID NO: 1672586 - DNA, 25 bp, Homo sapien
gaacagctcaattccagggatactt

SEQ ID NO: 1672587 - DNA, 25 bp, Homo sapien
gtgaccttggtacccagacaccagg

SEQ ID NO: 1672588 - DNA, 25 bp, Homo sapien
tgaggatatgtattagcccaggaca

SEQ ID NO: 1672589 - DNA, 25 bp, Homo sapien
gaggcaaacattgcacagctaggca

SEQ ID NO: 1672590 - DNA, 25 bp, Homo sapien
tacacaggtgtcactgaggaacagg

SEQ ID NO: 1672591 - DNA, 25 bp, Homo sapien
gaacaggttggtcagtccagcctag

SEQ ID NO: 1672592 - DNA, 25 bp, Homo sapien
gactgacccaccatgacagtccagg

SEQ ID NO: 1672593 - DNA, 25 bp, Homo sapien
aatgtagaagccttcagacctatga

SEQ ID NO: 1672594 - DNA, 25 bp, Homo sapien
tcagggtccctctgccacaactagt

SEQ ID NO: 1672595 - DNA, 25 bp, Homo sapien
tcttcagggtccctctgccacaact

SEQ ID NO: 1672596 - DNA, 25 bp, Homo sapien
caggggtagatctcttcagggtccc

SEQ ID NO: 1672597 - DNA, 25 bp, Homo sapien
ataagagcataaaattatgaaatac

SEQ ID NO: 1672598 - DNA, 25 bp, Homo sapien
gcccagccatgtaattttaaaaatg

SEQ ID NO: 1672599 - DNA, 25 bp, Homo sapien
tttaaaaatgtaatttataagagca

SEQ ID NO: 1672600 - DNA, 25 bp, Homo sapien
aaaaatgtaatttataagagcataa

SEQ ID NO: 1672601 - DNA, 25 bp, Homo sapien
catcaaacaatcgaagcttggctga

SEQ ID NO: 1672602 - DNA, 25 bp, Homo sapien
gaactgggtctaatgtttccactgc

SEQ ID NO: 1672603 - DNA, 25 bp, Homo sapien
gagtcattagttgtcaggccatgcc

SEQ ID NO: 1672604 - DNA, 25 bp, Homo sapien
caaggtctgcagatcgatgagttct

SEQ ID NO: 1672605 - DNA, 25 bp, Homo sapien
gccccatatggctcagctaaccttt

SEQ ID NO: 1672606 - DNA, 25 bp, Homo sapien
gagatctaatcttggccactcacac

SEQ ID NO: 1672607 - DNA, 25 bp, Homo sapien
tgagctctgatgacgtgtctaccct

SEQ ID NO: 1672608 - DNA, 25 bp, Homo sapien
ctttaattctgatcccacatgtgtc

SEQ ID NO: 1672609 - DNA, 25 bp, Homo sapien
gccttagggcaacaagacaaattca

SEQ ID NO: 1672610 - DNA, 25 bp, Homo sapien
caaacttttgctgtggaggttctca

SEQ ID NO: 1672611 - DNA, 25 bp, Homo sapien
tgtgcgtttagaacagacatgtccc

SEQ ID NO: 1672612 - DNA, 25 bp, Homo sapien
cccatgcggctgtttgagacactca

SEQ ID NO: 1672613 - DNA, 25 bp, Homo sapien
tggttatagataagaatcgatttct

SEQ ID NO: 1672614 - DNA, 25 bp, Homo sapien
tttctcacataggagaggtgactga

SEQ ID NO: 1672615 - DNA, 25 bp, Homo sapien
tttgttgcccataactctcttgtga

SEQ ID NO: 1672616 - DNA, 25 bp, Homo sapien
cccataggtactttatatagctttc

SEQ ID NO: 1672617 - DNA, 25 bp, Homo sapien
ggcatgtgccctagttcaccagtct

SEQ ID NO: 1672618 - DNA, 25 bp, Homo sapien
ccagcaagactgtgaaggcatgaag

SEQ ID NO: 1672619 - DNA, 25 bp, Homo sapien
ctggacgtcaggctatcacttctct

SEQ ID NO: 1672620 - DNA, 25 bp, Homo sapien
gaaaccctggccagactgcaaaaac

SEQ ID NO: 1672621 - DNA, 25 bp, Homo sapien
tgagatggccctgcaaaggttcctg

SEQ ID NO: 1672622 - DNA, 25 bp, Homo sapien
tagtgcaggcaaggtaggtgattcc

SEQ ID NO: 1672623 - DNA, 25 bp, Homo sapien
caaccagcatcggttcagctgagca

SEQ ID NO: 1672624 - DNA, 25 bp, Homo sapien
tggcctcaatggacacatcttaggg

SEQ ID NO: 1672625 - DNA, 25 bp, Homo sapien
gacaggtggactttagagctcttca

SEQ ID NO: 1672626 - DNA, 25 bp, Homo sapien
aactctctgatgacgaaccaggtgg

SEQ ID NO: 1672627 - DNA, 25 bp, Homo sapien
tctggtgccgaacaagtgtagatct

SEQ ID NO: 1672628 - DNA, 25 bp, Homo sapien
tctgatgccgaaggaaattggagct

SEQ ID NO: 1672629 - DNA, 25 bp, Homo sapien
tcttggtggaaggatctgcattagg

SEQ ID NO: 1672630 - DNA, 25 bp, Homo sapien
ggatctgcattagggatcctgacct

SEQ ID NO: 1672631 - DNA, 25 bp, Homo sapien
cacaggagttagctttcttggtgga

SEQ ID NO: 1672632 - DNA, 25 bp, Homo sapien
gggatcctgacctgtaacacttcta

SEQ ID NO: 1672633 - DNA, 25 bp, Homo sapien
cattactattggcaggatagggacc

SEQ ID NO: 1672634 - DNA, 25 bp, Homo sapien
agaaatgttacccaggaattcacac

SEQ ID NO: 1672635 - DNA, 25 bp, Homo sapien
gccaagcaacagaataagggagacc

SEQ ID NO: 1672636 - DNA, 25 bp, Homo sapien
cacttggtgggaatggttgacttca

SEQ ID NO: 1672637 - DNA, 25 bp, Homo sapien
aagtgaggtcacaagctcaaggttt

SEQ ID NO: 1672638 - DNA, 25 bp, Homo sapien
gcatcacactgtggtacaggtgcct

SEQ ID NO: 1672639 - DNA, 25 bp, Homo sapien
caagctcaaggttttccagcatcac

SEQ ID NO: 1672640 - DNA, 25 bp, Homo sapien
tgcctctgggctgcatcaaggagct

SEQ ID NO: 1672641 - DNA, 25 bp, Homo sapien
gctcttcaatgtggggacagctgag

SEQ ID NO: 1672642 - DNA, 25 bp, Homo sapien
cagctgagccacagggccaagaagt

SEQ ID NO: 1672643 - DNA, 25 bp, Homo sapien
gacagctgagccacagggccaagaa

SEQ ID NO: 1672644 - DNA, 25 bp, Homo sapien
ctgagccacagggccaagaagtatg

SEQ ID NO: 1672645 - DNA, 25 bp, Homo sapien
cagcaacgctggcaaccccattaga

SEQ ID NO: 1672646 - DNA, 25 bp, Homo sapien
gcaaccccattagaacctgtgggct

SEQ ID NO: 1672647 - DNA, 25 bp, Homo sapien
gctggcaaccccattagaacctgtg

SEQ ID NO: 1672648 - DNA, 25 bp, Homo sapien
gcgccgggcccatcagcaacgctgg

SEQ ID NO: 1672649 - DNA, 25 bp, Homo sapien
ggcgctggctccactttcgggaaca

SEQ ID NO: 1672650 - DNA, 25 bp, Homo sapien
caaatgcaaaatgcgcgcaaggcct

SEQ ID NO: 1672651 - DNA, 25 bp, Homo sapien
aaaagcagagtaattagccgggcac

SEQ ID NO: 1672652 - DNA, 25 bp, Homo sapien
tcgggaacaccttggctcataaaag

SEQ ID NO: 1672653 - DNA, 25 bp, Homo sapien
gagtgctcttcagatccacgatggg

SEQ ID NO: 1672654 - DNA, 25 bp, Homo sapien
gtcctgaagccagcgaaggtctgag

SEQ ID NO: 1672655 - DNA, 25 bp, Homo sapien
tccacagctaaagggtccgagtgct

SEQ ID NO: 1672656 - DNA, 25 bp, Homo sapien
gtttagtcatagctcacacctccat

SEQ ID NO: 1672657 - DNA, 25 bp, Homo sapien
caaaagattggataacccagcctta

SEQ ID NO: 1672658 - DNA, 25 bp, Homo sapien
ccaaaagattggataacccagcctt

SEQ ID NO: 1672659 - DNA, 25 bp, Homo sapien
aaaagattggataacccagccttag

SEQ ID NO: 1672660 - DNA, 25 bp, Homo sapien
cgtctcgcagccagcggaggtctga

SEQ ID NO: 1672661 - DNA, 25 bp, Homo sapien
agaggatccataccggcgagaagac

SEQ ID NO: 1672662 - DNA, 25 bp, Homo sapien
cagagaaaaagtcccgtgcttgcta

SEQ ID NO: 1672663 - DNA, 25 bp, Homo sapien
tcacaggttgcagccctggccttct

SEQ ID NO: 1672664 - DNA, 25 bp, Homo sapien
ggttgagcatgtccgatcagcctgg

SEQ ID NO: 1672665 - DNA, 25 bp, Homo sapien
ttggaagcgagtcccagcgaactac

SEQ ID NO: 1672666 - DNA, 25 bp, Homo sapien
cctgaacgttgccacgggaacagct

SEQ ID NO: 1672667 - DNA, 25 bp, Homo sapien
tccttagggcgcttaacagaggtca

SEQ ID NO: 1672668 - DNA, 25 bp, Homo sapien
gaaagacgcctacagtgatgggcca

SEQ ID NO: 1672669 - DNA, 25 bp, Homo sapien
cacacctgcagagacgagactggag

SEQ ID NO: 1672670 - DNA, 25 bp, Homo sapien
aactgtactgggatgcgatgctgga

SEQ ID NO: 1672671 - DNA, 25 bp, Homo sapien
taggtaacctgctgactcttccggg

SEQ ID NO: 1672672 - DNA, 25 bp, Homo sapien
gtgttcaaaaactgtgccttcccac

SEQ ID NO: 1672673 - DNA, 25 bp, Homo sapien
ttcccactcgtctgtgcagaggctg

SEQ ID NO: 1672674 - DNA, 25 bp, Homo sapien
cacagttggcttccgtttctcctgc

SEQ ID NO: 1672675 - DNA, 25 bp, Homo sapien
gaaagcacagttggcttccgtttct

SEQ ID NO: 1672676 - DNA, 25 bp, Homo sapien
agtgagctctgataacaccattgca

SEQ ID NO: 1672677 - DNA, 25 bp, Homo sapien
tgtagtcccagggagactgaggtgg

SEQ ID NO: 1672678 - DNA, 25 bp, Homo sapien
gcagtgagctctgataacaccattg

SEQ ID NO: 1672679 - DNA, 25 bp, Homo sapien
gagctctgataacaccattgcactc

SEQ ID NO: 1672680 - DNA, 25 bp, Homo sapien
tggacaacctactgtgtgcgtggga

SEQ ID NO: 1672681 - DNA, 25 bp, Homo sapien
acagatgctcatagtgggaccccaa

SEQ ID NO: 1672682 - DNA, 25 bp, Homo sapien
gaagagcctcgaatgctaccaggaa

SEQ ID NO: 1672683 - DNA, 25 bp, Homo sapien
agaagagaattacagtgcacggcca

SEQ ID NO: 1672684 - DNA, 25 bp, Homo sapien
aagtggcccatagcctgatgaggag

SEQ ID NO: 1672685 - DNA, 25 bp, Homo sapien
cgaaggctagttctgtctcaaagtg

SEQ ID NO: 1672686 - DNA, 25 bp, Homo sapien
tcaaagtggcccatagcctgatgag

SEQ ID NO: 1672687 - DNA, 25 bp, Homo sapien
gctcccttcgaaggctagttctgtc

SEQ ID NO: 1672688 - DNA, 25 bp, Homo sapien
actgactccaatggggacggcacca

SEQ ID NO: 1672689 - DNA, 25 bp, Homo sapien
gagcacagtattgtgccaaacccct

SEQ ID NO: 1672690 - DNA, 25 bp, Homo sapien
ccctactgactccaatggggacggc

SEQ ID NO: 1672691 - DNA, 25 bp, Homo sapien
ctgaggcacgggagagcacagtatt

SEQ ID NO: 1672692 - DNA, 25 bp, Homo sapien
aggatgaaagggacaccgagtgtgt

SEQ ID NO: 1672693 - DNA, 25 bp, Homo sapien
tctgccactgctacagggcccactg

SEQ ID NO: 1672694 - DNA, 25 bp, Homo sapien
ccagcccactgaggttgagggtatg

SEQ ID NO: 1672695 - DNA, 25 bp, Homo sapien
ctgctacagggcccactgtcatttc

SEQ ID NO: 1672696 - DNA, 25 bp, Homo sapien
cagtttgaacgtgctggtgacctcc

SEQ ID NO: 1672697 - DNA, 25 bp, Homo sapien
acaaacagagggtcaaccacgatcc

SEQ ID NO: 1672698 - DNA, 25 bp, Homo sapien
gcctggtacatttctgccgtcaggg

SEQ ID NO: 1672699 - DNA, 25 bp, Homo sapien
tgggcccggttgtccagtacaaaca

SEQ ID NO: 1672700 - DNA, 25 bp, Homo sapien
caacttctccccgtcgaaagtctgg

SEQ ID NO: 1672701 - DNA, 25 bp, Homo sapien
gtgctggtacaacttctccccgtcg

SEQ ID NO: 1672702 - DNA, 25 bp, Homo sapien
ggtagcgtaggcagggagccaagcg

SEQ ID NO: 1672703 - DNA, 25 bp, Homo sapien
gagccaagcgcgaacgtgctggtac

SEQ ID NO: 1672704 - DNA, 25 bp, Homo sapien
gcacacgccatacacgttaacctgt

SEQ ID NO: 1672705 - DNA, 25 bp, Homo sapien
cacctcgtgcgtggacacgttctcg

SEQ ID NO: 1672706 - DNA, 25 bp, Homo sapien
aagaagtccacctgcgacaacacgc

SEQ ID NO: 1672707 - DNA, 25 bp, Homo sapien
gtgcgtggacacgttctcgcccttc

SEQ ID NO: 1672708 - DNA, 25 bp, Homo sapien
ctctaggatctgaaagcgtccgtgg

SEQ ID NO: 1672709 - DNA, 25 bp, Homo sapien
ccacgaagggttgctggcttaccac

SEQ ID NO: 1672710 - DNA, 25 bp, Homo sapien
tgtagtaaacgtcgcccgattgccg

SEQ ID NO: 1672711 - DNA, 25 bp, Homo sapien
gattgccgcacgttgcgcaccagct

SEQ ID NO: 1672712 - DNA, 25 bp, Homo sapien
ttcgcggtccatggccagtacgtcc

SEQ ID NO: 1672713 - DNA, 25 bp, Homo sapien
tcaacaacggtggactcttcatcac

SEQ ID NO: 1672714 - DNA, 25 bp, Homo sapien
aacggtggactcttcatcacccagc

SEQ ID NO: 1672715 - DNA, 25 bp, Homo sapien
ttttcaacaacggtggactcttcat

SEQ ID NO: 1672716 - DNA, 25 bp, Homo sapien
aacaacggtggactcttcatcaccc

SEQ ID NO: 1672717 - DNA, 25 bp, Homo sapien
ctgcaccagctcaaagggggacagc

SEQ ID NO: 1672718 - DNA, 25 bp, Homo sapien
gctccgccgcctccatgtcgaactg

SEQ ID NO: 1672719 - DNA, 25 bp, Homo sapien
ccgcctccatgtcgaactgcaccag

SEQ ID NO: 1672720 - DNA, 25 bp, Homo sapien
agggatgcagaagccctgattgtcc

SEQ ID NO: 1672721 - DNA, 25 bp, Homo sapien
gccttctgtggagccgtagacttcc

SEQ ID NO: 1672722 - DNA, 25 bp, Homo sapien
gaataggaccgaagcgctgctggaa

SEQ ID NO: 1672723 - DNA, 25 bp, Homo sapien
catagttgactaagcccatgttgcc

SEQ ID NO: 1672724 - DNA, 25 bp, Homo sapien
gtagacttcccagatccgaatagga

SEQ ID NO: 1672725 - DNA, 25 bp, Homo sapien
gttacacaagtaccgcaggagctcg

SEQ ID NO: 1672726 - DNA, 25 bp, Homo sapien
gtcacgccatgctgccgacagtcat

SEQ ID NO: 1672727 - DNA, 25 bp, Homo sapien
acaggatcactgtcacgccatgctg

SEQ ID NO: 1672728 - DNA, 25 bp, Homo sapien
caggagctcgcccacatacaggatc

SEQ ID NO: 1672729 - DNA, 25 bp, Homo sapien
ggtcctgtagactggagggatcctc

SEQ ID NO: 1672730 - DNA, 25 bp, Homo sapien
gagggatcctcagaagtgggcttac

SEQ ID NO: 1672731 - DNA, 25 bp, Homo sapien
tcccgtggtcctgtagactggaggg

SEQ ID NO: 1672732 - DNA, 25 bp, Homo sapien
ctgtagactggagggatcctcagaa

SEQ ID NO: 1672733 - DNA, 25 bp, Homo sapien
gtacccgctcatgcgtgaggatggc

SEQ ID NO: 1672734 - DNA, 25 bp, Homo sapien
tacagaggcaggaccgtgtaaacca

SEQ ID NO: 1672735 - DNA, 25 bp, Homo sapien
agtcccatcacgtggtacagaggca

SEQ ID NO: 1672736 - DNA, 25 bp, Homo sapien
gaggatcccaacgacaagtcccatc

SEQ ID NO: 1672737 - DNA, 25 bp, Homo sapien
ctgaggtagaagcagcggatgttct

SEQ ID NO: 1672738 - DNA, 25 bp, Homo sapien
agtggtccccgaggtatagatgaag

SEQ ID NO: 1672739 - DNA, 25 bp, Homo sapien
ccccgaggtatagatgaagagggca

SEQ ID NO: 1672740 - DNA, 25 bp, Homo sapien
gaggtagaagcagcggatgttctca

SEQ ID NO: 1672741 - DNA, 25 bp, Homo sapien
gccacatacacagggctggaacggc

SEQ ID NO: 1672742 - DNA, 25 bp, Homo sapien
ccatgcgggttgatccaggctgttg

SEQ ID NO: 1672743 - DNA, 25 bp, Homo sapien
ccggccatgcgggttgatccaggct

SEQ ID NO: 1672744 - DNA, 25 bp, Homo sapien
cccagccacatacacagggctggaa

SEQ ID NO: 1672745 - DNA, 25 bp, Homo sapien
catctacaaaggtgtcaggcggctg

SEQ ID NO: 1672746 - DNA, 25 bp, Homo sapien
tgtcaggcggctgccggctcaagca

SEQ ID NO: 1672747 - DNA, 25 bp, Homo sapien
agctcaccaaaggtgactgagccgg

SEQ ID NO: 1672748 - DNA, 25 bp, Homo sapien
tgcgctcgtgctcgccgctcgaagg

SEQ ID NO: 1672749 - DNA, 25 bp, Homo sapien
cagcccaagtagcacgcaacatgtg

SEQ ID NO: 1672750 - DNA, 25 bp, Homo sapien
cgagccagggccgtgctaacatggc

SEQ ID NO: 1672751 - DNA, 25 bp, Homo sapien
gccagggccgtgctaacatggccag

SEQ ID NO: 1672752 - DNA, 25 bp, Homo sapien
cagcagcaaggccaactgttgcctg

SEQ ID NO: 1672753 - DNA, 25 bp, Homo sapien
ggcccctcaagagtagcccaatggc

SEQ ID NO: 1672754 - DNA, 25 bp, Homo sapien
cctcaagagtagcccaatggctcct

SEQ ID NO: 1672755 - DNA, 25 bp, Homo sapien
gcccctcaagagtagcccaatggct

SEQ ID NO: 1672756 - DNA, 25 bp, Homo sapien
tcaagagtagcccaatggctcctcc

SEQ ID NO: 1672757 - DNA, 25 bp, Homo sapien
ccttaggcgccccatgagggagtaa

SEQ ID NO: 1672758 - DNA, 25 bp, Homo sapien
tgagaaccggagtcaaatcttgggc

SEQ ID NO: 1672759 - DNA, 25 bp, Homo sapien
tgagcgcccggtttacgcaggaaat

SEQ ID NO: 1672760 - DNA, 25 bp, Homo sapien
tttattagagcgagagtcccgaggc

SEQ ID NO: 1672761 - DNA, 25 bp, Homo sapien
cccgcagcgggcgtggccgactgtg

SEQ ID NO: 1672762 - DNA, 25 bp, Homo sapien
ccggatccaccgtgggcgaggccag

SEQ ID NO: 1672763 - DNA, 25 bp, Homo sapien
gtggccgactgtgcgggaggccccg

SEQ ID NO: 1672764 - DNA, 25 bp, Homo sapien
gcgggcgtggccgactgtgcgggag

SEQ ID NO: 1672765 - DNA, 25 bp, Homo sapien
agcgcgcggtgcgagaagaccttgc

SEQ ID NO: 1672766 - DNA, 25 bp, Homo sapien
catgtgtttgagcaggtagtcgcgt

SEQ ID NO: 1672767 - DNA, 25 bp, Homo sapien
tagtcgcgtagagagaaggatcgcc

SEQ ID NO: 1672768 - DNA, 25 bp, Homo sapien
cgcgcacgccggtgtgcgtgaccat

SEQ ID NO: 1672769 - DNA, 25 bp, Homo sapien
gctgcactcatacgtaggtggctca

SEQ ID NO: 1672770 - DNA, 25 bp, Homo sapien
aacgtcttgcgacagtggctgcact

SEQ ID NO: 1672771 - DNA, 25 bp, Homo sapien
cactcatacgtaggtggctcagcac

SEQ ID NO: 1672772 - DNA, 25 bp, Homo sapien
cagtggctgcactcatacgtaggtg

SEQ ID NO: 1672773 - DNA, 25 bp, Homo sapien
tcccccagctgagtactgggggctg

SEQ ID NO: 1672774 - DNA, 25 bp, Homo sapien
cccccagctgagtactgggggctgc

SEQ ID NO: 1672775 - DNA, 25 bp, Homo sapien
ccccagctgagtactgggggctgcc

SEQ ID NO: 1672776 - DNA, 25 bp, Homo sapien
cgccatcctcgtcgtgccaagtgga

SEQ ID NO: 1672777 - DNA, 25 bp, Homo sapien
gaagaaaatctctcccggcaccact

SEQ ID NO: 1672778 - DNA, 25 bp, Homo sapien
gatacatagctgtctggaaatacgt

SEQ ID NO: 1672779 - DNA, 25 bp, Homo sapien
ctggaaatacgtcctcagctgaccc

SEQ ID NO: 1672780 - DNA, 25 bp, Homo sapien
atcgtcactttcctcgtcatcctcg

SEQ ID NO: 1672781 - DNA, 25 bp, Homo sapien
tcgccatcggtctcatcgtcacttt

SEQ ID NO: 1672782 - DNA, 25 bp, Homo sapien
cttcgccatcctcgccatcggtctc

SEQ ID NO: 1672783 - DNA, 25 bp, Homo sapien
atcggtctcatcgtcactttcctcg

SEQ ID NO: 1672784 - DNA, 25 bp, Homo sapien
aacgcgcgggctggcgctgcttacg

SEQ ID NO: 1672785 - DNA, 25 bp, Homo sapien
gctggcagctgcaaacgcgcgggct

SEQ ID NO: 1672786 - DNA, 25 bp, Homo sapien
cgctgcttacggctgtgtgcagcac

SEQ ID NO: 1672787 - DNA, 25 bp, Homo sapien
ggacagtgaggggtcagcatcaggc

SEQ ID NO: 1672788 - DNA, 25 bp, Homo sapien
ctcgagcgcgggcgataatctgcgt

SEQ ID NO: 1672789 - DNA, 25 bp, Homo sapien
tgtctgtatgcgaagcactgacgcg

SEQ ID NO: 1672790 - DNA, 25 bp, Homo sapien
tctaccagctgtcgcactgtctgcg

SEQ ID NO: 1672791 - DNA, 25 bp, Homo sapien
aaccgctgtacaggaactctaccag

SEQ ID NO: 1672792 - DNA, 25 bp, Homo sapien
acgaatgcgcacagtcacgtcacag

SEQ ID NO: 1672793 - DNA, 25 bp, Homo sapien
ttcacgaatgcgcacagtcacgtca

SEQ ID NO: 1672794 - DNA, 25 bp, Homo sapien
cgaatgcgcacagtcacgtcacaga

SEQ ID NO: 1672795 - DNA, 25 bp, Homo sapien
tcacgaatgcgcacagtcacgtcac

SEQ ID NO: 1672796 - DNA, 25 bp, Homo sapien
cccagggaaaccagtacatgctccc

SEQ ID NO: 1672797 - DNA, 25 bp, Homo sapien
ccagggaaaccagtacatgctccct

SEQ ID NO: 1672798 - DNA, 25 bp, Homo sapien
ggaaaccagtacatgctccctggca

SEQ ID NO: 1672799 - DNA, 25 bp, Homo sapien
agggaaaccagtacatgctccctgg

SEQ ID NO: 1672800 - DNA, 25 bp, Homo sapien
ggacggaaacttgcgcatcaacccg

SEQ ID NO: 1672801 - DNA, 25 bp, Homo sapien
cctggacacttcagaacaaaggcct

SEQ ID NO: 1672802 - DNA, 25 bp, Homo sapien
gattctaatctgtccggccgatggg

SEQ ID NO: 1672803 - DNA, 25 bp, Homo sapien
cgtgtgctttactccgagcgcgttc

SEQ ID NO: 1672804 - DNA, 25 bp, Homo sapien
ctacaaggccgcacttccgggccgt

SEQ ID NO: 1672805 - DNA, 25 bp, Homo sapien
aggctctgccgtggccgcttcctcc

SEQ ID NO: 1672806 - DNA, 25 bp, Homo sapien
cctgaccgactacaaggccgcactt

SEQ ID NO: 1672807 - DNA, 25 bp, Homo sapien
caggctctgccgtggccgcttcctc

SEQ ID NO: 1672808 - DNA, 25 bp, Homo sapien
atcctgggcatccactggttatctc

SEQ ID NO: 1672809 - DNA, 25 bp, Homo sapien
gggcatccactggttatctcggagt

SEQ ID NO: 1672810 - DNA, 25 bp, Homo sapien
tccactggttatctcggagtggcag

SEQ ID NO: 1672811 - DNA, 25 bp, Homo sapien
ctgggcatccactggttatctcgga

SEQ ID NO: 1672812 - DNA, 25 bp, Homo sapien
cagcatcagctagggctgaggctgc

SEQ ID NO: 1672813 - DNA, 25 bp, Homo sapien
cacactaagcgagcccccagttgag

SEQ ID NO: 1672814 - DNA, 25 bp, Homo sapien
accagcagccacactaagcgagccc

SEQ ID NO: 1672815 - DNA, 25 bp, Homo sapien
gcaggttcttaagccgttcctccag

SEQ ID NO: 1672816 - DNA, 25 bp, Homo sapien
ggggtccaggatttggagcactcac

SEQ ID NO: 1672817 - DNA, 25 bp, Homo sapien
gaggggagtaatgcagggaaaggga

SEQ ID NO: 1672818 - DNA, 25 bp, Homo sapien
gtcaggcagcggaggggagtaatgc

SEQ ID NO: 1672819 - DNA, 25 bp, Homo sapien
cagcggaggggagtaatgcagggaa

SEQ ID NO: 1672820 - DNA, 25 bp, Homo sapien
gacagctcatctgttaggctaagtc

SEQ ID NO: 1672821 - DNA, 25 bp, Homo sapien
cagctcatctgttaggctaagtccc

SEQ ID NO: 1672822 - DNA, 25 bp, Homo sapien
gctcatctgttaggctaagtcccag

SEQ ID NO: 1672823 - DNA, 25 bp, Homo sapien
tcgacagctcatctgttaggctaag

SEQ ID NO: 1672824 - DNA, 25 bp, Homo sapien
gtgagggccaggcaaacatctccac

SEQ ID NO: 1672825 - DNA, 25 bp, Homo sapien
agggctatgcactccgtgagggcca

SEQ ID NO: 1672826 - DNA, 25 bp, Homo sapien
atgcactccgtgagggccaggcaaa

SEQ ID NO: 1672827 - DNA, 25 bp, Homo sapien
actcagtgagggctatgcactccgt

SEQ ID NO: 1672828 - DNA, 25 bp, Homo sapien
tcacccatggcatcatcaatggcat

SEQ ID NO: 1672829 - DNA, 25 bp, Homo sapien
catcacccatggcatcatcaatggc

SEQ ID NO: 1672830 - DNA, 25 bp, Homo sapien
ctcatcacccatggcatcatcaatg

SEQ ID NO: 1672831 - DNA, 25 bp, Homo sapien
cacccatggcatcatcaatggcatc

SEQ ID NO: 1672832 - DNA, 25 bp, Homo sapien
gttggcccgcatcaatacaaacttg

SEQ ID NO: 1672833 - DNA, 25 bp, Homo sapien
gcgccgggtgcgcaccaagtctttt

SEQ ID NO: 1672834 - DNA, 25 bp, Homo sapien
caagtcttttgccatgatgcgaaca

SEQ ID NO: 1672835 - DNA, 25 bp, Homo sapien
caaacttgcgcacatagcgccgggt

SEQ ID NO: 1672836 - DNA, 25 bp, Homo sapien
tctgaattgtctggtccatgcccaa

SEQ ID NO: 1672837 - DNA, 25 bp, Homo sapien
tgccgggccagcttatccttatagt

SEQ ID NO: 1672838 - DNA, 25 bp, Homo sapien
caaactagggaagccctgctgacct

SEQ ID NO: 1672839 - DNA, 25 bp, Homo sapien
tcactgctgttagagccgtgcctga

SEQ ID NO: 1672840 - DNA, 25 bp, Homo sapien
tagtttctgtcgctcgcggtccagc

SEQ ID NO: 1672841 - DNA, 25 bp, Homo sapien
ttccggcgcccgaacaataggtcca

SEQ ID NO: 1672842 - DNA, 25 bp, Homo sapien
gccttgcttggccatcttcttaatg

SEQ ID NO: 1672843 - DNA, 25 bp, Homo sapien
atggcacggttcagggccctctggt

SEQ ID NO: 1672844 - DNA, 25 bp, Homo sapien
aaattatccaagtgctggcccgagc

SEQ ID NO: 1672845 - DNA, 25 bp, Homo sapien
tctccagaactatgggtgaggccct

SEQ ID NO: 1672846 - DNA, 25 bp, Homo sapien
tcacgggagccttgccaaatgggaa

SEQ ID NO: 1672847 - DNA, 25 bp, Homo sapien
gagtccttgatacgactgagagcgg

SEQ ID NO: 1672848 - DNA, 25 bp, Homo sapien
ggctgtgaagctcaggacaaggcat

SEQ ID NO: 1672849 - DNA, 25 bp, Homo sapien
ccctgaatgctgagggagacggttg

SEQ ID NO: 1672850 - DNA, 25 bp, Homo sapien
tgtgaagctcaggacaaggcattag

SEQ ID NO: 1672851 - DNA, 25 bp, Homo sapien
gaagctcaggacaaggcattaggat

SEQ ID NO: 1672852 - DNA, 25 bp, Homo sapien
gattcggtcgcactatacaccgagg

SEQ ID NO: 1672853 - DNA, 25 bp, Homo sapien
ggatgatggagattcggtcgcacta

SEQ ID NO: 1672854 - DNA, 25 bp, Homo sapien
actatacaccgaggacagtcagtgg

SEQ ID NO: 1672855 - DNA, 25 bp, Homo sapien
agtgggcccggcaccaaagcaaggt

SEQ ID NO: 1672856 - DNA, 25 bp, Homo sapien
tcgatgttgacgacagggtcccagg

SEQ ID NO: 1672857 - DNA, 25 bp, Homo sapien
gcccgggatccacggtccagcaggg

SEQ ID NO: 1672858 - DNA, 25 bp, Homo sapien
acacccgggcgagtagaaggcctcg

SEQ ID NO: 1672859 - DNA, 25 bp, Homo sapien
tcccagggagaagcgaggcaccgga

SEQ ID NO: 1672860 - DNA, 25 bp, Homo sapien
taaggcccctcggtcctgtcgccgc

SEQ ID NO: 1672861 - DNA, 25 bp, Homo sapien
cttgcccaccaactaaggcccctcg

SEQ ID NO: 1672862 - DNA, 25 bp, Homo sapien
gcttccgggtcacgcttctctttct

SEQ ID NO: 1672863 - DNA, 25 bp, Homo sapien
tctctttctgggatccccgacttgc

SEQ ID NO: 1672864 - DNA, 25 bp, Homo sapien
tagggtgctccaatgccacctgtga

SEQ ID NO: 1672865 - DNA, 25 bp, Homo sapien
ccaccccatagaagtaagaagcaga

SEQ ID NO: 1672866 - DNA, 25 bp, Homo sapien
tgcaggccctaatggacctcagctg

SEQ ID NO: 1672867 - DNA, 25 bp, Homo sapien
cagcctgttgtagggtgctccaatg

SEQ ID NO: 1672868 - DNA, 25 bp, Homo sapien
aaaaataactaggggcacgtggcag

SEQ ID NO: 1672869 - DNA, 25 bp, Homo sapien
cctggtgggacctccagaggtggag

SEQ ID NO: 1672870 - DNA, 25 bp, Homo sapien
atttcccatcgctgagtgggtcggg

SEQ ID NO: 1672871 - DNA, 25 bp, Homo sapien
caattcatttcccatcgctgagtgg

SEQ ID NO: 1672872 - DNA, 25 bp, Homo sapien
ttctgctcaaacagccgccggttgt

SEQ ID NO: 1672873 - DNA, 25 bp, Homo sapien
caaagtaggtggagccgatgtagcc

SEQ ID NO: 1672874 - DNA, 25 bp, Homo sapien
tctgcggcctccttgttcagtgggt

SEQ ID NO: 1672875 - DNA, 25 bp, Homo sapien
accccgcatggagcgctgcacgttc

SEQ ID NO: 1672876 - DNA, 25 bp, Homo sapien
tggccagtacaggtagggggggtca

SEQ ID NO: 1672877 - DNA, 25 bp, Homo sapien
gacccaaccacctattcctactcac

SEQ ID NO: 1672878 - DNA, 25 bp, Homo sapien
ggccagagggacagaaggccaatct

SEQ ID NO: 1672879 - DNA, 25 bp, Homo sapien
caggtagggggggtcaacaggccag

SEQ ID NO: 1672880 - DNA, 25 bp, Homo sapien
ggagtttatcgtaaggactggcttc

SEQ ID NO: 1672881 - DNA, 25 bp, Homo sapien
gccataaattatggagtttatcgta

SEQ ID NO: 1672882 - DNA, 25 bp, Homo sapien
tttatcgtaaggactggcttccagt

SEQ ID NO: 1672883 - DNA, 25 bp, Homo sapien
agagatactgcaggccataaattat

SEQ ID NO: 1672884 - DNA, 25 bp, Homo sapien
agaaaaccaaggtcaggccatgagg

SEQ ID NO: 1672885 - DNA, 25 bp, Homo sapien
gtctgatgtagtgcccacaagacca

SEQ ID NO: 1672886 - DNA, 25 bp, Homo sapien
ttgggcaggtcagatccagggcata

SEQ ID NO: 1672887 - DNA, 25 bp, Homo sapien
ggagggcattagagggccagtgtcc

SEQ ID NO: 1672888 - DNA, 25 bp, Homo sapien
gatgttgaggcagacgttgccctcg

SEQ ID NO: 1672889 - DNA, 25 bp, Homo sapien
atgttgaggcagacgttgccctcga

SEQ ID NO: 1672890 - DNA, 25 bp, Homo sapien
aatgttggggtgatagaccattgtc

SEQ ID NO: 1672891 - DNA, 25 bp, Homo sapien
gtgatagaccattgtctcacacttc

SEQ ID NO: 1672892 - DNA, 25 bp, Homo sapien
gggatcatgcgggtaaccctggccc

SEQ ID NO: 1672893 - DNA, 25 bp, Homo sapien
gggggatcatgcgggtaaccctggc

SEQ ID NO: 1672894 - DNA, 25 bp, Homo sapien
tggggggatcatgcgggtaaccctg

SEQ ID NO: 1672895 - DNA, 25 bp, Homo sapien
ggggatcatgcgggtaaccctggcc

SEQ ID NO: 1672896 - DNA, 25 bp, Homo sapien
aagagagatgggtaggtgcctggaa

SEQ ID NO: 1672897 - DNA, 25 bp, Homo sapien
agatgggtaggtgcctggaagggcc

SEQ ID NO: 1672898 - DNA, 25 bp, Homo sapien
gtaggtgcctggaagggcctcagct

SEQ ID NO: 1672899 - DNA, 25 bp, Homo sapien
gaaaagagagatgggtaggtgcctg

SEQ ID NO: 1672900 - DNA, 25 bp, Homo sapien
gaacacaaacttcccactcttgtag

SEQ ID NO: 1672901 - DNA, 25 bp, Homo sapien
aactgaacacaaacttcccactctt

SEQ ID NO: 1672902 - DNA, 25 bp, Homo sapien
caaacttcccactcttgtagaagcc

SEQ ID NO: 1672903 - DNA, 25 bp, Homo sapien
tgaacacaaacttcccactcttgta

SEQ ID NO: 1672904 - DNA, 25 bp, Homo sapien
gctcctgggaattcagccatatgca

SEQ ID NO: 1672905 - DNA, 25 bp, Homo sapien
ggaattcagccatatgcaccctcac

SEQ ID NO: 1672906 - DNA, 25 bp, Homo sapien
tcctgggaattcagccatatgcacc

SEQ ID NO: 1672907 - DNA, 25 bp, Homo sapien
tagggttccatcctgtggggcccga

SEQ ID NO: 1672908 - DNA, 25 bp, Homo sapien
cttgaagttgaggaggtcgtctgga

SEQ ID NO: 1672909 - DNA, 25 bp, Homo sapien
gatatcacacgtcttgggcaggttc

SEQ ID NO: 1672910 - DNA, 25 bp, Homo sapien
ctgagaagctgatatcacacgtctt

SEQ ID NO: 1672911 - DNA, 25 bp, Homo sapien
aagttgaggaggtcgtctggatctg

SEQ ID NO: 1672912 - DNA, 25 bp, Homo sapien
ggatccgcagctgcgccgccgacgc

SEQ ID NO: 1672913 - DNA, 25 bp, Homo sapien
tggatccgcagctgcgccgccgacg

SEQ ID NO: 1672914 - DNA, 25 bp, Homo sapien
ctgcttcagcgagaacagcttgatc

SEQ ID NO: 1672915 - DNA, 25 bp, Homo sapien
tgcttcagcgagaacagcttgatca

SEQ ID NO: 1672916 - DNA, 25 bp, Homo sapien
gcttcagcgagaacagcttgatcat

SEQ ID NO: 1672917 - DNA, 25 bp, Homo sapien
gtcgcctccgctcctcggacccgca

SEQ ID NO: 1672918 - DNA, 25 bp, Homo sapien
gcgtcgcctccgctcctcggacccg

SEQ ID NO: 1672919 - DNA, 25 bp, Homo sapien
tcgcctccgctcctcggacccgcag

SEQ ID NO: 1672920 - DNA, 25 bp, Homo sapien
gcctccgctcctcggacccgcagct

SEQ ID NO: 1672921 - DNA, 25 bp, Homo sapien
agcgcctcggactcgctcggcagcg

SEQ ID NO: 1672922 - DNA, 25 bp, Homo sapien
ctcggcagcgctcggccaaattcgg

SEQ ID NO: 1672923 - DNA, 25 bp, Homo sapien
ccaaattcggctgttctcgggcccg

SEQ ID NO: 1672924 - DNA, 25 bp, Homo sapien
ctcggctcccgtagtccggctccgg

SEQ ID NO: 1672925 - DNA, 25 bp, Homo sapien
cagcagcggctttagcgcggaggtc

SEQ ID NO: 1672926 - DNA, 25 bp, Homo sapien
tggaggatcgtcttccgcggcagca

SEQ ID NO: 1672927 - DNA, 25 bp, Homo sapien
gcttcggatatttccgccgcctgcc

SEQ ID NO: 1672928 - DNA, 25 bp, Homo sapien
accgtgccgtttggccgctcagctg

SEQ ID NO: 1672929 - DNA, 25 bp, Homo sapien
tggacacctacagtagccaagccct

SEQ ID NO: 1672930 - DNA, 25 bp, Homo sapien
tatgtaatcgccagcctcacaataa

SEQ ID NO: 1672931 - DNA, 25 bp, Homo sapien
ggacctgcttatacttatgtaatcg

SEQ ID NO: 1672932 - DNA, 25 bp, Homo sapien
atcgccagcctcacaataaccaggg

SEQ ID NO: 1672933 - DNA, 25 bp, Homo sapien
ggcggacacagtgcgtcccggctgg

SEQ ID NO: 1672934 - DNA, 25 bp, Homo sapien
cggacacagtgcgtcccggctggag

SEQ ID NO: 1672935 - DNA, 25 bp, Homo sapien
ccatggcggacacagtgcgtcccgg

SEQ ID NO: 1672936 - DNA, 25 bp, Homo sapien
atggcggacacagtgcgtcccggct

SEQ ID NO: 1672937 - DNA, 25 bp, Homo sapien
ttctctcgtcggtgggtgcgcagat

SEQ ID NO: 1672938 - DNA, 25 bp, Homo sapien
caccgcagtggtagggcttttcgcc

SEQ ID NO: 1672939 - DNA, 25 bp, Homo sapien
ctcagggcatgcgtagggccgttca

SEQ ID NO: 1672940 - DNA, 25 bp, Homo sapien
tgtgtcctctgatgacgcgtgagct

SEQ ID NO: 1672941 - DNA, 25 bp, Homo sapien
tggagcgctgccggaagctctggcc

SEQ ID NO: 1672942 - DNA, 25 bp, Homo sapien
ttggagcgctgccggaagctctggc

SEQ ID NO: 1672943 - DNA, 25 bp, Homo sapien
cgctcctcggtgtgcgtaagctggt

SEQ ID NO: 1672944 - DNA, 25 bp, Homo sapien
tcagcgcaacggaaaggctgttcgc

SEQ ID NO: 1672945 - DNA, 25 bp, Homo sapien
cactcgctgcacacgaatggtcgct

SEQ ID NO: 1672946 - DNA, 25 bp, Homo sapien
gatgctcttccaggcgcgcgctgcg

SEQ ID NO: 1672947 - DNA, 25 bp, Homo sapien
tcagcaggttgctgcgttggctgaa

SEQ ID NO: 1672948 - DNA, 25 bp, Homo sapien
gctgcgttggctgaacaccttgcca

SEQ ID NO: 1672949 - DNA, 25 bp, Homo sapien
ggttgctgcgttggctgaacacctt

SEQ ID NO: 1672950 - DNA, 25 bp, Homo sapien
ttgccacatacatcgcaacggccgc

SEQ ID NO: 1672951 - DNA, 25 bp, Homo sapien
agcgccagcgggtggtgatcagagc

SEQ ID NO: 1672952 - DNA, 25 bp, Homo sapien
cccacaccccggcagggatcctcgt

SEQ ID NO: 1672953 - DNA, 25 bp, Homo sapien
cagggatcctcgtccgtggggtcct

SEQ ID NO: 1672954 - DNA, 25 bp, Homo sapien
cgggtggtgatcagagcagggccca

SEQ ID NO: 1672955 - DNA, 25 bp, Homo sapien
cctgcggagatgctgcctagctgca

SEQ ID NO: 1672956 - DNA, 25 bp, Homo sapien
caaagccaccttcgcgggagggtga

SEQ ID NO: 1672957 - DNA, 25 bp, Homo sapien
aaggccagccatgccgaggtcccag

SEQ ID NO: 1672958 - DNA, 25 bp, Homo sapien
cttacactacctggacctgcggaga

SEQ ID NO: 1672959 - DNA, 25 bp, Homo sapien
ctgcatacacaaggggaccattcat

SEQ ID NO: 1672960 - DNA, 25 bp, Homo sapien
agaacccgggcctgcaagtgatcaa

SEQ ID NO: 1672961 - DNA, 25 bp, Homo sapien
ggctctagggcatacacatggcaca

SEQ ID NO: 1672962 - DNA, 25 bp, Homo sapien
gacacagtgtgaactacagggacct

SEQ ID NO: 1672963 - DNA, 25 bp, Homo sapien
gagaaagtccataagtcgccaaaga

SEQ ID NO: 1672964 - DNA, 25 bp, Homo sapien
tgaatgtattagctattcagaatag

SEQ ID NO: 1672965 - DNA, 25 bp, Homo sapien
aaggggcattccactgtatactgtc

SEQ ID NO: 1672966 - DNA, 25 bp, Homo sapien
aatgtattagctattcagaatagtc

SEQ ID NO: 1672967 - DNA, 25 bp, Homo sapien
tgaatttcctaacatatgaatgtat

SEQ ID NO: 1672968 - DNA, 25 bp, Homo sapien
tctggccatgcaagtgaatgagcag

SEQ ID NO: 1672969 - DNA, 25 bp, Homo sapien
tgcgcctggctaagaagattctaaa

SEQ ID NO: 1672970 - DNA, 25 bp, Homo sapien
ggtacttctggccatgcaagtgaat

SEQ ID NO: 1672971 - DNA, 25 bp, Homo sapien
agcggctgcgcctggctaagaagat

SEQ ID NO: 1672972 - DNA, 25 bp, Homo sapien
tctggatttcttctcccatcctggc

SEQ ID NO: 1672973 - DNA, 25 bp, Homo sapien
tggatttcttctcccatcctggcag

SEQ ID NO: 1672974 - DNA, 25 bp, Homo sapien
gatttcttctcccatcctggcagaa

SEQ ID NO: 1672975 - DNA, 25 bp, Homo sapien
atttcttctcccatcctggcagaag

SEQ ID NO: 1672976 - DNA, 25 bp, Homo sapien
gccctatggatctgtttgcagcatc

SEQ ID NO: 1672977 - DNA, 25 bp, Homo sapien
gacgatggaacgaaacatgcttgga

SEQ ID NO: 1672978 - DNA, 25 bp, Homo sapien
aatggcctagccacattgccctatg

SEQ ID NO: 1672979 - DNA, 25 bp, Homo sapien
gaagttaccttcttgcaggattcag

SEQ ID NO: 1672980 - DNA, 25 bp, Homo sapien
tcttgcatataagccaacaactagg

SEQ ID NO: 1672981 - DNA, 25 bp, Homo sapien
caacaggagacagctaaaaagatga

SEQ ID NO: 1672982 - DNA, 25 bp, Homo sapien
gtaaaaatatgctacaagagaccag

SEQ ID NO: 1672983 - DNA, 25 bp, Homo sapien
tacaagagaccagatgaagtagctc

SEQ ID NO: 1672984 - DNA, 25 bp, Homo sapien
gctctagtctgtgtgaaatagtgag

SEQ ID NO: 1672985 - DNA, 25 bp, Homo sapien
ccactgtgctctagtctgtgtgaaa

SEQ ID NO: 1672986 - DNA, 25 bp, Homo sapien
cactgtgctctagtctgtgtgaaat

SEQ ID NO: 1672987 - DNA, 25 bp, Homo sapien
tgtgctctagtctgtgtgaaatagt

SEQ ID NO: 1672988 - DNA, 25 bp, Homo sapien
catcccagatgccaatagccaagta

SEQ ID NO: 1672989 - DNA, 25 bp, Homo sapien
tgtgaactaagaaagaggagaccct

SEQ ID NO: 1672990 - DNA, 25 bp, Homo sapien
taagaacattaaaggacccatccca

SEQ ID NO: 1672991 - DNA, 25 bp, Homo sapien
aagtaagaggcatcccagaaacagg

SEQ ID NO: 1672992 - DNA, 25 bp, Homo sapien
ctgcttgcaaaaggttttactaggg

SEQ ID NO: 1672993 - DNA, 25 bp, Homo sapien
gaatactcgccctgcttgcaaaagg

SEQ ID NO: 1672994 - DNA, 25 bp, Homo sapien
tcgccctgcttgcaaaaggttttac

SEQ ID NO: 1672995 - DNA, 25 bp, Homo sapien
cccaggaggccatccaggataccag

SEQ ID NO: 1672996 - DNA, 25 bp, Homo sapien
ggaaagatctggtccagcacggtcc

SEQ ID NO: 1672997 - DNA, 25 bp, Homo sapien
ctggggtgctccctccatgagggac

SEQ ID NO: 1672998 - DNA, 25 bp, Homo sapien
gaaagatctggtccagcacggtccc

SEQ ID NO: 1672999 - DNA, 25 bp, Homo sapien
gggccctggggtgctccctccatga

SEQ ID NO: 1673000 - DNA, 25 bp, Homo sapien
gtggcagctagaggcccagactcca

SEQ ID NO: 1673001 - DNA, 25 bp, Homo sapien
tgggtggcagctagaggcccagact

SEQ ID NO: 1673002 - DNA, 25 bp, Homo sapien
gagggtgggtacagactcctgggtg

SEQ ID NO: 1673003 - DNA, 25 bp, Homo sapien
actcctgggtggcagctagaggccc

SEQ ID NO: 1673004 - DNA, 25 bp, Homo sapien
tctctgataggacctcctggccctg

SEQ ID NO: 1673005 - DNA, 25 bp, Homo sapien
tcctgcatagtcctaggaggtgtct

SEQ ID NO: 1673006 - DNA, 25 bp, Homo sapien
tgcatagtcctaggaggtgtcttgg

SEQ ID NO: 1673007 - DNA, 25 bp, Homo sapien
tctggagttggaggctcagtttcag

SEQ ID NO: 1673008 - DNA, 25 bp, Homo sapien
tcagaagtcctaccagagagtaagg

SEQ ID NO: 1673009 - DNA, 25 bp, Homo sapien
ggccacttctgtaccacaagggaga

SEQ ID NO: 1673010 - DNA, 25 bp, Homo sapien
cctatgtccacgtgactgcaggtga

SEQ ID NO: 1673011 - DNA, 25 bp, Homo sapien
gagcaaagaatgaagggaccacctg

SEQ ID NO: 1673012 - DNA, 25 bp, Homo sapien
gcaccggaaacgcaggcgtgcagct

SEQ ID NO: 1673013 - DNA, 25 bp, Homo sapien
gctccttggagcgtacctctggacg

SEQ ID NO: 1673014 - DNA, 25 bp, Homo sapien
tcctcatagcggaagcaccggaaac

SEQ ID NO: 1673015 - DNA, 25 bp, Homo sapien
gcgtacctctggacgcagccactgg

SEQ ID NO: 1673016 - DNA, 25 bp, Homo sapien
agggtaccaggtcaggtatctgagg

SEQ ID NO: 1673017 - DNA, 25 bp, Homo sapien
taccaggtcaggtatctgaggccag

SEQ ID NO: 1673018 - DNA, 25 bp, Homo sapien
gtcaggtatctgaggccagtgtctg

SEQ ID NO: 1673019 - DNA, 25 bp, Homo sapien
tcaggtatctgaggccagtgtctgc

SEQ ID NO: 1673020 - DNA, 25 bp, Homo sapien
tgcaaagtctctgacagtctccctg

SEQ ID NO: 1673021 - DNA, 25 bp, Homo sapien
cacagacttatgcagctggaagccc

SEQ ID NO: 1673022 - DNA, 25 bp, Homo sapien
tagtctatgctgtaccgtttgatcc

SEQ ID NO: 1673023 - DNA, 25 bp, Homo sapien
taccccatgtggaaggcagatgagg

SEQ ID NO: 1673024 - DNA, 25 bp, Homo sapien
cacaggctgttttttaggactagaa

SEQ ID NO: 1673025 - DNA, 25 bp, Homo sapien
tcgatgtggctcctcatttgggccc

SEQ ID NO: 1673026 - DNA, 25 bp, Homo sapien
tggatggcacctatacacctacagc

SEQ ID NO: 1673027 - DNA, 25 bp, Homo sapien
gcgctacagctctctctttaccagg

SEQ ID NO: 1673028 - DNA, 25 bp, Homo sapien
gcatcgatttcgagggccgcctcat

SEQ ID NO: 1673029 - DNA, 25 bp, Homo sapien
gggatggcaccgcagaatcattccc

SEQ ID NO: 1673030 - DNA, 25 bp, Homo sapien
aatcattcccccgtgggtggcatcg

SEQ ID NO: 1673031 - DNA, 25 bp, Homo sapien
gctgcggctttaggaaggaatctgc

SEQ ID NO: 1673032 - DNA, 25 bp, Homo sapien
acacgatagccctcccggttaagag

SEQ ID NO: 1673033 - DNA, 25 bp, Homo sapien
ctccagggtgccaaggtaggtccag

SEQ ID NO: 1673034 - DNA, 25 bp, Homo sapien
caacgagtagtgattgacaagcctc

SEQ ID NO: 1673035 - DNA, 25 bp, Homo sapien
caaagcctgtcgtcgtggcaacgag

SEQ ID NO: 1673036 - DNA, 25 bp, Homo sapien
tgatcaggtcatactcctggccgct

SEQ ID NO: 1673037 - DNA, 25 bp, Homo sapien
gcatgcgcaagcctctcaggtacaa

SEQ ID NO: 1673038 - DNA, 25 bp, Homo sapien
cccctagcggtggtcgcaatgatca

SEQ ID NO: 1673039 - DNA, 25 bp, Homo sapien
tcgaatccgtgcgtcggcatgcgca

SEQ ID NO: 1673040 - DNA, 25 bp, Homo sapien
cagatgtagtcagcaggcccttcgt

SEQ ID NO: 1673041 - DNA, 25 bp, Homo sapien
cgtcattagaactccgtcggtgccc

SEQ ID NO: 1673042 - DNA, 25 bp, Homo sapien
ggcccgatgctttccggcagatgta

SEQ ID NO: 1673043 - DNA, 25 bp, Homo sapien
accgcaaaatggagaaaggcttggc

SEQ ID NO: 1673044 - DNA, 25 bp, Homo sapien
gatgcccctcagaaagaggcctgca

SEQ ID NO: 1673045 - DNA, 25 bp, Homo sapien
gatatgggctcattccaaggaaagg

SEQ ID NO: 1673046 - DNA, 25 bp, Homo sapien
ggcatgagttggcttccttgcagga

SEQ ID NO: 1673047 - DNA, 25 bp, Homo sapien
aaggccctagatcccacgatggagg

SEQ ID NO: 1673048 - DNA, 25 bp, Homo sapien
taaccggagcaacatagtaaggcca

SEQ ID NO: 1673049 - DNA, 25 bp, Homo sapien
ctgaggattatgcaggtgacaaggc

SEQ ID NO: 1673050 - DNA, 25 bp, Homo sapien
atcaactttgaacaccacctttggg

SEQ ID NO: 1673051 - DNA, 25 bp, Homo sapien
cacatttgagggtctgtgctattca

SEQ ID NO: 1673052 - DNA, 25 bp, Homo sapien
tttctatgcaactccatttgcttat

SEQ ID NO: 1673053 - DNA, 25 bp, Homo sapien
ttctccactgtgaggttatttctcc

SEQ ID NO: 1673054 - DNA, 25 bp, Homo sapien
gacggctgagtgtctacatcaatta

SEQ ID NO: 1673055 - DNA, 25 bp, Homo sapien
tcctccttgtccgtactgcatgtgt

SEQ ID NO: 1673056 - DNA, 25 bp, Homo sapien
tccagaaactagaatattaaccagc

SEQ ID NO: 1673057 - DNA, 25 bp, Homo sapien
tcagtttcccaaccggacttctgga

SEQ ID NO: 1673058 - DNA, 25 bp, Homo sapien
tgttgtaagttacagttagagtaag

SEQ ID NO: 1673059 - DNA, 25 bp, Homo sapien
ccttaactgagtcaagtgtatggtc

SEQ ID NO: 1673060 - DNA, 25 bp, Homo sapien
tgtcttggagacgaacattctgacc

SEQ ID NO: 1673061 - DNA, 25 bp, Homo sapien
ggagtcctgtcttggagacgaacat

SEQ ID NO: 1673062 - DNA, 25 bp, Homo sapien
gggagtcctgtcttggagacgaaca

SEQ ID NO: 1673063 - DNA, 25 bp, Homo sapien
agtcctgtcttggagacgaacattc

SEQ ID NO: 1673064 - DNA, 25 bp, Homo sapien
aagaaaacaacacgcttgtgttcac

SEQ ID NO: 1673065 - DNA, 25 bp, Homo sapien
cttcaggcggcccaagacactgcga

SEQ ID NO: 1673066 - DNA, 25 bp, Homo sapien
aaacaacacgcttgtgttcactgtg

SEQ ID NO: 1673067 - DNA, 25 bp, Homo sapien
cagcccagatatcctcggaagagca

SEQ ID NO: 1673068 - DNA, 25 bp, Homo sapien
taagccagatagtcgcagtaaagcc

SEQ ID NO: 1673069 - DNA, 25 bp, Homo sapien
tctccctagggctcttatgacggca

SEQ ID NO: 1673070 - DNA, 25 bp, Homo sapien
cagagccggctacagaatcgagtgt

SEQ ID NO: 1673071 - DNA, 25 bp, Homo sapien
agtaaagccccattagcccgtctgg

SEQ ID NO: 1673072 - DNA, 25 bp, Homo sapien
cagccccgctgaatggcagggtcag

SEQ ID NO: 1673073 - DNA, 25 bp, Homo sapien
ctcgcagcccaggtgaccggtttgt

SEQ ID NO: 1673074 - DNA, 25 bp, Homo sapien
ccgggagcgcgctgaatgccaggtg

SEQ ID NO: 1673075 - DNA, 25 bp, Homo sapien
ggtcctggcagagaccgcggcgagg

SEQ ID NO: 1673076 - DNA, 25 bp, Homo sapien
agttccgaaggccacaagcgaggtg

SEQ ID NO: 1673077 - DNA, 25 bp, Homo sapien
gttttcattgcccattttcctgcgg

SEQ ID NO: 1673078 - DNA, 25 bp, Homo sapien
cggtgcaaatcaagttccgaaggcc

SEQ ID NO: 1673079 - DNA, 25 bp, Homo sapien
ctggtcagagtggactgagaagcca

SEQ ID NO: 1673080 - DNA, 25 bp, Homo sapien
cataaaaatgttagacaagcctggc

SEQ ID NO: 1673081 - DNA, 25 bp, Homo sapien
aaatgttagacaagcctggcatggc

SEQ ID NO: 1673082 - DNA, 25 bp, Homo sapien
acataaaaatgttagacaagcctgg

SEQ ID NO: 1673083 - DNA, 25 bp, Homo sapien
taaaaatgttagacaagcctggcat

SEQ ID NO: 1673084 - DNA, 25 bp, Homo sapien
gtgtatcaatcatatttgcttatcc

SEQ ID NO: 1673085 - DNA, 25 bp, Homo sapien
cttacatgtgtcagttggtattgca

SEQ ID NO: 1673086 - DNA, 25 bp, Homo sapien
caccttatcctgtgcttactggtca

SEQ ID NO: 1673087 - DNA, 25 bp, Homo sapien
ttttttgatggcagctatgcttaca

SEQ ID NO: 1673088 - DNA, 25 bp, Homo sapien
cattagtaagatccgggaggagtac

SEQ ID NO: 1673089 - DNA, 25 bp, Homo sapien
cctgccctcgcccaaggtgtcggac

SEQ ID NO: 1673090 - DNA, 25 bp, Homo sapien
atcctgccctcgcccaaggtgtcgg

SEQ ID NO: 1673091 - DNA, 25 bp, Homo sapien
tcataaacacattcagcatcctgcc

SEQ ID NO: 1673092 - DNA, 25 bp, Homo sapien
caagagaggaactcgagcagcctgt

SEQ ID NO: 1673093 - DNA, 25 bp, Homo sapien
agaggaattgaaggcattttagaaa

SEQ ID NO: 1673094 - DNA, 25 bp, Homo sapien
agcagcctgtggagcaatcacttgt

SEQ ID NO: 1673095 - DNA, 25 bp, Homo sapien
tacttgcaagggaagcatagcgtaa

SEQ ID NO: 1673096 - DNA, 25 bp, Homo sapien
tttgctggacaatgtcttagacaat

SEQ ID NO: 1673097 - DNA, 25 bp, Homo sapien
tagacaatttgctaagggtggacat

SEQ ID NO: 1673098 - DNA, 25 bp, Homo sapien
ttttgctggacaatgtcttagacaa

SEQ ID NO: 1673099 - DNA, 25 bp, Homo sapien
gtcttagacaatttgctaagggtgg

SEQ ID NO: 1673100 - DNA, 25 bp, Homo sapien
agacgccgtcgggcggtggggatgt

SEQ ID NO: 1673101 - DNA, 25 bp, Homo sapien
cgccgtcgggcggtggggatgttgg

SEQ ID NO: 1673102 - DNA, 25 bp, Homo sapien
gagacgccgtcgggcggtggggatg

SEQ ID NO: 1673103 - DNA, 25 bp, Homo sapien
acgccgtcgggcggtggggatgttg

SEQ ID NO: 1673104 - DNA, 25 bp, Homo sapien
ggaggcttgggcgagtcacccctag

SEQ ID NO: 1673105 - DNA, 25 bp, Homo sapien
gaggcttgggcgagtcacccctagc

SEQ ID NO: 1673106 - DNA, 25 bp, Homo sapien
aggcttgggcgagtcacccctagcg

SEQ ID NO: 1673107 - DNA, 25 bp, Homo sapien
cgagtgcagcggagcgagcgcggcc

SEQ ID NO: 1673108 - DNA, 25 bp, Homo sapien
ctgcgagtgcagcggagcgagcgcg

SEQ ID NO: 1673109 - DNA, 25 bp, Homo sapien
gcgagcgcggccgcgtttcccgtcg

SEQ ID NO: 1673110 - DNA, 25 bp, Homo sapien
cgagcgcggccgcgtttcccgtcgg

SEQ ID NO: 1673111 - DNA, 25 bp, Homo sapien
gcgaaggtgaggaaaaggcttcctg

SEQ ID NO: 1673112 - DNA, 25 bp, Homo sapien
cctggggccaccgaggcgaaggtga

SEQ ID NO: 1673113 - DNA, 25 bp, Homo sapien
ggccgcgtccgctgtgaggacaggg

SEQ ID NO: 1673114 - DNA, 25 bp, Homo sapien
gtgaggaaaaggcttcctgcccgcg

SEQ ID NO: 1673115 - DNA, 25 bp, Homo sapien
gcggcgcgcgcgaaccgtgtccgaa

SEQ ID NO: 1673116 - DNA, 25 bp, Homo sapien
gattttcagagattccccagagctg

SEQ ID NO: 1673117 - DNA, 25 bp, Homo sapien
actgtgaggacggggggtccactgt

SEQ ID NO: 1673118 - DNA, 25 bp, Homo sapien
tcacggcctggaaaaaatcaaggcg

SEQ ID NO: 1673119 - DNA, 25 bp, Homo sapien
ctggaggttggggactggcaggggc

SEQ ID NO: 1673120 - DNA, 25 bp, Homo sapien
gttggggactggcaggggccacagc

SEQ ID NO: 1673121 - DNA, 25 bp, Homo sapien
aggttggggactggcaggggccaca

SEQ ID NO: 1673122 - DNA, 25 bp, Homo sapien
gaggttggggactggcaggggccac

SEQ ID NO: 1673123 - DNA, 25 bp, Homo sapien
agacgccgttgtgccgtcgggcggt

SEQ ID NO: 1673124 - DNA, 25 bp, Homo sapien
aacgtggagacgccgttgtgccgtc

SEQ ID NO: 1673125 - DNA, 25 bp, Homo sapien
gaggaacgtggagacgccgttgtgc

SEQ ID NO: 1673126 - DNA, 25 bp, Homo sapien
gagaagcggaggaacgtggagacgc

SEQ ID NO: 1673127 - DNA, 25 bp, Homo sapien
aggacagggagacgctccgggacac

SEQ ID NO: 1673128 - DNA, 25 bp, Homo sapien
tgtgaggacagggagacgctccggg

SEQ ID NO: 1673129 - DNA, 25 bp, Homo sapien
gccacgtccgctgtgaggacaggga

SEQ ID NO: 1673130 - DNA, 25 bp, Homo sapien
tgaggacagggagacgctccgggac

SEQ ID NO: 1673131 - DNA, 25 bp, Homo sapien
gagcccttgtctgggactgaacctc

SEQ ID NO: 1673132 - DNA, 25 bp, Homo sapien
gacttgccagatgaatcatgtccat

SEQ ID NO: 1673133 - DNA, 25 bp, Homo sapien
tcatgtccattttgggaaagtggac

SEQ ID NO: 1673134 - DNA, 25 bp, Homo sapien
gaaagtggacttaagtctccggagc

SEQ ID NO: 1673135 - DNA, 25 bp, Homo sapien
acagccccttgcctatctgccacag

SEQ ID NO: 1673136 - DNA, 25 bp, Homo sapien
tgcctatctgccacaggaggacttg

SEQ ID NO: 1673137 - DNA, 25 bp, Homo sapien
cccttgcctatctgccacaggagga

SEQ ID NO: 1673138 - DNA, 25 bp, Homo sapien
gcactctgttccagactcggatggg

SEQ ID NO: 1673139 - DNA, 25 bp, Homo sapien
aagggactcagggtcccgtgatgag

SEQ ID NO: 1673140 - DNA, 25 bp, Homo sapien
agggactcagggtcccgtgatgagg

SEQ ID NO: 1673141 - DNA, 25 bp, Homo sapien
gaagggactcagggtcccgtgatga

SEQ ID NO: 1673142 - DNA, 25 bp, Homo sapien
tttgaaccataaaccaggcacttgg

SEQ ID NO: 1673143 - DNA, 25 bp, Homo sapien
cctgggcagccgagtacaaggctga

SEQ ID NO: 1673144 - DNA, 25 bp, Homo sapien
tgagcagggcacagatcatgactgt

SEQ ID NO: 1673145 - DNA, 25 bp, Homo sapien
tctctcaatgaggagcctagttttc

SEQ ID NO: 1673146 - DNA, 25 bp, Homo sapien
ctcctccttctgcaaaggtgtctgc

SEQ ID NO: 1673147 - DNA, 25 bp, Homo sapien
tcctccttctgcaaaggtgtctgcc

SEQ ID NO: 1673148 - DNA, 25 bp, Homo sapien
ctctggtttgcggctgtctgcaccc

SEQ ID NO: 1673149 - DNA, 25 bp, Homo sapien
cagttccactgttgacggaaaaacg

SEQ ID NO: 1673150 - DNA, 25 bp, Homo sapien
aactagctttattctccgttactga

SEQ ID NO: 1673151 - DNA, 25 bp, Homo sapien
tctcatgacttatctctgtcccctc

SEQ ID NO: 1673152 - DNA, 25 bp, Homo sapien
caaggaggcccagttaggtcctgcc

SEQ ID NO: 1673153 - DNA, 25 bp, Homo sapien
ttctatgcggctgttaggcaaggag

SEQ ID NO: 1673154 - DNA, 25 bp, Homo sapien
catgctgtaaaggacgcgtgcctca

SEQ ID NO: 1673155 - DNA, 25 bp, Homo sapien
tcagtataagtcagttctatgcggc

SEQ ID NO: 1673156 - DNA, 25 bp, Homo sapien
ccagggcactaaagggcgcactttt

SEQ ID NO: 1673157 - DNA, 25 bp, Homo sapien
tccactttggcccagggcactaaag

SEQ ID NO: 1673158 - DNA, 25 bp, Homo sapien
cacttttgccaggtaggtttgtggg

SEQ ID NO: 1673159 - DNA, 25 bp, Homo sapien
taaagggcgcacttttgccaggtag

SEQ ID NO: 1673160 - DNA, 25 bp, Homo sapien
ttgaggccaggctgcgtgtccagac

SEQ ID NO: 1673161 - DNA, 25 bp, Homo sapien
cacattgtcggggtgacctggctca

SEQ ID NO: 1673162 - DNA, 25 bp, Homo sapien
ggctcatacttgaagcctttgagct

SEQ ID NO: 1673163 - DNA, 25 bp, Homo sapien
tgagctggaccctggctttatcctt

SEQ ID NO: 1673164 - DNA, 25 bp, Homo sapien
agtgttgccgcccaaggcagcactc

SEQ ID NO: 1673165 - DNA, 25 bp, Homo sapien
gcagctgcaccaggatagtgtagca

SEQ ID NO: 1673166 - DNA, 25 bp, Homo sapien
cagtgagtgcactgtagtgttgccg

SEQ ID NO: 1673167 - DNA, 25 bp, Homo sapien
caggatagtgtagcagccccgtggt

SEQ ID NO: 1673168 - DNA, 25 bp, Homo sapien
ttgcccatgtaccatgggtcagagc

SEQ ID NO: 1673169 - DNA, 25 bp, Homo sapien
cttgcccatgtaccatgggtcagag

SEQ ID NO: 1673170 - DNA, 25 bp, Homo sapien
tgcccatgtaccatgggtcagagcc

SEQ ID NO: 1673171 - DNA, 25 bp, Homo sapien
caaagggacagacactgctgcagag

SEQ ID NO: 1673172 - DNA, 25 bp, Homo sapien
gtaactgttgcacaaagggacagac

SEQ ID NO: 1673173 - DNA, 25 bp, Homo sapien
agtaactgttgcacaaagggacaga

SEQ ID NO: 1673174 - DNA, 25 bp, Homo sapien
gccttgttgctgtacccaactttcc

SEQ ID NO: 1673175 - DNA, 25 bp, Homo sapien
tccctgtcttgaaacgaggcctgct

SEQ ID NO: 1673176 - DNA, 25 bp, Homo sapien
gctggcctggcctgattctacatag

SEQ ID NO: 1673177 - DNA, 25 bp, Homo sapien
cctcagatggccatattgccttgtt

SEQ ID NO: 1673178 - DNA, 25 bp, Homo sapien
ccatggaataggtgcggctctgaga

SEQ ID NO: 1673179 - DNA, 25 bp, Homo sapien
tcctgtgaccgggtgttgtctgagc

SEQ ID NO: 1673180 - DNA, 25 bp, Homo sapien
gacccaatgtggcagaagctgtacc

SEQ ID NO: 1673181 - DNA, 25 bp, Homo sapien
ttgtctgagctgcggtgaggcctcc

SEQ ID NO: 1673182 - DNA, 25 bp, Homo sapien
cctcccgtgggtgtggcagagcctg

SEQ ID NO: 1673183 - DNA, 25 bp, Homo sapien
ggcagagcctgtggtctgaggcagg

SEQ ID NO: 1673184 - DNA, 25 bp, Homo sapien
tctgaggcaggggtccagctgcaga

SEQ ID NO: 1673185 - DNA, 25 bp, Homo sapien
tcccgtgggtgtggcagagcctgtg

SEQ ID NO: 1673186 - DNA, 25 bp, Homo sapien
gctggcagcgtgaatcatgtgtcct

SEQ ID NO: 1673187 - DNA, 25 bp, Homo sapien
ttagctggcagcgtgaatcatgtgt

SEQ ID NO: 1673188 - DNA, 25 bp, Homo sapien
tagctggcagcgtgaatcatgtgtc

SEQ ID NO: 1673189 - DNA, 25 bp, Homo sapien
cttagctggcagcgtgaatcatgtg

SEQ ID NO: 1673190 - DNA, 25 bp, Homo sapien
tgcagacgagctgatgatcaccttc

SEQ ID NO: 1673191 - DNA, 25 bp, Homo sapien
tctgcagacgagctgatgatcacct

SEQ ID NO: 1673192 - DNA, 25 bp, Homo sapien
ctgcagacgagctgatgatcacctt

SEQ ID NO: 1673193 - DNA, 25 bp, Homo sapien
gtctcaaatgcaaacatcctcgtgc

SEQ ID NO: 1673194 - DNA, 25 bp, Homo sapien
tctcaaatgcaaacatcctcgtgct

SEQ ID NO: 1673195 - DNA, 25 bp, Homo sapien
caaatgcaaacatcctcgtgcttac

SEQ ID NO: 1673196 - DNA, 25 bp, Homo sapien
ctagagccatgtctcaaatgcaaac

SEQ ID NO: 1673197 - DNA, 25 bp, Homo sapien
ccccacagagacctcagggtgattg

SEQ ID NO: 1673198 - DNA, 25 bp, Homo sapien
gcacagcgagttccccggaggagca

SEQ ID NO: 1673199 - DNA, 25 bp, Homo sapien
atgcagacgccgcactccaggtggg

SEQ ID NO: 1673200 - DNA, 25 bp, Homo sapien
tttacaaacaagtctcatcccatca

SEQ ID NO: 1673201 - DNA, 25 bp, Homo sapien
gagccttcgcagagttgaagagcag

SEQ ID NO: 1673202 - DNA, 25 bp, Homo sapien
cttcgcagagttgaagagcagagct

SEQ ID NO: 1673203 - DNA, 25 bp, Homo sapien
gtcgtgtccgcaggcccgtttcact

SEQ ID NO: 1673204 - DNA, 25 bp, Homo sapien
ctgagggtcgtgtccgcaggcccgt

SEQ ID NO: 1673205 - DNA, 25 bp, Homo sapien
gctgagccagatctgcatctcacag

SEQ ID NO: 1673206 - DNA, 25 bp, Homo sapien
tcagcggttgttgctgagccagatc

SEQ ID NO: 1673207 - DNA, 25 bp, Homo sapien
cccctcccaggtaagcgccaggtga

SEQ ID NO: 1673208 - DNA, 25 bp, Homo sapien
ccaggtaagcgccaggtgaccccag

SEQ ID NO: 1673209 - DNA, 25 bp, Homo sapien
gcctagacaaaagttacagcacctg

SEQ ID NO: 1673210 - DNA, 25 bp, Homo sapien
caagagttggatcacctcgggatca

SEQ ID NO: 1673211 - DNA, 25 bp, Homo sapien
cgggatcagtgcagagatatgtctc

SEQ ID NO: 1673212 - DNA, 25 bp, Homo sapien
cagtcatatgtcacaatgctgtgta

SEQ ID NO: 1673213 - DNA, 25 bp, Homo sapien
cacctgggtgatcagagcaaaggta

SEQ ID NO: 1673214 - DNA, 25 bp, Homo sapien
tgtaggcagagcttagatgagttac

SEQ ID NO: 1673215 - DNA, 25 bp, Homo sapien
gagatatgtcacaaagctcctgtag

SEQ ID NO: 1673216 - DNA, 25 bp, Homo sapien
tcacaaagctcctgtaggcagagct

SEQ ID NO: 1673217 - DNA, 25 bp, Homo sapien
cacaatacctcctgtaggcagatcc

SEQ ID NO: 1673218 - DNA, 25 bp, Homo sapien
gggatatgtgaaaacgcccctgcag

SEQ ID NO: 1673219 - DNA, 25 bp, Homo sapien
cctttgtcatcagttcagggatatg

SEQ ID NO: 1673220 - DNA, 25 bp, Homo sapien
caaagcctaggcaagagttacatca

SEQ ID NO: 1673221 - DNA, 25 bp, Homo sapien
atgtaccctgtaggcagagcacaga

SEQ ID NO: 1673222 - DNA, 25 bp, Homo sapien
cagagcacagagaagagttgcatca

SEQ ID NO: 1673223 - DNA, 25 bp, Homo sapien
gtcacaatgtaccctgtaggcagag

SEQ ID NO: 1673224 - DNA, 25 bp, Homo sapien
caatgtaccctgtaggcagagcaca

SEQ ID NO: 1673225 - DNA, 25 bp, Homo sapien
ctcggtgatcagtgcagatgtgtgt

SEQ ID NO: 1673226 - DNA, 25 bp, Homo sapien
cggtgatcagtgcagatgtgtgtca

SEQ ID NO: 1673227 - DNA, 25 bp, Homo sapien
gtgatcagtgcagatgtgtgtcaga

SEQ ID NO: 1673228 - DNA, 25 bp, Homo sapien
tgatcagtgcagatgtgtgtcagat

SEQ ID NO: 1673229 - DNA, 25 bp, Homo sapien
cagcaggtgggccgcctactgcgca

SEQ ID NO: 1673230 - DNA, 25 bp, Homo sapien
gccgggacagagctctcccgcctct

SEQ ID NO: 1673231 - DNA, 25 bp, Homo sapien
gcacgcgcgggtttgcgggcagccg

SEQ ID NO: 1673232 - DNA, 25 bp, Homo sapien
caggtgggccgcctactgcgcacgc

SEQ ID NO: 1673233 - DNA, 25 bp, Homo sapien
ttcctgccttctaggtctaggcccg

SEQ ID NO: 1673234 - DNA, 25 bp, Homo sapien
agagactccacacagcggagaactg

SEQ ID NO: 1673235 - DNA, 25 bp, Homo sapien
cttctaggtctaggcccggtgagag

SEQ ID NO: 1673236 - DNA, 25 bp, Homo sapien
tccacacagcggagaactgccattc

SEQ ID NO: 1673237 - DNA, 25 bp, Homo sapien
gcctctctttcgcggggaacacctg

SEQ ID NO: 1673238 - DNA, 25 bp, Homo sapien
tctttcgcggggaacacctggctgg

SEQ ID NO: 1673239 - DNA, 25 bp, Homo sapien
gctggctacggaggggcgtgtctcc

SEQ ID NO: 1673240 - DNA, 25 bp, Homo sapien
cacctggctggctacggaggggcgt

SEQ ID NO: 1673241 - DNA, 25 bp, Homo sapien
tcgctggaagcacccctcagcgagg

SEQ ID NO: 1673242 - DNA, 25 bp, Homo sapien
agctggaggcctcggaagaggccgc

SEQ ID NO: 1673243 - DNA, 25 bp, Homo sapien
cgaggaagaataccgggctctgctg

SEQ ID NO: 1673244 - DNA, 25 bp, Homo sapien
aggcctcggaagaggccgcctcgct

SEQ ID NO: 1673245 - DNA, 25 bp, Homo sapien
taaaaagcagttaccagacttgact

SEQ ID NO: 1673246 - DNA, 25 bp, Homo sapien
aagtccaagtatgctcaaggctctt

SEQ ID NO: 1673247 - DNA, 25 bp, Homo sapien
ctactagtcggtaaggtccttaatg

SEQ ID NO: 1673248 - DNA, 25 bp, Homo sapien
tttatatccacagggaattgattcc

SEQ ID NO: 1673249 - DNA, 25 bp, Homo sapien
ctaaaatgaaaataaatataggcca

SEQ ID NO: 1673250 - DNA, 25 bp, Homo sapien
taaaatgaaaataaatataggccat

SEQ ID NO: 1673251 - DNA, 25 bp, Homo sapien
tacaggtctaacgtgaaacagttta

SEQ ID NO: 1673252 - DNA, 25 bp, Homo sapien
ctccttgggttacaggtctaacgtg

SEQ ID NO: 1673253 - DNA, 25 bp, Homo sapien
tctatacacatctccttgggttaca

SEQ ID NO: 1673254 - DNA, 25 bp, Homo sapien
cagtttcagctctatacacatctcc

SEQ ID NO: 1673255 - DNA, 25 bp, Homo sapien
cattcaccttcatttgcatatagta

SEQ ID NO: 1673256 - DNA, 25 bp, Homo sapien
tggcacaggcatcacaattggcagg

SEQ ID NO: 1673257 - DNA, 25 bp, Homo sapien
gtggtagagtgtaggaataaactca

SEQ ID NO: 1673258 - DNA, 25 bp, Homo sapien
cttatctaagtgatctctgtggcac

SEQ ID NO: 1673259 - DNA, 25 bp, Homo sapien
catggacaaattaagtcctctttct

SEQ ID NO: 1673260 - DNA, 25 bp, Homo sapien
atcctgagaacatgctaacagcagc

SEQ ID NO: 1673261 - DNA, 25 bp, Homo sapien
aaaccagatggtggattcttaggga

SEQ ID NO: 1673262 - DNA, 25 bp, Homo sapien
cacgaacaaaaccagatggtggatt

SEQ ID NO: 1673263 - DNA, 25 bp, Homo sapien
gggaagcacgaacaaaaccagatgg

SEQ ID NO: 1673264 - DNA, 25 bp, Homo sapien
tccggaaagactgatttgcagtgga

SEQ ID NO: 1673265 - DNA, 25 bp, Homo sapien
tgatttgcagtggatcttgtagaaa

SEQ ID NO: 1673266 - DNA, 25 bp, Homo sapien
tttgaccactttccggaaagactga

SEQ ID NO: 1673267 - DNA, 25 bp, Homo sapien
ttgcagtggatcttgtagaaagcgt

SEQ ID NO: 1673268 - DNA, 25 bp, Homo sapien
gcaatcttaaccctgaagcctgtga

SEQ ID NO: 1673269 - DNA, 25 bp, Homo sapien
tctgctctgcatggttaaagaagcc

SEQ ID NO: 1673270 - DNA, 25 bp, Homo sapien
aggtagcatcccacacgattccaca

SEQ ID NO: 1673271 - DNA, 25 bp, Homo sapien
aaaccctcagtgtgttgtgccaaag

SEQ ID NO: 1673272 - DNA, 25 bp, Homo sapien
gaaaactctgttctatcacgactga

SEQ ID NO: 1673273 - DNA, 25 bp, Homo sapien
tgggcaatcaacagtaaggctttta

SEQ ID NO: 1673274 - DNA, 25 bp, Homo sapien
cacttgaaagtgaaagtcccttcct

SEQ ID NO: 1673275 - DNA, 25 bp, Homo sapien
tataaatccaaaaaggcagcacctt

SEQ ID NO: 1673276 - DNA, 25 bp, Homo sapien
cagtgcggctttcaataccacttga

SEQ ID NO: 1673277 - DNA, 25 bp, Homo sapien
ggcactaaaaggacaatgcaacccc

SEQ ID NO: 1673278 - DNA, 25 bp, Homo sapien
catcctagagacgatcggttttcca

SEQ ID NO: 1673279 - DNA, 25 bp, Homo sapien
actcaatatggcttggcaaaaatgc

SEQ ID NO: 1673280 - DNA, 25 bp, Homo sapien
tttctcattaaatgagcacagtcat

SEQ ID NO: 1673281 - DNA, 25 bp, Homo sapien
ctcattaaatgagcacagtcattac

SEQ ID NO: 1673282 - DNA, 25 bp, Homo sapien
tctcattaaatgagcacagtcatta

SEQ ID NO: 1673283 - DNA, 25 bp, Homo sapien
tatttctcattaaatgagcacagtc

SEQ ID NO: 1673284 - DNA, 25 bp, Homo sapien
aactggaggtagattgtagcaagcc

SEQ ID NO: 1673285 - DNA, 25 bp, Homo sapien
cagacatgaggttcttaagtggcaa

SEQ ID NO: 1673286 - DNA, 25 bp, Homo sapien
gattatggcactatctggaccctct

SEQ ID NO: 1673287 - DNA, 25 bp, Homo sapien
gagatgcaggctgtgctaaatgcca

SEQ ID NO: 1673288 - DNA, 25 bp, Homo sapien
tccatgaaaatgaggcttcgggatg

SEQ ID NO: 1673289 - DNA, 25 bp, Homo sapien
attcacaagggcaccgagcaaggag

SEQ ID NO: 1673290 - DNA, 25 bp, Homo sapien
taaagtaacaggttcatgatgcaca

SEQ ID NO: 1673291 - DNA, 25 bp, Homo sapien
cacgtcttgggcaattgtgttggcc

SEQ ID NO: 1673292 - DNA, 25 bp, Homo sapien
tctggtctttttctgacgttctcca

SEQ ID NO: 1673293 - DNA, 25 bp, Homo sapien
ctggtctttttctgacgttctccag

SEQ ID NO: 1673294 - DNA, 25 bp, Homo sapien
ttctggtctttttctgacgttctcc

SEQ ID NO: 1673295 - DNA, 25 bp, Homo sapien
ttacttggttgaagatgggttgcag

SEQ ID NO: 1673296 - DNA, 25 bp, Homo sapien
tgtgaaggggcttgtcttttacttg

SEQ ID NO: 1673297 - DNA, 25 bp, Homo sapien
tgaagatgggttgcaggatccaagt

SEQ ID NO: 1673298 - DNA, 25 bp, Homo sapien
tacttgagtaataagctgtgaaggg

SEQ ID NO: 1673299 - DNA, 25 bp, Homo sapien
tgaggaggtggaaccatgctagcaa

SEQ ID NO: 1673300 - DNA, 25 bp, Homo sapien
agtgaggaggtggaaccatgctagc

SEQ ID NO: 1673301 - DNA, 25 bp, Homo sapien
gagtgaggaggtggaaccatgctag

SEQ ID NO: 1673302 - DNA, 25 bp, Homo sapien
gtgaggaggtggaaccatgctagca

SEQ ID NO: 1673303 - DNA, 25 bp, Homo sapien
gaagtttattcatcatgtagatgac

SEQ ID NO: 1673304 - DNA, 25 bp, Homo sapien
tggtccctttggtacaactagcttc

SEQ ID NO: 1673305 - DNA, 25 bp, Homo sapien
ggtacaactagcttcttccagcctc

SEQ ID NO: 1673306 - DNA, 25 bp, Homo sapien
gatgaccagggaatcttgtagacca

SEQ ID NO: 1673307 - DNA, 25 bp, Homo sapien
agcaacacgcaaaacacccgtgcag

SEQ ID NO: 1673308 - DNA, 25 bp, Homo sapien
atgacgcagcaacacgcaaaacacc

SEQ ID NO: 1673309 - DNA, 25 bp, Homo sapien
ctggcgatgacgcagcaacacgcaa

SEQ ID NO: 1673310 - DNA, 25 bp, Homo sapien
ggcgatgacgcagcaacacgcaaaa

SEQ ID NO: 1673311 - DNA, 25 bp, Homo sapien
ggcggcggcttcggtgcgacgagtc

SEQ ID NO: 1673312 - DNA, 25 bp, Homo sapien
tggcggcggcttcggtgcgacgagt

SEQ ID NO: 1673313 - DNA, 25 bp, Homo sapien
gcacaccagggcagcgtcagaaact

SEQ ID NO: 1673314 - DNA, 25 bp, Homo sapien
cagcgtcagaaactattctgcagag

SEQ ID NO: 1673315 - DNA, 25 bp, Homo sapien
ccacccatcggtggctcagggggac

SEQ ID NO: 1673316 - DNA, 25 bp, Homo sapien
cagagtcacgactttgagaggcttc

SEQ ID NO: 1673317 - DNA, 25 bp, Homo sapien
gaaaaagtgggagcaactcaagtgt

SEQ ID NO: 1673318 - DNA, 25 bp, Homo sapien
cagccattagaatggctattctttt

SEQ ID NO: 1673319 - DNA, 25 bp, Homo sapien
tccatcaaccaattaatggacaaag

SEQ ID NO: 1673320 - DNA, 25 bp, Homo sapien
ttattcacaacagccgaaaaagtgg

SEQ ID NO: 1673321 - DNA, 25 bp, Homo sapien
ctgagacttcagcaggctgggcgtg

SEQ ID NO: 1673322 - DNA, 25 bp, Homo sapien
ttagcgttcctcctttcaccataac

SEQ ID NO: 1673323 - DNA, 25 bp, Homo sapien
tctgtattcaattctacaccttcaa

SEQ ID NO: 1673324 - DNA, 25 bp, Homo sapien
cagctgagccttgaataccattgga

SEQ ID NO: 1673325 - DNA, 25 bp, Homo sapien
tggactccagtcaacgcaaacagct

SEQ ID NO: 1673326 - DNA, 25 bp, Homo sapien
attttgatgtttccccaatcatcat

SEQ ID NO: 1673327 - DNA, 25 bp, Homo sapien
ttttgatgtttccccaatcatcatc

SEQ ID NO: 1673328 - DNA, 25 bp, Homo sapien
tattttgatgtttccccaatcatca

SEQ ID NO: 1673329 - DNA, 25 bp, Homo sapien
ttattttgatgtttccccaatcatc

SEQ ID NO: 1673330 - DNA, 25 bp, Homo sapien
tgtcatgtcttctacgaagacagtt

SEQ ID NO: 1673331 - DNA, 25 bp, Homo sapien
cttctacgaagacagttttggctga

SEQ ID NO: 1673332 - DNA, 25 bp, Homo sapien
ctgagggttcttctggaagagcatc

SEQ ID NO: 1673333 - DNA, 25 bp, Homo sapien
agttttggctgagggttcttctgga

SEQ ID NO: 1673334 - DNA, 25 bp, Homo sapien
cacagaacgaatacactgaactgtg

SEQ ID NO: 1673335 - DNA, 25 bp, Homo sapien
taccaaggtttgtcaatccacatgg

SEQ ID NO: 1673336 - DNA, 25 bp, Homo sapien
taacaagtgttaccaaggtttgtca

SEQ ID NO: 1673337 - DNA, 25 bp, Homo sapien
ttcatgtaacaagtgttaccaaggt

SEQ ID NO: 1673338 - DNA, 25 bp, Homo sapien
gctttcaacaacagatcagtcctat

SEQ ID NO: 1673339 - DNA, 25 bp, Homo sapien
ttccaggaaaagatagacatagagc

SEQ ID NO: 1673340 - DNA, 25 bp, Homo sapien
tagagctagcataactgtaacacca

SEQ ID NO: 1673341 - DNA, 25 bp, Homo sapien
gctgagtgcagacaatttcatgggc

SEQ ID NO: 1673342 - DNA, 25 bp, Homo sapien
tatactgcgctgaagccatttcccc

SEQ ID NO: 1673343 - DNA, 25 bp, Homo sapien
cagtaatatactgcgctgaagccat

SEQ ID NO: 1673344 - DNA, 25 bp, Homo sapien
ctgcagtaatatactgcgctgaagc

SEQ ID NO: 1673345 - DNA, 25 bp, Homo sapien
tgcgctgaagccatttcccctgaag

SEQ ID NO: 1673346 - DNA, 25 bp, Homo sapien
attccatttagagtaaaagtccaga

SEQ ID NO: 1673347 - DNA, 25 bp, Homo sapien
aattccatttagagtaaaagtccag

SEQ ID NO: 1673348 - DNA, 25 bp, Homo sapien
tagggtactgtgtgaaactcccaaa

SEQ ID NO: 1673349 - DNA, 25 bp, Homo sapien
atctagtatataccatcaacagagc

SEQ ID NO: 1673350 - DNA, 25 bp, Homo sapien
gcaatgtgggatcttaaactgaatc

SEQ ID NO: 1673351 - DNA, 25 bp, Homo sapien
tttttaatggacaatactaggacag

SEQ ID NO: 1673352 - DNA, 25 bp, Homo sapien
ttcctctagcttatctcaacttgta

SEQ ID NO: 1673353 - DNA, 25 bp, Homo sapien
tgtacagcaaaactcttcctctagc

SEQ ID NO: 1673354 - DNA, 25 bp, Homo sapien
gaaatttgggcatcactaccaagct

SEQ ID NO: 1673355 - DNA, 25 bp, Homo sapien
catcattatacagactgaacccacc

SEQ ID NO: 1673356 - DNA, 25 bp, Homo sapien
catttctcctctgcggacttcctag

SEQ ID NO: 1673357 - DNA, 25 bp, Homo sapien
cctctgcggacttcctagtgatcat

SEQ ID NO: 1673358 - DNA, 25 bp, Homo sapien
tcttggatttcgaaccatttctcct

SEQ ID NO: 1673359 - DNA, 25 bp, Homo sapien
cacagtcatggactagtctgttctc

SEQ ID NO: 1673360 - DNA, 25 bp, Homo sapien
cacataacctctgtttagggacaaa

SEQ ID NO: 1673361 - DNA, 25 bp, Homo sapien
tctgccaagatcaggatagcgggtc

SEQ ID NO: 1673362 - DNA, 25 bp, Homo sapien
ggacagctaagaaccaaaactacta

SEQ ID NO: 1673363 - DNA, 25 bp, Homo sapien
aaatctgggtccttaaacagctgac

SEQ ID NO: 1673364 - DNA, 25 bp, Homo sapien
caaagcaaacattgccttagtaaaa

SEQ ID NO: 1673365 - DNA, 25 bp, Homo sapien
aatacacgcgactgtaaattaattt

SEQ ID NO: 1673366 - DNA, 25 bp, Homo sapien
gtcacatatttaatacacgcgactg

SEQ ID NO: 1673367 - DNA, 25 bp, Homo sapien
aacattgccttagtaaaacagtcac

SEQ ID NO: 1673368 - DNA, 25 bp, Homo sapien
taataggtggaatactggaagaagt

SEQ ID NO: 1673369 - DNA, 25 bp, Homo sapien
aagccatgtgcaaaaactgcagtag

SEQ ID NO: 1673370 - DNA, 25 bp, Homo sapien
aaactgcagtagaataataggtgga

SEQ ID NO: 1673371 - DNA, 25 bp, Homo sapien
ggaagaagttttatccatggaatca

SEQ ID NO: 1673372 - DNA, 25 bp, Homo sapien
gtccttgttcacctttctcggcaaa

SEQ ID NO: 1673373 - DNA, 25 bp, Homo sapien
ctgttgaagatactgtccttgttca

SEQ ID NO: 1673374 - DNA, 25 bp, Homo sapien
tgtccttgttcacctttctcggcaa

SEQ ID NO: 1673375 - DNA, 25 bp, Homo sapien
ttgaagatactgtccttgttcacct

SEQ ID NO: 1673376 - DNA, 25 bp, Homo sapien
tctgttgcaatactcgcatcatttg

SEQ ID NO: 1673377 - DNA, 25 bp, Homo sapien
gcttccaatttctgttgcaatactc

SEQ ID NO: 1673378 - DNA, 25 bp, Homo sapien
gcaatactcgcatcatttgtatcca

SEQ ID NO: 1673379 - DNA, 25 bp, Homo sapien
atttgtatccaacattcattagcat

SEQ ID NO: 1673380 - DNA, 25 bp, Homo sapien
aaggtgtcgctgccgatgcagatga

SEQ ID NO: 1673381 - DNA, 25 bp, Homo sapien
gaagaactgatcgattaaacttttc

SEQ ID NO: 1673382 - DNA, 25 bp, Homo sapien
gctgccgatgcagatgaggagtctg

SEQ ID NO: 1673383 - DNA, 25 bp, Homo sapien
tttcaaactcaacaccgaagaactg

SEQ ID NO: 1673384 - DNA, 25 bp, Homo sapien
gatacttgacttcctgattgataaa

SEQ ID NO: 1673385 - DNA, 25 bp, Homo sapien
taagtcctgtaaaaagatacttgac

SEQ ID NO: 1673386 - DNA, 25 bp, Homo sapien
cctgattgataaaacagctaagctg

SEQ ID NO: 1673387 - DNA, 25 bp, Homo sapien
cagctaagctgaagttgattttcct

SEQ ID NO: 1673388 - DNA, 25 bp, Homo sapien
tatttctgcaatatagaatcacacc

SEQ ID NO: 1673389 - DNA, 25 bp, Homo sapien
gaatcacaccagtaagccttttaaa

SEQ ID NO: 1673390 - DNA, 25 bp, Homo sapien
tctgcaatatagaatcacaccagta

SEQ ID NO: 1673391 - DNA, 25 bp, Homo sapien
atagaatcacaccagtaagcctttt

SEQ ID NO: 1673392 - DNA, 25 bp, Homo sapien
caacgttggagactgtttggtgatt

SEQ ID NO: 1673393 - DNA, 25 bp, Homo sapien
ggcatttctttgcaacgttggagac

SEQ ID NO: 1673394 - DNA, 25 bp, Homo sapien
catttctttgcaacgttggagactg

SEQ ID NO: 1673395 - DNA, 25 bp, Homo sapien
tctttgcaacgttggagactgtttg

SEQ ID NO: 1673396 - DNA, 25 bp, Homo sapien
tcagtgaagcggaatttggcttcga

SEQ ID NO: 1673397 - DNA, 25 bp, Homo sapien
tatttcagtgaagcggaatttggct

SEQ ID NO: 1673398 - DNA, 25 bp, Homo sapien
cagtgaagcggaatttggcttcgaa

SEQ ID NO: 1673399 - DNA, 25 bp, Homo sapien
tttcagtgaagcggaatttggcttc

SEQ ID NO: 1673400 - DNA, 25 bp, Homo sapien
tctgaatggtcaagtaagcaggcag

SEQ ID NO: 1673401 - DNA, 25 bp, Homo sapien
tcacagattccttctctttataaaa

SEQ ID NO: 1673402 - DNA, 25 bp, Homo sapien
taaaaaaatcgaaccatctgaatgg

SEQ ID NO: 1673403 - DNA, 25 bp, Homo sapien
ctttataaaaaaatcgaaccatctg

SEQ ID NO: 1673404 - DNA, 25 bp, Homo sapien
ttatacaaagtaaagttcattacta

SEQ ID NO: 1673405 - DNA, 25 bp, Homo sapien
tatacaaagtaaagttcattactaa

SEQ ID NO: 1673406 - DNA, 25 bp, Homo sapien
tatccaacataagaggaaatttaac

SEQ ID NO: 1673407 - DNA, 25 bp, Homo sapien
agatccttgaatttggatcgaaaag

SEQ ID NO: 1673408 - DNA, 25 bp, Homo sapien
tgaatttggatcgaaaagacaccat

SEQ ID NO: 1673409 - DNA, 25 bp, Homo sapien
acagttcatacatatccaacataag

SEQ ID NO: 1673410 - DNA, 25 bp, Homo sapien
aaagatctgcactgatatatggagg

SEQ ID NO: 1673411 - DNA, 25 bp, Homo sapien
aagacagagtaattgctgagcactg

SEQ ID NO: 1673412 - DNA, 25 bp, Homo sapien
tatggaggatgtgtatacctgctaa

SEQ ID NO: 1673413 - DNA, 25 bp, Homo sapien
tcatgctaaaatacacctaaaggcc

SEQ ID NO: 1673414 - DNA, 25 bp, Homo sapien
taaacccagcagtcctacacttcaa

SEQ ID NO: 1673415 - DNA, 25 bp, Homo sapien
tacagtctaccttccaaattactaa

SEQ ID NO: 1673416 - DNA, 25 bp, Homo sapien
tatttactgtctacagtgcacagag

SEQ ID NO: 1673417 - DNA, 25 bp, Homo sapien
cagtacagtaacagacaccctgaat

SEQ ID NO: 1673418 - DNA, 25 bp, Homo sapien
catcagcaaaagaaaagggttcata

SEQ ID NO: 1673419 - DNA, 25 bp, Homo sapien
tttctggggactactctttttgtca

SEQ ID NO: 1673420 - DNA, 25 bp, Homo sapien
agggttcatacttaacttctttctg

SEQ ID NO: 1673421 - DNA, 25 bp, Homo sapien
tctggggactactctttttgtcact

SEQ ID NO: 1673422 - DNA, 25 bp, Homo sapien
gacaatgaatagacatgtgccttct

SEQ ID NO: 1673423 - DNA, 25 bp, Homo sapien
taacttactcatagaactgtatgcc

SEQ ID NO: 1673424 - DNA, 25 bp, Homo sapien
ttgttcaagaaacctgacattttgt

SEQ ID NO: 1673425 - DNA, 25 bp, Homo sapien
gtccaatcatagttaaggcttcatg

SEQ ID NO: 1673426 - DNA, 25 bp, Homo sapien
gacctgaagaactagaccttccctg

SEQ ID NO: 1673427 - DNA, 25 bp, Homo sapien
cttccctggtgtgttagtactgctt

SEQ ID NO: 1673428 - DNA, 25 bp, Homo sapien
tcacccatgatacataatgacctga

SEQ ID NO: 1673429 - DNA, 25 bp, Homo sapien
tactgcttgtaagtcatagtatcca

SEQ ID NO: 1673430 - DNA, 25 bp, Homo sapien
ggattcgtctcagagttccactgca

SEQ ID NO: 1673431 - DNA, 25 bp, Homo sapien
tacttcaatgacaccactagagcac

SEQ ID NO: 1673432 - DNA, 25 bp, Homo sapien
agtcctccaagtgcgacccagtgac

SEQ ID NO: 1673433 - DNA, 25 bp, Homo sapien
aaagtatcaagtcatcggaggcaca

SEQ ID NO: 1673434 - DNA, 25 bp, Homo sapien
tcaactctgcgaggcccatagagta

SEQ ID NO: 1673435 - DNA, 25 bp, Homo sapien
aacgtaagcgatatgccagtctcca

SEQ ID NO: 1673436 - DNA, 25 bp, Homo sapien
gtctccaccaccagaaagccgtaag

SEQ ID NO: 1673437 - DNA, 25 bp, Homo sapien
tcttctggtgttacgatgctgactt

SEQ ID NO: 1673438 - DNA, 25 bp, Homo sapien
tatatagggcagcacaatccaaaga

SEQ ID NO: 1673439 - DNA, 25 bp, Homo sapien
tacagaatggtggtttgaaccatgc

SEQ ID NO: 1673440 - DNA, 25 bp, Homo sapien
ggtgtgcagtaaacatctgactgct

SEQ ID NO: 1673441 - DNA, 25 bp, Homo sapien
gactgattattacaaagccattcca

SEQ ID NO: 1673442 - DNA, 25 bp, Homo sapien
atcctttccctagcatcagtcaagg

SEQ ID NO: 1673443 - DNA, 25 bp, Homo sapien
gccaagctccaacactcagaagaca

SEQ ID NO: 1673444 - DNA, 25 bp, Homo sapien
aactcaaaatcagagccaaactggc

SEQ ID NO: 1673445 - DNA, 25 bp, Homo sapien
aactgagccaaggaaagaatctgac

SEQ ID NO: 1673446 - DNA, 25 bp, Homo sapien
taacaattgttgtacagtcggctgg

SEQ ID NO: 1673447 - DNA, 25 bp, Homo sapien
aagcagcatttgataagaggtccac

SEQ ID NO: 1673448 - DNA, 25 bp, Homo sapien
cattaaaattgtactggcacccagc

SEQ ID NO: 1673449 - DNA, 25 bp, Homo sapien
gataatgacctaaacgaagtgacct

SEQ ID NO: 1673450 - DNA, 25 bp, Homo sapien
aagtctggattaagtgaccttgcag

SEQ ID NO: 1673451 - DNA, 25 bp, Homo sapien
tgagaatctgattaatgcactgaat

SEQ ID NO: 1673452 - DNA, 25 bp, Homo sapien
taactaatgacaatgagacaaatag

SEQ ID NO: 1673453 - DNA, 25 bp, Homo sapien
gaccttgcagaaagtctaactaatg

SEQ ID NO: 1673454 - DNA, 25 bp, Homo sapien
taagtgaaaccttgactgggctgtc

SEQ ID NO: 1673455 - DNA, 25 bp, Homo sapien
gactataataggctttgtgccacca

SEQ ID NO: 1673456 - DNA, 25 bp, Homo sapien
tgcggtaatgcctcacatgcagtga

SEQ ID NO: 1673457 - DNA, 25 bp, Homo sapien
tagctgatggatttacaactgagtg

SEQ ID NO: 1673458 - DNA, 25 bp, Homo sapien
tgtaaacagcccaaaagacactggc

SEQ ID NO: 1673459 - DNA, 25 bp, Homo sapien
gtaggctacaagatgatgagtcacc

SEQ ID NO: 1673460 - DNA, 25 bp, Homo sapien
cattagaggtagtgtggctccaagc

SEQ ID NO: 1673461 - DNA, 25 bp, Homo sapien
ggagatgtatttctggcatcccaga

SEQ ID NO: 1673462 - DNA, 25 bp, Homo sapien
agatgtctccgacgccgccgctctt

SEQ ID NO: 1673463 - DNA, 25 bp, Homo sapien
cacgcgcagccgagaagatgtctcc

SEQ ID NO: 1673464 - DNA, 25 bp, Homo sapien
gccgctcttcagtttgcccgaagcg

SEQ ID NO: 1673465 - DNA, 25 bp, Homo sapien
ttcagtttgcccgaagcgcggacgc

SEQ ID NO: 1673466 - DNA, 25 bp, Homo sapien
tagacccaaacgaacacaatccgga

SEQ ID NO: 1673467 - DNA, 25 bp, Homo sapien
tgtggtggccatgataatgctctac

SEQ ID NO: 1673468 - DNA, 25 bp, Homo sapien
ggcaaaggtactagtacaggcccat

SEQ ID NO: 1673469 - DNA, 25 bp, Homo sapien
tcattatgtggtccaactgagccca

SEQ ID NO: 1673470 - DNA, 25 bp, Homo sapien
tcagttacacgtgcatgacagcaac

SEQ ID NO: 1673471 - DNA, 25 bp, Homo sapien
tgcctcagggcgtctctaatatcgt

SEQ ID NO: 1673472 - DNA, 25 bp, Homo sapien
tgtgtgaacatcagcctagatcgac

SEQ ID NO: 1673473 - DNA, 25 bp, Homo sapien
tgtaaccactgctatggcaacgagc

SEQ ID NO: 1673474 - DNA, 25 bp, Homo sapien
atctcagcattttgagagtccaagt

SEQ ID NO: 1673475 - DNA, 25 bp, Homo sapien
tcagcattttgagagtccaagttgg

SEQ ID NO: 1673476 - DNA, 25 bp, Homo sapien
actagcctgggctacgtggtgaggc

SEQ ID NO: 1673477 - DNA, 25 bp, Homo sapien
cctgggctacgtggtgaggccccat

SEQ ID NO: 1673478 - DNA, 25 bp, Homo sapien
cagagggagtcacagatagggaaca

SEQ ID NO: 1673479 - DNA, 25 bp, Homo sapien
tgtcatataatgaggtgatcaaaga

SEQ ID NO: 1673480 - DNA, 25 bp, Homo sapien
aagaactagagttctcagagcaaga

SEQ ID NO: 1673481 - DNA, 25 bp, Homo sapien
agctctggctgtaacaactgtcatg

SEQ ID NO: 1673482 - DNA, 25 bp, Homo sapien
tggagtggagagttttagtaaaata

SEQ ID NO: 1673483 - DNA, 25 bp, Homo sapien
acacaccagctttctattcacctac

SEQ ID NO: 1673484 - DNA, 25 bp, Homo sapien
caccagctttctattcacctacaca

SEQ ID NO: 1673485 - DNA, 25 bp, Homo sapien
tagtaaaatatgatggggtcttcag

SEQ ID NO: 1673486 - DNA, 25 bp, Homo sapien
gagccaacattaactgtcaggaacg

SEQ ID NO: 1673487 - DNA, 25 bp, Homo sapien
agaaagatgggaaccggctacgtgt

SEQ ID NO: 1673488 - DNA, 25 bp, Homo sapien
tcaggaacgtatggcgtcacatcag

SEQ ID NO: 1673489 - DNA, 25 bp, Homo sapien
cattcttgacgtgtgcctgaccaga

SEQ ID NO: 1673490 - DNA, 25 bp, Homo sapien
taactaatgttactgggaagcccca

SEQ ID NO: 1673491 - DNA, 25 bp, Homo sapien
aaaacgtgtgagcaccagctaggag

SEQ ID NO: 1673492 - DNA, 25 bp, Homo sapien
gaggaagtatttatcccacagtgcc

SEQ ID NO: 1673493 - DNA, 25 bp, Homo sapien
tggagttaaaccttccagcctggta

SEQ ID NO: 1673494 - DNA, 25 bp, Homo sapien
acaatgacgcttgacctctgcacaa

SEQ ID NO: 1673495 - DNA, 25 bp, Homo sapien
ttttcccatcaatgacacaatgacg

SEQ ID NO: 1673496 - DNA, 25 bp, Homo sapien
tctgaggctctcttagtggaatgta

SEQ ID NO: 1673497 - DNA, 25 bp, Homo sapien
tgtgtcatctactataatctctgct

SEQ ID NO: 1673498 - DNA, 25 bp, Homo sapien
gggaaagatgagtgtgctggagtca

SEQ ID NO: 1673499 - DNA, 25 bp, Homo sapien
gagggaaagatgagtgtgctggagt

SEQ ID NO: 1673500 - DNA, 25 bp, Homo sapien
gaaagatgagtgtgctggagtcagg

SEQ ID NO: 1673501 - DNA, 25 bp, Homo sapien
aaagatgagtgtgctggagtcagga

SEQ ID NO: 1673502 - DNA, 25 bp, Homo sapien
tgaaggagccattgaagactggctt

SEQ ID NO: 1673503 - DNA, 25 bp, Homo sapien
atgaaggagccattgaagactggct

SEQ ID NO: 1673504 - DNA, 25 bp, Homo sapien
gatgaaggagccattgaagactggc

SEQ ID NO: 1673505 - DNA, 25 bp, Homo sapien
gaggctgcggctccctgtggcatca

SEQ ID NO: 1673506 - DNA, 25 bp, Homo sapien
caggggtctgaaggcatgttttgca

SEQ ID NO: 1673507 - DNA, 25 bp, Homo sapien
tcctttcatcataaccttcattcca

SEQ ID NO: 1673508 - DNA, 25 bp, Homo sapien
tacctccagcgggtttgaggctgcg

SEQ ID NO: 1673509 - DNA, 25 bp, Homo sapien
gacagtgttgttaagtcctcaccca

SEQ ID NO: 1673510 - DNA, 25 bp, Homo sapien
tcacccaaagccgcttcttctttaa

SEQ ID NO: 1673511 - DNA, 25 bp, Homo sapien
tttacaactgtaattaggagctgtt

SEQ ID NO: 1673512 - DNA, 25 bp, Homo sapien
cttcagcaaagtgcggattggacag

SEQ ID NO: 1673513 - DNA, 25 bp, Homo sapien
gatggatcttccacgggctcaaagt

SEQ ID NO: 1673514 - DNA, 25 bp, Homo sapien
aagattgacttctatgcagtagtcc

SEQ ID NO: 1673515 - DNA, 25 bp, Homo sapien
tttgtgcccagttgcggcgtgtctg

SEQ ID NO: 1673516 - DNA, 25 bp, Homo sapien
aacatttctcttccgtgatttgtgc

SEQ ID NO: 1673517 - DNA, 25 bp, Homo sapien
ttgatcgattctgccctggatatcc

SEQ ID NO: 1673518 - DNA, 25 bp, Homo sapien
ataccgcagtttgtttcccctcact

SEQ ID NO: 1673519 - DNA, 25 bp, Homo sapien
gcagatgttagtttcataccgcagt

SEQ ID NO: 1673520 - DNA, 25 bp, Homo sapien
tactgctgtgccgatgactgctgtg

SEQ ID NO: 1673521 - DNA, 25 bp, Homo sapien
attaggatcgaaagcctcgtgggag

SEQ ID NO: 1673522 - DNA, 25 bp, Homo sapien
cgaaagcctcgtgggagaagttgca

SEQ ID NO: 1673523 - DNA, 25 bp, Homo sapien
gatcgaaagcctcgtgggagaagtt

SEQ ID NO: 1673524 - DNA, 25 bp, Homo sapien
aaagcctcgtgggagaagttgcaag

SEQ ID NO: 1673525 - DNA, 25 bp, Homo sapien
tctacccggttcagataagccctta

SEQ ID NO: 1673526 - DNA, 25 bp, Homo sapien
tgtaccacgaagcataccagacaga

SEQ ID NO: 1673527 - DNA, 25 bp, Homo sapien
caatatttgattctacccggttcag

SEQ ID NO: 1673528 - DNA, 25 bp, Homo sapien
ggccctggggttctatcacaatatt

SEQ ID NO: 1673529 - DNA, 25 bp, Homo sapien
gaaatggtttcagccgcttgctgag

SEQ ID NO: 1673530 - DNA, 25 bp, Homo sapien
actgggttttacaggagtcacagca

SEQ ID NO: 1673531 - DNA, 25 bp, Homo sapien
acgtgccgggagcatcatgctgctg

SEQ ID NO: 1673532 - DNA, 25 bp, Homo sapien
gagcactgggttttacaggagtcac

SEQ ID NO: 1673533 - DNA, 25 bp, Homo sapien
tatggctggcagtttgggtgtgaag

SEQ ID NO: 1673534 - DNA, 25 bp, Homo sapien
caggattatggctggcagtttgggt

SEQ ID NO: 1673535 - DNA, 25 bp, Homo sapien
gattatggctggcagtttgggtgtg

SEQ ID NO: 1673536 - DNA, 25 bp, Homo sapien
attcaggattatggctggcagtttg

SEQ ID NO: 1673537 - DNA, 25 bp, Homo sapien
atttccaccggcgtggctcaatcct

SEQ ID NO: 1673538 - DNA, 25 bp, Homo sapien
ggcatggttgccagaaaccaccctg

SEQ ID NO: 1673539 - DNA, 25 bp, Homo sapien
ggagggcatggttgccagaaaccac

SEQ ID NO: 1673540 - DNA, 25 bp, Homo sapien
ctgtgcatttccaccggcgtggctc

SEQ ID NO: 1673541 - DNA, 25 bp, Homo sapien
ggcaacttcggctttctcgaccgaa

SEQ ID NO: 1673542 - DNA, 25 bp, Homo sapien
ccatcatgcatgaagatttgcaagc

SEQ ID NO: 1673543 - DNA, 25 bp, Homo sapien
ttcctgactgggcaacttcggcttt

SEQ ID NO: 1673544 - DNA, 25 bp, Homo sapien
tttctcgaccgaaccatcatgcatg

SEQ ID NO: 1673545 - DNA, 25 bp, Homo sapien
ctaccagatggctttcgtcctgcgc

SEQ ID NO: 1673546 - DNA, 25 bp, Homo sapien
ttctcctttgtggtttttgtgctgg

SEQ ID NO: 1673547 - DNA, 25 bp, Homo sapien
tttgctttcctccggaaatacagct

SEQ ID NO: 1673548 - DNA, 25 bp, Homo sapien
cttaatctggtcttgcaagcaaagc

SEQ ID NO: 1673549 - DNA, 25 bp, Homo sapien
ttgggtatgccacaagaatgaactt

SEQ ID NO: 1673550 - DNA, 25 bp, Homo sapien
gacttgcccacacagtacaggcagt

SEQ ID NO: 1673551 - DNA, 25 bp, Homo sapien
gaattgcgttgtaaaatggacagca

SEQ ID NO: 1673552 - DNA, 25 bp, Homo sapien
cctggactccagattagacagactt

SEQ ID NO: 1673553 - DNA, 25 bp, Homo sapien
gtgaataatgtaactgggctgcttt

SEQ ID NO: 1673554 - DNA, 25 bp, Homo sapien
cacacctgatgtagacactccacag

SEQ ID NO: 1673555 - DNA, 25 bp, Homo sapien
tccaattgtatcaacaagctcatct

SEQ ID NO: 1673556 - DNA, 25 bp, Homo sapien
gctgaatgctatcaattataaatcc

SEQ ID NO: 1673557 - DNA, 25 bp, Homo sapien
ggttacttcctgacagacatgggtt

SEQ ID NO: 1673558 - DNA, 25 bp, Homo sapien
gcctggttacttcctgacagacatg

SEQ ID NO: 1673559 - DNA, 25 bp, Homo sapien
gctatgggaacgatgtctgtcccac

SEQ ID NO: 1673560 - DNA, 25 bp, Homo sapien
catgggtttgctgctatgggaacga

SEQ ID NO: 1673561 - DNA, 25 bp, Homo sapien
gctacagtagcacaagttgaaaaat

SEQ ID NO: 1673562 - DNA, 25 bp, Homo sapien
caagctacagtagcacaagttgaaa

SEQ ID NO: 1673563 - DNA, 25 bp, Homo sapien
cagtagcacaagttgaaaaattaca

SEQ ID NO: 1673564 - DNA, 25 bp, Homo sapien
aggtaccaagctacagtagcacaag

SEQ ID NO: 1673565 - DNA, 25 bp, Homo sapien
gaagagtagtgaattgtaggtaatg

SEQ ID NO: 1673566 - DNA, 25 bp, Homo sapien
gcgagttatccagaagagtagtgaa

SEQ ID NO: 1673567 - DNA, 25 bp, Homo sapien
tagtgaattgtaggtaatgatagcc

SEQ ID NO: 1673568 - DNA, 25 bp, Homo sapien
caaggttcaggcgagttatccagaa

SEQ ID NO: 1673569 - DNA, 25 bp, Homo sapien
cgcacagggcctgtaaattgcacag

SEQ ID NO: 1673570 - DNA, 25 bp, Homo sapien
taatcaaacctagcagcaccaagag

SEQ ID NO: 1673571 - DNA, 25 bp, Homo sapien
ctctccaccacattgtgtgctctgg

SEQ ID NO: 1673572 - DNA, 25 bp, Homo sapien
tctgggtcgcacagggcctgtaaat

SEQ ID NO: 1673573 - DNA, 25 bp, Homo sapien
ctgctgaataagaagcagtgtggac

SEQ ID NO: 1673574 - DNA, 25 bp, Homo sapien
tttactgaaggtattaagactgcag

SEQ ID NO: 1673575 - DNA, 25 bp, Homo sapien
ccagtttctcatagtttcgatgctt

SEQ ID NO: 1673576 - DNA, 25 bp, Homo sapien
aagaagcagtgtggactaatgggaa

SEQ ID NO: 1673577 - DNA, 25 bp, Homo sapien
gggtttgcacaatacggctgaaatg

SEQ ID NO: 1673578 - DNA, 25 bp, Homo sapien
ctgggtttgcacaatacggctgaaa

SEQ ID NO: 1673579 - DNA, 25 bp, Homo sapien
tgggtttgcacaatacggctgaaat

SEQ ID NO: 1673580 - DNA, 25 bp, Homo sapien
cacagattcaagtatgagttgcagg

SEQ ID NO: 1673581 - DNA, 25 bp, Homo sapien
cttccattgcataaccgacagccat

SEQ ID NO: 1673582 - DNA, 25 bp, Homo sapien
caagtgttactgagatctctgcgca

SEQ ID NO: 1673583 - DNA, 25 bp, Homo sapien
gccatgtgctcaggcatttctgtga

SEQ ID NO: 1673584 - DNA, 25 bp, Homo sapien
taaaagaccagccaggacgaatggc

SEQ ID NO: 1673585 - DNA, 25 bp, Homo sapien
ctggagattttacagaggaattatt

SEQ ID NO: 1673586 - DNA, 25 bp, Homo sapien
gagattttacagaggaattatttaa

SEQ ID NO: 1673587 - DNA, 25 bp, Homo sapien
ccagccaggacgaatggcaacagat

SEQ ID NO: 1673588 - DNA, 25 bp, Homo sapien
tcaacgcttctagtccgaggcagtc

SEQ ID NO: 1673589 - DNA, 25 bp, Homo sapien
tacgggttgaatccctgtcaggaag

SEQ ID NO: 1673590 - DNA, 25 bp, Homo sapien
tcgctgagcactaaggacaagtcct

SEQ ID NO: 1673591 - DNA, 25 bp, Homo sapien
ccttggtgacaattagaaggatctt

SEQ ID NO: 1673592 - DNA, 25 bp, Homo sapien
ggcttcttgggccttagagcagccc

SEQ ID NO: 1673593 - DNA, 25 bp, Homo sapien
gcttcttgggccttagagcagccca

SEQ ID NO: 1673594 - DNA, 25 bp, Homo sapien
tcttgggccttagagcagcccacac

SEQ ID NO: 1673595 - DNA, 25 bp, Homo sapien
ttcttgggccttagagcagcccaca

SEQ ID NO: 1673596 - DNA, 25 bp, Homo sapien
tgacagtgtgaaaggcctttgtact

SEQ ID NO: 1673597 - DNA, 25 bp, Homo sapien
tacagggctggacagacatgacagt

SEQ ID NO: 1673598 - DNA, 25 bp, Homo sapien
tgtactctcagccatgtggcttgct

SEQ ID NO: 1673599 - DNA, 25 bp, Homo sapien
ggaccatctgaaggcctactgagac

SEQ ID NO: 1673600 - DNA, 25 bp, Homo sapien
aatttggcgatgcttttgctaaccg

SEQ ID NO: 1673601 - DNA, 25 bp, Homo sapien
cattgctggcgtagctgaatttggc

SEQ ID NO: 1673602 - DNA, 25 bp, Homo sapien
aaatgaggatttctctccctacggc

SEQ ID NO: 1673603 - DNA, 25 bp, Homo sapien
tcaacgtggacttgatgacctcaga

SEQ ID NO: 1673604 - DNA, 25 bp, Homo sapien
aggcctgagaaatcacccaggtcag

SEQ ID NO: 1673605 - DNA, 25 bp, Homo sapien
ggcctgagaaatcacccaggtcagc

SEQ ID NO: 1673606 - DNA, 25 bp, Homo sapien
gcctgagaaatcacccaggtcagct

SEQ ID NO: 1673607 - DNA, 25 bp, Homo sapien
gagctaggcctgagaaatcacccag

SEQ ID NO: 1673608 - DNA, 25 bp, Homo sapien
cctgcctcagatgaagccccaggca

SEQ ID NO: 1673609 - DNA, 25 bp, Homo sapien
ctgcctcagatgaagccccaggcat

SEQ ID NO: 1673610 - DNA, 25 bp, Homo sapien
gtcctgcctcagatgaagccccagg

SEQ ID NO: 1673611 - DNA, 25 bp, Homo sapien
cagtcctgcctcagatgaagcccca

SEQ ID NO: 1673612 - DNA, 25 bp, Homo sapien
tatccttcttcaaattggaaggtca

SEQ ID NO: 1673613 - DNA, 25 bp, Homo sapien
gagtgtgctcggtgccagaatcttt

SEQ ID NO: 1673614 - DNA, 25 bp, Homo sapien
tattaataatgtgcaagagagtgtg

SEQ ID NO: 1673615 - DNA, 25 bp, Homo sapien
tggaaggtcaagtcagttacatttt

SEQ ID NO: 1673616 - DNA, 25 bp, Homo sapien
cactgggccaggcttcgctgtttac

SEQ ID NO: 1673617 - DNA, 25 bp, Homo sapien
ggtgctacgcatcagcatgggtttt

SEQ ID NO: 1673618 - DNA, 25 bp, Homo sapien
tgggccaggcttcgctgtttaccca

SEQ ID NO: 1673619 - DNA, 25 bp, Homo sapien
gggctaagtctgagcttggtgctac

SEQ ID NO: 1673620 - DNA, 25 bp, Homo sapien
atagaagcagcagtatgtgtagaga

SEQ ID NO: 1673621 - DNA, 25 bp, Homo sapien
agcagcagtatgtgtagagagcaat

SEQ ID NO: 1673622 - DNA, 25 bp, Homo sapien
agaagcagcagtatgtgtagagagc

SEQ ID NO: 1673623 - DNA, 25 bp, Homo sapien
gaagcagcagtatgtgtagagagca

SEQ ID NO: 1673624 - DNA, 25 bp, Homo sapien
tgatcaaggataactgttcaggtgg

SEQ ID NO: 1673625 - DNA, 25 bp, Homo sapien
gaccactctaggtaaactgttaaga

SEQ ID NO: 1673626 - DNA, 25 bp, Homo sapien
taaacactataaatgatcaaggata

SEQ ID NO: 1673627 - DNA, 25 bp, Homo sapien
taactgttcaggtggtactgaccac

SEQ ID NO: 1673628 - DNA, 25 bp, Homo sapien
cctgatatgattatattcttgatat

SEQ ID NO: 1673629 - DNA, 25 bp, Homo sapien
tctgaaagtgattgaccgctaccaa

SEQ ID NO: 1673630 - DNA, 25 bp, Homo sapien
gtgattgaccgctaccaaagatgaa

SEQ ID NO: 1673631 - DNA, 25 bp, Homo sapien
agtttttctcctgatatgattatat

SEQ ID NO: 1673632 - DNA, 25 bp, Homo sapien
ccaaagctcataggcacttgtgtgg

SEQ ID NO: 1673633 - DNA, 25 bp, Homo sapien
aaagctcataggcacttgtgtggca

SEQ ID NO: 1673634 - DNA, 25 bp, Homo sapien
cataggcacttgtgtggcaggaaga

SEQ ID NO: 1673635 - DNA, 25 bp, Homo sapien
tgtggccaaagctcataggcacttg

SEQ ID NO: 1673636 - DNA, 25 bp, Homo sapien
cagactcaaaatagcgagcagccaa

SEQ ID NO: 1673637 - DNA, 25 bp, Homo sapien
agctctgatgttgccaaacagcctg

SEQ ID NO: 1673638 - DNA, 25 bp, Homo sapien
ctgcttgcggtccacagctcagtca

SEQ ID NO: 1673639 - DNA, 25 bp, Homo sapien
cctgtgctcctcgtgaacaatctct

SEQ ID NO: 1673640 - DNA, 25 bp, Homo sapien
atcctaacaaaatgccgtgaaaatg

SEQ ID NO: 1673641 - DNA, 25 bp, Homo sapien
tgtgaacaaaccaccatcctaacaa

SEQ ID NO: 1673642 - DNA, 25 bp, Homo sapien
tgccaagagaaaaccctcgggaatg

SEQ ID NO: 1673643 - DNA, 25 bp, Homo sapien
caagagaaaaccctcgggaatgtga

SEQ ID NO: 1673644 - DNA, 25 bp, Homo sapien
taactgaatctccttcggcgctgca

SEQ ID NO: 1673645 - DNA, 25 bp, Homo sapien
tcagcaggccgaggactgttggctt

SEQ ID NO: 1673646 - DNA, 25 bp, Homo sapien
tcactgtaactgaatctccttcggc

SEQ ID NO: 1673647 - DNA, 25 bp, Homo sapien
tgcagtgcctgggtactctgtgcag

SEQ ID NO: 1673648 - DNA, 25 bp, Homo sapien
gctgttactaaactgctgccatgtg

SEQ ID NO: 1673649 - DNA, 25 bp, Homo sapien
ccatgtgaagccactctgctgatta

SEQ ID NO: 1673650 - DNA, 25 bp, Homo sapien
actctgctgattaatagcagctatg

SEQ ID NO: 1673651 - DNA, 25 bp, Homo sapien
tgctgcgcacgccatcggccacagc

SEQ ID NO: 1673652 - DNA, 25 bp, Homo sapien
ctgttttgatataaactcgtaaaag

SEQ ID NO: 1673653 - DNA, 25 bp, Homo sapien
tgagaatctgttttgatataaactc

SEQ ID NO: 1673654 - DNA, 25 bp, Homo sapien
gaatctgttttgatataaactcgta

SEQ ID NO: 1673655 - DNA, 25 bp, Homo sapien
ttggggatgaggtatgagaatctgt

SEQ ID NO: 1673656 - DNA, 25 bp, Homo sapien
tacgtgccagatgtactgtgagccc

SEQ ID NO: 1673657 - DNA, 25 bp, Homo sapien
ggtgttctaggttcagtactggcaa

SEQ ID NO: 1673658 - DNA, 25 bp, Homo sapien
tactggcaaagcttcaatggtttcc

SEQ ID NO: 1673659 - DNA, 25 bp, Homo sapien
tccacaggcacaatagagggcacta

SEQ ID NO: 1673660 - DNA, 25 bp, Homo sapien
tgccctgtaatctctaatatttgaa

SEQ ID NO: 1673661 - DNA, 25 bp, Homo sapien
ccaaggcctgaagatgccctgtaat

SEQ ID NO: 1673662 - DNA, 25 bp, Homo sapien
gcaggaatttagacttgtcaggaaa

SEQ ID NO: 1673663 - DNA, 25 bp, Homo sapien
taacctttctaacatgtcgttctca

SEQ ID NO: 1673664 - DNA, 25 bp, Homo sapien
attccctgatgggaatgccaggaat

SEQ ID NO: 1673665 - DNA, 25 bp, Homo sapien
tgacccattccctgatgggaatgcc

SEQ ID NO: 1673666 - DNA, 25 bp, Homo sapien
aacgactgagtaagcacagtgagag

SEQ ID NO: 1673667 - DNA, 25 bp, Homo sapien
tcctgtggggaacgactgagtaagc

SEQ ID NO: 1673668 - DNA, 25 bp, Homo sapien
tctgaggtattaattttcctgcata

SEQ ID NO: 1673669 - DNA, 25 bp, Homo sapien
ttcctctcaattgctttatctggtt

SEQ ID NO: 1673670 - DNA, 25 bp, Homo sapien
cttatctctgtaagtgtattaatgg

SEQ ID NO: 1673671 - DNA, 25 bp, Homo sapien
ttttcctgcataatgtagatttcct

SEQ ID NO: 1673672 - DNA, 25 bp, Homo sapien
tctggctctgtggaagaagccacat

SEQ ID NO: 1673673 - DNA, 25 bp, Homo sapien
aagccacatttcttttgccccagtc

SEQ ID NO: 1673674 - DNA, 25 bp, Homo sapien
ttgtctctggctctgtggaagaagc

SEQ ID NO: 1673675 - DNA, 25 bp, Homo sapien
gaagccacatttcttttgccccagt

SEQ ID NO: 1673676 - DNA, 25 bp, Homo sapien
aaacggcccctacactcgtcttgct

SEQ ID NO: 1673677 - DNA, 25 bp, Homo sapien
ccctacactcgtcttgctaacaggt

SEQ ID NO: 1673678 - DNA, 25 bp, Homo sapien
tcttgctaacaggtttgcattgaga

SEQ ID NO: 1673679 - DNA, 25 bp, Homo sapien
gaaatattgtcagaagtgccatttt

SEQ ID NO: 1673680 - DNA, 25 bp, Homo sapien
cctctagagttacgtgtgtcgttaa

SEQ ID NO: 1673681 - DNA, 25 bp, Homo sapien
tattggttagtttcagtgcagcagc

SEQ ID NO: 1673682 - DNA, 25 bp, Homo sapien
catattcacattcttgacgaaggaa

SEQ ID NO: 1673683 - DNA, 25 bp, Homo sapien
gacgaaggaatctgactcctctaga

SEQ ID NO: 1673684 - DNA, 25 bp, Homo sapien
gcggtgagcagccgctcgggacgac

SEQ ID NO: 1673685 - DNA, 25 bp, Homo sapien
gccggcggtgcgtccccacggtcac

SEQ ID NO: 1673686 - DNA, 25 bp, Homo sapien
tgagcagccgctcgggacgacttcc

SEQ ID NO: 1673687 - DNA, 25 bp, Homo sapien
cgacttcctcggctgcgcggcgctc

SEQ ID NO: 1673688 - DNA, 25 bp, Homo sapien
cgcccaacacttgctaggtagtttg

SEQ ID NO: 1673689 - DNA, 25 bp, Homo sapien
tgctcgccgaaggtgaacgctggac

SEQ ID NO: 1673690 - DNA, 25 bp, Homo sapien
agcagcagcggcaccttaggtgctc

SEQ ID NO: 1673691 - DNA, 25 bp, Homo sapien
gggaagggctttgctcccgacttca

SEQ ID NO: 1673692 - DNA, 25 bp, Homo sapien
agcaataaagcgatgggtctgctta

SEQ ID NO: 1673693 - DNA, 25 bp, Homo sapien
ataaagcgatgggtctgcttagagg

SEQ ID NO: 1673694 - DNA, 25 bp, Homo sapien
ttaaagcaataaagcgatgggtctg

SEQ ID NO: 1673695 - DNA, 25 bp, Homo sapien
taaagcaataaagcgatgggtctgc

SEQ ID NO: 1673696 - DNA, 25 bp, Homo sapien
ttccgtcttcatatcctccagagtg

SEQ ID NO: 1673697 - DNA, 25 bp, Homo sapien
cttccgtcttcatatcctccagagt

SEQ ID NO: 1673698 - DNA, 25 bp, Homo sapien
cttcatatcctccagagtggggctc

SEQ ID NO: 1673699 - DNA, 25 bp, Homo sapien
gactgcagggcagactactgcagga

SEQ ID NO: 1673700 - DNA, 25 bp, Homo sapien
gtccggaggtctgaaagcgcagact

SEQ ID NO: 1673701 - DNA, 25 bp, Homo sapien
ccggaggtctgaaagcgcagactgc

SEQ ID NO: 1673702 - DNA, 25 bp, Homo sapien
aggatctaggcgctgacgaacagga

SEQ ID NO: 1673703 - DNA, 25 bp, Homo sapien
tacttttagaaagcttgagagacaa

SEQ ID NO: 1673704 - DNA, 25 bp, Homo sapien
attatagctgccaccatgtcgggct

SEQ ID NO: 1673705 - DNA, 25 bp, Homo sapien
tgcatgggcacgatttcgactcact

SEQ ID NO: 1673706 - DNA, 25 bp, Homo sapien
gcatgggcacgatttcgactcactg

SEQ ID NO: 1673707 - DNA, 25 bp, Homo sapien
gagtgcatgggcacgatttcgactc

SEQ ID NO: 1673708 - DNA, 25 bp, Homo sapien
tgagtgtgggcccataagccctttg

SEQ ID NO: 1673709 - DNA, 25 bp, Homo sapien
catttgaatctgagacgggttgtcc

SEQ ID NO: 1673710 - DNA, 25 bp, Homo sapien
tggccatatgatcacgtgtacaggg

SEQ ID NO: 1673711 - DNA, 25 bp, Homo sapien
gagcctgttaatactccagtgagga

SEQ ID NO: 1673712 - DNA, 25 bp, Homo sapien
tattaaaagtcataccatgtgttca

SEQ ID NO: 1673713 - DNA, 25 bp, Homo sapien
gatcacttgacattcaatgtgggga

SEQ ID NO: 1673714 - DNA, 25 bp, Homo sapien
tcaacttgacataaatgggaaacag

SEQ ID NO: 1673715 - DNA, 25 bp, Homo sapien
taaatttaggataatcaagattgag

SEQ ID NO: 1673716 - DNA, 25 bp, Homo sapien
tgtgctagcatccataagaccccag

SEQ ID NO: 1673717 - DNA, 25 bp, Homo sapien
catctgcgggatcttgcttaggcga

SEQ ID NO: 1673718 - DNA, 25 bp, Homo sapien
tttccacgagttgacgcctgagctg

SEQ ID NO: 1673719 - DNA, 25 bp, Homo sapien
cctgagctggcaagaacagcctgta

SEQ ID NO: 1673720 - DNA, 25 bp, Homo sapien
cgtccacgtcgaagaggtcaaatgc

SEQ ID NO: 1673721 - DNA, 25 bp, Homo sapien
tctgcgtcatcacggccaggaagtc

SEQ ID NO: 1673722 - DNA, 25 bp, Homo sapien
tgagctcgggcttaggtgccacctt

SEQ ID NO: 1673723 - DNA, 25 bp, Homo sapien
tcgttggccacacgcttcaggtttt

SEQ ID NO: 1673724 - DNA, 25 bp, Homo sapien
ctggtcttcttcatgatccgaagga

SEQ ID NO: 1673725 - DNA, 25 bp, Homo sapien
tggtcttcttcatgatccgaaggaa

SEQ ID NO: 1673726 - DNA, 25 bp, Homo sapien
ggtcttcttcatgatccgaaggaac

SEQ ID NO: 1673727 - DNA, 25 bp, Homo sapien
tggagggcgcactcaaacttcaggg

SEQ ID NO: 1673728 - DNA, 25 bp, Homo sapien
cgtaagtttgtaagtggccaccctg

SEQ ID NO: 1673729 - DNA, 25 bp, Homo sapien
gaacagcaagttcagcacagggcaa

SEQ ID NO: 1673730 - DNA, 25 bp, Homo sapien
taagattatctgtcctgagctccgt

SEQ ID NO: 1673731 - DNA, 25 bp, Homo sapien
tcagcaacctccagggtggaaacca

SEQ ID NO: 1673732 - DNA, 25 bp, Homo sapien
ccaaccccgcggcccgggcctgcag

SEQ ID NO: 1673733 - DNA, 25 bp, Homo sapien
cagcaacctccagggtggaaaccaa

SEQ ID NO: 1673734 - DNA, 25 bp, Homo sapien
caaccccgcggcccgggcctgcagg

SEQ ID NO: 1673735 - DNA, 25 bp, Homo sapien
ttcctaagatgcgcttgagtgctgc

SEQ ID NO: 1673736 - DNA, 25 bp, Homo sapien
cctaagatgcgcttgagtgctgccc

SEQ ID NO: 1673737 - DNA, 25 bp, Homo sapien
ctaagatgcgcttgagtgctgcccc

SEQ ID NO: 1673738 - DNA, 25 bp, Homo sapien
cattcctaagatgcgcttgagtgct

SEQ ID NO: 1673739 - DNA, 25 bp, Homo sapien
ggctgtcgaaagaaggaagactcac

SEQ ID NO: 1673740 - DNA, 25 bp, Homo sapien
gagactccaggctgtcgaaagaagg

SEQ ID NO: 1673741 - DNA, 25 bp, Homo sapien
ccatggaattcattgtctcattagc

SEQ ID NO: 1673742 - DNA, 25 bp, Homo sapien
gatactgcctagaggatgttagaga

SEQ ID NO: 1673743 - DNA, 25 bp, Homo sapien
agcctggcaaccgagagggacgcaa

SEQ ID NO: 1673744 - DNA, 25 bp, Homo sapien
gcctggcaaccgagagggacgcaac

SEQ ID NO: 1673745 - DNA, 25 bp, Homo sapien
cctggcaaccgagagggacgcaact

SEQ ID NO: 1673746 - DNA, 25 bp, Homo sapien
ccagacatttgggaatcatcccaga

SEQ ID NO: 1673747 - DNA, 25 bp, Homo sapien
ccagatgtattgcatctgggcccgt

SEQ ID NO: 1673748 - DNA, 25 bp, Homo sapien
tgtctccttcaatccagtggccaac

SEQ ID NO: 1673749 - DNA, 25 bp, Homo sapien
cagtttcaacagttcctaacccagc

SEQ ID NO: 1673750 - DNA, 25 bp, Homo sapien
tgtcctccgtcagatgtttctcttc

SEQ ID NO: 1673751 - DNA, 25 bp, Homo sapien
tgaaactctctttcgatgaagttac

SEQ ID NO: 1673752 - DNA, 25 bp, Homo sapien
gggctttgtcctgggtgctcttatt

SEQ ID NO: 1673753 - DNA, 25 bp, Homo sapien
tgcctgaaactctctttcgatgaag

SEQ ID NO: 1673754 - DNA, 25 bp, Homo sapien
gtcttatatagaaccagctccagga

SEQ ID NO: 1673755 - DNA, 25 bp, Homo sapien
taagagtgcatgtgtcctgtagaca

SEQ ID NO: 1673756 - DNA, 25 bp, Homo sapien
tcttagatgcatggccataaaggtc

SEQ ID NO: 1673757 - DNA, 25 bp, Homo sapien
tttggccaggagcagactaggaagc

SEQ ID NO: 1673758 - DNA, 25 bp, Homo sapien
atctccccagtgaagttgccaccag

SEQ ID NO: 1673759 - DNA, 25 bp, Homo sapien
ttgcaatatctccccagtgaagttg

SEQ ID NO: 1673760 - DNA, 25 bp, Homo sapien
gcaatatctccccagtgaagttgcc

SEQ ID NO: 1673761 - DNA, 25 bp, Homo sapien
aatatctccccagtgaagttgccac

SEQ ID NO: 1673762 - DNA, 25 bp, Homo sapien
caagtgggtgcgcagtgactgtctt

SEQ ID NO: 1673763 - DNA, 25 bp, Homo sapien
cttcaggttttcactgatagcagtt

SEQ ID NO: 1673764 - DNA, 25 bp, Homo sapien
gactgtctttcaaccacagcagaca

SEQ ID NO: 1673765 - DNA, 25 bp, Homo sapien
gatagcagttttgtccttccaagtg

SEQ ID NO: 1673766 - DNA, 25 bp, Homo sapien
tctccaaaagagaggcttaattgtt

SEQ ID NO: 1673767 - DNA, 25 bp, Homo sapien
ttaattgttctcttataggctcata

SEQ ID NO: 1673768 - DNA, 25 bp, Homo sapien
taattgttctcttataggctcatat

SEQ ID NO: 1673769 - DNA, 25 bp, Homo sapien
caaaagagaggcttaattgttctct

SEQ ID NO: 1673770 - DNA, 25 bp, Homo sapien
cttcatctgcatctatctcccccac

SEQ ID NO: 1673771 - DNA, 25 bp, Homo sapien
gcttaataccagtcaaagccttctt

SEQ ID NO: 1673772 - DNA, 25 bp, Homo sapien
ttaataccagtcaaagccttcttca

SEQ ID NO: 1673773 - DNA, 25 bp, Homo sapien
aataccagtcaaagccttcttcacc

SEQ ID NO: 1673774 - DNA, 25 bp, Homo sapien
ggccatgatcctcagaagtaaaaag

SEQ ID NO: 1673775 - DNA, 25 bp, Homo sapien
ccggctccagttgcttaacggactc

SEQ ID NO: 1673776 - DNA, 25 bp, Homo sapien
tgatcctcagaagtaaaaagatgta

SEQ ID NO: 1673777 - DNA, 25 bp, Homo sapien
tgcttaacggactcccagaggccat

SEQ ID NO: 1673778 - DNA, 25 bp, Homo sapien
aaagactcccggcatagcctttctt

SEQ ID NO: 1673779 - DNA, 25 bp, Homo sapien
ctcatgcagttattttccaggcaag

SEQ ID NO: 1673780 - DNA, 25 bp, Homo sapien
cattcaccccaggaatctgccaaag

SEQ ID NO: 1673781 - DNA, 25 bp, Homo sapien
cacagaggaccagctaggttggcag

SEQ ID NO: 1673782 - DNA, 25 bp, Homo sapien
tctgtgatccctctgctcagaagat

SEQ ID NO: 1673783 - DNA, 25 bp, Homo sapien
aaaatctagcttaattggagccgtt

SEQ ID NO: 1673784 - DNA, 25 bp, Homo sapien
gggcagagctcatcctattcaggtc

SEQ ID NO: 1673785 - DNA, 25 bp, Homo sapien
tagcttaattggagccgttagtggg

SEQ ID NO: 1673786 - DNA, 25 bp, Homo sapien
gctgaacacatcctccatttgggtc

SEQ ID NO: 1673787 - DNA, 25 bp, Homo sapien
caagatctgcttttgtcatcggctc

SEQ ID NO: 1673788 - DNA, 25 bp, Homo sapien
tgtctgaagacgttaaaactcctgt

SEQ ID NO: 1673789 - DNA, 25 bp, Homo sapien
ggtaaatcttctattgccttcagca

SEQ ID NO: 1673790 - DNA, 25 bp, Homo sapien
cacccagcctggatagatttagtct

SEQ ID NO: 1673791 - DNA, 25 bp, Homo sapien
tactgacagtcctgtgcacatggga

SEQ ID NO: 1673792 - DNA, 25 bp, Homo sapien
gacagtggaaacctatgttcgtagc

SEQ ID NO: 1673793 - DNA, 25 bp, Homo sapien
ccaatgcttgtgtaaggctgctaca

SEQ ID NO: 1673794 - DNA, 25 bp, Homo sapien
atcactgagatggaagtggcgcaga

SEQ ID NO: 1673795 - DNA, 25 bp, Homo sapien
catcactgagatggaagtggcgcag

SEQ ID NO: 1673796 - DNA, 25 bp, Homo sapien
gagatggaagtggcgcagaggggct

SEQ ID NO: 1673797 - DNA, 25 bp, Homo sapien
cactgagatggaagtggcgcagagg

SEQ ID NO: 1673798 - DNA, 25 bp, Homo sapien
ttgtctttactatttgcattcacag

SEQ ID NO: 1673799 - DNA, 25 bp, Homo sapien
gtctttactatttgcattcacaggg

SEQ ID NO: 1673800 - DNA, 25 bp, Homo sapien
tttactatttgcattcacaggggac

SEQ ID NO: 1673801 - DNA, 25 bp, Homo sapien
ttttgtctttactatttgcattcac

SEQ ID NO: 1673802 - DNA, 25 bp, Homo sapien
atttccagttcctcgaggccaccta

SEQ ID NO: 1673803 - DNA, 25 bp, Homo sapien
gtggctgctactattaattcttttc

SEQ ID NO: 1673804 - DNA, 25 bp, Homo sapien
tctgtcttcaaggtcgtcaaagtcg

SEQ ID NO: 1673805 - DNA, 25 bp, Homo sapien
ggataatccagcatactctctctat

SEQ ID NO: 1673806 - DNA, 25 bp, Homo sapien
cttcagataggtgagcctgacattt

SEQ ID NO: 1673807 - DNA, 25 bp, Homo sapien
tctttgaaatcaggcctccgtggtc

SEQ ID NO: 1673808 - DNA, 25 bp, Homo sapien
tgaaatttgaaacatcttgacaaat

SEQ ID NO: 1673809 - DNA, 25 bp, Homo sapien
tctgtcctgcccaggtaacatcttt

SEQ ID NO: 1673810 - DNA, 25 bp, Homo sapien
tttgttctttgcgttgatataaatt

SEQ ID NO: 1673811 - DNA, 25 bp, Homo sapien
ttgatataaattactccagtggtct

SEQ ID NO: 1673812 - DNA, 25 bp, Homo sapien
gatataaattactccagtggtcttc

SEQ ID NO: 1673813 - DNA, 25 bp, Homo sapien
tgttctttgcgttgatataaattac

SEQ ID NO: 1673814 - DNA, 25 bp, Homo sapien
ttagattgaggagagaaagccaagg

SEQ ID NO: 1673815 - DNA, 25 bp, Homo sapien
gccaagggaggggcaggagtttcca

SEQ ID NO: 1673816 - DNA, 25 bp, Homo sapien
tgttagattgaggagagaaagccaa

SEQ ID NO: 1673817 - DNA, 25 bp, Homo sapien
gggaggggcaggagtttccactgac

SEQ ID NO: 1673818 - DNA, 25 bp, Homo sapien
gctttccaaacgcttttctgcccaa

SEQ ID NO: 1673819 - DNA, 25 bp, Homo sapien
gcaacgctttccaaacgcttttctg

SEQ ID NO: 1673820 - DNA, 25 bp, Homo sapien
ccaaacgcttttctgcccaacaaga

SEQ ID NO: 1673821 - DNA, 25 bp, Homo sapien
ctggagcaacgctttccaaacgctt

SEQ ID NO: 1673822 - DNA, 25 bp, Homo sapien
tgcagagcaggtacatcaggacagt

SEQ ID NO: 1673823 - DNA, 25 bp, Homo sapien
tgtgcagagcaggtacatcaggaca

SEQ ID NO: 1673824 - DNA, 25 bp, Homo sapien
ctgtgtgcagagcaggtacatcagg

SEQ ID NO: 1673825 - DNA, 25 bp, Homo sapien
tgtgtgcagagcaggtacatcagga

SEQ ID NO: 1673826 - DNA, 25 bp, Homo sapien
ggtgtcctccaagtgcttccgggtc

SEQ ID NO: 1673827 - DNA, 25 bp, Homo sapien
tccgggtcatctggagaatctggcc

SEQ ID NO: 1673828 - DNA, 25 bp, Homo sapien
ttctccaccagataggcggtgtcct

SEQ ID NO: 1673829 - DNA, 25 bp, Homo sapien
tactgctgattggatacattgacca

SEQ ID NO: 1673830 - DNA, 25 bp, Homo sapien
tgccactacgtagccaatgaagtta

SEQ ID NO: 1673831 - DNA, 25 bp, Homo sapien
aatgttccttaaaatgctgtagagc

SEQ ID NO: 1673832 - DNA, 25 bp, Homo sapien
cttgagtgtgaaattagaggaaggc

SEQ ID NO: 1673833 - DNA, 25 bp, Homo sapien
aatgaagttagaactctcagcactt

SEQ ID NO: 1673834 - DNA, 25 bp, Homo sapien
gctctactctttcttgccgtatttt

SEQ ID NO: 1673835 - DNA, 25 bp, Homo sapien
ttggaacagtctcctctccaaccta

SEQ ID NO: 1673836 - DNA, 25 bp, Homo sapien
ctctttcttgccgtatttgcccatg

SEQ ID NO: 1673837 - DNA, 25 bp, Homo sapien
cgtatttttagcaggacttcccagc

SEQ ID NO: 1673838 - DNA, 25 bp, Homo sapien
tgactcatgagtcggtatccatcca

SEQ ID NO: 1673839 - DNA, 25 bp, Homo sapien
catgagtcggtatccatccatttct

SEQ ID NO: 1673840 - DNA, 25 bp, Homo sapien
cctctgactcatgagtcggtatcca

SEQ ID NO: 1673841 - DNA, 25 bp, Homo sapien
tggctctgggcatagacgtccagct

SEQ ID NO: 1673842 - DNA, 25 bp, Homo sapien
gaactactaatgtaccatgaaatgt

SEQ ID NO: 1673843 - DNA, 25 bp, Homo sapien
ttctacttactggatataggatgca

SEQ ID NO: 1673844 - DNA, 25 bp, Homo sapien
tatttcaggatttccaggtcccaga

SEQ ID NO: 1673845 - DNA, 25 bp, Homo sapien
taagagtacttcatagtatatagct

SEQ ID NO: 1673846 - DNA, 25 bp, Homo sapien
aagtacagtcgtggttgctacgggc

SEQ ID NO: 1673847 - DNA, 25 bp, Homo sapien
tacgtatgtcaaaagacagcgctgt

SEQ ID NO: 1673848 - DNA, 25 bp, Homo sapien
caaattatgaggttgagcgtcagcc

SEQ ID NO: 1673849 - DNA, 25 bp, Homo sapien
aaagtaactatgtagcacacccacg

SEQ ID NO: 1673850 - DNA, 25 bp, Homo sapien
caattataacagtatgccggcatcc

SEQ ID NO: 1673851 - DNA, 25 bp, Homo sapien
taaaaccgcagttgatctcgggtaa

SEQ ID NO: 1673852 - DNA, 25 bp, Homo sapien
gaatgtagtcatcgtggagccactg

SEQ ID NO: 1673853 - DNA, 25 bp, Homo sapien
caaagggagcattcacctccggaga

SEQ ID NO: 1673854 - DNA, 25 bp, Homo sapien
ctcaacggttgattgagtacagagg

SEQ ID NO: 1673855 - DNA, 25 bp, Homo sapien
tagctggaccggtttgttctgcaca

SEQ ID NO: 1673856 - DNA, 25 bp, Homo sapien
aacggttgattgagtacagaggtgc

SEQ ID NO: 1673857 - DNA, 25 bp, Homo sapien
ttcttagctggaccggtttgttctg

SEQ ID NO: 1673858 - DNA, 25 bp, Homo sapien
cctcttcctgctcggcggggtcgcg

SEQ ID NO: 1673859 - DNA, 25 bp, Homo sapien
cgcctcttcctgctcggcggggtcg

SEQ ID NO: 1673860 - DNA, 25 bp, Homo sapien
ctgctcggcggggtcgcggcggccc

SEQ ID NO: 1673861 - DNA, 25 bp, Homo sapien
ttcctgctcggcggggtcgcggcgg

SEQ ID NO: 1673862 - DNA, 25 bp, Homo sapien
gcgcggcgggacggaggcaggccaa

SEQ ID NO: 1673863 - DNA, 25 bp, Homo sapien
ggcgcggcgggacggaggcaggcca

SEQ ID NO: 1673864 - DNA, 25 bp, Homo sapien
gtggcgcggcgggacggaggcaggc

SEQ ID NO: 1673865 - DNA, 25 bp, Homo sapien
tggcgcggcgggacggaggcaggcc

SEQ ID NO: 1673866 - DNA, 25 bp, Homo sapien
aagtggcgcggcgggacggaggcag

SEQ ID NO: 1673867 - DNA, 25 bp, Homo sapien
gcggcagctccgagccggccacagg

SEQ ID NO: 1673868 - DNA, 25 bp, Homo sapien
cggcagctccgagccggccacaggc

SEQ ID NO: 1673869 - DNA, 25 bp, Homo sapien
ctctcaggctgtagcgcgcctgcat

SEQ ID NO: 1673870 - DNA, 25 bp, Homo sapien
ctgcatgccgaataccgacagggtg

SEQ ID NO: 1673871 - DNA, 25 bp, Homo sapien
cggaggatgtgttggatctgcccca

SEQ ID NO: 1673872 - DNA, 25 bp, Homo sapien
ttcctgacgccgcagcggaggatgt

SEQ ID NO: 1673873 - DNA, 25 bp, Homo sapien
gaggaggacgatgcgtcccctccct

SEQ ID NO: 1673874 - DNA, 25 bp, Homo sapien
ctccctcgcaggattgaggttagga

SEQ ID NO: 1673875 - DNA, 25 bp, Homo sapien
aggcgaggaggacgatgcgtcccct

SEQ ID NO: 1673876 - DNA, 25 bp, Homo sapien
tcccctccctcgcaggattgaggtt

SEQ ID NO: 1673877 - DNA, 25 bp, Homo sapien
gctgtgtgtgttgcccgcgccagtc

SEQ ID NO: 1673878 - DNA, 25 bp, Homo sapien
gcgccagtcacgtccctaatgggac

SEQ ID NO: 1673879 - DNA, 25 bp, Homo sapien
gcccgcgccagtcacgtccctaatg

SEQ ID NO: 1673880 - DNA, 25 bp, Homo sapien
ccgcgccagtcacgtccctaatggg

SEQ ID NO: 1673881 - DNA, 25 bp, Homo sapien
gccaacggctgcctaacgtcctgtg

SEQ ID NO: 1673882 - DNA, 25 bp, Homo sapien
cagtttttgaaaacgctgcgaagcg

SEQ ID NO: 1673883 - DNA, 25 bp, Homo sapien
gacccgcgagacattttttgcctgg

SEQ ID NO: 1673884 - DNA, 25 bp, Homo sapien
taagaacttatactcgaactcccga

SEQ ID NO: 1673885 - DNA, 25 bp, Homo sapien
agctggcgcaggatccaggacggca

SEQ ID NO: 1673886 - DNA, 25 bp, Homo sapien
ctggcgcaggatccaggacggcagg

SEQ ID NO: 1673887 - DNA, 25 bp, Homo sapien
cgcagctggcgcaggatccaggacg

SEQ ID NO: 1673888 - DNA, 25 bp, Homo sapien
gcgcaggatccaggacggcaggacg

SEQ ID NO: 1673889 - DNA, 25 bp, Homo sapien
tcgtctctagatgggtccgtgggcc

SEQ ID NO: 1673890 - DNA, 25 bp, Homo sapien
caaggctgcgctccatttatctgag

SEQ ID NO: 1673891 - DNA, 25 bp, Homo sapien
tatctgagcggtcaaggtcagcccc

SEQ ID NO: 1673892 - DNA, 25 bp, Homo sapien
taaatgcagtcctcgttcatccgca

SEQ ID NO: 1673893 - DNA, 25 bp, Homo sapien
aacacacgtttggttgtcagcagag

SEQ ID NO: 1673894 - DNA, 25 bp, Homo sapien
agaacacacgtttggttgtcagcag

SEQ ID NO: 1673895 - DNA, 25 bp, Homo sapien
aacacccttccagaacacacgtttg

SEQ ID NO: 1673896 - DNA, 25 bp, Homo sapien
gaacacacgtttggttgtcagcaga

SEQ ID NO: 1673897 - DNA, 25 bp, Homo sapien
ctggcccctgctgacttgctaggag

SEQ ID NO: 1673898 - DNA, 25 bp, Homo sapien
acttgctaggaggtgggcacttgac

SEQ ID NO: 1673899 - DNA, 25 bp, Homo sapien
ttgacaccacccatatggaacccat

SEQ ID NO: 1673900 - DNA, 25 bp, Homo sapien
gtgggcacttgacaccacccatatg

SEQ ID NO: 1673901 - DNA, 25 bp, Homo sapien
caggctgtccaaaaagtctcgggat

SEQ ID NO: 1673902 - DNA, 25 bp, Homo sapien
tctggtggagaatcccaggctgtcc

SEQ ID NO: 1673903 - DNA, 25 bp, Homo sapien
cctccactggaagccataaactggg

SEQ ID NO: 1673904 - DNA, 25 bp, Homo sapien
gattttcactcccttggaagacagc

SEQ ID NO: 1673905 - DNA, 25 bp, Homo sapien
caatcactctttgcagttggtcaac

SEQ ID NO: 1673906 - DNA, 25 bp, Homo sapien
ttgcagttggtcaactccctgtcct

SEQ ID NO: 1673907 - DNA, 25 bp, Homo sapien
ggttggttttgatggtgtcaatcac

SEQ ID NO: 1673908 - DNA, 25 bp, Homo sapien
gatgattcttctgtcgtcagggttg

SEQ ID NO: 1673909 - DNA, 25 bp, Homo sapien
gcctctgcacaaaaccagattgctt

SEQ ID NO: 1673910 - DNA, 25 bp, Homo sapien
caaccatgtggctgggggaagttcc

SEQ ID NO: 1673911 - DNA, 25 bp, Homo sapien
ggtgcctctgcacaaaaccagattg

SEQ ID NO: 1673912 - DNA, 25 bp, Homo sapien
ccaacgtcacacaatcaaccatgtg

SEQ ID NO: 1673913 - DNA, 25 bp, Homo sapien
tctcgccttggcctctggagttgtt

SEQ ID NO: 1673914 - DNA, 25 bp, Homo sapien
tcctctcgccttggcctctggagtt

SEQ ID NO: 1673915 - DNA, 25 bp, Homo sapien
attacaggtgtgagccaccacacct

SEQ ID NO: 1673916 - DNA, 25 bp, Homo sapien
ggaattacaggtgtgagccaccaca

SEQ ID NO: 1673917 - DNA, 25 bp, Homo sapien
aagggatctgggctacctcgtggca

SEQ ID NO: 1673918 - DNA, 25 bp, Homo sapien
tatccatcggtgcaaggtttctgca

SEQ ID NO: 1673919 - DNA, 25 bp, Homo sapien
caggtgtccatttacggctgaagca

SEQ ID NO: 1673920 - DNA, 25 bp, Homo sapien
agtgatgtccataacagcctctgca

SEQ ID NO: 1673921 - DNA, 25 bp, Homo sapien
gaagataaggagggatggtggtttg

SEQ ID NO: 1673922 - DNA, 25 bp, Homo sapien
aggaagataaggagggatggtggtt

SEQ ID NO: 1673923 - DNA, 25 bp, Homo sapien
tgttcaccacatagaactggcagag

SEQ ID NO: 1673924 - DNA, 25 bp, Homo sapien
caatcatgtacgtgagcagggcgta

SEQ ID NO: 1673925 - DNA, 25 bp, Homo sapien
gatgttgaaaggcacaccgaggccc

SEQ ID NO: 1673926 - DNA, 25 bp, Homo sapien
ttcaggcccgtgatgtgcgcaatca

SEQ ID NO: 1673927 - DNA, 25 bp, Homo sapien
aattttcagtggctcgatgtgattc

SEQ ID NO: 1673928 - DNA, 25 bp, Homo sapien
tttcagtggctcgatgtgattcagg

SEQ ID NO: 1673929 - DNA, 25 bp, Homo sapien
gattcaggtaaatatgtgcatctcc

SEQ ID NO: 1673930 - DNA, 25 bp, Homo sapien
cagtggctcgatgtgattcaggtaa

SEQ ID NO: 1673931 - DNA, 25 bp, Homo sapien
tcccctggcttgaatgtggctcttc

SEQ ID NO: 1673932 - DNA, 25 bp, Homo sapien
ccctctctggtactggtgcttagta

SEQ ID NO: 1673933 - DNA, 25 bp, Homo sapien
ggttgctgaggcagatgcctgcctt

SEQ ID NO: 1673934 - DNA, 25 bp, Homo sapien
gcacctgacatgttaagtgcccatg

SEQ ID NO: 1673935 - DNA, 25 bp, Homo sapien
tcaacttttcgaagaatcctgagct

SEQ ID NO: 1673936 - DNA, 25 bp, Homo sapien
gatgcggattgtacccttcaatctg

SEQ ID NO: 1673937 - DNA, 25 bp, Homo sapien
cttttcgaagaatcctgagctttgg

SEQ ID NO: 1673938 - DNA, 25 bp, Homo sapien
tccattttaatagttggatgcggat

SEQ ID NO: 1673939 - DNA, 25 bp, Homo sapien
aaagaacttttacctcggcatccag

SEQ ID NO: 1673940 - DNA, 25 bp, Homo sapien
taataactgataggtcacggacaga

SEQ ID NO: 1673941 - DNA, 25 bp, Homo sapien
gactgacaatatccttcgagctcct

SEQ ID NO: 1673942 - DNA, 25 bp, Homo sapien
cacggacagatttttgacctagttc

SEQ ID NO: 1673943 - DNA, 25 bp, Homo sapien
tcagcattgtcagataccctcagtg

SEQ ID NO: 1673944 - DNA, 25 bp, Homo sapien
gatcgatggtgttactcagctccct

SEQ ID NO: 1673945 - DNA, 25 bp, Homo sapien
taagtacgtgggattgaaatgcaca

SEQ ID NO: 1673946 - DNA, 25 bp, Homo sapien
taaccacactctacatcatgatcga

SEQ ID NO: 1673947 - DNA, 25 bp, Homo sapien
aactgagcagataagtggcagtaca

SEQ ID NO: 1673948 - DNA, 25 bp, Homo sapien
ataagtggcagtacagaatgaacaa

SEQ ID NO: 1673949 - DNA, 25 bp, Homo sapien
gaaggaactgagcagataagtggca

SEQ ID NO: 1673950 - DNA, 25 bp, Homo sapien
gcagataagtggcagtacagaatga

SEQ ID NO: 1673951 - DNA, 25 bp, Homo sapien
tattttgaggataagatgcagttaa

SEQ ID NO: 1673952 - DNA, 25 bp, Homo sapien
actctatcctaaatggtcattatat

SEQ ID NO: 1673953 - DNA, 25 bp, Homo sapien
tactcttttaagtagcatccaaacc

SEQ ID NO: 1673954 - DNA, 25 bp, Homo sapien
gcatccaaaccagaatacagcacat

SEQ ID NO: 1673955 - DNA, 25 bp, Homo sapien
tgaactagactgtggagcaccaagc

SEQ ID NO: 1673956 - DNA, 25 bp, Homo sapien
caagtatcccgtgatgatccagcgg

SEQ ID NO: 1673957 - DNA, 25 bp, Homo sapien
gtatcaaaatcctcaggcctgaggg

SEQ ID NO: 1673958 - DNA, 25 bp, Homo sapien
tgggcaacggacagtgactccatgt

SEQ ID NO: 1673959 - DNA, 25 bp, Homo sapien
ggaacaagcacttcttatggccaag

SEQ ID NO: 1673960 - DNA, 25 bp, Homo sapien
aaccatatcagcctgcctgtcacag

SEQ ID NO: 1673961 - DNA, 25 bp, Homo sapien
caataacaggcgatggaagtcaggc

SEQ ID NO: 1673962 - DNA, 25 bp, Homo sapien
tctcgaacagcaccaaggaacgggt

SEQ ID NO: 1673963 - DNA, 25 bp, Homo sapien
aggattttggaatcaacaaagacat

SEQ ID NO: 1673964 - DNA, 25 bp, Homo sapien
gaggattttggaatcaacaaagaca

SEQ ID NO: 1673965 - DNA, 25 bp, Homo sapien
agaggattttggaatcaacaaagac

SEQ ID NO: 1673966 - DNA, 25 bp, Homo sapien
tcttggttccagttctaggagggac

SEQ ID NO: 1673967 - DNA, 25 bp, Homo sapien
acaaagaccggaggatactgggcca

SEQ ID NO: 1673968 - DNA, 25 bp, Homo sapien
gatggccagagctgactccataagg

SEQ ID NO: 1673969 - DNA, 25 bp, Homo sapien
taaattcatgggtcgtactggaggt

SEQ ID NO: 1673970 - DNA, 25 bp, Homo sapien
caacaaggacctcaaggacattgtt

SEQ ID NO: 1673971 - DNA, 25 bp, Homo sapien
aacaaggacctcaaggacattgttg

SEQ ID NO: 1673972 - DNA, 25 bp, Homo sapien
gtcagttgtccagcaagtcagtcct

SEQ ID NO: 1673973 - DNA, 25 bp, Homo sapien
cagcaagtcagtccttctgcagact

SEQ ID NO: 1673974 - DNA, 25 bp, Homo sapien
tacctggccgtggtgatgcatggct

SEQ ID NO: 1673975 - DNA, 25 bp, Homo sapien
ccttgaactttcaatggacactgcc

SEQ ID NO: 1673976 - DNA, 25 bp, Homo sapien
catggttcttttcgggtttctcaca

SEQ ID NO: 1673977 - DNA, 25 bp, Homo sapien
agctcttgtggcacggcccctgtgg

SEQ ID NO: 1673978 - DNA, 25 bp, Homo sapien
ggaccctgactactcggctgcctat

SEQ ID NO: 1673979 - DNA, 25 bp, Homo sapien
cactggcattgtttcggcggggaac

SEQ ID NO: 1673980 - DNA, 25 bp, Homo sapien
tcacatcttctgcctggctttttgg

SEQ ID NO: 1673981 - DNA, 25 bp, Homo sapien
catcttctgcctggctttttggagt

SEQ ID NO: 1673982 - DNA, 25 bp, Homo sapien
gcattcacatcttctgcctggcttt

SEQ ID NO: 1673983 - DNA, 25 bp, Homo sapien
cattcacatcttctgcctggctttt

SEQ ID NO: 1673984 - DNA, 25 bp, Homo sapien
tcaagggcagacgtatctgtaaccc

SEQ ID NO: 1673985 - DNA, 25 bp, Homo sapien
cagcatgcccgttctataagcaggt

SEQ ID NO: 1673986 - DNA, 25 bp, Homo sapien
cataatttacttgtggccgggcgtg

SEQ ID NO: 1673987 - DNA, 25 bp, Homo sapien
gatgctcagcgatgcatcacactga

SEQ ID NO: 1673988 - DNA, 25 bp, Homo sapien
tgtcggctgcctcttcttcgtgtgc

SEQ ID NO: 1673989 - DNA, 25 bp, Homo sapien
tcagatacgttttccgctgtcggct

SEQ ID NO: 1673990 - DNA, 25 bp, Homo sapien
tgaagaccctctccgcattctgact

SEQ ID NO: 1673991 - DNA, 25 bp, Homo sapien
cctttatgccggagactcccagatc

SEQ ID NO: 1673992 - DNA, 25 bp, Homo sapien
ccctcgtagtccactgatgagattg

SEQ ID NO: 1673993 - DNA, 25 bp, Homo sapien
tcgtagtccactgatgagattggcc

SEQ ID NO: 1673994 - DNA, 25 bp, Homo sapien
actgcccctcgtagtccactgatga

SEQ ID NO: 1673995 - DNA, 25 bp, Homo sapien
tagtccactgatgagattggccgcg

SEQ ID NO: 1673996 - DNA, 25 bp, Homo sapien
gggcagcttcccgacttcgaaccca

SEQ ID NO: 1673997 - DNA, 25 bp, Homo sapien
gccccgggcagcttcccgacttcga

SEQ ID NO: 1673998 - DNA, 25 bp, Homo sapien
ggcagcttcccgacttcgaacccat

SEQ ID NO: 1673999 - DNA, 25 bp, Homo sapien
taagcgcggacgccatggtaagcgc

SEQ ID NO: 1674000 - DNA, 25 bp, Homo sapien
atggtaagcgcggacgccatggtaa

SEQ ID NO: 1674001 - DNA, 25 bp, Homo sapien
tggtaagcgcggacgccatggtaag

SEQ ID NO: 1674002 - DNA, 25 bp, Homo sapien
acgccatggtaagcgcggacgccat

SEQ ID NO: 1674003 - DNA, 25 bp, Homo sapien
aaaccttcctgcaaatcagctacac

SEQ ID NO: 1674004 - DNA, 25 bp, Homo sapien
ctacacataacagtgagtcagtgac

SEQ ID NO: 1674005 - DNA, 25 bp, Homo sapien
tcagctacacataacagtgagtcag

SEQ ID NO: 1674006 - DNA, 25 bp, Homo sapien
tgcaaatcagctacacataacagtg

SEQ ID NO: 1674007 - DNA, 25 bp, Homo sapien
cattagtggtttgagtgtctagcaa

SEQ ID NO: 1674008 - DNA, 25 bp, Homo sapien
cgtaacctgcttagtattgacactc

SEQ ID NO: 1674009 - DNA, 25 bp, Homo sapien
tctaagcatattcaaaagggtgaca

SEQ ID NO: 1674010 - DNA, 25 bp, Homo sapien
aagatggacttcatgcaagttggca

SEQ ID NO: 1674011 - DNA, 25 bp, Homo sapien
tccttcacccaacaacttctagttg

SEQ ID NO: 1674012 - DNA, 25 bp, Homo sapien
cataggttccggcttatttggattg

SEQ ID NO: 1674013 - DNA, 25 bp, Homo sapien
ttgtagtttgtagagtcgtggtttc

SEQ ID NO: 1674014 - DNA, 25 bp, Homo sapien
gaagttcaattatagtaagccctca

SEQ ID NO: 1674015 - DNA, 25 bp, Homo sapien
tttactatagtccaacacaagaatt

SEQ ID NO: 1674016 - DNA, 25 bp, Homo sapien
atatgtggtaggtatttgagaggcc

SEQ ID NO: 1674017 - DNA, 25 bp, Homo sapien
gttaaaagtttctcttcagatatgt

SEQ ID NO: 1674018 - DNA, 25 bp, Homo sapien
ggtaggtatttgagaggccttatta

SEQ ID NO: 1674019 - DNA, 25 bp, Homo sapien
gagcagttccatggtgtcatcaagg

SEQ ID NO: 1674020 - DNA, 25 bp, Homo sapien
tttatctctattctgcagcccttgg

SEQ ID NO: 1674021 - DNA, 25 bp, Homo sapien
tatgtcctcattaacagccagtggg

SEQ ID NO: 1674022 - DNA, 25 bp, Homo sapien
taaagggtcccgtatcaggatgctt

SEQ ID NO: 1674023 - DNA, 25 bp, Homo sapien
tctaaacatatctagggccaggcac

SEQ ID NO: 1674024 - DNA, 25 bp, Homo sapien
tacagatttacttacggtcgcacgt

SEQ ID NO: 1674025 - DNA, 25 bp, Homo sapien
ggtcgcacgtcactttaaagacagg

SEQ ID NO: 1674026 - DNA, 25 bp, Homo sapien
cacttgtgttcgacattgcactgga

SEQ ID NO: 1674027 - DNA, 25 bp, Homo sapien
cagccttttaattcgtacaggattt

SEQ ID NO: 1674028 - DNA, 25 bp, Homo sapien
aggattttgaatcgaaacatgactg

SEQ ID NO: 1674029 - DNA, 25 bp, Homo sapien
taattcgtacaggattttgaatcga

SEQ ID NO: 1674030 - DNA, 25 bp, Homo sapien
cgtacaggattttgaatcgaaacat

SEQ ID NO: 1674031 - DNA, 25 bp, Homo sapien
gtccctcaaacttgacactcttatg

SEQ ID NO: 1674032 - DNA, 25 bp, Homo sapien
acttgacactcttatgtgaagctcc

SEQ ID NO: 1674033 - DNA, 25 bp, Homo sapien
caaacttgacactcttatgtgaagc

SEQ ID NO: 1674034 - DNA, 25 bp, Homo sapien
gacactcttatgtgaagctcccctt

SEQ ID NO: 1674035 - DNA, 25 bp, Homo sapien
cctgcaaggaaattctgtgaacgta

SEQ ID NO: 1674036 - DNA, 25 bp, Homo sapien
taagccctacgtttgtgtgcagaat

SEQ ID NO: 1674037 - DNA, 25 bp, Homo sapien
aaatagaagcatagaatacctgtgg

SEQ ID NO: 1674038 - DNA, 25 bp, Homo sapien
taagaacataacttggtggctgact

SEQ ID NO: 1674039 - DNA, 25 bp, Homo sapien
taccaaccgatggtgtaagacttac

SEQ ID NO: 1674040 - DNA, 25 bp, Homo sapien
gacattagctaaaagtcggtggaga

SEQ ID NO: 1674041 - DNA, 25 bp, Homo sapien
tgctggttgacaattcagagggtcc

SEQ ID NO: 1674042 - DNA, 25 bp, Homo sapien
gagacccctgccacaattgacatgt

SEQ ID NO: 1674043 - DNA, 25 bp, Homo sapien
ctcgagctgcggtagcagcgactca

SEQ ID NO: 1674044 - DNA, 25 bp, Homo sapien
tcgagctgcggtagcagcgactcat

SEQ ID NO: 1674045 - DNA, 25 bp, Homo sapien
tacttgttgcacttccctcactggg

SEQ ID NO: 1674046 - DNA, 25 bp, Homo sapien
caaggctggttcgacctacagtcaa

SEQ ID NO: 1674047 - DNA, 25 bp, Homo sapien
ttacaaggctcataggaaaggtgcg

SEQ ID NO: 1674048 - DNA, 25 bp, Homo sapien
gggatagtcgccaaacagaactcag

SEQ ID NO: 1674049 - DNA, 25 bp, Homo sapien
tccactgagcttggcacaataggcc

SEQ ID NO: 1674050 - DNA, 25 bp, Homo sapien
gatagcacgtaggagaggtttaccc

SEQ ID NO: 1674051 - DNA, 25 bp, Homo sapien
gaaaatcatcatagcctcagtggcg

SEQ ID NO: 1674052 - DNA, 25 bp, Homo sapien
caataggcccaacactcaaggagaa

SEQ ID NO: 1674053 - DNA, 25 bp, Homo sapien
ctgaatattttcctgaataggagtt

SEQ ID NO: 1674054 - DNA, 25 bp, Homo sapien
tatgggagacgttagagaaaagctt

SEQ ID NO: 1674055 - DNA, 25 bp, Homo sapien
gaatccacgactggacaatatgtcc

SEQ ID NO: 1674056 - DNA, 25 bp, Homo sapien
tggttttcaaaacatccattccttg

SEQ ID NO: 1674057 - DNA, 25 bp, Homo sapien
aaacgaacagaaagcttgtatgtgg

SEQ ID NO: 1674058 - DNA, 25 bp, Homo sapien
taaacgaacagaaagcttgtatgtg

SEQ ID NO: 1674059 - DNA, 25 bp, Homo sapien
gtggctaggcacactaaattcttca

SEQ ID NO: 1674060 - DNA, 25 bp, Homo sapien
aataaacgaacagaaagcttgtatg

SEQ ID NO: 1674061 - DNA, 25 bp, Homo sapien
gagtatactaagcaccttctgcatg

SEQ ID NO: 1674062 - DNA, 25 bp, Homo sapien
agtatactaagcaccttctgcatgt

SEQ ID NO: 1674063 - DNA, 25 bp, Homo sapien
agctcggacccctgccacgctgctt

SEQ ID NO: 1674064 - DNA, 25 bp, Homo sapien
cggacccctgccacgctgctttgcg

SEQ ID NO: 1674065 - DNA, 25 bp, Homo sapien
cagctcggacccctgccacgctgct

SEQ ID NO: 1674066 - DNA, 25 bp, Homo sapien
gacccctgccacgctgctttgcgcc

SEQ ID NO: 1674067 - DNA, 25 bp, Homo sapien
ggtaattggcgctgagttccctggc

SEQ ID NO: 1674068 - DNA, 25 bp, Homo sapien
ctaggcacgcattcaccagctggtg

SEQ ID NO: 1674069 - DNA, 25 bp, Homo sapien
tacaggttgaaggtcgtgtcctcca

SEQ ID NO: 1674070 - DNA, 25 bp, Homo sapien
ctcctggaggtaattggcgctgagt

SEQ ID NO: 1674071 - DNA, 25 bp, Homo sapien
ggtcagggttttctgttcaaaggca

SEQ ID NO: 1674072 - DNA, 25 bp, Homo sapien
tttctgttcaaaggcatggatgtgt

SEQ ID NO: 1674073 - DNA, 25 bp, Homo sapien
gcatggatgtgtgggagctcttctg

SEQ ID NO: 1674074 - DNA, 25 bp, Homo sapien
atttctgctgctcacgggcccactg

SEQ ID NO: 1674075 - DNA, 25 bp, Homo sapien
cttggcttcttcctgctgctgagtt

SEQ ID NO: 1674076 - DNA, 25 bp, Homo sapien
tgtcaagcaggatgtggatgaaggt

SEQ ID NO: 1674077 - DNA, 25 bp, Homo sapien
cgcttgatgtaggcattggtctgtg

SEQ ID NO: 1674078 - DNA, 25 bp, Homo sapien
tgaaggtgtagctcttggcagggat

SEQ ID NO: 1674079 - DNA, 25 bp, Homo sapien
cagggcgcttgatgtaggcattggt

SEQ ID NO: 1674080 - DNA, 25 bp, Homo sapien
ataaccaaaagatccactaagattt

SEQ ID NO: 1674081 - DNA, 25 bp, Homo sapien
ccataaccaaaagatccactaagat

SEQ ID NO: 1674082 - DNA, 25 bp, Homo sapien
accaaaagatccactaagattttgc

SEQ ID NO: 1674083 - DNA, 25 bp, Homo sapien
tccataaccaaaagatccactaaga

SEQ ID NO: 1674084 - DNA, 25 bp, Homo sapien
ccctccctgggagatgacctaggtc

SEQ ID NO: 1674085 - DNA, 25 bp, Homo sapien
gatgacctaggtccaaagtcccatg

SEQ ID NO: 1674086 - DNA, 25 bp, Homo sapien
ccacagtgtccctccctgggagatg

SEQ ID NO: 1674087 - DNA, 25 bp, Homo sapien
ccaaagtcccatggaaggtatactc

SEQ ID NO: 1674088 - DNA, 25 bp, Homo sapien
taccgaacccactatgagatggacc

SEQ ID NO: 1674089 - DNA, 25 bp, Homo sapien
ctaggaaagtaaccacaggatgggt

SEQ ID NO: 1674090 - DNA, 25 bp, Homo sapien
gaactaaaactctatgggtcatctg

SEQ ID NO: 1674091 - DNA, 25 bp, Homo sapien
taagccactactctaactggtgaac

SEQ ID NO: 1674092 - DNA, 25 bp, Homo sapien
tgaacactgaattcagccgcagaac

SEQ ID NO: 1674093 - DNA, 25 bp, Homo sapien
aaatgaatcgcagtttctgagcccc

SEQ ID NO: 1674094 - DNA, 25 bp, Homo sapien
tcagccgcagaacacattaagagaa

SEQ ID NO: 1674095 - DNA, 25 bp, Homo sapien
cacctgtaagtggttcctggaacct

SEQ ID NO: 1674096 - DNA, 25 bp, Homo sapien
taccactatctctatatcctacaac

SEQ ID NO: 1674097 - DNA, 25 bp, Homo sapien
tctctatatcctacaacattgattt

SEQ ID NO: 1674098 - DNA, 25 bp, Homo sapien
ttttactaccactatctctatatcc

SEQ ID NO: 1674099 - DNA, 25 bp, Homo sapien
tctatatcctacaacattgattttc

SEQ ID NO: 1674100 - DNA, 25 bp, Homo sapien
tttccactttgtttacaacttcagc

SEQ ID NO: 1674101 - DNA, 25 bp, Homo sapien
ttccactttgtttacaacttcagct

SEQ ID NO: 1674102 - DNA, 25 bp, Homo sapien
tctggctgccgttgacagtagggct

SEQ ID NO: 1674103 - DNA, 25 bp, Homo sapien
cattaaatgtggaagtcgttttgtt

SEQ ID NO: 1674104 - DNA, 25 bp, Homo sapien
aagggaagtcttggaggattttcag

SEQ ID NO: 1674105 - DNA, 25 bp, Homo sapien
tagggctatgagtagattgatgaga

SEQ ID NO: 1674106 - DNA, 25 bp, Homo sapien
ccgaacatggtttttggagagccct

SEQ ID NO: 1674107 - DNA, 25 bp, Homo sapien
tgtgcagttcgcaaaaatctatccg

SEQ ID NO: 1674108 - DNA, 25 bp, Homo sapien
tggttacagaggtgaccggccttct

SEQ ID NO: 1674109 - DNA, 25 bp, Homo sapien
tggagagccctctttgtcaacatct

SEQ ID NO: 1674110 - DNA, 25 bp, Homo sapien
cgatgaggtgaagcgcggaggagca

SEQ ID NO: 1674111 - DNA, 25 bp, Homo sapien
tcaaaagtttgtagacgcgcagaac

SEQ ID NO: 1674112 - DNA, 25 bp, Homo sapien
agcaaggtggccgtaagtccacccg

SEQ ID NO: 1674113 - DNA, 25 bp, Homo sapien
ccgcctttgtaggagccgcgggcca

SEQ ID NO: 1674114 - DNA, 25 bp, Homo sapien
ctgcgggactcgtttgccgaggctc

SEQ ID NO: 1674115 - DNA, 25 bp, Homo sapien
tcttcaagttcctgcgctggagtca

SEQ ID NO: 1674116 - DNA, 25 bp, Homo sapien
tgccaggtaggacggcgggcaaagc

SEQ ID NO: 1674117 - DNA, 25 bp, Homo sapien
gcatcgccgtctggcgttggtgtct

SEQ ID NO: 1674118 - DNA, 25 bp, Homo sapien
acagcacttggcgacagccggtgcg

SEQ ID NO: 1674119 - DNA, 25 bp, Homo sapien
gttgaacagcacttggcgacagccg

SEQ ID NO: 1674120 - DNA, 25 bp, Homo sapien
gcgaagccccggctccctgagttga

SEQ ID NO: 1674121 - DNA, 25 bp, Homo sapien
gctccctgagttgaacagcacttgg

SEQ ID NO: 1674122 - DNA, 25 bp, Homo sapien
gattatcccatagaccagcagggcc

SEQ ID NO: 1674123 - DNA, 25 bp, Homo sapien
agcctcgctccgctacacatggtca

SEQ ID NO: 1674124 - DNA, 25 bp, Homo sapien
gagctgtagacgctgctgtgcatga

SEQ ID NO: 1674125 - DNA, 25 bp, Homo sapien
gacgctgctgtgcatgattatccca

SEQ ID NO: 1674126 - DNA, 25 bp, Homo sapien
tctggggctgcctccgggaacctgg

SEQ ID NO: 1674127 - DNA, 25 bp, Homo sapien
cctggcacatcggtccgcgactctg

SEQ ID NO: 1674128 - DNA, 25 bp, Homo sapien
tggcacatcggtccgcgactctggg

SEQ ID NO: 1674129 - DNA, 25 bp, Homo sapien
acagcctggcacatcggtccgcgac

SEQ ID NO: 1674130 - DNA, 25 bp, Homo sapien
tatcgatggcggtgccccatctcaa

SEQ ID NO: 1674131 - DNA, 25 bp, Homo sapien
taaggccactaaacgaatagttcgc

SEQ ID NO: 1674132 - DNA, 25 bp, Homo sapien
atctcaaccccagagcacgaggagg

SEQ ID NO: 1674133 - DNA, 25 bp, Homo sapien
aatagttcgcgctgatctgttatcg

SEQ ID NO: 1674134 - DNA, 25 bp, Homo sapien
ccaggcacacgggaacttgaaaata

SEQ ID NO: 1674135 - DNA, 25 bp, Homo sapien
tgccaggcacacgggaacttgaaaa

SEQ ID NO: 1674136 - DNA, 25 bp, Homo sapien
aagtgccaggcacacgggaacttga

SEQ ID NO: 1674137 - DNA, 25 bp, Homo sapien
caggcacacgggaacttgaaaatag

SEQ ID NO: 1674138 - DNA, 25 bp, Homo sapien
caggcgaggatctggcaggaacatg

SEQ ID NO: 1674139 - DNA, 25 bp, Homo sapien
cggcggctcagactgtggcgcgtcc

SEQ ID NO: 1674140 - DNA, 25 bp, Homo sapien
ggctcagactgtggcgcgtccgcac

SEQ ID NO: 1674141 - DNA, 25 bp, Homo sapien
tctattttgggcaggcgaggatctg

SEQ ID NO: 1674142 - DNA, 25 bp, Homo sapien
ccagctcggcgaggatccaaagtaa

SEQ ID NO: 1674143 - DNA, 25 bp, Homo sapien
agctcggcgaggatccaaagtaagg

SEQ ID NO: 1674144 - DNA, 25 bp, Homo sapien
cgaggatccaaagtaaggggctcgc

SEQ ID NO: 1674145 - DNA, 25 bp, Homo sapien
ccaaagtaaggggctcgcgcggatt

SEQ ID NO: 1674146 - DNA, 25 bp, Homo sapien
gtctggcagcgggtttccgtcctcg

SEQ ID NO: 1674147 - DNA, 25 bp, Homo sapien
tggcagcgggtttccgtcctcgccg

SEQ ID NO: 1674148 - DNA, 25 bp, Homo sapien
aagtctggcagcgggtttccgtcct

SEQ ID NO: 1674149 - DNA, 25 bp, Homo sapien
gtcctcgccgtacgcctcttcctct

SEQ ID NO: 1674150 - DNA, 25 bp, Homo sapien
tagtcccggctctaggagtggcaga

SEQ ID NO: 1674151 - DNA, 25 bp, Homo sapien
gaactcgccaataactcccgggatg

SEQ ID NO: 1674152 - DNA, 25 bp, Homo sapien
gatgatctcgagagcaactgctagg

SEQ ID NO: 1674153 - DNA, 25 bp, Homo sapien
aactgctaggatcgggagctagtcc

SEQ ID NO: 1674154 - DNA, 25 bp, Homo sapien
ggccacgagcgactgcaggtgcttc

SEQ ID NO: 1674155 - DNA, 25 bp, Homo sapien
gttaaggatcccgtgggcgacatct

SEQ ID NO: 1674156 - DNA, 25 bp, Homo sapien
ggtccagcactttgcggtaggcctc

SEQ ID NO: 1674157 - DNA, 25 bp, Homo sapien
ttcccggcggacagctggtccagca

SEQ ID NO: 1674158 - DNA, 25 bp, Homo sapien
tcctcacgccgagttgaaaaacgtg

SEQ ID NO: 1674159 - DNA, 25 bp, Homo sapien
gagataggcttcacacaagccctgt

SEQ ID NO: 1674160 - DNA, 25 bp, Homo sapien
taatataagtcgacaggctgtaggc

SEQ ID NO: 1674161 - DNA, 25 bp, Homo sapien
aatgtaatctgttttcccacgggct

SEQ ID NO: 1674162 - DNA, 25 bp, Homo sapien
tacatatgccagtctggctgctgcc

SEQ ID NO: 1674163 - DNA, 25 bp, Homo sapien
ctacatatgccagtctggctgctgc

SEQ ID NO: 1674164 - DNA, 25 bp, Homo sapien
cccttgagatccgacccttcgtgtg

SEQ ID NO: 1674165 - DNA, 25 bp, Homo sapien
tctcacccgcgacatacagagaaag

SEQ ID NO: 1674166 - DNA, 25 bp, Homo sapien
tgtttgcgctaaattgtcctcgctg

SEQ ID NO: 1674167 - DNA, 25 bp, Homo sapien
catacagagaaagtaaccggagagc

SEQ ID NO: 1674168 - DNA, 25 bp, Homo sapien
gtccgtgaagatcccgtccgagtgg

SEQ ID NO: 1674169 - DNA, 25 bp, Homo sapien
tcttccctaggacggccgccaagta

SEQ ID NO: 1674170 - DNA, 25 bp, Homo sapien
atcccgtccgagtggcgcttggaga

SEQ ID NO: 1674171 - DNA, 25 bp, Homo sapien
ctgtagctgtccgtgaagatcccgt

SEQ ID NO: 1674172 - DNA, 25 bp, Homo sapien
ctacaaataagctattcggcgtcct

SEQ ID NO: 1674173 - DNA, 25 bp, Homo sapien
tacaaataagctattcggcgtcctt

SEQ ID NO: 1674174 - DNA, 25 bp, Homo sapien
ataagctattcggcgtcctttgttt

SEQ ID NO: 1674175 - DNA, 25 bp, Homo sapien
caaataagctattcggcgtcctttg

SEQ ID NO: 1674176 - DNA, 25 bp, Homo sapien
cacacgagcgatgactgttgagtca

SEQ ID NO: 1674177 - DNA, 25 bp, Homo sapien
tcagggctgtatacacagggtagct

SEQ ID NO: 1674178 - DNA, 25 bp, Homo sapien
catgtttggatagaacacacgagcg

SEQ ID NO: 1674179 - DNA, 25 bp, Homo sapien
aaacgacttttcattgcgtcagggc

SEQ ID NO: 1674180 - DNA, 25 bp, Homo sapien
cagcaattctccatatctttacctc

SEQ ID NO: 1674181 - DNA, 25 bp, Homo sapien
gtagcaaatggtaagtagtaatatc

SEQ ID NO: 1674182 - DNA, 25 bp, Homo sapien
atggtaagtagtaatatcttcaggc

SEQ ID NO: 1674183 - DNA, 25 bp, Homo sapien
gcaattctccatatctttacctcaa

SEQ ID NO: 1674184 - DNA, 25 bp, Homo sapien
acagagcccagttgagttaggctgg

SEQ ID NO: 1674185 - DNA, 25 bp, Homo sapien
tacacataaaaggagaatcaaagaa

SEQ ID NO: 1674186 - DNA, 25 bp, Homo sapien
gctgggattgaagcagcctgcccca

SEQ ID NO: 1674187 - DNA, 25 bp, Homo sapien
gaattgccacccaaccagggggaca

SEQ ID NO: 1674188 - DNA, 25 bp, Homo sapien
tacagttcctcaactcttctcctag

SEQ ID NO: 1674189 - DNA, 25 bp, Homo sapien
tctcctagggagaggcgtgaattct

SEQ ID NO: 1674190 - DNA, 25 bp, Homo sapien
gggagaagcacaatttggatcgagc

SEQ ID NO: 1674191 - DNA, 25 bp, Homo sapien
aacgaagccgcccttttctgtacag

SEQ ID NO: 1674192 - DNA, 25 bp, Homo sapien
tacacaggactcaggcatagaccga

SEQ ID NO: 1674193 - DNA, 25 bp, Homo sapien
tgttgcagcattgtagggccactaa

SEQ ID NO: 1674194 - DNA, 25 bp, Homo sapien
taaaatgcttgcaactagccacggg

SEQ ID NO: 1674195 - DNA, 25 bp, Homo sapien
tacaagcgtaggttctcagggtctg

SEQ ID NO: 1674196 - DNA, 25 bp, Homo sapien
cttcagtttagtaaggctcttggca

SEQ ID NO: 1674197 - DNA, 25 bp, Homo sapien
ttcagtttagtaaggctcttggcat

SEQ ID NO: 1674198 - DNA, 25 bp, Homo sapien
tgcttcagtttagtaaggctcttgg

SEQ ID NO: 1674199 - DNA, 25 bp, Homo sapien
atctgcttcagtttagtaaggctct

SEQ ID NO: 1674200 - DNA, 25 bp, Homo sapien
tataatcagttgcacacaaaataag

SEQ ID NO: 1674201 - DNA, 25 bp, Homo sapien
cctagttatagatatcatgtgtgta

SEQ ID NO: 1674202 - DNA, 25 bp, Homo sapien
tgtgtaataatacttggttaaggtg

SEQ ID NO: 1674203 - DNA, 25 bp, Homo sapien
aaataagagcttcaagactaacatc

SEQ ID NO: 1674204 - DNA, 25 bp, Homo sapien
gcaagtactgcctggtgtaacttgg

SEQ ID NO: 1674205 - DNA, 25 bp, Homo sapien
cagcagcaccttcagtctttgagag

SEQ ID NO: 1674206 - DNA, 25 bp, Homo sapien
tgctgaccagaatcactcctccaaa

SEQ ID NO: 1674207 - DNA, 25 bp, Homo sapien
agtgatggggcctgctgaccagaat

SEQ ID NO: 1674208 - DNA, 25 bp, Homo sapien
taagtggttaatggaagtgccttca

SEQ ID NO: 1674209 - DNA, 25 bp, Homo sapien
tactggctcctaagcgtattaagtg

SEQ ID NO: 1674210 - DNA, 25 bp, Homo sapien
tgatgctgccagtgttactggctcc

SEQ ID NO: 1674211 - DNA, 25 bp, Homo sapien
caggatctaagtcatgtggctgagg

SEQ ID NO: 1674212 - DNA, 25 bp, Homo sapien
ttgagaaatactttctggttaataa

SEQ ID NO: 1674213 - DNA, 25 bp, Homo sapien
tgagaaatactttctggttaataac

SEQ ID NO: 1674214 - DNA, 25 bp, Homo sapien
aggaagagtagggaaacaaatatgt

SEQ ID NO: 1674215 - DNA, 25 bp, Homo sapien
tggacaggaagagtagggaaacaaa

SEQ ID NO: 1674216 - DNA, 25 bp, Homo sapien
ctgaatggacaggaagagtagggaa

SEQ ID NO: 1674217 - DNA, 25 bp, Homo sapien
gagtagggaaacaaatatgtttcaa

SEQ ID NO: 1674218 - DNA, 25 bp, Homo sapien
gttaccatgacaacaggcatctgct

SEQ ID NO: 1674219 - DNA, 25 bp, Homo sapien
ttgctcttgtttctgttaccatgac

SEQ ID NO: 1674220 - DNA, 25 bp, Homo sapien
tctgttaccatgacaacaggcatct

SEQ ID NO: 1674221 - DNA, 25 bp, Homo sapien
tgctcttgtttctgttaccatgaca

SEQ ID NO: 1674222 - DNA, 25 bp, Homo sapien
aacccatgaggtgcacactgtgcca

SEQ ID NO: 1674223 - DNA, 25 bp, Homo sapien
caggagtgtgctgtataaaggacta

SEQ ID NO: 1674224 - DNA, 25 bp, Homo sapien
ggtgaagcacgagagtggaacccat

SEQ ID NO: 1674225 - DNA, 25 bp, Homo sapien
aggactatccggtgtgtctgtgcag

SEQ ID NO: 1674226 - DNA, 25 bp, Homo sapien
acatggtgcattctcaaattcacga

SEQ ID NO: 1674227 - DNA, 25 bp, Homo sapien
tctcaaattcacgaagtaactgcaa

SEQ ID NO: 1674228 - DNA, 25 bp, Homo sapien
caatagttcaaaacatggtgcattc

SEQ ID NO: 1674229 - DNA, 25 bp, Homo sapien
aaattcacgaagtaactgcaaactc

SEQ ID NO: 1674230 - DNA, 25 bp, Homo sapien
aaatgtgtccaagagtagtctagca

SEQ ID NO: 1674231 - DNA, 25 bp, Homo sapien
cttcccttgggagtagagtgacaca

SEQ ID NO: 1674232 - DNA, 25 bp, Homo sapien
taaacacctcagacttcacactggc

SEQ ID NO: 1674233 - DNA, 25 bp, Homo sapien
cagatcagagtctatagtgacatca

SEQ ID NO: 1674234 - DNA, 25 bp, Homo sapien
tcttgagggttttctctcgtccacc

SEQ ID NO: 1674235 - DNA, 25 bp, Homo sapien
agggttttctctcgtccacctctct

SEQ ID NO: 1674236 - DNA, 25 bp, Homo sapien
tctttatcttgagggttttctctcg

SEQ ID NO: 1674237 - DNA, 25 bp, Homo sapien
ttctgtgccctggtctctttatctt

SEQ ID NO: 1674238 - DNA, 25 bp, Homo sapien
cagcaaggagtataagtcacggaaa

SEQ ID NO: 1674239 - DNA, 25 bp, Homo sapien
gagcagcaaggagtataagtcacgg

SEQ ID NO: 1674240 - DNA, 25 bp, Homo sapien
caaggagtataagtcacggaaaagg

SEQ ID NO: 1674241 - DNA, 25 bp, Homo sapien
ctgagcagcaaggagtataagtcac

SEQ ID NO: 1674242 - DNA, 25 bp, Homo sapien
catggtcatctcactggtctcctcc

SEQ ID NO: 1674243 - DNA, 25 bp, Homo sapien
tcactggtctcctcccttagggtca

SEQ ID NO: 1674244 - DNA, 25 bp, Homo sapien
tggtcatctcactggtctcctccct

SEQ ID NO: 1674245 - DNA, 25 bp, Homo sapien
gtcatctcactggtctcctccctta

SEQ ID NO: 1674246 - DNA, 25 bp, Homo sapien
tggacaaaacagaacctttgcagag

SEQ ID NO: 1674247 - DNA, 25 bp, Homo sapien
ctggacaaaacagaacctttgcaga

SEQ ID NO: 1674248 - DNA, 25 bp, Homo sapien
ggacaaaacagaacctttgcagagc

SEQ ID NO: 1674249 - DNA, 25 bp, Homo sapien
tttattgagtgttttggctgcagat

SEQ ID NO: 1674250 - DNA, 25 bp, Homo sapien
tgagtgttttggctgcagattcatc

SEQ ID NO: 1674251 - DNA, 25 bp, Homo sapien
attgagtgttttggctgcagattca

SEQ ID NO: 1674252 - DNA, 25 bp, Homo sapien
tattgagtgttttggctgcagattc

SEQ ID NO: 1674253 - DNA, 25 bp, Homo sapien
cacaagtagataagacacagagcct

SEQ ID NO: 1674254 - DNA, 25 bp, Homo sapien
cacagagcctatttgtaacagcgca

SEQ ID NO: 1674255 - DNA, 25 bp, Homo sapien
taatgatcggtaataaaagtggcag

SEQ ID NO: 1674256 - DNA, 25 bp, Homo sapien
taacatcaagaggacagccagcttc

SEQ ID NO: 1674257 - DNA, 25 bp, Homo sapien
taataagttttgcagagccccttga

SEQ ID NO: 1674258 - DNA, 25 bp, Homo sapien
tgcgcaaagtacagcgaagccagaa

SEQ ID NO: 1674259 - DNA, 25 bp, Homo sapien
tatgttacctgatacgcacctaggc

SEQ ID NO: 1674260 - DNA, 25 bp, Homo sapien
gaaagtccagccacttaggtgcaga

SEQ ID NO: 1674261 - DNA, 25 bp, Homo sapien
ccagtgtcttcttgtctgagagcat

SEQ ID NO: 1674262 - DNA, 25 bp, Homo sapien
caccagtgtcttcttgtctgagagc

SEQ ID NO: 1674263 - DNA, 25 bp, Homo sapien
caggaacaccagtgtcttcttgtct

SEQ ID NO: 1674264 - DNA, 25 bp, Homo sapien
ggaacaccagtgtcttcttgtctga

SEQ ID NO: 1674265 - DNA, 25 bp, Homo sapien
ctattccacaagtgcatgaatagaa

SEQ ID NO: 1674266 - DNA, 25 bp, Homo sapien
tattccacaagtgcatgaatagaag

SEQ ID NO: 1674267 - DNA, 25 bp, Homo sapien
attccacaagtgcatgaatagaaga

SEQ ID NO: 1674268 - DNA, 25 bp, Homo sapien
ttccacaagtgcatgaatagaagac

SEQ ID NO: 1674269 - DNA, 25 bp, Homo sapien
cacaaggcttttctttcccagttat

SEQ ID NO: 1674270 - DNA, 25 bp, Homo sapien
ggagatgtcttctttccacaaggct

SEQ ID NO: 1674271 - DNA, 25 bp, Homo sapien
agatgtcttctttccacaaggcttt

SEQ ID NO: 1674272 - DNA, 25 bp, Homo sapien
ctggagatgtcttctttccacaagg

SEQ ID NO: 1674273 - DNA, 25 bp, Homo sapien
tcagcttccatgcattttgccatct

SEQ ID NO: 1674274 - DNA, 25 bp, Homo sapien
tttgccatctgaaattggagtcttt

SEQ ID NO: 1674275 - DNA, 25 bp, Homo sapien
attggagtctttgaagaagcagcat

SEQ ID NO: 1674276 - DNA, 25 bp, Homo sapien
gaaattggagtctttgaagaagcag

SEQ ID NO: 1674277 - DNA, 25 bp, Homo sapien
tgtggtgaataaaggcagtgccact

SEQ ID NO: 1674278 - DNA, 25 bp, Homo sapien
gaccgggctgtgtgggtatcatcat

SEQ ID NO: 1674279 - DNA, 25 bp, Homo sapien
tcctcagaggattggatgtaggctg

SEQ ID NO: 1674280 - DNA, 25 bp, Homo sapien
tggacctctgactgagctacagtgg

SEQ ID NO: 1674281 - DNA, 25 bp, Homo sapien
gccaggatagagactcttggtcttt

SEQ ID NO: 1674282 - DNA, 25 bp, Homo sapien
tgccaggatagagactcttggtctt

SEQ ID NO: 1674283 - DNA, 25 bp, Homo sapien
ccaggatagagactcttggtctttc

SEQ ID NO: 1674284 - DNA, 25 bp, Homo sapien
ccatgtcttttgactgacctaataa

SEQ ID NO: 1674285 - DNA, 25 bp, Homo sapien
ttcgattatgcctttgaagtttcca

SEQ ID NO: 1674286 - DNA, 25 bp, Homo sapien
acattctccaagataatgtacttgg

SEQ ID NO: 1674287 - DNA, 25 bp, Homo sapien
gacctaataatagaggagacaaatc

SEQ ID NO: 1674288 - DNA, 25 bp, Homo sapien
ttaaaagaagcactatggtgaactt

SEQ ID NO: 1674289 - DNA, 25 bp, Homo sapien
agttttgacatataaacgcccatga

SEQ ID NO: 1674290 - DNA, 25 bp, Homo sapien
tggtgaacttatgtctaaccagcac

SEQ ID NO: 1674291 - DNA, 25 bp, Homo sapien
tgccctgtactcagatttcactgct

SEQ ID NO: 1674292 - DNA, 25 bp, Homo sapien
tagtgctgcttaaatgaccacaagg

SEQ ID NO: 1674293 - DNA, 25 bp, Homo sapien
tggtacctaatgtgagtagtgctgc

SEQ ID NO: 1674294 - DNA, 25 bp, Homo sapien
aacattagtgctgggctggttctct

SEQ ID NO: 1674295 - DNA, 25 bp, Homo sapien
tgtcaagtcattcggcagttgttct

SEQ ID NO: 1674296 - DNA, 25 bp, Homo sapien
aaatatattatacatccatggaaat

SEQ ID NO: 1674297 - DNA, 25 bp, Homo sapien
aatacacaaatttagccggacacag

SEQ ID NO: 1674298 - DNA, 25 bp, Homo sapien
caagtccatcttgggaaatatagca

SEQ ID NO: 1674299 - DNA, 25 bp, Homo sapien
caaatttagccggacacagtggtgt

SEQ ID NO: 1674300 - DNA, 25 bp, Homo sapien
cgtgagctgcctcgttggtccctcg

SEQ ID NO: 1674301 - DNA, 25 bp, Homo sapien
tggtccctcgagctcagtggctgag

SEQ ID NO: 1674302 - DNA, 25 bp, Homo sapien
ccctcgagctcagtggctgagggat

SEQ ID NO: 1674303 - DNA, 25 bp, Homo sapien
gagctgcctcgttggtccctcgagc

SEQ ID NO: 1674304 - DNA, 25 bp, Homo sapien
caccaggtgtaggtctctttttcac

SEQ ID NO: 1674305 - DNA, 25 bp, Homo sapien
cagatgtgttatagagttcttccca

SEQ ID NO: 1674306 - DNA, 25 bp, Homo sapien
cactcaagtccaccaggtgtaggtc

SEQ ID NO: 1674307 - DNA, 25 bp, Homo sapien
tccattttcccaaatctggtaagtg

SEQ ID NO: 1674308 - DNA, 25 bp, Homo sapien
aactaactctgttccaattcctggt

SEQ ID NO: 1674309 - DNA, 25 bp, Homo sapien
taacctgggatcttaggctgaaaag

SEQ ID NO: 1674310 - DNA, 25 bp, Homo sapien
gacatgcatagtgcctctgtttcac

SEQ ID NO: 1674311 - DNA, 25 bp, Homo sapien
ggaatcattgttctctaacctggga

SEQ ID NO: 1674312 - DNA, 25 bp, Homo sapien
gggcctctactattgtcagctgaat

SEQ ID NO: 1674313 - DNA, 25 bp, Homo sapien
tctctgctccgttgtcaattctcaa

SEQ ID NO: 1674314 - DNA, 25 bp, Homo sapien
caggaactgggcctctactattgtc

SEQ ID NO: 1674315 - DNA, 25 bp, Homo sapien
tgaattctctgctccgttgtcaatt

SEQ ID NO: 1674316 - DNA, 25 bp, Homo sapien
cactggttctaaactcagcaaatgt

SEQ ID NO: 1674317 - DNA, 25 bp, Homo sapien
ctgggcctccgacactggttctaaa

SEQ ID NO: 1674318 - DNA, 25 bp, Homo sapien
gagactgtgggagatttactgcgac

SEQ ID NO: 1674319 - DNA, 25 bp, Homo sapien
ggccctctcgccaacacatttgtat

SEQ ID NO: 1674320 - DNA, 25 bp, Homo sapien
aaagccagagagctcagcgtgccat

SEQ ID NO: 1674321 - DNA, 25 bp, Homo sapien
ccatctttctggatgcagtaatgtc

SEQ ID NO: 1674322 - DNA, 25 bp, Homo sapien
tcagcgtgccatctttctggatgca

SEQ ID NO: 1674323 - DNA, 25 bp, Homo sapien
gagagctcagcgtgccatctttctg

SEQ ID NO: 1674324 - DNA, 25 bp, Homo sapien
gcttataggacatcctaagcagccc

SEQ ID NO: 1674325 - DNA, 25 bp, Homo sapien
accactcaggagcagcttataggac

SEQ ID NO: 1674326 - DNA, 25 bp, Homo sapien
ggagcagcttataggacatcctaag

SEQ ID NO: 1674327 - DNA, 25 bp, Homo sapien
gagaaattgggaaacctgggatctg

SEQ ID NO: 1674328 - DNA, 25 bp, Homo sapien
cctttctggccttctaactctggct

SEQ ID NO: 1674329 - DNA, 25 bp, Homo sapien
cacattccagttccttttcctgaag

SEQ ID NO: 1674330 - DNA, 25 bp, Homo sapien
ccacattccagttccttttcctgaa

SEQ ID NO: 1674331 - DNA, 25 bp, Homo sapien
ccttctaactctggctgaagaccac

SEQ ID NO: 1674332 - DNA, 25 bp, Homo sapien
tcactgagcatgctctaatttaggt

SEQ ID NO: 1674333 - DNA, 25 bp, Homo sapien
ggtataacagattcaaaatgtatca

SEQ ID NO: 1674334 - DNA, 25 bp, Homo sapien
gagcatgctctaatttaggtataac

SEQ ID NO: 1674335 - DNA, 25 bp, Homo sapien
gctctaatttaggtataacagattc

SEQ ID NO: 1674336 - DNA, 25 bp, Homo sapien
ggtcacctgagcactggatccccat

SEQ ID NO: 1674337 - DNA, 25 bp, Homo sapien
cagctctgctactggtgcctctttg

SEQ ID NO: 1674338 - DNA, 25 bp, Homo sapien
tctgctactggtgcctctttgagaa

SEQ ID NO: 1674339 - DNA, 25 bp, Homo sapien
aggtcacctgagcactggatcccca

SEQ ID NO: 1674340 - DNA, 25 bp, Homo sapien
aagaagttgagctgttcacagggca

SEQ ID NO: 1674341 - DNA, 25 bp, Homo sapien
gagttggccgtagtgcatgtcaaca

SEQ ID NO: 1674342 - DNA, 25 bp, Homo sapien
cagggcatgaaggtttgagaccaca

SEQ ID NO: 1674343 - DNA, 25 bp, Homo sapien
tcccagtggtggaatcaagtttctt

SEQ ID NO: 1674344 - DNA, 25 bp, Homo sapien
tttccttcaattgcacctttttgct

SEQ ID NO: 1674345 - DNA, 25 bp, Homo sapien
gaaagtgtgcgcctcatttgccgca

SEQ ID NO: 1674346 - DNA, 25 bp, Homo sapien
tgttgcctgtgaatatcctagaaag

SEQ ID NO: 1674347 - DNA, 25 bp, Homo sapien
aaattgcaggcccacattccatttt

SEQ ID NO: 1674348 - DNA, 25 bp, Homo sapien
ttataaagtgtgctgtcattggtct

SEQ ID NO: 1674349 - DNA, 25 bp, Homo sapien
ttggccagtcttctgcggctttatc

SEQ ID NO: 1674350 - DNA, 25 bp, Homo sapien
aaatgatttctgatgtctgcttctg

SEQ ID NO: 1674351 - DNA, 25 bp, Homo sapien
cactgattgtcaatctcttggccag

SEQ ID NO: 1674352 - DNA, 25 bp, Homo sapien
tttcatgaattaggattacccagac

SEQ ID NO: 1674353 - DNA, 25 bp, Homo sapien
ctggaattgagtgctatttcatgaa

SEQ ID NO: 1674354 - DNA, 25 bp, Homo sapien
gcaaaacctggaattgagtgctatt

SEQ ID NO: 1674355 - DNA, 25 bp, Homo sapien
gaattgagtgctatttcatgaatta

SEQ ID NO: 1674356 - DNA, 25 bp, Homo sapien
ctcaaaggtcaatctcttggcaaca

SEQ ID NO: 1674357 - DNA, 25 bp, Homo sapien
ctgactcaaaggtcaatctcttggc

SEQ ID NO: 1674358 - DNA, 25 bp, Homo sapien
gataataatgaggtcataattaggc

SEQ ID NO: 1674359 - DNA, 25 bp, Homo sapien
gaggtcataattaggcgggacacag

SEQ ID NO: 1674360 - DNA, 25 bp, Homo sapien
tatttttaaagaatgtagtggatga

SEQ ID NO: 1674361 - DNA, 25 bp, Homo sapien
aatgtatacctgaggaaattttgag

SEQ ID NO: 1674362 - DNA, 25 bp, Homo sapien
atcatttgcaaatgtatacctgagg

SEQ ID NO: 1674363 - DNA, 25 bp, Homo sapien
agctcatgctcgcatgggctgcacc

SEQ ID NO: 1674364 - DNA, 25 bp, Homo sapien
tcctggtgattgtgggaattgcagt

SEQ ID NO: 1674365 - DNA, 25 bp, Homo sapien
ctccacggggacgaatagtgatgta

SEQ ID NO: 1674366 - DNA, 25 bp, Homo sapien
tagattactgctagcagtgttagtg

SEQ ID NO: 1674367 - DNA, 25 bp, Homo sapien
gcagtgttagtgtcatcagatagga

SEQ ID NO: 1674368 - DNA, 25 bp, Homo sapien
cctacagtatagcttggagtgctct

SEQ ID NO: 1674369 - DNA, 25 bp, Homo sapien
gaaggtcttacaccctatgcattca

SEQ ID NO: 1674370 - DNA, 25 bp, Homo sapien
tgatgacatcaccatagtctggttg

SEQ ID NO: 1674371 - DNA, 25 bp, Homo sapien
tagaccgtgtgggagcactctgtgt

SEQ ID NO: 1674372 - DNA, 25 bp, Homo sapien
gtttttagaccagtcaactgctgca

SEQ ID NO: 1674373 - DNA, 25 bp, Homo sapien
gaacagcctggatgagaagtatgtg

SEQ ID NO: 1674374 - DNA, 25 bp, Homo sapien
cagcctataagtggaggtctattct

SEQ ID NO: 1674375 - DNA, 25 bp, Homo sapien
gaaggcaacataggttcacatatgg

SEQ ID NO: 1674376 - DNA, 25 bp, Homo sapien
tcacatgaaaaccaaatgacgtcct

SEQ ID NO: 1674377 - DNA, 25 bp, Homo sapien
cagatgccctgacagccgtctggcc

SEQ ID NO: 1674378 - DNA, 25 bp, Homo sapien
tcatgttccacttgattgaaaggga

SEQ ID NO: 1674379 - DNA, 25 bp, Homo sapien
tcagtatgctcctctactaccagct

SEQ ID NO: 1674380 - DNA, 25 bp, Homo sapien
ttccagcagtaatctagtgtgcact

SEQ ID NO: 1674381 - DNA, 25 bp, Homo sapien
ctagtgtgcactcttattgaataaa

SEQ ID NO: 1674382 - DNA, 25 bp, Homo sapien
gatccgaatatagccagaaaacaat

SEQ ID NO: 1674383 - DNA, 25 bp, Homo sapien
aagagaattatgatccgaatatagc

SEQ ID NO: 1674384 - DNA, 25 bp, Homo sapien
ttttcccagtattaaagcaagacac

SEQ ID NO: 1674385 - DNA, 25 bp, Homo sapien
tagcttcttgagtgtatgaaacaca

SEQ ID NO: 1674386 - DNA, 25 bp, Homo sapien
catagcagcatttagtcaagaatta

SEQ ID NO: 1674387 - DNA, 25 bp, Homo sapien
ccttgttaggtggagcatagcagca

SEQ ID NO: 1674388 - DNA, 25 bp, Homo sapien
cagtcttcaatggcttcctcatcac

SEQ ID NO: 1674389 - DNA, 25 bp, Homo sapien
tcagtcttcaatggcttcctcatca

SEQ ID NO: 1674390 - DNA, 25 bp, Homo sapien
gcagacctcgcctccgtggattcag

SEQ ID NO: 1674391 - DNA, 25 bp, Homo sapien
cattctgactgacggctcctcttgc

SEQ ID NO: 1674392 - DNA, 25 bp, Homo sapien
tcttgctccgcagtctcttccttgc

SEQ ID NO: 1674393 - DNA, 25 bp, Homo sapien
ctgcatgttccattctgactgacgg

SEQ ID NO: 1674394 - DNA, 25 bp, Homo sapien
acttctgagccttttaatttccttg

SEQ ID NO: 1674395 - DNA, 25 bp, Homo sapien
ccttgatttgcagcatgaataatgc

SEQ ID NO: 1674396 - DNA, 25 bp, Homo sapien
gcttatcagccctcagtgtcggctt

SEQ ID NO: 1674397 - DNA, 25 bp, Homo sapien
cagcagacattagtttccaggcagt

SEQ ID NO: 1674398 - DNA, 25 bp, Homo sapien
ccagcagagagtttgattcatgtcc

SEQ ID NO: 1674399 - DNA, 25 bp, Homo sapien
ttgattcatgtcctggttacagggc

SEQ ID NO: 1674400 - DNA, 25 bp, Homo sapien
gcagagagtttgattcatgtcctgg

SEQ ID NO: 1674401 - DNA, 25 bp, Homo sapien
gagtttgattcatgtcctggttaca

SEQ ID NO: 1674402 - DNA, 25 bp, Homo sapien
tacagtagataggtaggcagtcaga

SEQ ID NO: 1674403 - DNA, 25 bp, Homo sapien
tctctcagtagataggaaaacctca

SEQ ID NO: 1674404 - DNA, 25 bp, Homo sapien
atggtcaggcggttgctaaactgcc

SEQ ID NO: 1674405 - DNA, 25 bp, Homo sapien
aataatgataggtcacagctggcgc

SEQ ID NO: 1674406 - DNA, 25 bp, Homo sapien
ggaaatataatgctccctggtcagc

SEQ ID NO: 1674407 - DNA, 25 bp, Homo sapien
taatggaaatataatgctccctggt

SEQ ID NO: 1674408 - DNA, 25 bp, Homo sapien
ttgctggttctcagtaatggaaata

SEQ ID NO: 1674409 - DNA, 25 bp, Homo sapien
tgttgctggttctcagtaatggaaa

SEQ ID NO: 1674410 - DNA, 25 bp, Homo sapien
gcaagcacgaaagggagaatgatac

SEQ ID NO: 1674411 - DNA, 25 bp, Homo sapien
cctggactaggcatgcaggagcatt

SEQ ID NO: 1674412 - DNA, 25 bp, Homo sapien
tgagcaaagagcaggttagtcacct

SEQ ID NO: 1674413 - DNA, 25 bp, Homo sapien
tgtgtttatctcagaggctccagcg

SEQ ID NO: 1674414 - DNA, 25 bp, Homo sapien
aacactcattggagccagctttctg

SEQ ID NO: 1674415 - DNA, 25 bp, Homo sapien
actcattggagccagctttctgata

SEQ ID NO: 1674416 - DNA, 25 bp, Homo sapien
tcattggagccagctttctgataaa

SEQ ID NO: 1674417 - DNA, 25 bp, Homo sapien
tcagaacactcattggagccagctt

SEQ ID NO: 1674418 - DNA, 25 bp, Homo sapien
gaaaggtccaagcaagcacttcata

SEQ ID NO: 1674419 - DNA, 25 bp, Homo sapien
tagaaaggtccaagcaagcacttca

SEQ ID NO: 1674420 - DNA, 25 bp, Homo sapien
agtagaaaggtccaagcaagcactt

SEQ ID NO: 1674421 - DNA, 25 bp, Homo sapien
gtagaaaggtccaagcaagcacttc

SEQ ID NO: 1674422 - DNA, 25 bp, Homo sapien
gagtggttcctacacacttccctgg

SEQ ID NO: 1674423 - DNA, 25 bp, Homo sapien
cagtcttgccgacaggatggtctga

SEQ ID NO: 1674424 - DNA, 25 bp, Homo sapien
tgagaactcgggttccgcagtcttg

SEQ ID NO: 1674425 - DNA, 25 bp, Homo sapien
tggcagttgagacccaagcatttta

SEQ ID NO: 1674426 - DNA, 25 bp, Homo sapien
ggccaggcaggatgaattatgcctg

SEQ ID NO: 1674427 - DNA, 25 bp, Homo sapien
gaggtggaagggttccttgattcca

SEQ ID NO: 1674428 - DNA, 25 bp, Homo sapien
tccttgattccaggagtacgagacc

SEQ ID NO: 1674429 - DNA, 25 bp, Homo sapien
aggcaggatgaattatgcctgtaat

SEQ ID NO: 1674430 - DNA, 25 bp, Homo sapien
tcagagattggttgaggagacacaa

SEQ ID NO: 1674431 - DNA, 25 bp, Homo sapien
cacaagcaggtcgaaggtctaaggg

SEQ ID NO: 1674432 - DNA, 25 bp, Homo sapien
gggaccctgggaattgagtcgctaa

SEQ ID NO: 1674433 - DNA, 25 bp, Homo sapien
ccaggaaaaacgatgctaggaatgc

SEQ ID NO: 1674434 - DNA, 25 bp, Homo sapien
tcgttaagccaaaattccaggagtc

SEQ ID NO: 1674435 - DNA, 25 bp, Homo sapien
tgactacaaccaaacaactactatg

SEQ ID NO: 1674436 - DNA, 25 bp, Homo sapien
tagcaatatcatccacccacactaa

SEQ ID NO: 1674437 - DNA, 25 bp, Homo sapien
tcactgtagtccaggtacaatcatc

SEQ ID NO: 1674438 - DNA, 25 bp, Homo sapien
ggctgggaggaaatgtggagatgga

SEQ ID NO: 1674439 - DNA, 25 bp, Homo sapien
ggaaatgtggagatggaggtcaaga

SEQ ID NO: 1674440 - DNA, 25 bp, Homo sapien
aatgtggagatggaggtcaagaggt

SEQ ID NO: 1674441 - DNA, 25 bp, Homo sapien
gaggtgtagaggctgggaggaaatg

SEQ ID NO: 1674442 - DNA, 25 bp, Homo sapien
taggaggaccccacaatttcatgac

SEQ ID NO: 1674443 - DNA, 25 bp, Homo sapien
gaccctgatggaagcaaactggcaa

SEQ ID NO: 1674444 - DNA, 25 bp, Homo sapien
tatgcttacctggagcaaaagctgc

SEQ ID NO: 1674445 - DNA, 25 bp, Homo sapien
tgaacctagtccctgctgagatatg

SEQ ID NO: 1674446 - DNA, 25 bp, Homo sapien
aaatagtactcttaggatctgcaca

SEQ ID NO: 1674447 - DNA, 25 bp, Homo sapien
gattcagacgtcaaacaagggaggg

SEQ ID NO: 1674448 - DNA, 25 bp, Homo sapien
caccttcaaagactagcacaactgg

SEQ ID NO: 1674449 - DNA, 25 bp, Homo sapien
gcaaccagttgccagagtccattct

SEQ ID NO: 1674450 - DNA, 25 bp, Homo sapien
aaactatatttccagacttgtagat

SEQ ID NO: 1674451 - DNA, 25 bp, Homo sapien
tgcacaaactatatttccagacttg

SEQ ID NO: 1674452 - DNA, 25 bp, Homo sapien
acaaactatatttccagacttgtag

SEQ ID NO: 1674453 - DNA, 25 bp, Homo sapien
gcacaaactatatttccagacttgt

SEQ ID NO: 1674454 - DNA, 25 bp, Homo sapien
cacaaacctttcctatagaaaagag

SEQ ID NO: 1674455 - DNA, 25 bp, Homo sapien
aagcagaagcatgtattggaatact

SEQ ID NO: 1674456 - DNA, 25 bp, Homo sapien
ttaaacttcatactggagcttagaa

SEQ ID NO: 1674457 - DNA, 25 bp, Homo sapien
gagaatgcgtcttataccctgtcct

SEQ ID NO: 1674458 - DNA, 25 bp, Homo sapien
tggatgccttcaggtagccagagac

SEQ ID NO: 1674459 - DNA, 25 bp, Homo sapien
gccagagacatgtccacagagagaa

SEQ ID NO: 1674460 - DNA, 25 bp, Homo sapien
tcaggtagccagagacatgtccaca

SEQ ID NO: 1674461 - DNA, 25 bp, Homo sapien
gttttttcacatgctggatgccttc

SEQ ID NO: 1674462 - DNA, 25 bp, Homo sapien
cagttaatgatagaaataaggaaag

SEQ ID NO: 1674463 - DNA, 25 bp, Homo sapien
tcttctctaaaaagacctatagtat

SEQ ID NO: 1674464 - DNA, 25 bp, Homo sapien
cctatagtatttcactgacaactac

SEQ ID NO: 1674465 - DNA, 25 bp, Homo sapien
tgaataatgaatgttgagaagactg

SEQ ID NO: 1674466 - DNA, 25 bp, Homo sapien
tcaggtattacaatgctagcggaaa

SEQ ID NO: 1674467 - DNA, 25 bp, Homo sapien
gaaaatgtcaggtattacaatgcta

SEQ ID NO: 1674468 - DNA, 25 bp, Homo sapien
tattacaatgctagcggaaaactcc

SEQ ID NO: 1674469 - DNA, 25 bp, Homo sapien
aatgtcaggtattacaatgctagcg

SEQ ID NO: 1674470 - DNA, 25 bp, Homo sapien
tagacatctgggtagtgactcaaga

SEQ ID NO: 1674471 - DNA, 25 bp, Homo sapien
tcaagatataagagtcagcaggtct

SEQ ID NO: 1674472 - DNA, 25 bp, Homo sapien
cagcaggtctgatcctcatcaccat

SEQ ID NO: 1674473 - DNA, 25 bp, Homo sapien
cacagtccatgcagattccacaatg

SEQ ID NO: 1674474 - DNA, 25 bp, Homo sapien
atacccacgattccaccttctgata

SEQ ID NO: 1674475 - DNA, 25 bp, Homo sapien
cttctgatataaaccgtttgtcagc

SEQ ID NO: 1674476 - DNA, 25 bp, Homo sapien
tttaggacctgccacatcgaccata

SEQ ID NO: 1674477 - DNA, 25 bp, Homo sapien
ccaatttatgtttaggacctgccac

SEQ ID NO: 1674478 - DNA, 25 bp, Homo sapien
caatctcttgcaatccctcgtttat

SEQ ID NO: 1674479 - DNA, 25 bp, Homo sapien
ggtttcctgtgtcttcagcgaaata

SEQ ID NO: 1674480 - DNA, 25 bp, Homo sapien
aaatagggtttcctgtgtcttcagc

SEQ ID NO: 1674481 - DNA, 25 bp, Homo sapien
gcaatccctcgtttatacaaaatag

SEQ ID NO: 1674482 - DNA, 25 bp, Homo sapien
tcatcttgctgtgaccggtaaccaa

SEQ ID NO: 1674483 - DNA, 25 bp, Homo sapien
gactcaaatgatatcaagctcctga

SEQ ID NO: 1674484 - DNA, 25 bp, Homo sapien
caaataggtagcactgtttcaagga

SEQ ID NO: 1674485 - DNA, 25 bp, Homo sapien
tgcctagttactgagccatgctgtt

SEQ ID NO: 1674486 - DNA, 25 bp, Homo sapien
tggtgctgagacaatacaaacagtc

SEQ ID NO: 1674487 - DNA, 25 bp, Homo sapien
tagaaactgccctgaatagcacaga

SEQ ID NO: 1674488 - DNA, 25 bp, Homo sapien
gaacattcttgtctgttcttggtgc

SEQ ID NO: 1674489 - DNA, 25 bp, Homo sapien
cccacgacttttgtgtagcttcaag

SEQ ID NO: 1674490 - DNA, 25 bp, Homo sapien
tttgggaaaatacaatgttctgcag

SEQ ID NO: 1674491 - DNA, 25 bp, Homo sapien
taggcaacagtgcaaaggtagtgag

SEQ ID NO: 1674492 - DNA, 25 bp, Homo sapien
catcagggttcctcatgctttggga

SEQ ID NO: 1674493 - DNA, 25 bp, Homo sapien
aataggcaacagtgcaaaggtagtg

SEQ ID NO: 1674494 - DNA, 25 bp, Homo sapien
taatctttgttatggtaaagtctcc

SEQ ID NO: 1674495 - DNA, 25 bp, Homo sapien
tgaagacgatattttactacagaag

SEQ ID NO: 1674496 - DNA, 25 bp, Homo sapien
tctggtttattgtgatgtagctggg

SEQ ID NO: 1674497 - DNA, 25 bp, Homo sapien
gggatctgcaaccttatcaacgaac

SEQ ID NO: 1674498 - DNA, 25 bp, Homo sapien
tctgttcttgccctcgtatgtcttc

SEQ ID NO: 1674499 - DNA, 25 bp, Homo sapien
tccaatctaggggaatctttcctct

SEQ ID NO: 1674500 - DNA, 25 bp, Homo sapien
tctgcttaagacttttcgctcttcc

SEQ ID NO: 1674501 - DNA, 25 bp, Homo sapien
ttggtgctgcttccaatctagggga

SEQ ID NO: 1674502 - DNA, 25 bp, Homo sapien
tggaacagtattgctaattcagtac

SEQ ID NO: 1674503 - DNA, 25 bp, Homo sapien
ttcctcaaggagcaatggaacagta

SEQ ID NO: 1674504 - DNA, 25 bp, Homo sapien
aaatatgttgtgaccagaagcttgc

SEQ ID NO: 1674505 - DNA, 25 bp, Homo sapien
tgcaggaccctagcactgtatttcc

SEQ ID NO: 1674506 - DNA, 25 bp, Homo sapien
agtgagacggtcactgccttcacta

SEQ ID NO: 1674507 - DNA, 25 bp, Homo sapien
cctagagcaggttccctgtgctcac

SEQ ID NO: 1674508 - DNA, 25 bp, Homo sapien
cacagtgagacggtcactgccttca

SEQ ID NO: 1674509 - DNA, 25 bp, Homo sapien
aggttccctgtgctcacacagtgag

SEQ ID NO: 1674510 - DNA, 25 bp, Homo sapien
catcctggacaattctttctaaagc

SEQ ID NO: 1674511 - DNA, 25 bp, Homo sapien
atcctggacaattctttctaaagcc

SEQ ID NO: 1674512 - DNA, 25 bp, Homo sapien
tcaggaatttcatcaagagttgtca

SEQ ID NO: 1674513 - DNA, 25 bp, Homo sapien
catttctctggttcgtgctggattc

SEQ ID NO: 1674514 - DNA, 25 bp, Homo sapien
ggttcgtgctggattcctgaacagg

SEQ ID NO: 1674515 - DNA, 25 bp, Homo sapien
cctgaacaggagatcctcaggaatt

SEQ ID NO: 1674516 - DNA, 25 bp, Homo sapien
caagtcttcctgggacctaaagtga

SEQ ID NO: 1674517 - DNA, 25 bp, Homo sapien
tcagcttggcttggccacgactcta

SEQ ID NO: 1674518 - DNA, 25 bp, Homo sapien
gcattctgcgaggaaccaaagagat

SEQ ID NO: 1674519 - DNA, 25 bp, Homo sapien
tccaatcacacctgcattctgcgag

SEQ ID NO: 1674520 - DNA, 25 bp, Homo sapien
catagggctcttttgtgattccagg

SEQ ID NO: 1674521 - DNA, 25 bp, Homo sapien
tttttaatctgcttggtaaagctcc

SEQ ID NO: 1674522 - DNA, 25 bp, Homo sapien
catgattcaagtttggcaggtgcct

SEQ ID NO: 1674523 - DNA, 25 bp, Homo sapien
tacttttccctacagcttaaagcag

SEQ ID NO: 1674524 - DNA, 25 bp, Homo sapien
ctaaaggagacaacgcttgggtcat

SEQ ID NO: 1674525 - DNA, 25 bp, Homo sapien
agtctttccttcacctaggaaagca

SEQ ID NO: 1674526 - DNA, 25 bp, Homo sapien
ttcacctaggaaagcactgatttga

SEQ ID NO: 1674527 - DNA, 25 bp, Homo sapien
gaaagcactgatttgataaactgtc

SEQ ID NO: 1674528 - DNA, 25 bp, Homo sapien
tttccttcacctaggaaagcactga

SEQ ID NO: 1674529 - DNA, 25 bp, Homo sapien
gatacatcagcaggtccttggtgct

SEQ ID NO: 1674530 - DNA, 25 bp, Homo sapien
tgccaaaactcttgactacagacac

SEQ ID NO: 1674531 - DNA, 25 bp, Homo sapien
atacatcagcaggtccttggtgctc

SEQ ID NO: 1674532 - DNA, 25 bp, Homo sapien
aactcttgactacagacacactcac

SEQ ID NO: 1674533 - DNA, 25 bp, Homo sapien
gctggtttctctgcattttagcagc

SEQ ID NO: 1674534 - DNA, 25 bp, Homo sapien
ctctgctggtttctctgcattttag

SEQ ID NO: 1674535 - DNA, 25 bp, Homo sapien
tgctggtttctctgcattttagcag

SEQ ID NO: 1674536 - DNA, 25 bp, Homo sapien
ggtttctctgcattttagcagccat

SEQ ID NO: 1674537 - DNA, 25 bp, Homo sapien
ggttcctaactgagaccctgtggta

SEQ ID NO: 1674538 - DNA, 25 bp, Homo sapien
gcttggcttcttagtggcctgccag

SEQ ID NO: 1674539 - DNA, 25 bp, Homo sapien
gagccacctcctttcgagttttgaa

SEQ ID NO: 1674540 - DNA, 25 bp, Homo sapien
cctgaggattgcgaggctgcttttc

SEQ ID NO: 1674541 - DNA, 25 bp, Homo sapien
cattccgatagcttctctctaaggt

SEQ ID NO: 1674542 - DNA, 25 bp, Homo sapien
cagcaaatcattccgatagcttctc

SEQ ID NO: 1674543 - DNA, 25 bp, Homo sapien
gcaaatcattccgatagcttctctc

SEQ ID NO: 1674544 - DNA, 25 bp, Homo sapien
atagcttctctctaaggttgaatct

SEQ ID NO: 1674545 - DNA, 25 bp, Homo sapien
tgaatccatagcataatccatcata

SEQ ID NO: 1674546 - DNA, 25 bp, Homo sapien
cctcctgaatccatagcataatcca

SEQ ID NO: 1674547 - DNA, 25 bp, Homo sapien
taatattagatgctctgtatatgtc

SEQ ID NO: 1674548 - DNA, 25 bp, Homo sapien
gctctgtatatgtcttggaagtaga

SEQ ID NO: 1674549 - DNA, 25 bp, Homo sapien
tctccccatgggaagcacataatcc

SEQ ID NO: 1674550 - DNA, 25 bp, Homo sapien
tcatccatgcgacttgagtgggctc

SEQ ID NO: 1674551 - DNA, 25 bp, Homo sapien
acataatcccattagaggccacggg

SEQ ID NO: 1674552 - DNA, 25 bp, Homo sapien
gcagatcaactcttcttcaggctca

SEQ ID NO: 1674553 - DNA, 25 bp, Homo sapien
cattcttgatgattgcatccagagc

SEQ ID NO: 1674554 - DNA, 25 bp, Homo sapien
cttgatgattgcatccagagctcac

SEQ ID NO: 1674555 - DNA, 25 bp, Homo sapien
tcattcttgatgattgcatccagag

SEQ ID NO: 1674556 - DNA, 25 bp, Homo sapien
ttcttgatgattgcatccagagctc

SEQ ID NO: 1674557 - DNA, 25 bp, Homo sapien
gaattgctcccaatgtataaaccag

SEQ ID NO: 1674558 - DNA, 25 bp, Homo sapien
tataaaccagtgcaaagactccctt

SEQ ID NO: 1674559 - DNA, 25 bp, Homo sapien
tttccaggtgcccatcgtcatccag

SEQ ID NO: 1674560 - DNA, 25 bp, Homo sapien
cgtcatccagatctggaattgctcc

SEQ ID NO: 1674561 - DNA, 25 bp, Homo sapien
aatccaggaaatggagacggtggac

SEQ ID NO: 1674562 - DNA, 25 bp, Homo sapien
ggataaagcactccacaagtccagt

SEQ ID NO: 1674563 - DNA, 25 bp, Homo sapien
acaacaggagacctccgtgggctga

SEQ ID NO: 1674564 - DNA, 25 bp, Homo sapien
ttcagactccttggcaagcttgcct

SEQ ID NO: 1674565 - DNA, 25 bp, Homo sapien
ttgctgatccttctgtttggttgat

SEQ ID NO: 1674566 - DNA, 25 bp, Homo sapien
tgaagagatctgtgaaatctttcat

SEQ ID NO: 1674567 - DNA, 25 bp, Homo sapien
ttggttgatttcaccctccaggatt

SEQ ID NO: 1674568 - DNA, 25 bp, Homo sapien
ccaggattttcatcaattttatgaa

SEQ ID NO: 1674569 - DNA, 25 bp, Homo sapien
gaacttcttctggttacccatgaga

SEQ ID NO: 1674570 - DNA, 25 bp, Homo sapien
tagttaccaccactcttcctcagcg

SEQ ID NO: 1674571 - DNA, 25 bp, Homo sapien
cactcttcctcagcgatgtggtggg

SEQ ID NO: 1674572 - DNA, 25 bp, Homo sapien
cagcgatgtggtgggatagaacttc

SEQ ID NO: 1674573 - DNA, 25 bp, Homo sapien
ctccaagaaggtcacaatgagatta

SEQ ID NO: 1674574 - DNA, 25 bp, Homo sapien
caagaaggtcacaatgagattaggg

SEQ ID NO: 1674575 - DNA, 25 bp, Homo sapien
gggatttaaatagtgtgagagcagt

SEQ ID NO: 1674576 - DNA, 25 bp, Homo sapien
ttaaatagtgtgagagcagttcctg

SEQ ID NO: 1674577 - DNA, 25 bp, Homo sapien
caggtaacaatgacgcttggctcta

SEQ ID NO: 1674578 - DNA, 25 bp, Homo sapien
aataggctggcggtaaaatgagaca

SEQ ID NO: 1674579 - DNA, 25 bp, Homo sapien
gacgcttggctctaaataggctggc

SEQ ID NO: 1674580 - DNA, 25 bp, Homo sapien
gaggatcaagatccaggtaacaatg

SEQ ID NO: 1674581 - DNA, 25 bp, Homo sapien
tcattttgctctgagacattcaaag

SEQ ID NO: 1674582 - DNA, 25 bp, Homo sapien
gactcattttgctctgagacattca

SEQ ID NO: 1674583 - DNA, 25 bp, Homo sapien
ttttgctctgagacattcaaagagc

SEQ ID NO: 1674584 - DNA, 25 bp, Homo sapien
ctgactcattttgctctgagacatt

SEQ ID NO: 1674585 - DNA, 25 bp, Homo sapien
gagcatttatgctgattcgatttat

SEQ ID NO: 1674586 - DNA, 25 bp, Homo sapien
ctggaaattgtatagtcttgagcat

SEQ ID NO: 1674587 - DNA, 25 bp, Homo sapien
ttctggaaattgtatagtcttgagc

SEQ ID NO: 1674588 - DNA, 25 bp, Homo sapien
atttctggaaattgtatagtcttga

SEQ ID NO: 1674589 - DNA, 25 bp, Homo sapien
ccttcctcattaggctcgtagatac

SEQ ID NO: 1674590 - DNA, 25 bp, Homo sapien
ttcaccttcctcattaggctcgtag

SEQ ID NO: 1674591 - DNA, 25 bp, Homo sapien
taggctcgtagatacctaatatgta

SEQ ID NO: 1674592 - DNA, 25 bp, Homo sapien
cctcattaggctcgtagatacctaa

SEQ ID NO: 1674593 - DNA, 25 bp, Homo sapien
ggaaatagcacttgtgcttcttatt

SEQ ID NO: 1674594 - DNA, 25 bp, Homo sapien
tgtatggttccgaactgggcagcct

SEQ ID NO: 1674595 - DNA, 25 bp, Homo sapien
ccgcaagcgagagccaaattggcct

SEQ ID NO: 1674596 - DNA, 25 bp, Homo sapien
catctgtgccgtaagctttgagtgg

SEQ ID NO: 1674597 - DNA, 25 bp, Homo sapien
gtgaggacctagagggtcaacaggg

SEQ ID NO: 1674598 - DNA, 25 bp, Homo sapien
tatgcccatgtaacctttgcaccat

SEQ ID NO: 1674599 - DNA, 25 bp, Homo sapien
ccattttaatggtcttatgcccatg

SEQ ID NO: 1674600 - DNA, 25 bp, Homo sapien
tagagggtcaacaggggccatatcc

SEQ ID NO: 1674601 - DNA, 25 bp, Homo sapien
tgaaagtgatatgaacagatgctgt

SEQ ID NO: 1674602 - DNA, 25 bp, Homo sapien
ctttgccatgtaggatgaacgggaa

SEQ ID NO: 1674603 - DNA, 25 bp, Homo sapien
gaaatctttctaggggcaatttctg

SEQ ID NO: 1674604 - DNA, 25 bp, Homo sapien
tgttggagcaaaggcgaaggaggaa

SEQ ID NO: 1674605 - DNA, 25 bp, Homo sapien
cactagagtttgctctaacgcagta

SEQ ID NO: 1674606 - DNA, 25 bp, Homo sapien
tagagtttgctctaacgcagtagga

SEQ ID NO: 1674607 - DNA, 25 bp, Homo sapien
ttgctctaacgcagtaggacagcat

SEQ ID NO: 1674608 - DNA, 25 bp, Homo sapien
agtttgctctaacgcagtaggacag

SEQ ID NO: 1674609 - DNA, 25 bp, Homo sapien
gaaagaaatctttccccaagagcat

SEQ ID NO: 1674610 - DNA, 25 bp, Homo sapien
ggaaagaaatctttccccaagagca

SEQ ID NO: 1674611 - DNA, 25 bp, Homo sapien
ctactaggtcgtttaaatatatggg

SEQ ID NO: 1674612 - DNA, 25 bp, Homo sapien
aatcattaaatcattcataagaggg

SEQ ID NO: 1674613 - DNA, 25 bp, Homo sapien
gtaatttggagagttccttgaacaa

SEQ ID NO: 1674614 - DNA, 25 bp, Homo sapien
caataaatagcttacattctggtca

SEQ ID NO: 1674615 - DNA, 25 bp, Homo sapien
ggcttccaacttattgatgaaaact

SEQ ID NO: 1674616 - DNA, 25 bp, Homo sapien
agaaaccaaggcttccaacttattg

SEQ ID NO: 1674617 - DNA, 25 bp, Homo sapien
ggatagaatactaacctgagaaacc

SEQ ID NO: 1674618 - DNA, 25 bp, Homo sapien
ccaaggcttccaacttattgatgaa

SEQ ID NO: 1674619 - DNA, 25 bp, Homo sapien
gatggacatcaataaagtgatcggc

SEQ ID NO: 1674620 - DNA, 25 bp, Homo sapien
tcaataaagtgatcggctggatcat

SEQ ID NO: 1674621 - DNA, 25 bp, Homo sapien
caagctgtatggattatgtttaatg

SEQ ID NO: 1674622 - DNA, 25 bp, Homo sapien
taccaaggggaagtccatacaagct

SEQ ID NO: 1674623 - DNA, 25 bp, Homo sapien
gttctcatagagtcgttcagggcca

SEQ ID NO: 1674624 - DNA, 25 bp, Homo sapien
ccattttgcagtagccctggcgttg

SEQ ID NO: 1674625 - DNA, 25 bp, Homo sapien
ccctggtgttgaactccattttgca

SEQ ID NO: 1674626 - DNA, 25 bp, Homo sapien
agaaggctccagtgtcaatctcccg

SEQ ID NO: 1674627 - DNA, 25 bp, Homo sapien
ataaatttaatctgtcttctggcca

SEQ ID NO: 1674628 - DNA, 25 bp, Homo sapien
aaatttaatctgtcttctggccaat

SEQ ID NO: 1674629 - DNA, 25 bp, Homo sapien
taatctgtcttctggccaatttatc

SEQ ID NO: 1674630 - DNA, 25 bp, Homo sapien
ctgtcttctggccaatttatctcca

SEQ ID NO: 1674631 - DNA, 25 bp, Homo sapien
tgtttaccctctttatcaagggcca

SEQ ID NO: 1674632 - DNA, 25 bp, Homo sapien
tgtgtttaccctctttatcaagggc

SEQ ID NO: 1674633 - DNA, 25 bp, Homo sapien
tactctttcattggcatatgtactt

SEQ ID NO: 1674634 - DNA, 25 bp, Homo sapien
gagtctgatgatactctttcattgg

SEQ ID NO: 1674635 - DNA, 25 bp, Homo sapien
tctgatgatactctttcattggcat

SEQ ID NO: 1674636 - DNA, 25 bp, Homo sapien
cctctcaagttcatggcactgagct

SEQ ID NO: 1674637 - DNA, 25 bp, Homo sapien
ttcccaccagcatgttctgattaaa

SEQ ID NO: 1674638 - DNA, 25 bp, Homo sapien
attaaaagccagacctgtggccttc

SEQ ID NO: 1674639 - DNA, 25 bp, Homo sapien
ccaccagcatgttctgattaaaagc

SEQ ID NO: 1674640 - DNA, 25 bp, Homo sapien
tgattaaaagccagacctgtggcct

SEQ ID NO: 1674641 - DNA, 25 bp, Homo sapien
atttcctctctgtggtgcttagcca

SEQ ID NO: 1674642 - DNA, 25 bp, Homo sapien
tcagctttctaaaggctagctgtga

SEQ ID NO: 1674643 - DNA, 25 bp, Homo sapien
tccttcatttcctaacagatttcct

SEQ ID NO: 1674644 - DNA, 25 bp, Homo sapien
gctagctgtgatttgtgtaaggttt

SEQ ID NO: 1674645 - DNA, 25 bp, Homo sapien
gaatagatattacctcctcgtccca

SEQ ID NO: 1674646 - DNA, 25 bp, Homo sapien
tttggaatagatattacctcctcgt

SEQ ID NO: 1674647 - DNA, 25 bp, Homo sapien
aatagatattacctcctcgtcccat

SEQ ID NO: 1674648 - DNA, 25 bp, Homo sapien
tggaatagatattacctcctcgtcc

SEQ ID NO: 1674649 - DNA, 25 bp, Homo sapien
ttgttcttacgtccccttcctcaca

SEQ ID NO: 1674650 - DNA, 25 bp, Homo sapien
caagatggctcatgatggccagaac

SEQ ID NO: 1674651 - DNA, 25 bp, Homo sapien
ctaggcagcgccttcagatctatct

SEQ ID NO: 1674652 - DNA, 25 bp, Homo sapien
cctcacaatgcccaagatggctcat

SEQ ID NO: 1674653 - DNA, 25 bp, Homo sapien
ccccaaagaccactgtgccattctt

SEQ ID NO: 1674654 - DNA, 25 bp, Homo sapien
acatttgagtgagactacacgatgt

SEQ ID NO: 1674655 - DNA, 25 bp, Homo sapien
cccaaagaccactgtgccattctta

SEQ ID NO: 1674656 - DNA, 25 bp, Homo sapien
atttgagtgagactacacgatgttt

SEQ ID NO: 1674657 - DNA, 25 bp, Homo sapien
ttaactgacgcacgggggcacgaca

SEQ ID NO: 1674658 - DNA, 25 bp, Homo sapien
gtgtggggctgggaactggtgttca

SEQ ID NO: 1674659 - DNA, 25 bp, Homo sapien
cagggttaactgacgcacgggggca

SEQ ID NO: 1674660 - DNA, 25 bp, Homo sapien
tgctgcttagcagctacagtgtggg

SEQ ID NO: 1674661 - DNA, 25 bp, Homo sapien
ggagtcctgttacgcgtccacactg

SEQ ID NO: 1674662 - DNA, 25 bp, Homo sapien
tgttgttgactgaccgaagggaccc

SEQ ID NO: 1674663 - DNA, 25 bp, Homo sapien
ggaccccaactgctgggcttggaac

SEQ ID NO: 1674664 - DNA, 25 bp, Homo sapien
tgttggagactccactgtgggccca

SEQ ID NO: 1674665 - DNA, 25 bp, Homo sapien
ggtgcccagtgcatcactaggctca

SEQ ID NO: 1674666 - DNA, 25 bp, Homo sapien
tcttcagatgtccatccatggtgcc

SEQ ID NO: 1674667 - DNA, 25 bp, Homo sapien
ggctcacagtcaatgccccaggaat

SEQ ID NO: 1674668 - DNA, 25 bp, Homo sapien
gaatcttggaaatgaccgaatgccg

SEQ ID NO: 1674669 - DNA, 25 bp, Homo sapien
aaattccttgcaatattctccctaa

SEQ ID NO: 1674670 - DNA, 25 bp, Homo sapien
taaaattccttgcaatattctccct

SEQ ID NO: 1674671 - DNA, 25 bp, Homo sapien
aaaattccttgcaatattctcccta

SEQ ID NO: 1674672 - DNA, 25 bp, Homo sapien
aattccttgcaatattctccctaaa

SEQ ID NO: 1674673 - DNA, 25 bp, Homo sapien
ccatgttctcctcaaatagtctcag

SEQ ID NO: 1674674 - DNA, 25 bp, Homo sapien
tttgaggaacagttaggcagtggac

SEQ ID NO: 1674675 - DNA, 25 bp, Homo sapien
ttgaggaacagttaggcagtggact

SEQ ID NO: 1674676 - DNA, 25 bp, Homo sapien
ccaaatggaatgaagatctccatgt

SEQ ID NO: 1674677 - DNA, 25 bp, Homo sapien
tgactgtgtccagcgtcctgtactt

SEQ ID NO: 1674678 - DNA, 25 bp, Homo sapien
ctccattgactgtgtccagcgtcct

SEQ ID NO: 1674679 - DNA, 25 bp, Homo sapien
cattgactgtgtccagcgtcctgta

SEQ ID NO: 1674680 - DNA, 25 bp, Homo sapien
tgtgtccagcgtcctgtacttttta

SEQ ID NO: 1674681 - DNA, 25 bp, Homo sapien
cgttgctcctttgttgactgaggca

SEQ ID NO: 1674682 - DNA, 25 bp, Homo sapien
gctgtctggcttggtgattccctga

SEQ ID NO: 1674683 - DNA, 25 bp, Homo sapien
tagctgctgtctggcttggtgattc

SEQ ID NO: 1674684 - DNA, 25 bp, Homo sapien
gactgctcaatccattgtccctttg

SEQ ID NO: 1674685 - DNA, 25 bp, Homo sapien
tgggtggccacgtgcattgtcaata

SEQ ID NO: 1674686 - DNA, 25 bp, Homo sapien
tctccatcatggctcttgggtggcc

SEQ ID NO: 1674687 - DNA, 25 bp, Homo sapien
tttgaccaaggagcataaggcagag

SEQ ID NO: 1674688 - DNA, 25 bp, Homo sapien
gagcccagcaagagtagatgtagca

SEQ ID NO: 1674689 - DNA, 25 bp, Homo sapien
caaaatgatctgctgtggtcccttc

SEQ ID NO: 1674690 - DNA, 25 bp, Homo sapien
ctgtttttatctttggtgggcctgc

SEQ ID NO: 1674691 - DNA, 25 bp, Homo sapien
cttccaagacctccatgcgaatgca

SEQ ID NO: 1674692 - DNA, 25 bp, Homo sapien
ctttggtgggcctgctacacagcct

SEQ ID NO: 1674693 - DNA, 25 bp, Homo sapien
tcacggcagcataatacggaagcct

SEQ ID NO: 1674694 - DNA, 25 bp, Homo sapien
tcagacgaatactgctattgggcat

SEQ ID NO: 1674695 - DNA, 25 bp, Homo sapien
gattctgtttgatagtcccataggt

SEQ ID NO: 1674696 - DNA, 25 bp, Homo sapien
cccataggtgtttgccactaggaaa

SEQ ID NO: 1674697 - DNA, 25 bp, Homo sapien
tctattgggcttttgttaaagtgtc

SEQ ID NO: 1674698 - DNA, 25 bp, Homo sapien
ctattgggcttttgttaaagtgtct

SEQ ID NO: 1674699 - DNA, 25 bp, Homo sapien
ggcttttgttaaagtgtcttcctgc

SEQ ID NO: 1674700 - DNA, 25 bp, Homo sapien
cttttgttaaagtgtcttcctgctt

SEQ ID NO: 1674701 - DNA, 25 bp, Homo sapien
tacaatattccaagagtttaggtcc

SEQ ID NO: 1674702 - DNA, 25 bp, Homo sapien
tttaggtccacaaacaaactcttca

SEQ ID NO: 1674703 - DNA, 25 bp, Homo sapien
ttaggtccacaaacaaactcttcat

SEQ ID NO: 1674704 - DNA, 25 bp, Homo sapien
tccaagagtttaggtccacaaacaa

SEQ ID NO: 1674705 - DNA, 25 bp, Homo sapien
gaaaccctcaacacaaagagtagct

SEQ ID NO: 1674706 - DNA, 25 bp, Homo sapien
aaaccctcaacacaaagagtagctt

SEQ ID NO: 1674707 - DNA, 25 bp, Homo sapien
accctcaacacaaagagtagcttct

SEQ ID NO: 1674708 - DNA, 25 bp, Homo sapien
ccctcaacacaaagagtagcttctg

SEQ ID NO: 1674709 - DNA, 25 bp, Homo sapien
ctctgctagaacctgcctgttacta

SEQ ID NO: 1674710 - DNA, 25 bp, Homo sapien
ctgctagaacctgcctgttactata

SEQ ID NO: 1674711 - DNA, 25 bp, Homo sapien
gctagaacctgcctgttactatata

SEQ ID NO: 1674712 - DNA, 25 bp, Homo sapien
ctagaacctgcctgttactatatag

SEQ ID NO: 1674713 - DNA, 25 bp, Homo sapien
atgctgagactggatgatcacagac

SEQ ID NO: 1674714 - DNA, 25 bp, Homo sapien
tgctgagactggatgatcacagaca

SEQ ID NO: 1674715 - DNA, 25 bp, Homo sapien
ctctttgcgttgtcagaagttggaa

SEQ ID NO: 1674716 - DNA, 25 bp, Homo sapien
tttgcgttgtcagaagttggaaaga

SEQ ID NO: 1674717 - DNA, 25 bp, Homo sapien
cattctgattcagcccagagagtga

SEQ ID NO: 1674718 - DNA, 25 bp, Homo sapien
gtggacagatctgttgcactcagat

SEQ ID NO: 1674719 - DNA, 25 bp, Homo sapien
cagagagtgaagagttaatgtcccc

SEQ ID NO: 1674720 - DNA, 25 bp, Homo sapien
tcctcctccgtgcacttgaagtctt

SEQ ID NO: 1674721 - DNA, 25 bp, Homo sapien
catcagagattcctgccggtgtctc

SEQ ID NO: 1674722 - DNA, 25 bp, Homo sapien
tggtcctctggggatgtttgatagc

SEQ ID NO: 1674723 - DNA, 25 bp, Homo sapien
gagaagctgcgacatcagagattcc

SEQ ID NO: 1674724 - DNA, 25 bp, Homo sapien
gatggcaggagaagctgcgacatca

SEQ ID NO: 1674725 - DNA, 25 bp, Homo sapien
aatatccacatttgcatttagtttt

SEQ ID NO: 1674726 - DNA, 25 bp, Homo sapien
atatccacatttgcatttagttttg

SEQ ID NO: 1674727 - DNA, 25 bp, Homo sapien
taagtgctcggtactgggctaggac

SEQ ID NO: 1674728 - DNA, 25 bp, Homo sapien
aatccatgtcaggagaaaccttcag

SEQ ID NO: 1674729 - DNA, 25 bp, Homo sapien
gatgcgtttctgatccaagctgctg

SEQ ID NO: 1674730 - DNA, 25 bp, Homo sapien
ggatcttccttgactacatctgagg

SEQ ID NO: 1674731 - DNA, 25 bp, Homo sapien
tccagccggagctgtgactatttaa

SEQ ID NO: 1674732 - DNA, 25 bp, Homo sapien
cagccggagctgtgactatttaatc

SEQ ID NO: 1674733 - DNA, 25 bp, Homo sapien
ccagccggagctgtgactatttaat

SEQ ID NO: 1674734 - DNA, 25 bp, Homo sapien
gccggagctgtgactatttaatctc

SEQ ID NO: 1674735 - DNA, 25 bp, Homo sapien
cttcctggactgcactaacaaaggc

SEQ ID NO: 1674736 - DNA, 25 bp, Homo sapien
cctgtttcgggaaactctcgacact

SEQ ID NO: 1674737 - DNA, 25 bp, Homo sapien
ttcctggactgcactaacaaaggcc

SEQ ID NO: 1674738 - DNA, 25 bp, Homo sapien
aaactctcgacactttcctctgtgt

SEQ ID NO: 1674739 - DNA, 25 bp, Homo sapien
caaatgttaaatccctcaatgtgag

SEQ ID NO: 1674740 - DNA, 25 bp, Homo sapien
catctagttagaaaacctgttgcca

SEQ ID NO: 1674741 - DNA, 25 bp, Homo sapien
ttttctggaaatgacacttgcaagg

SEQ ID NO: 1674742 - DNA, 25 bp, Homo sapien
gaggtttgactatccggtagtgcca

SEQ ID NO: 1674743 - DNA, 25 bp, Homo sapien
tggaaattgagaggtactcctactc

SEQ ID NO: 1674744 - DNA, 25 bp, Homo sapien
aacagttggaaattgagaggtactc

SEQ ID NO: 1674745 - DNA, 25 bp, Homo sapien
ttgagaggtactcctactcctgagc

SEQ ID NO: 1674746 - DNA, 25 bp, Homo sapien
gaaattgagaggtactcctactcct

SEQ ID NO: 1674747 - DNA, 25 bp, Homo sapien
caacctcttccaagacaactttgat

SEQ ID NO: 1674748 - DNA, 25 bp, Homo sapien
gggagtttcatgttttctttagatg

SEQ ID NO: 1674749 - DNA, 25 bp, Homo sapien
tctttagatgtcattagctgttcaa

SEQ ID NO: 1674750 - DNA, 25 bp, Homo sapien
aacagtgtctttcaggctgctgagg

SEQ ID NO: 1674751 - DNA, 25 bp, Homo sapien
caaagaagtgtcgtggaaagtgttg

SEQ ID NO: 1674752 - DNA, 25 bp, Homo sapien
gaattcctcatggaaggcgaatctc

SEQ ID NO: 1674753 - DNA, 25 bp, Homo sapien
gacagtgcaaaaagagacttgacgg

SEQ ID NO: 1674754 - DNA, 25 bp, Homo sapien
ctcatggaaggcgaatctcagaggg

SEQ ID NO: 1674755 - DNA, 25 bp, Homo sapien
tgacagccggggtgtctgaataacc

SEQ ID NO: 1674756 - DNA, 25 bp, Homo sapien
cggggtgtctgaataaccctggtga

SEQ ID NO: 1674757 - DNA, 25 bp, Homo sapien
cagccggggtgtctgaataaccctg

SEQ ID NO: 1674758 - DNA, 25 bp, Homo sapien
gaccctgacagccggggtgtctgaa

SEQ ID NO: 1674759 - DNA, 25 bp, Homo sapien
gcggcgcccatggactcttagaaaa

SEQ ID NO: 1674760 - DNA, 25 bp, Homo sapien
ttttccgtacagcaacatggcggcg

SEQ ID NO: 1674761 - DNA, 25 bp, Homo sapien
agactggcacgacccctaaagttag

SEQ ID NO: 1674762 - DNA, 25 bp, Homo sapien
gccagtgtggccgtctctacgaaga

SEQ ID NO: 1674763 - DNA, 25 bp, Homo sapien
gcggtcatcaaaacaccaggtcctt

SEQ ID NO: 1674764 - DNA, 25 bp, Homo sapien
ggaccgaatttctgtaaaccgtgca

SEQ ID NO: 1674765 - DNA, 25 bp, Homo sapien
gaatttgaaattctccgccggcgct

SEQ ID NO: 1674766 - DNA, 25 bp, Homo sapien
tctgctagacaggacagcggtcatc

SEQ ID NO: 1674767 - DNA, 25 bp, Homo sapien
caaacaccaaaacatcgcctcagga

SEQ ID NO: 1674768 - DNA, 25 bp, Homo sapien
gttttggcctcgaggcttctcccaa

SEQ ID NO: 1674769 - DNA, 25 bp, Homo sapien
ttaatagatcccgtgaaaccagcgc

SEQ ID NO: 1674770 - DNA, 25 bp, Homo sapien
tctaaatttaagtcattggcgccat

SEQ ID NO: 1674771 - DNA, 25 bp, Homo sapien
tttacatcctgggatcttaactcct

SEQ ID NO: 1674772 - DNA, 25 bp, Homo sapien
tgaggggtatagaggccttgtttat

SEQ ID NO: 1674773 - DNA, 25 bp, Homo sapien
cgctggaaactgaactgcgcttcat

SEQ ID NO: 1674774 - DNA, 25 bp, Homo sapien
atcttaactcctgcatggagaggcg

SEQ ID NO: 1674775 - DNA, 25 bp, Homo sapien
ccaaatagcgagacttttctttcag

SEQ ID NO: 1674776 - DNA, 25 bp, Homo sapien
cttttgccaaatagcgagacttttc

SEQ ID NO: 1674777 - DNA, 25 bp, Homo sapien
gacttttctttcagatgtcggtttg

SEQ ID NO: 1674778 - DNA, 25 bp, Homo sapien
ttcagatgtcggtttgtttatactc

SEQ ID NO: 1674779 - DNA, 25 bp, Homo sapien
gaatgaatgctttgtcattaagtgg

SEQ ID NO: 1674780 - DNA, 25 bp, Homo sapien
tgactattccgggatccatgtccac

SEQ ID NO: 1674781 - DNA, 25 bp, Homo sapien
gaactggaaaatataccaagttgac

SEQ ID NO: 1674782 - DNA, 25 bp, Homo sapien
tggtctcgggtccttgattttctca

SEQ ID NO: 1674783 - DNA, 25 bp, Homo sapien
taaagaaatgtgaagatcttcagga

SEQ ID NO: 1674784 - DNA, 25 bp, Homo sapien
acagagggagcttgtagagatttca

SEQ ID NO: 1674785 - DNA, 25 bp, Homo sapien
tatgtgcataaccattttctgtaag

SEQ ID NO: 1674786 - DNA, 25 bp, Homo sapien
actttgtgtcaggaagttcgtatga

SEQ ID NO: 1674787 - DNA, 25 bp, Homo sapien
taaggctgccacaatgtgaggccat

SEQ ID NO: 1674788 - DNA, 25 bp, Homo sapien
acaatgtgaggccatgtatgaggag

SEQ ID NO: 1674789 - DNA, 25 bp, Homo sapien
cttgatgcagtctattagccaaact

SEQ ID NO: 1674790 - DNA, 25 bp, Homo sapien
tagccaaactaaggctgccacaatg

SEQ ID NO: 1674791 - DNA, 25 bp, Homo sapien
tgaaaaatgaaaactctgaagcaga

SEQ ID NO: 1674792 - DNA, 25 bp, Homo sapien
cttaaaatcaaatgtgctttgaaaa

SEQ ID NO: 1674793 - DNA, 25 bp, Homo sapien
aaccctttcccatgtatacatttca

SEQ ID NO: 1674794 - DNA, 25 bp, Homo sapien
gaatactgtcaaaagactgggagag

SEQ ID NO: 1674795 - DNA, 25 bp, Homo sapien
aagagagtctgttcatcatagtaac

SEQ ID NO: 1674796 - DNA, 25 bp, Homo sapien
caggaattagtatggtcatgaagca

SEQ ID NO: 1674797 - DNA, 25 bp, Homo sapien
tattgacaggatggaaatttcccct

SEQ ID NO: 1674798 - DNA, 25 bp, Homo sapien
taatttagagagtgaggatacgaca

SEQ ID NO: 1674799 - DNA, 25 bp, Homo sapien
caaataaaggtgagctttctttcat

SEQ ID NO: 1674800 - DNA, 25 bp, Homo sapien
cccatcatcaaataaaggtgagctt

SEQ ID NO: 1674801 - DNA, 25 bp, Homo sapien
tcaaataaaggtgagctttctttca

SEQ ID NO: 1674802 - DNA, 25 bp, Homo sapien
catcaaataaaggtgagctttcttt

SEQ ID NO: 1674803 - DNA, 25 bp, Homo sapien
caaagctgtcggcaccactcataaa

SEQ ID NO: 1674804 - DNA, 25 bp, Homo sapien
actctcatagcattttatggtgtag

SEQ ID NO: 1674805 - DNA, 25 bp, Homo sapien
cggcaccactcataaaactctcata

SEQ ID NO: 1674806 - DNA, 25 bp, Homo sapien
atctcatcaaagctgtcggcaccac

SEQ ID NO: 1674807 - DNA, 25 bp, Homo sapien
tttgcttctaatgattccagcttaa

SEQ ID NO: 1674808 - DNA, 25 bp, Homo sapien
tcttgttccaatcttgcaatctgtt

SEQ ID NO: 1674809 - DNA, 25 bp, Homo sapien
cttctaatgattccagcttaaaagc

SEQ ID NO: 1674810 - DNA, 25 bp, Homo sapien
gttccaatcttgcaatctgttcatt

SEQ ID NO: 1674811 - DNA, 25 bp, Homo sapien
gttttctcaacgactctagacgatt

SEQ ID NO: 1674812 - DNA, 25 bp, Homo sapien
tacttttgaacatctccttgtaagg

SEQ ID NO: 1674813 - DNA, 25 bp, Homo sapien
gcaatttcctcattgagaccattta

SEQ ID NO: 1674814 - DNA, 25 bp, Homo sapien
aattgctcatgtatgcctgatactt

SEQ ID NO: 1674815 - DNA, 25 bp, Homo sapien
caaatttttaatgtatcttcaattc

SEQ ID NO: 1674816 - DNA, 25 bp, Homo sapien
ccaaatttttaatgtatcttcaatt

SEQ ID NO: 1674817 - DNA, 25 bp, Homo sapien
accaaatttttaatgtatcttcaat

SEQ ID NO: 1674818 - DNA, 25 bp, Homo sapien
tgtctgcaactgagtacttctggtt

SEQ ID NO: 1674819 - DNA, 25 bp, Homo sapien
taactcctcattccacaacttctgt

SEQ ID NO: 1674820 - DNA, 25 bp, Homo sapien
tctttcatgatttattcgctcaatg

SEQ ID NO: 1674821 - DNA, 25 bp, Homo sapien
taatttattaatagtctgctgcaat

SEQ ID NO: 1674822 - DNA, 25 bp, Homo sapien
gaaaggtcagctatgatgagttgcc

SEQ ID NO: 1674823 - DNA, 25 bp, Homo sapien
tacagagtaaaaggagtgggaccta

SEQ ID NO: 1674824 - DNA, 25 bp, Homo sapien
tcttaattgggacagaccttcagaa

SEQ ID NO: 1674825 - DNA, 25 bp, Homo sapien
tatgcctagcataagtgacacacag

SEQ ID NO: 1674826 - DNA, 25 bp, Homo sapien
tgtatttgacaaggcagttggcacc

SEQ ID NO: 1674827 - DNA, 25 bp, Homo sapien
tttctagccaatttgtgatactctg

SEQ ID NO: 1674828 - DNA, 25 bp, Homo sapien
ctttggaattctcagcacctttagg

SEQ ID NO: 1674829 - DNA, 25 bp, Homo sapien
caccagcctcgggattaaacttaat

SEQ ID NO: 1674830 - DNA, 25 bp, Homo sapien
tgttctaaagtatcctccaaaccca

SEQ ID NO: 1674831 - DNA, 25 bp, Homo sapien
cattcaggagttccttaagaggtac

SEQ ID NO: 1674832 - DNA, 25 bp, Homo sapien
tcattcaggagttccttaagaggta

SEQ ID NO: 1674833 - DNA, 25 bp, Homo sapien
cagcttttgaacttcttctttcaga

SEQ ID NO: 1674834 - DNA, 25 bp, Homo sapien
tttttgttggtaaagatcatccagc

SEQ ID NO: 1674835 - DNA, 25 bp, Homo sapien
tcagagttctcacacttctcttgct

SEQ ID NO: 1674836 - DNA, 25 bp, Homo sapien
tgctttctgttatcattgcattcaa

SEQ ID NO: 1674837 - DNA, 25 bp, Homo sapien
taaagtgctcctttgggaatcctgt

SEQ ID NO: 1674838 - DNA, 25 bp, Homo sapien
tgtattctcaagatgcttactgttt

SEQ ID NO: 1674839 - DNA, 25 bp, Homo sapien
ttacatgcaagagactttaaagtgc

SEQ ID NO: 1674840 - DNA, 25 bp, Homo sapien
tcaggttgcatcatttgtattctca

SEQ ID NO: 1674841 - DNA, 25 bp, Homo sapien
tggttaacagtactttctagcaggt

SEQ ID NO: 1674842 - DNA, 25 bp, Homo sapien
tgagcccctggttaacagtactttc

SEQ ID NO: 1674843 - DNA, 25 bp, Homo sapien
gaacagcatctaattcattcatagc

SEQ ID NO: 1674844 - DNA, 25 bp, Homo sapien
attcatagcttcactgagcccctgg

SEQ ID NO: 1674845 - DNA, 25 bp, Homo sapien
caacatgtgtagcaaccatctctaa

SEQ ID NO: 1674846 - DNA, 25 bp, Homo sapien
ccatctctaacagacgttgcaagtt

SEQ ID NO: 1674847 - DNA, 25 bp, Homo sapien
acagacgttgcaagttatttcccac

SEQ ID NO: 1674848 - DNA, 25 bp, Homo sapien
tcttcagtcgtggtttgcacaacta

SEQ ID NO: 1674849 - DNA, 25 bp, Homo sapien
ttagcatgcggctgcttcaccccag

SEQ ID NO: 1674850 - DNA, 25 bp, Homo sapien
ttgctggcggctcctggcagtcctt

SEQ ID NO: 1674851 - DNA, 25 bp, Homo sapien
agggaagaatccttcttcgtctctc

SEQ ID NO: 1674852 - DNA, 25 bp, Homo sapien
tgggaaactaacatgccacattatt

SEQ ID NO: 1674853 - DNA, 25 bp, Homo sapien
ttagcaatctgctcctcaagatgtt

SEQ ID NO: 1674854 - DNA, 25 bp, Homo sapien
tccgagagatcttctgacatgcatt

SEQ ID NO: 1674855 - DNA, 25 bp, Homo sapien
cttcagaagacttaattagagtagc

SEQ ID NO: 1674856 - DNA, 25 bp, Homo sapien
tagagtagctttcttctcatactta

SEQ ID NO: 1674857 - DNA, 25 bp, Homo sapien
gacaattttattcactatggatata

SEQ ID NO: 1674858 - DNA, 25 bp, Homo sapien
gagacaattttattcactatggata

SEQ ID NO: 1674859 - DNA, 25 bp, Homo sapien
ctgagacaattttattcactatgga

SEQ ID NO: 1674860 - DNA, 25 bp, Homo sapien
tttactgagacaattttattcacta

SEQ ID NO: 1674861 - DNA, 25 bp, Homo sapien
taacatactacctttggacaagcca

SEQ ID NO: 1674862 - DNA, 25 bp, Homo sapien
agataacatactacctttggacaag

SEQ ID NO: 1674863 - DNA, 25 bp, Homo sapien
taactgaatatgaaaaatcaattga

SEQ ID NO: 1674864 - DNA, 25 bp, Homo sapien
ttgatctgtaactgaatatgaaaaa

SEQ ID NO: 1674865 - DNA, 25 bp, Homo sapien
ggcagcgtttcattaactatcctca

SEQ ID NO: 1674866 - DNA, 25 bp, Homo sapien
gggcagcgtttcattaactatcctc

SEQ ID NO: 1674867 - DNA, 25 bp, Homo sapien
gcagcgtttcattaactatcctcat

SEQ ID NO: 1674868 - DNA, 25 bp, Homo sapien
cgggcagcgtttcattaactatcct

SEQ ID NO: 1674869 - DNA, 25 bp, Homo sapien
gcccagcgcctatcgccgcccacgc

SEQ ID NO: 1674870 - DNA, 25 bp, Homo sapien
ggcccagcgcctatcgccgcccacg

SEQ ID NO: 1674871 - DNA, 25 bp, Homo sapien
cccagcgcctatcgccgcccacgcg

SEQ ID NO: 1674872 - DNA, 25 bp, Homo sapien
ttccgcggcccgccactcctgagga

SEQ ID NO: 1674873 - DNA, 25 bp, Homo sapien
tccgcggcccgccactcctgaggag

SEQ ID NO: 1674874 - DNA, 25 bp, Homo sapien
cggcccgccactcctgaggagaagg

SEQ ID NO: 1674875 - DNA, 25 bp, Homo sapien
cgcggcccgccactcctgaggagaa

SEQ ID NO: 1674876 - DNA, 25 bp, Homo sapien
agaaaagacagcgacgcctgccgcc

SEQ ID NO: 1674877 - DNA, 25 bp, Homo sapien
acagcgacgcctgccgccgccgggc

SEQ ID NO: 1674878 - DNA, 25 bp, Homo sapien
tcagggctgaggtgcgcgctccgcg

SEQ ID NO: 1674879 - DNA, 25 bp, Homo sapien
gagcagcggcaggcgcgaggatcac

SEQ ID NO: 1674880 - DNA, 25 bp, Homo sapien
acacacgcgcgaaatcccgcgtagt

SEQ ID NO: 1674881 - DNA, 25 bp, Homo sapien
aacaagtacaccgtcctgtggccga

SEQ ID NO: 1674882 - DNA, 25 bp, Homo sapien
gaaatcccgcgtagtccgagcgctc

SEQ ID NO: 1674883 - DNA, 25 bp, Homo sapien
gagctcggactccttttcgcgccga

SEQ ID NO: 1674884 - DNA, 25 bp, Homo sapien
caaaattatcacaggtaatttcttt

SEQ ID NO: 1674885 - DNA, 25 bp, Homo sapien
ttctttcctacttgttgttgtaata

SEQ ID NO: 1674886 - DNA, 25 bp, Homo sapien
tttcttcaggtgaaatgccaagtgt

SEQ ID NO: 1674887 - DNA, 25 bp, Homo sapien
cctacttgttgttgtaataacaaat

SEQ ID NO: 1674888 - DNA, 25 bp, Homo sapien
caattcgttctttcgtagctgtcag

SEQ ID NO: 1674889 - DNA, 25 bp, Homo sapien
ggtgactccatctttaacagtttca

SEQ ID NO: 1674890 - DNA, 25 bp, Homo sapien
ctgtagcaggtataaggtgactcca

SEQ ID NO: 1674891 - DNA, 25 bp, Homo sapien
ccagtgtgtcatagtgaggtaagaa

SEQ ID NO: 1674892 - DNA, 25 bp, Homo sapien
tatggaccctcgaaagtcaagtgaa

SEQ ID NO: 1674893 - DNA, 25 bp, Homo sapien
cagtagagtggtaggcgaaaacgtc

SEQ ID NO: 1674894 - DNA, 25 bp, Homo sapien
gaccataagagcgtgggtacagtag

SEQ ID NO: 1674895 - DNA, 25 bp, Homo sapien
tatggtcacgttactgcaaaaagga

SEQ ID NO: 1674896 - DNA, 25 bp, Homo sapien
gatctgtattcttctaaccccaatg

SEQ ID NO: 1674897 - DNA, 25 bp, Homo sapien
tgtcaattaattccgcaagagcaaa

SEQ ID NO: 1674898 - DNA, 25 bp, Homo sapien
tacgagaagtagcagacaatgaatt

SEQ ID NO: 1674899 - DNA, 25 bp, Homo sapien
caatgaattgtcaattaattccgca

SEQ ID NO: 1674900 - DNA, 25 bp, Homo sapien
ttcagagacatgtaccaaggtgtgc

SEQ ID NO: 1674901 - DNA, 25 bp, Homo sapien
ggctcacttatacattactgatgga

SEQ ID NO: 1674902 - DNA, 25 bp, Homo sapien
gccaataagtcactgcaacaacaga

SEQ ID NO: 1674903 - DNA, 25 bp, Homo sapien
attccttccagtggcaaaaatacag

SEQ ID NO: 1674904 - DNA, 25 bp, Homo sapien
cacggcccagttgttaagctgttta

SEQ ID NO: 1674905 - DNA, 25 bp, Homo sapien
gccttgtgaattttgacaacctata

SEQ ID NO: 1674906 - DNA, 25 bp, Homo sapien
taagctgtttagaggtcattcctct

SEQ ID NO: 1674907 - DNA, 25 bp, Homo sapien
cattatctatcactgcaacagcagg

SEQ ID NO: 1674908 - DNA, 25 bp, Homo sapien
tttatccttactaaaatacatagct

SEQ ID NO: 1674909 - DNA, 25 bp, Homo sapien
tggctgattgtccaacaaagaagac

SEQ ID NO: 1674910 - DNA, 25 bp, Homo sapien
tatcactatttaaactgcgtggcac

SEQ ID NO: 1674911 - DNA, 25 bp, Homo sapien
tggacgaacatatcctgaatgatca

SEQ ID NO: 1674912 - DNA, 25 bp, Homo sapien
taaactgcgtggcactggtactgga

SEQ ID NO: 1674913 - DNA, 25 bp, Homo sapien
agctcgtgaacatcttgggaatctg

SEQ ID NO: 1674914 - DNA, 25 bp, Homo sapien
ttgggaatctgcaggtttgcttatc

SEQ ID NO: 1674915 - DNA, 25 bp, Homo sapien
gggaatctgcaggtttgcttatcat

SEQ ID NO: 1674916 - DNA, 25 bp, Homo sapien
tctttagaaagcacaagctcgtgaa

SEQ ID NO: 1674917 - DNA, 25 bp, Homo sapien
tatccactatatattgcctctttat

SEQ ID NO: 1674918 - DNA, 25 bp, Homo sapien
atatatccactatatattgcctctt

SEQ ID NO: 1674919 - DNA, 25 bp, Homo sapien
tgtttctaatatatccactatatat

SEQ ID NO: 1674920 - DNA, 25 bp, Homo sapien
ctgtttctaatatatccactatata

SEQ ID NO: 1674921 - DNA, 25 bp, Homo sapien
gctaactgtcgtgtccaaaggtgga

SEQ ID NO: 1674922 - DNA, 25 bp, Homo sapien
ggttgtacccctgtgataaccacag

SEQ ID NO: 1674923 - DNA, 25 bp, Homo sapien
tcaagtactgtatgtgttctggttg

SEQ ID NO: 1674924 - DNA, 25 bp, Homo sapien
cctgtgataaccacagcagtaaagc

SEQ ID NO: 1674925 - DNA, 25 bp, Homo sapien
cttttgatgttcgtatttcatttcc

SEQ ID NO: 1674926 - DNA, 25 bp, Homo sapien
cttttgggccatgaatatagtagtg

SEQ ID NO: 1674927 - DNA, 25 bp, Homo sapien
ttgggccatgaatatagtagtgata

SEQ ID NO: 1674928 - DNA, 25 bp, Homo sapien
caacttcttttgatgttcgtatttc

SEQ ID NO: 1674929 - DNA, 25 bp, Homo sapien
gaattcaaaactatcagctgctgtg

SEQ ID NO: 1674930 - DNA, 25 bp, Homo sapien
tacatacaacgtctgcatgtcgtct

SEQ ID NO: 1674931 - DNA, 25 bp, Homo sapien
catggatcatcagggtaagtttctc

SEQ ID NO: 1674932 - DNA, 25 bp, Homo sapien
ggatgataacggataatcccttcca

SEQ ID NO: 1674933 - DNA, 25 bp, Homo sapien
tatgactgcataaagtgtaaaactg

SEQ ID NO: 1674934 - DNA, 25 bp, Homo sapien
aaacacagatgcattgaccataaaa

SEQ ID NO: 1674935 - DNA, 25 bp, Homo sapien
tacgcatacatatctaaaagtttgg

SEQ ID NO: 1674936 - DNA, 25 bp, Homo sapien
catataaaggattaatacgcataca

SEQ ID NO: 1674937 - DNA, 25 bp, Homo sapien
tggtattaatcgtccattccaaaaa

SEQ ID NO: 1674938 - DNA, 25 bp, Homo sapien
tatatggtattaatcgtccattcca

SEQ ID NO: 1674939 - DNA, 25 bp, Homo sapien
ttccctctagctgctttctcaagta

SEQ ID NO: 1674940 - DNA, 25 bp, Homo sapien
tctcaagtatgaaacaatcatcttc

SEQ ID NO: 1674941 - DNA, 25 bp, Homo sapien
tgtagcattcaattggtgcaagccc

SEQ ID NO: 1674942 - DNA, 25 bp, Homo sapien
tagtgaataatgcaccagatatcct

SEQ ID NO: 1674943 - DNA, 25 bp, Homo sapien
tagctcaagatccataaacgtcaat

SEQ ID NO: 1674944 - DNA, 25 bp, Homo sapien
tcttcttaggaggagtacaccagtc

SEQ ID NO: 1674945 - DNA, 25 bp, Homo sapien
ggtgtgaaccattatgcgcagcttg

SEQ ID NO: 1674946 - DNA, 25 bp, Homo sapien
caataaatgttggataactaacacc

SEQ ID NO: 1674947 - DNA, 25 bp, Homo sapien
gataaggtctttctcggtgtataat

SEQ ID NO: 1674948 - DNA, 25 bp, Homo sapien
ggatagcttttgaaaacacccactg

SEQ ID NO: 1674949 - DNA, 25 bp, Homo sapien
tcaggacgtgtaattactcccttaa

SEQ ID NO: 1674950 - DNA, 25 bp, Homo sapien
gaaggaagatcaggacgtgtaatta

SEQ ID NO: 1674951 - DNA, 25 bp, Homo sapien
atcatacttctcatgacagtccttc

SEQ ID NO: 1674952 - DNA, 25 bp, Homo sapien
ctctgtcaattttcattcgctgttc

SEQ ID NO: 1674953 - DNA, 25 bp, Homo sapien
catcatgatcgccataaagaaaaaa

SEQ ID NO: 1674954 - DNA, 25 bp, Homo sapien
tacttctccatcatgatcgccataa

SEQ ID NO: 1674955 - DNA, 25 bp, Homo sapien
tctcctcctgtagcatatacttctc

SEQ ID NO: 1674956 - DNA, 25 bp, Homo sapien
attgcaatttgaacctctcctcctg

SEQ ID NO: 1674957 - DNA, 25 bp, Homo sapien
tgtttactagttagtgggccctaga

SEQ ID NO: 1674958 - DNA, 25 bp, Homo sapien
cagtagctattcttacgttacacca

SEQ ID NO: 1674959 - DNA, 25 bp, Homo sapien
tcattgctgagatagaattctggct

SEQ ID NO: 1674960 - DNA, 25 bp, Homo sapien
tatccaatggaaaactagtcactag

SEQ ID NO: 1674961 - DNA, 25 bp, Homo sapien
gcaactgtcctatccagctttgcaa

SEQ ID NO: 1674962 - DNA, 25 bp, Homo sapien
gcaattggcacagttcttacttcat

SEQ ID NO: 1674963 - DNA, 25 bp, Homo sapien
cttcatcatatagtgcctgaggttc

SEQ ID NO: 1674964 - DNA, 25 bp, Homo sapien
catcttctacatattttttaacagc

SEQ ID NO: 1674965 - DNA, 25 bp, Homo sapien
ggccaagttactgacaatctatcag

SEQ ID NO: 1674966 - DNA, 25 bp, Homo sapien
cctcattaggcaataattcatctcc

SEQ ID NO: 1674967 - DNA, 25 bp, Homo sapien
caataggggttccagcaggcctaac

SEQ ID NO: 1674968 - DNA, 25 bp, Homo sapien
agttactgacaatctatcagggagc

SEQ ID NO: 1674969 - DNA, 25 bp, Homo sapien
cctggaagcttttgcattgcttccc

SEQ ID NO: 1674970 - DNA, 25 bp, Homo sapien
aagcttttgcattgcttcccctttt

SEQ ID NO: 1674971 - DNA, 25 bp, Homo sapien
aggagtttctttgaccctccatggc

SEQ ID NO: 1674972 - DNA, 25 bp, Homo sapien
ccaggagtttctttgaccctccatg

SEQ ID NO: 1674973 - DNA, 25 bp, Homo sapien
gggtgaatttcagcggcacaatcat

SEQ ID NO: 1674974 - DNA, 25 bp, Homo sapien
tgggtgaatttcagcggcacaatca

SEQ ID NO: 1674975 - DNA, 25 bp, Homo sapien
gcagtcaaccttacccacttggaaa

SEQ ID NO: 1674976 - DNA, 25 bp, Homo sapien
tctatctaagaaggaacacaggagc

SEQ ID NO: 1674977 - DNA, 25 bp, Homo sapien
ccatatagtgatggcttgtctctac

SEQ ID NO: 1674978 - DNA, 25 bp, Homo sapien
tatcaagtaggtaacatgaccacac

SEQ ID NO: 1674979 - DNA, 25 bp, Homo sapien
gactaatatgcgaaataatctcttt

SEQ ID NO: 1674980 - DNA, 25 bp, Homo sapien
ccatgttgactaatatgcgaaataa

SEQ ID NO: 1674981 - DNA, 25 bp, Homo sapien
gttgactaatatgcgaaataatctc

SEQ ID NO: 1674982 - DNA, 25 bp, Homo sapien
tccatgttgactaatatgcgaaata

SEQ ID NO: 1674983 - DNA, 25 bp, Homo sapien
caaggtataattccccaacttctga

SEQ ID NO: 1674984 - DNA, 25 bp, Homo sapien
tgtaatttcaaggtataattcccca

SEQ ID NO: 1674985 - DNA, 25 bp, Homo sapien
tgctttagatggtagtggtcttcct

SEQ ID NO: 1674986 - DNA, 25 bp, Homo sapien
aaacttaattgctttagatggtagt

SEQ ID NO: 1674987 - DNA, 25 bp, Homo sapien
gaaactccagagggatattaaatgg

SEQ ID NO: 1674988 - DNA, 25 bp, Homo sapien
ctccaacacgaaaaggaagatccag

SEQ ID NO: 1674989 - DNA, 25 bp, Homo sapien
gactggtatgaccaaattcatcctg

SEQ ID NO: 1674990 - DNA, 25 bp, Homo sapien
ggctgaatatcagttactagttgac

SEQ ID NO: 1674991 - DNA, 25 bp, Homo sapien
atctacttccatgagtaatatggtt

SEQ ID NO: 1674992 - DNA, 25 bp, Homo sapien
agatgtagatctttgcagtggcaaa

SEQ ID NO: 1674993 - DNA, 25 bp, Homo sapien
ctacttccatgagtaatatggttcc

SEQ ID NO: 1674994 - DNA, 25 bp, Homo sapien
gatctttgcagtggcaaaattttac

SEQ ID NO: 1674995 - DNA, 25 bp, Homo sapien
taacacctcgaattacacaatttgg

SEQ ID NO: 1674996 - DNA, 25 bp, Homo sapien
ggctgtaacacctcgaattacacaa

SEQ ID NO: 1674997 - DNA, 25 bp, Homo sapien
gagtttacagggcccttggctgtaa

SEQ ID NO: 1674998 - DNA, 25 bp, Homo sapien
cccttggctgtaacacctcgaatta

SEQ ID NO: 1674999 - DNA, 25 bp, Homo sapien
aattttctgtgaatttcaagttctt

SEQ ID NO: 1675000 - DNA, 25 bp, Homo sapien
gtgaatttcaagttctttttccaga

SEQ ID NO: 1675001 - DNA, 25 bp, Homo sapien
agtcaaattttctgtgaatttcaag

SEQ ID NO: 1675002 - DNA, 25 bp, Homo sapien
tctgtgaatttcaagttctttttcc

SEQ ID NO: 1675003 - DNA, 25 bp, Homo sapien
ttcttttaagccaggcagagtaacc

SEQ ID NO: 1675004 - DNA, 25 bp, Homo sapien
cttcttttaagccaggcagagtaac

SEQ ID NO: 1675005 - DNA, 25 bp, Homo sapien
aactgaggcatagaacgagtttacc

SEQ ID NO: 1675006 - DNA, 25 bp, Homo sapien
tacctagatactaacccagaagggc

SEQ ID NO: 1675007 - DNA, 25 bp, Homo sapien
tgtgcaaggcaaggactacctgtag

SEQ ID NO: 1675008 - DNA, 25 bp, Homo sapien
caaccccaagggagtagatattatc

SEQ ID NO: 1675009 - DNA, 25 bp, Homo sapien
ctgatgtcataagcaattaacatca

SEQ ID NO: 1675010 - DNA, 25 bp, Homo sapien
tgatgtcataagcaattaacatcac

SEQ ID NO: 1675011 - DNA, 25 bp, Homo sapien
ctgatgatttttctggcacaagtaa

SEQ ID NO: 1675012 - DNA, 25 bp, Homo sapien
aatacatattcaggtttcaaagact

SEQ ID NO: 1675013 - DNA, 25 bp, Homo sapien
atacatattcaggtttcaaagacta

SEQ ID NO: 1675014 - DNA, 25 bp, Homo sapien
acatattcaggtttcaaagactaaa

SEQ ID NO: 1675015 - DNA, 25 bp, Homo sapien
atattcaggtttcaaagactaaagt

SEQ ID NO: 1675016 - DNA, 25 bp, Homo sapien
caggtttcactttcagtcgacgagg

SEQ ID NO: 1675017 - DNA, 25 bp, Homo sapien
ctgttatgttgtctgattcatctaa

SEQ ID NO: 1675018 - DNA, 25 bp, Homo sapien
ttcactttcagtcgacgagggtgac

SEQ ID NO: 1675019 - DNA, 25 bp, Homo sapien
gaacaatcaattttggttgtgctgt

SEQ ID NO: 1675020 - DNA, 25 bp, Homo sapien
gaaactgggcacagttggcatcttt

SEQ ID NO: 1675021 - DNA, 25 bp, Homo sapien
tatatgaaatgagaggcatggagtc

SEQ ID NO: 1675022 - DNA, 25 bp, Homo sapien
cacttactacaatgggactcaatct

SEQ ID NO: 1675023 - DNA, 25 bp, Homo sapien
gagcagcccattcccaatcctgaaa

SEQ ID NO: 1675024 - DNA, 25 bp, Homo sapien
taatattctgaacttgaattgcaga

SEQ ID NO: 1675025 - DNA, 25 bp, Homo sapien
ctacaacatagactggaaggtttgg

SEQ ID NO: 1675026 - DNA, 25 bp, Homo sapien
tccagaactactgcaatctacaaca

SEQ ID NO: 1675027 - DNA, 25 bp, Homo sapien
caattcttgctttaagcgtctggtc

SEQ ID NO: 1675028 - DNA, 25 bp, Homo sapien
taagtatctgttaccctactcagca

SEQ ID NO: 1675029 - DNA, 25 bp, Homo sapien
gattgtttacagctcttgcctccat

SEQ ID NO: 1675030 - DNA, 25 bp, Homo sapien
gcatcctactggcacatgatataga

SEQ ID NO: 1675031 - DNA, 25 bp, Homo sapien
tgctatcagccacgatgaatcacca

SEQ ID NO: 1675032 - DNA, 25 bp, Homo sapien
acttaatagtcttctccacaggtgc

SEQ ID NO: 1675033 - DNA, 25 bp, Homo sapien
cactgaatatttgtagtcttgcaac

SEQ ID NO: 1675034 - DNA, 25 bp, Homo sapien
tatgcataatatcacccgctatcca

SEQ ID NO: 1675035 - DNA, 25 bp, Homo sapien
cgctatccaattaacctcatcctga

SEQ ID NO: 1675036 - DNA, 25 bp, Homo sapien
ggcaatagcgcatatcttttacaga

SEQ ID NO: 1675037 - DNA, 25 bp, Homo sapien
gaagcagaccctgtagcaagtgttc

SEQ ID NO: 1675038 - DNA, 25 bp, Homo sapien
tgttggtacttgcacatcaggaagc

SEQ ID NO: 1675039 - DNA, 25 bp, Homo sapien
cttggaatgaaacctggcaatagcg

SEQ ID NO: 1675040 - DNA, 25 bp, Homo sapien
tagaagtctttagtgacaccattaa

SEQ ID NO: 1675041 - DNA, 25 bp, Homo sapien
agttagaagtctttagtgacaccat

SEQ ID NO: 1675042 - DNA, 25 bp, Homo sapien
tgacaccattaattgaagtagttcc

SEQ ID NO: 1675043 - DNA, 25 bp, Homo sapien
tctttagtgacaccattaattgaag

SEQ ID NO: 1675044 - DNA, 25 bp, Homo sapien
attttaaatgtttaggttcatcagg

SEQ ID NO: 1675045 - DNA, 25 bp, Homo sapien
aatgtttaggttcatcaggaagtgg

SEQ ID NO: 1675046 - DNA, 25 bp, Homo sapien
ggcccatctgtactgtttttcctcc

SEQ ID NO: 1675047 - DNA, 25 bp, Homo sapien
acttctccttgaagctcttggccca

SEQ ID NO: 1675048 - DNA, 25 bp, Homo sapien
ggtgaaaatgcttgaatctgatttc

SEQ ID NO: 1675049 - DNA, 25 bp, Homo sapien
agaagataaagaacttggtgaaaat

SEQ ID NO: 1675050 - DNA, 25 bp, Homo sapien
agataaagaacttggtgaaaatgct

SEQ ID NO: 1675051 - DNA, 25 bp, Homo sapien
ttggtgaaaatgcttgaatctgatt

SEQ ID NO: 1675052 - DNA, 25 bp, Homo sapien
ggtattacaggccatactaaggcaa

SEQ ID NO: 1675053 - DNA, 25 bp, Homo sapien
cccctggatttggtcaggtagaaca

SEQ ID NO: 1675054 - DNA, 25 bp, Homo sapien
gaatacagggccaaaggaagctttg

SEQ ID NO: 1675055 - DNA, 25 bp, Homo sapien
cagagtggcttgctacagaatgaca

SEQ ID NO: 1675056 - DNA, 25 bp, Homo sapien
tacattgagaaagacagggggtatc

SEQ ID NO: 1675057 - DNA, 25 bp, Homo sapien
gaaagacagggggtatcacttagtg

SEQ ID NO: 1675058 - DNA, 25 bp, Homo sapien
ttgagaaagacagggggtatcactt

SEQ ID NO: 1675059 - DNA, 25 bp, Homo sapien
aaagacagggggtatcacttagtgt

SEQ ID NO: 1675060 - DNA, 25 bp, Homo sapien
ggacctggaataaatttgatgcctc

SEQ ID NO: 1675061 - DNA, 25 bp, Homo sapien
tagttctggccagtctataaggaga

SEQ ID NO: 1675062 - DNA, 25 bp, Homo sapien
caaagatccttatttccaggaggac

SEQ ID NO: 1675063 - DNA, 25 bp, Homo sapien
caggaggtccagaaattagttgcac

SEQ ID NO: 1675064 - DNA, 25 bp, Homo sapien
aaatgaggacacaatgatgaatcaa

SEQ ID NO: 1675065 - DNA, 25 bp, Homo sapien
caactgttagttgttacttcagcaa

SEQ ID NO: 1675066 - DNA, 25 bp, Homo sapien
tcagtgaagacatgaagtgacttac

SEQ ID NO: 1675067 - DNA, 25 bp, Homo sapien
gccatatgatattaaattctttcag

SEQ ID NO: 1675068 - DNA, 25 bp, Homo sapien
tgtaccggtgctggattatcccact

SEQ ID NO: 1675069 - DNA, 25 bp, Homo sapien
caataatagggttctgtaaatctct

SEQ ID NO: 1675070 - DNA, 25 bp, Homo sapien
cccactgatcacaaagttgaacaat

SEQ ID NO: 1675071 - DNA, 25 bp, Homo sapien
taaattgctagcttttgtaagactt

SEQ ID NO: 1675072 - DNA, 25 bp, Homo sapien
ggcaaaaacactgaatactcccaaa

SEQ ID NO: 1675073 - DNA, 25 bp, Homo sapien
ctgttttatgctgttggtttgaagg

SEQ ID NO: 1675074 - DNA, 25 bp, Homo sapien
gaatactcccaaattagccctgcct

SEQ ID NO: 1675075 - DNA, 25 bp, Homo sapien
tatgctgttggtttgaaggcatgag

SEQ ID NO: 1675076 - DNA, 25 bp, Homo sapien
ccctgctaagaaggatgcatctttg

SEQ ID NO: 1675077 - DNA, 25 bp, Homo sapien
cattaacttaattataggtccttct

SEQ ID NO: 1675078 - DNA, 25 bp, Homo sapien
catatttaacattgagacgaacggg

SEQ ID NO: 1675079 - DNA, 25 bp, Homo sapien
tataggtccttctatgatacttttg

SEQ ID NO: 1675080 - DNA, 25 bp, Homo sapien
tcggttcccactggtagacagcttc

SEQ ID NO: 1675081 - DNA, 25 bp, Homo sapien
tttcatggaaatacgtgctggatta

SEQ ID NO: 1675082 - DNA, 25 bp, Homo sapien
cattttcatggaaatacgtgctgga

SEQ ID NO: 1675083 - DNA, 25 bp, Homo sapien
gggtcggttcccactggtagacagc

SEQ ID NO: 1675084 - DNA, 25 bp, Homo sapien
gaaatagaagcagccatcttctttg

SEQ ID NO: 1675085 - DNA, 25 bp, Homo sapien
gaagcagccatcttctttgtcatta

SEQ ID NO: 1675086 - DNA, 25 bp, Homo sapien
ttttattacaactaaatgtttctgc

SEQ ID NO: 1675087 - DNA, 25 bp, Homo sapien
ctgaaatagaagcagccatcttctt

SEQ ID NO: 1675088 - DNA, 25 bp, Homo sapien
tcccaggttcctcttacctgtacat

SEQ ID NO: 1675089 - DNA, 25 bp, Homo sapien
aataaatgagtaggaagaatagaac

SEQ ID NO: 1675090 - DNA, 25 bp, Homo sapien
tatgaatttctaagcgacagttttg

SEQ ID NO: 1675091 - DNA, 25 bp, Homo sapien
caggaatatgaagttgagaaagcag

SEQ ID NO: 1675092 - DNA, 25 bp, Homo sapien
ctggatacaatatgtccccacttta

SEQ ID NO: 1675093 - DNA, 25 bp, Homo sapien
ccaaactggatacaatatgtcccca

SEQ ID NO: 1675094 - DNA, 25 bp, Homo sapien
aaactggatacaatatgtccccact

SEQ ID NO: 1675095 - DNA, 25 bp, Homo sapien
ctgttcactgttgagaatatttgtt

SEQ ID NO: 1675096 - DNA, 25 bp, Homo sapien
agctaactgtggtatataaaaaaag

SEQ ID NO: 1675097 - DNA, 25 bp, Homo sapien
tgtgactcctgtaacaggtcaaatt

SEQ ID NO: 1675098 - DNA, 25 bp, Homo sapien
tggaaatgtgactcctgtaacaggt

SEQ ID NO: 1675099 - DNA, 25 bp, Homo sapien
aatggaaatgtgactcctgtaacag

SEQ ID NO: 1675100 - DNA, 25 bp, Homo sapien
gaaatgtgactcctgtaacaggtca

SEQ ID NO: 1675101 - DNA, 25 bp, Homo sapien
ggtcctactggcaactgagcgaaca

SEQ ID NO: 1675102 - DNA, 25 bp, Homo sapien
tgagcgaacatttgaaacagctggt

SEQ ID NO: 1675103 - DNA, 25 bp, Homo sapien
cacaggttgattaggcaggacttca

SEQ ID NO: 1675104 - DNA, 25 bp, Homo sapien
atgtagatctctgaccaaggtccta

SEQ ID NO: 1675105 - DNA, 25 bp, Homo sapien
ggctattatagtgccaaccaaatca

SEQ ID NO: 1675106 - DNA, 25 bp, Homo sapien
tttcagccgaaccattcacgaaggg

SEQ ID NO: 1675107 - DNA, 25 bp, Homo sapien
ttccagtatggttgtcgtagtcatc

SEQ ID NO: 1675108 - DNA, 25 bp, Homo sapien
tcttcctcattagagcctttaatgg

SEQ ID NO: 1675109 - DNA, 25 bp, Homo sapien
ggatatatggttctaaggttcttga

SEQ ID NO: 1675110 - DNA, 25 bp, Homo sapien
aatattcagtactatcccttccagg

SEQ ID NO: 1675111 - DNA, 25 bp, Homo sapien
cattgtaaaacatgaacggtaggat

SEQ ID NO: 1675112 - DNA, 25 bp, Homo sapien
aggttcttgataaaagtggtagccg

SEQ ID NO: 1675113 - DNA, 25 bp, Homo sapien
tatacataacaatagactgagataa

SEQ ID NO: 1675114 - DNA, 25 bp, Homo sapien
acttttatacataacaatagactga

SEQ ID NO: 1675115 - DNA, 25 bp, Homo sapien
tagactgagataattggtccttttc

SEQ ID NO: 1675116 - DNA, 25 bp, Homo sapien
cattaagaagctgttggctggcttc

SEQ ID NO: 1675117 - DNA, 25 bp, Homo sapien
tgcctcatcattccccaaagcataa

SEQ ID NO: 1675118 - DNA, 25 bp, Homo sapien
ttgtcttgaatacaaaatgacttac

SEQ ID NO: 1675119 - DNA, 25 bp, Homo sapien
tttttgtcttgaatacaaaatgact

SEQ ID NO: 1675120 - DNA, 25 bp, Homo sapien
cattccccaaagcataatttttgtc

SEQ ID NO: 1675121 - DNA, 25 bp, Homo sapien
tgttgtaggaatgtcaatattatgt

SEQ ID NO: 1675122 - DNA, 25 bp, Homo sapien
tttttagttcatttcgcaattgggc

SEQ ID NO: 1675123 - DNA, 25 bp, Homo sapien
catttcgcaattgggcctcttttaa

SEQ ID NO: 1675124 - DNA, 25 bp, Homo sapien
caattgggcctcttttaatcttgct

SEQ ID NO: 1675125 - DNA, 25 bp, Homo sapien
ttagtatagtttggaagagtacacg

SEQ ID NO: 1675126 - DNA, 25 bp, Homo sapien
ctccactgcctttagtatagtttgg

SEQ ID NO: 1675127 - DNA, 25 bp, Homo sapien
gtttggaagagtacacgatcttcta

SEQ ID NO: 1675128 - DNA, 25 bp, Homo sapien
catctccactgcctttagtatagtt

SEQ ID NO: 1675129 - DNA, 25 bp, Homo sapien
gtgccaacagtgtaacaaggttcaa

SEQ ID NO: 1675130 - DNA, 25 bp, Homo sapien
caggtaatgtgccaacagtgtaaca

SEQ ID NO: 1675131 - DNA, 25 bp, Homo sapien
caagggtggcatatctcacgcatgt

SEQ ID NO: 1675132 - DNA, 25 bp, Homo sapien
ggtggcatatctcacgcatgtgcgt

SEQ ID NO: 1675133 - DNA, 25 bp, Homo sapien
cgcagctctatcatcttcaatttgt

SEQ ID NO: 1675134 - DNA, 25 bp, Homo sapien
gcaacacctgctgacgaccttgggt

SEQ ID NO: 1675135 - DNA, 25 bp, Homo sapien
cagcgtcagtggttagggtgactac

SEQ ID NO: 1675136 - DNA, 25 bp, Homo sapien
ttagggtgactacacagtccatgtc

SEQ ID NO: 1675137 - DNA, 25 bp, Homo sapien
tcatcatagatacgacgtgcagcgt

SEQ ID NO: 1675138 - DNA, 25 bp, Homo sapien
gtctcgagcaaagactggatctcca

SEQ ID NO: 1675139 - DNA, 25 bp, Homo sapien
gactggatctccaatgggtttaaaa

SEQ ID NO: 1675140 - DNA, 25 bp, Homo sapien
tatctggaaatgttaacaagtctcg

SEQ ID NO: 1675141 - DNA, 25 bp, Homo sapien
caattttccatttcggaaatgaggt

SEQ ID NO: 1675142 - DNA, 25 bp, Homo sapien
aatgattggccgcatccagattatc

SEQ ID NO: 1675143 - DNA, 25 bp, Homo sapien
ctataatgattggccgcatccagat

SEQ ID NO: 1675144 - DNA, 25 bp, Homo sapien
gattggccgcatccagattatccaa

SEQ ID NO: 1675145 - DNA, 25 bp, Homo sapien
tataatgattggccgcatccagatt

SEQ ID NO: 1675146 - DNA, 25 bp, Homo sapien
taatatgaggtcactgcggtgggcc

SEQ ID NO: 1675147 - DNA, 25 bp, Homo sapien
gagtcttagacaatttcgtagcccc

SEQ ID NO: 1675148 - DNA, 25 bp, Homo sapien
tattcacatcagttaatggctgccc

SEQ ID NO: 1675149 - DNA, 25 bp, Homo sapien
cacccagtctgttgtgggacagtaa

SEQ ID NO: 1675150 - DNA, 25 bp, Homo sapien
tgtagctgatggtgaaccatcaatt

SEQ ID NO: 1675151 - DNA, 25 bp, Homo sapien
ccagtcaagtagactagtaagaagg

SEQ ID NO: 1675152 - DNA, 25 bp, Homo sapien
tcattacctttgtttgggaccagcc

SEQ ID NO: 1675153 - DNA, 25 bp, Homo sapien
gaataaaacagagttagatctgtag

SEQ ID NO: 1675154 - DNA, 25 bp, Homo sapien
ggtaccagttgccagctacataagg

SEQ ID NO: 1675155 - DNA, 25 bp, Homo sapien
taggcatgatcagagcacacgacag

SEQ ID NO: 1675156 - DNA, 25 bp, Homo sapien
tagatgatccctatagtccccgtga

SEQ ID NO: 1675157 - DNA, 25 bp, Homo sapien
aaactcccctgcaaaggtgctatgg

SEQ ID NO: 1675158 - DNA, 25 bp, Homo sapien
tgtgcctagtgatacgctggaacca

SEQ ID NO: 1675159 - DNA, 25 bp, Homo sapien
gaaggacttcatacagactgctgga

SEQ ID NO: 1675160 - DNA, 25 bp, Homo sapien
tatctcattgaacaggagtcttccg

SEQ ID NO: 1675161 - DNA, 25 bp, Homo sapien
tccgcttagtgccaaagttcaagag

SEQ ID NO: 1675162 - DNA, 25 bp, Homo sapien
tgctttggaacccatggcagttaag

SEQ ID NO: 1675163 - DNA, 25 bp, Homo sapien
tacagactggaaagcactagactga

SEQ ID NO: 1675164 - DNA, 25 bp, Homo sapien
tatcaaggtagcatcaccaacccag

SEQ ID NO: 1675165 - DNA, 25 bp, Homo sapien
ctagaacagtgacaacgcaagtgaa

SEQ ID NO: 1675166 - DNA, 25 bp, Homo sapien
gcagtgtaggacagtgtgtaatttt

SEQ ID NO: 1675167 - DNA, 25 bp, Homo sapien
cattacttcgaattcgatctccatc

SEQ ID NO: 1675168 - DNA, 25 bp, Homo sapien
actttccattacttcgaattcgatc

SEQ ID NO: 1675169 - DNA, 25 bp, Homo sapien
ccattggaggagctttattctgaag

SEQ ID NO: 1675170 - DNA, 25 bp, Homo sapien
ataccattccccgaagtttatccat

SEQ ID NO: 1675171 - DNA, 25 bp, Homo sapien
ctatttgttcccctaagatcagaca

SEQ ID NO: 1675172 - DNA, 25 bp, Homo sapien
tgttcccctaagatcagacactgtt

SEQ ID NO: 1675173 - DNA, 25 bp, Homo sapien
ctaagatcagacactgttttggaac

SEQ ID NO: 1675174 - DNA, 25 bp, Homo sapien
tcccctaagatcagacactgttttg

SEQ ID NO: 1675175 - DNA, 25 bp, Homo sapien
tctgtgttaggaaagtagagttgag

SEQ ID NO: 1675176 - DNA, 25 bp, Homo sapien
aagttaacaacaaactgctctgtgt

SEQ ID NO: 1675177 - DNA, 25 bp, Homo sapien
catcgagcccggccaaactgtactc

SEQ ID NO: 1675178 - DNA, 25 bp, Homo sapien
ggaaagtagagttgagtgtatcaga

SEQ ID NO: 1675179 - DNA, 25 bp, Homo sapien
gccagaagaagtgtatgccaaatta

SEQ ID NO: 1675180 - DNA, 25 bp, Homo sapien
catataaaaaagtacgcaccgcaca

SEQ ID NO: 1675181 - DNA, 25 bp, Homo sapien
tactgtgataggaagcagcctgacg

SEQ ID NO: 1675182 - DNA, 25 bp, Homo sapien
gaatagattagtgccatcccttggg

SEQ ID NO: 1675183 - DNA, 25 bp, Homo sapien
tggtgatggccttcctcaaaattgc

SEQ ID NO: 1675184 - DNA, 25 bp, Homo sapien
tccttactaagtctggctgacctgg

SEQ ID NO: 1675185 - DNA, 25 bp, Homo sapien
gagaatgattccatgatacccaggg

SEQ ID NO: 1675186 - DNA, 25 bp, Homo sapien
catgcatggctgctattgcttacaa

SEQ ID NO: 1675187 - DNA, 25 bp, Homo sapien
cacagccccattataagttgagaag

SEQ ID NO: 1675188 - DNA, 25 bp, Homo sapien
gagagtgcgcttccaacttatgata

SEQ ID NO: 1675189 - DNA, 25 bp, Homo sapien
tgtaagctgaaacatcctaagtctg

SEQ ID NO: 1675190 - DNA, 25 bp, Homo sapien
aatattgtaaaagttgagagtgcgc

SEQ ID NO: 1675191 - DNA, 25 bp, Homo sapien
gcccactggcctatccagtttaaaa

SEQ ID NO: 1675192 - DNA, 25 bp, Homo sapien
aggagtgagcccactggcctatcca

SEQ ID NO: 1675193 - DNA, 25 bp, Homo sapien
ttcactatgctgttcgacctttggg

SEQ ID NO: 1675194 - DNA, 25 bp, Homo sapien
taagcgatctaaccatcttgggctc

SEQ ID NO: 1675195 - DNA, 25 bp, Homo sapien
tatccggagtgcgaaggtactctaa

SEQ ID NO: 1675196 - DNA, 25 bp, Homo sapien
ccttattcacactgtctagtttgca

SEQ ID NO: 1675197 - DNA, 25 bp, Homo sapien
tagtttgcacacagcagaacgatac

SEQ ID NO: 1675198 - DNA, 25 bp, Homo sapien
tactctaattgactgttaagatcct

SEQ ID NO: 1675199 - DNA, 25 bp, Homo sapien
caacctttggtgaatgacgcaatga

SEQ ID NO: 1675200 - DNA, 25 bp, Homo sapien
gacaatctgtcgtctcaacctttgg

SEQ ID NO: 1675201 - DNA, 25 bp, Homo sapien
tcattcttttaggaggaactggaca

SEQ ID NO: 1675202 - DNA, 25 bp, Homo sapien
tcattacacttacgtatgggagtca

SEQ ID NO: 1675203 - DNA, 25 bp, Homo sapien
gggcaaatttagtgctgagactgtg

SEQ ID NO: 1675204 - DNA, 25 bp, Homo sapien
ggcaaatttagtgctgagactgtgg

SEQ ID NO: 1675205 - DNA, 25 bp, Homo sapien
agactgtggcacaaaaacatgtacc

SEQ ID NO: 1675206 - DNA, 25 bp, Homo sapien
taccttacatcttagcctagaactg

SEQ ID NO: 1675207 - DNA, 25 bp, Homo sapien
caaatcaatgtccacagtagcgctg

SEQ ID NO: 1675208 - DNA, 25 bp, Homo sapien
aagttccaaatcaatgtccacagta

SEQ ID NO: 1675209 - DNA, 25 bp, Homo sapien
cagtagcgctgtagtaactggaagg

SEQ ID NO: 1675210 - DNA, 25 bp, Homo sapien
caatgtccacagtagcgctgtagta

SEQ ID NO: 1675211 - DNA, 25 bp, Homo sapien
tatatacacatatgaccgatgatca

SEQ ID NO: 1675212 - DNA, 25 bp, Homo sapien
cactgtaaatctataccatttgata

SEQ ID NO: 1675213 - DNA, 25 bp, Homo sapien
aactccctctgaattgctacaaaat

SEQ ID NO: 1675214 - DNA, 25 bp, Homo sapien
gactcacgtatagtacaacactgta

SEQ ID NO: 1675215 - DNA, 25 bp, Homo sapien
tagctagtcctaattgagatttgct

SEQ ID NO: 1675216 - DNA, 25 bp, Homo sapien
caaagaggagaaagtcgcagtccag

SEQ ID NO: 1675217 - DNA, 25 bp, Homo sapien
ttctaataccgccatcacaaagcta

SEQ ID NO: 1675218 - DNA, 25 bp, Homo sapien
gtgtctccccatgtactaaaggctg

SEQ ID NO: 1675219 - DNA, 25 bp, Homo sapien
ctaaaggctgcactgaaaatatggt

SEQ ID NO: 1675220 - DNA, 25 bp, Homo sapien
cacagtgctttgaaatggtattatc

SEQ ID NO: 1675221 - DNA, 25 bp, Homo sapien
ttatctcagacctaaattctgcaga

SEQ ID NO: 1675222 - DNA, 25 bp, Homo sapien
ccctcatcacacctgaatgcttaaa

SEQ ID NO: 1675223 - DNA, 25 bp, Homo sapien
taaatataattcttggtataaacag

SEQ ID NO: 1675224 - DNA, 25 bp, Homo sapien
tcatacatctgttttggttataatc

SEQ ID NO: 1675225 - DNA, 25 bp, Homo sapien
cattcttactgagaccaatggcctc

SEQ ID NO: 1675226 - DNA, 25 bp, Homo sapien
aatactcagtctggtaagtcaccct

SEQ ID NO: 1675227 - DNA, 25 bp, Homo sapien
ttgtattgtccccagaaatactcag

SEQ ID NO: 1675228 - DNA, 25 bp, Homo sapien
atgcccaggtacttgtattgtcccc

SEQ ID NO: 1675229 - DNA, 25 bp, Homo sapien
ccagtaaatccataatgtccagtaa

SEQ ID NO: 1675230 - DNA, 25 bp, Homo sapien
acatttgcaaggtagtgacaaccaa

SEQ ID NO: 1675231 - DNA, 25 bp, Homo sapien
caaggtagtgacaaccaaagggcat

SEQ ID NO: 1675232 - DNA, 25 bp, Homo sapien
tcataaaattgaatggttgtttcca

SEQ ID NO: 1675233 - DNA, 25 bp, Homo sapien
catgtgccagttttacagtcactgc

SEQ ID NO: 1675234 - DNA, 25 bp, Homo sapien
aaaacacatacatttcctgggacac

SEQ ID NO: 1675235 - DNA, 25 bp, Homo sapien
tcaggattaataaatgccatgtgcc

SEQ ID NO: 1675236 - DNA, 25 bp, Homo sapien
taatggcctgcatatttagaaaggg

SEQ ID NO: 1675237 - DNA, 25 bp, Homo sapien
gataatatccatagaactcgccatt

SEQ ID NO: 1675238 - DNA, 25 bp, Homo sapien
catttgagcgcagatatgacacata

SEQ ID NO: 1675239 - DNA, 25 bp, Homo sapien
ggccactgtcgctcaagggaaaaaa

SEQ ID NO: 1675240 - DNA, 25 bp, Homo sapien
cctgtagtaccatgggagccaatct

SEQ ID NO: 1675241 - DNA, 25 bp, Homo sapien
tagatatacggggtacacatgtgtg

SEQ ID NO: 1675242 - DNA, 25 bp, Homo sapien
tcaccccagcagtccacagtgtcta

SEQ ID NO: 1675243 - DNA, 25 bp, Homo sapien
caatgttgaacacccccttataagt

SEQ ID NO: 1675244 - DNA, 25 bp, Homo sapien
accccagcagtccacagtgtctatt

SEQ ID NO: 1675245 - DNA, 25 bp, Homo sapien
ttcaggcactgctagacatccgtct

SEQ ID NO: 1675246 - DNA, 25 bp, Homo sapien
gagagtccaggaggaaacgaacgct

SEQ ID NO: 1675247 - DNA, 25 bp, Homo sapien
tgtgagctaaccagacgctgttggc

SEQ ID NO: 1675248 - DNA, 25 bp, Homo sapien
tgccttaggcaccatctgacagttt

SEQ ID NO: 1675249 - DNA, 25 bp, Homo sapien
gggacatgtttatcagtcccgcggg

SEQ ID NO: 1675250 - DNA, 25 bp, Homo sapien
tcctcgcgtcgtgcctgggtgccag

SEQ ID NO: 1675251 - DNA, 25 bp, Homo sapien
cgagtctggccgtcctcgcgtcgtg

SEQ ID NO: 1675252 - DNA, 25 bp, Homo sapien
tcgaatttcctcctcgggcaagaca

SEQ ID NO: 1675253 - DNA, 25 bp, Homo sapien
ccaatgactcattcctttggtctct

SEQ ID NO: 1675254 - DNA, 25 bp, Homo sapien
ctcttcccagatgccgagcgactcc

SEQ ID NO: 1675255 - DNA, 25 bp, Homo sapien
ttccaatgactcattcctttggtct

SEQ ID NO: 1675256 - DNA, 25 bp, Homo sapien
agatgccgagcgactccgcctccca

SEQ ID NO: 1675257 - DNA, 25 bp, Homo sapien
cggtccctcaatgacgcacaggtcc

SEQ ID NO: 1675258 - DNA, 25 bp, Homo sapien
gcgaaggcaagaggctcgggcgctt

SEQ ID NO: 1675259 - DNA, 25 bp, Homo sapien
cgggtgccgccctctttatttcact

SEQ ID NO: 1675260 - DNA, 25 bp, Homo sapien
acttccctctccgaaacgtgactct

SEQ ID NO: 1675261 - DNA, 25 bp, Homo sapien
acagccccgcgccaaccagggccag

SEQ ID NO: 1675262 - DNA, 25 bp, Homo sapien
gcgggccggcgtggcacagccccgc

SEQ ID NO: 1675263 - DNA, 25 bp, Homo sapien
gctgggccgcgcgggatacccgggc

SEQ ID NO: 1675264 - DNA, 25 bp, Homo sapien
ctggcgctgggccgcgcgggatacc

SEQ ID NO: 1675265 - DNA, 25 bp, Homo sapien
taaacccggagaacaatgaggccag

SEQ ID NO: 1675266 - DNA, 25 bp, Homo sapien
cttcaccgagcagacgccggagggt

SEQ ID NO: 1675267 - DNA, 25 bp, Homo sapien
tgcggcaccagaccgagcgagggtc

SEQ ID NO: 1675268 - DNA, 25 bp, Homo sapien
ccgtcgccctctgcggaggcgggag

SEQ ID NO: 1675269 - DNA, 25 bp, Homo sapien
tcttgttcacgatgtaggcgcacca

SEQ ID NO: 1675270 - DNA, 25 bp, Homo sapien
cattcttgttcacgatgtaggcgca

SEQ ID NO: 1675271 - DNA, 25 bp, Homo sapien
cacattcttgttcacgatgtaggcg

SEQ ID NO: 1675272 - DNA, 25 bp, Homo sapien
gttcacgatgtaggcgcaccagttc

SEQ ID NO: 1675273 - DNA, 25 bp, Homo sapien
cgacggacagggcatctggttccag

SEQ ID NO: 1675274 - DNA, 25 bp, Homo sapien
caggcacagttgtactgagcctgaa

SEQ ID NO: 1675275 - DNA, 25 bp, Homo sapien
tggttccaggcacagttgtactgag

SEQ ID NO: 1675276 - DNA, 25 bp, Homo sapien
ccagcgccgacggacagggcatctg

SEQ ID NO: 1675277 - DNA, 25 bp, Homo sapien
cgcgagcgctcggagcgcttttccg

SEQ ID NO: 1675278 - DNA, 25 bp, Homo sapien
ctaaatagcccagcgtggccggtgc

SEQ ID NO: 1675279 - DNA, 25 bp, Homo sapien
ggcagcacccactccctaaatagcc

SEQ ID NO: 1675280 - DNA, 25 bp, Homo sapien
cgagcgctcggagcgcttttccgct

SEQ ID NO: 1675281 - DNA, 25 bp, Homo sapien
tcgtcagcacaacagaccggactca

SEQ ID NO: 1675282 - DNA, 25 bp, Homo sapien
tcagagatgcctgacataaaccagg

SEQ ID NO: 1675283 - DNA, 25 bp, Homo sapien
gcatcgtcagcacaacagaccggac

SEQ ID NO: 1675284 - DNA, 25 bp, Homo sapien
gtcagagatgcctgacataaaccag

SEQ ID NO: 1675285 - DNA, 25 bp, Homo sapien
tcgcaaatctcgagagtggccagga

SEQ ID NO: 1675286 - DNA, 25 bp, Homo sapien
caccggccgtgagaaggagatctgt

SEQ ID NO: 1675287 - DNA, 25 bp, Homo sapien
gcagcaatgcaacagaatgactcgc

SEQ ID NO: 1675288 - DNA, 25 bp, Homo sapien
gacacgagatacagcggcatttctg

SEQ ID NO: 1675289 - DNA, 25 bp, Homo sapien
ctgagtgagtccctcctgtgcccct

SEQ ID NO: 1675290 - DNA, 25 bp, Homo sapien
tctggcacggactgccagtctcctg

SEQ ID NO: 1675291 - DNA, 25 bp, Homo sapien
ggcacggactgccagtctcctgagt

SEQ ID NO: 1675292 - DNA, 25 bp, Homo sapien
tgccagtctcctgagtgagtccctc

SEQ ID NO: 1675293 - DNA, 25 bp, Homo sapien
ggagcacacagatccccgctcagtg

SEQ ID NO: 1675294 - DNA, 25 bp, Homo sapien
cacagatccccgctcagtgccaaat

SEQ ID NO: 1675295 - DNA, 25 bp, Homo sapien
agcaggaggaactgcggtcccaggc

SEQ ID NO: 1675296 - DNA, 25 bp, Homo sapien
acagatccccgctcagtgccaaatc

SEQ ID NO: 1675297 - DNA, 25 bp, Homo sapien
cacttcagcatgtagctgcccatcc

SEQ ID NO: 1675298 - DNA, 25 bp, Homo sapien
ttagatcctgtacatcaagagaagt

SEQ ID NO: 1675299 - DNA, 25 bp, Homo sapien
ttcagacctttgggtgaaggccaca

SEQ ID NO: 1675300 - DNA, 25 bp, Homo sapien
gaagtggccgtgacatcccacttgg

SEQ ID NO: 1675301 - DNA, 25 bp, Homo sapien
cctccctcttcaaggactttggtca

SEQ ID NO: 1675302 - DNA, 25 bp, Homo sapien
ctccctcttcaaggactttggtcac

SEQ ID NO: 1675303 - DNA, 25 bp, Homo sapien
ctgggctttcactggtttgcagcac

SEQ ID NO: 1675304 - DNA, 25 bp, Homo sapien
gctttcactggtttgcagcaccggc

SEQ ID NO: 1675305 - DNA, 25 bp, Homo sapien
tttcactggtttgcagcaccggcac

SEQ ID NO: 1675306 - DNA, 25 bp, Homo sapien
ggctttcactggtttgcagcaccgg

SEQ ID NO: 1675307 - DNA, 25 bp, Homo sapien
atcctttctcctgctcttcccttga

SEQ ID NO: 1675308 - DNA, 25 bp, Homo sapien
tcctttctcctgctcttcccttgac

SEQ ID NO: 1675309 - DNA, 25 bp, Homo sapien
gggagacgcatcacaaaactcaagg

SEQ ID NO: 1675310 - DNA, 25 bp, Homo sapien
cactgtgggagacgcatcacaaaac

SEQ ID NO: 1675311 - DNA, 25 bp, Homo sapien
cttccactgtgggagacgcatcaca

SEQ ID NO: 1675312 - DNA, 25 bp, Homo sapien
gctcatgcatgccttccactgtggg

SEQ ID NO: 1675313 - DNA, 25 bp, Homo sapien
tgaaaatacccacatgtcccagagg

SEQ ID NO: 1675314 - DNA, 25 bp, Homo sapien
aaaatacccacatgtcccagaggga

SEQ ID NO: 1675315 - DNA, 25 bp, Homo sapien
ctgaaaatacccacatgtcccagag

SEQ ID NO: 1675316 - DNA, 25 bp, Homo sapien
aatacccacatgtcccagagggaat

SEQ ID NO: 1675317 - DNA, 25 bp, Homo sapien
tccagacctacgaatggaatcttcc

SEQ ID NO: 1675318 - DNA, 25 bp, Homo sapien
atccattccagacctacgaatggaa

SEQ ID NO: 1675319 - DNA, 25 bp, Homo sapien
tcatgagactgttgagtaatcagca

SEQ ID NO: 1675320 - DNA, 25 bp, Homo sapien
taatcagcagcaggcgcgcatctgt

SEQ ID NO: 1675321 - DNA, 25 bp, Homo sapien
aaatcatgtgctggacctttgacat

SEQ ID NO: 1675322 - DNA, 25 bp, Homo sapien
gaggaaagcacaaatcatgtgctgg

SEQ ID NO: 1675323 - DNA, 25 bp, Homo sapien
gcacaaatcatgtgctggacctttg

SEQ ID NO: 1675324 - DNA, 25 bp, Homo sapien
gaaagcacaaatcatgtgctggacc

SEQ ID NO: 1675325 - DNA, 25 bp, Homo sapien
cccagaaagcaataggctgagtgtc

SEQ ID NO: 1675326 - DNA, 25 bp, Homo sapien
ttcccagaaagcaataggctgagtg

SEQ ID NO: 1675327 - DNA, 25 bp, Homo sapien
cagaaagcaataggctgagtgtcac

SEQ ID NO: 1675328 - DNA, 25 bp, Homo sapien
tcccagaaagcaataggctgagtgt

SEQ ID NO: 1675329 - DNA, 25 bp, Homo sapien
ggacagcacctccattccaactgtg

SEQ ID NO: 1675330 - DNA, 25 bp, Homo sapien
ttcttggcaatctccccctctaaag

SEQ ID NO: 1675331 - DNA, 25 bp, Homo sapien
caactgtgtcactgtcttataccta

SEQ ID NO: 1675332 - DNA, 25 bp, Homo sapien
ttcaagctgtttcgaggccgagccg

SEQ ID NO: 1675333 - DNA, 25 bp, Homo sapien
tgtgctcaaagagtctcacagacat

SEQ ID NO: 1675334 - DNA, 25 bp, Homo sapien
tctgtgctcaaagagtctcacagac

SEQ ID NO: 1675335 - DNA, 25 bp, Homo sapien
acatctctgtgctcaaagagtctca

SEQ ID NO: 1675336 - DNA, 25 bp, Homo sapien
tctctgtgctcaaagagtctcacag

SEQ ID NO: 1675337 - DNA, 25 bp, Homo sapien
atgaacattttctacctttagccag

SEQ ID NO: 1675338 - DNA, 25 bp, Homo sapien
aacattttctacctttagccagatt

SEQ ID NO: 1675339 - DNA, 25 bp, Homo sapien
gaatgaacattttctacctttagcc

SEQ ID NO: 1675340 - DNA, 25 bp, Homo sapien
tgaacattttctacctttagccaga

SEQ ID NO: 1675341 - DNA, 25 bp, Homo sapien
ctgttacaaagataaagttggacat

SEQ ID NO: 1675342 - DNA, 25 bp, Homo sapien
cttttggatctaccccccagcttgg

SEQ ID NO: 1675343 - DNA, 25 bp, Homo sapien
accagttggggacaaagtcttcctg

SEQ ID NO: 1675344 - DNA, 25 bp, Homo sapien
taccccccagcttggttgtgctgta

SEQ ID NO: 1675345 - DNA, 25 bp, Homo sapien
tcctgggctctgagaattggctggg

SEQ ID NO: 1675346 - DNA, 25 bp, Homo sapien
tatgagctctatcactcccaggtag

SEQ ID NO: 1675347 - DNA, 25 bp, Homo sapien
gaaccgtccttgtgagtcgaagaac

SEQ ID NO: 1675348 - DNA, 25 bp, Homo sapien
tctggctctggaactataaggcggt

SEQ ID NO: 1675349 - DNA, 25 bp, Homo sapien
taaggcggtcaaactcattgtccag

SEQ ID NO: 1675350 - DNA, 25 bp, Homo sapien
gctctgcaccagtgttattggtcat

SEQ ID NO: 1675351 - DNA, 25 bp, Homo sapien
agctctgcaccagtgttattggtca

SEQ ID NO: 1675352 - DNA, 25 bp, Homo sapien
gagctctgcaccagtgttattggtc

SEQ ID NO: 1675353 - DNA, 25 bp, Homo sapien
ggtttaattccatcatgacccgttc

SEQ ID NO: 1675354 - DNA, 25 bp, Homo sapien
aaaaggtgcaggctgtcgcgtactg

SEQ ID NO: 1675355 - DNA, 25 bp, Homo sapien
gcatcgtgtcgttgagagatttcaa

SEQ ID NO: 1675356 - DNA, 25 bp, Homo sapien
tactgcgcggtcttccctgtttggc

SEQ ID NO: 1675357 - DNA, 25 bp, Homo sapien
gtgaacctacccatgccagcgtttt

SEQ ID NO: 1675358 - DNA, 25 bp, Homo sapien
ctggatggtttgttcggtttcttga

SEQ ID NO: 1675359 - DNA, 25 bp, Homo sapien
gttgaagtttctggatggtttgttc

SEQ ID NO: 1675360 - DNA, 25 bp, Homo sapien
cttagtgaacctacccatgccagcg

SEQ ID NO: 1675361 - DNA, 25 bp, Homo sapien
aatgtctctggaatgcgacctgagc

SEQ ID NO: 1675362 - DNA, 25 bp, Homo sapien
tcagtagaaatctggaagacgtggc

SEQ ID NO: 1675363 - DNA, 25 bp, Homo sapien
tacaagcatccagctccgagatgac

SEQ ID NO: 1675364 - DNA, 25 bp, Homo sapien
tgctgacatgcttgttgagcccctc

SEQ ID NO: 1675365 - DNA, 25 bp, Homo sapien
ctaagatgcagtagagcagctgcgg

SEQ ID NO: 1675366 - DNA, 25 bp, Homo sapien
cagtagagcagctgcggtttacacg

SEQ ID NO: 1675367 - DNA, 25 bp, Homo sapien
aaagggcatcgtagaaacctggtgc

SEQ ID NO: 1675368 - DNA, 25 bp, Homo sapien
tgcggtttacacgaaccaaagggca

SEQ ID NO: 1675369 - DNA, 25 bp, Homo sapien
ggaaagctccattctccgaacactg

SEQ ID NO: 1675370 - DNA, 25 bp, Homo sapien
aagctccattctccgaacactgcag

SEQ ID NO: 1675371 - DNA, 25 bp, Homo sapien
gaaagctccattctccgaacactgc

SEQ ID NO: 1675372 - DNA, 25 bp, Homo sapien
gctccattctccgaacactgcagct

SEQ ID NO: 1675373 - DNA, 25 bp, Homo sapien
tcagagaaactgtcgcttgtggtgc

SEQ ID NO: 1675374 - DNA, 25 bp, Homo sapien
catcacggactgaagcatgagaaat

SEQ ID NO: 1675375 - DNA, 25 bp, Homo sapien
gaaatgctggactcatcagaaaatt

SEQ ID NO: 1675376 - DNA, 25 bp, Homo sapien
tcgcttgtggtgctaaatgggcccg

SEQ ID NO: 1675377 - DNA, 25 bp, Homo sapien
gttccaaagcgcaacacatttgatt

SEQ ID NO: 1675378 - DNA, 25 bp, Homo sapien
cgatgcccagagttccaaagcgcaa

SEQ ID NO: 1675379 - DNA, 25 bp, Homo sapien
ctcccgacctgccgtctagttttgt

SEQ ID NO: 1675380 - DNA, 25 bp, Homo sapien
gacccgacaaaaatcggcggctgcc

SEQ ID NO: 1675381 - DNA, 25 bp, Homo sapien
gaccgtccacgggacgcctgacaat

SEQ ID NO: 1675382 - DNA, 25 bp, Homo sapien
gaggaagctcctggcgtgcgtctcc

SEQ ID NO: 1675383 - DNA, 25 bp, Homo sapien
tgagggacccgctcgccaagaaacg

SEQ ID NO: 1675384 - DNA, 25 bp, Homo sapien
ccagcggaagggacttccaacggag

SEQ ID NO: 1675385 - DNA, 25 bp, Homo sapien
tcttggctccggcatcaacaattcc

SEQ ID NO: 1675386 - DNA, 25 bp, Homo sapien
aaccgcgggtgcgtcgcaagtgact

SEQ ID NO: 1675387 - DNA, 25 bp, Homo sapien
caattcccgatttcacagcacgcgg

SEQ ID NO: 1675388 - DNA, 25 bp, Homo sapien
ctgcactttccaaaccggcctcact

SEQ ID NO: 1675389 - DNA, 25 bp, Homo sapien
cacacgggattaggaaacctcagcc

SEQ ID NO: 1675390 - DNA, 25 bp, Homo sapien
ggtccccgtgaggactctgcggcca

SEQ ID NO: 1675391 - DNA, 25 bp, Homo sapien
cctgcgacgtcaggccagcgggaca

SEQ ID NO: 1675392 - DNA, 25 bp, Homo sapien
tcagggtcccctccatgagtcccgg

SEQ ID NO: 1675393 - DNA, 25 bp, Homo sapien
tgcgggcggcgggggcgagggcgcc

SEQ ID NO: 1675394 - DNA, 25 bp, Homo sapien
ctgcgggcggcgggggcgagggcgc

SEQ ID NO: 1675395 - DNA, 25 bp, Homo sapien
acgggccgtcgcccagggtcctctg

SEQ ID NO: 1675396 - DNA, 25 bp, Homo sapien
gcaggacgggccgtcgcccagggtc

SEQ ID NO: 1675397 - DNA, 25 bp, Homo sapien
ccgtctccgcgatgaccccggtgga

SEQ ID NO: 1675398 - DNA, 25 bp, Homo sapien
gcccgtctccgcgatgaccccggtg

SEQ ID NO: 1675399 - DNA, 25 bp, Homo sapien
gtctccgcgatgaccccggtggagc

SEQ ID NO: 1675400 - DNA, 25 bp, Homo sapien
ggcctggcccgtctccgcgatgacc

SEQ ID NO: 1675401 - DNA, 25 bp, Homo sapien
ctggccgtccacgccccgcggcaga

SEQ ID NO: 1675402 - DNA, 25 bp, Homo sapien
tggccgtccacgccccgcggcagac

SEQ ID NO: 1675403 - DNA, 25 bp, Homo sapien
ctggtgcgcccgcgaagccttctgc

SEQ ID NO: 1675404 - DNA, 25 bp, Homo sapien
ggtgcgcccgcgaagccttctgcgc

SEQ ID NO: 1675405 - DNA, 25 bp, Homo sapien
tggtgcgcccgcgaagccttctgcg

SEQ ID NO: 1675406 - DNA, 25 bp, Homo sapien
gtgcgcccgcgaagccttctgcgcc

SEQ ID NO: 1675407 - DNA, 25 bp, Homo sapien
tggactagcatgagcggtccctcgg

SEQ ID NO: 1675408 - DNA, 25 bp, Homo sapien
gaatcaatgagctgcccgtgtggca

SEQ ID NO: 1675409 - DNA, 25 bp, Homo sapien
cagacgactgcactgtccctgaggt

SEQ ID NO: 1675410 - DNA, 25 bp, Homo sapien
tccaaagctgcatttcggaacttgc

SEQ ID NO: 1675411 - DNA, 25 bp, Homo sapien
ttgctgctacccaagctcccaatac

SEQ ID NO: 1675412 - DNA, 25 bp, Homo sapien
ctgctttgctgctacccaagctccc

SEQ ID NO: 1675413 - DNA, 25 bp, Homo sapien
gcccatttatccctggcggggaaga

SEQ ID NO: 1675414 - DNA, 25 bp, Homo sapien
ccatttatccctggcggggaagagg

SEQ ID NO: 1675415 - DNA, 25 bp, Homo sapien
ttatccctggcggggaagagggcac

SEQ ID NO: 1675416 - DNA, 25 bp, Homo sapien
tagcccatttatccctggcggggaa

SEQ ID NO: 1675417 - DNA, 25 bp, Homo sapien
gaagctacaggaggtgacttcgggt

SEQ ID NO: 1675418 - DNA, 25 bp, Homo sapien
gctacaggaggtgacttcgggtatc

SEQ ID NO: 1675419 - DNA, 25 bp, Homo sapien
aagctacaggaggtgacttcgggta

SEQ ID NO: 1675420 - DNA, 25 bp, Homo sapien
gggaagctacaggaggtgacttcgg

SEQ ID NO: 1675421 - DNA, 25 bp, Homo sapien
aaagacaccagagaaggcaccggag

SEQ ID NO: 1675422 - DNA, 25 bp, Homo sapien
tgctggggttgtaaacatccccgtc

SEQ ID NO: 1675423 - DNA, 25 bp, Homo sapien
atccccgtcgttcaccagcactttg

SEQ ID NO: 1675424 - DNA, 25 bp, Homo sapien
gcactttgttaaagaggacaacgcc

SEQ ID NO: 1675425 - DNA, 25 bp, Homo sapien
gaggacacagtaccagttccgttca

SEQ ID NO: 1675426 - DNA, 25 bp, Homo sapien
gtaggaggaggacacagtaccagtt

SEQ ID NO: 1675427 - DNA, 25 bp, Homo sapien
agtaccagttccgttcaaacactca

SEQ ID NO: 1675428 - DNA, 25 bp, Homo sapien
cacagtaccagttccgttcaaacac

SEQ ID NO: 1675429 - DNA, 25 bp, Homo sapien
ctgggaaccagccagccatggtggg

SEQ ID NO: 1675430 - DNA, 25 bp, Homo sapien
gggaaccagccagccatggtgggag

SEQ ID NO: 1675431 - DNA, 25 bp, Homo sapien
ccagccatggtgggaggggtcccac

SEQ ID NO: 1675432 - DNA, 25 bp, Homo sapien
agccagccatggtgggaggggtccc

SEQ ID NO: 1675433 - DNA, 25 bp, Homo sapien
ggacacgttctacgtgaaagcccac

SEQ ID NO: 1675434 - DNA, 25 bp, Homo sapien
ctgcagccctcgagctgggacacgt

SEQ ID NO: 1675435 - DNA, 25 bp, Homo sapien
gctgggacacgttctacgtgaaagc

SEQ ID NO: 1675436 - DNA, 25 bp, Homo sapien
tgaaagcccacagagtcgggcagag

SEQ ID NO: 1675437 - DNA, 25 bp, Homo sapien
cagccctggcgttttgagtgtggcc

SEQ ID NO: 1675438 - DNA, 25 bp, Homo sapien
cgttttgagtgtggccttcaccttt

SEQ ID NO: 1675439 - DNA, 25 bp, Homo sapien
agcaccagccctggcgttttgagtg

SEQ ID NO: 1675440 - DNA, 25 bp, Homo sapien
cctggcgttttgagtgtggccttca

SEQ ID NO: 1675441 - DNA, 25 bp, Homo sapien
agagtggacataaagcggagggccc

SEQ ID NO: 1675442 - DNA, 25 bp, Homo sapien
caagagtggacataaagcggagggc

SEQ ID NO: 1675443 - DNA, 25 bp, Homo sapien
agccaagagtggacataaagcggag

SEQ ID NO: 1675444 - DNA, 25 bp, Homo sapien
acaagccaagagtggacataaagcg

SEQ ID NO: 1675445 - DNA, 25 bp, Homo sapien
ccgcagcagacatcggaccttgccg

SEQ ID NO: 1675446 - DNA, 25 bp, Homo sapien
tccgcagcagacatcggaccttgcc

SEQ ID NO: 1675447 - DNA, 25 bp, Homo sapien
gagagtcagtgccaacaccaaatgc

SEQ ID NO: 1675448 - DNA, 25 bp, Homo sapien
ccaaatgccggcaggaatggccatc

SEQ ID NO: 1675449 - DNA, 25 bp, Homo sapien
agtcagtgccaacaccaaatgccgg

SEQ ID NO: 1675450 - DNA, 25 bp, Homo sapien
accaaatgccggcaggaatggccat

SEQ ID NO: 1675451 - DNA, 25 bp, Homo sapien
ctgctgtcgtcacagcccttgccat

SEQ ID NO: 1675452 - DNA, 25 bp, Homo sapien
gtggccgtgatcaggtagcgcccat

SEQ ID NO: 1675453 - DNA, 25 bp, Homo sapien
cgtgatcaggtagcgcccatcataa

SEQ ID NO: 1675454 - DNA, 25 bp, Homo sapien
caggtagcgcccatcataaggagcc

SEQ ID NO: 1675455 - DNA, 25 bp, Homo sapien
tcaggtagcgcccatcataaggagc

SEQ ID NO: 1675456 - DNA, 25 bp, Homo sapien
tcccgccttcaggtgcacgatgagg

SEQ ID NO: 1675457 - DNA, 25 bp, Homo sapien
caggtatgcaaagctcctggagggc

SEQ ID NO: 1675458 - DNA, 25 bp, Homo sapien
gttggagaccgacagcactgcttcc

SEQ ID NO: 1675459 - DNA, 25 bp, Homo sapien
tctcctgtacccagcggtatgcagc

SEQ ID NO: 1675460 - DNA, 25 bp, Homo sapien
aatgtggagtacatttcatcaaagt

SEQ ID NO: 1675461 - DNA, 25 bp, Homo sapien
taaatgtggagtacatttcatcaaa

SEQ ID NO: 1675462 - DNA, 25 bp, Homo sapien
aaatgtggagtacatttcatcaaag

SEQ ID NO: 1675463 - DNA, 25 bp, Homo sapien
atgtggagtacatttcatcaaagtc

SEQ ID NO: 1675464 - DNA, 25 bp, Homo sapien
tagaggtgggaaaggaaaggatata

SEQ ID NO: 1675465 - DNA, 25 bp, Homo sapien
ctgagcaggttaagtcccaggcggc

SEQ ID NO: 1675466 - DNA, 25 bp, Homo sapien
tatgtggaaactctagccccgtgct

SEQ ID NO: 1675467 - DNA, 25 bp, Homo sapien
ctatttgcagctgggcgaaggcccg

SEQ ID NO: 1675468 - DNA, 25 bp, Homo sapien
ccagggccctcagagtgtagataca

SEQ ID NO: 1675469 - DNA, 25 bp, Homo sapien
gggtaacagttttgtagctgagatt

SEQ ID NO: 1675470 - DNA, 25 bp, Homo sapien
tactcaaggttactttctgtagccc

SEQ ID NO: 1675471 - DNA, 25 bp, Homo sapien
cccgatctgtaagggaccacactta

SEQ ID NO: 1675472 - DNA, 25 bp, Homo sapien
cagtttgctttttagcaacaactcc

SEQ ID NO: 1675473 - DNA, 25 bp, Homo sapien
cttcacaagccagaaacaaaaccca

SEQ ID NO: 1675474 - DNA, 25 bp, Homo sapien
ccagaaacaaaacccaagtgtatag

SEQ ID NO: 1675475 - DNA, 25 bp, Homo sapien
acaagccagaaacaaaacccaagtg

SEQ ID NO: 1675476 - DNA, 25 bp, Homo sapien
agccagaaacaaaacccaagtgtat

SEQ ID NO: 1675477 - DNA, 25 bp, Homo sapien
agcgttaggttgagcttcctgctgc

SEQ ID NO: 1675478 - DNA, 25 bp, Homo sapien
tgctgcttagaaacccaagagctcg

SEQ ID NO: 1675479 - DNA, 25 bp, Homo sapien
ggatcaagttagcctgggcagctgc

SEQ ID NO: 1675480 - DNA, 25 bp, Homo sapien
caagagctcggcgagctgtgtctgc

SEQ ID NO: 1675481 - DNA, 25 bp, Homo sapien
gaactaagggtgctgagaggtctcc

SEQ ID NO: 1675482 - DNA, 25 bp, Homo sapien
cgccgagtgcggtcttttcaaaagg

SEQ ID NO: 1675483 - DNA, 25 bp, Homo sapien
ggtgacagattgatactcccgggcc

SEQ ID NO: 1675484 - DNA, 25 bp, Homo sapien
cagcataagagcatcttgtgggcca

SEQ ID NO: 1675485 - DNA, 25 bp, Homo sapien
cattgttggtgagtagagatgcact

SEQ ID NO: 1675486 - DNA, 25 bp, Homo sapien
ttgttggtgagtagagatgcactga

SEQ ID NO: 1675487 - DNA, 25 bp, Homo sapien
gagtagagatgcactgagaggagga

SEQ ID NO: 1675488 - DNA, 25 bp, Homo sapien
tagagatgcactgagaggaggactg

SEQ ID NO: 1675489 - DNA, 25 bp, Homo sapien
ttatctcaaagtagaggcacgctcc

SEQ ID NO: 1675490 - DNA, 25 bp, Homo sapien
gactgactcgcaggcactacttcag

SEQ ID NO: 1675491 - DNA, 25 bp, Homo sapien
taaagatgtctcctaagtgggccag

SEQ ID NO: 1675492 - DNA, 25 bp, Homo sapien
ttgaagggctgcttcgaaccccaca

SEQ ID NO: 1675493 - DNA, 25 bp, Homo sapien
tttacccagagcagctttgagggct

SEQ ID NO: 1675494 - DNA, 25 bp, Homo sapien
caaccatgggtctttgggaatgcaa

SEQ ID NO: 1675495 - DNA, 25 bp, Homo sapien
gagcagtgaactttgcatacctgag

SEQ ID NO: 1675496 - DNA, 25 bp, Homo sapien
tacctgagctctgaggacgtgcctg

SEQ ID NO: 1675497 - DNA, 25 bp, Homo sapien
gagtctttccctgaagtaagtgctc

SEQ ID NO: 1675498 - DNA, 25 bp, Homo sapien
ttttcccgtgttgtagagcttccag

SEQ ID NO: 1675499 - DNA, 25 bp, Homo sapien
caggtgcaggccaaccctttaaaga

SEQ ID NO: 1675500 - DNA, 25 bp, Homo sapien
tgggatgtcctaaaatgaaagctgc

SEQ ID NO: 1675501 - DNA, 25 bp, Homo sapien
tctctcagttactccattggtgaaa

SEQ ID NO: 1675502 - DNA, 25 bp, Homo sapien
tcgtgtagacctggagcatgcaggc

SEQ ID NO: 1675503 - DNA, 25 bp, Homo sapien
gctgcctccgtttttgggtactgtg

SEQ ID NO: 1675504 - DNA, 25 bp, Homo sapien
tgtgctgaagctcgtcccgtgtgag

SEQ ID NO: 1675505 - DNA, 25 bp, Homo sapien
tgaattctagtacagcagccatgca

SEQ ID NO: 1675506 - DNA, 25 bp, Homo sapien
tatcttcagtgacgggtgacggctc

SEQ ID NO: 1675507 - DNA, 25 bp, Homo sapien
tatctacagtaggttagggatcctg

SEQ ID NO: 1675508 - DNA, 25 bp, Homo sapien
tctgtgaaagagatgccctcgagtg

SEQ ID NO: 1675509 - DNA, 25 bp, Homo sapien
aaaggtgtgccataagctgctccag

SEQ ID NO: 1675510 - DNA, 25 bp, Homo sapien
tccattggcgagaacacaggacgtg

SEQ ID NO: 1675511 - DNA, 25 bp, Homo sapien
catgcccctgccgttgtagtggaac

SEQ ID NO: 1675512 - DNA, 25 bp, Homo sapien
caactctgcttttagggaggcctcc

SEQ ID NO: 1675513 - DNA, 25 bp, Homo sapien
ccccagaatttatacgaaggacgct

SEQ ID NO: 1675514 - DNA, 25 bp, Homo sapien
tacctgcactgggtcaatgacaagg

SEQ ID NO: 1675515 - DNA, 25 bp, Homo sapien
aagaatctgtttgccccgtctaagc

SEQ ID NO: 1675516 - DNA, 25 bp, Homo sapien
cagaagtcagatgttggagccgcca

SEQ ID NO: 1675517 - DNA, 25 bp, Homo sapien
ccaagtaagctcaatccttcaggtg

SEQ ID NO: 1675518 - DNA, 25 bp, Homo sapien
aaaactgaagctccacgatggccca

SEQ ID NO: 1675519 - DNA, 25 bp, Homo sapien
tatcaaggcacctgtcgctgtgcag

SEQ ID NO: 1675520 - DNA, 25 bp, Homo sapien
tgcagggaccatttacctgtggaac

SEQ ID NO: 1675521 - DNA, 25 bp, Homo sapien
catccggagccaaagggagacatac

SEQ ID NO: 1675522 - DNA, 25 bp, Homo sapien
tgagaggagttgctcgcgatacgcc

SEQ ID NO: 1675523 - DNA, 25 bp, Homo sapien
ctttggacagttagggtgagcagcc

SEQ ID NO: 1675524 - DNA, 25 bp, Homo sapien
tatttgtgccactcagcagatgaca

SEQ ID NO: 1675525 - DNA, 25 bp, Homo sapien
gagatgttcgagttgccatttcaca

SEQ ID NO: 1675526 - DNA, 25 bp, Homo sapien
ccaagtggtcctttactgtagctca

SEQ ID NO: 1675527 - DNA, 25 bp, Homo sapien
tttgagcacttaggacgtgcaggtg

SEQ ID NO: 1675528 - DNA, 25 bp, Homo sapien
cgtgcaggtgttgtcccaagtggtc

SEQ ID NO: 1675529 - DNA, 25 bp, Homo sapien
tggtctcatgccacagagctgtgct

SEQ ID NO: 1675530 - DNA, 25 bp, Homo sapien
tgtctctcagaggtgttaaaaacgc

SEQ ID NO: 1675531 - DNA, 25 bp, Homo sapien
tagggcagatggtggctaacatacc

SEQ ID NO: 1675532 - DNA, 25 bp, Homo sapien
ggtcctacatagcagaccgcctggt

SEQ ID NO: 1675533 - DNA, 25 bp, Homo sapien
ttcagctgatcatctttattgaaaa

SEQ ID NO: 1675534 - DNA, 25 bp, Homo sapien
actttcactgtgtaatggttttgca

SEQ ID NO: 1675535 - DNA, 25 bp, Homo sapien
agttactataactgggctttggcag

SEQ ID NO: 1675536 - DNA, 25 bp, Homo sapien
tcccatgatccttagcttgcaagta

SEQ ID NO: 1675537 - DNA, 25 bp, Homo sapien
gctaaagctgtaagacccctatgaa

SEQ ID NO: 1675538 - DNA, 25 bp, Homo sapien
tgaatattccccagttatgccgttg

SEQ ID NO: 1675539 - DNA, 25 bp, Homo sapien
tatgccgttgcctgtcagtaaagtt

SEQ ID NO: 1675540 - DNA, 25 bp, Homo sapien
cacagaccttgagccaaattctagg

SEQ ID NO: 1675541 - DNA, 25 bp, Homo sapien
catctgtggcagagcttctcgaacc

SEQ ID NO: 1675542 - DNA, 25 bp, Homo sapien
gaacgatctgaccatcatcctagga

SEQ ID NO: 1675543 - DNA, 25 bp, Homo sapien
gaatgaacacattgccagcttagga

SEQ ID NO: 1675544 - DNA, 25 bp, Homo sapien
tgtctgtaccatagtgaagcccaaa

SEQ ID NO: 1675545 - DNA, 25 bp, Homo sapien
ccggccagaacatttataagtatca

SEQ ID NO: 1675546 - DNA, 25 bp, Homo sapien
ggccagaacatttataagtatcatg

SEQ ID NO: 1675547 - DNA, 25 bp, Homo sapien
catttataagtatcatgatattgaa

SEQ ID NO: 1675548 - DNA, 25 bp, Homo sapien
ccagaacatttataagtatcatgat

SEQ ID NO: 1675549 - DNA, 25 bp, Homo sapien
aacatgtggactaaaaaagatgctg

SEQ ID NO: 1675550 - DNA, 25 bp, Homo sapien
ctggagtacctattttccatgaggg

SEQ ID NO: 1675551 - DNA, 25 bp, Homo sapien
tggagggtgttcaaagacatatcgg

SEQ ID NO: 1675552 - DNA, 25 bp, Homo sapien
gattgggacctcatgtaagaatgga

SEQ ID NO: 1675553 - DNA, 25 bp, Homo sapien
ttttcctgatggtgtgaaaggctgt

SEQ ID NO: 1675554 - DNA, 25 bp, Homo sapien
tgtttttcctgatggtgtgaaaggc

SEQ ID NO: 1675555 - DNA, 25 bp, Homo sapien
tttttcctgatggtgtgaaaggctg

SEQ ID NO: 1675556 - DNA, 25 bp, Homo sapien
cttgtttttcctgatggtgtgaaag

SEQ ID NO: 1675557 - DNA, 25 bp, Homo sapien
catctgtcgaaaagaggtcacaccc

SEQ ID NO: 1675558 - DNA, 25 bp, Homo sapien
caccttggcactaggaccgtggtgg

SEQ ID NO: 1675559 - DNA, 25 bp, Homo sapien
tggtgacgactggacaagaagctgc

SEQ ID NO: 1675560 - DNA, 25 bp, Homo sapien
gcagttgggagtagaacacgttttc

SEQ ID NO: 1675561 - DNA, 25 bp, Homo sapien
ccctttggtgaaatcgggtggagat

SEQ ID NO: 1675562 - DNA, 25 bp, Homo sapien
taaagatattgacacccctttggtg

SEQ ID NO: 1675563 - DNA, 25 bp, Homo sapien
tctcacacgtcttggaaacagagac

SEQ ID NO: 1675564 - DNA, 25 bp, Homo sapien
tcaccaattcctactgaagatcagt

SEQ ID NO: 1675565 - DNA, 25 bp, Homo sapien
tgggagtcctgagatccaaagagaa

SEQ ID NO: 1675566 - DNA, 25 bp, Homo sapien
aaagtggtgagtgtcctcaaggaga

SEQ ID NO: 1675567 - DNA, 25 bp, Homo sapien
tcacgttcggtttggaaagctggga

SEQ ID NO: 1675568 - DNA, 25 bp, Homo sapien
caaagagaaagtggtgagtgtcctc

SEQ ID NO: 1675569 - DNA, 25 bp, Homo sapien
gctgctcatcatacccagggtgtag

SEQ ID NO: 1675570 - DNA, 25 bp, Homo sapien
cgtaactaacggtgaggaagcctct

SEQ ID NO: 1675571 - DNA, 25 bp, Homo sapien
tgcctatgacgaacaactgcatttc

SEQ ID NO: 1675572 - DNA, 25 bp, Homo sapien
tggcactagattctgcttcaagagc

SEQ ID NO: 1675573 - DNA, 25 bp, Homo sapien
tactgcagcagaataccatagatgg

SEQ ID NO: 1675574 - DNA, 25 bp, Homo sapien
tagtgagtctctgtcaactgtaacg

SEQ ID NO: 1675575 - DNA, 25 bp, Homo sapien
tcggagctcccaatacttaatctag

SEQ ID NO: 1675576 - DNA, 25 bp, Homo sapien
gagtcagagtagacccaatcagttc

SEQ ID NO: 1675577 - DNA, 25 bp, Homo sapien
gctgcgtgggtacctttgcgtttca

SEQ ID NO: 1675578 - DNA, 25 bp, Homo sapien
gggtacctttgcgtttcatcactta

SEQ ID NO: 1675579 - DNA, 25 bp, Homo sapien
ttgcgtttcatcacttacttttggg

SEQ ID NO: 1675580 - DNA, 25 bp, Homo sapien
gcagctgctgcgtgggtacctttgc

SEQ ID NO: 1675581 - DNA, 25 bp, Homo sapien
tagactgcgctgtgttgtatactct

SEQ ID NO: 1675582 - DNA, 25 bp, Homo sapien
tcttctgtctagctaagttgtaacc

SEQ ID NO: 1675583 - DNA, 25 bp, Homo sapien
ctagctaagttgtaacctcctttcg

SEQ ID NO: 1675584 - DNA, 25 bp, Homo sapien
actgcgctgtgttgtatactcttcc

SEQ ID NO: 1675585 - DNA, 25 bp, Homo sapien
cattgtgatgaaaaagctgtctgga

SEQ ID NO: 1675586 - DNA, 25 bp, Homo sapien
attacatcgagaggcctttcccggg

SEQ ID NO: 1675587 - DNA, 25 bp, Homo sapien
gaggcactgggttttcgtttacaga

SEQ ID NO: 1675588 - DNA, 25 bp, Homo sapien
cagaaacaggccagtataatgggca

SEQ ID NO: 1675589 - DNA, 25 bp, Homo sapien
caacaccagctcagaacgattcaaa

SEQ ID NO: 1675590 - DNA, 25 bp, Homo sapien
cagatctagccattgcattatgtgt

SEQ ID NO: 1675591 - DNA, 25 bp, Homo sapien
ttaccttcagatctagccattgcat

SEQ ID NO: 1675592 - DNA, 25 bp, Homo sapien
ccttcagatctagccattgcattat

SEQ ID NO: 1675593 - DNA, 25 bp, Homo sapien
ttcagatctagccattgcattatgt

SEQ ID NO: 1675594 - DNA, 25 bp, Homo sapien
caagacctgggtcccgtattataga

SEQ ID NO: 1675595 - DNA, 25 bp, Homo sapien
ctgaaatcattgaaatccagggagc

SEQ ID NO: 1675596 - DNA, 25 bp, Homo sapien
tgtcagccagcagataccaagacct

SEQ ID NO: 1675597 - DNA, 25 bp, Homo sapien
ggtgcctctctgagcactgaaatca

SEQ ID NO: 1675598 - DNA, 25 bp, Homo sapien
cagtgttccaagctggtgggccttc

SEQ ID NO: 1675599 - DNA, 25 bp, Homo sapien
ttctgcatcccatctcaggtagccc

SEQ ID NO: 1675600 - DNA, 25 bp, Homo sapien
cctcccagtcttgggtggccttggc

SEQ ID NO: 1675601 - DNA, 25 bp, Homo sapien
tgcatcccatctcaggtagcccagc

SEQ ID NO: 1675602 - DNA, 25 bp, Homo sapien
ctgaagtagacactgtcgttgagta

SEQ ID NO: 1675603 - DNA, 25 bp, Homo sapien
ctgtcgttgagtaaaggtctgggcc

SEQ ID NO: 1675604 - DNA, 25 bp, Homo sapien
ccgccactcggagagagggtgcatt

SEQ ID NO: 1675605 - DNA, 25 bp, Homo sapien
gctatactgggaaagcgtcttccct

SEQ ID NO: 1675606 - DNA, 25 bp, Homo sapien
cacaatctgttgtggatgtacgttc

SEQ ID NO: 1675607 - DNA, 25 bp, Homo sapien
gaaacatccttgctcctcttacgaa

SEQ ID NO: 1675608 - DNA, 25 bp, Homo sapien
tgtccagaaaattattgggctgatg

SEQ ID NO: 1675609 - DNA, 25 bp, Homo sapien
gaaaactggtattggcttttgaaga

SEQ ID NO: 1675610 - DNA, 25 bp, Homo sapien
ctaaatgttcatgccgcgtggtggg

SEQ ID NO: 1675611 - DNA, 25 bp, Homo sapien
agtttgaaggtagcctaaatgttca

SEQ ID NO: 1675612 - DNA, 25 bp, Homo sapien
cctaaatgttcatgccgcgtggtgg

SEQ ID NO: 1675613 - DNA, 25 bp, Homo sapien
tcaagagtttgaaggtagcctaaat

SEQ ID NO: 1675614 - DNA, 25 bp, Homo sapien
gagtgcagtgtaggaggcaacctct

SEQ ID NO: 1675615 - DNA, 25 bp, Homo sapien
cctgttttgcgtgggaagtggtaca

SEQ ID NO: 1675616 - DNA, 25 bp, Homo sapien
gccttctaaggagctaggacctcag

SEQ ID NO: 1675617 - DNA, 25 bp, Homo sapien
ggatccaaaggctcttacggcttag

SEQ ID NO: 1675618 - DNA, 25 bp, Homo sapien
ggtggcctgatcatgaggattcccc

SEQ ID NO: 1675619 - DNA, 25 bp, Homo sapien
gcacctcagtgactgcaacgtgcac

SEQ ID NO: 1675620 - DNA, 25 bp, Homo sapien
cattctgggatcatttggaggcttt

SEQ ID NO: 1675621 - DNA, 25 bp, Homo sapien
ggaggctttcaaaagtacttgcagt

SEQ ID NO: 1675622 - DNA, 25 bp, Homo sapien
gaaaggaacaggaactactacacca

SEQ ID NO: 1675623 - DNA, 25 bp, Homo sapien
ggtatcttggtgagttacatctccc

SEQ ID NO: 1675624 - DNA, 25 bp, Homo sapien
tctggacactactgagagacaaggg

SEQ ID NO: 1675625 - DNA, 25 bp, Homo sapien
gacaagtcccctcctggtatcttgg

SEQ ID NO: 1675626 - DNA, 25 bp, Homo sapien
tcccttcgctgcttgctcaatctgg

SEQ ID NO: 1675627 - DNA, 25 bp, Homo sapien
gcaccccaatatccggtttttatca

SEQ ID NO: 1675628 - DNA, 25 bp, Homo sapien
tccggtttttatcactaccatctga

SEQ ID NO: 1675629 - DNA, 25 bp, Homo sapien
caatatccggtttttatcactacca

SEQ ID NO: 1675630 - DNA, 25 bp, Homo sapien
cggcagcaccccaatatccggtttt

SEQ ID NO: 1675631 - DNA, 25 bp, Homo sapien
aatctctctttctcctactagcctc

SEQ ID NO: 1675632 - DNA, 25 bp, Homo sapien
tgctatccagttgaatattttctca

SEQ ID NO: 1675633 - DNA, 25 bp, Homo sapien
tcctgctatccagttgaatattttc

SEQ ID NO: 1675634 - DNA, 25 bp, Homo sapien
ctttctcctactagcctccccttct

SEQ ID NO: 1675635 - DNA, 25 bp, Homo sapien
tgggtccatagtacatgttccttgc

SEQ ID NO: 1675636 - DNA, 25 bp, Homo sapien
gtccatagtacatgttccttgcagt

SEQ ID NO: 1675637 - DNA, 25 bp, Homo sapien
tgatgggtccatagtacatgttcct

SEQ ID NO: 1675638 - DNA, 25 bp, Homo sapien
ggtccatagtacatgttccttgcag

SEQ ID NO: 1675639 - DNA, 25 bp, Homo sapien
tggaagcagaactttggctaccagc

SEQ ID NO: 1675640 - DNA, 25 bp, Homo sapien
tatccatcaagactgaaaagtgcca

SEQ ID NO: 1675641 - DNA, 25 bp, Homo sapien
tggccataggaggaaactttaggtg

SEQ ID NO: 1675642 - DNA, 25 bp, Homo sapien
gctttgaaggtcagggtgatccaca

SEQ ID NO: 1675643 - DNA, 25 bp, Homo sapien
ctggagggaggtagtatcattgtcc

SEQ ID NO: 1675644 - DNA, 25 bp, Homo sapien
aagactggagggaggtagtatcatt

SEQ ID NO: 1675645 - DNA, 25 bp, Homo sapien
gggtgctggcatcataccaggatga

SEQ ID NO: 1675646 - DNA, 25 bp, Homo sapien
tcataccaggatgaggaggacccag

SEQ ID NO: 1675647 - DNA, 25 bp, Homo sapien
catcatgggacaagcaagaggtctc

SEQ ID NO: 1675648 - DNA, 25 bp, Homo sapien
tcatgggacaagcaagaggtctcat

SEQ ID NO: 1675649 - DNA, 25 bp, Homo sapien
atcatgggacaagcaagaggtctca

SEQ ID NO: 1675650 - DNA, 25 bp, Homo sapien
catgggacaagcaagaggtctcatc

SEQ ID NO: 1675651 - DNA, 25 bp, Homo sapien
ctatcctttctgtctgctcgagtca

SEQ ID NO: 1675652 - DNA, 25 bp, Homo sapien
tcctttctgtctgctcgagtcattc

SEQ ID NO: 1675653 - DNA, 25 bp, Homo sapien
cgagtcattctgggccaagtgggca

SEQ ID NO: 1675654 - DNA, 25 bp, Homo sapien
gagtcattctgggccaagtgggcac

SEQ ID NO: 1675655 - DNA, 25 bp, Homo sapien
acgaccaaacttgttttctacagtg

SEQ ID NO: 1675656 - DNA, 25 bp, Homo sapien
ctgtgccgagcctggtaattccata

SEQ ID NO: 1675657 - DNA, 25 bp, Homo sapien
tggttacaccatttgacattctcac

SEQ ID NO: 1675658 - DNA, 25 bp, Homo sapien
agcttttgagaaacgaccaaacttg

SEQ ID NO: 1675659 - DNA, 25 bp, Homo sapien
ggctaaatattgcttacagctgagc

SEQ ID NO: 1675660 - DNA, 25 bp, Homo sapien
tgatggagcacatcctctagcagct

SEQ ID NO: 1675661 - DNA, 25 bp, Homo sapien
gatttcctacgctgcaagatgaagg

SEQ ID NO: 1675662 - DNA, 25 bp, Homo sapien
tttgagcctcctacccaactgatag

SEQ ID NO: 1675663 - DNA, 25 bp, Homo sapien
tgacggttcctgatttgagtaagtg

SEQ ID NO: 1675664 - DNA, 25 bp, Homo sapien
gagtaagtgtacactgtgactcctg

SEQ ID NO: 1675665 - DNA, 25 bp, Homo sapien
gtatgtcagtatccaacatggtgcc

SEQ ID NO: 1675666 - DNA, 25 bp, Homo sapien
gactcctgggttacatggcactgga

SEQ ID NO: 1675667 - DNA, 25 bp, Homo sapien
tcacaagttggtagatagcctccag

SEQ ID NO: 1675668 - DNA, 25 bp, Homo sapien
ccgacttgccgtgccagattggtag

SEQ ID NO: 1675669 - DNA, 25 bp, Homo sapien
gaaggtattatagcctggagcagta

SEQ ID NO: 1675670 - DNA, 25 bp, Homo sapien
gagtctcgtgacctaccatttgcct

SEQ ID NO: 1675671 - DNA, 25 bp, Homo sapien
tcctggttgatcaaatctccagccc

SEQ ID NO: 1675672 - DNA, 25 bp, Homo sapien
cagcccctcgggttctgatacctgt

SEQ ID NO: 1675673 - DNA, 25 bp, Homo sapien
caagaacgagcctcctcaagatgtt

SEQ ID NO: 1675674 - DNA, 25 bp, Homo sapien
tgttctagatatgcctcccatgaca

SEQ ID NO: 1675675 - DNA, 25 bp, Homo sapien
ctgtgacctgctgctagagtattca

SEQ ID NO: 1675676 - DNA, 25 bp, Homo sapien
ctaaggatttcctctattgtgctgc

SEQ ID NO: 1675677 - DNA, 25 bp, Homo sapien
ccttgactaggttggctggtggaaa

SEQ ID NO: 1675678 - DNA, 25 bp, Homo sapien
gaatctgtgacctgctgctagagta

SEQ ID NO: 1675679 - DNA, 25 bp, Homo sapien
tacatttagtcagaaacaacgtgga

SEQ ID NO: 1675680 - DNA, 25 bp, Homo sapien
gtggaatctcattcctcagcaagca

SEQ ID NO: 1675681 - DNA, 25 bp, Homo sapien
ctgccagatgttttaggaatagtcc

SEQ ID NO: 1675682 - DNA, 25 bp, Homo sapien
aatagtccatgagaaaccccaatct

SEQ ID NO: 1675683 - DNA, 25 bp, Homo sapien
tcatccaagttgagccccaaaccaa

SEQ ID NO: 1675684 - DNA, 25 bp, Homo sapien
aagttgagccccaaaccaaagagag

SEQ ID NO: 1675685 - DNA, 25 bp, Homo sapien
cagtctgctgttagatgattattca

SEQ ID NO: 1675686 - DNA, 25 bp, Homo sapien
ttccagtctgctgttagatgattat

SEQ ID NO: 1675687 - DNA, 25 bp, Homo sapien
ggacacctcagttcacaaagaaaca

SEQ ID NO: 1675688 - DNA, 25 bp, Homo sapien
aagacctgctttgacaaaccctgga

SEQ ID NO: 1675689 - DNA, 25 bp, Homo sapien
tagacttagtaaggcatctcctgat

SEQ ID NO: 1675690 - DNA, 25 bp, Homo sapien
tcgtgcaatgtctagtcaatcccag

SEQ ID NO: 1675691 - DNA, 25 bp, Homo sapien
ccatagtgtcggcactggccaggta

SEQ ID NO: 1675692 - DNA, 25 bp, Homo sapien
gcaacaggcttgaggtttcccacag

SEQ ID NO: 1675693 - DNA, 25 bp, Homo sapien
tggggtgtaactgagcttccacaga

SEQ ID NO: 1675694 - DNA, 25 bp, Homo sapien
tctggaagcccaagggtgcctttgc

SEQ ID NO: 1675695 - DNA, 25 bp, Homo sapien
acgtggccttccctctgttatatac

SEQ ID NO: 1675696 - DNA, 25 bp, Homo sapien
tcttctcggctcatggatggctgtc

SEQ ID NO: 1675697 - DNA, 25 bp, Homo sapien
gtggccttccctctgttatatacat

SEQ ID NO: 1675698 - DNA, 25 bp, Homo sapien
tctcaggtctcttctcggctcatgg

SEQ ID NO: 1675699 - DNA, 25 bp, Homo sapien
cttctttgttcatagatgtatctcc

SEQ ID NO: 1675700 - DNA, 25 bp, Homo sapien
gtcttctttgttcatagatgtatct

SEQ ID NO: 1675701 - DNA, 25 bp, Homo sapien
ttcagtcaattctggtaggattttc

SEQ ID NO: 1675702 - DNA, 25 bp, Homo sapien
tttcagtcaattctggtaggatttt

SEQ ID NO: 1675703 - DNA, 25 bp, Homo sapien
gcagccccccaaagtgttatttcag

SEQ ID NO: 1675704 - DNA, 25 bp, Homo sapien
ccagcagccccccaaagtgttattt

SEQ ID NO: 1675705 - DNA, 25 bp, Homo sapien
ttgcacctgtgagcctgtaaaatta

SEQ ID NO: 1675706 - DNA, 25 bp, Homo sapien
gtcaaggcaagtcccttgcacctgt

SEQ ID NO: 1675707 - DNA, 25 bp, Homo sapien
tggaaaaatagcatctcgataaaat

SEQ ID NO: 1675708 - DNA, 25 bp, Homo sapien
gagggagcagcatgcctgattgtct

SEQ ID NO: 1675709 - DNA, 25 bp, Homo sapien
gggatgttaaagagctaattctaga

SEQ ID NO: 1675710 - DNA, 25 bp, Homo sapien
aaacttgtctgggaactagtggaag

SEQ ID NO: 1675711 - DNA, 25 bp, Homo sapien
tcttgagggatctcgggaacgttcc

SEQ ID NO: 1675712 - DNA, 25 bp, Homo sapien
cactatgcaggaaggaaggcgactc

SEQ ID NO: 1675713 - DNA, 25 bp, Homo sapien
cagtgttgctgtaaacgccgcggaa

SEQ ID NO: 1675714 - DNA, 25 bp, Homo sapien
tgggatcctctaacactcgagccgt

SEQ ID NO: 1675715 - DNA, 25 bp, Homo sapien
tgttgcagtgttaagtcttcctccc

SEQ ID NO: 1675716 - DNA, 25 bp, Homo sapien
tcccccctatcctttccgcagatgg

SEQ ID NO: 1675717 - DNA, 25 bp, Homo sapien
gttgcagtgttaagtcttcctcccc

SEQ ID NO: 1675718 - DNA, 25 bp, Homo sapien
cagatggttgcgtccgtcctgtggc

SEQ ID NO: 1675719 - DNA, 25 bp, Homo sapien
gaagtgtaaagtgggcgacctagaa

SEQ ID NO: 1675720 - DNA, 25 bp, Homo sapien
cggcacagctacgagaatccgagca

SEQ ID NO: 1675721 - DNA, 25 bp, Homo sapien
caatatataatggtcctctgggtcc

SEQ ID NO: 1675722 - DNA, 25 bp, Homo sapien
tctgcttagcaagccggaaggaagc

SEQ ID NO: 1675723 - DNA, 25 bp, Homo sapien
aatagtcccggagtcagctctgcag

SEQ ID NO: 1675724 - DNA, 25 bp, Homo sapien
gacaacgggctacgtttttgcgcaa

SEQ ID NO: 1675725 - DNA, 25 bp, Homo sapien
tttgcgcaaaccctcttgaatcggg

SEQ ID NO: 1675726 - DNA, 25 bp, Homo sapien
gaagacacttccatggcgaattgaa

SEQ ID NO: 1675727 - DNA, 25 bp, Homo sapien
ctggtggcaatgaatctggttttta

SEQ ID NO: 1675728 - DNA, 25 bp, Homo sapien
cgctggtggcaatgaatctggtttt

SEQ ID NO: 1675729 - DNA, 25 bp, Homo sapien
gagcgctggtggcaatgaatctggt

SEQ ID NO: 1675730 - DNA, 25 bp, Homo sapien
gcgctggtggcaatgaatctggttt

SEQ ID NO: 1675731 - DNA, 25 bp, Homo sapien
ggagactgagtttacagatctaaag

SEQ ID NO: 1675732 - DNA, 25 bp, Homo sapien
aacaggcttctacaaaatatgagga

SEQ ID NO: 1675733 - DNA, 25 bp, Homo sapien
gagagacttacagaacaggcttcta

SEQ ID NO: 1675734 - DNA, 25 bp, Homo sapien
ttcagatgcatgagaaagtggatga

SEQ ID NO: 1675735 - DNA, 25 bp, Homo sapien
tttgagggattaagtgaaagatcct

SEQ ID NO: 1675736 - DNA, 25 bp, Homo sapien
taagtgaaagatccttggtgtcaag

SEQ ID NO: 1675737 - DNA, 25 bp, Homo sapien
gaaagatccttggtgtcaaggagtg

SEQ ID NO: 1675738 - DNA, 25 bp, Homo sapien
gtcaaggagtgtctgttgtacgaaa

SEQ ID NO: 1675739 - DNA, 25 bp, Homo sapien
agtggcgcgatctcaacctccacct

SEQ ID NO: 1675740 - DNA, 25 bp, Homo sapien
tgggattacaggcacccaccaccat

SEQ ID NO: 1675741 - DNA, 25 bp, Homo sapien
tctctgcctcagcctctggagtagc

SEQ ID NO: 1675742 - DNA, 25 bp, Homo sapien
gggttcaagcaattctctgcctcag

SEQ ID NO: 1675743 - DNA, 25 bp, Homo sapien
gagggagtcaaatcaggaacagtgc

SEQ ID NO: 1675744 - DNA, 25 bp, Homo sapien
cagaaacctttcagcgatagggagt

SEQ ID NO: 1675745 - DNA, 25 bp, Homo sapien
tactttttcaaggaggctggattct

SEQ ID NO: 1675746 - DNA, 25 bp, Homo sapien
ccccgtgtgggatcatttagaagct

SEQ ID NO: 1675747 - DNA, 25 bp, Homo sapien
ctgcaaaaccgctcagcagcaaaag

SEQ ID NO: 1675748 - DNA, 25 bp, Homo sapien
agcaaaagtaagacactgcattgag

SEQ ID NO: 1675749 - DNA, 25 bp, Homo sapien
ggaagatggtagtctgcaaaaccgc

SEQ ID NO: 1675750 - DNA, 25 bp, Homo sapien
gcattgagttatattcttccaagca

SEQ ID NO: 1675751 - DNA, 25 bp, Homo sapien
caatactcaatctgttaaaaactac

SEQ ID NO: 1675752 - DNA, 25 bp, Homo sapien
aatactcaatctgttaaaaactaca

SEQ ID NO: 1675753 - DNA, 25 bp, Homo sapien
atactcaatctgttaaaaactacaa

SEQ ID NO: 1675754 - DNA, 25 bp, Homo sapien
gctttgcagccttagcctaaactgg

SEQ ID NO: 1675755 - DNA, 25 bp, Homo sapien
tcttcagtaggtccctgctttgcag

SEQ ID NO: 1675756 - DNA, 25 bp, Homo sapien
gactaactgatggaacaggtcttca

SEQ ID NO: 1675757 - DNA, 25 bp, Homo sapien
catagtacggtggacagaaaggtga

SEQ ID NO: 1675758 - DNA, 25 bp, Homo sapien
gcaaacacattggatgttgcacgct

SEQ ID NO: 1675759 - DNA, 25 bp, Homo sapien
acacattggatgttgcacgctgagg

SEQ ID NO: 1675760 - DNA, 25 bp, Homo sapien
acattggatgttgcacgctgagggc

SEQ ID NO: 1675761 - DNA, 25 bp, Homo sapien
aaacacattggatgttgcacgctga

SEQ ID NO: 1675762 - DNA, 25 bp, Homo sapien
cccaatcctaagacagggtcacgaa

SEQ ID NO: 1675763 - DNA, 25 bp, Homo sapien
tggtgatccggtgggaaacactgtt

SEQ ID NO: 1675764 - DNA, 25 bp, Homo sapien
tagactcattagacaggctttacag

SEQ ID NO: 1675765 - DNA, 25 bp, Homo sapien
aaatcaagatgaaaggcaccatgga

SEQ ID NO: 1675766 - DNA, 25 bp, Homo sapien
atcatggcatctagatactcatcag

SEQ ID NO: 1675767 - DNA, 25 bp, Homo sapien
gaataccggaagcttgaggcccagt

SEQ ID NO: 1675768 - DNA, 25 bp, Homo sapien
gaaaaatgcctagctgcttagcagc

SEQ ID NO: 1675769 - DNA, 25 bp, Homo sapien
tatatgaactacagggtgtccacct

SEQ ID NO: 1675770 - DNA, 25 bp, Homo sapien
gcctcagcagagaagtgcctagaaa

SEQ ID NO: 1675771 - DNA, 25 bp, Homo sapien
ccatggttgtcagcagctctctcaa

SEQ ID NO: 1675772 - DNA, 25 bp, Homo sapien
gtttcaggatgcgtgtgaactcgat

SEQ ID NO: 1675773 - DNA, 25 bp, Homo sapien
tatcaataggtgcttctctgtacag

SEQ ID NO: 1675774 - DNA, 25 bp, Homo sapien
tctgtaaaccgatcccccatggttg

SEQ ID NO: 1675775 - DNA, 25 bp, Homo sapien
cagaatacccaaagtggcaacaagg

SEQ ID NO: 1675776 - DNA, 25 bp, Homo sapien
agaatacccaaagtggcaacaagga

SEQ ID NO: 1675777 - DNA, 25 bp, Homo sapien
aaatgatattaatagaaagtcccgt

SEQ ID NO: 1675778 - DNA, 25 bp, Homo sapien
atgatattaatagaaagtcccgttt

SEQ ID NO: 1675779 - DNA, 25 bp, Homo sapien
tgaaaatgatattaatagaaagtcc

SEQ ID NO: 1675780 - DNA, 25 bp, Homo sapien
aaaatgatattaatagaaagtcccg

SEQ ID NO: 1675781 - DNA, 25 bp, Homo sapien
gactctgtatagaccacagttattg

SEQ ID NO: 1675782 - DNA, 25 bp, Homo sapien
tattgactctgtatagaccacagtt

SEQ ID NO: 1675783 - DNA, 25 bp, Homo sapien
tatattgactctgtatagaccacag

SEQ ID NO: 1675784 - DNA, 25 bp, Homo sapien
aaaatatattgactctgtatagacc

SEQ ID NO: 1675785 - DNA, 25 bp, Homo sapien
ataaagtttaattatgattcagaaa

SEQ ID NO: 1675786 - DNA, 25 bp, Homo sapien
tctttgggagatacgactgaaacca

SEQ ID NO: 1675787 - DNA, 25 bp, Homo sapien
catggactcatggtgaatctctgca

SEQ ID NO: 1675788 - DNA, 25 bp, Homo sapien
ccaggcatgcaggttcagctgtttt

SEQ ID NO: 1675789 - DNA, 25 bp, Homo sapien
ggtagcattccacagaacctttaag

SEQ ID NO: 1675790 - DNA, 25 bp, Homo sapien
aagagcgttaggctgtggccggaca

SEQ ID NO: 1675791 - DNA, 25 bp, Homo sapien
ctgcgcgagaccacaaacgacagcg

SEQ ID NO: 1675792 - DNA, 25 bp, Homo sapien
acagtggcggcgccgacacttcctg

SEQ ID NO: 1675793 - DNA, 25 bp, Homo sapien
ggtgcgctgagtgttcgcgcccggg

SEQ ID NO: 1675794 - DNA, 25 bp, Homo sapien
catctaggatagtgttgggcacagg

SEQ ID NO: 1675795 - DNA, 25 bp, Homo sapien
tctcgcgagcagagtcgagcgcgac

SEQ ID NO: 1675796 - DNA, 25 bp, Homo sapien
ttaggcaagaccgtgcaacaggagg

SEQ ID NO: 1675797 - DNA, 25 bp, Homo sapien
ctgaggtcacccaggtggcgcaggg

SEQ ID NO: 1675798 - DNA, 25 bp, Homo sapien
ctaatggcttccttggaggcttcac

SEQ ID NO: 1675799 - DNA, 25 bp, Homo sapien
tgctaatggcttccttggaggcttc

SEQ ID NO: 1675800 - DNA, 25 bp, Homo sapien
gctaatggcttccttggaggcttca

SEQ ID NO: 1675801 - DNA, 25 bp, Homo sapien
tctagccggaaacgctaagttctcc

SEQ ID NO: 1675802 - DNA, 25 bp, Homo sapien
ccgactattagtcattacagttctg

SEQ ID NO: 1675803 - DNA, 25 bp, Homo sapien
cacggcctgcttttcacaggacaca

SEQ ID NO: 1675804 - DNA, 25 bp, Homo sapien
tatctacccttatttccgactatta

SEQ ID NO: 1675805 - DNA, 25 bp, Homo sapien
ggttcatttagtaatccccaggatg

SEQ ID NO: 1675806 - DNA, 25 bp, Homo sapien
gatcagaagtcataacctggcagct

SEQ ID NO: 1675807 - DNA, 25 bp, Homo sapien
gtattttcaaaaacgcaccaggtga

SEQ ID NO: 1675808 - DNA, 25 bp, Homo sapien
tcctgcaggccataagtgttcaaca

SEQ ID NO: 1675809 - DNA, 25 bp, Homo sapien
tcagaggttacatcaaaggcaggca

SEQ ID NO: 1675810 - DNA, 25 bp, Homo sapien
gatagtacccaacccatacagttag

SEQ ID NO: 1675811 - DNA, 25 bp, Homo sapien
acaggttccgcactcacagattcaa

SEQ ID NO: 1675812 - DNA, 25 bp, Homo sapien
taggaattgatacagcagtccctcc

SEQ ID NO: 1675813 - DNA, 25 bp, Homo sapien
actacacatacagtatcagctgaaa

SEQ ID NO: 1675814 - DNA, 25 bp, Homo sapien
tttgtatacgtatatggtacctata

SEQ ID NO: 1675815 - DNA, 25 bp, Homo sapien
gtatcagctgaaaagtgaggcaaag

SEQ ID NO: 1675816 - DNA, 25 bp, Homo sapien
gtatacgtatatggtacctataaaa

SEQ ID NO: 1675817 - DNA, 25 bp, Homo sapien
gcaaacacattggatgttgcacgct

SEQ ID NO: 1675818 - DNA, 25 bp, Homo sapien
acacattggatgttgcacgctgagg

SEQ ID NO: 1675819 - DNA, 25 bp, Homo sapien
acattggatgttgcacgctgagggc

SEQ ID NO: 1675820 - DNA, 25 bp, Homo sapien
aaacacattggatgttgcacgctga

SEQ ID NO: 1675821 - DNA, 25 bp, Homo sapien
caaatcttccttgtcgatgaagcca

SEQ ID NO: 1675822 - DNA, 25 bp, Homo sapien
catatcatgcaaatcttccttgtcg

SEQ ID NO: 1675823 - DNA, 25 bp, Homo sapien
ctagagaagcaagcatatcatgcaa

SEQ ID NO: 1675824 - DNA, 25 bp, Homo sapien
atgcaaatcttccttgtcgatgaag

SEQ ID NO: 1675825 - DNA, 25 bp, Homo sapien
aatacaaataaagaatataaagtct

SEQ ID NO: 1675826 - DNA, 25 bp, Homo sapien
tacaaataaagaatataaagtctac

SEQ ID NO: 1675827 - DNA, 25 bp, Homo sapien
atacaaataaagaatataaagtcta

SEQ ID NO: 1675828 - DNA, 25 bp, Homo sapien
tcttctaccacgtggctgcactgga

SEQ ID NO: 1675829 - DNA, 25 bp, Homo sapien
gaacatggtgaaattgatgggccct

SEQ ID NO: 1675830 - DNA, 25 bp, Homo sapien
agcaaaggcgtttctgatgacatct

SEQ ID NO: 1675831 - DNA, 25 bp, Homo sapien
gcaagcaaaggcgtttctgatgaca

SEQ ID NO: 1675832 - DNA, 25 bp, Homo sapien
atcaaagcaagcaaaggcgtttctg

SEQ ID NO: 1675833 - DNA, 25 bp, Homo sapien
ctttttgtcaataggtgcttctctg

SEQ ID NO: 1675834 - DNA, 25 bp, Homo sapien
cccatggttgtcagcagctctctta

SEQ ID NO: 1675835 - DNA, 25 bp, Homo sapien
agctctcttaggtaatcttcctgaa

SEQ ID NO: 1675836 - DNA, 25 bp, Homo sapien
catctgtaaaccgatcccccatggt

SEQ ID NO: 1675837 - DNA, 25 bp, Homo sapien
tggctccatgtttcaggatgcgtgt

SEQ ID NO: 1675838 - DNA, 25 bp, Homo sapien
tccatgtttcaggatgcgtgtgaac

SEQ ID NO: 1675839 - DNA, 25 bp, Homo sapien
atctttgtctttggctccatgtttc

SEQ ID NO: 1675840 - DNA, 25 bp, Homo sapien
agtcatctttgtctttggctccatg

SEQ ID NO: 1675841 - DNA, 25 bp, Homo sapien
gagagtaagacaatgtaactggaag

SEQ ID NO: 1675842 - DNA, 25 bp, Homo sapien
gttgcatgcaacaggttctatgagg

SEQ ID NO: 1675843 - DNA, 25 bp, Homo sapien
catgcaacaggttctatgagggtgg

SEQ ID NO: 1675844 - DNA, 25 bp, Homo sapien
aagtgtctgagaagtaaaagagagt

SEQ ID NO: 1675845 - DNA, 25 bp, Homo sapien
attatacaagtgctaagtggcagaa

SEQ ID NO: 1675846 - DNA, 25 bp, Homo sapien
ctgattatacaagtgctaagtggca

SEQ ID NO: 1675847 - DNA, 25 bp, Homo sapien
tgattatacaagtgctaagtggcag

SEQ ID NO: 1675848 - DNA, 25 bp, Homo sapien
gattatacaagtgctaagtggcaga

SEQ ID NO: 1675849 - DNA, 25 bp, Homo sapien
aatgtaaaaatccagcaaaaccaga

SEQ ID NO: 1675850 - DNA, 25 bp, Homo sapien
aaatccagcaaaaccagaaatacga

SEQ ID NO: 1675851 - DNA, 25 bp, Homo sapien
tccagcaaaaccagaaatacgaata

SEQ ID NO: 1675852 - DNA, 25 bp, Homo sapien
tgtaaaaatccagcaaaaccagaaa

SEQ ID NO: 1675853 - DNA, 25 bp, Homo sapien
tcaggcctggccaatgctgccagcc

SEQ ID NO: 1675854 - DNA, 25 bp, Homo sapien
ttggcaataacttggtcacatccat

SEQ ID NO: 1675855 - DNA, 25 bp, Homo sapien
tcctcttggcaataacttggtcaca

SEQ ID NO: 1675856 - DNA, 25 bp, Homo sapien
ctgtttcacttgatttactcaggcc

SEQ ID NO: 1675857 - DNA, 25 bp, Homo sapien
ttgtatgctctgtcaaaagatcaat

SEQ ID NO: 1675858 - DNA, 25 bp, Homo sapien
ttttgtatgctctgtcaaaagatca

SEQ ID NO: 1675859 - DNA, 25 bp, Homo sapien
atgtttttgtatgctctgtcaaaag

SEQ ID NO: 1675860 - DNA, 25 bp, Homo sapien
gtatgctctgtcaaaagatcaatta

SEQ ID NO: 1675861 - DNA, 25 bp, Homo sapien
ccctcagtttgaatggcccagtcca

SEQ ID NO: 1675862 - DNA, 25 bp, Homo sapien
gccatagtgagctgtgtccacacca

SEQ ID NO: 1675863 - DNA, 25 bp, Homo sapien
tcaatgtgagacaacactactgggt

SEQ ID NO: 1675864 - DNA, 25 bp, Homo sapien
gaggatcgcttcatcccaggacggt

SEQ ID NO: 1675865 - DNA, 25 bp, Homo sapien
ttggacgtcgcagaactagaacccg

SEQ ID NO: 1675866 - DNA, 25 bp, Homo sapien
tcacacgtgacaggaatctgaccct

SEQ ID NO: 1675867 - DNA, 25 bp, Homo sapien
aaataatcacatgcgcggagctcac

SEQ ID NO: 1675868 - DNA, 25 bp, Homo sapien
gccgttaccaatacgtgagccatgg

SEQ ID NO: 1675869 - DNA, 25 bp, Homo sapien
ataaaggaatgtatgagactgagta

SEQ ID NO: 1675870 - DNA, 25 bp, Homo sapien
aaggaatgtatgagactgagtaatt

SEQ ID NO: 1675871 - DNA, 25 bp, Homo sapien
taaaggaatgtatgagactgagtaa

SEQ ID NO: 1675872 - DNA, 25 bp, Homo sapien
cagatctcgtgtgaactaagaactc

SEQ ID NO: 1675873 - DNA, 25 bp, Homo sapien
tccttgcttcgagcagacaccaaca

SEQ ID NO: 1675874 - DNA, 25 bp, Homo sapien
cagacaccaacaggattcgggaagt

SEQ ID NO: 1675875 - DNA, 25 bp, Homo sapien
taaagaaggaacctggacaaggaca

SEQ ID NO: 1675876 - DNA, 25 bp, Homo sapien
gggaagtccagtgactgacccctgg

SEQ ID NO: 1675877 - DNA, 25 bp, Homo sapien
ggcagctacagccacaggaatactc

SEQ ID NO: 1675878 - DNA, 25 bp, Homo sapien
tactcttgagaaaggagtgtaatac

SEQ ID NO: 1675879 - DNA, 25 bp, Homo sapien
cacaggaatactcttgagaaaggag

SEQ ID NO: 1675880 - DNA, 25 bp, Homo sapien
tacagccacaggaatactcttgaga

SEQ ID NO: 1675881 - DNA, 25 bp, Homo sapien
tcgctgctgaggagccctgacttgg

SEQ ID NO: 1675882 - DNA, 25 bp, Homo sapien
agctcgctgctgaggagccctgact

SEQ ID NO: 1675883 - DNA, 25 bp, Homo sapien
acacagctcgctgctgaggagccct

SEQ ID NO: 1675884 - DNA, 25 bp, Homo sapien
ggagccctgacttgggagtggacca

SEQ ID NO: 1675885 - DNA, 25 bp, Homo sapien
aagcgtctggtgctgcgatcgaggc

SEQ ID NO: 1675886 - DNA, 25 bp, Homo sapien
tcaactgggaagcgtctggtgctgc

SEQ ID NO: 1675887 - DNA, 25 bp, Homo sapien
tctggtgctgcgatcgaggcacccc

SEQ ID NO: 1675888 - DNA, 25 bp, Homo sapien
gggaagcgtctggtgctgcgatcga

SEQ ID NO: 1675889 - DNA, 25 bp, Homo sapien
gccagactcaacaaagctatctgag

SEQ ID NO: 1675890 - DNA, 25 bp, Homo sapien
tgagctgaaggaataaggaatatcc

SEQ ID NO: 1675891 - DNA, 25 bp, Homo sapien
gatgtgctcattgatgccagactca

SEQ ID NO: 1675892 - DNA, 25 bp, Homo sapien
gaagtgtgcccctctggcactcaga

SEQ ID NO: 1675893 - DNA, 25 bp, Homo sapien
tctgtcattaggttagtcatttctt

SEQ ID NO: 1675894 - DNA, 25 bp, Homo sapien
ctgtcattaggttagtcatttcttt

SEQ ID NO: 1675895 - DNA, 25 bp, Homo sapien
tgtcattaggttagtcatttctttt

SEQ ID NO: 1675896 - DNA, 25 bp, Homo sapien
ttgaggaatcaacataactccttaa

SEQ ID NO: 1675897 - DNA, 25 bp, Homo sapien
gatatctctgcgaaactgctttcat

SEQ ID NO: 1675898 - DNA, 25 bp, Homo sapien
catccacatttgtataggttgtttc

SEQ ID NO: 1675899 - DNA, 25 bp, Homo sapien
tatatgtgtttccagtacacatata

SEQ ID NO: 1675900 - DNA, 25 bp, Homo sapien
gacagtgaatgatgcttggatcgaa

SEQ ID NO: 1675901 - DNA, 25 bp, Homo sapien
agtgaatgatgcttggatcgaaacc

SEQ ID NO: 1675902 - DNA, 25 bp, Homo sapien
gtgcgacagtgaatgatgcttggat

SEQ ID NO: 1675903 - DNA, 25 bp, Homo sapien
tgcgacagtgaatgatgcttggatc

SEQ ID NO: 1675904 - DNA, 25 bp, Homo sapien
agtgggctgggtcttgctgccaaac

SEQ ID NO: 1675905 - DNA, 25 bp, Homo sapien
acagtgggctgggtcttgctgccaa

SEQ ID NO: 1675906 - DNA, 25 bp, Homo sapien
tgggctgggtcttgctgccaaacat

SEQ ID NO: 1675907 - DNA, 25 bp, Homo sapien
ctaagacagtgggctgggtcttgct

SEQ ID NO: 1675908 - DNA, 25 bp, Homo sapien
gagacacactagggtggccttgtta

SEQ ID NO: 1675909 - DNA, 25 bp, Homo sapien
gaacagagtgaccaaacggggagcc

SEQ ID NO: 1675910 - DNA, 25 bp, Homo sapien
tgatgatgatgccgtctgccttcca

SEQ ID NO: 1675911 - DNA, 25 bp, Homo sapien
gggtggccttgttagcttggaactc

SEQ ID NO: 1675912 - DNA, 25 bp, Homo sapien
ctccagggtgctccttttatgcatg

SEQ ID NO: 1675913 - DNA, 25 bp, Homo sapien
catggcccagcagttgtagctgctg

SEQ ID NO: 1675914 - DNA, 25 bp, Homo sapien
tctccagggtgctccttttatgcat

SEQ ID NO: 1675915 - DNA, 25 bp, Homo sapien
ccaaaagaattaatgtgcgtattga

SEQ ID NO: 1675916 - DNA, 25 bp, Homo sapien
ttgccaaaagaattaatgtgcgtat

SEQ ID NO: 1675917 - DNA, 25 bp, Homo sapien
cataaacaaacaagggcaagattct

SEQ ID NO: 1675918 - DNA, 25 bp, Homo sapien
gctgttggcattgcataaacaaaca

SEQ ID NO: 1675919 - DNA, 25 bp, Homo sapien
aagagtctacaatgttccccagcat

SEQ ID NO: 1675920 - DNA, 25 bp, Homo sapien
tggaagagtctacaatgttccccag

SEQ ID NO: 1675921 - DNA, 25 bp, Homo sapien
cttggcaaaactggaagagtctaca

SEQ ID NO: 1675922 - DNA, 25 bp, Homo sapien
ttggcaaaactggaagagtctacaa

SEQ ID NO: 1675923 - DNA, 25 bp, Homo sapien
tggccacgtatatgcaaatctataa

SEQ ID NO: 1675924 - DNA, 25 bp, Homo sapien
cgatatatgttctctgggcctttta

SEQ ID NO: 1675925 - DNA, 25 bp, Homo sapien
catcaagggaatgggtactgtccaa

SEQ ID NO: 1675926 - DNA, 25 bp, Homo sapien
gccacgtatatgcaaatctataaga

SEQ ID NO: 1675927 - DNA, 25 bp, Homo sapien
cagctgtctaaaggattatgccaat

SEQ ID NO: 1675928 - DNA, 25 bp, Homo sapien
tgtcccatccgaccatttgtaaagc

SEQ ID NO: 1675929 - DNA, 25 bp, Homo sapien
gaccttcacaaagagactctcagag

SEQ ID NO: 1675930 - DNA, 25 bp, Homo sapien
aggagagggccttttgtcagagacc

SEQ ID NO: 1675931 - DNA, 25 bp, Homo sapien
gaagacacagaggtggctgacttga

SEQ ID NO: 1675932 - DNA, 25 bp, Homo sapien
tgaaagattcccgaccaggcttcct

SEQ ID NO: 1675933 - DNA, 25 bp, Homo sapien
tcactgcaggtagccaaaaagagcg

SEQ ID NO: 1675934 - DNA, 25 bp, Homo sapien
gcaaatcactgttgtcctggaggtg

SEQ ID NO: 1675935 - DNA, 25 bp, Homo sapien
ctgcggtaaggagggagccccgcgc

SEQ ID NO: 1675936 - DNA, 25 bp, Homo sapien
gcggtaaggagggagccccgcgcag

SEQ ID NO: 1675937 - DNA, 25 bp, Homo sapien
gggagccccgcgcagcaccgagcat

SEQ ID NO: 1675938 - DNA, 25 bp, Homo sapien
gagggagccccgcgcagcaccgagc

SEQ ID NO: 1675939 - DNA, 25 bp, Homo sapien
ggtaaaatactctatctctcaaatt

SEQ ID NO: 1675940 - DNA, 25 bp, Homo sapien
caggtaaaatactctatctctcaaa

SEQ ID NO: 1675941 - DNA, 25 bp, Homo sapien
atctctcaaatttagtctcctcttc

SEQ ID NO: 1675942 - DNA, 25 bp, Homo sapien
ttttcaggtaaaatactctatctct

SEQ ID NO: 1675943 - DNA, 25 bp, Homo sapien
gatacaggcttgtttcagtgtaaac

SEQ ID NO: 1675944 - DNA, 25 bp, Homo sapien
tagagtgcattttccctatgcgtgc

SEQ ID NO: 1675945 - DNA, 25 bp, Homo sapien
gtgctcgtttagaagcgcacctgct

SEQ ID NO: 1675946 - DNA, 25 bp, Homo sapien
aacatgtggtccatttgaagttcag

SEQ ID NO: 1675947 - DNA, 25 bp, Homo sapien
ttggggacagagcctcgttttgtcg

SEQ ID NO: 1675948 - DNA, 25 bp, Homo sapien
tttggggacagagcctcgttttgtc

SEQ ID NO: 1675949 - DNA, 25 bp, Homo sapien
ttttattacggcagccatagaatga

SEQ ID NO: 1675950 - DNA, 25 bp, Homo sapien
aaaataattcccttgacgatatatc

SEQ ID NO: 1675951 - DNA, 25 bp, Homo sapien
tgttatttttattacggcagccata

SEQ ID NO: 1675952 - DNA, 25 bp, Homo sapien
ttacggcagccatagaatgaatttg

SEQ ID NO: 1675953 - DNA, 25 bp, Homo sapien
gccattgagggagaccaaatatggc

SEQ ID NO: 1675954 - DNA, 25 bp, Homo sapien
tcagccattgagggagaccaaatat

SEQ ID NO: 1675955 - DNA, 25 bp, Homo sapien
tccgggtcgccggaaggcagagccg

SEQ ID NO: 1675956 - DNA, 25 bp, Homo sapien
aggcagagccgggatcatggtgcct

SEQ ID NO: 1675957 - DNA, 25 bp, Homo sapien
gtggacaccgaaccctcagctttct

SEQ ID NO: 1675958 - DNA, 25 bp, Homo sapien
ggcttttgcgcatcataagattcca

SEQ ID NO: 1675959 - DNA, 25 bp, Homo sapien
acttgctccttccgttggtggcctg

SEQ ID NO: 1675960 - DNA, 25 bp, Homo sapien
ctgcctctgaccatttcgcaatagg

SEQ ID NO: 1675961 - DNA, 25 bp, Homo sapien
gagctttcaaaaggcgttgggcatg

SEQ ID NO: 1675962 - DNA, 25 bp, Homo sapien
gttgggcatgttcctgagaaccgcc

SEQ ID NO: 1675963 - DNA, 25 bp, Homo sapien
aaaggcgttgggcatgttcctgaga

SEQ ID NO: 1675964 - DNA, 25 bp, Homo sapien
tttcaaaaggcgttgggcatgttcc

SEQ ID NO: 1675965 - DNA, 25 bp, Homo sapien
gccagcttctaccacgtggaaaaga

SEQ ID NO: 1675966 - DNA, 25 bp, Homo sapien
cttctaccacgtggaaaagacacca

SEQ ID NO: 1675967 - DNA, 25 bp, Homo sapien
ggaggttagccagcttctaccacgt

SEQ ID NO: 1675968 - DNA, 25 bp, Homo sapien
ggaagtggaggttagccagcttcta

SEQ ID NO: 1675969 - DNA, 25 bp, Homo sapien
ttctgaggtagcatcctggaaccaa

SEQ ID NO: 1675970 - DNA, 25 bp, Homo sapien
catgactaggttcaagccaatggtg

SEQ ID NO: 1675971 - DNA, 25 bp, Homo sapien
cacacacacagttggccctgggttt

SEQ ID NO: 1675972 - DNA, 25 bp, Homo sapien
tggagactatagatcgcagcctgcc

SEQ ID NO: 1675973 - DNA, 25 bp, Homo sapien
tttggactgcaattctaaatagtgc

SEQ ID NO: 1675974 - DNA, 25 bp, Homo sapien
gaacaatcttgttcacatgtatttt

SEQ ID NO: 1675975 - DNA, 25 bp, Homo sapien
catattattgaagctatatcctcag

SEQ ID NO: 1675976 - DNA, 25 bp, Homo sapien
tcagaacaacttcctaaaagtgtga

SEQ ID NO: 1675977 - DNA, 25 bp, Homo sapien
ctccccccagccaacgctgatctca

SEQ ID NO: 1675978 - DNA, 25 bp, Homo sapien
ccccccagccaacgctgatctcaaa

SEQ ID NO: 1675979 - DNA, 25 bp, Homo sapien
gctcccgtagatgcacccccactgc

SEQ ID NO: 1675980 - DNA, 25 bp, Homo sapien
gcccaaccgctcccgtagatgcacc

SEQ ID NO: 1675981 - DNA, 25 bp, Homo sapien
tccaaagagaaacactggcacaatt

SEQ ID NO: 1675982 - DNA, 25 bp, Homo sapien
ctccaaagagaaacactggcacaat

SEQ ID NO: 1675983 - DNA, 25 bp, Homo sapien
aacggttgttaaagctggcgaggca

SEQ ID NO: 1675984 - DNA, 25 bp, Homo sapien
atccaaacggttgttaaagctggcg

SEQ ID NO: 1675985 - DNA, 25 bp, Homo sapien
ccaaacggttgttaaagctggcgag

SEQ ID NO: 1675986 - DNA, 25 bp, Homo sapien
caaacggttgttaaagctggcgagg

SEQ ID NO: 1675987 - DNA, 25 bp, Homo sapien
agaagtcaggcttgatcgggccaat

SEQ ID NO: 1675988 - DNA, 25 bp, Homo sapien
tgcacaacttttgcccgagcaagtc

SEQ ID NO: 1675989 - DNA, 25 bp, Homo sapien
atcgggccaatgcacaacttttgcc

SEQ ID NO: 1675990 - DNA, 25 bp, Homo sapien
agtcaggcttgatcgggccaatgca

SEQ ID NO: 1675991 - DNA, 25 bp, Homo sapien
tgcaactgccgggagcacagttcct

SEQ ID NO: 1675992 - DNA, 25 bp, Homo sapien
atgaatcagctgctgcgcccggtgc

SEQ ID NO: 1675993 - DNA, 25 bp, Homo sapien
gggccgcctcgctatttcgtttgaa

SEQ ID NO: 1675994 - DNA, 25 bp, Homo sapien
gagacgctttgtttgctaacttcga

SEQ ID NO: 1675995 - DNA, 25 bp, Homo sapien
gttggcttattttggtccacagtta

SEQ ID NO: 1675996 - DNA, 25 bp, Homo sapien
tcttcggattggaaccctgctaggg

SEQ ID NO: 1675997 - DNA, 25 bp, Homo sapien
cagaaactagccattaagtaaacac

SEQ ID NO: 1675998 - DNA, 25 bp, Homo sapien
ggtccacagttaggagggatccaac

SEQ ID NO: 1675999 - DNA, 25 bp, Homo sapien
tgctcgtctgtttcggtcaacagtg

SEQ ID NO: 1676000 - DNA, 25 bp, Homo sapien
ctgctcgtctgtttcggtcaacagt

SEQ ID NO: 1676001 - DNA, 25 bp, Homo sapien
gctcgtctgtttcggtcaacagtgt

SEQ ID NO: 1676002 - DNA, 25 bp, Homo sapien
accccggcagcggccacttttatag

SEQ ID NO: 1676003 - DNA, 25 bp, Homo sapien
caagactccgcctgacaccccgagt

SEQ ID NO: 1676004 - DNA, 25 bp, Homo sapien
gcctgacaccccgagtcgccgaacc

SEQ ID NO: 1676005 - DNA, 25 bp, Homo sapien
cgagtcgccgaaccccggcagcggc

SEQ ID NO: 1676006 - DNA, 25 bp, Homo sapien
atgctctttaaacgtctctgcccgg

SEQ ID NO: 1676007 - DNA, 25 bp, Homo sapien
tgctctttaaacgtctctgcccggg

SEQ ID NO: 1676008 - DNA, 25 bp, Homo sapien
ttcttccagaatgcgcggctgccat

SEQ ID NO: 1676009 - DNA, 25 bp, Homo sapien
gagttccggactggattgcaaggca

SEQ ID NO: 1676010 - DNA, 25 bp, Homo sapien
gaaatctgacacgttgcggacagac

SEQ ID NO: 1676011 - DNA, 25 bp, Homo sapien
tgatgagacacagcctaaacgaacg

SEQ ID NO: 1676012 - DNA, 25 bp, Homo sapien
tactggccctgctctagccgcacga

SEQ ID NO: 1676013 - DNA, 25 bp, Homo sapien
tttttgacagctgccccgaactcta

SEQ ID NO: 1676014 - DNA, 25 bp, Homo sapien
gagacagccgcctctgattcaaggg

SEQ ID NO: 1676015 - DNA, 25 bp, Homo sapien
agcctccccgtctcgtttttgacag

SEQ ID NO: 1676016 - DNA, 25 bp, Homo sapien
ggtccagaaacacgatcctttccgc

SEQ ID NO: 1676017 - DNA, 25 bp, Homo sapien
ggtggccgggtccagaaacacgatc

SEQ ID NO: 1676018 - DNA, 25 bp, Homo sapien
atcctttccgcctgccgcgcacgga

SEQ ID NO: 1676019 - DNA, 25 bp, Homo sapien
tggcgagggtgcgtttggttcggaa

SEQ ID NO: 1676020 - DNA, 25 bp, Homo sapien
ccgggaagactggaccgagcgcggc

SEQ ID NO: 1676021 - DNA, 25 bp, Homo sapien
aagactggaccgagcgcggcggccg

SEQ ID NO: 1676022 - DNA, 25 bp, Homo sapien
cttccagccgggaagactggaccga

SEQ ID NO: 1676023 - DNA, 25 bp, Homo sapien
gggaagactggaccgagcgcggcgg

SEQ ID NO: 1676024 - DNA, 25 bp, Homo sapien
ctgctcggcgcacctcggcgctgtc

SEQ ID NO: 1676025 - DNA, 25 bp, Homo sapien
taggacgtgctccagccgttattgc

SEQ ID NO: 1676026 - DNA, 25 bp, Homo sapien
gataagcgaacgtctccttcacagc

SEQ ID NO: 1676027 - DNA, 25 bp, Homo sapien
acagccgactctcccgtaacttgta

SEQ ID NO: 1676028 - DNA, 25 bp, Homo sapien
gttattgctaaacaggacgctctga

SEQ ID NO: 1676029 - DNA, 25 bp, Homo sapien
ccctcccagcgcgaggcaaggcggg

SEQ ID NO: 1676030 - DNA, 25 bp, Homo sapien
atctcccctcccagcgcgaggcaag

SEQ ID NO: 1676031 - DNA, 25 bp, Homo sapien
cagcccctcgtgttgtgtctagcag

SEQ ID NO: 1676032 - DNA, 25 bp, Homo sapien
ggcgctgagcgtgtttcttgacaac

SEQ ID NO: 1676033 - DNA, 25 bp, Homo sapien
tcttgacaacgtgccagcagcgtgg

SEQ ID NO: 1676034 - DNA, 25 bp, Homo sapien
cacgcgagaaagagcgagaagccac

SEQ ID NO: 1676035 - DNA, 25 bp, Homo sapien
caaagctgtttacacccgagggcga

SEQ ID NO: 1676036 - DNA, 25 bp, Homo sapien
tcatcgtgggaaaacttttagagac

SEQ ID NO: 1676037 - DNA, 25 bp, Homo sapien
ttttgactgcatgccgcttgaagct

SEQ ID NO: 1676038 - DNA, 25 bp, Homo sapien
gaatcgcattccttcgatcgtaaaa

SEQ ID NO: 1676039 - DNA, 25 bp, Homo sapien
aggaaccccgctggccttgaggcta

SEQ ID NO: 1676040 - DNA, 25 bp, Homo sapien
ttcagggcctcccacagaaacgcag

SEQ ID NO: 1676041 - DNA, 25 bp, Homo sapien
gcagagggaagctccgcgcgtttca

SEQ ID NO: 1676042 - DNA, 25 bp, Homo sapien
cagcgggccgggtctgaaagaatgt

SEQ ID NO: 1676043 - DNA, 25 bp, Homo sapien
acgactgccagttgatccgagtttc

SEQ ID NO: 1676044 - DNA, 25 bp, Homo sapien
ccagttgatccgagtttcaagttta

SEQ ID NO: 1676045 - DNA, 25 bp, Homo sapien
aacaacgactgccagttgatccgag

SEQ ID NO: 1676046 - DNA, 25 bp, Homo sapien
ctgccagttgatccgagtttcaagt

SEQ ID NO: 1676047 - DNA, 25 bp, Homo sapien
cgcgcgttttctcccagggccaatt

SEQ ID NO: 1676048 - DNA, 25 bp, Homo sapien
ccgcgcgttttctcccagggccaat

SEQ ID NO: 1676049 - DNA, 25 bp, Homo sapien
cccagggccaattccctgtcccgag

SEQ ID NO: 1676050 - DNA, 25 bp, Homo sapien
gccaattccctgtcccgagtcctcc

SEQ ID NO: 1676051 - DNA, 25 bp, Homo sapien
tcccaagggtcggcacggctttcac

SEQ ID NO: 1676052 - DNA, 25 bp, Homo sapien
ctcccaagggtcggcacggctttca

SEQ ID NO: 1676053 - DNA, 25 bp, Homo sapien
accacaacagacagcgcgtgtctct

SEQ ID NO: 1676054 - DNA, 25 bp, Homo sapien
ggcccaccacaacagacagcgcgtg

SEQ ID NO: 1676055 - DNA, 25 bp, Homo sapien
cagacagcgcgtgtctctagacctg

SEQ ID NO: 1676056 - DNA, 25 bp, Homo sapien
tcacttattcccgggaggcccacca

SEQ ID NO: 1676057 - DNA, 25 bp, Homo sapien
ggccatggaaaggaatcagagccgc

SEQ ID NO: 1676058 - DNA, 25 bp, Homo sapien
gagcccgaacaatgcggggagccca

SEQ ID NO: 1676059 - DNA, 25 bp, Homo sapien
gcagacacccggctctgcgctagaa

SEQ ID NO: 1676060 - DNA, 25 bp, Homo sapien
agcccaccccggcagacacccggct

SEQ ID NO: 1676061 - DNA, 25 bp, Homo sapien
aggtaggccaaagtgccgcgggaga

SEQ ID NO: 1676062 - DNA, 25 bp, Homo sapien
gtaggccaaagtgccgcgggagagt

SEQ ID NO: 1676063 - DNA, 25 bp, Homo sapien
ggccaaagtgccgcgggagagtcgg

SEQ ID NO: 1676064 - DNA, 25 bp, Homo sapien
gaaggtaggccaaagtgccgcggga

SEQ ID NO: 1676065 - DNA, 25 bp, Homo sapien
aggagctggaccctgtgcgccctgg

SEQ ID NO: 1676066 - DNA, 25 bp, Homo sapien
aagttcccaccgatgcggccggcgg

SEQ ID NO: 1676067 - DNA, 25 bp, Homo sapien
attgtttccaggagtcggcgccgag

SEQ ID NO: 1676068 - DNA, 25 bp, Homo sapien
ggaccgcggaagttcccaccgatgc

SEQ ID NO: 1676069 - DNA, 25 bp, Homo sapien
gggtaacctcggcagcctcggctcc

SEQ ID NO: 1676070 - DNA, 25 bp, Homo sapien
ccgggtaacctcggcagcctcggct

SEQ ID NO: 1676071 - DNA, 25 bp, Homo sapien
ggtaacctcggcagcctcggctccc

SEQ ID NO: 1676072 - DNA, 25 bp, Homo sapien
cgggtaacctcggcagcctcggctc

SEQ ID NO: 1676073 - DNA, 25 bp, Homo sapien
caccccagacgactcgccagggaaa

SEQ ID NO: 1676074 - DNA, 25 bp, Homo sapien
ccaccccagacgactcgccagggaa

SEQ ID NO: 1676075 - DNA, 25 bp, Homo sapien
ctgcccaccccagacgactcgccag

SEQ ID NO: 1676076 - DNA, 25 bp, Homo sapien
gcccaccccagacgactcgccaggg

SEQ ID NO: 1676077 - DNA, 25 bp, Homo sapien
caaggtatggttggctaccccagcc

SEQ ID NO: 1676078 - DNA, 25 bp, Homo sapien
aactagaaatgaggccgtgaatccc

SEQ ID NO: 1676079 - DNA, 25 bp, Homo sapien
gagacaccggttgtgaagagactct

SEQ ID NO: 1676080 - DNA, 25 bp, Homo sapien
taagacaagacagtaaggagggccc

SEQ ID NO: 1676081 - DNA, 25 bp, Homo sapien
tgggggcaggatcacaagcttcttt

SEQ ID NO: 1676082 - DNA, 25 bp, Homo sapien
gcttctttcacgctatccacataca

SEQ ID NO: 1676083 - DNA, 25 bp, Homo sapien
tcacaagcttctttcacgctatcca

SEQ ID NO: 1676084 - DNA, 25 bp, Homo sapien
tctttcacgctatccacatacaagg

SEQ ID NO: 1676085 - DNA, 25 bp, Homo sapien
tacattcttttgcttgtagacaatc

SEQ ID NO: 1676086 - DNA, 25 bp, Homo sapien
gcttgtagacaatctagaatcttaa

SEQ ID NO: 1676087 - DNA, 25 bp, Homo sapien
actacagcaggctactccgaatgac

SEQ ID NO: 1676088 - DNA, 25 bp, Homo sapien
tactccgaatgactaaagaaataca

SEQ ID NO: 1676089 - DNA, 25 bp, Homo sapien
tttgaaatgaaagggagcactcgta

SEQ ID NO: 1676090 - DNA, 25 bp, Homo sapien
tacatactacgctgaacccagttag

SEQ ID NO: 1676091 - DNA, 25 bp, Homo sapien
tttaaatgggcagtactagtcacct

SEQ ID NO: 1676092 - DNA, 25 bp, Homo sapien
gctaccagtttgagctcaacctaga

SEQ ID NO: 1676093 - DNA, 25 bp, Homo sapien
cctgaattcagggtccaagtaaaag

SEQ ID NO: 1676094 - DNA, 25 bp, Homo sapien
gtagtttgactagcaccacatagga

SEQ ID NO: 1676095 - DNA, 25 bp, Homo sapien
cataggaggctctcaaccaaatgcc

SEQ ID NO: 1676096 - DNA, 25 bp, Homo sapien
gctttcccaacaactgagagcgagg

SEQ ID NO: 1676097 - DNA, 25 bp, Homo sapien
attgcaaagctcacttaacgctgac

SEQ ID NO: 1676098 - DNA, 25 bp, Homo sapien
aactattgcaaagctcacttaacgc

SEQ ID NO: 1676099 - DNA, 25 bp, Homo sapien
acagcaactattgcaaagctcactt

SEQ ID NO: 1676100 - DNA, 25 bp, Homo sapien
gcaactattgcaaagctcacttaac

SEQ ID NO: 1676101 - DNA, 25 bp, Homo sapien
tgtcctcatcctcagtctcactgcc

SEQ ID NO: 1676102 - DNA, 25 bp, Homo sapien
gctgtcctcatcctcagtctcactg

SEQ ID NO: 1676103 - DNA, 25 bp, Homo sapien
cagtctcactgccagatgctgcaac

SEQ ID NO: 1676104 - DNA, 25 bp, Homo sapien
tcactgccagatgctgcaacaatac

SEQ ID NO: 1676105 - DNA, 25 bp, Homo sapien
ttgctctgaaggataggcattgtaa

SEQ ID NO: 1676106 - DNA, 25 bp, Homo sapien
ctgtagcgtagacaggtgtgtttgc

SEQ ID NO: 1676107 - DNA, 25 bp, Homo sapien
gataggcattgtaacggtgctcata

SEQ ID NO: 1676108 - DNA, 25 bp, Homo sapien
gctgggacagcaacgctttttcttg

SEQ ID NO: 1676109 - DNA, 25 bp, Homo sapien
tacaagtgtcctctgggtacatgag

SEQ ID NO: 1676110 - DNA, 25 bp, Homo sapien
cactgaagtcctggttgaggtccgg

SEQ ID NO: 1676111 - DNA, 25 bp, Homo sapien
atcttggccccacggcgggaaattg

SEQ ID NO: 1676112 - DNA, 25 bp, Homo sapien
gtttttggccgctatctgctgtata

SEQ ID NO: 1676113 - DNA, 25 bp, Homo sapien
tatgtgggcatcctgttccacatgg

SEQ ID NO: 1676114 - DNA, 25 bp, Homo sapien
aacaggaagctgttttagcaatccc

SEQ ID NO: 1676115 - DNA, 25 bp, Homo sapien
tcacatgatattgggaaccatctca

SEQ ID NO: 1676116 - DNA, 25 bp, Homo sapien
gctataggttctctaagtattgcac

SEQ ID NO: 1676117 - DNA, 25 bp, Homo sapien
aagaaaatactttattatgtcatga

SEQ ID NO: 1676118 - DNA, 25 bp, Homo sapien
aaaatactttattatgtcatgaaaa

SEQ ID NO: 1676119 - DNA, 25 bp, Homo sapien
aatactttattatgtcatgaaaaaa

SEQ ID NO: 1676120 - DNA, 25 bp, Homo sapien
gaaaatactttattatgtcatgaaa

SEQ ID NO: 1676121 - DNA, 25 bp, Homo sapien
tttaaactacgcaggacagatcagc

SEQ ID NO: 1676122 - DNA, 25 bp, Homo sapien
gaaaactcagcaataaccggatgct

SEQ ID NO: 1676123 - DNA, 25 bp, Homo sapien
tcagcaagggatttagtggctagct

SEQ ID NO: 1676124 - DNA, 25 bp, Homo sapien
ttaagtaaagctctaagggcctgct

SEQ ID NO: 1676125 - DNA, 25 bp, Homo sapien
aggagcaacaccaattcccttctgg

SEQ ID NO: 1676126 - DNA, 25 bp, Homo sapien
cacacttagacaattcatagctggg

SEQ ID NO: 1676127 - DNA, 25 bp, Homo sapien
tctgctcaaccatacaagtgaaagg

SEQ ID NO: 1676128 - DNA, 25 bp, Homo sapien
caaactgagaccttggaaaatactc

SEQ ID NO: 1676129 - DNA, 25 bp, Homo sapien
tcaacaccaactattatcaaccatg

SEQ ID NO: 1676130 - DNA, 25 bp, Homo sapien
tgacctgtaacaacctcaataggga

SEQ ID NO: 1676131 - DNA, 25 bp, Homo sapien
tgagtgatgaaacaccgtaacaggg

SEQ ID NO: 1676132 - DNA, 25 bp, Homo sapien
catagggaatttaaggtgacttaca

SEQ ID NO: 1676133 - DNA, 25 bp, Homo sapien
caaaaagctagttgaaggcctgaag

SEQ ID NO: 1676134 - DNA, 25 bp, Homo sapien
tccctccaggttaacaatcatgaag

SEQ ID NO: 1676135 - DNA, 25 bp, Homo sapien
aatccctagttggtttgtgcagcag

SEQ ID NO: 1676136 - DNA, 25 bp, Homo sapien
ccaaaagcataaactggagggtcgt

SEQ ID NO: 1676137 - DNA, 25 bp, Homo sapien
attatttcaggcattggctagtcat

SEQ ID NO: 1676138 - DNA, 25 bp, Homo sapien
cattggctagtcataagacttagga

SEQ ID NO: 1676139 - DNA, 25 bp, Homo sapien
gcttcaaaacagatttcttgccttg

SEQ ID NO: 1676140 - DNA, 25 bp, Homo sapien
ttcaaaacagatttcttgccttgga

SEQ ID NO: 1676141 - DNA, 25 bp, Homo sapien
gatgcctgggatgatcatccataac

SEQ ID NO: 1676142 - DNA, 25 bp, Homo sapien
agggcttcacacctgatgcctggga

SEQ ID NO: 1676143 - DNA, 25 bp, Homo sapien
cataacgcacaatgtggaaaatgcc

SEQ ID NO: 1676144 - DNA, 25 bp, Homo sapien
gcagagagatttgatagcccctgga

SEQ ID NO: 1676145 - DNA, 25 bp, Homo sapien
ctgcatacacatcactgtaaacgtg

SEQ ID NO: 1676146 - DNA, 25 bp, Homo sapien
tgcatacacatcactgtaaacgtgc

SEQ ID NO: 1676147 - DNA, 25 bp, Homo sapien
gctttcttaccacttgtatgttcat

SEQ ID NO: 1676148 - DNA, 25 bp, Homo sapien
agaattaagaccttgctctggatta

SEQ ID NO: 1676149 - DNA, 25 bp, Homo sapien
ttgctttcttaccacttgtatgttc

SEQ ID NO: 1676150 - DNA, 25 bp, Homo sapien
gatctttatccaaaccattcaaact

SEQ ID NO: 1676151 - DNA, 25 bp, Homo sapien
gctctgctaacttccaggttttctt

SEQ ID NO: 1676152 - DNA, 25 bp, Homo sapien
ggatcaagctctgctaacttccagg

SEQ ID NO: 1676153 - DNA, 25 bp, Homo sapien
ctggatcaagctctgctaacttcca

SEQ ID NO: 1676154 - DNA, 25 bp, Homo sapien
aaacctctggatcaagctctgctaa

SEQ ID NO: 1676155 - DNA, 25 bp, Homo sapien
aatcctcaggtatggaattatctgg

SEQ ID NO: 1676156 - DNA, 25 bp, Homo sapien
tctaagtgccaagtttacaaaccac

SEQ ID NO: 1676157 - DNA, 25 bp, Homo sapien
tctggcctctgtcctagtggtgtaa

SEQ ID NO: 1676158 - DNA, 25 bp, Homo sapien
ggactccattcattatctctaccct

SEQ ID NO: 1676159 - DNA, 25 bp, Homo sapien
gagctcggtgacttccactgtcgcg

SEQ ID NO: 1676160 - DNA, 25 bp, Homo sapien
gtgtagttgtccacctcgcaggagc

SEQ ID NO: 1676161 - DNA, 25 bp, Homo sapien
cacagggtgatcctttgggacttac

SEQ ID NO: 1676162 - DNA, 25 bp, Homo sapien
tttcagaaatccagtatcacagggt

SEQ ID NO: 1676163 - DNA, 25 bp, Homo sapien
cgcgccgctgatccgggagcgctcg

SEQ ID NO: 1676164 - DNA, 25 bp, Homo sapien
tgaaccttctgctttgatcaggaga

SEQ ID NO: 1676165 - DNA, 25 bp, Homo sapien
ccttctgctttgatcaggagagaag

SEQ ID NO: 1676166 - DNA, 25 bp, Homo sapien
tctgctttgatcaggagagaagggc

SEQ ID NO: 1676167 - DNA, 25 bp, Homo sapien
tgtacatgtggcctctcacttggga

SEQ ID NO: 1676168 - DNA, 25 bp, Homo sapien
caggctggcatgtcaaacgtgactt

SEQ ID NO: 1676169 - DNA, 25 bp, Homo sapien
tatggtgttccacgaggctcacacg

SEQ ID NO: 1676170 - DNA, 25 bp, Homo sapien
gctcacacgggtatccaatgtccag

SEQ ID NO: 1676171 - DNA, 25 bp, Homo sapien
gatattaagacaaccaatccagctt

SEQ ID NO: 1676172 - DNA, 25 bp, Homo sapien
tctagtagttctatcagtgcttgct

SEQ ID NO: 1676173 - DNA, 25 bp, Homo sapien
taaggtcagtatagctgctgaattc

SEQ ID NO: 1676174 - DNA, 25 bp, Homo sapien
gatctcaaacctacctagtctgata

SEQ ID NO: 1676175 - DNA, 25 bp, Homo sapien
ggcaaaactacatttcgcgcactga

SEQ ID NO: 1676176 - DNA, 25 bp, Homo sapien
gaagagacagttgcgccattgctgg

SEQ ID NO: 1676177 - DNA, 25 bp, Homo sapien
tgactggtcttttcagatggttcac

SEQ ID NO: 1676178 - DNA, 25 bp, Homo sapien
tggcagaggtgtagcacaaaccaca

SEQ ID NO: 1676179 - DNA, 25 bp, Homo sapien
ttctctctagtctccatgggcacct

SEQ ID NO: 1676180 - DNA, 25 bp, Homo sapien
ccattctctctagtctccatgggca

SEQ ID NO: 1676181 - DNA, 25 bp, Homo sapien
attctctctagtctccatgggcacc

SEQ ID NO: 1676182 - DNA, 25 bp, Homo sapien
cattctctctagtctccatgggcac

SEQ ID NO: 1676183 - DNA, 25 bp, Homo sapien
ttgactgtgatcattgtggccaccg

SEQ ID NO: 1676184 - DNA, 25 bp, Homo sapien
tgtgatcattgtggccaccgtcgtc

SEQ ID NO: 1676185 - DNA, 25 bp, Homo sapien
ggttgactgtgatcattgtggccac

SEQ ID NO: 1676186 - DNA, 25 bp, Homo sapien
ctgtggttgactgtgatcattgtgg

SEQ ID NO: 1676187 - DNA, 25 bp, Homo sapien
ctgaggggatggtgcgtggctgtcc

SEQ ID NO: 1676188 - DNA, 25 bp, Homo sapien
cagcagcctctcaaatggcacgaga

SEQ ID NO: 1676189 - DNA, 25 bp, Homo sapien
gcacgagagcagtacaaatattcca

SEQ ID NO: 1676190 - DNA, 25 bp, Homo sapien
caacatgagtgtagccaagaggagt

SEQ ID NO: 1676191 - DNA, 25 bp, Homo sapien
tgcccaggttccaaacagaggtgtg

SEQ ID NO: 1676192 - DNA, 25 bp, Homo sapien
tctgacagccgccatcgaagctgca

SEQ ID NO: 1676193 - DNA, 25 bp, Homo sapien
cagggccagcgaggagatattatca

SEQ ID NO: 1676194 - DNA, 25 bp, Homo sapien
gatgcctacatggacggacagggcc

SEQ ID NO: 1676195 - DNA, 25 bp, Homo sapien
caccgagagcctggacagtatgaag

SEQ ID NO: 1676196 - DNA, 25 bp, Homo sapien
cagttgaatagatctctaggccaga

SEQ ID NO: 1676197 - DNA, 25 bp, Homo sapien
tgctttctgaaagatctgctctccc

SEQ ID NO: 1676198 - DNA, 25 bp, Homo sapien
gctgagaacaatgttgcgtttgatt

SEQ ID NO: 1676199 - DNA, 25 bp, Homo sapien
cgtttgattagcagcgcagccagtg

SEQ ID NO: 1676200 - DNA, 25 bp, Homo sapien
tttctttaatgacgaactctctgac

SEQ ID NO: 1676201 - DNA, 25 bp, Homo sapien
caggaagcccaagttttgtagcagc

SEQ ID NO: 1676202 - DNA, 25 bp, Homo sapien
ttaatgacgaactctctgacccctc

SEQ ID NO: 1676203 - DNA, 25 bp, Homo sapien
gcttgttgaaacaacttgggtgcct

SEQ ID NO: 1676204 - DNA, 25 bp, Homo sapien
acagcacagtcctccggcttggtag

SEQ ID NO: 1676205 - DNA, 25 bp, Homo sapien
actgggctggcgctgacatttgcag

SEQ ID NO: 1676206 - DNA, 25 bp, Homo sapien
cagctgctgtggattgcctgcgcat

SEQ ID NO: 1676207 - DNA, 25 bp, Homo sapien
tcaagctcttttgactgggctggcg

SEQ ID NO: 1676208 - DNA, 25 bp, Homo sapien
tgcaacgtacagatgtgatgttcca

SEQ ID NO: 1676209 - DNA, 25 bp, Homo sapien
tgatccacagattgcaacgtacaga

SEQ ID NO: 1676210 - DNA, 25 bp, Homo sapien
cagattgcaacgtacagatgtgatg

SEQ ID NO: 1676211 - DNA, 25 bp, Homo sapien
ctcgtagctgatccacagattgcaa

SEQ ID NO: 1676212 - DNA, 25 bp, Homo sapien
ccagttaacatagccagagggagac

SEQ ID NO: 1676213 - DNA, 25 bp, Homo sapien
gaggtttaaccctgcagctaaggtg

SEQ ID NO: 1676214 - DNA, 25 bp, Homo sapien
caagttacaaataccgccgttggca

SEQ ID NO: 1676215 - DNA, 25 bp, Homo sapien
tgtacacggatgacttgattgcacc

SEQ ID NO: 1676216 - DNA, 25 bp, Homo sapien
tacatccgtggaacagacagacagc

SEQ ID NO: 1676217 - DNA, 25 bp, Homo sapien
gacagcagtgcctgatcttgtaatt

SEQ ID NO: 1676218 - DNA, 25 bp, Homo sapien
tgagccacgcgtgtgctgtggttac

SEQ ID NO: 1676219 - DNA, 25 bp, Homo sapien
tgtgctgtggttacatccgtggaac

SEQ ID NO: 1676220 - DNA, 25 bp, Homo sapien
gacactgcacaatcagagatcacag

SEQ ID NO: 1676221 - DNA, 25 bp, Homo sapien
tgctgaggtgtccactttactcctg

SEQ ID NO: 1676222 - DNA, 25 bp, Homo sapien
cccttcctgattgttagtccttttg

SEQ ID NO: 1676223 - DNA, 25 bp, Homo sapien
tgttcacgccttcatgtaacaagca

SEQ ID NO: 1676224 - DNA, 25 bp, Homo sapien
cattggccaacatcaaacacgaggg

SEQ ID NO: 1676225 - DNA, 25 bp, Homo sapien
ccacggtcctttgccgagagcctgt

SEQ ID NO: 1676226 - DNA, 25 bp, Homo sapien
gatttggcctgctagatcatgctgg

SEQ ID NO: 1676227 - DNA, 25 bp, Homo sapien
gctggtgtcagagaatggtagatta

SEQ ID NO: 1676228 - DNA, 25 bp, Homo sapien
aggaggtaaagaaagttcgctggct

SEQ ID NO: 1676229 - DNA, 25 bp, Homo sapien
gtaaagaaagttcgctggctctcag

SEQ ID NO: 1676230 - DNA, 25 bp, Homo sapien
gaaatgatactaggaggtaaagaaa

SEQ ID NO: 1676231 - DNA, 25 bp, Homo sapien
tcatgaaatgatactaggaggtaaa

SEQ ID NO: 1676232 - DNA, 25 bp, Homo sapien
cccattgtgcaggtgctactaattt

SEQ ID NO: 1676233 - DNA, 25 bp, Homo sapien
ccgggcagggagtcttcatagcctg

SEQ ID NO: 1676234 - DNA, 25 bp, Homo sapien
ttaccagacatatagcagccgggca

SEQ ID NO: 1676235 - DNA, 25 bp, Homo sapien
tagcctgttgcgtcatgtgattcca

SEQ ID NO: 1676236 - DNA, 25 bp, Homo sapien
gaaccaaggttactgatgaatccac

SEQ ID NO: 1676237 - DNA, 25 bp, Homo sapien
ggcaataagtgcacaataccctggt

SEQ ID NO: 1676238 - DNA, 25 bp, Homo sapien
gactctcattagatgggacggaccc

SEQ ID NO: 1676239 - DNA, 25 bp, Homo sapien
gaatccacgctgaagtcttggtgag

SEQ ID NO: 1676240 - DNA, 25 bp, Homo sapien
ccttgtgcaaaagctcctgtaccag

SEQ ID NO: 1676241 - DNA, 25 bp, Homo sapien
tgttcctagggcagtggcagcaatg

SEQ ID NO: 1676242 - DNA, 25 bp, Homo sapien
ttggaggtttgagccggccttgtgc

SEQ ID NO: 1676243 - DNA, 25 bp, Homo sapien
gtaccaggtcaagccctggctccag

SEQ ID NO: 1676244 - DNA, 25 bp, Homo sapien
caccaacaggaaggaacggtggatg

SEQ ID NO: 1676245 - DNA, 25 bp, Homo sapien
cctcatcgtgctgacaccaacagga

SEQ ID NO: 1676246 - DNA, 25 bp, Homo sapien
catcgtgctgacaccaacaggaagg

SEQ ID NO: 1676247 - DNA, 25 bp, Homo sapien
ttattcctcatcgtgctgacaccaa

SEQ ID NO: 1676248 - DNA, 25 bp, Homo sapien
ggccaagtgggctgatgtaaacagt

SEQ ID NO: 1676249 - DNA, 25 bp, Homo sapien
taagcactaaccctgttatctgagc

SEQ ID NO: 1676250 - DNA, 25 bp, Homo sapien
aagtgcctaactacacagatcaggg

SEQ ID NO: 1676251 - DNA, 25 bp, Homo sapien
tatctgagcatcagtaaggagctgg

SEQ ID NO: 1676252 - DNA, 25 bp, Homo sapien
atgaccggctaatttatttgtattt

SEQ ID NO: 1676253 - DNA, 25 bp, Homo sapien
ctggtctcaaattcccgacctcaaa

SEQ ID NO: 1676254 - DNA, 25 bp, Homo sapien
gattactggggcaggccaccatgac

SEQ ID NO: 1676255 - DNA, 25 bp, Homo sapien
atttgtatttttggtagagacaggg

SEQ ID NO: 1676256 - DNA, 25 bp, Homo sapien
gagctgccaccctgtagtgcaaaat

SEQ ID NO: 1676257 - DNA, 25 bp, Homo sapien
tacgtgcactgtctcggttatctgg

SEQ ID NO: 1676258 - DNA, 25 bp, Homo sapien
gcttgtacatagcacggagctgcca

SEQ ID NO: 1676259 - DNA, 25 bp, Homo sapien
gagtacttgcagacacacttttagg

SEQ ID NO: 1676260 - DNA, 25 bp, Homo sapien
gctctgtcctcttgtgttctctttg

SEQ ID NO: 1676261 - DNA, 25 bp, Homo sapien
tcaatccgaagactagctctagttt

SEQ ID NO: 1676262 - DNA, 25 bp, Homo sapien
ctgcaagttcttccgcattcctaca

SEQ ID NO: 1676263 - DNA, 25 bp, Homo sapien
tggtaattcatttcaatccgaagac

SEQ ID NO: 1676264 - DNA, 25 bp, Homo sapien
ttattacttcgcagccaggtgcctg

SEQ ID NO: 1676265 - DNA, 25 bp, Homo sapien
gcaactgcaaatgggctgaacctcg

SEQ ID NO: 1676266 - DNA, 25 bp, Homo sapien
tcggagcagggaccatcaaaacgct

SEQ ID NO: 1676267 - DNA, 25 bp, Homo sapien
gacaagacttgcctttatctggtga

SEQ ID NO: 1676268 - DNA, 25 bp, Homo sapien
aaggacaggcaatttcagtttacta

SEQ ID NO: 1676269 - DNA, 25 bp, Homo sapien
ccagggtgaggggagtctagccggg

SEQ ID NO: 1676270 - DNA, 25 bp, Homo sapien
gctgcttttctcactccctggaaaa

SEQ ID NO: 1676271 - DNA, 25 bp, Homo sapien
aggacaggcaatttcagtttactat

SEQ ID NO: 1676272 - DNA, 25 bp, Homo sapien
acgtgggcctgatctgtcggcaatc

SEQ ID NO: 1676273 - DNA, 25 bp, Homo sapien
gaaggctcctaagaagatttcttgg

SEQ ID NO: 1676274 - DNA, 25 bp, Homo sapien
aaggaaggctcctaagaagatttct

SEQ ID NO: 1676275 - DNA, 25 bp, Homo sapien
catcacgtgggcctgatctgtcggc

SEQ ID NO: 1676276 - DNA, 25 bp, Homo sapien
cttagcaaagcaatgactcagtcat

SEQ ID NO: 1676277 - DNA, 25 bp, Homo sapien
ttagcaaagcaatgactcagtcatt

SEQ ID NO: 1676278 - DNA, 25 bp, Homo sapien
tagcaaagcaatgactcagtcattt

SEQ ID NO: 1676279 - DNA, 25 bp, Homo sapien
gcaaagcaatgactcagtcatttac

SEQ ID NO: 1676280 - DNA, 25 bp, Homo sapien
aaacttttcatccaactgccggagc

SEQ ID NO: 1676281 - DNA, 25 bp, Homo sapien
tggtgtgattgtaacttccttccct

SEQ ID NO: 1676282 - DNA, 25 bp, Homo sapien
tgccggagctaacagcaatgaatga

SEQ ID NO: 1676283 - DNA, 25 bp, Homo sapien
atttaaagtacatttgttgctgctt

SEQ ID NO: 1676284 - DNA, 25 bp, Homo sapien
caggagctcttttgtgtggatggca

SEQ ID NO: 1676285 - DNA, 25 bp, Homo sapien
gctcttttgtgtggatggcattcat

SEQ ID NO: 1676286 - DNA, 25 bp, Homo sapien
ggagctcttttgtgtggatggcatt

SEQ ID NO: 1676287 - DNA, 25 bp, Homo sapien
ctgggggagattgtaaatgagatgt

SEQ ID NO: 1676288 - DNA, 25 bp, Homo sapien
ttcttcttcatgcacgctctctgac

SEQ ID NO: 1676289 - DNA, 25 bp, Homo sapien
ctctgacagcatcgggtcaaaggaa

SEQ ID NO: 1676290 - DNA, 25 bp, Homo sapien
ttttgcaaagccatagggagtggtg

SEQ ID NO: 1676291 - DNA, 25 bp, Homo sapien
cctgtggcgagttgaagattttgaa

SEQ ID NO: 1676292 - DNA, 25 bp, Homo sapien
gttcacgaacgtcacaggcatttct

SEQ ID NO: 1676293 - DNA, 25 bp, Homo sapien
cattcagccacgatgttggcaggag

SEQ ID NO: 1676294 - DNA, 25 bp, Homo sapien
gaatgggttaagcatagtcccagct

SEQ ID NO: 1676295 - DNA, 25 bp, Homo sapien
tcttaggcgcttcttatataaatgg

SEQ ID NO: 1676296 - DNA, 25 bp, Homo sapien
cttggaaaggacaggcaagattcaa

SEQ ID NO: 1676297 - DNA, 25 bp, Homo sapien
ctagcacttaggcacaagactccac

SEQ ID NO: 1676298 - DNA, 25 bp, Homo sapien
aaggagtgggctctagcacttaggc

SEQ ID NO: 1676299 - DNA, 25 bp, Homo sapien
tcaaatccccgagggaacagacagc

SEQ ID NO: 1676300 - DNA, 25 bp, Homo sapien
ttgcccagtatgtacacagatccgg

SEQ ID NO: 1676301 - DNA, 25 bp, Homo sapien
gacccagtgagactaagtagaaacg

SEQ ID NO: 1676302 - DNA, 25 bp, Homo sapien
gaagttgctgtgatactccagaaga

SEQ ID NO: 1676303 - DNA, 25 bp, Homo sapien
gacaggacctgctggagggtttcca

SEQ ID NO: 1676304 - DNA, 25 bp, Homo sapien
cttggaagaggtcgaacgtaagctc

SEQ ID NO: 1676305 - DNA, 25 bp, Homo sapien
tgactgcccacttggaacttaaaag

SEQ ID NO: 1676306 - DNA, 25 bp, Homo sapien
tatccctaacgaggaatcgattgca

SEQ ID NO: 1676307 - DNA, 25 bp, Homo sapien
taagctcgtatctgaaggaaaaacc

SEQ ID NO: 1676308 - DNA, 25 bp, Homo sapien
ccatctaatagcaaaccacagcgag

SEQ ID NO: 1676309 - DNA, 25 bp, Homo sapien
ctacaaagggtcaggatgccaaaat

SEQ ID NO: 1676310 - DNA, 25 bp, Homo sapien
taatgtcccgacctgcctaggcagg

SEQ ID NO: 1676311 - DNA, 25 bp, Homo sapien
tgagcgtggtgactcgtcaaggcac

SEQ ID NO: 1676312 - DNA, 25 bp, Homo sapien
tggtatagttacaatagtgattttc

SEQ ID NO: 1676313 - DNA, 25 bp, Homo sapien
aatttggtatagttacaatagtgat

SEQ ID NO: 1676314 - DNA, 25 bp, Homo sapien
tttggtatagttacaatagtgattt

SEQ ID NO: 1676315 - DNA, 25 bp, Homo sapien
taatttggtatagttacaatagtga

SEQ ID NO: 1676316 - DNA, 25 bp, Homo sapien
cgtggctgtaacgacttgatgtcaa

SEQ ID NO: 1676317 - DNA, 25 bp, Homo sapien
atcacccgtaatcccattacgtggc

SEQ ID NO: 1676318 - DNA, 25 bp, Homo sapien
tagcagtgaagaaataatagtgtgt

SEQ ID NO: 1676319 - DNA, 25 bp, Homo sapien
aattgtaatctagtcatgtcatagc

SEQ ID NO: 1676320 - DNA, 25 bp, Homo sapien
cggcctccgagatggttttcatatt

SEQ ID NO: 1676321 - DNA, 25 bp, Homo sapien
tatttgaattttgttgcatcacata

SEQ ID NO: 1676322 - DNA, 25 bp, Homo sapien
atttgaattttgttgcatcacataa

SEQ ID NO: 1676323 - DNA, 25 bp, Homo sapien
ggcctccgagatggttttcatattt

SEQ ID NO: 1676324 - DNA, 25 bp, Homo sapien
gggtccaccatacaagccctgagaa

SEQ ID NO: 1676325 - DNA, 25 bp, Homo sapien
gagaaacgcgtggtaagttctgcca

SEQ ID NO: 1676326 - DNA, 25 bp, Homo sapien
tgatagagaaggtgcggaaaaggtt

SEQ ID NO: 1676327 - DNA, 25 bp, Homo sapien
tcttttctgaactggagggtgatag

SEQ ID NO: 1676328 - DNA, 25 bp, Homo sapien
acgttggtgtagaagttagcttcag

SEQ ID NO: 1676329 - DNA, 25 bp, Homo sapien
cacgactcaggcgtttagggacttg

SEQ ID NO: 1676330 - DNA, 25 bp, Homo sapien
aatgagggaccatctccttagagaa

SEQ ID NO: 1676331 - DNA, 25 bp, Homo sapien
ttggcagtcgtaacatcactgggca

SEQ ID NO: 1676332 - DNA, 25 bp, Homo sapien
tcactgggcatttaatgactagggc

SEQ ID NO: 1676333 - DNA, 25 bp, Homo sapien
ctggcgcgatcactactcattgtag

SEQ ID NO: 1676334 - DNA, 25 bp, Homo sapien
tggcgcgatcactactcattgtagc

SEQ ID NO: 1676335 - DNA, 25 bp, Homo sapien
cactggcgcgatcactactcattgt

SEQ ID NO: 1676336 - DNA, 25 bp, Homo sapien
actggcgcgatcactactcattgta

SEQ ID NO: 1676337 - DNA, 25 bp, Homo sapien
gactagttacttctgggataggagg

SEQ ID NO: 1676338 - DNA, 25 bp, Homo sapien
tgcaggctcggaggcattctatagc

SEQ ID NO: 1676339 - DNA, 25 bp, Homo sapien
ttgtaacagggaaaagatgcacggg

SEQ ID NO: 1676340 - DNA, 25 bp, Homo sapien
tggcctacgtggtggtttcggaatc

SEQ ID NO: 1676341 - DNA, 25 bp, Homo sapien
gacctgatgtgtacttccagcttga

SEQ ID NO: 1676342 - DNA, 25 bp, Homo sapien
ccaaggaggaccaatgtttcaggcc

SEQ ID NO: 1676343 - DNA, 25 bp, Homo sapien
tctcgagtcatcaagctgaggaccc

SEQ ID NO: 1676344 - DNA, 25 bp, Homo sapien
tatagaggccgagaattcccaagat

SEQ ID NO: 1676345 - DNA, 25 bp, Homo sapien
tctcctcagtttgggagctttgttg

SEQ ID NO: 1676346 - DNA, 25 bp, Homo sapien
tttctcctcagtttgggagctttgt

SEQ ID NO: 1676347 - DNA, 25 bp, Homo sapien
gtttctcctcagtttgggagctttg

SEQ ID NO: 1676348 - DNA, 25 bp, Homo sapien
gaccggttagagatttagcgtccaa

SEQ ID NO: 1676349 - DNA, 25 bp, Homo sapien
taatttagcacgtgtgtccacagtg

SEQ ID NO: 1676350 - DNA, 25 bp, Homo sapien
ggatagtcaacctgcagtaccaatg

SEQ ID NO: 1676351 - DNA, 25 bp, Homo sapien
gacaggcactggtctatgaaacact

SEQ ID NO: 1676352 - DNA, 25 bp, Homo sapien
gttcgattcagatgagattgtcccc

SEQ ID NO: 1676353 - DNA, 25 bp, Homo sapien
acagccccagtttggagtgttcgat

SEQ ID NO: 1676354 - DNA, 25 bp, Homo sapien
cccagtttggagtgttcgattcaga

SEQ ID NO: 1676355 - DNA, 25 bp, Homo sapien
tttggagtgttcgattcagatgaga

SEQ ID NO: 1676356 - DNA, 25 bp, Homo sapien
ggaagcgactcctcgtgttggatag

SEQ ID NO: 1676357 - DNA, 25 bp, Homo sapien
agcgactcctcgtgttggatagagc

SEQ ID NO: 1676358 - DNA, 25 bp, Homo sapien
cgactcctcgtgttggatagagctc

SEQ ID NO: 1676359 - DNA, 25 bp, Homo sapien
tcctcgtgttggatagagctctctg

SEQ ID NO: 1676360 - DNA, 25 bp, Homo sapien
gaaatcaaacctcagatggtcggcc

SEQ ID NO: 1676361 - DNA, 25 bp, Homo sapien
catgctcagtggcacgtgtgtcgga

SEQ ID NO: 1676362 - DNA, 25 bp, Homo sapien
caaggcagcttcgtgcagcttttca

SEQ ID NO: 1676363 - DNA, 25 bp, Homo sapien
ccaagtgtctatggcaggcagtttt

SEQ ID NO: 1676364 - DNA, 25 bp, Homo sapien
gggacgtgtgttccatgcatgcatt

SEQ ID NO: 1676365 - DNA, 25 bp, Homo sapien
caatttgggagtgcggttgttgggc

SEQ ID NO: 1676366 - DNA, 25 bp, Homo sapien
tcagtgcatctgaaacgtggaactc

SEQ ID NO: 1676367 - DNA, 25 bp, Homo sapien
taaccgtgttagaatatatgtgtgc

SEQ ID NO: 1676368 - DNA, 25 bp, Homo sapien
ccagtagcaatttgagcactgagtt

SEQ ID NO: 1676369 - DNA, 25 bp, Homo sapien
cccagtagcaatttgagcactgagt

SEQ ID NO: 1676370 - DNA, 25 bp, Homo sapien
caagcagaaattcaagttcgctttg

SEQ ID NO: 1676371 - DNA, 25 bp, Homo sapien
ttcgctttgcgcatcaaagtggaat

SEQ ID NO: 1676372 - DNA, 25 bp, Homo sapien
gtggaattttactgaaggacaatcc

SEQ ID NO: 1676373 - DNA, 25 bp, Homo sapien
aagtgcatgttgcaggcctgtggta

SEQ ID NO: 1676374 - DNA, 25 bp, Homo sapien
agggtgctttatccctttggcggat

SEQ ID NO: 1676375 - DNA, 25 bp, Homo sapien
ggcagaaagtatgatgctactctaa

SEQ ID NO: 1676376 - DNA, 25 bp, Homo sapien
ctttggcggatttagtaccattaca

SEQ ID NO: 1676377 - DNA, 25 bp, Homo sapien
cagtatttgtggcattcgtggcaga

SEQ ID NO: 1676378 - DNA, 25 bp, Homo sapien
agtacaaaagagacgtccaagcaaa

SEQ ID NO: 1676379 - DNA, 25 bp, Homo sapien
caaaagagacgtccaagcaaagtgt

SEQ ID NO: 1676380 - DNA, 25 bp, Homo sapien
cttcagtcatacgttcaaaaagccg

SEQ ID NO: 1676381 - DNA, 25 bp, Homo sapien
catacgttcaaaaagccgagaagaa

SEQ ID NO: 1676382 - DNA, 25 bp, Homo sapien
cagagcagacatgtttgcccaggaa

SEQ ID NO: 1676383 - DNA, 25 bp, Homo sapien
tagagcgtcctttatcccaacagag

SEQ ID NO: 1676384 - DNA, 25 bp, Homo sapien
tcattgcgggttcctcctgggcagt

SEQ ID NO: 1676385 - DNA, 25 bp, Homo sapien
catgtgcgaattgccagctattgcc

SEQ ID NO: 1676386 - DNA, 25 bp, Homo sapien
accagagtttgcagcatagattcag

SEQ ID NO: 1676387 - DNA, 25 bp, Homo sapien
tcttcatctttcacgaggcttgtgg

SEQ ID NO: 1676388 - DNA, 25 bp, Homo sapien
agtttgcagcatagattcaggcttc

SEQ ID NO: 1676389 - DNA, 25 bp, Homo sapien
catcatcccattgggaggaagcctt

SEQ ID NO: 1676390 - DNA, 25 bp, Homo sapien
agatcaactgggatttcagacttac

SEQ ID NO: 1676391 - DNA, 25 bp, Homo sapien
cagatcaactgggatttcagactta

SEQ ID NO: 1676392 - DNA, 25 bp, Homo sapien
tagacattatctctgactctaagaa

SEQ ID NO: 1676393 - DNA, 25 bp, Homo sapien
agacattatctctgactctaagaaa

SEQ ID NO: 1676394 - DNA, 25 bp, Homo sapien
ttagacattatctctgactctaaga

SEQ ID NO: 1676395 - DNA, 25 bp, Homo sapien
gtcttggggcttcagaatcaatcaa

SEQ ID NO: 1676396 - DNA, 25 bp, Homo sapien
tatcaactacggaaatcacctggcc

SEQ ID NO: 1676397 - DNA, 25 bp, Homo sapien
catgtctgaatcataagtcttggcc

SEQ ID NO: 1676398 - DNA, 25 bp, Homo sapien
tactcgaggaagaaatagggaagcg

SEQ ID NO: 1676399 - DNA, 25 bp, Homo sapien
gagtcagacccctttgtcaggaatg

SEQ ID NO: 1676400 - DNA, 25 bp, Homo sapien
ggcttcaggcccacctcatttgcta

SEQ ID NO: 1676401 - DNA, 25 bp, Homo sapien
tttcaatcaggcagacataatcctt

SEQ ID NO: 1676402 - DNA, 25 bp, Homo sapien
cagacaaatatatccacgattacag

SEQ ID NO: 1676403 - DNA, 25 bp, Homo sapien
caagaagcccctttcaatcaggcag

SEQ ID NO: 1676404 - DNA, 25 bp, Homo sapien
cttccaggaacgcagcaccaatgca

SEQ ID NO: 1676405 - DNA, 25 bp, Homo sapien
ttaagaaaccttgcattgtgagctg

SEQ ID NO: 1676406 - DNA, 25 bp, Homo sapien
gcactgtgcaagctctagtaggaat

SEQ ID NO: 1676407 - DNA, 25 bp, Homo sapien
tattgacaaacctacgctaaaagag

SEQ ID NO: 1676408 - DNA, 25 bp, Homo sapien
ggataatgctttctcgtacacctgt

SEQ ID NO: 1676409 - DNA, 25 bp, Homo sapien
gcacagccccaagagtggtcatgct

SEQ ID NO: 1676410 - DNA, 25 bp, Homo sapien
ttgttcatccaagaggccggtctct

SEQ ID NO: 1676411 - DNA, 25 bp, Homo sapien
ggttataacggagagtcggcacagc

SEQ ID NO: 1676412 - DNA, 25 bp, Homo sapien
tggtcatgctccctaagcaaggaag

SEQ ID NO: 1676413 - DNA, 25 bp, Homo sapien
tcctcgtcaggagcagttctgtgtg

SEQ ID NO: 1676414 - DNA, 25 bp, Homo sapien
caaggctctcgctcattgcactgga

SEQ ID NO: 1676415 - DNA, 25 bp, Homo sapien
ttgcactggatccagactgggcctg

SEQ ID NO: 1676416 - DNA, 25 bp, Homo sapien
tgcatgtttacaggtttcacttgaa

SEQ ID NO: 1676417 - DNA, 25 bp, Homo sapien
tacaagtgcctgagaagactggcct

SEQ ID NO: 1676418 - DNA, 25 bp, Homo sapien
gagctctcggaacagatccaaatta

SEQ ID NO: 1676419 - DNA, 25 bp, Homo sapien
tcggtagcatcattcctgtgccaga

SEQ ID NO: 1676420 - DNA, 25 bp, Homo sapien
tataaaattgccaccacctcggtag

SEQ ID NO: 1676421 - DNA, 25 bp, Homo sapien
gctggcttcaaggggctgtgtaaac

SEQ ID NO: 1676422 - DNA, 25 bp, Homo sapien
catgtgtaacctgaaccttcttcaa

SEQ ID NO: 1676423 - DNA, 25 bp, Homo sapien
caggtttgcacccttgacagctggc

SEQ ID NO: 1676424 - DNA, 25 bp, Homo sapien
gcagaccaggtttgcacccttgaca

SEQ ID NO: 1676425 - DNA, 25 bp, Homo sapien
gcaagtgtaaacatcagacatgcag

SEQ ID NO: 1676426 - DNA, 25 bp, Homo sapien
agtgaagtgagttctgagtcgcaag

SEQ ID NO: 1676427 - DNA, 25 bp, Homo sapien
tttgaaggggcgtcagaagcctgca

SEQ ID NO: 1676428 - DNA, 25 bp, Homo sapien
tgagttctgagtcgcaagtgtaaac

SEQ ID NO: 1676429 - DNA, 25 bp, Homo sapien
aagacggatagtgtgccaacatcat

SEQ ID NO: 1676430 - DNA, 25 bp, Homo sapien
agacggatagtgtgccaacatcata

SEQ ID NO: 1676431 - DNA, 25 bp, Homo sapien
gaggagatggtctttacactcacgt

SEQ ID NO: 1676432 - DNA, 25 bp, Homo sapien
cactttgcttacatggcctttgtgg

SEQ ID NO: 1676433 - DNA, 25 bp, Homo sapien
tttacactcacgtctttgacccaaa

SEQ ID NO: 1676434 - DNA, 25 bp, Homo sapien
tgctggtacagagccagtaagagtc

SEQ ID NO: 1676435 - DNA, 25 bp, Homo sapien
tcgtgcacggagatgtgttcctcca

SEQ ID NO: 1676436 - DNA, 25 bp, Homo sapien
tgttcctccatgatccctgtttgcc

SEQ ID NO: 1676437 - DNA, 25 bp, Homo sapien
cacacatgcaccagcaacttcgtgc

SEQ ID NO: 1676438 - DNA, 25 bp, Homo sapien
aaccattgcgaggtttcttccctgc

SEQ ID NO: 1676439 - DNA, 25 bp, Homo sapien
gcatttttcgtattgctctctgaaa

SEQ ID NO: 1676440 - DNA, 25 bp, Homo sapien
ctgaaaccaggcactctttcgccat

SEQ ID NO: 1676441 - DNA, 25 bp, Homo sapien
catttttcgtattgctctctgaaac

SEQ ID NO: 1676442 - DNA, 25 bp, Homo sapien
gctctctgaaaccaggcactctttc

SEQ ID NO: 1676443 - DNA, 25 bp, Homo sapien
aaatcagtcatcttgccagtggaac

SEQ ID NO: 1676444 - DNA, 25 bp, Homo sapien
accttggaccattcgtgtagactag

SEQ ID NO: 1676445 - DNA, 25 bp, Homo sapien
gaatagtagaacctcctgatcagaa

SEQ ID NO: 1676446 - DNA, 25 bp, Homo sapien
tgtagactagttagggatgtcctgc

SEQ ID NO: 1676447 - DNA, 25 bp, Homo sapien
ctccttgctgtagtattgtaatttt

SEQ ID NO: 1676448 - DNA, 25 bp, Homo sapien
tccataagaactctcatcttttcct

SEQ ID NO: 1676449 - DNA, 25 bp, Homo sapien
ttttccataagaactctcatctttt

SEQ ID NO: 1676450 - DNA, 25 bp, Homo sapien
ttccataagaactctcatcttttcc

SEQ ID NO: 1676451 - DNA, 25 bp, Homo sapien
ctatgttagaatactgcgatggtca

SEQ ID NO: 1676452 - DNA, 25 bp, Homo sapien
atcagtaactacaccccgacctgag

SEQ ID NO: 1676453 - DNA, 25 bp, Homo sapien
gcacagcaaatcaggaagacgccct

SEQ ID NO: 1676454 - DNA, 25 bp, Homo sapien
agcttccacatcgagggcacagcaa

SEQ ID NO: 1676455 - DNA, 25 bp, Homo sapien
ttcctggaggcctacaacaccatca

SEQ ID NO: 1676456 - DNA, 25 bp, Homo sapien
gaaggcctcccggagcaacaacgac

SEQ ID NO: 1676457 - DNA, 25 bp, Homo sapien
acaacaccatcagcgagcaggcggt

SEQ ID NO: 1676458 - DNA, 25 bp, Homo sapien
aacaacgacgtcaagtgctccacct

SEQ ID NO: 1676459 - DNA, 25 bp, Homo sapien
ataagacaggctgtccccctgctgc

SEQ ID NO: 1676460 - DNA, 25 bp, Homo sapien
ccgcataagacaggctgtccccctg

SEQ ID NO: 1676461 - DNA, 25 bp, Homo sapien
gcacctcctgaagggcactgtccat

SEQ ID NO: 1676462 - DNA, 25 bp, Homo sapien
ctgcagcacctcctgaagggcactg

SEQ ID NO: 1676463 - DNA, 25 bp, Homo sapien
tggagtaaacgctgatgggtttttc

SEQ ID NO: 1676464 - DNA, 25 bp, Homo sapien
cattaaacaggtttattctgtcatc

SEQ ID NO: 1676465 - DNA, 25 bp, Homo sapien
tctttctcctagattcatcagtagt

SEQ ID NO: 1676466 - DNA, 25 bp, Homo sapien
ttctcctagattcatcagtagtttg

SEQ ID NO: 1676467 - DNA, 25 bp, Homo sapien
tgtctgtttctttcgctggggttcc

SEQ ID NO: 1676468 - DNA, 25 bp, Homo sapien
tccagtggggccgacatgggccctt

SEQ ID NO: 1676469 - DNA, 25 bp, Homo sapien
gtagggcccatggctaacgctgccc

SEQ ID NO: 1676470 - DNA, 25 bp, Homo sapien
acagttcaatagcatcaactctggc

SEQ ID NO: 1676471 - DNA, 25 bp, Homo sapien
ttgccattgtagttcaggagcctct

SEQ ID NO: 1676472 - DNA, 25 bp, Homo sapien
caagagtggattagcagcctggttc

SEQ ID NO: 1676473 - DNA, 25 bp, Homo sapien
cagtgacataccgagaatttggcgt

SEQ ID NO: 1676474 - DNA, 25 bp, Homo sapien
tttggcgtggacttttcaacaacag

SEQ ID NO: 1676475 - DNA, 25 bp, Homo sapien
gatggtatgcattcccagagggcag

SEQ ID NO: 1676476 - DNA, 25 bp, Homo sapien
ctgtgacacaccttgggaaagagga

SEQ ID NO: 1676477 - DNA, 25 bp, Homo sapien
gagttatgaacatgatctcagggcc

SEQ ID NO: 1676478 - DNA, 25 bp, Homo sapien
ggttgccatgactcacttcaaggga

SEQ ID NO: 1676479 - DNA, 25 bp, Homo sapien
tcttccacagcctttgatcttgaag

SEQ ID NO: 1676480 - DNA, 25 bp, Homo sapien
tgatcaactgttgatgacacctgtg

SEQ ID NO: 1676481 - DNA, 25 bp, Homo sapien
tcatccctcctggtcgttggcacct

SEQ ID NO: 1676482 - DNA, 25 bp, Homo sapien
ggtagcctggccttcgagtcttcta

SEQ ID NO: 1676483 - DNA, 25 bp, Homo sapien
tcaattcacatctttggcagcccag

SEQ ID NO: 1676484 - DNA, 25 bp, Homo sapien
tgttttctgaactgttcaaccaaaa

SEQ ID NO: 1676485 - DNA, 25 bp, Homo sapien
tctgaactgttcaaccaaaagcttt

SEQ ID NO: 1676486 - DNA, 25 bp, Homo sapien
gagagtgtagtggaactggttttgt

SEQ ID NO: 1676487 - DNA, 25 bp, Homo sapien
ctgggagagtgtagtggaactggtt

SEQ ID NO: 1676488 - DNA, 25 bp, Homo sapien
tggagacgggtagttaggccccagc

SEQ ID NO: 1676489 - DNA, 25 bp, Homo sapien
gctagtgggtcgttgctgtttttcc

SEQ ID NO: 1676490 - DNA, 25 bp, Homo sapien
tgcctcacgatattttgagggctag

SEQ ID NO: 1676491 - DNA, 25 bp, Homo sapien
ttaaaccagcttttgcgtaaccatg

SEQ ID NO: 1676492 - DNA, 25 bp, Homo sapien
accaacctcaagctgccaggacaac

SEQ ID NO: 1676493 - DNA, 25 bp, Homo sapien
taccaacctcaagctgccaggacaa

SEQ ID NO: 1676494 - DNA, 25 bp, Homo sapien
acctcaagctgccaggacaaccttc

SEQ ID NO: 1676495 - DNA, 25 bp, Homo sapien
caacctcaagctgccaggacaacct

SEQ ID NO: 1676496 - DNA, 25 bp, Homo sapien
gcttagaagatgcacatgaggcact

SEQ ID NO: 1676497 - DNA, 25 bp, Homo sapien
ccccgcaagggtatttctgcaatgt

SEQ ID NO: 1676498 - DNA, 25 bp, Homo sapien
tttgttgatgttattggccggctgt

SEQ ID NO: 1676499 - DNA, 25 bp, Homo sapien
cagcttcattctggcacagtccttg

SEQ ID NO: 1676500 - DNA, 25 bp, Homo sapien
gatttacccagagagactgccctcc

SEQ ID NO: 1676501 - DNA, 25 bp, Homo sapien
gaagatttacccagagagactgccc

SEQ ID NO: 1676502 - DNA, 25 bp, Homo sapien
atttacccagagagactgccctcct

SEQ ID NO: 1676503 - DNA, 25 bp, Homo sapien
ctagaagatttacccagagagactg

SEQ ID NO: 1676504 - DNA, 25 bp, Homo sapien
caggacctggaaaacgtattctgaa

SEQ ID NO: 1676505 - DNA, 25 bp, Homo sapien
accaggacctggaaaacgtattctg

SEQ ID NO: 1676506 - DNA, 25 bp, Homo sapien
cctggaaaacgtattctgaagcttt

SEQ ID NO: 1676507 - DNA, 25 bp, Homo sapien
ggacctggaaaacgtattctgaagc

SEQ ID NO: 1676508 - DNA, 25 bp, Homo sapien
taatacaaggtcagccgtgacacca

SEQ ID NO: 1676509 - DNA, 25 bp, Homo sapien
ggacactgcacagaatcgagcttcc

SEQ ID NO: 1676510 - DNA, 25 bp, Homo sapien
accatgagggccagtcaactccaag

SEQ ID NO: 1676511 - DNA, 25 bp, Homo sapien
caggattcactaatacaaggtcagc

SEQ ID NO: 1676512 - DNA, 25 bp, Homo sapien
ttcatcgcaattcattctacacacc

SEQ ID NO: 1676513 - DNA, 25 bp, Homo sapien
ggatgagatgtttcatcgcaattca

SEQ ID NO: 1676514 - DNA, 25 bp, Homo sapien
gagcaggtaggatgagatgtttcat

SEQ ID NO: 1676515 - DNA, 25 bp, Homo sapien
gatgtttcatcgcaattcattctac

SEQ ID NO: 1676516 - DNA, 25 bp, Homo sapien
cactcttcagtagcggtgctcctgg

SEQ ID NO: 1676517 - DNA, 25 bp, Homo sapien
gaagattcccatctcgtatctccag

SEQ ID NO: 1676518 - DNA, 25 bp, Homo sapien
tgcagcgacaactcctagcgaagat

SEQ ID NO: 1676519 - DNA, 25 bp, Homo sapien
ggggatttcatccactgcagcgaca

SEQ ID NO: 1676520 - DNA, 25 bp, Homo sapien
gtacttgcagggtagtagacacaca

SEQ ID NO: 1676521 - DNA, 25 bp, Homo sapien
cactatattgatgcctctttaggta

SEQ ID NO: 1676522 - DNA, 25 bp, Homo sapien
tggcctgtactctattatttagaac

SEQ ID NO: 1676523 - DNA, 25 bp, Homo sapien
acacacacaagcatgtttgttgagt

SEQ ID NO: 1676524 - DNA, 25 bp, Homo sapien
cactgattaaacacccacatcgtaa

SEQ ID NO: 1676525 - DNA, 25 bp, Homo sapien
tcgtaacacaacaaatctgctgact

SEQ ID NO: 1676526 - DNA, 25 bp, Homo sapien
tctgctgacttctgttcgtgtgctt

SEQ ID NO: 1676527 - DNA, 25 bp, Homo sapien
tgacttctgttcgtgtgctttccat

SEQ ID NO: 1676528 - DNA, 25 bp, Homo sapien
tacagcaacagggtagtagacctta

SEQ ID NO: 1676529 - DNA, 25 bp, Homo sapien
agagagggggagtccctgccgcact

SEQ ID NO: 1676530 - DNA, 25 bp, Homo sapien
gactttaacagcatcacccactctt

SEQ ID NO: 1676531 - DNA, 25 bp, Homo sapien
ccgcactcagtcctccacaacactg

SEQ ID NO: 1676532 - DNA, 25 bp, Homo sapien
ttgtctccaccaccaacgtgttggt

SEQ ID NO: 1676533 - DNA, 25 bp, Homo sapien
cttgtctccaccaccaacgtgttgg

SEQ ID NO: 1676534 - DNA, 25 bp, Homo sapien
ccttgtctccaccaccaacgtgttg

SEQ ID NO: 1676535 - DNA, 25 bp, Homo sapien
tgtctccaccaccaacgtgttggtc

SEQ ID NO: 1676536 - DNA, 25 bp, Homo sapien
agatcatcggcaacgcctcctgtgc

SEQ ID NO: 1676537 - DNA, 25 bp, Homo sapien
caagatcatcggcaacgcctcctgt

SEQ ID NO: 1676538 - DNA, 25 bp, Homo sapien
ctgatgggcatgaacgatgagaagt

SEQ ID NO: 1676539 - DNA, 25 bp, Homo sapien
tctgctgatgggcatgaacgatgag

SEQ ID NO: 1676540 - DNA, 25 bp, Homo sapien
gatattgtcaccatcggttacccgt

SEQ ID NO: 1676541 - DNA, 25 bp, Homo sapien
tccaaggcgagatcccacgaaaatt

SEQ ID NO: 1676542 - DNA, 25 bp, Homo sapien
caatggaaactgcatcactcatcat

SEQ ID NO: 1676543 - DNA, 25 bp, Homo sapien
ccggaactgcttttcactctggtaa

SEQ ID NO: 1676544 - DNA, 25 bp, Homo sapien
gatgcctgagatcagacccctgcag

SEQ ID NO: 1676545 - DNA, 25 bp, Homo sapien
agataggccgcgatgcctgagatca

SEQ ID NO: 1676546 - DNA, 25 bp, Homo sapien
tgcctccagataggccgcgatgcct

SEQ ID NO: 1676547 - DNA, 25 bp, Homo sapien
atgcctgagatcagacccctgcagc

SEQ ID NO: 1676548 - DNA, 25 bp, Homo sapien
cattgcctcggaagtgcagcagtgg

SEQ ID NO: 1676549 - DNA, 25 bp, Homo sapien
aaaagtcccgagcaacccattgcct

SEQ ID NO: 1676550 - DNA, 25 bp, Homo sapien
agggagaagcaaaagtcccgagcaa

SEQ ID NO: 1676551 - DNA, 25 bp, Homo sapien
cgagcaacccattgcctcggaagtg

SEQ ID NO: 1676552 - DNA, 25 bp, Homo sapien
gcaagctaggctgctccagggaact

SEQ ID NO: 1676553 - DNA, 25 bp, Homo sapien
ccagggaactgggtaaccatggcca

SEQ ID NO: 1676554 - DNA, 25 bp, Homo sapien
ccctccaggagcatagggaccgggt

SEQ ID NO: 1676555 - DNA, 25 bp, Homo sapien
taagaaaagacagtgccgtccacca

SEQ ID NO: 1676556 - DNA, 25 bp, Homo sapien
tgggtacccacatcagtaggttttg

SEQ ID NO: 1676557 - DNA, 25 bp, Homo sapien
ttcttcccacgtgagtcgccggtgc

SEQ ID NO: 1676558 - DNA, 25 bp, Homo sapien
ctgcttgtcttctgaagataaatcg

SEQ ID NO: 1676559 - DNA, 25 bp, Homo sapien
tcttctgaagataaatcgttggcag

SEQ ID NO: 1676560 - DNA, 25 bp, Homo sapien
agggccttgcctggatcacccggtg

SEQ ID NO: 1676561 - DNA, 25 bp, Homo sapien
ctgtggacaggctgccatcgcagag

SEQ ID NO: 1676562 - DNA, 25 bp, Homo sapien
tgctgaaacaccagcacagggagga

SEQ ID NO: 1676563 - DNA, 25 bp, Homo sapien
cagaaggacccagagctgtctcccc

SEQ ID NO: 1676564 - DNA, 25 bp, Homo sapien
catcttagctctcactccatttcag

SEQ ID NO: 1676565 - DNA, 25 bp, Homo sapien
tctgagagcatcttagctctcactc

SEQ ID NO: 1676566 - DNA, 25 bp, Homo sapien
cattttaaccttcacttgtatccac

SEQ ID NO: 1676567 - DNA, 25 bp, Homo sapien
ctattcacccgggcttctttgcagc

SEQ ID NO: 1676568 - DNA, 25 bp, Homo sapien
ggcttggaaaggtgcgctgaaatca

SEQ ID NO: 1676569 - DNA, 25 bp, Homo sapien
tgcaccaaagcgagagaacactagg

SEQ ID NO: 1676570 - DNA, 25 bp, Homo sapien
ggcagtgtggttagagcagaactct

SEQ ID NO: 1676571 - DNA, 25 bp, Homo sapien
gcagaactctcaagaggcttggaaa

SEQ ID NO: 1676572 - DNA, 25 bp, Homo sapien
aacatctccaataaagcagcgggaa

SEQ ID NO: 1676573 - DNA, 25 bp, Homo sapien
cgtgttaacatagacaggcaggtag

SEQ ID NO: 1676574 - DNA, 25 bp, Homo sapien
tactggtgagattaagacctgtaca

SEQ ID NO: 1676575 - DNA, 25 bp, Homo sapien
aaatggacctgtgccgttcaaacct

SEQ ID NO: 1676576 - DNA, 25 bp, Homo sapien
gagacacgcagagacttttcacaga

SEQ ID NO: 1676577 - DNA, 25 bp, Homo sapien
cacacaggagcacttcagatggaca

SEQ ID NO: 1676578 - DNA, 25 bp, Homo sapien
gaatcagggctcaaagcttcttagg

SEQ ID NO: 1676579 - DNA, 25 bp, Homo sapien
tcaatagatccctgaactgtgcaca

SEQ ID NO: 1676580 - DNA, 25 bp, Homo sapien
gtctctaccaagagcagaggatcca

SEQ ID NO: 1676581 - DNA, 25 bp, Homo sapien
gatgtccaggtgatctggacccatg

SEQ ID NO: 1676582 - DNA, 25 bp, Homo sapien
agcagaggatccaactacaacccgg

SEQ ID NO: 1676583 - DNA, 25 bp, Homo sapien
gatccaactacaacccggaggaggc

SEQ ID NO: 1676584 - DNA, 25 bp, Homo sapien
tcttctacctttgaataatccagtt

SEQ ID NO: 1676585 - DNA, 25 bp, Homo sapien
ttctacctttgaataatccagttcc

SEQ ID NO: 1676586 - DNA, 25 bp, Homo sapien
gtcctgtagcaaggcttcatcagca

SEQ ID NO: 1676587 - DNA, 25 bp, Homo sapien
ctacctttgaataatccagttccca

SEQ ID NO: 1676588 - DNA, 25 bp, Homo sapien
tctacctccctgtccatacatgatc

SEQ ID NO: 1676589 - DNA, 25 bp, Homo sapien
tggtccggtgaggagactcattcac

SEQ ID NO: 1676590 - DNA, 25 bp, Homo sapien
tccctgtccatacatgatccagctc

SEQ ID NO: 1676591 - DNA, 25 bp, Homo sapien
tactgttcccttggtccggtgagga

SEQ ID NO: 1676592 - DNA, 25 bp, Homo sapien
tctccggaagtatgagaaacctgca

SEQ ID NO: 1676593 - DNA, 25 bp, Homo sapien
aatatgttcgttatgactgtggtca

SEQ ID NO: 1676594 - DNA, 25 bp, Homo sapien
gttagaagcatcctattgcaatggg

SEQ ID NO: 1676595 - DNA, 25 bp, Homo sapien
gccagcttaggactatagaaatatg

SEQ ID NO: 1676596 - DNA, 25 bp, Homo sapien
tgactgtactttcataccccttgac

SEQ ID NO: 1676597 - DNA, 25 bp, Homo sapien
tatttgctgtgaaggataaggatgg

SEQ ID NO: 1676598 - DNA, 25 bp, Homo sapien
gctggacttgtccttaaaagttggc

SEQ ID NO: 1676599 - DNA, 25 bp, Homo sapien
gagtaattgagatattatcacccca

SEQ ID NO: 1676600 - DNA, 25 bp, Homo sapien
tcaaaggcatgttctcgcaagagtc

SEQ ID NO: 1676601 - DNA, 25 bp, Homo sapien
gcatgttctcgcaagagtctgggcc

SEQ ID NO: 1676602 - DNA, 25 bp, Homo sapien
acagttcaaaggcatgttctcgcaa

SEQ ID NO: 1676603 - DNA, 25 bp, Homo sapien
tgttctcgcaagagtctgggcccag

SEQ ID NO: 1676604 - DNA, 25 bp, Homo sapien
gcattgaccacacatcctttaaaca

SEQ ID NO: 1676605 - DNA, 25 bp, Homo sapien
acttcagagctttcaatccacagaa

SEQ ID NO: 1676606 - DNA, 25 bp, Homo sapien
cacagaagagtcaccgtcaggaatg

SEQ ID NO: 1676607 - DNA, 25 bp, Homo sapien
tttttccagcgtgggacttcagagc

SEQ ID NO: 1676608 - DNA, 25 bp, Homo sapien
gcgtccagattatacttaaagagag

SEQ ID NO: 1676609 - DNA, 25 bp, Homo sapien
aatgctgtctgctagtatcttttga

SEQ ID NO: 1676610 - DNA, 25 bp, Homo sapien
gcaaactgaatcattaactggtcca

SEQ ID NO: 1676611 - DNA, 25 bp, Homo sapien
catgtgagtgattttctgcgtccag

SEQ ID NO: 1676612 - DNA, 25 bp, Homo sapien
cagaattcgaataattaaatctaat

SEQ ID NO: 1676613 - DNA, 25 bp, Homo sapien
taattaaatctaatgacgaagtcat

SEQ ID NO: 1676614 - DNA, 25 bp, Homo sapien
tgtaaagcttaaattcagaattcga

SEQ ID NO: 1676615 - DNA, 25 bp, Homo sapien
cgaataattaaatctaatgacgaag

SEQ ID NO: 1676616 - DNA, 25 bp, Homo sapien
ctaaagaagacaccaggacagggaa

SEQ ID NO: 1676617 - DNA, 25 bp, Homo sapien
ccaggacagggaattcagtaagcat

SEQ ID NO: 1676618 - DNA, 25 bp, Homo sapien
agaagacaccaggacagggaattca

SEQ ID NO: 1676619 - DNA, 25 bp, Homo sapien
gacaccaggacagggaattcagtaa

SEQ ID NO: 1676620 - DNA, 25 bp, Homo sapien
gagaaaatgatagcatctcaacacc

SEQ ID NO: 1676621 - DNA, 25 bp, Homo sapien
agatttgctggtcccgttgctccaa

SEQ ID NO: 1676622 - DNA, 25 bp, Homo sapien
gttgttctcaataagtttctgctga

SEQ ID NO: 1676623 - DNA, 25 bp, Homo sapien
tcaacaccaagtgcctgaatcagct

SEQ ID NO: 1676624 - DNA, 25 bp, Homo sapien
tctttggtttatcttggtgtttgct

SEQ ID NO: 1676625 - DNA, 25 bp, Homo sapien
gacattgttctttggtttatcttgg

SEQ ID NO: 1676626 - DNA, 25 bp, Homo sapien
tctctgattgacattgttctttggt

SEQ ID NO: 1676627 - DNA, 25 bp, Homo sapien
atctctgattgacattgttctttgg

SEQ ID NO: 1676628 - DNA, 25 bp, Homo sapien
cagaagtatcaggtggcagtcacac

SEQ ID NO: 1676629 - DNA, 25 bp, Homo sapien
agtatcaggtggcagtcacactgcc

SEQ ID NO: 1676630 - DNA, 25 bp, Homo sapien
tatcaggtggcagtcacactgccct

SEQ ID NO: 1676631 - DNA, 25 bp, Homo sapien
gaagtatcaggtggcagtcacactg

SEQ ID NO: 1676632 - DNA, 25 bp, Homo sapien
ggagtcttatacattggcaggcttc

SEQ ID NO: 1676633 - DNA, 25 bp, Homo sapien
gggattgcgatccttctcccctgat

SEQ ID NO: 1676634 - DNA, 25 bp, Homo sapien
tcttccgttagggtgggctgtccac

SEQ ID NO: 1676635 - DNA, 25 bp, Homo sapien
gcaacttgagagattcacgtgcatg

SEQ ID NO: 1676636 - DNA, 25 bp, Homo sapien
catattccaccagaggcttcagcat

SEQ ID NO: 1676637 - DNA, 25 bp, Homo sapien
ggtccccattgtctaggccatattc

SEQ ID NO: 1676638 - DNA, 25 bp, Homo sapien
cagtcagactggtccccattgtcta

SEQ ID NO: 1676639 - DNA, 25 bp, Homo sapien
gccatattccaccagaggcttcagc

SEQ ID NO: 1676640 - DNA, 25 bp, Homo sapien
tggacagcatatgcctaatgaggcc

SEQ ID NO: 1676641 - DNA, 25 bp, Homo sapien
aaatttatgtgggaagtccgtgctc

SEQ ID NO: 1676642 - DNA, 25 bp, Homo sapien
tccacaagccaatggatgctgagtg

SEQ ID NO: 1676643 - DNA, 25 bp, Homo sapien
cccatctatgctgggctatccttaa

SEQ ID NO: 1676644 - DNA, 25 bp, Homo sapien
ggcaagtctattgctactcctagga

SEQ ID NO: 1676645 - DNA, 25 bp, Homo sapien
tactcctaggatgtaagcaggattt

SEQ ID NO: 1676646 - DNA, 25 bp, Homo sapien
ccgaatgtataaggaagagcttgct

SEQ ID NO: 1676647 - DNA, 25 bp, Homo sapien
tagtaagaccccgaatgtataagga

SEQ ID NO: 1676648 - DNA, 25 bp, Homo sapien
aattctaccattcagttgcaccaag

SEQ ID NO: 1676649 - DNA, 25 bp, Homo sapien
cacttaattctaccattcagttgca

SEQ ID NO: 1676650 - DNA, 25 bp, Homo sapien
taccattcagttgcaccaagactgc

SEQ ID NO: 1676651 - DNA, 25 bp, Homo sapien
ttacccacttaattctaccattcag

SEQ ID NO: 1676652 - DNA, 25 bp, Homo sapien
tctttatataacctgttagcaagaa

SEQ ID NO: 1676653 - DNA, 25 bp, Homo sapien
ttctctacaaggttagaaagcaccc

SEQ ID NO: 1676654 - DNA, 25 bp, Homo sapien
agaaaagaattctctacaaggttag

SEQ ID NO: 1676655 - DNA, 25 bp, Homo sapien
atattctttatataacctgttagca

SEQ ID NO: 1676656 - DNA, 25 bp, Homo sapien
ctacataggctggtgcttccctcct

SEQ ID NO: 1676657 - DNA, 25 bp, Homo sapien
tcccatcttgtccgttgatgcccat

SEQ ID NO: 1676658 - DNA, 25 bp, Homo sapien
tacataggctggtgcttccctcctc

SEQ ID NO: 1676659 - DNA, 25 bp, Homo sapien
cctcccatcttgtccgttgatgccc

SEQ ID NO: 1676660 - DNA, 25 bp, Homo sapien
ggaaatgttcgtagcagccacctgt

SEQ ID NO: 1676661 - DNA, 25 bp, Homo sapien
cagtgccctgctctaattttaggac

SEQ ID NO: 1676662 - DNA, 25 bp, Homo sapien
actgcggcttgtgcccttagttttt

SEQ ID NO: 1676663 - DNA, 25 bp, Homo sapien
tcactctggccctggaaatgttcgt

SEQ ID NO: 1676664 - DNA, 25 bp, Homo sapien
ggtcttcagagtagcgtaatcttca

SEQ ID NO: 1676665 - DNA, 25 bp, Homo sapien
gctgatagcatgctccttggtcctg

SEQ ID NO: 1676666 - DNA, 25 bp, Homo sapien
ttaacttggatcctcgctgatagca

SEQ ID NO: 1676667 - DNA, 25 bp, Homo sapien
ccattggtaaatgtggtccagcctt

SEQ ID NO: 1676668 - DNA, 25 bp, Homo sapien
agcctcaggaaaagtcgcagtgttc

SEQ ID NO: 1676669 - DNA, 25 bp, Homo sapien
gttccttgtagtcttagaaaagcac

SEQ ID NO: 1676670 - DNA, 25 bp, Homo sapien
atcttccagtaacccaaagcctcag

SEQ ID NO: 1676671 - DNA, 25 bp, Homo sapien
gtcaggtggaatttaaaacagtcca

SEQ ID NO: 1676672 - DNA, 25 bp, Homo sapien
taaaagagacgatggtgaccagact

SEQ ID NO: 1676673 - DNA, 25 bp, Homo sapien
ttcctgtggccatgtataaaagaga

SEQ ID NO: 1676674 - DNA, 25 bp, Homo sapien
actgtggcataatacttcctgtggc

SEQ ID NO: 1676675 - DNA, 25 bp, Homo sapien
gtcaaaatctttgggtcatcctcga

SEQ ID NO: 1676676 - DNA, 25 bp, Homo sapien
agtcccagttatgggcctggtttgg

SEQ ID NO: 1676677 - DNA, 25 bp, Homo sapien
cactctttaacctggacaaagctat

SEQ ID NO: 1676678 - DNA, 25 bp, Homo sapien
agtgctgggcagaccccaaagaaag

SEQ ID NO: 1676679 - DNA, 25 bp, Homo sapien
acaaagctatagtctcacagtccca

SEQ ID NO: 1676680 - DNA, 25 bp, Homo sapien
cagcacccttatgttcaccagttga

SEQ ID NO: 1676681 - DNA, 25 bp, Homo sapien
caaactgtgattggttatttcagca

SEQ ID NO: 1676682 - DNA, 25 bp, Homo sapien
gttgaagcagctgcggttgctatgc

SEQ ID NO: 1676683 - DNA, 25 bp, Homo sapien
ctgcggttgctatgccatcagctct

SEQ ID NO: 1676684 - DNA, 25 bp, Homo sapien
ttgtatgggcttctagagaaaccag

SEQ ID NO: 1676685 - DNA, 25 bp, Homo sapien
ttgtaattgtatgggcttctagaga

SEQ ID NO: 1676686 - DNA, 25 bp, Homo sapien
tctaccttgactgattgtaattgta

SEQ ID NO: 1676687 - DNA, 25 bp, Homo sapien
gtctaccttgactgattgtaattgt

SEQ ID NO: 1676688 - DNA, 25 bp, Homo sapien
tctttactgaaagccagtttctcca

SEQ ID NO: 1676689 - DNA, 25 bp, Homo sapien
atctttactgaaagccagtttctcc

SEQ ID NO: 1676690 - DNA, 25 bp, Homo sapien
aatctttactgaaagccagtttctc

SEQ ID NO: 1676691 - DNA, 25 bp, Homo sapien
aagatcagacacaggagctttcggt

SEQ ID NO: 1676692 - DNA, 25 bp, Homo sapien
gtgttttcaaccaagatagtagtgc

SEQ ID NO: 1676693 - DNA, 25 bp, Homo sapien
cagaggtattgactcctatcacggg

SEQ ID NO: 1676694 - DNA, 25 bp, Homo sapien
agtagtgcttctccttgttcacaga

SEQ ID NO: 1676695 - DNA, 25 bp, Homo sapien
aagaaacattccttcatccatcaga

SEQ ID NO: 1676696 - DNA, 25 bp, Homo sapien
cccagaactttagtttagtatggca

SEQ ID NO: 1676697 - DNA, 25 bp, Homo sapien
tgcggtaacttgcacaagtatcagg

SEQ ID NO: 1676698 - DNA, 25 bp, Homo sapien
catcagagatgtgtatgcggtaact

SEQ ID NO: 1676699 - DNA, 25 bp, Homo sapien
tattaattgtttcgtggacccatta

SEQ ID NO: 1676700 - DNA, 25 bp, Homo sapien
ttgtttcgtggacccattacagtac

SEQ ID NO: 1676701 - DNA, 25 bp, Homo sapien
taattgtttcgtggacccattacag

SEQ ID NO: 1676702 - DNA, 25 bp, Homo sapien
tatctattaattgtttcgtggaccc

SEQ ID NO: 1676703 - DNA, 25 bp, Homo sapien
ggtagcaaaatggagtgaaaaagcc

SEQ ID NO: 1676704 - DNA, 25 bp, Homo sapien
aagccttaaacccagactcagtcat

SEQ ID NO: 1676705 - DNA, 25 bp, Homo sapien
gtgccctcagctggcatagttcctt

SEQ ID NO: 1676706 - DNA, 25 bp, Homo sapien
tggcatagttcctttgcactgcttg

SEQ ID NO: 1676707 - DNA, 25 bp, Homo sapien
ttgcattctctcctgaatttggcaa

SEQ ID NO: 1676708 - DNA, 25 bp, Homo sapien
gactgctgaacatatgaaaagctgc

SEQ ID NO: 1676709 - DNA, 25 bp, Homo sapien
ggactgctgaacatatgaaaagctg

SEQ ID NO: 1676710 - DNA, 25 bp, Homo sapien
tgcattctctcctgaatttggcaaa

SEQ ID NO: 1676711 - DNA, 25 bp, Homo sapien
tatccgtcttgatgagtttcggcat

SEQ ID NO: 1676712 - DNA, 25 bp, Homo sapien
gtctttgatactcccttctcttctg

SEQ ID NO: 1676713 - DNA, 25 bp, Homo sapien
ctctttcttgtaaggtttagacatg

SEQ ID NO: 1676714 - DNA, 25 bp, Homo sapien
cctcttttgacctttatccgtcttg

SEQ ID NO: 1676715 - DNA, 25 bp, Homo sapien
ctgccagagatgtgatgttttacct

SEQ ID NO: 1676716 - DNA, 25 bp, Homo sapien
gtgatgttttacctttgctatgaaa

SEQ ID NO: 1676717 - DNA, 25 bp, Homo sapien
tacctttgctatgaaaattgcattt

SEQ ID NO: 1676718 - DNA, 25 bp, Homo sapien
cagagatgtgatgttttacctttgc

SEQ ID NO: 1676719 - DNA, 25 bp, Homo sapien
ttttcagtctgcatcttcctaccca

SEQ ID NO: 1676720 - DNA, 25 bp, Homo sapien
ttttggcaggagaaatggaccacca

SEQ ID NO: 1676721 - DNA, 25 bp, Homo sapien
tggaccaccaacatcaggaggagat

SEQ ID NO: 1676722 - DNA, 25 bp, Homo sapien
tcttcctacccaaatgtgttcctgc

SEQ ID NO: 1676723 - DNA, 25 bp, Homo sapien
tgtgtcagtgcatctctagccctca

SEQ ID NO: 1676724 - DNA, 25 bp, Homo sapien
ggccactttgtgtcagtgcatctct

SEQ ID NO: 1676725 - DNA, 25 bp, Homo sapien
ttgtgtcagtgcatctctagccctc

SEQ ID NO: 1676726 - DNA, 25 bp, Homo sapien
tttgtgtcagtgcatctctagccct

SEQ ID NO: 1676727 - DNA, 25 bp, Homo sapien
tgaaattgctgttgtgagcccaagg

SEQ ID NO: 1676728 - DNA, 25 bp, Homo sapien
tctgtttcacctgagagatcatttc

SEQ ID NO: 1676729 - DNA, 25 bp, Homo sapien
gcatctgctgaactccgaagtgcga

SEQ ID NO: 1676730 - DNA, 25 bp, Homo sapien
tgccctcttggttaataaggccttc

SEQ ID NO: 1676731 - DNA, 25 bp, Homo sapien
tgacaccggggctttctcagattcc

SEQ ID NO: 1676732 - DNA, 25 bp, Homo sapien
cggggctttctcagattccctttct

SEQ ID NO: 1676733 - DNA, 25 bp, Homo sapien
gattccctttcttctcttccctcca

SEQ ID NO: 1676734 - DNA, 25 bp, Homo sapien
attccctttcttctcttccctccat

SEQ ID NO: 1676735 - DNA, 25 bp, Homo sapien
tcctctgaccggatgtggatctcaa

SEQ ID NO: 1676736 - DNA, 25 bp, Homo sapien
ttcctctgaccggatgtggatctca

SEQ ID NO: 1676737 - DNA, 25 bp, Homo sapien
ccaagctagcacatacatctgctgg

SEQ ID NO: 1676738 - DNA, 25 bp, Homo sapien
cagtgtgggagccaagctagcacat

SEQ ID NO: 1676739 - DNA, 25 bp, Homo sapien
attaattcagctcaaggtccccaag

SEQ ID NO: 1676740 - DNA, 25 bp, Homo sapien
gaagtgagcttccaaaattagtctg

SEQ ID NO: 1676741 - DNA, 25 bp, Homo sapien
catggttttgccgagggctgtttca

SEQ ID NO: 1676742 - DNA, 25 bp, Homo sapien
ttcgctgtgtaattcccatccttgg

SEQ ID NO: 1676743 - DNA, 25 bp, Homo sapien
gcaagtaccaagaggagacccatgt

SEQ ID NO: 1676744 - DNA, 25 bp, Homo sapien
aagtatgtgagggatttcttggttc

SEQ ID NO: 1676745 - DNA, 25 bp, Homo sapien
ctgggtaaagtatgtgagggatttc

SEQ ID NO: 1676746 - DNA, 25 bp, Homo sapien
tggttcagccaagaccaggaaaagg

SEQ ID NO: 1676747 - DNA, 25 bp, Homo sapien
accacgaggatctctaagggaagag

SEQ ID NO: 1676748 - DNA, 25 bp, Homo sapien
tcaccacgaggatctctaagggaag

SEQ ID NO: 1676749 - DNA, 25 bp, Homo sapien
aattcaccacgaggatctctaaggg

SEQ ID NO: 1676750 - DNA, 25 bp, Homo sapien
ttcaccacgaggatctctaagggaa

SEQ ID NO: 1676751 - DNA, 25 bp, Homo sapien
ttatcaaagctaatcagtcatcaag

SEQ ID NO: 1676752 - DNA, 25 bp, Homo sapien
gggtgggattagtaacaacagcata

SEQ ID NO: 1676753 - DNA, 25 bp, Homo sapien
tgcccaaccactgttagattcacga

SEQ ID NO: 1676754 - DNA, 25 bp, Homo sapien
gattcacgagtttaagaggtcatcg

SEQ ID NO: 1676755 - DNA, 25 bp, Homo sapien
caactgtctcctcacaggctctttg

SEQ ID NO: 1676756 - DNA, 25 bp, Homo sapien
tctaaaactagaaaccacaactgtc

SEQ ID NO: 1676757 - DNA, 25 bp, Homo sapien
tagaaaccacaactgtctcctcaca

SEQ ID NO: 1676758 - DNA, 25 bp, Homo sapien
tgtctcctcacaggctctttgacac

SEQ ID NO: 1676759 - DNA, 25 bp, Homo sapien
tgtgttctgagtttgccggagtgac

SEQ ID NO: 1676760 - DNA, 25 bp, Homo sapien
aattttactatcagtccgggaccag

SEQ ID NO: 1676761 - DNA, 25 bp, Homo sapien
ggaagagacataagctgttgtgttc

SEQ ID NO: 1676762 - DNA, 25 bp, Homo sapien
caaataaattttgtccacattcctc

SEQ ID NO: 1676763 - DNA, 25 bp, Homo sapien
tctaccatataatactgttttgctc

SEQ ID NO: 1676764 - DNA, 25 bp, Homo sapien
cttaatttggcccatctctcctcta

SEQ ID NO: 1676765 - DNA, 25 bp, Homo sapien
catctctcctctaccatataatact

SEQ ID NO: 1676766 - DNA, 25 bp, Homo sapien
gctgcttaatttggcccatctctcc

SEQ ID NO: 1676767 - DNA, 25 bp, Homo sapien
tgcaaacgtaggtagagaatgattc

SEQ ID NO: 1676768 - DNA, 25 bp, Homo sapien
gaatgattcacccttcgcagaatgc

SEQ ID NO: 1676769 - DNA, 25 bp, Homo sapien
cctggttactgctgcaaacgtaggt

SEQ ID NO: 1676770 - DNA, 25 bp, Homo sapien
ttcgcagaatgctgccataaccctc

SEQ ID NO: 1676771 - DNA, 25 bp, Homo sapien
catatgtgtacacagctattgtctc

SEQ ID NO: 1676772 - DNA, 25 bp, Homo sapien
ctttcatcgccacatatgtgtacac

SEQ ID NO: 1676773 - DNA, 25 bp, Homo sapien
tgtgcacttaagagcagttgcctgc

SEQ ID NO: 1676774 - DNA, 25 bp, Homo sapien
gactcgagacagactgaacttctcc

SEQ ID NO: 1676775 - DNA, 25 bp, Homo sapien
ccgacagtgaccgtgaaccttctat

SEQ ID NO: 1676776 - DNA, 25 bp, Homo sapien
tgccttgccatgtggagtccacgtt

SEQ ID NO: 1676777 - DNA, 25 bp, Homo sapien
caaggagattagcaaactggatggc

SEQ ID NO: 1676778 - DNA, 25 bp, Homo sapien
tcttgcacagggaacaccattaggc

SEQ ID NO: 1676779 - DNA, 25 bp, Homo sapien
gagccaaacttgaccatccactgag

SEQ ID NO: 1676780 - DNA, 25 bp, Homo sapien
gaatttcgcgtctgcaccaactggg

SEQ ID NO: 1676781 - DNA, 25 bp, Homo sapien
caagagtgagtacagaattctgcat

SEQ ID NO: 1676782 - DNA, 25 bp, Homo sapien
cattgccatgaaatactggtcgtga

SEQ ID NO: 1676783 - DNA, 25 bp, Homo sapien
taagcgtaaagactgagacattgcc

SEQ ID NO: 1676784 - DNA, 25 bp, Homo sapien
tgatcgataggacattaagaaggca

SEQ ID NO: 1676785 - DNA, 25 bp, Homo sapien
tggcacgtcctagaaagaccaaggg

SEQ ID NO: 1676786 - DNA, 25 bp, Homo sapien
tggctacccatgctggaggaacaac

SEQ ID NO: 1676787 - DNA, 25 bp, Homo sapien
ggagtgttatccttgtggctaccca

SEQ ID NO: 1676788 - DNA, 25 bp, Homo sapien
gccagtggactagagcagagcaaac

SEQ ID NO: 1676789 - DNA, 25 bp, Homo sapien
acagatacatcttgagccctgccat

SEQ ID NO: 1676790 - DNA, 25 bp, Homo sapien
caggcttttgcacagatacatcttg

SEQ ID NO: 1676791 - DNA, 25 bp, Homo sapien
tttgcacagatacatcttgagccct

SEQ ID NO: 1676792 - DNA, 25 bp, Homo sapien
tgcacagatacatcttgagccctgc

SEQ ID NO: 1676793 - DNA, 25 bp, Homo sapien
tggtatgcttcttgagactgggagc

SEQ ID NO: 1676794 - DNA, 25 bp, Homo sapien
agtaaccaaccttcacatagatcat

SEQ ID NO: 1676795 - DNA, 25 bp, Homo sapien
actgggagcatgtatagaagtaacc

SEQ ID NO: 1676796 - DNA, 25 bp, Homo sapien
cattatatcccttaagcgctcagct

SEQ ID NO: 1676797 - DNA, 25 bp, Homo sapien
cacatgtatgtaccagtggagaacc

SEQ ID NO: 1676798 - DNA, 25 bp, Homo sapien
taaagctcctcgaatgtgaaaatag

SEQ ID NO: 1676799 - DNA, 25 bp, Homo sapien
tgaaaatagggtgtgcctcacactg

SEQ ID NO: 1676800 - DNA, 25 bp, Homo sapien
caggtcaatagggagggaagtcaca

SEQ ID NO: 1676801 - DNA, 25 bp, Homo sapien
gaaggaatgtctcctgcgttccaag

SEQ ID NO: 1676802 - DNA, 25 bp, Homo sapien
gcgttccaagctgcatatccatcta

SEQ ID NO: 1676803 - DNA, 25 bp, Homo sapien
catacttccctatggatgtgccaca

SEQ ID NO: 1676804 - DNA, 25 bp, Homo sapien
gaactatatgtaccctctaggcaag

SEQ ID NO: 1676805 - DNA, 25 bp, Homo sapien
tattgtaaggaagccacaccggtcc

SEQ ID NO: 1676806 - DNA, 25 bp, Homo sapien
caacagggcacatgttaggagccgt

SEQ ID NO: 1676807 - DNA, 25 bp, Homo sapien
taggagccgtgaagtaggagacaaa

SEQ ID NO: 1676808 - DNA, 25 bp, Homo sapien
cgtttgtcctttttgaatcattagc

SEQ ID NO: 1676809 - DNA, 25 bp, Homo sapien
tgtccagaagaggatcccgttttaa

SEQ ID NO: 1676810 - DNA, 25 bp, Homo sapien
tttgagcttctttgctgatagttct

SEQ ID NO: 1676811 - DNA, 25 bp, Homo sapien
gagcttctttgctgatagttctcat

SEQ ID NO: 1676812 - DNA, 25 bp, Homo sapien
tgagcttctttgctgatagttctca

SEQ ID NO: 1676813 - DNA, 25 bp, Homo sapien
gttttgagcttctttgctgatagtt

SEQ ID NO: 1676814 - DNA, 25 bp, Homo sapien
gagcttctaactttctccttaccac

SEQ ID NO: 1676815 - DNA, 25 bp, Homo sapien
ctttgaaactgtttctctgagcttc

SEQ ID NO: 1676816 - DNA, 25 bp, Homo sapien
tccttaccaccaaaaccatcttgca

SEQ ID NO: 1676817 - DNA, 25 bp, Homo sapien
ttctctgagcttctaactttctcct

SEQ ID NO: 1676818 - DNA, 25 bp, Homo sapien
aggatgcaggctattttgatgacat

SEQ ID NO: 1676819 - DNA, 25 bp, Homo sapien
atggataagcatttggatgaggaga

SEQ ID NO: 1676820 - DNA, 25 bp, Homo sapien
tggataagcatttggatgaggagac

SEQ ID NO: 1676821 - DNA, 25 bp, Homo sapien
gataagcatttggatgaggagacat

SEQ ID NO: 1676822 - DNA, 25 bp, Homo sapien
ggataagcatttggatgaggagaca

SEQ ID NO: 1676823 - DNA, 25 bp, Homo sapien
tgctttcaggacttcggctgctgcg

SEQ ID NO: 1676824 - DNA, 25 bp, Homo sapien
actgagtgcctgtgtccgagtgccg

SEQ ID NO: 1676825 - DNA, 25 bp, Homo sapien
agcccgaccgtagcgctgcggaatt

SEQ ID NO: 1676826 - DNA, 25 bp, Homo sapien
gctttttgcggaaggcgcgctgtcc

SEQ ID NO: 1676827 - DNA, 25 bp, Homo sapien
tttcattgaggggcggctgcagctg

SEQ ID NO: 1676828 - DNA, 25 bp, Homo sapien
ctctccggccatgcggtcctcgcgg

SEQ ID NO: 1676829 - DNA, 25 bp, Homo sapien
gatctcgggggcgagcgcgtcctct

SEQ ID NO: 1676830 - DNA, 25 bp, Homo sapien
ctgggatctcgggggcgagcgcgtc

SEQ ID NO: 1676831 - DNA, 25 bp, Homo sapien
cctctccggccatgcggtcctcgcg

SEQ ID NO: 1676832 - DNA, 25 bp, Homo sapien
cagccgcccggggtgcactcccggg

SEQ ID NO: 1676833 - DNA, 25 bp, Homo sapien
cttcctccgaggctcgtgggaccaa

SEQ ID NO: 1676834 - DNA, 25 bp, Homo sapien
ccttcctccgaggctcgtgggacca

SEQ ID NO: 1676835 - DNA, 25 bp, Homo sapien
tccttcctccgaggctcgtgggacc

SEQ ID NO: 1676836 - DNA, 25 bp, Homo sapien
ttcctccgaggctcgtgggaccaac

SEQ ID NO: 1676837 - DNA, 25 bp, Homo sapien
agcataggcggcgcgaacggccgcc

SEQ ID NO: 1676838 - DNA, 25 bp, Homo sapien
ccgcctcggggaatcggcagcatag

SEQ ID NO: 1676839 - DNA, 25 bp, Homo sapien
tcggggaatcggcagcataggcggc

SEQ ID NO: 1676840 - DNA, 25 bp, Homo sapien
cttccgcctcggggaatcggcagca

SEQ ID NO: 1676841 - DNA, 25 bp, Homo sapien
gctctgagggataacggtttgaaag

SEQ ID NO: 1676842 - DNA, 25 bp, Homo sapien
tatagtgtcatcgaacccgggagag

SEQ ID NO: 1676843 - DNA, 25 bp, Homo sapien
aacatgggtccctgcgagtctgaga

SEQ ID NO: 1676844 - DNA, 25 bp, Homo sapien
tccttgctgccgattacttcttcaa

SEQ ID NO: 1676845 - DNA, 25 bp, Homo sapien
agatgagattcgtttcgctttttga

SEQ ID NO: 1676846 - DNA, 25 bp, Homo sapien
ggtcaggagatgagattcgtttcgc

SEQ ID NO: 1676847 - DNA, 25 bp, Homo sapien
caggagatgagattcgtttcgcttt

SEQ ID NO: 1676848 - DNA, 25 bp, Homo sapien
gatgagattcgtttcgctttttgaa

SEQ ID NO: 1676849 - DNA, 25 bp, Homo sapien
acacttttgatatcacatttgaagg

SEQ ID NO: 1676850 - DNA, 25 bp, Homo sapien
tttgatatcacatttgaaggtatct

SEQ ID NO: 1676851 - DNA, 25 bp, Homo sapien
cttttgatatcacatttgaaggtat

SEQ ID NO: 1676852 - DNA, 25 bp, Homo sapien
tgatatcacatttgaaggtatctct

SEQ ID NO: 1676853 - DNA, 25 bp, Homo sapien
tgtcgttcacattcaccattcaaaa

SEQ ID NO: 1676854 - DNA, 25 bp, Homo sapien
ttatgtcgttcacattcaccattca

SEQ ID NO: 1676855 - DNA, 25 bp, Homo sapien
tcacattcaccattcaaaatgccct

SEQ ID NO: 1676856 - DNA, 25 bp, Homo sapien
gttcacattcaccattcaaaatgcc

SEQ ID NO: 1676857 - DNA, 25 bp, Homo sapien
cactggattggctactataaagaaa

SEQ ID NO: 1676858 - DNA, 25 bp, Homo sapien
taatagggtatatcctgacaccaca

SEQ ID NO: 1676859 - DNA, 25 bp, Homo sapien
tcagagcagttcaggtcaatcgagt

SEQ ID NO: 1676860 - DNA, 25 bp, Homo sapien
tgtttagcacgagaaagaaagctcc

SEQ ID NO: 1676861 - DNA, 25 bp, Homo sapien
agatgtcatcgcctcagctaccatc

SEQ ID NO: 1676862 - DNA, 25 bp, Homo sapien
catgaaaattgcaacttaggagggg

SEQ ID NO: 1676863 - DNA, 25 bp, Homo sapien
tgcaacttaggaggggtagtaagaa

SEQ ID NO: 1676864 - DNA, 25 bp, Homo sapien
tcagagatgtcatcgcctcagctac

SEQ ID NO: 1676865 - DNA, 25 bp, Homo sapien
gtcttttacatgttgcggagccctt

SEQ ID NO: 1676866 - DNA, 25 bp, Homo sapien
cttttacatgttgcggagccctttt

SEQ ID NO: 1676867 - DNA, 25 bp, Homo sapien
ttgtcttttacatgttgcggagccc

SEQ ID NO: 1676868 - DNA, 25 bp, Homo sapien
tcattgtcttttacatgttgcggag

SEQ ID NO: 1676869 - DNA, 25 bp, Homo sapien
aagacaaggatcaaggactctccac

SEQ ID NO: 1676870 - DNA, 25 bp, Homo sapien
aaagacaaggatcaaggactctcca

SEQ ID NO: 1676871 - DNA, 25 bp, Homo sapien
tcaaagacaaggatcaaggactctc

SEQ ID NO: 1676872 - DNA, 25 bp, Homo sapien
caaagacaaggatcaaggactctcc

SEQ ID NO: 1676873 - DNA, 25 bp, Homo sapien
cacaaaggtatcaagttccatactc

SEQ ID NO: 1676874 - DNA, 25 bp, Homo sapien
ggtatcaagttccatactccgggaa

SEQ ID NO: 1676875 - DNA, 25 bp, Homo sapien
tttcacaaaggtatcaagttccata

SEQ ID NO: 1676876 - DNA, 25 bp, Homo sapien
caagttccatactccgggaactcct

SEQ ID NO: 1676877 - DNA, 25 bp, Homo sapien
gctgggtcaggtagctcctccaggg

SEQ ID NO: 1676878 - DNA, 25 bp, Homo sapien
agaatgagaaccacacggcggggct

SEQ ID NO: 1676879 - DNA, 25 bp, Homo sapien
ggggctgggtcaggtagctcctcca

SEQ ID NO: 1676880 - DNA, 25 bp, Homo sapien
ggagaatgagaaccacacggcgggg

SEQ ID NO: 1676881 - DNA, 25 bp, Homo sapien
ggtgaaggttgtcaggtcactgttt

SEQ ID NO: 1676882 - DNA, 25 bp, Homo sapien
tcaggtcactgtttgacatattcat

SEQ ID NO: 1676883 - DNA, 25 bp, Homo sapien
aaggttgtcaggtcactgtttgaca

SEQ ID NO: 1676884 - DNA, 25 bp, Homo sapien
gtcaggtcactgtttgacatattca

SEQ ID NO: 1676885 - DNA, 25 bp, Homo sapien
ctcgtggtttccgtggaagaggctc

SEQ ID NO: 1676886 - DNA, 25 bp, Homo sapien
cttcctctattattggggtttgagg

SEQ ID NO: 1676887 - DNA, 25 bp, Homo sapien
ctctattattggggtttgaggattg

SEQ ID NO: 1676888 - DNA, 25 bp, Homo sapien
tcttcctctattattggggtttgag

SEQ ID NO: 1676889 - DNA, 25 bp, Homo sapien
tcctctattattggggtttgaggat

SEQ ID NO: 1676890 - DNA, 25 bp, Homo sapien
tgcttcccctggacttgagctagac

SEQ ID NO: 1676891 - DNA, 25 bp, Homo sapien
gcgtgttttccactgcgatgccgaa

SEQ ID NO: 1676892 - DNA, 25 bp, Homo sapien
tgcctttaggagtcccctattcttg

SEQ ID NO: 1676893 - DNA, 25 bp, Homo sapien
gctagactccttgaaaagtgggcat

SEQ ID NO: 1676894 - DNA, 25 bp, Homo sapien
ttttagcctagtgtttgaagaagac

SEQ ID NO: 1676895 - DNA, 25 bp, Homo sapien
tactggaaatgtaaacactctaatt

SEQ ID NO: 1676896 - DNA, 25 bp, Homo sapien
taggagtctggagaggtacctttta

SEQ ID NO: 1676897 - DNA, 25 bp, Homo sapien
aggaaacttgtttgaatagcaatta

SEQ ID NO: 1676898 - DNA, 25 bp, Homo sapien
tttggtactttttcaagctgtttca

SEQ ID NO: 1676899 - DNA, 25 bp, Homo sapien
tggtactttttcaagctgtttcacg

SEQ ID NO: 1676900 - DNA, 25 bp, Homo sapien
ctttttcaagctgtttcacgtacat

SEQ ID NO: 1676901 - DNA, 25 bp, Homo sapien
attctttggtactttttcaagctgt

SEQ ID NO: 1676902 - DNA, 25 bp, Homo sapien
gaacatctgccaacttccgatacaa

SEQ ID NO: 1676903 - DNA, 25 bp, Homo sapien
acaactagcatctgtgtctgtggct

SEQ ID NO: 1676904 - DNA, 25 bp, Homo sapien
tgcaaaccaaaaacgcctcaggaat

SEQ ID NO: 1676905 - DNA, 25 bp, Homo sapien
aactccaactaggtcactttctgcc

SEQ ID NO: 1676906 - DNA, 25 bp, Homo sapien
catgctgaccatggtactcctgtac

SEQ ID NO: 1676907 - DNA, 25 bp, Homo sapien
gccctgctggtgtagttgccttcct

SEQ ID NO: 1676908 - DNA, 25 bp, Homo sapien
taaagtgttggagccatcgaaggcc

SEQ ID NO: 1676909 - DNA, 25 bp, Homo sapien
caaacacataggtaatcagctgcac

SEQ ID NO: 1676910 - DNA, 25 bp, Homo sapien
caattataggttttcagtttacctg

SEQ ID NO: 1676911 - DNA, 25 bp, Homo sapien
aagctatggattgtcagtggtctca

SEQ ID NO: 1676912 - DNA, 25 bp, Homo sapien
tctcagtgttttcaggctatgccct

SEQ ID NO: 1676913 - DNA, 25 bp, Homo sapien
aggaaagctatggattgtcagtggt

SEQ ID NO: 1676914 - DNA, 25 bp, Homo sapien
cacatccgcattgatacagaaccaa

SEQ ID NO: 1676915 - DNA, 25 bp, Homo sapien
tactataacgttaggaagtgagcct

SEQ ID NO: 1676916 - DNA, 25 bp, Homo sapien
gctggtggaggccaaagacttatat

SEQ ID NO: 1676917 - DNA, 25 bp, Homo sapien
gtctctatcttgcaagaaaccatgg

SEQ ID NO: 1676918 - DNA, 25 bp, Homo sapien
tgctgtagcgggctgaaaagatgct

SEQ ID NO: 1676919 - DNA, 25 bp, Homo sapien
tgagctgagcatgggtaagacttac

SEQ ID NO: 1676920 - DNA, 25 bp, Homo sapien
ttccacttttactgcaagaagccct

SEQ ID NO: 1676921 - DNA, 25 bp, Homo sapien
tcatcctgtaagcaggtggtacagc

SEQ ID NO: 1676922 - DNA, 25 bp, Homo sapien
gaagggtagatcacgtctgcaagct

SEQ ID NO: 1676923 - DNA, 25 bp, Homo sapien
gaagagaagggtagatcacgtctgc

SEQ ID NO: 1676924 - DNA, 25 bp, Homo sapien
agagaagggtagatcacgtctgcaa

SEQ ID NO: 1676925 - DNA, 25 bp, Homo sapien
tagaagagaagggtagatcacgtct

SEQ ID NO: 1676926 - DNA, 25 bp, Homo sapien
ccatcttctagcacggaggaagtgc

SEQ ID NO: 1676927 - DNA, 25 bp, Homo sapien
ctgcaccatcttctagcacggagga

SEQ ID NO: 1676928 - DNA, 25 bp, Homo sapien
ctttgtggggacctgcaccatcttc

SEQ ID NO: 1676929 - DNA, 25 bp, Homo sapien
tctagcacggaggaagtgctagccg

SEQ ID NO: 1676930 - DNA, 25 bp, Homo sapien
atggttctcattggccactcttcct

SEQ ID NO: 1676931 - DNA, 25 bp, Homo sapien
tctccacgcaggttcacgggcagct

SEQ ID NO: 1676932 - DNA, 25 bp, Homo sapien
tctccttgagctgcactgatctact

SEQ ID NO: 1676933 - DNA, 25 bp, Homo sapien
tgatctacttctccacgcaggttca

SEQ ID NO: 1676934 - DNA, 25 bp, Homo sapien
atgagcctactgagtttttgtaaac

SEQ ID NO: 1676935 - DNA, 25 bp, Homo sapien
catccacaaacctgatgagcctact

SEQ ID NO: 1676936 - DNA, 25 bp, Homo sapien
cacaaacctgatgagcctactgagt

SEQ ID NO: 1676937 - DNA, 25 bp, Homo sapien
tccacaaacctgatgagcctactga

SEQ ID NO: 1676938 - DNA, 25 bp, Homo sapien
gaatgaacatgccacccttggaaca

SEQ ID NO: 1676939 - DNA, 25 bp, Homo sapien
cttggaacagccatacgtaaggcga

SEQ ID NO: 1676940 - DNA, 25 bp, Homo sapien
taaggcgagtcagccttcttgaatc

SEQ ID NO: 1676941 - DNA, 25 bp, Homo sapien
gaaacagtttgtcatatgggaagga

SEQ ID NO: 1676942 - DNA, 25 bp, Homo sapien
tctttcctgtgtataagtggagaga

SEQ ID NO: 1676943 - DNA, 25 bp, Homo sapien
agtggagagaagccgttgttctcca

SEQ ID NO: 1676944 - DNA, 25 bp, Homo sapien
gtggagagaagccgttgttctccat

SEQ ID NO: 1676945 - DNA, 25 bp, Homo sapien
taccagtgttaaccacaagatcttg

SEQ ID NO: 1676946 - DNA, 25 bp, Homo sapien
tactttaccagtgttaaccacaaga

SEQ ID NO: 1676947 - DNA, 25 bp, Homo sapien
cagtgttaaccacaagatcttggta

SEQ ID NO: 1676948 - DNA, 25 bp, Homo sapien
tgttactttaccagtgttaaccaca

SEQ ID NO: 1676949 - DNA, 25 bp, Homo sapien
cagaatatctgggctttatccaagc

SEQ ID NO: 1676950 - DNA, 25 bp, Homo sapien
aatatctgggctttatccaagccat

SEQ ID NO: 1676951 - DNA, 25 bp, Homo sapien
ttcagaatatctgggctttatccaa

SEQ ID NO: 1676952 - DNA, 25 bp, Homo sapien
ctttgggaattcagaatatctgggc

SEQ ID NO: 1676953 - DNA, 25 bp, Homo sapien
gcagctgtgctcgtactaggcctct

SEQ ID NO: 1676954 - DNA, 25 bp, Homo sapien
tatgtcccttgagtgtccttgtccg

SEQ ID NO: 1676955 - DNA, 25 bp, Homo sapien
gacttgaaacggaagctatgcacag

SEQ ID NO: 1676956 - DNA, 25 bp, Homo sapien
tcagacgtgtgactgtgcccggaag

SEQ ID NO: 1676957 - DNA, 25 bp, Homo sapien
cttgcagaataacaacagaaattac

SEQ ID NO: 1676958 - DNA, 25 bp, Homo sapien
tccattttcccccagtgtttgacat

SEQ ID NO: 1676959 - DNA, 25 bp, Homo sapien
ttttcccccagtgtttgacatccat

SEQ ID NO: 1676960 - DNA, 25 bp, Homo sapien
cattttcccccagtgtttgacatcc

SEQ ID NO: 1676961 - DNA, 25 bp, Homo sapien
cactatggagactgcagtacttatc

SEQ ID NO: 1676962 - DNA, 25 bp, Homo sapien
tcactatggagactgcagtacttat

SEQ ID NO: 1676963 - DNA, 25 bp, Homo sapien
tgaagatattggttctttgaaatac

SEQ ID NO: 1676964 - DNA, 25 bp, Homo sapien
tgttgaagatattggttctttgaaa

SEQ ID NO: 1676965 - DNA, 25 bp, Homo sapien
cttgacattcagaacatctcgacga

SEQ ID NO: 1676966 - DNA, 25 bp, Homo sapien
ttgacattcagaacatctcgacgac

SEQ ID NO: 1676967 - DNA, 25 bp, Homo sapien
tcagaagtatgcaaacaagttggta

SEQ ID NO: 1676968 - DNA, 25 bp, Homo sapien
gaatgtcaggattgttagagggcct

SEQ ID NO: 1676969 - DNA, 25 bp, Homo sapien
tccttttggctatagcatggagttc

SEQ ID NO: 1676970 - DNA, 25 bp, Homo sapien
tcagctttagccgaaaagacataag

SEQ ID NO: 1676971 - DNA, 25 bp, Homo sapien
tctgggagaatgagagtatcacaag

SEQ ID NO: 1676972 - DNA, 25 bp, Homo sapien
catttgaaactaggagatcatgagg

SEQ ID NO: 1676973 - DNA, 25 bp, Homo sapien
taacaatattatttacgatgtggag

SEQ ID NO: 1676974 - DNA, 25 bp, Homo sapien
tcacaagggttggtacaagaaatta

SEQ ID NO: 1676975 - DNA, 25 bp, Homo sapien
tgcaggattcagagcttgcaactta

SEQ ID NO: 1676976 - DNA, 25 bp, Homo sapien
ctgcaggattcagagcttgcaactt

SEQ ID NO: 1676977 - DNA, 25 bp, Homo sapien
tcagtactgggccacagacgaagcc

SEQ ID NO: 1676978 - DNA, 25 bp, Homo sapien
catcaggataggatgttctggtttc

SEQ ID NO: 1676979 - DNA, 25 bp, Homo sapien
cacagacgaagccatcaggatagga

SEQ ID NO: 1676980 - DNA, 25 bp, Homo sapien
actgggccacagacgaagccatcag

SEQ ID NO: 1676981 - DNA, 25 bp, Homo sapien
tctgttgataacatgtaccatgttg

SEQ ID NO: 1676982 - DNA, 25 bp, Homo sapien
tgaggtatgtcctttaatccccagt

SEQ ID NO: 1676983 - DNA, 25 bp, Homo sapien
tgttgaaccatcctagtatcccaag

SEQ ID NO: 1676984 - DNA, 25 bp, Homo sapien
gaagtttcgcatgaatattcatcag

SEQ ID NO: 1676985 - DNA, 25 bp, Homo sapien
ctttttgtctttctggctgtgaatt

SEQ ID NO: 1676986 - DNA, 25 bp, Homo sapien
gtctttctggctgtgaattttgtcc

SEQ ID NO: 1676987 - DNA, 25 bp, Homo sapien
caactttttgtctttctggctgtga

SEQ ID NO: 1676988 - DNA, 25 bp, Homo sapien
ctttctggctgtgaattttgtccat

SEQ ID NO: 1676989 - DNA, 25 bp, Homo sapien
agatggtaaaaatcagatctggact

SEQ ID NO: 1676990 - DNA, 25 bp, Homo sapien
ttagaagaaatctcgaaatgggttg

SEQ ID NO: 1676991 - DNA, 25 bp, Homo sapien
gaaatgggttgacagagtttgatac

SEQ ID NO: 1676992 - DNA, 25 bp, Homo sapien
tgacagagtttgatactgaaatcct

SEQ ID NO: 1676993 - DNA, 25 bp, Homo sapien
aatatgcaatacatgattgctttga

SEQ ID NO: 1676994 - DNA, 25 bp, Homo sapien
ctttgatgtctctcagacaactgct

SEQ ID NO: 1676995 - DNA, 25 bp, Homo sapien
tcttctcctaaaatatgcaatacat

SEQ ID NO: 1676996 - DNA, 25 bp, Homo sapien
ttgctttgatgtctctcagacaact

SEQ ID NO: 1676997 - DNA, 25 bp, Homo sapien
gcaagtctaatatgtcacctagacg

SEQ ID NO: 1676998 - DNA, 25 bp, Homo sapien
cacctagacgacatccttgtgtcag

SEQ ID NO: 1676999 - DNA, 25 bp, Homo sapien
tatgtcacctagacgacatccttgt

SEQ ID NO: 1677000 - DNA, 25 bp, Homo sapien
ccagtaagcaagtctaatatgtcac

SEQ ID NO: 1677001 - DNA, 25 bp, Homo sapien
tggcagtagtacgtggggagaacct

SEQ ID NO: 1677002 - DNA, 25 bp, Homo sapien
tggagtccactggagtcatccaggt

SEQ ID NO: 1677003 - DNA, 25 bp, Homo sapien
tggctgatagaagagatctaggctg

SEQ ID NO: 1677004 - DNA, 25 bp, Homo sapien
agcaggaatggctgatagaagagat

SEQ ID NO: 1677005 - DNA, 25 bp, Homo sapien
tattccttaataggtggctaggaag

SEQ ID NO: 1677006 - DNA, 25 bp, Homo sapien
taggaagaggatgtctagtaaaaac

SEQ ID NO: 1677007 - DNA, 25 bp, Homo sapien
ttttactctacaacaatattcagtg

SEQ ID NO: 1677008 - DNA, 25 bp, Homo sapien
tcaggtgcaaagataatttccgatg

SEQ ID NO: 1677009 - DNA, 25 bp, Homo sapien
gcatcgctgcttctgttgggcatcg

SEQ ID NO: 1677010 - DNA, 25 bp, Homo sapien
gaatcaccccagatgactcctgcta

SEQ ID NO: 1677011 - DNA, 25 bp, Homo sapien
tagcaacctgctatgtgcaccaggc

SEQ ID NO: 1677012 - DNA, 25 bp, Homo sapien
catgtgggactctatatcacttcag

SEQ ID NO: 1677013 - DNA, 25 bp, Homo sapien
tcgagttgtacagaagtgactgggc

SEQ ID NO: 1677014 - DNA, 25 bp, Homo sapien
gcttatccaagctaggttctcgcct

SEQ ID NO: 1677015 - DNA, 25 bp, Homo sapien
cgcagattcatttggcagtcttgag

SEQ ID NO: 1677016 - DNA, 25 bp, Homo sapien
ggttttttgactggcgcttatccaa

SEQ ID NO: 1677017 - DNA, 25 bp, Homo sapien
gaatgaattcacactagcccctggc

SEQ ID NO: 1677018 - DNA, 25 bp, Homo sapien
gccagtaaagcaaaccgaagtgtca

SEQ ID NO: 1677019 - DNA, 25 bp, Homo sapien
gagaaacctggaaatgagcctgaag

SEQ ID NO: 1677020 - DNA, 25 bp, Homo sapien
gaatcagtgacaaccgggaccacat

SEQ ID NO: 1677021 - DNA, 25 bp, Homo sapien
gaagagggccttagctgatgaatga

SEQ ID NO: 1677022 - DNA, 25 bp, Homo sapien
gagaagagggccttagctgatgaat

SEQ ID NO: 1677023 - DNA, 25 bp, Homo sapien
gagggccttagctgatgaatgatat

SEQ ID NO: 1677024 - DNA, 25 bp, Homo sapien
aagagggccttagctgatgaatgat

SEQ ID NO: 1677025 - DNA, 25 bp, Homo sapien
gaaagggaattctatgtgcactgcc

SEQ ID NO: 1677026 - DNA, 25 bp, Homo sapien
taagaccagacaaggtggcctagct

SEQ ID NO: 1677027 - DNA, 25 bp, Homo sapien
ggtcctcacagtccctataggcagt

SEQ ID NO: 1677028 - DNA, 25 bp, Homo sapien
gaccttgactgctcctagctgagtg

SEQ ID NO: 1677029 - DNA, 25 bp, Homo sapien
tgccacatttcagaagggcatacca

SEQ ID NO: 1677030 - DNA, 25 bp, Homo sapien
gtgatgttctaagcagcttttgatg

SEQ ID NO: 1677031 - DNA, 25 bp, Homo sapien
gaattcctcaggcagtgttgacact

SEQ ID NO: 1677032 - DNA, 25 bp, Homo sapien
tccttcagacaatcatccaggtcaa

SEQ ID NO: 1677033 - DNA, 25 bp, Homo sapien
gctgtttaaaggctagcagctgcat

SEQ ID NO: 1677034 - DNA, 25 bp, Homo sapien
aaagcagatgtctgagtgcatcctg

SEQ ID NO: 1677035 - DNA, 25 bp, Homo sapien
gttatgaatcatggaaagttgctgt

SEQ ID NO: 1677036 - DNA, 25 bp, Homo sapien
gcatcctgagatgaataagttatga

SEQ ID NO: 1677037 - DNA, 25 bp, Homo sapien
tgtccttgcacagttcctagattct

SEQ ID NO: 1677038 - DNA, 25 bp, Homo sapien
ttcagagttagaggatataagatgc

SEQ ID NO: 1677039 - DNA, 25 bp, Homo sapien
tagaggatataagatgctcttctct

SEQ ID NO: 1677040 - DNA, 25 bp, Homo sapien
gaatcttccgtatgtccagcacctt

SEQ ID NO: 1677041 - DNA, 25 bp, Homo sapien
gcgtgcgtgcgcatttgagtccgcc

SEQ ID NO: 1677042 - DNA, 25 bp, Homo sapien
tcagatttgtctgcggttgaccggc

SEQ ID NO: 1677043 - DNA, 25 bp, Homo sapien
gaggttgccgtgtctttttggagca

SEQ ID NO: 1677044 - DNA, 25 bp, Homo sapien
gctctccgtggctactagttggcga

SEQ ID NO: 1677045 - DNA, 25 bp, Homo sapien
gcccatctgcgcgtttcggagttac

SEQ ID NO: 1677046 - DNA, 25 bp, Homo sapien
atctgcgcgtttcggagttactgtc

SEQ ID NO: 1677047 - DNA, 25 bp, Homo sapien
cgcgtttcggagttactgtctgtgc

SEQ ID NO: 1677048 - DNA, 25 bp, Homo sapien
ctcgtcccgctgcttctcttcccat

SEQ ID NO: 1677049 - DNA, 25 bp, Homo sapien
caggtacaccgcaccttgctttttc

SEQ ID NO: 1677050 - DNA, 25 bp, Homo sapien
gccaagtccggccttcttcccatcc

SEQ ID NO: 1677051 - DNA, 25 bp, Homo sapien
agaaatcatggtgttcgctccaggt

SEQ ID NO: 1677052 - DNA, 25 bp, Homo sapien
tctctcttaatctgggggcgtagcg

SEQ ID NO: 1677053 - DNA, 25 bp, Homo sapien
ccttcgtcgcgtgaaagcggtggaa

SEQ ID NO: 1677054 - DNA, 25 bp, Homo sapien
tgctcttccgaccttcgtcgcgtga

SEQ ID NO: 1677055 - DNA, 25 bp, Homo sapien
ctaagcagcagtgtacgtcgccgag

SEQ ID NO: 1677056 - DNA, 25 bp, Homo sapien
gcggtggaagtgctttgctccctaa

SEQ ID NO: 1677057 - DNA, 25 bp, Homo sapien
aatatccacggcgacgagccacagc

SEQ ID NO: 1677058 - DNA, 25 bp, Homo sapien
gtccaatatccacggcgacgagcca

SEQ ID NO: 1677059 - DNA, 25 bp, Homo sapien
tcagtccaatatccacggcgacgag

SEQ ID NO: 1677060 - DNA, 25 bp, Homo sapien
atgtcagtccaatatccacggcgac

SEQ ID NO: 1677061 - DNA, 25 bp, Homo sapien
cctcgagcgctccatagtcactgtg

SEQ ID NO: 1677062 - DNA, 25 bp, Homo sapien
tcagagccggatttgccacctggga

SEQ ID NO: 1677063 - DNA, 25 bp, Homo sapien
cacctgggagcggaacctgatagta

SEQ ID NO: 1677064 - DNA, 25 bp, Homo sapien
ttgaggaccttcaagcttaggagct

SEQ ID NO: 1677065 - DNA, 25 bp, Homo sapien
tcttagagctgcagacaaatgggct

SEQ ID NO: 1677066 - DNA, 25 bp, Homo sapien
ccagagttttgagccaatcaggaga

SEQ ID NO: 1677067 - DNA, 25 bp, Homo sapien
tgaggcagacttacccaccagagtc

SEQ ID NO: 1677068 - DNA, 25 bp, Homo sapien
tgaaagtattcttgcagaccatagg

SEQ ID NO: 1677069 - DNA, 25 bp, Homo sapien
gaacgcctgcatcaaaaagtcggga

SEQ ID NO: 1677070 - DNA, 25 bp, Homo sapien
tgtaggcgactacgaactgctccgc

SEQ ID NO: 1677071 - DNA, 25 bp, Homo sapien
gatcaagcttcccagcgagggtcaa

SEQ ID NO: 1677072 - DNA, 25 bp, Homo sapien
gaaagtcatgtaagagaacgcctgc

SEQ ID NO: 1677073 - DNA, 25 bp, Homo sapien
agggcctgcgttcctcagaccaaaa

SEQ ID NO: 1677074 - DNA, 25 bp, Homo sapien
gaccaaaaggcgcaaactggcattg

SEQ ID NO: 1677075 - DNA, 25 bp, Homo sapien
tcttcagtgttgtcaggcacactaa

SEQ ID NO: 1677076 - DNA, 25 bp, Homo sapien
aatgtataaaacgaagtaattctgg

SEQ ID NO: 1677077 - DNA, 25 bp, Homo sapien
aggcatacggtaaagatatacattc

SEQ ID NO: 1677078 - DNA, 25 bp, Homo sapien
gtttcttccaagcactactgtacta

SEQ ID NO: 1677079 - DNA, 25 bp, Homo sapien
attctttctcagaacgtaagtgttc

SEQ ID NO: 1677080 - DNA, 25 bp, Homo sapien
tgtcttactaatctgtttcttccaa

SEQ ID NO: 1677081 - DNA, 25 bp, Homo sapien
tcagaatgacaaacccatgaacgtt

SEQ ID NO: 1677082 - DNA, 25 bp, Homo sapien
gaataatgccaactggatacagctc

SEQ ID NO: 1677083 - DNA, 25 bp, Homo sapien
caaaaagatacttcagtgggacgat

SEQ ID NO: 1677084 - DNA, 25 bp, Homo sapien
caagaaaccccttgattgagaggag

SEQ ID NO: 1677085 - DNA, 25 bp, Homo sapien
gaggaaattatgcaggtccagagga

SEQ ID NO: 1677086 - DNA, 25 bp, Homo sapien
gataaacaggtatggatccgttccc

SEQ ID NO: 1677087 - DNA, 25 bp, Homo sapien
gagataccaagcattaaaagcccac

SEQ ID NO: 1677088 - DNA, 25 bp, Homo sapien
caagaccaacttactagacgtgaac

SEQ ID NO: 1677089 - DNA, 25 bp, Homo sapien
tcgtgttcctgtgatagggcctccc

SEQ ID NO: 1677090 - DNA, 25 bp, Homo sapien
gaatctgatttctagcgactccggg

SEQ ID NO: 1677091 - DNA, 25 bp, Homo sapien
taggaagtcggcctgaagcaaagcc

SEQ ID NO: 1677092 - DNA, 25 bp, Homo sapien
gattcttccagcacatgagttcaca

SEQ ID NO: 1677093 - DNA, 25 bp, Homo sapien
gatgagccttagtttagccaagaca

SEQ ID NO: 1677094 - DNA, 25 bp, Homo sapien
ttaagttcacctggctctctactgg

SEQ ID NO: 1677095 - DNA, 25 bp, Homo sapien
taaactgtgctaattcggctctcaa

SEQ ID NO: 1677096 - DNA, 25 bp, Homo sapien
ctagtttacgaagagtcacctgatc

SEQ ID NO: 1677097 - DNA, 25 bp, Homo sapien
gattttacataagctccctaggtga

SEQ ID NO: 1677098 - DNA, 25 bp, Homo sapien
gataagaaactctggggatagggcc

SEQ ID NO: 1677099 - DNA, 25 bp, Homo sapien
gctgagaatcattgtagaggattgt

SEQ ID NO: 1677100 - DNA, 25 bp, Homo sapien
tgtagaggattgttgatagcaggcc

SEQ ID NO: 1677101 - DNA, 25 bp, Homo sapien
catcgcctaggaatttttgttagag

SEQ ID NO: 1677102 - DNA, 25 bp, Homo sapien
gagcatcgcctaggaatttttgtta

SEQ ID NO: 1677103 - DNA, 25 bp, Homo sapien
ccttacaccaacagtgtgagcatcg

SEQ ID NO: 1677104 - DNA, 25 bp, Homo sapien
caacagtgtgagcatcgcctaggaa

SEQ ID NO: 1677105 - DNA, 25 bp, Homo sapien
cagaacatgtcttataggaggactc

SEQ ID NO: 1677106 - DNA, 25 bp, Homo sapien
tgtatctaagcatagcaatctggcc

SEQ ID NO: 1677107 - DNA, 25 bp, Homo sapien
ggtaattttggtgaccctctgctag

SEQ ID NO: 1677108 - DNA, 25 bp, Homo sapien
aacatcatattcttaaaccccaggg

SEQ ID NO: 1677109 - DNA, 25 bp, Homo sapien
tagctttgactgctttgatagttct

SEQ ID NO: 1677110 - DNA, 25 bp, Homo sapien
ctttgactgctttgatagttctcca

SEQ ID NO: 1677111 - DNA, 25 bp, Homo sapien
tattttgatagctttgactgctttg

SEQ ID NO: 1677112 - DNA, 25 bp, Homo sapien
ttgatagctttgactgctttgatag

SEQ ID NO: 1677113 - DNA, 25 bp, Homo sapien
ttgagtgaaccaagggatgcccaga

SEQ ID NO: 1677114 - DNA, 25 bp, Homo sapien
taaaagacgctatgaggcagagttc

SEQ ID NO: 1677115 - DNA, 25 bp, Homo sapien
tacacttgcttctctggccattgga

SEQ ID NO: 1677116 - DNA, 25 bp, Homo sapien
ttactaagaaagatacagctgcccc

SEQ ID NO: 1677117 - DNA, 25 bp, Homo sapien
tgcttatatctcactgtctaaagtt

SEQ ID NO: 1677118 - DNA, 25 bp, Homo sapien
gccacagaagatatctgcttatatc

SEQ ID NO: 1677119 - DNA, 25 bp, Homo sapien
aacactgccacagaagatatctgct

SEQ ID NO: 1677120 - DNA, 25 bp, Homo sapien
gaagatatctgcttatatctcactg

SEQ ID NO: 1677121 - DNA, 25 bp, Homo sapien
cagctgactgggtacaggtgagccc

SEQ ID NO: 1677122 - DNA, 25 bp, Homo sapien
cctagactagtaaagcagctgatcc

SEQ ID NO: 1677123 - DNA, 25 bp, Homo sapien
attaaacggtagacccatgggctgg

SEQ ID NO: 1677124 - DNA, 25 bp, Homo sapien
agacatgtgtgagatcccagccaag

SEQ ID NO: 1677125 - DNA, 25 bp, Homo sapien
ggtttgacacaactgaaacatgaag

SEQ ID NO: 1677126 - DNA, 25 bp, Homo sapien
gtggtataaacactccaacagtggc

SEQ ID NO: 1677127 - DNA, 25 bp, Homo sapien
ccttaagaggacagacaatagtaaa

SEQ ID NO: 1677128 - DNA, 25 bp, Homo sapien
tcaacaagcaacacttcatttgtag

SEQ ID NO: 1677129 - DNA, 25 bp, Homo sapien
cacaattctatgtgacttatggtca

SEQ ID NO: 1677130 - DNA, 25 bp, Homo sapien
cctgtgtccagtttagaagtgagag

SEQ ID NO: 1677131 - DNA, 25 bp, Homo sapien
gagtggttgaccaagaacactgcac

SEQ ID NO: 1677132 - DNA, 25 bp, Homo sapien
tacttcagatagacgcagaaaattg

SEQ ID NO: 1677133 - DNA, 25 bp, Homo sapien
gaaggcgacgtggttcaacagcaac

SEQ ID NO: 1677134 - DNA, 25 bp, Homo sapien
gcaacatgagcgactctaaggcggc

SEQ ID NO: 1677135 - DNA, 25 bp, Homo sapien
tctcggtgagcagaaaacgcgggag

SEQ ID NO: 1677136 - DNA, 25 bp, Homo sapien
gaaacttcgcgtgtgaggtaaagca

SEQ ID NO: 1677137 - DNA, 25 bp, Homo sapien
cttatccaagttgacctcatctctg

SEQ ID NO: 1677138 - DNA, 25 bp, Homo sapien
acttatccaagttgacctcatctct

SEQ ID NO: 1677139 - DNA, 25 bp, Homo sapien
tcaacttatccaagttgacctcatc

SEQ ID NO: 1677140 - DNA, 25 bp, Homo sapien
cttcaacttatccaagttgacctca

SEQ ID NO: 1677141 - DNA, 25 bp, Homo sapien
ctccaggttcattgcatctagccat

SEQ ID NO: 1677142 - DNA, 25 bp, Homo sapien
gggaaaatctccaggttcattgcat

SEQ ID NO: 1677143 - DNA, 25 bp, Homo sapien
ttgggaaaatctccaggttcattgc

SEQ ID NO: 1677144 - DNA, 25 bp, Homo sapien
aaaatctccaggttcattgcatcta

SEQ ID NO: 1677145 - DNA, 25 bp, Homo sapien
tgaagcaggagcctcttttcaacgt

SEQ ID NO: 1677146 - DNA, 25 bp, Homo sapien
gaagcaggagcctcttttcaacgtg

SEQ ID NO: 1677147 - DNA, 25 bp, Homo sapien
aatggctggattgaagcaggagcct

SEQ ID NO: 1677148 - DNA, 25 bp, Homo sapien
tgtttccagaaacatttggcaagca

SEQ ID NO: 1677149 - DNA, 25 bp, Homo sapien
gtttccagaaacatttggcaagcaa

SEQ ID NO: 1677150 - DNA, 25 bp, Homo sapien
gctgtttccagaaacatttggcaag

SEQ ID NO: 1677151 - DNA, 25 bp, Homo sapien
tttccagaaacatttggcaagcaat

SEQ ID NO: 1677152 - DNA, 25 bp, Homo sapien
aagttactgaagttgacagcggaag

SEQ ID NO: 1677153 - DNA, 25 bp, Homo sapien
gagttgttccaagtggaaacgacca

SEQ ID NO: 1677154 - DNA, 25 bp, Homo sapien
gagctggcgtcattctgaccaagtt

SEQ ID NO: 1677155 - DNA, 25 bp, Homo sapien
taagcatccaacagtgagttgttcc

SEQ ID NO: 1677156 - DNA, 25 bp, Homo sapien
cctgtgaatgtctaacttccaaata

SEQ ID NO: 1677157 - DNA, 25 bp, Homo sapien
ggccagcactattgtcagagcattg

SEQ ID NO: 1677158 - DNA, 25 bp, Homo sapien
caaaggccagcactattgtcagagc

SEQ ID NO: 1677159 - DNA, 25 bp, Homo sapien
tattgtcagagcattgctattaaca

SEQ ID NO: 1677160 - DNA, 25 bp, Homo sapien
tgccacaccagtcgggaacttctgc

SEQ ID NO: 1677161 - DNA, 25 bp, Homo sapien
gccacaccagtcgggaacttctgct

SEQ ID NO: 1677162 - DNA, 25 bp, Homo sapien
ttcaattagcctcgactgctggatg

SEQ ID NO: 1677163 - DNA, 25 bp, Homo sapien
gactttttcaattagcctcgactgc

SEQ ID NO: 1677164 - DNA, 25 bp, Homo sapien
cataaagctgactttcaaattcccc

SEQ ID NO: 1677165 - DNA, 25 bp, Homo sapien
cccctgcttatgatttgtggtgact

SEQ ID NO: 1677166 - DNA, 25 bp, Homo sapien
atttcagaggagttgtccacgaatg

SEQ ID NO: 1677167 - DNA, 25 bp, Homo sapien
ttgagcagccaaatgatacaaggca

SEQ ID NO: 1677168 - DNA, 25 bp, Homo sapien
gctgcctcccaactaaatgagaagg

SEQ ID NO: 1677169 - DNA, 25 bp, Homo sapien
cctcccaactaaatgagaaggtgct

SEQ ID NO: 1677170 - DNA, 25 bp, Homo sapien
aaaattgtgacaggccatcggtgca

SEQ ID NO: 1677171 - DNA, 25 bp, Homo sapien
gtggctattaacacacgcatgcatg

SEQ ID NO: 1677172 - DNA, 25 bp, Homo sapien
gcacgcatatgctctgctcaggaaa

SEQ ID NO: 1677173 - DNA, 25 bp, Homo sapien
tagaggtggccctgtattttaatgg

SEQ ID NO: 1677174 - DNA, 25 bp, Homo sapien
ttctgcatagcgaaataaaaatggc

SEQ ID NO: 1677175 - DNA, 25 bp, Homo sapien
agagagattctccattacacgatca

SEQ ID NO: 1677176 - DNA, 25 bp, Homo sapien
gcatcacagcccatggtgaatgtat

SEQ ID NO: 1677177 - DNA, 25 bp, Homo sapien
cattctagttcagagccaagcctta

SEQ ID NO: 1677178 - DNA, 25 bp, Homo sapien
ttcaatccagagagcttaaattgtc

SEQ ID NO: 1677179 - DNA, 25 bp, Homo sapien
ttttgttagtttacaatattatgaa

SEQ ID NO: 1677180 - DNA, 25 bp, Homo sapien
tttgttagtttacaatattatgaaa

SEQ ID NO: 1677181 - DNA, 25 bp, Homo sapien
tgtgttcaatccagagagcttaaat

SEQ ID NO: 1677182 - DNA, 25 bp, Homo sapien
cagtccagaagaattgaccttgacc

SEQ ID NO: 1677183 - DNA, 25 bp, Homo sapien
aaccagagcctatatggagttccct

SEQ ID NO: 1677184 - DNA, 25 bp, Homo sapien
taaaccgataatgcatgaagcaacg

SEQ ID NO: 1677185 - DNA, 25 bp, Homo sapien
tgcagtcatgcaaaccgttaggaaa

SEQ ID NO: 1677186 - DNA, 25 bp, Homo sapien
caagtgcccgagagtgaggtcttaa

SEQ ID NO: 1677187 - DNA, 25 bp, Homo sapien
atgaagatcattcccggcctggcag

SEQ ID NO: 1677188 - DNA, 25 bp, Homo sapien
gaaaccctcgctgatgagaaatcca

SEQ ID NO: 1677189 - DNA, 25 bp, Homo sapien
ggtccagacgacacagcggaaattg

SEQ ID NO: 1677190 - DNA, 25 bp, Homo sapien
cctgctctgtgaagttgaacgcttg

SEQ ID NO: 1677191 - DNA, 25 bp, Homo sapien
cttggttcaacttaggcttggtagc

SEQ ID NO: 1677192 - DNA, 25 bp, Homo sapien
caaaatctgtcagggtaggtcctgc

SEQ ID NO: 1677193 - DNA, 25 bp, Homo sapien
tcctctgaaaatggcttgtttctca

SEQ ID NO: 1677194 - DNA, 25 bp, Homo sapien
aaatgcaagtcattcgagctgggcg

SEQ ID NO: 1677195 - DNA, 25 bp, Homo sapien
agggagtcctccctagtcccactag

SEQ ID NO: 1677196 - DNA, 25 bp, Homo sapien
taggactatagggagtcctccctag

SEQ ID NO: 1677197 - DNA, 25 bp, Homo sapien
tttgacacagctaattagaacacta

SEQ ID NO: 1677198 - DNA, 25 bp, Homo sapien
tccaggcttcaaatagagtgcaggg

SEQ ID NO: 1677199 - DNA, 25 bp, Homo sapien
tatgttgagggtgtgcgagtatcta

SEQ ID NO: 1677200 - DNA, 25 bp, Homo sapien
gaaagtcataatttgagctgcacct

SEQ ID NO: 1677201 - DNA, 25 bp, Homo sapien
gctgcacctgtgagtatatagtatt

SEQ ID NO: 1677202 - DNA, 25 bp, Homo sapien
tggttgacccttttcagtgctggag

SEQ ID NO: 1677203 - DNA, 25 bp, Homo sapien
ttcgaaatacaagcaggacctaggc

SEQ ID NO: 1677204 - DNA, 25 bp, Homo sapien
tactgcatttgaaggccggaagaac

SEQ ID NO: 1677205 - DNA, 25 bp, Homo sapien
ttgcaaagcataaagaggatctggc

SEQ ID NO: 1677206 - DNA, 25 bp, Homo sapien
cagggcctgctttgaagtgaataaa

SEQ ID NO: 1677207 - DNA, 25 bp, Homo sapien
tattcaagccatcgattcctaggcc

SEQ ID NO: 1677208 - DNA, 25 bp, Homo sapien
taggccatactccaaatctctggaa

SEQ ID NO: 1677209 - DNA, 25 bp, Homo sapien
caggtatttcttcggctcactatag

SEQ ID NO: 1677210 - DNA, 25 bp, Homo sapien
tttgcataggccaggagtccagtgt

SEQ ID NO: 1677211 - DNA, 25 bp, Homo sapien
tatgtcagttggtccggtgttcagg

SEQ ID NO: 1677212 - DNA, 25 bp, Homo sapien
ccctgtggttgtgcaactgaagtcc

SEQ ID NO: 1677213 - DNA, 25 bp, Homo sapien
ggtgttcagggtctcagaaagcaga

SEQ ID NO: 1677214 - DNA, 25 bp, Homo sapien
ggcagcttggctctaggcctgcagt

SEQ ID NO: 1677215 - DNA, 25 bp, Homo sapien
gctctaggcctgcagtggattaatc

SEQ ID NO: 1677216 - DNA, 25 bp, Homo sapien
cgttttaataaacagggcagcttgg

SEQ ID NO: 1677217 - DNA, 25 bp, Homo sapien
cacttgccgtcttcttgtggctgga

SEQ ID NO: 1677218 - DNA, 25 bp, Homo sapien
actgttttggcctttagaattggct

SEQ ID NO: 1677219 - DNA, 25 bp, Homo sapien
tttggcctttagaattggctattca

SEQ ID NO: 1677220 - DNA, 25 bp, Homo sapien
tcataagctcagcagattggtctct

SEQ ID NO: 1677221 - DNA, 25 bp, Homo sapien
tcttaagaagttctcaagactttgc

SEQ ID NO: 1677222 - DNA, 25 bp, Homo sapien
tctgcacttttattgccgggcagaa

SEQ ID NO: 1677223 - DNA, 25 bp, Homo sapien
tgatggagagcagggagatcccatc

SEQ ID NO: 1677224 - DNA, 25 bp, Homo sapien
ggaagtccaattcttacaccatctg

SEQ ID NO: 1677225 - DNA, 25 bp, Homo sapien
gatcccatcccagcttagtagacaa

SEQ ID NO: 1677226 - DNA, 25 bp, Homo sapien
cagttaatgctttctgaggttccca

SEQ ID NO: 1677227 - DNA, 25 bp, Homo sapien
catttggtactttgaggagtaactt

SEQ ID NO: 1677228 - DNA, 25 bp, Homo sapien
tgagtttggcctagctttgagctga

SEQ ID NO: 1677229 - DNA, 25 bp, Homo sapien
tgaggagtaacttgtcccggctgcc

SEQ ID NO: 1677230 - DNA, 25 bp, Homo sapien
tcttccgagtgactagcttccttta

SEQ ID NO: 1677231 - DNA, 25 bp, Homo sapien
ttccgagtgactagcttcctttatg

SEQ ID NO: 1677232 - DNA, 25 bp, Homo sapien
tgtcttccgagtgactagcttcctt

SEQ ID NO: 1677233 - DNA, 25 bp, Homo sapien
tgtgtcttccgagtgactagcttcc

SEQ ID NO: 1677234 - DNA, 25 bp, Homo sapien
tggcaacatgcaactgtaggtgatc

SEQ ID NO: 1677235 - DNA, 25 bp, Homo sapien
gtggcatattggcaacatgcaactg

SEQ ID NO: 1677236 - DNA, 25 bp, Homo sapien
caactgtaggtgatcccataaagca

SEQ ID NO: 1677237 - DNA, 25 bp, Homo sapien
catgcaactgtaggtgatcccataa

SEQ ID NO: 1677238 - DNA, 25 bp, Homo sapien
cctcgaaaagcagactcagtgccat

SEQ ID NO: 1677239 - DNA, 25 bp, Homo sapien
tatgagttattgagcctcgaaaagc

SEQ ID NO: 1677240 - DNA, 25 bp, Homo sapien
ttaaagccgccatagtggaaagtta

SEQ ID NO: 1677241 - DNA, 25 bp, Homo sapien
tggaaagttatgagttattgagcct

SEQ ID NO: 1677242 - DNA, 25 bp, Homo sapien
tgatgaggcactgctttcaggcgac

SEQ ID NO: 1677243 - DNA, 25 bp, Homo sapien
agagaacttgatgaggcactgcttt

SEQ ID NO: 1677244 - DNA, 25 bp, Homo sapien
caggcgactcatttgtgtgccaggg

SEQ ID NO: 1677245 - DNA, 25 bp, Homo sapien
gccagggagacctttgaaagaacat

SEQ ID NO: 1677246 - DNA, 25 bp, Homo sapien
tgcttcctggatataacatccgtgt

SEQ ID NO: 1677247 - DNA, 25 bp, Homo sapien
cagctaactctgaacataatctgtt

SEQ ID NO: 1677248 - DNA, 25 bp, Homo sapien
tcatcacttttgtaggagattggtg

SEQ ID NO: 1677249 - DNA, 25 bp, Homo sapien
ggtgactgataccaattggcaacag

SEQ ID NO: 1677250 - DNA, 25 bp, Homo sapien
ttgagagggtgttgtttgggccagg

SEQ ID NO: 1677251 - DNA, 25 bp, Homo sapien
tgagagggtgttgtttgggccaggt

SEQ ID NO: 1677252 - DNA, 25 bp, Homo sapien
gttgagagggtgttgtttgggccag

SEQ ID NO: 1677253 - DNA, 25 bp, Homo sapien
tttttgtgcattcttaatctccatc

SEQ ID NO: 1677254 - DNA, 25 bp, Homo sapien
tctgtaccagcttaatttttgtgca

SEQ ID NO: 1677255 - DNA, 25 bp, Homo sapien
tgtcttattgaaagcgattttgaag

SEQ ID NO: 1677256 - DNA, 25 bp, Homo sapien
aagccttttgaaactgcgaatctgt

SEQ ID NO: 1677257 - DNA, 25 bp, Homo sapien
tttcttacattgctgaacttgacca

SEQ ID NO: 1677258 - DNA, 25 bp, Homo sapien
tgttttcttacattgctgaacttga

SEQ ID NO: 1677259 - DNA, 25 bp, Homo sapien
tacattgctgaacttgaccagaaag

SEQ ID NO: 1677260 - DNA, 25 bp, Homo sapien
cttacattgctgaacttgaccagaa

SEQ ID NO: 1677261 - DNA, 25 bp, Homo sapien
ttttgctgtgctatttcagttaatc

SEQ ID NO: 1677262 - DNA, 25 bp, Homo sapien
gttgaccttaaggattttgagacag

SEQ ID NO: 1677263 - DNA, 25 bp, Homo sapien
tctggcattgttgaccttaaggatt

SEQ ID NO: 1677264 - DNA, 25 bp, Homo sapien
cactttcacgctatcttttctggca

SEQ ID NO: 1677265 - DNA, 25 bp, Homo sapien
tacacagccaatggatttgcatcct

SEQ ID NO: 1677266 - DNA, 25 bp, Homo sapien
tgcagtgccccttagggactcctgg

SEQ ID NO: 1677267 - DNA, 25 bp, Homo sapien
gggtttcccatactctcctgtaaga

SEQ ID NO: 1677268 - DNA, 25 bp, Homo sapien
gagtatagtcgcgatgggtttccca

SEQ ID NO: 1677269 - DNA, 25 bp, Homo sapien
ttggacttgggattctttatgcttt

SEQ ID NO: 1677270 - DNA, 25 bp, Homo sapien
acttggacttgggattctttatgct

SEQ ID NO: 1677271 - DNA, 25 bp, Homo sapien
taacttggacttgggattctttatg

SEQ ID NO: 1677272 - DNA, 25 bp, Homo sapien
cttggacttgggattctttatgctt

SEQ ID NO: 1677273 - DNA, 25 bp, Homo sapien
ctttggacggagagggagtggtgtc

SEQ ID NO: 1677274 - DNA, 25 bp, Homo sapien
acggagagggagtggtgtccaacct

SEQ ID NO: 1677275 - DNA, 25 bp, Homo sapien
tgggtgtgtggctttggacggagag

SEQ ID NO: 1677276 - DNA, 25 bp, Homo sapien
tgtgtggctttggacggagagggag

SEQ ID NO: 1677277 - DNA, 25 bp, Homo sapien
gaagacatctagaaccagtctaatg

SEQ ID NO: 1677278 - DNA, 25 bp, Homo sapien
taatgagagtatacacatagtacat

SEQ ID NO: 1677279 - DNA, 25 bp, Homo sapien
tctagaaccagtctaatgagagtat

SEQ ID NO: 1677280 - DNA, 25 bp, Homo sapien
cagtctaatgagagtatacacatag

SEQ ID NO: 1677281 - DNA, 25 bp, Homo sapien
gtaggtgtacggggtcactgggctc

SEQ ID NO: 1677282 - DNA, 25 bp, Homo sapien
gagatggaaaatattaagcttcctt

SEQ ID NO: 1677283 - DNA, 25 bp, Homo sapien
actgggctcccagagatggaaaata

SEQ ID NO: 1677284 - DNA, 25 bp, Homo sapien
ctgggatagtttagtaggtgtacgg

SEQ ID NO: 1677285 - DNA, 25 bp, Homo sapien
agcagatgcagcagtctggacctga

SEQ ID NO: 1677286 - DNA, 25 bp, Homo sapien
agactctccagaatcaaaatatcca

SEQ ID NO: 1677287 - DNA, 25 bp, Homo sapien
gcctcttggcatgcctcgagggaca

SEQ ID NO: 1677288 - DNA, 25 bp, Homo sapien
catgtgcctcttggcatgcctcgag

SEQ ID NO: 1677289 - DNA, 25 bp, Homo sapien
taatgatggtgttgatgtgaagcct

SEQ ID NO: 1677290 - DNA, 25 bp, Homo sapien
ggaggagctttttcatgcatgcaaa

SEQ ID NO: 1677291 - DNA, 25 bp, Homo sapien
tgcttgctgcctacacttcatgact

SEQ ID NO: 1677292 - DNA, 25 bp, Homo sapien
ctctcttctaatatacacatcagga

SEQ ID NO: 1677293 - DNA, 25 bp, Homo sapien
tacctctgtctgtagctcaaattgg

SEQ ID NO: 1677294 - DNA, 25 bp, Homo sapien
tctgcaggtaccaagagaaaagaag

SEQ ID NO: 1677295 - DNA, 25 bp, Homo sapien
tagaggttttgccatatcagggaag

SEQ ID NO: 1677296 - DNA, 25 bp, Homo sapien
aagaactgcagggagtcggtttcct

SEQ ID NO: 1677297 - DNA, 25 bp, Homo sapien
gctagggcttcggaccgctggagtt

SEQ ID NO: 1677298 - DNA, 25 bp, Homo sapien
ggatttcccctctaatctcgccgga

SEQ ID NO: 1677299 - DNA, 25 bp, Homo sapien
ccgcgattctcctcgggaggtgtct

SEQ ID NO: 1677300 - DNA, 25 bp, Homo sapien
gtcgcagccagttcctggcgagtgt

SEQ ID NO: 1677301 - DNA, 25 bp, Homo sapien
cccgagcctagtccccacgccgcgg

SEQ ID NO: 1677302 - DNA, 25 bp, Homo sapien
gcgcccgagcctagtccccacgccg

SEQ ID NO: 1677303 - DNA, 25 bp, Homo sapien
gcgcgcccgagcctagtccccacgc

SEQ ID NO: 1677304 - DNA, 25 bp, Homo sapien
gacgcgcgcccgagcctagtcccca

SEQ ID NO: 1677305 - DNA, 25 bp, Homo sapien
aagggctaaagctattggcattggc

SEQ ID NO: 1677306 - DNA, 25 bp, Homo sapien
gcagctgtctccaggcgtcgtccgc

SEQ ID NO: 1677307 - DNA, 25 bp, Homo sapien
agtgggaataaagggctaaagctat

SEQ ID NO: 1677308 - DNA, 25 bp, Homo sapien
ctgtctccaggcgtcgtccgcggag

SEQ ID NO: 1677309 - DNA, 25 bp, Homo sapien
tcttaagatattgtgagatgaccag

SEQ ID NO: 1677310 - DNA, 25 bp, Homo sapien
cctgttgtgctatcagatgctatgt

SEQ ID NO: 1677311 - DNA, 25 bp, Homo sapien
aaacaggaaatctatccttcaagca

SEQ ID NO: 1677312 - DNA, 25 bp, Homo sapien
aatatcttggttagtcggttagatc

SEQ ID NO: 1677313 - DNA, 25 bp, Homo sapien
cgtatatgtctgagtgggctgtttt

SEQ ID NO: 1677314 - DNA, 25 bp, Homo sapien
cagctctcgtatatgtctgagtggg

SEQ ID NO: 1677315 - DNA, 25 bp, Homo sapien
tcagttcagctctcgtatatgtctg

SEQ ID NO: 1677316 - DNA, 25 bp, Homo sapien
ttcggttccaacttctatgaaacat

SEQ ID NO: 1677317 - DNA, 25 bp, Homo sapien
tgcagactgatgcatgcaatgacag

SEQ ID NO: 1677318 - DNA, 25 bp, Homo sapien
caaactgtgaatcgtgtagtgtaga

SEQ ID NO: 1677319 - DNA, 25 bp, Homo sapien
gactgatgcatgcaatgacaggatc

SEQ ID NO: 1677320 - DNA, 25 bp, Homo sapien
actcctgcaaactgtgaatcgtgta

SEQ ID NO: 1677321 - DNA, 25 bp, Homo sapien
agaaaggtttgattagagaggttga

SEQ ID NO: 1677322 - DNA, 25 bp, Homo sapien
gagaggttgaggacttgtataaatc

SEQ ID NO: 1677323 - DNA, 25 bp, Homo sapien
tgtataaatctaagcagattagagt

SEQ ID NO: 1677324 - DNA, 25 bp, Homo sapien
tctaagcagattagagttgatggat

SEQ ID NO: 1677325 - DNA, 25 bp, Homo sapien
actccagcagcaccgctagggaaaa

SEQ ID NO: 1677326 - DNA, 25 bp, Homo sapien
gcagcaccgctagggaaaattaagg

SEQ ID NO: 1677327 - DNA, 25 bp, Homo sapien
acaccaaatgttcctactccagcag

SEQ ID NO: 1677328 - DNA, 25 bp, Homo sapien
tcttgtggcagcatttcaacaccaa

SEQ ID NO: 1677329 - DNA, 25 bp, Homo sapien
gaggctttgacttagttcataacca

SEQ ID NO: 1677330 - DNA, 25 bp, Homo sapien
ctttgacttagttcataaccagttg

SEQ ID NO: 1677331 - DNA, 25 bp, Homo sapien
tgacttagttcataaccagttgtct

SEQ ID NO: 1677332 - DNA, 25 bp, Homo sapien
ctgaggctttgacttagttcataac

SEQ ID NO: 1677333 - DNA, 25 bp, Homo sapien
cactcaatacacaagccttcatcga

SEQ ID NO: 1677334 - DNA, 25 bp, Homo sapien
cttcatcgagcttgtgagtagctgc

SEQ ID NO: 1677335 - DNA, 25 bp, Homo sapien
ggtagagttctggtatctgtgtgcc

SEQ ID NO: 1677336 - DNA, 25 bp, Homo sapien
gccaccttgcattgtccagtatctc

SEQ ID NO: 1677337 - DNA, 25 bp, Homo sapien
tggccagcccaaaaaccctgagtct

SEQ ID NO: 1677338 - DNA, 25 bp, Homo sapien
tttagttgccctacagatgctacca

SEQ ID NO: 1677339 - DNA, 25 bp, Homo sapien
gccagcatatgcctttgagagaagc

SEQ ID NO: 1677340 - DNA, 25 bp, Homo sapien
tctcttcaaactagacaattgccag

SEQ ID NO: 1677341 - DNA, 25 bp, Homo sapien
aattgttttctcgaagtcagcacca

SEQ ID NO: 1677342 - DNA, 25 bp, Homo sapien
gccggtttgcgtttgtattgccaag

SEQ ID NO: 1677343 - DNA, 25 bp, Homo sapien
aaagaaaggctgcagatacagccac

SEQ ID NO: 1677344 - DNA, 25 bp, Homo sapien
cactagaggtgttgtgtcctgggac

SEQ ID NO: 1677345 - DNA, 25 bp, Homo sapien
tatgcgccacctaaacaacactgaa

SEQ ID NO: 1677346 - DNA, 25 bp, Homo sapien
gaaaacctacgtactgcatgcacat

SEQ ID NO: 1677347 - DNA, 25 bp, Homo sapien
ggtactctcttgaggactaatggtc

SEQ ID NO: 1677348 - DNA, 25 bp, Homo sapien
ggaatggatggagatggtactctct

SEQ ID NO: 1677349 - DNA, 25 bp, Homo sapien
gtgacagaggatggtaaaaggaggc

SEQ ID NO: 1677350 - DNA, 25 bp, Homo sapien
ctatttgatttgaggggtgacagag

SEQ ID NO: 1677351 - DNA, 25 bp, Homo sapien
acatctccgttgccaggcaacagca

SEQ ID NO: 1677352 - DNA, 25 bp, Homo sapien
aatgactttagtctgctccttaacc

SEQ ID NO: 1677353 - DNA, 25 bp, Homo sapien
tagtctgctccttaacctctgacat

SEQ ID NO: 1677354 - DNA, 25 bp, Homo sapien
tttccataatgactttagtctgctc

SEQ ID NO: 1677355 - DNA, 25 bp, Homo sapien
ggatctttctgtgtttcacagagaa

SEQ ID NO: 1677356 - DNA, 25 bp, Homo sapien
ccgggatctttctgtgtttcacaga

SEQ ID NO: 1677357 - DNA, 25 bp, Homo sapien
gatctttctgtgtttcacagagaat

SEQ ID NO: 1677358 - DNA, 25 bp, Homo sapien
tttccgggatctttctgtgtttcac

SEQ ID NO: 1677359 - DNA, 25 bp, Homo sapien
cttgcgtggactactctatgtgata

SEQ ID NO: 1677360 - DNA, 25 bp, Homo sapien
tatttttaggtgagttgcttcttgc

SEQ ID NO: 1677361 - DNA, 25 bp, Homo sapien
aatggacgttatgaggccaggttct

SEQ ID NO: 1677362 - DNA, 25 bp, Homo sapien
cagccccagaatggacgttatgagg

SEQ ID NO: 1677363 - DNA, 25 bp, Homo sapien
cacttccagcaggttgggttgcaaa

SEQ ID NO: 1677364 - DNA, 25 bp, Homo sapien
atgtcagcagaagcatggggcaaga

SEQ ID NO: 1677365 - DNA, 25 bp, Homo sapien
tactctgctgcgtaattcagctgtc

SEQ ID NO: 1677366 - DNA, 25 bp, Homo sapien
gaagtttgtcttgcctggcccaaga

SEQ ID NO: 1677367 - DNA, 25 bp, Homo sapien
tcaaaggttactctgctgcgtaatt

SEQ ID NO: 1677368 - DNA, 25 bp, Homo sapien
tgctgcgtaattcagctgtcagcag

SEQ ID NO: 1677369 - DNA, 25 bp, Homo sapien
cagttggagatgttcgaaagttcac

SEQ ID NO: 1677370 - DNA, 25 bp, Homo sapien
tcactctgaattgacacggctttgt

SEQ ID NO: 1677371 - DNA, 25 bp, Homo sapien
ccaagaggcaggcaacagttggaga

SEQ ID NO: 1677372 - DNA, 25 bp, Homo sapien
gaactgagcattactgccaagaggc

SEQ ID NO: 1677373 - DNA, 25 bp, Homo sapien
tttgtttctaagagcataggaatgc

SEQ ID NO: 1677374 - DNA, 25 bp, Homo sapien
ttgggaggtattggcactctctttc

SEQ ID NO: 1677375 - DNA, 25 bp, Homo sapien
tcatattttgggaggtattggcact

SEQ ID NO: 1677376 - DNA, 25 bp, Homo sapien
taagagcataggaatgcttcttttc

SEQ ID NO: 1677377 - DNA, 25 bp, Homo sapien
tttggcgcgtcctgctcagaagccg

SEQ ID NO: 1677378 - DNA, 25 bp, Homo sapien
aatcatctggccaaagggtgcgggt

SEQ ID NO: 1677379 - DNA, 25 bp, Homo sapien
gaccaacgcggaatcccaggattaa

SEQ ID NO: 1677380 - DNA, 25 bp, Homo sapien
cgttcccgaggcgaatgaggctgtt

SEQ ID NO: 1677381 - DNA, 25 bp, Homo sapien
tcaggcctggaaatcccgtgggcac

SEQ ID NO: 1677382 - DNA, 25 bp, Homo sapien
caaacacgcatgtgacacgctgagc

SEQ ID NO: 1677383 - DNA, 25 bp, Homo sapien
gcaggccctggaacgccagggtcct

SEQ ID NO: 1677384 - DNA, 25 bp, Homo sapien
ggccacagaatcaagcaaacacgca

SEQ ID NO: 1677385 - DNA, 25 bp, Homo sapien
cttcttcagaatcttcagccacagg

SEQ ID NO: 1677386 - DNA, 25 bp, Homo sapien
gtgttggagaagctgttccaggtct

SEQ ID NO: 1677387 - DNA, 25 bp, Homo sapien
cacactgacttccttcacattctct

SEQ ID NO: 1677388 - DNA, 25 bp, Homo sapien
tgtccactgatttctcccactgtca

SEQ ID NO: 1677389 - DNA, 25 bp, Homo sapien
tgaggaggacgattgtgaacttcat

SEQ ID NO: 1677390 - DNA, 25 bp, Homo sapien
cctcatgaggaggacgattgtgaac

SEQ ID NO: 1677391 - DNA, 25 bp, Homo sapien
tagcctcatgaggaggacgattgtg

SEQ ID NO: 1677392 - DNA, 25 bp, Homo sapien
cataggtagcctcatgaggaggacg

SEQ ID NO: 1677393 - DNA, 25 bp, Homo sapien
caacatcgcgggtctggcaaaatct

SEQ ID NO: 1677394 - DNA, 25 bp, Homo sapien
acaacatcgcgggtctggcaaaatc

SEQ ID NO: 1677395 - DNA, 25 bp, Homo sapien
cccttttcacaacatcgcgggtctg

SEQ ID NO: 1677396 - DNA, 25 bp, Homo sapien
ttttcacaacatcgcgggtctggca

SEQ ID NO: 1677397 - DNA, 25 bp, Homo sapien
tgagctcagtctcaaagttgtctca

SEQ ID NO: 1677398 - DNA, 25 bp, Homo sapien
agtctgattggttattctgagtgca

SEQ ID NO: 1677399 - DNA, 25 bp, Homo sapien
tgcctgtcatgcaaatgcagtctga

SEQ ID NO: 1677400 - DNA, 25 bp, Homo sapien
ggatggcactcccagaacaagtaat

SEQ ID NO: 1677401 - DNA, 25 bp, Homo sapien
ggccagttctctctgcacagagtag

SEQ ID NO: 1677402 - DNA, 25 bp, Homo sapien
tggccagttctctctgcacagagta

SEQ ID NO: 1677403 - DNA, 25 bp, Homo sapien
agttctctctgcacagagtagcaaa

SEQ ID NO: 1677404 - DNA, 25 bp, Homo sapien
ccagttctctctgcacagagtagca

SEQ ID NO: 1677405 - DNA, 25 bp, Homo sapien
gaaatgccaacactgttccccctac

SEQ ID NO: 1677406 - DNA, 25 bp, Homo sapien
aatgccaacactgttccccctacca

SEQ ID NO: 1677407 - DNA, 25 bp, Homo sapien
ctgaaatgccaacactgttccccct

SEQ ID NO: 1677408 - DNA, 25 bp, Homo sapien
tgccaacactgttccccctaccaca

SEQ ID NO: 1677409 - DNA, 25 bp, Homo sapien
gctgttgtagtttagttccttctgg

SEQ ID NO: 1677410 - DNA, 25 bp, Homo sapien
cagcagcaagccactctgacggcat

SEQ ID NO: 1677411 - DNA, 25 bp, Homo sapien
gcagcaagccactctgacggcattt

SEQ ID NO: 1677412 - DNA, 25 bp, Homo sapien
agcaagccactctgacggcattttt

SEQ ID NO: 1677413 - DNA, 25 bp, Homo sapien
catgctgagcattgcagagtctggc

SEQ ID NO: 1677414 - DNA, 25 bp, Homo sapien
gtgatcttagggtaaagggcaagtc

SEQ ID NO: 1677415 - DNA, 25 bp, Homo sapien
atcttagggtaaagggcaagtcgag

SEQ ID NO: 1677416 - DNA, 25 bp, Homo sapien
agtctggcagtatccgcaggcacct

SEQ ID NO: 1677417 - DNA, 25 bp, Homo sapien
accctgtttagatgtccctgaagca

SEQ ID NO: 1677418 - DNA, 25 bp, Homo sapien
ccctgtttagatgtccctgaagcac

SEQ ID NO: 1677419 - DNA, 25 bp, Homo sapien
ttgagaagtctattttagcatccac

SEQ ID NO: 1677420 - DNA, 25 bp, Homo sapien
gaaccaactcttgagaagtctattt

SEQ ID NO: 1677421 - DNA, 25 bp, Homo sapien
tggcaagagctctttcaattagcag

SEQ ID NO: 1677422 - DNA, 25 bp, Homo sapien
tacctttgctactttcgtcagacca

SEQ ID NO: 1677423 - DNA, 25 bp, Homo sapien
cactttggcctgcatagttcatcag

SEQ ID NO: 1677424 - DNA, 25 bp, Homo sapien
tctggttggacaagtctcagtggga

SEQ ID NO: 1677425 - DNA, 25 bp, Homo sapien
aacgtgcattactctttcaaggctg

SEQ ID NO: 1677426 - DNA, 25 bp, Homo sapien
tctgttcttcactaacccaatctgg

SEQ ID NO: 1677427 - DNA, 25 bp, Homo sapien
ccagacatgaaatttagtctcttcc

SEQ ID NO: 1677428 - DNA, 25 bp, Homo sapien
cctactttcatcagagttggcagga

SEQ ID NO: 1677429 - DNA, 25 bp, Homo sapien
catgaaatttagtctcttccctact

SEQ ID NO: 1677430 - DNA, 25 bp, Homo sapien
tcttccctactttcatcagagttgg

SEQ ID NO: 1677431 - DNA, 25 bp, Homo sapien
ctgatggtgcactgatcacaagggt

SEQ ID NO: 1677432 - DNA, 25 bp, Homo sapien
tgcactgatcacaagggttactggg

SEQ ID NO: 1677433 - DNA, 25 bp, Homo sapien
gatggtgcactgatcacaagggtta

SEQ ID NO: 1677434 - DNA, 25 bp, Homo sapien
ggtgcactgatcacaagggttactg

SEQ ID NO: 1677435 - DNA, 25 bp, Homo sapien
tatttgtaaagtctagccgatacac

SEQ ID NO: 1677436 - DNA, 25 bp, Homo sapien
ttatttgtaaagtctagccgataca

SEQ ID NO: 1677437 - DNA, 25 bp, Homo sapien
ggagaaatcagatgtagccacagag

SEQ ID NO: 1677438 - DNA, 25 bp, Homo sapien
gaaatcagatgtagccacagagcct

SEQ ID NO: 1677439 - DNA, 25 bp, Homo sapien
gctggagaaatcagatgtagccaca

SEQ ID NO: 1677440 - DNA, 25 bp, Homo sapien
aaatcagatgtagccacagagcctg

SEQ ID NO: 1677441 - DNA, 25 bp, Homo sapien
agtcctcacatcctgaatcctccat

SEQ ID NO: 1677442 - DNA, 25 bp, Homo sapien
taaggcagtccaattgcagacccaa

SEQ ID NO: 1677443 - DNA, 25 bp, Homo sapien
gcagacccaatccaccagggatggc

SEQ ID NO: 1677444 - DNA, 25 bp, Homo sapien
ttctttgtaaggcagtccaattgca

SEQ ID NO: 1677445 - DNA, 25 bp, Homo sapien
catgtggacccttagtgaacagctt

SEQ ID NO: 1677446 - DNA, 25 bp, Homo sapien
ctttctgatttactaggattgtttt

SEQ ID NO: 1677447 - DNA, 25 bp, Homo sapien
tctgatttactaggattgttttcca

SEQ ID NO: 1677448 - DNA, 25 bp, Homo sapien
tcttgtgtctatagagtcatgttct

SEQ ID NO: 1677449 - DNA, 25 bp, Homo sapien
acagccgggactgcgtccctgagca

SEQ ID NO: 1677450 - DNA, 25 bp, Homo sapien
ccgatcatctggcagcgttccttgc

SEQ ID NO: 1677451 - DNA, 25 bp, Homo sapien
aggctccactcagatccctcctgct

SEQ ID NO: 1677452 - DNA, 25 bp, Homo sapien
ttgcggtcctgaccacccgagtctg

SEQ ID NO: 1677453 - DNA, 25 bp, Homo sapien
tctgttagcctctttataaccttta

SEQ ID NO: 1677454 - DNA, 25 bp, Homo sapien
tgaattctgttagcctctttataac

SEQ ID NO: 1677455 - DNA, 25 bp, Homo sapien
tttgaattctgttagcctctttata

SEQ ID NO: 1677456 - DNA, 25 bp, Homo sapien
aattctgttagcctctttataacct

SEQ ID NO: 1677457 - DNA, 25 bp, Homo sapien
ttctgtcttgttcccgaggactcat

SEQ ID NO: 1677458 - DNA, 25 bp, Homo sapien
tcattaagccacatatgcaaaccag

SEQ ID NO: 1677459 - DNA, 25 bp, Homo sapien
cacatatgcaaaccagatctaaggg

SEQ ID NO: 1677460 - DNA, 25 bp, Homo sapien
tgttcccgaggactcattaagccac

SEQ ID NO: 1677461 - DNA, 25 bp, Homo sapien
cagggtcactttccatttggctcgc

SEQ ID NO: 1677462 - DNA, 25 bp, Homo sapien
gggtcactttccatttggctcgcag

SEQ ID NO: 1677463 - DNA, 25 bp, Homo sapien
cactttccatttggctcgcagcctg

SEQ ID NO: 1677464 - DNA, 25 bp, Homo sapien
ttccatttggctcgcagcctgcttt

SEQ ID NO: 1677465 - DNA, 25 bp, Homo sapien
ctttcagttcttcaggttttctgtc

SEQ ID NO: 1677466 - DNA, 25 bp, Homo sapien
ttcttcaggttttctgtccatttca

SEQ ID NO: 1677467 - DNA, 25 bp, Homo sapien
cagttcttcaggttttctgtccatt

SEQ ID NO: 1677468 - DNA, 25 bp, Homo sapien
ttcagttcttcaggttttctgtcca

SEQ ID NO: 1677469 - DNA, 25 bp, Homo sapien
cttaattattcgtcttgtggatccc

SEQ ID NO: 1677470 - DNA, 25 bp, Homo sapien
tgttgatcagaggtcccccttaatt

SEQ ID NO: 1677471 - DNA, 25 bp, Homo sapien
ccccttaattattcgtcttgtggat

SEQ ID NO: 1677472 - DNA, 25 bp, Homo sapien
attattcgtcttgtggatcccttca

SEQ ID NO: 1677473 - DNA, 25 bp, Homo sapien
tctgctcaacatcagcccattggag

SEQ ID NO: 1677474 - DNA, 25 bp, Homo sapien
taagtatgacagttctggcagccgc

SEQ ID NO: 1677475 - DNA, 25 bp, Homo sapien
tctgtgtacctttccagtctggctc

SEQ ID NO: 1677476 - DNA, 25 bp, Homo sapien
tgaattcagaattaaccgggaaagc

SEQ ID NO: 1677477 - DNA, 25 bp, Homo sapien
caggaactggtttaatgtaattaca

SEQ ID NO: 1677478 - DNA, 25 bp, Homo sapien
taccccagagtcagagaagtaactg

SEQ ID NO: 1677479 - DNA, 25 bp, Homo sapien
tgttgtgggctataccaaaacccca

SEQ ID NO: 1677480 - DNA, 25 bp, Homo sapien
ttagatgaaggcacatcacagtccc

SEQ ID NO: 1677481 - DNA, 25 bp, Homo sapien
gacacttgaggaaagctctgacatg

SEQ ID NO: 1677482 - DNA, 25 bp, Homo sapien
catgatgccagagactgttacagca

SEQ ID NO: 1677483 - DNA, 25 bp, Homo sapien
gggaagcagagtaggcagatcactt

SEQ ID NO: 1677484 - DNA, 25 bp, Homo sapien
ccaacatggtaatacaatggccagg

SEQ ID NO: 1677485 - DNA, 25 bp, Homo sapien
gcattgtatccagagggtgtcctct

SEQ ID NO: 1677486 - DNA, 25 bp, Homo sapien
ggtctcctctaccaatacagctggg

SEQ ID NO: 1677487 - DNA, 25 bp, Homo sapien
cacatcaagtctggcattgtatcca

SEQ ID NO: 1677488 - DNA, 25 bp, Homo sapien
ggtccataggttggtcagtcccaca

SEQ ID NO: 1677489 - DNA, 25 bp, Homo sapien
tcatccttgtagatcgtctctgttc

SEQ ID NO: 1677490 - DNA, 25 bp, Homo sapien
catccttgtagatcgtctctgttct

SEQ ID NO: 1677491 - DNA, 25 bp, Homo sapien
tctcatccttgtagatcgtctctgt

SEQ ID NO: 1677492 - DNA, 25 bp, Homo sapien
gatctcatccttgtagatcgtctct

SEQ ID NO: 1677493 - DNA, 25 bp, Homo sapien
gaacagttctctctccacggctgtg

SEQ ID NO: 1677494 - DNA, 25 bp, Homo sapien
gtgaacagttctctctccacggctg

SEQ ID NO: 1677495 - DNA, 25 bp, Homo sapien
cagtgaacagttctctctccacggc

SEQ ID NO: 1677496 - DNA, 25 bp, Homo sapien
tgaacagttctctctccacggctgt

SEQ ID NO: 1677497 - DNA, 25 bp, Homo sapien
cagagtaggggcgacagaagcccac

SEQ ID NO: 1677498 - DNA, 25 bp, Homo sapien
taacccacacatctcctcatcacag

SEQ ID NO: 1677499 - DNA, 25 bp, Homo sapien
gcaaaggtggggctaacccacacat

SEQ ID NO: 1677500 - DNA, 25 bp, Homo sapien
caatgaatggaagcacagtagcaga

SEQ ID NO: 1677501 - DNA, 25 bp, Homo sapien
gagcaagagtcacatgtcgtctgaa

SEQ ID NO: 1677502 - DNA, 25 bp, Homo sapien
gagtcacatgtcgtctgaagcacac

SEQ ID NO: 1677503 - DNA, 25 bp, Homo sapien
tcacagagcaagagtcacatgtcgt

SEQ ID NO: 1677504 - DNA, 25 bp, Homo sapien
acatgtcgtctgaagcacacccaga

SEQ ID NO: 1677505 - DNA, 25 bp, Homo sapien
caggacctgagacattgacacatga

SEQ ID NO: 1677506 - DNA, 25 bp, Homo sapien
atagatcgacccaggtccctagcac

SEQ ID NO: 1677507 - DNA, 25 bp, Homo sapien
gaagcacattcctggggatgaacac

SEQ ID NO: 1677508 - DNA, 25 bp, Homo sapien
gtccttgggagacatagatcgaccc

SEQ ID NO: 1677509 - DNA, 25 bp, Homo sapien
cattgaccgaactcttgggtcagag

SEQ ID NO: 1677510 - DNA, 25 bp, Homo sapien
tggctgccaacatatgcattgaccg

SEQ ID NO: 1677511 - DNA, 25 bp, Homo sapien
tatttgaagttcatatttggtgcga

SEQ ID NO: 1677512 - DNA, 25 bp, Homo sapien
tatttggtgcgatgtgcagctggct

SEQ ID NO: 1677513 - DNA, 25 bp, Homo sapien
aaaatgacagatagaaactcagaga

SEQ ID NO: 1677514 - DNA, 25 bp, Homo sapien
gaatccctagaacactaacacttgg

SEQ ID NO: 1677515 - DNA, 25 bp, Homo sapien
cagaggttcagactttcacaactta

SEQ ID NO: 1677516 - DNA, 25 bp, Homo sapien
gtaaaatgacagatagaaaggaaaa

SEQ ID NO: 1677517 - DNA, 25 bp, Homo sapien
tactagccacttcttgcggaaggca

SEQ ID NO: 1677518 - DNA, 25 bp, Homo sapien
gaaggaattctgctcccagttcaga

SEQ ID NO: 1677519 - DNA, 25 bp, Homo sapien
taaaaacatgatccgaaggtcaccc

SEQ ID NO: 1677520 - DNA, 25 bp, Homo sapien
ggttgtagcctgatatgcctaggac

SEQ ID NO: 1677521 - DNA, 25 bp, Homo sapien
gtatttggcatacaattcctgttca

SEQ ID NO: 1677522 - DNA, 25 bp, Homo sapien
tatttggcatacaattcctgttcag

SEQ ID NO: 1677523 - DNA, 25 bp, Homo sapien
atttggcatacaattcctgttcagt

SEQ ID NO: 1677524 - DNA, 25 bp, Homo sapien
agtatttggcatacaattcctgttc

SEQ ID NO: 1677525 - DNA, 25 bp, Homo sapien
ctgtgacaacttagaatttcctcca

SEQ ID NO: 1677526 - DNA, 25 bp, Homo sapien
tgtgacaacttagaatttcctccat

SEQ ID NO: 1677527 - DNA, 25 bp, Homo sapien
ttctgtgacaacttagaatttcctc

SEQ ID NO: 1677528 - DNA, 25 bp, Homo sapien
tctgtgacaacttagaatttcctcc

SEQ ID NO: 1677529 - DNA, 25 bp, Homo sapien
ccttgtccttgttctcggattgtta

SEQ ID NO: 1677530 - DNA, 25 bp, Homo sapien
catggtgatattgctgtcgatttgg

SEQ ID NO: 1677531 - DNA, 25 bp, Homo sapien
cacaatgtttaggacttccttgtcc

SEQ ID NO: 1677532 - DNA, 25 bp, Homo sapien
gttaacttgtcatattctgcctctg

SEQ ID NO: 1677533 - DNA, 25 bp, Homo sapien
gaggtgaaactgctggtaagtagca

SEQ ID NO: 1677534 - DNA, 25 bp, Homo sapien
tggacattgaaaagtgtcagcttct

SEQ ID NO: 1677535 - DNA, 25 bp, Homo sapien
gtaagtagcattgggactctcttgg

SEQ ID NO: 1677536 - DNA, 25 bp, Homo sapien
tttctccttaatttgaatgaggtga

SEQ ID NO: 1677537 - DNA, 25 bp, Homo sapien
gatatctcactcatgagcctggtga

SEQ ID NO: 1677538 - DNA, 25 bp, Homo sapien
tcaattaagggagtaagatagatct

SEQ ID NO: 1677539 - DNA, 25 bp, Homo sapien
agtttgtgtgccttccgatatctca

SEQ ID NO: 1677540 - DNA, 25 bp, Homo sapien
tacatggctactacagatgtcagga

SEQ ID NO: 1677541 - DNA, 25 bp, Homo sapien
taggctgtaggagttcattacttgg

SEQ ID NO: 1677542 - DNA, 25 bp, Homo sapien
tcagctcagatgtcgctttagtgac

SEQ ID NO: 1677543 - DNA, 25 bp, Homo sapien
gtcgctttagtgacattgaaggatt

SEQ ID NO: 1677544 - DNA, 25 bp, Homo sapien
tttgaaccctcaattgatacctttg

SEQ ID NO: 1677545 - DNA, 25 bp, Homo sapien
tgagctcagtccagagttccaggag

SEQ ID NO: 1677546 - DNA, 25 bp, Homo sapien
aacatgaacgtaaaatctcctggtg

SEQ ID NO: 1677547 - DNA, 25 bp, Homo sapien
ggagcatctcattctgcaccgaaga

SEQ ID NO: 1677548 - DNA, 25 bp, Homo sapien
gtcaacttggctacccctgctgctt

SEQ ID NO: 1677549 - DNA, 25 bp, Homo sapien
cttatcaaaggccaatagcccctcc

SEQ ID NO: 1677550 - DNA, 25 bp, Homo sapien
tcttatcaaaggccaatagcccctc

SEQ ID NO: 1677551 - DNA, 25 bp, Homo sapien
gggaccgtggagcatctcattattc

SEQ ID NO: 1677552 - DNA, 25 bp, Homo sapien
gatttgtggaaaagcgtggccagcc

SEQ ID NO: 1677553 - DNA, 25 bp, Homo sapien
ctcagagacttcactcactagagtc

SEQ ID NO: 1677554 - DNA, 25 bp, Homo sapien
gctttttagcaacccttcttctgag

SEQ ID NO: 1677555 - DNA, 25 bp, Homo sapien
tccagagatcgactgtaaaaacttc

SEQ ID NO: 1677556 - DNA, 25 bp, Homo sapien
agccgtccttgtggttgggttcttg

SEQ ID NO: 1677557 - DNA, 25 bp, Homo sapien
tctctcataggacaagccatggctg

SEQ ID NO: 1677558 - DNA, 25 bp, Homo sapien
agcaggacttcgctggctgatccag

SEQ ID NO: 1677559 - DNA, 25 bp, Homo sapien
tatctgggaatttgtttttcataca

SEQ ID NO: 1677560 - DNA, 25 bp, Homo sapien
tgaaattttttgtaagcagttacac

SEQ ID NO: 1677561 - DNA, 25 bp, Homo sapien
gttacacgattcaaagctgctggca

SEQ ID NO: 1677562 - DNA, 25 bp, Homo sapien
ctggaccatgtgaaattttttgtaa

SEQ ID NO: 1677563 - DNA, 25 bp, Homo sapien
tatccctggccctgaagaagaacaa

SEQ ID NO: 1677564 - DNA, 25 bp, Homo sapien
actggtggtaaactgactcaaactc

SEQ ID NO: 1677565 - DNA, 25 bp, Homo sapien
tctgacctaaaacactggaaactgg

SEQ ID NO: 1677566 - DNA, 25 bp, Homo sapien
caaactcaagtttccacaaagctca

SEQ ID NO: 1677567 - DNA, 25 bp, Homo sapien
gacagtgagaatacccagattcctg

SEQ ID NO: 1677568 - DNA, 25 bp, Homo sapien
tgagaatacccagattcctgcttct

SEQ ID NO: 1677569 - DNA, 25 bp, Homo sapien
ctagacatatggaatattgacagtg

SEQ ID NO: 1677570 - DNA, 25 bp, Homo sapien
tggaatattgacagtgagaataccc

SEQ ID NO: 1677571 - DNA, 25 bp, Homo sapien
gtcttccaaataatctgccttcctt

SEQ ID NO: 1677572 - DNA, 25 bp, Homo sapien
ctctggtcttgttttaggtttccag

SEQ ID NO: 1677573 - DNA, 25 bp, Homo sapien
taatctgccttccttggtattctct

SEQ ID NO: 1677574 - DNA, 25 bp, Homo sapien
tggtattctctggtcttgttttagg

SEQ ID NO: 1677575 - DNA, 25 bp, Homo sapien
tcgtcctccgattcacaggaaataa

SEQ ID NO: 1677576 - DNA, 25 bp, Homo sapien
tcatttggtttctcatcgtcctccg

SEQ ID NO: 1677577 - DNA, 25 bp, Homo sapien
gtcctccgattcacaggaaataaaa

SEQ ID NO: 1677578 - DNA, 25 bp, Homo sapien
tcatcgtcctccgattcacaggaaa

SEQ ID NO: 1677579 - DNA, 25 bp, Homo sapien
gtaccacagccgatcattcaaaatg

SEQ ID NO: 1677580 - DNA, 25 bp, Homo sapien
ttgcaataggccacccactgcgatg

SEQ ID NO: 1677581 - DNA, 25 bp, Homo sapien
gcaggagggtcacaaaaatctttat

SEQ ID NO: 1677582 - DNA, 25 bp, Homo sapien
tttgttcactagagaaactcagggt

SEQ ID NO: 1677583 - DNA, 25 bp, Homo sapien
tatatagttacgagttgccagttgt

SEQ ID NO: 1677584 - DNA, 25 bp, Homo sapien
tctcattgtgccctccacataatct

SEQ ID NO: 1677585 - DNA, 25 bp, Homo sapien
tcttagcactttgaaggtgttatta

SEQ ID NO: 1677586 - DNA, 25 bp, Homo sapien
gggtaacttggatttatcttgatgt

SEQ ID NO: 1677587 - DNA, 25 bp, Homo sapien
gggcgatgtgctgcctaagctctcc

SEQ ID NO: 1677588 - DNA, 25 bp, Homo sapien
gcgatgtgctgcctaagctctccag

SEQ ID NO: 1677589 - DNA, 25 bp, Homo sapien
agggtgggggcgatgtgctgcctaa

SEQ ID NO: 1677590 - DNA, 25 bp, Homo sapien
tgggggcgatgtgctgcctaagctc

SEQ ID NO: 1677591 - DNA, 25 bp, Homo sapien
ttggctgtaggagccactctttcct

SEQ ID NO: 1677592 - DNA, 25 bp, Homo sapien
gccactctttcctgtcaaaaaggcc

SEQ ID NO: 1677593 - DNA, 25 bp, Homo sapien
cactctttcctgtcaaaaaggcctt

SEQ ID NO: 1677594 - DNA, 25 bp, Homo sapien
ggagccactctttcctgtcaaaaag

SEQ ID NO: 1677595 - DNA, 25 bp, Homo sapien
ctactgcgccctcttgtgtcagcca

SEQ ID NO: 1677596 - DNA, 25 bp, Homo sapien
gtgaaccacgattgactgtagcctc

SEQ ID NO: 1677597 - DNA, 25 bp, Homo sapien
ctgagtgaaccacgattgactgtag

SEQ ID NO: 1677598 - DNA, 25 bp, Homo sapien
cacgattgactgtagcctcaagcgc

SEQ ID NO: 1677599 - DNA, 25 bp, Homo sapien
gaaccacgattgactgtagcctcaa

SEQ ID NO: 1677600 - DNA, 25 bp, Homo sapien
aaggacccgctcgaatgtggcctga

SEQ ID NO: 1677601 - DNA, 25 bp, Homo sapien
cagcgtaagaaatcaggtgcagagc

SEQ ID NO: 1677602 - DNA, 25 bp, Homo sapien
tcttgtcgggcagaggattcccagc

SEQ ID NO: 1677603 - DNA, 25 bp, Homo sapien
tcatcaacaatgagcgtcctccggg

SEQ ID NO: 1677604 - DNA, 25 bp, Homo sapien
ggtgatatagtccacagcttttggt

SEQ ID NO: 1677605 - DNA, 25 bp, Homo sapien
tgggagggtgatatagtccacagct

SEQ ID NO: 1677606 - DNA, 25 bp, Homo sapien
ttggttggtggagtgactatcttca

SEQ ID NO: 1677607 - DNA, 25 bp, Homo sapien
cagcttttggttggtggagtgacta

SEQ ID NO: 1677608 - DNA, 25 bp, Homo sapien
ggagggtctccactaccaatggcaa

SEQ ID NO: 1677609 - DNA, 25 bp, Homo sapien
catcatccaggtgtagtgtccagag

SEQ ID NO: 1677610 - DNA, 25 bp, Homo sapien
gcttcttccagtagacagcatgcaa

SEQ ID NO: 1677611 - DNA, 25 bp, Homo sapien
tcaagcatgtaatgcaaatccccac

SEQ ID NO: 1677612 - DNA, 25 bp, Homo sapien
taccgctgttttgcagagaaagaca

SEQ ID NO: 1677613 - DNA, 25 bp, Homo sapien
tactattgtaggagcttggtacaca

SEQ ID NO: 1677614 - DNA, 25 bp, Homo sapien
aagattaggtagacctgtcggcaga

SEQ ID NO: 1677615 - DNA, 25 bp, Homo sapien
tgaagtaggatcattcttaccgctg

SEQ ID NO: 1677616 - DNA, 25 bp, Homo sapien
aaagtactcagcaccattgtcgcat

SEQ ID NO: 1677617 - DNA, 25 bp, Homo sapien
tcatttgccttggagctagctcatc

SEQ ID NO: 1677618 - DNA, 25 bp, Homo sapien
gacactgctaccaggactgttgtga

SEQ ID NO: 1677619 - DNA, 25 bp, Homo sapien
tgaaatattttgctgtgacactgct

SEQ ID NO: 1677620 - DNA, 25 bp, Homo sapien
gctactaggctatgtggtggagact

SEQ ID NO: 1677621 - DNA, 25 bp, Homo sapien
ccacagctgcttgcgaatggcaggc

SEQ ID NO: 1677622 - DNA, 25 bp, Homo sapien
catgaataattcaggaacgagcact

SEQ ID NO: 1677623 - DNA, 25 bp, Homo sapien
gaccaggaactagatggactgttac

SEQ ID NO: 1677624 - DNA, 25 bp, Homo sapien
ggtgcagaggcagtttacaaacaag

SEQ ID NO: 1677625 - DNA, 25 bp, Homo sapien
gatgacccatccagcagcaataagg

SEQ ID NO: 1677626 - DNA, 25 bp, Homo sapien
tagctggtcaaacgcgagactctgc

SEQ ID NO: 1677627 - DNA, 25 bp, Homo sapien
cggtcttggacgcagtagctggtca

SEQ ID NO: 1677628 - DNA, 25 bp, Homo sapien
cttcctcagctacgtgcagtcgcgg

SEQ ID NO: 1677629 - DNA, 25 bp, Homo sapien
aaatcatcaacctgcgggacctcta

SEQ ID NO: 1677630 - DNA, 25 bp, Homo sapien
tcttcatctgcgcaaacgcggtcct

SEQ ID NO: 1677631 - DNA, 25 bp, Homo sapien
tgacaagctcaaggtcttcgggccc

SEQ ID NO: 1677632 - DNA, 25 bp, Homo sapien
gtccgtgggcttcttcttccgcatc

SEQ ID NO: 1677633 - DNA, 25 bp, Homo sapien
gtgggcttcttcttccgcatcttct

SEQ ID NO: 1677634 - DNA, 25 bp, Homo sapien
gcttcttcttccgcatcttctctgg

SEQ ID NO: 1677635 - DNA, 25 bp, Homo sapien
tccgtgggcttcttcttccgcatct

SEQ ID NO: 1677636 - DNA, 25 bp, Homo sapien
tggcagcaaaaaccggtccaggagc

SEQ ID NO: 1677637 - DNA, 25 bp, Homo sapien
ggctcatcgccctctgtgggatcct

SEQ ID NO: 1677638 - DNA, 25 bp, Homo sapien
tggtgggctactggcccaaggccac

SEQ ID NO: 1677639 - DNA, 25 bp, Homo sapien
accacggccaacagcagtagcagtg

SEQ ID NO: 1677640 - DNA, 25 bp, Homo sapien
gaacaggcataggtgggagacaact

SEQ ID NO: 1677641 - DNA, 25 bp, Homo sapien
gaagctgtccagatgttgctgagag

SEQ ID NO: 1677642 - DNA, 25 bp, Homo sapien
tatctgaagtaaataaaccgcctgc

SEQ ID NO: 1677643 - DNA, 25 bp, Homo sapien
tctgacacatgatacctttaaggga

SEQ ID NO: 1677644 - DNA, 25 bp, Homo sapien
ttggaaatggctcccgccacagcgc

SEQ ID NO: 1677645 - DNA, 25 bp, Homo sapien
gggctgctgagtcgcgctcggatgc

SEQ ID NO: 1677646 - DNA, 25 bp, Homo sapien
tcttggaaactcttggaaatggctc

SEQ ID NO: 1677647 - DNA, 25 bp, Homo sapien
ggactgcgagcctggggcgggcgct

SEQ ID NO: 1677648 - DNA, 25 bp, Homo sapien
tacagttccatgtggatcccagaaa

SEQ ID NO: 1677649 - DNA, 25 bp, Homo sapien
ggcattggacctatgtcatctgggt

SEQ ID NO: 1677650 - DNA, 25 bp, Homo sapien
caagctttctggagtggcattggac

SEQ ID NO: 1677651 - DNA, 25 bp, Homo sapien
tgtcataccaaggtttgaaggtcct

SEQ ID NO: 1677652 - DNA, 25 bp, Homo sapien
taaatttttcagtaatcaagccctg

SEQ ID NO: 1677653 - DNA, 25 bp, Homo sapien
tgtaaatttttcagtaatcaagccc

SEQ ID NO: 1677654 - DNA, 25 bp, Homo sapien
aatttttcagtaatcaagccctgat

SEQ ID NO: 1677655 - DNA, 25 bp, Homo sapien
tttttcagtaatcaagccctgatcc

SEQ ID NO: 1677656 - DNA, 25 bp, Homo sapien
cttccgctgcgataggctgcagggc

SEQ ID NO: 1677657 - DNA, 25 bp, Homo sapien
tttactgcttacaaaacgaagctgc

SEQ ID NO: 1677658 - DNA, 25 bp, Homo sapien
gctgcagggcaattcctttactgct

SEQ ID NO: 1677659 - DNA, 25 bp, Homo sapien
tgcttacaaaacgaagctgcagaaa

SEQ ID NO: 1677660 - DNA, 25 bp, Homo sapien
ctgagccactgcctcacgtttttag

SEQ ID NO: 1677661 - DNA, 25 bp, Homo sapien
cgtttttagactccgcagcttcgct

SEQ ID NO: 1677662 - DNA, 25 bp, Homo sapien
tatcctttctctacgctgagccact

SEQ ID NO: 1677663 - DNA, 25 bp, Homo sapien
agttgtgcccattagatgttttgga

SEQ ID NO: 1677664 - DNA, 25 bp, Homo sapien
acattgcagagtcagagaatcccca

SEQ ID NO: 1677665 - DNA, 25 bp, Homo sapien
ttaaccagcatttacttggggcatg

SEQ ID NO: 1677666 - DNA, 25 bp, Homo sapien
gacattgcagagtcagagaatcccc

SEQ ID NO: 1677667 - DNA, 25 bp, Homo sapien
ccagcatttacttggggcatgactg

SEQ ID NO: 1677668 - DNA, 25 bp, Homo sapien
caggtccctcttgagaacgactgct

SEQ ID NO: 1677669 - DNA, 25 bp, Homo sapien
taaaatacagcagtaggtgtggcaa

SEQ ID NO: 1677670 - DNA, 25 bp, Homo sapien
acggacagcgggaagcagtatccac

SEQ ID NO: 1677671 - DNA, 25 bp, Homo sapien
tgccttttgatagcaccaggtccct

SEQ ID NO: 1677672 - DNA, 25 bp, Homo sapien
tccaaatccttttgcatcggatact

SEQ ID NO: 1677673 - DNA, 25 bp, Homo sapien
aatccttttgcatcggatactccat

SEQ ID NO: 1677674 - DNA, 25 bp, Homo sapien
caaatccttttgcatcggatactcc

SEQ ID NO: 1677675 - DNA, 25 bp, Homo sapien
aaatccttttgcatcggatactcca

SEQ ID NO: 1677676 - DNA, 25 bp, Homo sapien
tccttgttttgccaaactctcaaga

SEQ ID NO: 1677677 - DNA, 25 bp, Homo sapien
atgagggtgggtctcccatgagatc

SEQ ID NO: 1677678 - DNA, 25 bp, Homo sapien
tgagggtgggtctcccatgagatcc

SEQ ID NO: 1677679 - DNA, 25 bp, Homo sapien
atgagatccttgttttgccaaactc

SEQ ID NO: 1677680 - DNA, 25 bp, Homo sapien
cactagctttgttcttaggcttgca

SEQ ID NO: 1677681 - DNA, 25 bp, Homo sapien
tctgcttcactagctttgttcttag

SEQ ID NO: 1677682 - DNA, 25 bp, Homo sapien
taggcttgcatgatgcagactcagg

SEQ ID NO: 1677683 - DNA, 25 bp, Homo sapien
tgttcttaggcttgcatgatgcaga

SEQ ID NO: 1677684 - DNA, 25 bp, Homo sapien
ctgagcacactgacatctgcccgtg

SEQ ID NO: 1677685 - DNA, 25 bp, Homo sapien
aaaccatcagttatacttctagtgc

SEQ ID NO: 1677686 - DNA, 25 bp, Homo sapien
aaagttgcggactgccaaccacagc

SEQ ID NO: 1677687 - DNA, 25 bp, Homo sapien
cacagctggtactgtccagggcctg

SEQ ID NO: 1677688 - DNA, 25 bp, Homo sapien
cctggctctgtgtcaactcataggg

SEQ ID NO: 1677689 - DNA, 25 bp, Homo sapien
tcccggcctttgtccgtgtctgctg

SEQ ID NO: 1677690 - DNA, 25 bp, Homo sapien
gcctttgtccgtgtctgctggcctc

SEQ ID NO: 1677691 - DNA, 25 bp, Homo sapien
tgtcaactcatagggccatctcagt

SEQ ID NO: 1677692 - DNA, 25 bp, Homo sapien
ctgaaagcaaaagcccatgatggtt

SEQ ID NO: 1677693 - DNA, 25 bp, Homo sapien
agcccatgatggttttcagccacag

SEQ ID NO: 1677694 - DNA, 25 bp, Homo sapien
ccacaggatctcagcaaggctttct

SEQ ID NO: 1677695 - DNA, 25 bp, Homo sapien
aaaagcccatgatggttttcagcca

SEQ ID NO: 1677696 - DNA, 25 bp, Homo sapien
tctgggcctgcatcggttggcaatg

SEQ ID NO: 1677697 - DNA, 25 bp, Homo sapien
ttctctgggcctgcatcggttggca

SEQ ID NO: 1677698 - DNA, 25 bp, Homo sapien
cttcccagaacagcactcctccttg

SEQ ID NO: 1677699 - DNA, 25 bp, Homo sapien
cctgcatcggttggcaatgggcagt

SEQ ID NO: 1677700 - DNA, 25 bp, Homo sapien
aagtctgtctttaaggagctgaaca

SEQ ID NO: 1677701 - DNA, 25 bp, Homo sapien
agccaagggccccgaagtctgtctt

SEQ ID NO: 1677702 - DNA, 25 bp, Homo sapien
tgagggcctgaagtcgcaagtctag

SEQ ID NO: 1677703 - DNA, 25 bp, Homo sapien
taatcatgggcccaagaagcaggtg

SEQ ID NO: 1677704 - DNA, 25 bp, Homo sapien
caggagcgtggccacattggcgact

SEQ ID NO: 1677705 - DNA, 25 bp, Homo sapien
gagcgtggccacattggcgactcct

SEQ ID NO: 1677706 - DNA, 25 bp, Homo sapien
aggagcgtggccacattggcgactc

SEQ ID NO: 1677707 - DNA, 25 bp, Homo sapien
gcgtggccacattggcgactccttc

SEQ ID NO: 1677708 - DNA, 25 bp, Homo sapien
tcttttgactcaggacagctactga

SEQ ID NO: 1677709 - DNA, 25 bp, Homo sapien
ggtcttttgactcaggacagctact

SEQ ID NO: 1677710 - DNA, 25 bp, Homo sapien
tttgactcaggacagctactgagcc

SEQ ID NO: 1677711 - DNA, 25 bp, Homo sapien
ttggtcttttgactcaggacagcta

SEQ ID NO: 1677712 - DNA, 25 bp, Homo sapien
gagcctgccactcataacttggaga

SEQ ID NO: 1677713 - DNA, 25 bp, Homo sapien
actcatcttgcttatcgtctcaggg

SEQ ID NO: 1677714 - DNA, 25 bp, Homo sapien
tgcccatgcccaggtctaagtcctg

SEQ ID NO: 1677715 - DNA, 25 bp, Homo sapien
tgctccatcattgttctcagagcct

SEQ ID NO: 1677716 - DNA, 25 bp, Homo sapien
ggtaattttaaatactgccatgctt

SEQ ID NO: 1677717 - DNA, 25 bp, Homo sapien
cccggctcgggtgtgaatattattt

SEQ ID NO: 1677718 - DNA, 25 bp, Homo sapien
gaattaagcaacctgttaacctgga

SEQ ID NO: 1677719 - DNA, 25 bp, Homo sapien
gactcattaattttagctcagtggt

SEQ ID NO: 1677720 - DNA, 25 bp, Homo sapien
ttacaagcataacactctcaagtgg

SEQ ID NO: 1677721 - DNA, 25 bp, Homo sapien
tgccatggagcacagctagtctaag

SEQ ID NO: 1677722 - DNA, 25 bp, Homo sapien
tgtttttaccagagcaacatcgagc

SEQ ID NO: 1677723 - DNA, 25 bp, Homo sapien
aacatcgagcttggctcagatctgc

SEQ ID NO: 1677724 - DNA, 25 bp, Homo sapien
cacattaatttgatgtgaatgtccc

SEQ ID NO: 1677725 - DNA, 25 bp, Homo sapien
ctgcgctctttcagcaataaaagtg

SEQ ID NO: 1677726 - DNA, 25 bp, Homo sapien
ttaatttgatgtgaatgtccccatg

SEQ ID NO: 1677727 - DNA, 25 bp, Homo sapien
gcaataaaagtggagcacattaatt

SEQ ID NO: 1677728 - DNA, 25 bp, Homo sapien
gttaacatttggtgtaaagacttca

SEQ ID NO: 1677729 - DNA, 25 bp, Homo sapien
attaccacccatgccatacatcaga

SEQ ID NO: 1677730 - DNA, 25 bp, Homo sapien
catcagagccccagatcttgttcat

SEQ ID NO: 1677731 - DNA, 25 bp, Homo sapien
caggaatcattctgtgcaagttttg

SEQ ID NO: 1677732 - DNA, 25 bp, Homo sapien
cttatcaaccgtatgtggccttggg

SEQ ID NO: 1677733 - DNA, 25 bp, Homo sapien
tggccttgggtaagtactgaacctc

SEQ ID NO: 1677734 - DNA, 25 bp, Homo sapien
catcatttatgtgggaattcagctc

SEQ ID NO: 1677735 - DNA, 25 bp, Homo sapien
tagagatagcaaacccgaattccaa

SEQ ID NO: 1677736 - DNA, 25 bp, Homo sapien
aacagcatgatcaccccctttgaaa

SEQ ID NO: 1677737 - DNA, 25 bp, Homo sapien
gggcaagtggatggtcgtttcctct

SEQ ID NO: 1677738 - DNA, 25 bp, Homo sapien
agtggatggtcgtttcctcttctgc

SEQ ID NO: 1677739 - DNA, 25 bp, Homo sapien
gtgggtgcagggcaagtggatggtc

SEQ ID NO: 1677740 - DNA, 25 bp, Homo sapien
gacagagccgttctgggttcttatg

SEQ ID NO: 1677741 - DNA, 25 bp, Homo sapien
ctttgtgaagatggcgtttcaggaa

SEQ ID NO: 1677742 - DNA, 25 bp, Homo sapien
ggttcttatgcggaaagtcactttg

SEQ ID NO: 1677743 - DNA, 25 bp, Homo sapien
agcccacagtctgctggacagagcc

SEQ ID NO: 1677744 - DNA, 25 bp, Homo sapien
tgttgagtgcatccacacgtggcca

SEQ ID NO: 1677745 - DNA, 25 bp, Homo sapien
ttgcgagtacattcccacactgctg

SEQ ID NO: 1677746 - DNA, 25 bp, Homo sapien
ctgaaatatagctggctcctgttga

SEQ ID NO: 1677747 - DNA, 25 bp, Homo sapien
cactgctgggcttcgccccatggtt

SEQ ID NO: 1677748 - DNA, 25 bp, Homo sapien
gcattagcagagcttcgtctctgga

SEQ ID NO: 1677749 - DNA, 25 bp, Homo sapien
gatgctgcagcttaaatggaaaacc

SEQ ID NO: 1677750 - DNA, 25 bp, Homo sapien
ttctgattagggatctgacaagcac

SEQ ID NO: 1677751 - DNA, 25 bp, Homo sapien
gctgatggactacgttgtcttggca

SEQ ID NO: 1677752 - DNA, 25 bp, Homo sapien
tgagtattatatgcaagattgctcc

SEQ ID NO: 1677753 - DNA, 25 bp, Homo sapien
gataattttgtctagtggcctaaca

SEQ ID NO: 1677754 - DNA, 25 bp, Homo sapien
tcttttaattggtatgggcatcgcc

SEQ ID NO: 1677755 - DNA, 25 bp, Homo sapien
tatattgactcattactctggacat

SEQ ID NO: 1677756 - DNA, 25 bp, Homo sapien
cagggtcttagtatagaagcgctcc

SEQ ID NO: 1677757 - DNA, 25 bp, Homo sapien
tcatagaacctaggcgagtagtgga

SEQ ID NO: 1677758 - DNA, 25 bp, Homo sapien
tgtaggccatgtttggtcacataca

SEQ ID NO: 1677759 - DNA, 25 bp, Homo sapien
tagtggaagtcctcaaaggtgcacc

SEQ ID NO: 1677760 - DNA, 25 bp, Homo sapien
tttggtgtgagcgctggaaagagaa

SEQ ID NO: 1677761 - DNA, 25 bp, Homo sapien
tggtgtgagcgctggaaagagaaca

SEQ ID NO: 1677762 - DNA, 25 bp, Homo sapien
ttggtgtgagcgctggaaagagaac

SEQ ID NO: 1677763 - DNA, 25 bp, Homo sapien
gtgtgagcgctggaaagagaacagg

SEQ ID NO: 1677764 - DNA, 25 bp, Homo sapien
gaggaagtacctgcatgccccagga

SEQ ID NO: 1677765 - DNA, 25 bp, Homo sapien
ttcagaggaagtacctgcatgcccc

SEQ ID NO: 1677766 - DNA, 25 bp, Homo sapien
tcagaggaagtacctgcatgcccca

SEQ ID NO: 1677767 - DNA, 25 bp, Homo sapien
gcttcagaggaagtacctgcatgcc

SEQ ID NO: 1677768 - DNA, 25 bp, Homo sapien
gtcgccgctgtggaaagcacagatg

SEQ ID NO: 1677769 - DNA, 25 bp, Homo sapien
agcacagatggtgattgtcagaccc

SEQ ID NO: 1677770 - DNA, 25 bp, Homo sapien
gcacagatggtgattgtcagaccca

SEQ ID NO: 1677771 - DNA, 25 bp, Homo sapien
cttgcagtatccctgcatggcgtgg

SEQ ID NO: 1677772 - DNA, 25 bp, Homo sapien
tgtctctccagaagtgcgaaggctc

SEQ ID NO: 1677773 - DNA, 25 bp, Homo sapien
gccagccatgctcttagggtaacat

SEQ ID NO: 1677774 - DNA, 25 bp, Homo sapien
tggcattttcctgctaagtagtggg

SEQ ID NO: 1677775 - DNA, 25 bp, Homo sapien
gctcattcttggtcgcatgggtgaa

SEQ ID NO: 1677776 - DNA, 25 bp, Homo sapien
tctgagcttcatgttagggatgatg

SEQ ID NO: 1677777 - DNA, 25 bp, Homo sapien
gatggtgtggtcaggcccagtcttt

SEQ ID NO: 1677778 - DNA, 25 bp, Homo sapien
ttcatgttagggatgatgatggaga

SEQ ID NO: 1677779 - DNA, 25 bp, Homo sapien
cataacctgcactgatggtgtggtc

SEQ ID NO: 1677780 - DNA, 25 bp, Homo sapien
ttcttgccacccctagccaaggtca

SEQ ID NO: 1677781 - DNA, 25 bp, Homo sapien
tttcttgccacccctagccaaggtc

SEQ ID NO: 1677782 - DNA, 25 bp, Homo sapien
ctttcttgccacccctagccaaggt

SEQ ID NO: 1677783 - DNA, 25 bp, Homo sapien
tcttgccacccctagccaaggtcat

SEQ ID NO: 1677784 - DNA, 25 bp, Homo sapien
gccggcacttagcaaagtcattatc

SEQ ID NO: 1677785 - DNA, 25 bp, Homo sapien
cttttggtcccttgatgagacacca

SEQ ID NO: 1677786 - DNA, 25 bp, Homo sapien
cagcagtaacaacaacagagtctgc

SEQ ID NO: 1677787 - DNA, 25 bp, Homo sapien
gtcattatccaggttgacttcccca

SEQ ID NO: 1677788 - DNA, 25 bp, Homo sapien
gcatcagaattggacctacagggac

SEQ ID NO: 1677789 - DNA, 25 bp, Homo sapien
catcagaattggacctacagggacc

SEQ ID NO: 1677790 - DNA, 25 bp, Homo sapien
ggcatcagaattggacctacaggga

SEQ ID NO: 1677791 - DNA, 25 bp, Homo sapien
tggcatcagaattggacctacaggg

SEQ ID NO: 1677792 - DNA, 25 bp, Homo sapien
ggtcctcattgcaagtcagtccaca

SEQ ID NO: 1677793 - DNA, 25 bp, Homo sapien
ctgcctctaggtcctcattgcaagt

SEQ ID NO: 1677794 - DNA, 25 bp, Homo sapien
tgcaagtcagtccacactgagacat

SEQ ID NO: 1677795 - DNA, 25 bp, Homo sapien
ctctaggtcctcattgcaagtcagt

SEQ ID NO: 1677796 - DNA, 25 bp, Homo sapien
caggaccagcatcccgtgaagggtg

SEQ ID NO: 1677797 - DNA, 25 bp, Homo sapien
cagatttctgtaatgggcaggacca

SEQ ID NO: 1677798 - DNA, 25 bp, Homo sapien
tgtgttcacctcatgaccacgggct

SEQ ID NO: 1677799 - DNA, 25 bp, Homo sapien
ctctgctggagatgctgaatgcttg

SEQ ID NO: 1677800 - DNA, 25 bp, Homo sapien
gaatgttcttcgttctatcaaaagg

SEQ ID NO: 1677801 - DNA, 25 bp, Homo sapien
gaatcagtgcactcagatgcaaaga

SEQ ID NO: 1677802 - DNA, 25 bp, Homo sapien
aaattagtccacaggaaattagcca

SEQ ID NO: 1677803 - DNA, 25 bp, Homo sapien
tatcatctccaaagctaatgagagc

SEQ ID NO: 1677804 - DNA, 25 bp, Homo sapien
aaatgagtatgaccagcagtaatta

SEQ ID NO: 1677805 - DNA, 25 bp, Homo sapien
tccttcagatagtgtaccttgaggg

SEQ ID NO: 1677806 - DNA, 25 bp, Homo sapien
cagtaattaattagcagaggcacta

SEQ ID NO: 1677807 - DNA, 25 bp, Homo sapien
cattctgcagctgaatttatccctg

SEQ ID NO: 1677808 - DNA, 25 bp, Homo sapien
agtgtcttctgtactcatcactcat

SEQ ID NO: 1677809 - DNA, 25 bp, Homo sapien
catgttgctgtgtaaaggaggcttc

SEQ ID NO: 1677810 - DNA, 25 bp, Homo sapien
ttagcaataaaatctgacgagcagt

SEQ ID NO: 1677811 - DNA, 25 bp, Homo sapien
ataagtgaccagtccctgcccatgg

SEQ ID NO: 1677812 - DNA, 25 bp, Homo sapien
gcagttcttaacacatggagcggca

SEQ ID NO: 1677813 - DNA, 25 bp, Homo sapien
agtaaggtagatccagaagcggctg

SEQ ID NO: 1677814 - DNA, 25 bp, Homo sapien
ggcagtaaggtagatccagaagcgg

SEQ ID NO: 1677815 - DNA, 25 bp, Homo sapien
cagtaaggtagatccagaagcggct

SEQ ID NO: 1677816 - DNA, 25 bp, Homo sapien
ctgggcagtaaggtagatccagaag

SEQ ID NO: 1677817 - DNA, 25 bp, Homo sapien
agatggcagatgtggtgggcatggc

SEQ ID NO: 1677818 - DNA, 25 bp, Homo sapien
ttggtgaagacgagatggcagatgt

SEQ ID NO: 1677819 - DNA, 25 bp, Homo sapien
tggtgaagacgagatggcagatgtg

SEQ ID NO: 1677820 - DNA, 25 bp, Homo sapien
ggcagatgtggtgggcatggcctga

SEQ ID NO: 1677821 - DNA, 25 bp, Homo sapien
tttctctgtaaagcatgaggccaca

SEQ ID NO: 1677822 - DNA, 25 bp, Homo sapien
attttctctgtaaagcatgaggcca

SEQ ID NO: 1677823 - DNA, 25 bp, Homo sapien
ctctgtaaagcatgaggccacatcc

SEQ ID NO: 1677824 - DNA, 25 bp, Homo sapien
cttggggaggtatggcagttgggga

SEQ ID NO: 1677825 - DNA, 25 bp, Homo sapien
cacctctcacatcggcttccccaga

SEQ ID NO: 1677826 - DNA, 25 bp, Homo sapien
accagcacctctcacatcggcttcc

SEQ ID NO: 1677827 - DNA, 25 bp, Homo sapien
ctgccaccagcacctctcacatcgg

SEQ ID NO: 1677828 - DNA, 25 bp, Homo sapien
agcacctctcacatcggcttcccca

SEQ ID NO: 1677829 - DNA, 25 bp, Homo sapien
gacacagtgtggaatactagcaaaa

SEQ ID NO: 1677830 - DNA, 25 bp, Homo sapien
ggatccttctggactggcaaccaaa

SEQ ID NO: 1677831 - DNA, 25 bp, Homo sapien
aaaaggagttctgcgggatgtgcct

SEQ ID NO: 1677832 - DNA, 25 bp, Homo sapien
gagaaggtgtccatgcatcaacatc

SEQ ID NO: 1677833 - DNA, 25 bp, Homo sapien
gaaataaccctctcgaactggagtc

SEQ ID NO: 1677834 - DNA, 25 bp, Homo sapien
gaggcttccttggagtattccagaa

SEQ ID NO: 1677835 - DNA, 25 bp, Homo sapien
tgagggagtgacaactctgaacacc

SEQ ID NO: 1677836 - DNA, 25 bp, Homo sapien
caacaagtctggtgcatgtgggcag

SEQ ID NO: 1677837 - DNA, 25 bp, Homo sapien
aaaaaagctgattgcgagtacttcg

SEQ ID NO: 1677838 - DNA, 25 bp, Homo sapien
gactgaaagatcattctaagggaag

SEQ ID NO: 1677839 - DNA, 25 bp, Homo sapien
gctggataaccacatagctcaagga

SEQ ID NO: 1677840 - DNA, 25 bp, Homo sapien
gcatagaggaataggacaaactgga

SEQ ID NO: 1677841 - DNA, 25 bp, Homo sapien
gcaacattacgctgaatggcgaaga

SEQ ID NO: 1677842 - DNA, 25 bp, Homo sapien
aagccatataaggtaaacccacagg

SEQ ID NO: 1677843 - DNA, 25 bp, Homo sapien
taactcagattgtcacgattcatca

SEQ ID NO: 1677844 - DNA, 25 bp, Homo sapien
actcaatcccttttcaactgctgct

SEQ ID NO: 1677845 - DNA, 25 bp, Homo sapien
taatagatcatgagtcttttggtgg

SEQ ID NO: 1677846 - DNA, 25 bp, Homo sapien
acaagtctgcatcccctaatagatc

SEQ ID NO: 1677847 - DNA, 25 bp, Homo sapien
ctgcagaatgcaacagctgcaggca

SEQ ID NO: 1677848 - DNA, 25 bp, Homo sapien
tcctgttgtatgatccaatagcaca

SEQ ID NO: 1677849 - DNA, 25 bp, Homo sapien
tggcccctttgagccctctgactcc

SEQ ID NO: 1677850 - DNA, 25 bp, Homo sapien
gtggcccctttgagccctctgactc

SEQ ID NO: 1677851 - DNA, 25 bp, Homo sapien
ggtggcccctttgagccctctgact

SEQ ID NO: 1677852 - DNA, 25 bp, Homo sapien
aattcaacttctgcaatgtggagac

SEQ ID NO: 1677853 - DNA, 25 bp, Homo sapien
tgcatgctgtccaggtcctgtcccc

SEQ ID NO: 1677854 - DNA, 25 bp, Homo sapien
catgctgtccaggtcctgtccccat

SEQ ID NO: 1677855 - DNA, 25 bp, Homo sapien
gcctgcatgctgtccaggtcctgtc

SEQ ID NO: 1677856 - DNA, 25 bp, Homo sapien
cagaccgcctgcatgctgtccaggt

SEQ ID NO: 1677857 - DNA, 25 bp, Homo sapien
cacgtgggcatttgtttagccaggg

SEQ ID NO: 1677858 - DNA, 25 bp, Homo sapien
tgtgtaggtttgcacgtgggcattt

SEQ ID NO: 1677859 - DNA, 25 bp, Homo sapien
tttgcacgtgggcatttgtttagcc

SEQ ID NO: 1677860 - DNA, 25 bp, Homo sapien
aggtttgcacgtgggcatttgttta

SEQ ID NO: 1677861 - DNA, 25 bp, Homo sapien
ccgttgcaggtatcctttgactcat

SEQ ID NO: 1677862 - DNA, 25 bp, Homo sapien
cctaagtgaacctgcaccaccgttg

SEQ ID NO: 1677863 - DNA, 25 bp, Homo sapien
tctcctctccgctgtgtgacctcct

SEQ ID NO: 1677864 - DNA, 25 bp, Homo sapien
catggctgcccttccgctgtgttct

SEQ ID NO: 1677865 - DNA, 25 bp, Homo sapien
tcacagtccataagactcagcttgg

SEQ ID NO: 1677866 - DNA, 25 bp, Homo sapien
cagcttgggctttagtctgctttgc

SEQ ID NO: 1677867 - DNA, 25 bp, Homo sapien
cataagactcagcttgggctttagt

SEQ ID NO: 1677868 - DNA, 25 bp, Homo sapien
actcagcttgggctttagtctgctt

SEQ ID NO: 1677869 - DNA, 25 bp, Homo sapien
ttccttacacctggtatgatggaat

SEQ ID NO: 1677870 - DNA, 25 bp, Homo sapien
tccttacacctggtatgatggaata

SEQ ID NO: 1677871 - DNA, 25 bp, Homo sapien
gccattttgggtgatgacaagaccc

SEQ ID NO: 1677872 - DNA, 25 bp, Homo sapien
ttttgtttgtgtggcccagatgggt

SEQ ID NO: 1677873 - DNA, 25 bp, Homo sapien
cacgcagtatgggaggatacgattt

SEQ ID NO: 1677874 - DNA, 25 bp, Homo sapien
gggccactagctcgaggaagtgact

SEQ ID NO: 1677875 - DNA, 25 bp, Homo sapien
tctgtagctcttgcaggtgcttagc

SEQ ID NO: 1677876 - DNA, 25 bp, Homo sapien
tgtggaacctctgtagctcttgcag

SEQ ID NO: 1677877 - DNA, 25 bp, Homo sapien
gctcatgtccggaaacacttggtga

SEQ ID NO: 1677878 - DNA, 25 bp, Homo sapien
caggtgcttagctcatgtccggaaa

SEQ ID NO: 1677879 - DNA, 25 bp, Homo sapien
catttcttcggtcccattttcagtc

SEQ ID NO: 1677880 - DNA, 25 bp, Homo sapien
cggcagggccttccattagtgtaag

SEQ ID NO: 1677881 - DNA, 25 bp, Homo sapien
tgtgtcttccttgcatctgagagag

SEQ ID NO: 1677882 - DNA, 25 bp, Homo sapien
tgagagagctgaggcttctcatttc

SEQ ID NO: 1677883 - DNA, 25 bp, Homo sapien
agagctctttcactgcccttgggcc

SEQ ID NO: 1677884 - DNA, 25 bp, Homo sapien
tctgtaggacacttccagagctctt

SEQ ID NO: 1677885 - DNA, 25 bp, Homo sapien
gacagctttctgtaggacacttcca

SEQ ID NO: 1677886 - DNA, 25 bp, Homo sapien
ctgtcctgcctgacagctttctgta

SEQ ID NO: 1677887 - DNA, 25 bp, Homo sapien
ttcctccttccaggggtgttgtcca

SEQ ID NO: 1677888 - DNA, 25 bp, Homo sapien
ttgtcactgagcttccatcagtggc

SEQ ID NO: 1677889 - DNA, 25 bp, Homo sapien
ccttgttgtcactgagcttccatca

SEQ ID NO: 1677890 - DNA, 25 bp, Homo sapien
cactccttgttgtcactgagcttcc

SEQ ID NO: 1677891 - DNA, 25 bp, Homo sapien
caggaaatttgcagtagtggcctct

SEQ ID NO: 1677892 - DNA, 25 bp, Homo sapien
aatttgcagtagtggcctctgtgaa

SEQ ID NO: 1677893 - DNA, 25 bp, Homo sapien
tctgtgaatatatcccttaacccct

SEQ ID NO: 1677894 - DNA, 25 bp, Homo sapien
ctgtgaatatatcccttaacccctc

SEQ ID NO: 1677895 - DNA, 25 bp, Homo sapien
ttccaaaatgaagaaacaggtttgc

SEQ ID NO: 1677896 - DNA, 25 bp, Homo sapien
agattccaaaatgaagaaacaggtt

SEQ ID NO: 1677897 - DNA, 25 bp, Homo sapien
ccaaaatgaagaaacaggtttgcac

SEQ ID NO: 1677898 - DNA, 25 bp, Homo sapien
ctaagattccaaaatgaagaaacag

SEQ ID NO: 1677899 - DNA, 25 bp, Homo sapien
gcccaagcagtagccacagagcttt

SEQ ID NO: 1677900 - DNA, 25 bp, Homo sapien
gctaggccatggaaacaataggacc

SEQ ID NO: 1677901 - DNA, 25 bp, Homo sapien
tccatctagagtcctgtgtgtgtcc

SEQ ID NO: 1677902 - DNA, 25 bp, Homo sapien
gagttcttggcacggccagtgctag

SEQ ID NO: 1677903 - DNA, 25 bp, Homo sapien
tattttagcgaagcctgcaagggcc

SEQ ID NO: 1677904 - DNA, 25 bp, Homo sapien
catgctgtttattcagaccaaacat

SEQ ID NO: 1677905 - DNA, 25 bp, Homo sapien
aaggcagagctgacaagactctcac

SEQ ID NO: 1677906 - DNA, 25 bp, Homo sapien
caagttgatgctccctattttagcg

SEQ ID NO: 1677907 - DNA, 25 bp, Homo sapien
tcccgatctgcacttaagagtgggt

SEQ ID NO: 1677908 - DNA, 25 bp, Homo sapien
ggtgcccagcgggaaacccactgtc

SEQ ID NO: 1677909 - DNA, 25 bp, Homo sapien
cttggttcgaccacagtcctctatc

SEQ ID NO: 1677910 - DNA, 25 bp, Homo sapien
ctgtcttagtctcccgatctgcact

SEQ ID NO: 1677911 - DNA, 25 bp, Homo sapien
ccaagcactgctgagtaggaaccat

SEQ ID NO: 1677912 - DNA, 25 bp, Homo sapien
ggtgccaagcactgctgagtaggaa

SEQ ID NO: 1677913 - DNA, 25 bp, Homo sapien
tgccaagcactgctgagtaggaacc

SEQ ID NO: 1677914 - DNA, 25 bp, Homo sapien
cttctctaccccaggtgccaagcac

SEQ ID NO: 1677915 - DNA, 25 bp, Homo sapien
tgccttcgtgaccacactggcataa

SEQ ID NO: 1677916 - DNA, 25 bp, Homo sapien
tgcccccttttcagttcaacccatc

SEQ ID NO: 1677917 - DNA, 25 bp, Homo sapien
cacactggcataagtcacagttgaa

SEQ ID NO: 1677918 - DNA, 25 bp, Homo sapien
ggcataagtcacagttgaacctcct

SEQ ID NO: 1677919 - DNA, 25 bp, Homo sapien
tgtgacagtccatccacctcctaag

SEQ ID NO: 1677920 - DNA, 25 bp, Homo sapien
gggacatttctttgcccatgtgaca

SEQ ID NO: 1677921 - DNA, 25 bp, Homo sapien
ctcctaagaccttgggtgcctccat

SEQ ID NO: 1677922 - DNA, 25 bp, Homo sapien
tctttgcccatgtgacagtccatcc

SEQ ID NO: 1677923 - DNA, 25 bp, Homo sapien
taggagacaccattctcagcattgg

SEQ ID NO: 1677924 - DNA, 25 bp, Homo sapien
gacattgaattgacctaggtgccca

SEQ ID NO: 1677925 - DNA, 25 bp, Homo sapien
tctgaccctggtctgagtgacttct

SEQ ID NO: 1677926 - DNA, 25 bp, Homo sapien
aaaaggcagatggttcatgtcagct

SEQ ID NO: 1677927 - DNA, 25 bp, Homo sapien
aaactcttctcgcttctgagtgtaa

SEQ ID NO: 1677928 - DNA, 25 bp, Homo sapien
cagttcagtgtagctcacagtcacc

SEQ ID NO: 1677929 - DNA, 25 bp, Homo sapien
ctagggaaactcttctcgcttctga

SEQ ID NO: 1677930 - DNA, 25 bp, Homo sapien
cgcttctgagtgtaaagatctttga

SEQ ID NO: 1677931 - DNA, 25 bp, Homo sapien
gcagcttcgggactattttgccttc

SEQ ID NO: 1677932 - DNA, 25 bp, Homo sapien
cctggtgcccggcagcttcgggact

SEQ ID NO: 1677933 - DNA, 25 bp, Homo sapien
cccaccctgtgcctgttgatcgaat

SEQ ID NO: 1677934 - DNA, 25 bp, Homo sapien
actttcctccgcgttctgcgctggt

SEQ ID NO: 1677935 - DNA, 25 bp, Homo sapien
gaaagtcccctggtgctggtcgcct

SEQ ID NO: 1677936 - DNA, 25 bp, Homo sapien
tcccacttccgactgtcatgagctg

SEQ ID NO: 1677937 - DNA, 25 bp, Homo sapien
cagctgtccgcaaatgtaaccgcct

SEQ ID NO: 1677938 - DNA, 25 bp, Homo sapien
tgtcatgagctgttggagaaagtcc

SEQ ID NO: 1677939 - DNA, 25 bp, Homo sapien
tgtaatctaaggctctaccctagag

SEQ ID NO: 1677940 - DNA, 25 bp, Homo sapien
gagttcatcgtctcacttgcagtag

SEQ ID NO: 1677941 - DNA, 25 bp, Homo sapien
cagtgagggccgtatacttttggca

SEQ ID NO: 1677942 - DNA, 25 bp, Homo sapien
catgccctgctaaaaggtggtggct

SEQ ID NO: 1677943 - DNA, 25 bp, Homo sapien
tccttgacgtattttgtcttttcac

SEQ ID NO: 1677944 - DNA, 25 bp, Homo sapien
ctccttgacgtattttgtcttttca

SEQ ID NO: 1677945 - DNA, 25 bp, Homo sapien
aacactcttcatgtgtttgagggtc

SEQ ID NO: 1677946 - DNA, 25 bp, Homo sapien
tctggcctccgaagatcacgtaaac

SEQ ID NO: 1677947 - DNA, 25 bp, Homo sapien
gctaaatattagagtaacactcttc

SEQ ID NO: 1677948 - DNA, 25 bp, Homo sapien
tcaagtctccaatttcgatcctctg

SEQ ID NO: 1677949 - DNA, 25 bp, Homo sapien
caaatgaggttgttaactcccagca

SEQ ID NO: 1677950 - DNA, 25 bp, Homo sapien
gctgcggatgagacagacacttttc

SEQ ID NO: 1677951 - DNA, 25 bp, Homo sapien
tttaatcggcactcttagtaaagtg

SEQ ID NO: 1677952 - DNA, 25 bp, Homo sapien
ccaaggcttggtcaaaggcattttc

SEQ ID NO: 1677953 - DNA, 25 bp, Homo sapien
aaaatttgcacggttggggcagacg

SEQ ID NO: 1677954 - DNA, 25 bp, Homo sapien
tgcacggttggggcagacggcggtg

SEQ ID NO: 1677955 - DNA, 25 bp, Homo sapien
tgcaaaaatttgcacggttggggca

SEQ ID NO: 1677956 - DNA, 25 bp, Homo sapien
gcacggttggggcagacggcggtgg

SEQ ID NO: 1677957 - DNA, 25 bp, Homo sapien
cccctggatctgtgggctgttgctg

SEQ ID NO: 1677958 - DNA, 25 bp, Homo sapien
ttagttcctattacagattccttgg

SEQ ID NO: 1677959 - DNA, 25 bp, Homo sapien
cttgagtctggaggccacccctgga

SEQ ID NO: 1677960 - DNA, 25 bp, Homo sapien
tccttggtacggaatctgatttgtc

SEQ ID NO: 1677961 - DNA, 25 bp, Homo sapien
ctcaggaaacggagacttgaccgtt

SEQ ID NO: 1677962 - DNA, 25 bp, Homo sapien
ccacaatttacgaactcaggaaacg

SEQ ID NO: 1677963 - DNA, 25 bp, Homo sapien
tacgaactcaggaaacggagacttg

SEQ ID NO: 1677964 - DNA, 25 bp, Homo sapien
caatttacgaactcaggaaacggag

SEQ ID NO: 1677965 - DNA, 25 bp, Homo sapien
gttcggtgagtcaggtcactgccag

SEQ ID NO: 1677966 - DNA, 25 bp, Homo sapien
tcctagggacttgtgttttgtgccc

SEQ ID NO: 1677967 - DNA, 25 bp, Homo sapien
tctctttggctagagtaaaaggaga

SEQ ID NO: 1677968 - DNA, 25 bp, Homo sapien
tgttttgtgccctgcttgggttcgg

SEQ ID NO: 1677969 - DNA, 25 bp, Homo sapien
cgacagaaaggtaggctccagggtt

SEQ ID NO: 1677970 - DNA, 25 bp, Homo sapien
gctccagggttagactgtcgggctt

SEQ ID NO: 1677971 - DNA, 25 bp, Homo sapien
tcagagggacccgacagaaaggtag

SEQ ID NO: 1677972 - DNA, 25 bp, Homo sapien
tcgggcttgggatcctcttagctcc

SEQ ID NO: 1677973 - DNA, 25 bp, Homo sapien
gaagatggcgctaccattgcctgtg

SEQ ID NO: 1677974 - DNA, 25 bp, Homo sapien
gaccttggcagacagtaagcacaca

SEQ ID NO: 1677975 - DNA, 25 bp, Homo sapien
cccagggtccctagcaaagtagata

SEQ ID NO: 1677976 - DNA, 25 bp, Homo sapien
cactgtgagtcatggagaagcagca

SEQ ID NO: 1677977 - DNA, 25 bp, Homo sapien
ctacagcagatcagctagagaggag

SEQ ID NO: 1677978 - DNA, 25 bp, Homo sapien
ttatgcaagtaggaatggaagggac

SEQ ID NO: 1677979 - DNA, 25 bp, Homo sapien
tctagtggagtgttggtctgcgttt

SEQ ID NO: 1677980 - DNA, 25 bp, Homo sapien
tcaatgtcaaggacgtctagtggag

SEQ ID NO: 1677981 - DNA, 25 bp, Homo sapien
gggtggtagcagatgaggctccggg

SEQ ID NO: 1677982 - DNA, 25 bp, Homo sapien
ttttggattgctggacaaacactgg

SEQ ID NO: 1677983 - DNA, 25 bp, Homo sapien
ctggcagatcccctgagtaggtaaa

SEQ ID NO: 1677984 - DNA, 25 bp, Homo sapien
aagtggctggttgtttttggattgc

SEQ ID NO: 1677985 - DNA, 25 bp, Homo sapien
agatcccctgagtaggtaaagtggc

SEQ ID NO: 1677986 - DNA, 25 bp, Homo sapien
ttgcatgtcctagttgggtgttata

SEQ ID NO: 1677987 - DNA, 25 bp, Homo sapien
gccactgctgccgtagggcacaaaa

SEQ ID NO: 1677988 - DNA, 25 bp, Homo sapien
actgctgccgtagggcacaaaagaa

SEQ ID NO: 1677989 - DNA, 25 bp, Homo sapien
cctttgcatgtcctagttgggtgtt

SEQ ID NO: 1677990 - DNA, 25 bp, Homo sapien
tgtgtaacaaatggcgttaagatct

SEQ ID NO: 1677991 - DNA, 25 bp, Homo sapien
gtaacaaatggcgttaagatctaaa

SEQ ID NO: 1677992 - DNA, 25 bp, Homo sapien
caaatggcgttaagatctaaatcca

SEQ ID NO: 1677993 - DNA, 25 bp, Homo sapien
agatctaaatccagggccaacaatt

SEQ ID NO: 1677994 - DNA, 25 bp, Homo sapien
accagcacccagtctgaccaaggaa

SEQ ID NO: 1677995 - DNA, 25 bp, Homo sapien
gaggctgcgtaggaagcaccagcac

SEQ ID NO: 1677996 - DNA, 25 bp, Homo sapien
caggaggctgcgtaggaagcaccag

SEQ ID NO: 1677997 - DNA, 25 bp, Homo sapien
ccacttccaggaggctgcgtaggaa

SEQ ID NO: 1677998 - DNA, 25 bp, Homo sapien
taaaagcaacagtgagggagatcag

SEQ ID NO: 1677999 - DNA, 25 bp, Homo sapien
agcaacagtgagggagatcaggctg

SEQ ID NO: 1678000 - DNA, 25 bp, Homo sapien
aaagcaacagtgagggagatcaggc

SEQ ID NO: 1678001 - DNA, 25 bp, Homo sapien
gcaggaggtgataaaagcaacagtg

SEQ ID NO: 1678002 - DNA, 25 bp, Homo sapien
tttggtggtaataagcctcctttgc

SEQ ID NO: 1678003 - DNA, 25 bp, Homo sapien
cctttgcttggcatgggacttggca

SEQ ID NO: 1678004 - DNA, 25 bp, Homo sapien
cacgtgggtaagtgcatgctcaaca

SEQ ID NO: 1678005 - DNA, 25 bp, Homo sapien
gaccgagtccgtatgtgagcagaca

SEQ ID NO: 1678006 - DNA, 25 bp, Homo sapien
ccactatgacttgctggtggcccat

SEQ ID NO: 1678007 - DNA, 25 bp, Homo sapien
ctgttggagctgttctagaagatgc

SEQ ID NO: 1678008 - DNA, 25 bp, Homo sapien
ttcacacttgtttggactccactat

SEQ ID NO: 1678009 - DNA, 25 bp, Homo sapien
ggtggcccatctcctggatccttct

SEQ ID NO: 1678010 - DNA, 25 bp, Homo sapien
cacagtcgccctcgcctgctctccg

SEQ ID NO: 1678011 - DNA, 25 bp, Homo sapien
tggacgcgagtcgagctgggcacac

SEQ ID NO: 1678012 - DNA, 25 bp, Homo sapien
ggcccgcttggtcccaggtggacgc

SEQ ID NO: 1678013 - DNA, 25 bp, Homo sapien
tgccaccgcctggaactgcgggggg

SEQ ID NO: 1678014 - DNA, 25 bp, Homo sapien
tcgtgagtagcaaagtcaagagcag

SEQ ID NO: 1678015 - DNA, 25 bp, Homo sapien
ttgcaaaatcggagcgagcagcagg

SEQ ID NO: 1678016 - DNA, 25 bp, Homo sapien
gctactgggacttcgctgccaggga

SEQ ID NO: 1678017 - DNA, 25 bp, Homo sapien
ttcagacggtgaaccccaagagctg

SEQ ID NO: 1678018 - DNA, 25 bp, Homo sapien
tcaagagtcctaaaaagtagacatt

SEQ ID NO: 1678019 - DNA, 25 bp, Homo sapien
cacaaaattaagagatcgagtagag

SEQ ID NO: 1678020 - DNA, 25 bp, Homo sapien
tcagtggtcgaaatatattaactca

SEQ ID NO: 1678021 - DNA, 25 bp, Homo sapien
gaacttacaaggtgtctagcagtgt

SEQ ID NO: 1678022 - DNA, 25 bp, Homo sapien
tgtccaggaaccgactgcttcaggg

SEQ ID NO: 1678023 - DNA, 25 bp, Homo sapien
tttgctcttgaggacgcagtgaagc

SEQ ID NO: 1678024 - DNA, 25 bp, Homo sapien
gctttgccggagaattacatcatga

SEQ ID NO: 1678025 - DNA, 25 bp, Homo sapien
gcaaacatcttttggcaagcctgct

SEQ ID NO: 1678026 - DNA, 25 bp, Homo sapien
acactcacaaatgtgcgcatcatcc

SEQ ID NO: 1678027 - DNA, 25 bp, Homo sapien
aatgtgcgcatcatccttgcatagg

SEQ ID NO: 1678028 - DNA, 25 bp, Homo sapien
acaaatgtgcgcatcatccttgcat

SEQ ID NO: 1678029 - DNA, 25 bp, Homo sapien
cactcacaaatgtgcgcatcatcct

SEQ ID NO: 1678030 - DNA, 25 bp, Homo sapien
aggtgagatcttcgacacagaaaaa

SEQ ID NO: 1678031 - DNA, 25 bp, Homo sapien
gagatcttcgacacagaaaaagaga

SEQ ID NO: 1678032 - DNA, 25 bp, Homo sapien
agaaatatgagattacggagcagcg

SEQ ID NO: 1678033 - DNA, 25 bp, Homo sapien
attacggagcagcgcaagattgatc

SEQ ID NO: 1678034 - DNA, 25 bp, Homo sapien
cagccgctaaatccaaggttgaaaa

SEQ ID NO: 1678035 - DNA, 25 bp, Homo sapien
aagaggaagtactcagccgctaaat

SEQ ID NO: 1678036 - DNA, 25 bp, Homo sapien
accagttggtggtgacaagaacggc

SEQ ID NO: 1678037 - DNA, 25 bp, Homo sapien
agtactcagccgctaaatccaaggt

SEQ ID NO: 1678038 - DNA, 25 bp, Homo sapien
ttgatgctggtggcaaggtgaaaaa

SEQ ID NO: 1678039 - DNA, 25 bp, Homo sapien
cccgaagccaagaaggttgatgctg

SEQ ID NO: 1678040 - DNA, 25 bp, Homo sapien
tgagaagccagatactaaagagaag

SEQ ID NO: 1678041 - DNA, 25 bp, Homo sapien
ctcaaagctaaaaagcccaagaagg

SEQ ID NO: 1678042 - DNA, 25 bp, Homo sapien
ataactggttatgcctgtgcatctg

SEQ ID NO: 1678043 - DNA, 25 bp, Homo sapien
cagtcaataactggttatgcctgtg

SEQ ID NO: 1678044 - DNA, 25 bp, Homo sapien
ggctgctccccagtcaataactggt

SEQ ID NO: 1678045 - DNA, 25 bp, Homo sapien
tccccagtcaataactggttatgcc

SEQ ID NO: 1678046 - DNA, 25 bp, Homo sapien
cagccagtaagtctaggacgggttg

SEQ ID NO: 1678047 - DNA, 25 bp, Homo sapien
tacgtggggaatgtgagctgctgca

SEQ ID NO: 1678048 - DNA, 25 bp, Homo sapien
agtctaggacgggttggagtctcac

SEQ ID NO: 1678049 - DNA, 25 bp, Homo sapien
tgtgcatttgccaatcccaggctgt

SEQ ID NO: 1678050 - DNA, 25 bp, Homo sapien
cttgcctttgggtgtgatggcggct

SEQ ID NO: 1678051 - DNA, 25 bp, Homo sapien
tcttgcctttgggtgtgatggcggc

SEQ ID NO: 1678052 - DNA, 25 bp, Homo sapien
tggcttccgccttcacaggtgattc

SEQ ID NO: 1678053 - DNA, 25 bp, Homo sapien
gggttacactcggaagtgacacagc

SEQ ID NO: 1678054 - DNA, 25 bp, Homo sapien
ggcatccctaaatccgctggagcag

SEQ ID NO: 1678055 - DNA, 25 bp, Homo sapien
gcagacagttttaagaacagtgaca

SEQ ID NO: 1678056 - DNA, 25 bp, Homo sapien
gatgtccacgattattacaggatga

SEQ ID NO: 1678057 - DNA, 25 bp, Homo sapien
gagagctttgaaatactcatcctgg

SEQ ID NO: 1678058 - DNA, 25 bp, Homo sapien
gagctttgaaatactcatcctggta

SEQ ID NO: 1678059 - DNA, 25 bp, Homo sapien
tctgtacatcagtgtgtgatgtcca

SEQ ID NO: 1678060 - DNA, 25 bp, Homo sapien
tgatccaaggatacttagatcccat

SEQ ID NO: 1678061 - DNA, 25 bp, Homo sapien
tcccattgtggcaccgggttttcca

SEQ ID NO: 1678062 - DNA, 25 bp, Homo sapien
cacgaatccgtattgatccaaggat

SEQ ID NO: 1678063 - DNA, 25 bp, Homo sapien
cctgaacttcggtgtgagaaacacg

SEQ ID NO: 1678064 - DNA, 25 bp, Homo sapien
tgccaaacacgtaaaatggatccct

SEQ ID NO: 1678065 - DNA, 25 bp, Homo sapien
tgctgctaccggctgcttcagggaa

SEQ ID NO: 1678066 - DNA, 25 bp, Homo sapien
gtaaccatctctataaagctgactg

SEQ ID NO: 1678067 - DNA, 25 bp, Homo sapien
gtggctgcctgcaaccggttgtcat

SEQ ID NO: 1678068 - DNA, 25 bp, Homo sapien
gctcccttcctcgagccagaaagct

SEQ ID NO: 1678069 - DNA, 25 bp, Homo sapien
gtagctcccttcctcgagccagaaa

SEQ ID NO: 1678070 - DNA, 25 bp, Homo sapien
tagctcccttcctcgagccagaaag

SEQ ID NO: 1678071 - DNA, 25 bp, Homo sapien
ctcccttcctcgagccagaaagctc

SEQ ID NO: 1678072 - DNA, 25 bp, Homo sapien
acgtggcactgaggacagtcctttg

SEQ ID NO: 1678073 - DNA, 25 bp, Homo sapien
ggacagtcctttgacgggttctctg

SEQ ID NO: 1678074 - DNA, 25 bp, Homo sapien
cactgaggacagtcctttgacgggt

SEQ ID NO: 1678075 - DNA, 25 bp, Homo sapien
gaggacagtcctttgacgggttctc

SEQ ID NO: 1678076 - DNA, 25 bp, Homo sapien
tctgttctgaagcaatgtcatcttg

SEQ ID NO: 1678077 - DNA, 25 bp, Homo sapien
tctggaagtccaaacctaggagtcc

SEQ ID NO: 1678078 - DNA, 25 bp, Homo sapien
cctaggagtccttcgcatatttgca

SEQ ID NO: 1678079 - DNA, 25 bp, Homo sapien
gaaggaagtccaatctgcaatctgg

SEQ ID NO: 1678080 - DNA, 25 bp, Homo sapien
tgctctcagtatccccatagttaag

SEQ ID NO: 1678081 - DNA, 25 bp, Homo sapien
ttgggaatgctctcagtatccccat

SEQ ID NO: 1678082 - DNA, 25 bp, Homo sapien
ggaatgctctcagtatccccatagt

SEQ ID NO: 1678083 - DNA, 25 bp, Homo sapien
aatgctctcagtatccccatagtta

SEQ ID NO: 1678084 - DNA, 25 bp, Homo sapien
gatttgtataaactgcatctgagcc

SEQ ID NO: 1678085 - DNA, 25 bp, Homo sapien
cacagttccgaagatttgtataaac

SEQ ID NO: 1678086 - DNA, 25 bp, Homo sapien
tccgaagatttgtataaactgcatc

SEQ ID NO: 1678087 - DNA, 25 bp, Homo sapien
tcatttccacagttccgaagatttg

SEQ ID NO: 1678088 - DNA, 25 bp, Homo sapien
tgtcagacaagggacacctccaagt

SEQ ID NO: 1678089 - DNA, 25 bp, Homo sapien
ggcaacaaagggcaagtctcagtac

SEQ ID NO: 1678090 - DNA, 25 bp, Homo sapien
agttctcatgtagcgaaggccagca

SEQ ID NO: 1678091 - DNA, 25 bp, Homo sapien
cagccgttcgtagcagcctgtgtca

SEQ ID NO: 1678092 - DNA, 25 bp, Homo sapien
gcctcttgtggtgatagtgtcttgc

SEQ ID NO: 1678093 - DNA, 25 bp, Homo sapien
caacttcgtaatagcggatgccctt

SEQ ID NO: 1678094 - DNA, 25 bp, Homo sapien
gtatttatgggattgcattcacaga

SEQ ID NO: 1678095 - DNA, 25 bp, Homo sapien
tggcatgcttccctcatgcctcttg

SEQ ID NO: 1678096 - DNA, 25 bp, Homo sapien
gaaagacgtggattagtggctcgcc

SEQ ID NO: 1678097 - DNA, 25 bp, Homo sapien
ccgctttggatgattcggcttctgg

SEQ ID NO: 1678098 - DNA, 25 bp, Homo sapien
tagtggctcgcctttgagttagaaa

SEQ ID NO: 1678099 - DNA, 25 bp, Homo sapien
gattcggcttctggtctgaaagacg

SEQ ID NO: 1678100 - DNA, 25 bp, Homo sapien
gacgcctggattttgaacagcaccc

SEQ ID NO: 1678101 - DNA, 25 bp, Homo sapien
ctagttccaaagaggactggctcct

SEQ ID NO: 1678102 - DNA, 25 bp, Homo sapien
gcagcataattcatgagacgcctgg

SEQ ID NO: 1678103 - DNA, 25 bp, Homo sapien
gctcctcctagatctggcagcataa

SEQ ID NO: 1678104 - DNA, 25 bp, Homo sapien
aactgcccatttgaactgtttgttc

SEQ ID NO: 1678105 - DNA, 25 bp, Homo sapien
aaactgcccatttgaactgtttgtt

SEQ ID NO: 1678106 - DNA, 25 bp, Homo sapien
tgagaggaaaaaaggagggagacat

SEQ ID NO: 1678107 - DNA, 25 bp, Homo sapien
gagaggaaaaaaggagggagacata

SEQ ID NO: 1678108 - DNA, 25 bp, Homo sapien
ttgagaggaaaaaaggagggagaca

SEQ ID NO: 1678109 - DNA, 25 bp, Homo sapien
tttccataagggcacgtcactatca

SEQ ID NO: 1678110 - DNA, 25 bp, Homo sapien
ttttccataagggcacgtcactatc

SEQ ID NO: 1678111 - DNA, 25 bp, Homo sapien
tccataagggcacgtcactatcact

SEQ ID NO: 1678112 - DNA, 25 bp, Homo sapien
tctttccacgctttctgaagtagat

SEQ ID NO: 1678113 - DNA, 25 bp, Homo sapien
gaacaatggaacctgcactaaccag

SEQ ID NO: 1678114 - DNA, 25 bp, Homo sapien
agtcttatcttgtttggtatctcta

SEQ ID NO: 1678115 - DNA, 25 bp, Homo sapien
gatggcagcttttcagatacctctg

SEQ ID NO: 1678116 - DNA, 25 bp, Homo sapien
acaaagagctttgattgatggcagc

SEQ ID NO: 1678117 - DNA, 25 bp, Homo sapien
agctgcaggcgagcgggctgctgcc

SEQ ID NO: 1678118 - DNA, 25 bp, Homo sapien
tgctgccggtaggtgcaagcacagt

SEQ ID NO: 1678119 - DNA, 25 bp, Homo sapien
gttccctcccaatttggatgcagca

SEQ ID NO: 1678120 - DNA, 25 bp, Homo sapien
cttccgtggtgaggctagctgctga

SEQ ID NO: 1678121 - DNA, 25 bp, Homo sapien
tgctgctggccttcttacaaaatga

SEQ ID NO: 1678122 - DNA, 25 bp, Homo sapien
ctgctggccttcttacaaaatgagt

SEQ ID NO: 1678123 - DNA, 25 bp, Homo sapien
tctttctggctgccaaagccacttt

SEQ ID NO: 1678124 - DNA, 25 bp, Homo sapien
caaaatgagtaagcactgactttct

SEQ ID NO: 1678125 - DNA, 25 bp, Homo sapien
acttgggttcctggcttcgtgctac

SEQ ID NO: 1678126 - DNA, 25 bp, Homo sapien
gacacaatcccttctggtctctcag

SEQ ID NO: 1678127 - DNA, 25 bp, Homo sapien
tactggcttttcaatggtggagttc

SEQ ID NO: 1678128 - DNA, 25 bp, Homo sapien
ggtctctcagcattcacttgggttc

SEQ ID NO: 1678129 - DNA, 25 bp, Homo sapien
agggcctgggtaggaacattcagtt

SEQ ID NO: 1678130 - DNA, 25 bp, Homo sapien
gagggaatatctgcctcctgtcggg

SEQ ID NO: 1678131 - DNA, 25 bp, Homo sapien
gggtcctcagctatcagtcctctct

SEQ ID NO: 1678132 - DNA, 25 bp, Homo sapien
ccatatggttgtgtcgtggctgtca

SEQ ID NO: 1678133 - DNA, 25 bp, Homo sapien
tatatacatcctgttgccggccagc

SEQ ID NO: 1678134 - DNA, 25 bp, Homo sapien
tagtcctatatacatcctgttgccg

SEQ ID NO: 1678135 - DNA, 25 bp, Homo sapien
agccaggggtgatgtatgctgccca

SEQ ID NO: 1678136 - DNA, 25 bp, Homo sapien
atacatcctgttgccggccagccag

SEQ ID NO: 1678137 - DNA, 25 bp, Homo sapien
tctactatccggtgaacactctggg

SEQ ID NO: 1678138 - DNA, 25 bp, Homo sapien
cagttctactatccggtgaacactc

SEQ ID NO: 1678139 - DNA, 25 bp, Homo sapien
tccggtgaacactctgggcaggaga

SEQ ID NO: 1678140 - DNA, 25 bp, Homo sapien
ctgtagcctcttctaacctttccat

SEQ ID NO: 1678141 - DNA, 25 bp, Homo sapien
caaggaggtattgtttgtcctcctc

SEQ ID NO: 1678142 - DNA, 25 bp, Homo sapien
ggaggtattgtttgtcctcctcact

SEQ ID NO: 1678143 - DNA, 25 bp, Homo sapien
gttggcttctcgctaggcacagttt

SEQ ID NO: 1678144 - DNA, 25 bp, Homo sapien
ctaggcacagttttgcatagccagc

SEQ ID NO: 1678145 - DNA, 25 bp, Homo sapien
acaaagtagcatataggagagtggg

SEQ ID NO: 1678146 - DNA, 25 bp, Homo sapien
cacaaagtagcatataggagagtgg

SEQ ID NO: 1678147 - DNA, 25 bp, Homo sapien
agtgggggacagagatactgcatct

SEQ ID NO: 1678148 - DNA, 25 bp, Homo sapien
gacagagatactgcatctgaattcc

SEQ ID NO: 1678149 - DNA, 25 bp, Homo sapien
cacagacatgcttaaactatacaac

SEQ ID NO: 1678150 - DNA, 25 bp, Homo sapien
acgttgcaatagaggcggtagcaga

SEQ ID NO: 1678151 - DNA, 25 bp, Homo sapien
aactatacaacgttgcaatagaggc

SEQ ID NO: 1678152 - DNA, 25 bp, Homo sapien
gacatgcttaaactatacaacgttg

SEQ ID NO: 1678153 - DNA, 25 bp, Homo sapien
taaggcaccaggatatgggaaagtg

SEQ ID NO: 1678154 - DNA, 25 bp, Homo sapien
tcatgaggtagaaagctggcccaaa

SEQ ID NO: 1678155 - DNA, 25 bp, Homo sapien
tgaggttgccaaacacaaatgctcc

SEQ ID NO: 1678156 - DNA, 25 bp, Homo sapien
ttcttccttccgtaaggcaccagga

SEQ ID NO: 1678157 - DNA, 25 bp, Homo sapien
tacattctgctttacctggttcaag

SEQ ID NO: 1678158 - DNA, 25 bp, Homo sapien
atagcattggccgataattcctcat

SEQ ID NO: 1678159 - DNA, 25 bp, Homo sapien
caaagaccacggctgttactgatga

SEQ ID NO: 1678160 - DNA, 25 bp, Homo sapien
caaggtggagtctgtgaaattgcta

SEQ ID NO: 1678161 - DNA, 25 bp, Homo sapien
acttgggttcctggcttcgtgctac

SEQ ID NO: 1678162 - DNA, 25 bp, Homo sapien
tactggcttttcaatggtggagttc

SEQ ID NO: 1678163 - DNA, 25 bp, Homo sapien
gacacaatcccttctggtctctcag

SEQ ID NO: 1678164 - DNA, 25 bp, Homo sapien
ggtctctcagcattcacttgggttc

SEQ ID NO: 1678165 - DNA, 25 bp, Homo sapien
agggcctgggtaggaacattcagtt

SEQ ID NO: 1678166 - DNA, 25 bp, Homo sapien
gggtcctcagctatcagtcctctct

SEQ ID NO: 1678167 - DNA, 25 bp, Homo sapien
ccatatggttgtgtcgtggctgtca

SEQ ID NO: 1678168 - DNA, 25 bp, Homo sapien
gagggaatatctgcctcctgtcggg

SEQ ID NO: 1678169 - DNA, 25 bp, Homo sapien
cagcgtgtacactgatgaattcaac

SEQ ID NO: 1678170 - DNA, 25 bp, Homo sapien
actcccatgagcttttatcaccaaa

SEQ ID NO: 1678171 - DNA, 25 bp, Homo sapien
gcagctagtgaataatagaccttta

SEQ ID NO: 1678172 - DNA, 25 bp, Homo sapien
attagttcattcagcgtgtacactg

SEQ ID NO: 1678173 - DNA, 25 bp, Homo sapien
tagtcctatatacatcctgttgccg

SEQ ID NO: 1678174 - DNA, 25 bp, Homo sapien
tcctatatacatcctgttgccggcc

SEQ ID NO: 1678175 - DNA, 25 bp, Homo sapien
tatatacatcctgttgccggccagc

SEQ ID NO: 1678176 - DNA, 25 bp, Homo sapien
atacatcctgttgccggccagccag

SEQ ID NO: 1678177 - DNA, 25 bp, Homo sapien
tctactatccggtgaacactctggg

SEQ ID NO: 1678178 - DNA, 25 bp, Homo sapien
ctgtagcctcttctaacctttccat

SEQ ID NO: 1678179 - DNA, 25 bp, Homo sapien
cagttctactatccggtgaacactc

SEQ ID NO: 1678180 - DNA, 25 bp, Homo sapien
tccggtgaacactctgggcaggaga

SEQ ID NO: 1678181 - DNA, 25 bp, Homo sapien
caaggaggtattgtttgtcctcctc

SEQ ID NO: 1678182 - DNA, 25 bp, Homo sapien
ctaggcacagttttgcatagccagc

SEQ ID NO: 1678183 - DNA, 25 bp, Homo sapien
ggaggtattgtttgtcctcctcact

SEQ ID NO: 1678184 - DNA, 25 bp, Homo sapien
gttggcttctcgctaggcacagttt

SEQ ID NO: 1678185 - DNA, 25 bp, Homo sapien
gacagagatactgcatctgaattcc

SEQ ID NO: 1678186 - DNA, 25 bp, Homo sapien
cacaaagtagcatataggagagtgg

SEQ ID NO: 1678187 - DNA, 25 bp, Homo sapien
agtgggggacagagatactgcatct

SEQ ID NO: 1678188 - DNA, 25 bp, Homo sapien
acaaagtagcatataggagagtggg

SEQ ID NO: 1678189 - DNA, 25 bp, Homo sapien
acgttgcaatagaggcggtagcaga

SEQ ID NO: 1678190 - DNA, 25 bp, Homo sapien
gacatgcttaaactatacaacgttg

SEQ ID NO: 1678191 - DNA, 25 bp, Homo sapien
cacagacatgcttaaactatacaac

SEQ ID NO: 1678192 - DNA, 25 bp, Homo sapien
aactatacaacgttgcaatagaggc

SEQ ID NO: 1678193 - DNA, 25 bp, Homo sapien
taaggcaccaggatatgggaaagtg

SEQ ID NO: 1678194 - DNA, 25 bp, Homo sapien
tgaggttgccaaacacaaatgctcc

SEQ ID NO: 1678195 - DNA, 25 bp, Homo sapien
tcatgaggtagaaagctggcccaaa

SEQ ID NO: 1678196 - DNA, 25 bp, Homo sapien
ttcttccttccgtaaggcaccagga

SEQ ID NO: 1678197 - DNA, 25 bp, Homo sapien
cctttccctgcatagctttctccat

SEQ ID NO: 1678198 - DNA, 25 bp, Homo sapien
cacctttccctgcatagctttctcc

SEQ ID NO: 1678199 - DNA, 25 bp, Homo sapien
cacactcgattccacctttccctgc

SEQ ID NO: 1678200 - DNA, 25 bp, Homo sapien
cactcgattccacctttccctgcat

SEQ ID NO: 1678201 - DNA, 25 bp, Homo sapien
tggacaagtttgcacaggatcttag

SEQ ID NO: 1678202 - DNA, 25 bp, Homo sapien
aaaccatcacaatgggtttttgact

SEQ ID NO: 1678203 - DNA, 25 bp, Homo sapien
gcacaggatcttagagctgatattg

SEQ ID NO: 1678204 - DNA, 25 bp, Homo sapien
catcacaatgggtttttgacttggg

SEQ ID NO: 1678205 - DNA, 25 bp, Homo sapien
tcctgcactcagcatcaaatggaag

SEQ ID NO: 1678206 - DNA, 25 bp, Homo sapien
ctgggatgtctataagcctcagaga

SEQ ID NO: 1678207 - DNA, 25 bp, Homo sapien
aaatcctgcactcagcatcaaatgg

SEQ ID NO: 1678208 - DNA, 25 bp, Homo sapien
ccatttctgaagtttatctgggatg

SEQ ID NO: 1678209 - DNA, 25 bp, Homo sapien
tgacgtaggacccttttcctgtcat

SEQ ID NO: 1678210 - DNA, 25 bp, Homo sapien
gtgcactgtgacgtaggaccctttt

SEQ ID NO: 1678211 - DNA, 25 bp, Homo sapien
actgtgacgtaggacccttttcctg

SEQ ID NO: 1678212 - DNA, 25 bp, Homo sapien
cagtgcactgtgacgtaggaccctt

SEQ ID NO: 1678213 - DNA, 25 bp, Homo sapien
tctgtttctgcacgtaatactccct

SEQ ID NO: 1678214 - DNA, 25 bp, Homo sapien
acaccaaccagttcccttgtagtca

SEQ ID NO: 1678215 - DNA, 25 bp, Homo sapien
cctcttctgtcttaaaggaattcag

SEQ ID NO: 1678216 - DNA, 25 bp, Homo sapien
atcccttttactgagaggtttctgg

SEQ ID NO: 1678217 - DNA, 25 bp, Homo sapien
tctcggcgttattagtattctccat

SEQ ID NO: 1678218 - DNA, 25 bp, Homo sapien
tggcagagtgctggaatgggctctc

SEQ ID NO: 1678219 - DNA, 25 bp, Homo sapien
tgggctctcggcgttattagtattc

SEQ ID NO: 1678220 - DNA, 25 bp, Homo sapien
tgctggaatgggctctcggcgttat

SEQ ID NO: 1678221 - DNA, 25 bp, Homo sapien
tctcttctaatctcacccaagtttg

SEQ ID NO: 1678222 - DNA, 25 bp, Homo sapien
gagtatcctttaaatgcattctggg

SEQ ID NO: 1678223 - DNA, 25 bp, Homo sapien
gaaaacagtcacaagggcagtagtc

SEQ ID NO: 1678224 - DNA, 25 bp, Homo sapien
tcagaatgtttcatcgtggctcctc

SEQ ID NO: 1678225 - DNA, 25 bp, Homo sapien
ggctcctcttcactgagagagagta

SEQ ID NO: 1678226 - DNA, 25 bp, Homo sapien
ctagtcataataataggctgccaaa

SEQ ID NO: 1678227 - DNA, 25 bp, Homo sapien
tagtcataataataggctgccaaag

SEQ ID NO: 1678228 - DNA, 25 bp, Homo sapien
tgctgctcctgtcatgatggagaag

SEQ ID NO: 1678229 - DNA, 25 bp, Homo sapien
ctgctgctcctgtcatgatggagaa

SEQ ID NO: 1678230 - DNA, 25 bp, Homo sapien
gctccaatgtaccactcatgtgtca

SEQ ID NO: 1678231 - DNA, 25 bp, Homo sapien
gatggagagcttaggagcccacaga

SEQ ID NO: 1678232 - DNA, 25 bp, Homo sapien
tcctggctatttcgctgggcagagc

SEQ ID NO: 1678233 - DNA, 25 bp, Homo sapien
taagacttgatatcaggcaatgcct

SEQ ID NO: 1678234 - DNA, 25 bp, Homo sapien
gacagccctagatctatccccagtt

SEQ ID NO: 1678235 - DNA, 25 bp, Homo sapien
agagacagccctagatctatcccca

SEQ ID NO: 1678236 - DNA, 25 bp, Homo sapien
cagttctttaaagtaaacctcagca

SEQ ID NO: 1678237 - DNA, 25 bp, Homo sapien
gccctagatctatccccagttcttt

SEQ ID NO: 1678238 - DNA, 25 bp, Homo sapien
gaattgtcatgcaaagcaaggtgtg

SEQ ID NO: 1678239 - DNA, 25 bp, Homo sapien
ccatttcaagcgttagagaagaact

SEQ ID NO: 1678240 - DNA, 25 bp, Homo sapien
cacttagcctggaatgttaaacctc

SEQ ID NO: 1678241 - DNA, 25 bp, Homo sapien
tcttgcaggattaaaactgccggtc

SEQ ID NO: 1678242 - DNA, 25 bp, Homo sapien
cacacaacgggcaaaagtatgggct

SEQ ID NO: 1678243 - DNA, 25 bp, Homo sapien
taattgtagccaccagtctgaactg

SEQ ID NO: 1678244 - DNA, 25 bp, Homo sapien
gcaataggcttttcgggaagacacc

SEQ ID NO: 1678245 - DNA, 25 bp, Homo sapien
ggaagacacctaaatccagagtcag

SEQ ID NO: 1678246 - DNA, 25 bp, Homo sapien
tgtctgctggtaatagttacaacca

SEQ ID NO: 1678247 - DNA, 25 bp, Homo sapien
tacacaactctggtatattaagagt

SEQ ID NO: 1678248 - DNA, 25 bp, Homo sapien
aattagttatgttcacttggttagc

SEQ ID NO: 1678249 - DNA, 25 bp, Homo sapien
taatagttacaaccaaggagtagaa

SEQ ID NO: 1678250 - DNA, 25 bp, Homo sapien
catctacagaaagcaataggttgcc

SEQ ID NO: 1678251 - DNA, 25 bp, Homo sapien
aatgctgcgtgttttatgaactgcc

SEQ ID NO: 1678252 - DNA, 25 bp, Homo sapien
gcctctatcttgcacaccagggatg

SEQ ID NO: 1678253 - DNA, 25 bp, Homo sapien
taggttgccctattttccggctgaa

SEQ ID NO: 1678254 - DNA, 25 bp, Homo sapien
gctccttgtttctgcttgcaaccat

SEQ ID NO: 1678255 - DNA, 25 bp, Homo sapien
ttgctccttgtttctgcttgcaacc

SEQ ID NO: 1678256 - DNA, 25 bp, Homo sapien
tgctccttgtttctgcttgcaacca

SEQ ID NO: 1678257 - DNA, 25 bp, Homo sapien
cttgctccttgtttctgcttgcaac

SEQ ID NO: 1678258 - DNA, 25 bp, Homo sapien
cgaatggtcttagcatctgttgaaa

SEQ ID NO: 1678259 - DNA, 25 bp, Homo sapien
ttgcatatgaacaaagagttgtccc

SEQ ID NO: 1678260 - DNA, 25 bp, Homo sapien
tccccgtgactaatgatgtttagca

SEQ ID NO: 1678261 - DNA, 25 bp, Homo sapien
gctttggttcgcatttccccgtgac

SEQ ID NO: 1678262 - DNA, 25 bp, Homo sapien
gtttcgtttattagtagcagtattc

SEQ ID NO: 1678263 - DNA, 25 bp, Homo sapien
agctttgtttcgtttattagtagca

SEQ ID NO: 1678264 - DNA, 25 bp, Homo sapien
cgtttattagtagcagtattctgca

SEQ ID NO: 1678265 - DNA, 25 bp, Homo sapien
gctttgtttcgtttattagtagcag

SEQ ID NO: 1678266 - DNA, 25 bp, Homo sapien
tcaggtttcaaattgtgaggaggct

SEQ ID NO: 1678267 - DNA, 25 bp, Homo sapien
aggtttcaaattgtgaggaggcttt

SEQ ID NO: 1678268 - DNA, 25 bp, Homo sapien
tttcaattctatttgaagtttaatc

SEQ ID NO: 1678269 - DNA, 25 bp, Homo sapien
ttcaggtttcaaattgtgaggaggc

SEQ ID NO: 1678270 - DNA, 25 bp, Homo sapien
acgtgggcacctccttactctgctc

SEQ ID NO: 1678271 - DNA, 25 bp, Homo sapien
ctccttactctgctcggcctctgac

SEQ ID NO: 1678272 - DNA, 25 bp, Homo sapien
acctccttactctgctcggcctctg

SEQ ID NO: 1678273 - DNA, 25 bp, Homo sapien
gtgggcacctccttactctgctcgg

SEQ ID NO: 1678274 - DNA, 25 bp, Homo sapien
gagagattttatgaagtgtgacaac

SEQ ID NO: 1678275 - DNA, 25 bp, Homo sapien
taccaaactgacacgcccactgatt

SEQ ID NO: 1678276 - DNA, 25 bp, Homo sapien
tgtattattgagcacaccatgatgt

SEQ ID NO: 1678277 - DNA, 25 bp, Homo sapien
ccagaaacacagaacggtattgtat

SEQ ID NO: 1678278 - DNA, 25 bp, Homo sapien
caatttgactccttttatcatcagg

SEQ ID NO: 1678279 - DNA, 25 bp, Homo sapien
catcaggagtgtgatctagtgccct

SEQ ID NO: 1678280 - DNA, 25 bp, Homo sapien
gcaaatagggcttcaatttgactcc

SEQ ID NO: 1678281 - DNA, 25 bp, Homo sapien
tcaaggggaaattttaacatcagca

SEQ ID NO: 1678282 - DNA, 25 bp, Homo sapien
gcaccttgatggcttccaccatgtt

SEQ ID NO: 1678283 - DNA, 25 bp, Homo sapien
caggcaccttgatggcttccaccat

SEQ ID NO: 1678284 - DNA, 25 bp, Homo sapien
ccttgatggcttccaccatgttggt

SEQ ID NO: 1678285 - DNA, 25 bp, Homo sapien
accttgatggcttccaccatgttgg

SEQ ID NO: 1678286 - DNA, 25 bp, Homo sapien
cacagacgtttagcgcttctatcca

SEQ ID NO: 1678287 - DNA, 25 bp, Homo sapien
ggtgctatttgccacagacgtttag

SEQ ID NO: 1678288 - DNA, 25 bp, Homo sapien
ttagcgcttctatccacaccagtga

SEQ ID NO: 1678289 - DNA, 25 bp, Homo sapien
gtgatggccactggtcctttcccca

SEQ ID NO: 1678290 - DNA, 25 bp, Homo sapien
acttcatggttcatagcatctgaca

SEQ ID NO: 1678291 - DNA, 25 bp, Homo sapien
ccttggttttgaatgctaaagatgt

SEQ ID NO: 1678292 - DNA, 25 bp, Homo sapien
cttcatggttcatagcatctgacat

SEQ ID NO: 1678293 - DNA, 25 bp, Homo sapien
aatccttggttttgaatgctaaaga

SEQ ID NO: 1678294 - DNA, 25 bp, Homo sapien
gcaccacgtatcacttcctgggtcc

SEQ ID NO: 1678295 - DNA, 25 bp, Homo sapien
ccagcaccacgtatcacttcctggg

SEQ ID NO: 1678296 - DNA, 25 bp, Homo sapien
cagcaccacgtatcacttcctgggt

SEQ ID NO: 1678297 - DNA, 25 bp, Homo sapien
caccagcaccacgtatcacttcctg

SEQ ID NO: 1678298 - DNA, 25 bp, Homo sapien
cctcaggctttattaggtgagagga

SEQ ID NO: 1678299 - DNA, 25 bp, Homo sapien
tttccgtcttcacaacctcaggctt

SEQ ID NO: 1678300 - DNA, 25 bp, Homo sapien
caacctcaggctttattaggtgaga

SEQ ID NO: 1678301 - DNA, 25 bp, Homo sapien
cttcacaacctcaggctttattagg

SEQ ID NO: 1678302 - DNA, 25 bp, Homo sapien
aggataagacagaattggcatcagt

SEQ ID NO: 1678303 - DNA, 25 bp, Homo sapien
gagcttccacaccattagaaaatgt

SEQ ID NO: 1678304 - DNA, 25 bp, Homo sapien
aatcaagagcttccacaccattaga

SEQ ID NO: 1678305 - DNA, 25 bp, Homo sapien
ttcttggctccatttaggccctctt

SEQ ID NO: 1678306 - DNA, 25 bp, Homo sapien
cctctccacagagcaatgctttgtc

SEQ ID NO: 1678307 - DNA, 25 bp, Homo sapien
ctcctctccacagagcaatgctttg

SEQ ID NO: 1678308 - DNA, 25 bp, Homo sapien
tctccacagagcaatgctttgtctc

SEQ ID NO: 1678309 - DNA, 25 bp, Homo sapien
tccacagagcaatgctttgtctctt

SEQ ID NO: 1678310 - DNA, 25 bp, Homo sapien
tcagagatggtcgttggacggccaa

SEQ ID NO: 1678311 - DNA, 25 bp, Homo sapien
agctgtgagcgctctctttaattct

SEQ ID NO: 1678312 - DNA, 25 bp, Homo sapien
actgtttgtcagagatggtcgttgg

SEQ ID NO: 1678313 - DNA, 25 bp, Homo sapien
ttggacggccaagctgtgagcgctc

SEQ ID NO: 1678314 - DNA, 25 bp, Homo sapien
gaattgcgttgaatttctggattcc

SEQ ID NO: 1678315 - DNA, 25 bp, Homo sapien
tgtatgtagttggtgctcaaagata

SEQ ID NO: 1678316 - DNA, 25 bp, Homo sapien
tcaaagatatctattgaattgcgtt

SEQ ID NO: 1678317 - DNA, 25 bp, Homo sapien
actttgtatgtagttggtgctcaaa

SEQ ID NO: 1678318 - DNA, 25 bp, Homo sapien
gaaagcccaggtgtaaggcagttgc

SEQ ID NO: 1678319 - DNA, 25 bp, Homo sapien
tgcccttctgctacaaaatatcttg

SEQ ID NO: 1678320 - DNA, 25 bp, Homo sapien
gggcctgaatagaaagcccaggtgt

SEQ ID NO: 1678321 - DNA, 25 bp, Homo sapien
agccttggggcctgaatagaaagcc

SEQ ID NO: 1678322 - DNA, 25 bp, Homo sapien
cacaacattgcttgggtacttgagt

SEQ ID NO: 1678323 - DNA, 25 bp, Homo sapien
aactgtttagcacccagtcttgcgg

SEQ ID NO: 1678324 - DNA, 25 bp, Homo sapien
cccctgaccaaggtgtagtatgaga

SEQ ID NO: 1678325 - DNA, 25 bp, Homo sapien
tcacatggacatctactcggaaatg

SEQ ID NO: 1678326 - DNA, 25 bp, Homo sapien
cagtgttttgtggaatgagtggaga

SEQ ID NO: 1678327 - DNA, 25 bp, Homo sapien
ggaatgagtggagactctggttccc

SEQ ID NO: 1678328 - DNA, 25 bp, Homo sapien
actctggttccccagcatgcagcat

SEQ ID NO: 1678329 - DNA, 25 bp, Homo sapien
ttttgtggaatgagtggagactctg

SEQ ID NO: 1678330 - DNA, 25 bp, Homo sapien
ttacccaccgcccatcttttgcttg

SEQ ID NO: 1678331 - DNA, 25 bp, Homo sapien
ctttgctattttccaatcactagag

SEQ ID NO: 1678332 - DNA, 25 bp, Homo sapien
tgaaaccaaaggataggctaagaac

SEQ ID NO: 1678333 - DNA, 25 bp, Homo sapien
acacatacaaacagacaacctccct

SEQ ID NO: 1678334 - DNA, 25 bp, Homo sapien
aaaatactgtaatactctcttgctc

SEQ ID NO: 1678335 - DNA, 25 bp, Homo sapien
aatactgtaatactctcttgctcat

SEQ ID NO: 1678336 - DNA, 25 bp, Homo sapien
caaaatactgtaatactctcttgct

SEQ ID NO: 1678337 - DNA, 25 bp, Homo sapien
aaatactgtaatactctcttgctca

SEQ ID NO: 1678338 - DNA, 25 bp, Homo sapien
cttcttcttgttttatcagatagtt

SEQ ID NO: 1678339 - DNA, 25 bp, Homo sapien
gaagtgtgttacctttccatgaaat

SEQ ID NO: 1678340 - DNA, 25 bp, Homo sapien
taaattcttgaatggtcaccttgaa

SEQ ID NO: 1678341 - DNA, 25 bp, Homo sapien
atagttaaattcttgaatggtcacc

SEQ ID NO: 1678342 - DNA, 25 bp, Homo sapien
ggaggattagttgcaaacagcagta

SEQ ID NO: 1678343 - DNA, 25 bp, Homo sapien
gcagtactgataaagtctgctgtcc

SEQ ID NO: 1678344 - DNA, 25 bp, Homo sapien
aatgcacctgtcaacttgataaagc

SEQ ID NO: 1678345 - DNA, 25 bp, Homo sapien
ctaaattggaggattagttgcaaac

SEQ ID NO: 1678346 - DNA, 25 bp, Homo sapien
tttccataatggagtgtaaaagaaa

SEQ ID NO: 1678347 - DNA, 25 bp, Homo sapien
ttccataatggagtgtaaaagaaaa

SEQ ID NO: 1678348 - DNA, 25 bp, Homo sapien
agtaatcagatccagcgtctctggc

SEQ ID NO: 1678349 - DNA, 25 bp, Homo sapien
ccaagcaggagatttgcgatgaata

SEQ ID NO: 1678350 - DNA, 25 bp, Homo sapien
gccaaatgggccattctgggtggta

SEQ ID NO: 1678351 - DNA, 25 bp, Homo sapien
tagattctggaacatatactaggcc

SEQ ID NO: 1678352 - DNA, 25 bp, Homo sapien
tgctcctccatgctagcgttctttc

SEQ ID NO: 1678353 - DNA, 25 bp, Homo sapien
catgagcttcccatgtgtccctttg

SEQ ID NO: 1678354 - DNA, 25 bp, Homo sapien
taggaactgagcagtgcttatctcc

SEQ ID NO: 1678355 - DNA, 25 bp, Homo sapien
tgctagcgttctttcccactaggaa

SEQ ID NO: 1678356 - DNA, 25 bp, Homo sapien
gtatcctcatccatccgaccacttc

SEQ ID NO: 1678357 - DNA, 25 bp, Homo sapien
tgcttcttgccacaatatgattaag

SEQ ID NO: 1678358 - DNA, 25 bp, Homo sapien
ccatactgtttctcgtgtccatgca

SEQ ID NO: 1678359 - DNA, 25 bp, Homo sapien
tatgagcagttcactacacatgcca

SEQ ID NO: 1678360 - DNA, 25 bp, Homo sapien
tgtcagcggcttacagataatgagg

SEQ ID NO: 1678361 - DNA, 25 bp, Homo sapien
gatgccgcgaagctctactggatgt

SEQ ID NO: 1678362 - DNA, 25 bp, Homo sapien
ccaggcattcttggcgtggtgatca

SEQ ID NO: 1678363 - DNA, 25 bp, Homo sapien
tttgtaagaaccgtgcagccaggca

SEQ ID NO: 1678364 - DNA, 25 bp, Homo sapien
tgcagccagctggataacatctacg

SEQ ID NO: 1678365 - DNA, 25 bp, Homo sapien
aatgctgtctgcattctgagtggac

SEQ ID NO: 1678366 - DNA, 25 bp, Homo sapien
ctgattctcagtgaactgagctgca

SEQ ID NO: 1678367 - DNA, 25 bp, Homo sapien
gataataaggtgactgtggcatcga

SEQ ID NO: 1678368 - DNA, 25 bp, Homo sapien
tttaagtgcactaatgtctttgtag

SEQ ID NO: 1678369 - DNA, 25 bp, Homo sapien
cataagactggagttctcgaagatt

SEQ ID NO: 1678370 - DNA, 25 bp, Homo sapien
gctgggctgctcttcataagactgg

SEQ ID NO: 1678371 - DNA, 25 bp, Homo sapien
catgtgagaattctgactgcttatt

SEQ ID NO: 1678372 - DNA, 25 bp, Homo sapien
tctccagcttcacattctggaacca

SEQ ID NO: 1678373 - DNA, 25 bp, Homo sapien
ctctccagcttcacattctggaacc

SEQ ID NO: 1678374 - DNA, 25 bp, Homo sapien
ctccagcttcacattctggaaccat

SEQ ID NO: 1678375 - DNA, 25 bp, Homo sapien
tgttgaaagtgacatggcctaaggt

SEQ ID NO: 1678376 - DNA, 25 bp, Homo sapien
ctttgtgttgaaagtgacatggcct

SEQ ID NO: 1678377 - DNA, 25 bp, Homo sapien
tttgtgttgaaagtgacatggccta

SEQ ID NO: 1678378 - DNA, 25 bp, Homo sapien
tgtgttgaaagtgacatggcctaag

SEQ ID NO: 1678379 - DNA, 25 bp, Homo sapien
tgtctggttgggttctgttcctggt

SEQ ID NO: 1678380 - DNA, 25 bp, Homo sapien
ggaggctggaagcttaacatcaagg

SEQ ID NO: 1678381 - DNA, 25 bp, Homo sapien
ggctgtcttctcctcggatcctaat

SEQ ID NO: 1678382 - DNA, 25 bp, Homo sapien
tgttcctggttcgtggatggctgtc

SEQ ID NO: 1678383 - DNA, 25 bp, Homo sapien
tttgtttagcactgacaacttgctt

SEQ ID NO: 1678384 - DNA, 25 bp, Homo sapien
ttacactcagttctatttgtttagc

SEQ ID NO: 1678385 - DNA, 25 bp, Homo sapien
cttgatcagcggcttggtcattctg

SEQ ID NO: 1678386 - DNA, 25 bp, Homo sapien
caacttgcttatacagcgtgtgcat

SEQ ID NO: 1678387 - DNA, 25 bp, Homo sapien
tccactggtaaatgacaaaatcttt

SEQ ID NO: 1678388 - DNA, 25 bp, Homo sapien
gaagagatggctaagcggccatgca

SEQ ID NO: 1678389 - DNA, 25 bp, Homo sapien
tcttccaaattgctgtgtttcagag

SEQ ID NO: 1678390 - DNA, 25 bp, Homo sapien
tatggcttgctgacttgaaacaacc

SEQ ID NO: 1678391 - DNA, 25 bp, Homo sapien
ggaagagacttaacaagaccactaa

SEQ ID NO: 1678392 - DNA, 25 bp, Homo sapien
gaccactaagacttagttggatcat

SEQ ID NO: 1678393 - DNA, 25 bp, Homo sapien
acaagaccactaagacttagttgga

SEQ ID NO: 1678394 - DNA, 25 bp, Homo sapien
acttggaagagacttaacaagacca

SEQ ID NO: 1678395 - DNA, 25 bp, Homo sapien
tcacttctttgctgtatcatctcca

SEQ ID NO: 1678396 - DNA, 25 bp, Homo sapien
tcttcctcacttctttgctgtatca

SEQ ID NO: 1678397 - DNA, 25 bp, Homo sapien
ttcctcacttctttgctgtatcatc

SEQ ID NO: 1678398 - DNA, 25 bp, Homo sapien
cctcacttctttgctgtatcatctc

SEQ ID NO: 1678399 - DNA, 25 bp, Homo sapien
ggttcccaactgttcagattgcagg

SEQ ID NO: 1678400 - DNA, 25 bp, Homo sapien
aagatcattctggtcccgtcggcgt

SEQ ID NO: 1678401 - DNA, 25 bp, Homo sapien
tatggagactggagacttgagagat

SEQ ID NO: 1678402 - DNA, 25 bp, Homo sapien
ggagtaaggacatctttcttggtgg

SEQ ID NO: 1678403 - DNA, 25 bp, Homo sapien
tcctcccttcttatctgtgtacact

SEQ ID NO: 1678404 - DNA, 25 bp, Homo sapien
caatcaatatcaatctgctgccaaa

SEQ ID NO: 1678405 - DNA, 25 bp, Homo sapien
ctgctggatttgaagcaagtccaca

SEQ ID NO: 1678406 - DNA, 25 bp, Homo sapien
accaatcaatatcaatctgctgcca

SEQ ID NO: 1678407 - DNA, 25 bp, Homo sapien
gaagcaagtccacaccaatcaatat

SEQ ID NO: 1678408 - DNA, 25 bp, Homo sapien
tttacacctgggcacagacaaggag

SEQ ID NO: 1678409 - DNA, 25 bp, Homo sapien
ttacacctgggcacagacaaggagg

SEQ ID NO: 1678410 - DNA, 25 bp, Homo sapien
taacactgtttgtttacacctgggc

SEQ ID NO: 1678411 - DNA, 25 bp, Homo sapien
actgtttgtttacacctgggcacag

SEQ ID NO: 1678412 - DNA, 25 bp, Homo sapien
taagtaacagacattccttcatgag

SEQ ID NO: 1678413 - DNA, 25 bp, Homo sapien
tatttttgctcttgggtgtctggaa

SEQ ID NO: 1678414 - DNA, 25 bp, Homo sapien
gcccttgggtacgttctcattctta

SEQ ID NO: 1678415 - DNA, 25 bp, Homo sapien
tctggaatttaggagcgtggagttt

SEQ ID NO: 1678416 - DNA, 25 bp, Homo sapien
caaggatgctcaatgcgatggcagg

SEQ ID NO: 1678417 - DNA, 25 bp, Homo sapien
aatgcgatggcaggataccatgagg

SEQ ID NO: 1678418 - DNA, 25 bp, Homo sapien
ctttcggtacaaatgcattccagga

SEQ ID NO: 1678419 - DNA, 25 bp, Homo sapien
tgctcaatgcgatggcaggatacca

SEQ ID NO: 1678420 - DNA, 25 bp, Homo sapien
agcccaactctctattccgaaagtc

SEQ ID NO: 1678421 - DNA, 25 bp, Homo sapien
ggacttggaggatgttgattttgaa

SEQ ID NO: 1678422 - DNA, 25 bp, Homo sapien
tctattccgaaagtccatggacttg

SEQ ID NO: 1678423 - DNA, 25 bp, Homo sapien
ccatggacttggaggatgttgattt

SEQ ID NO: 1678424 - DNA, 25 bp, Homo sapien
tttcggaggttggaaccgatgatga

SEQ ID NO: 1678425 - DNA, 25 bp, Homo sapien
taatttcggaggttggaaccgatga

SEQ ID NO: 1678426 - DNA, 25 bp, Homo sapien
gaggttggaaccgatgatgattaca

SEQ ID NO: 1678427 - DNA, 25 bp, Homo sapien
cggaggttggaaccgatgatgatta

SEQ ID NO: 1678428 - DNA, 25 bp, Homo sapien
ctgatcttacctggatttcttaaac

SEQ ID NO: 1678429 - DNA, 25 bp, Homo sapien
tctgatcttacctggatttcttaaa

SEQ ID NO: 1678430 - DNA, 25 bp, Homo sapien
aatgtattggcgaatccttgggtcc

SEQ ID NO: 1678431 - DNA, 25 bp, Homo sapien
gagacttctgctttcgcttggaaca

SEQ ID NO: 1678432 - DNA, 25 bp, Homo sapien
gaggcaagcccctgaaatcgagact

SEQ ID NO: 1678433 - DNA, 25 bp, Homo sapien
catatacactgttcggcaagagctc

SEQ ID NO: 1678434 - DNA, 25 bp, Homo sapien
ccgtggcttctgacccatgaatttc

SEQ ID NO: 1678435 - DNA, 25 bp, Homo sapien
gaccgtggcttctgacccatgaatt

SEQ ID NO: 1678436 - DNA, 25 bp, Homo sapien
ggcttctgacccatgaatttcatgt

SEQ ID NO: 1678437 - DNA, 25 bp, Homo sapien
tcagaccgtggcttctgacccatga

SEQ ID NO: 1678438 - DNA, 25 bp, Homo sapien
ggaaaaatgcactggctcttttgat

SEQ ID NO: 1678439 - DNA, 25 bp, Homo sapien
tgcactggctcttttgatacaaaca

SEQ ID NO: 1678440 - DNA, 25 bp, Homo sapien
aaaatgcactggctcttttgataca

SEQ ID NO: 1678441 - DNA, 25 bp, Homo sapien
aatgcactggctcttttgatacaaa

SEQ ID NO: 1678442 - DNA, 25 bp, Homo sapien
gaaaaggcccacaaggtcatatgtt

SEQ ID NO: 1678443 - DNA, 25 bp, Homo sapien
cagaaatggcaagacatgacatggc

SEQ ID NO: 1678444 - DNA, 25 bp, Homo sapien
tcgagggtccaaactactaggctat

SEQ ID NO: 1678445 - DNA, 25 bp, Homo sapien
gaagaatcaattaacctcgagggtc

SEQ ID NO: 1678446 - DNA, 25 bp, Homo sapien
caccatgactatcagccacaaggag

SEQ ID NO: 1678447 - DNA, 25 bp, Homo sapien
tgcaaggcccgaggtcaagcaatca

SEQ ID NO: 1678448 - DNA, 25 bp, Homo sapien
tagtgaattccgcagagccgcttgc

SEQ ID NO: 1678449 - DNA, 25 bp, Homo sapien
caaggagaaccttgagggacccaag

SEQ ID NO: 1678450 - DNA, 25 bp, Homo sapien
agcaggtttttctcccgcatcccac

SEQ ID NO: 1678451 - DNA, 25 bp, Homo sapien
cacgctctgcgcctgaatgccgtgc

SEQ ID NO: 1678452 - DNA, 25 bp, Homo sapien
gcatcccacgctctgcgcctgaatg

SEQ ID NO: 1678453 - DNA, 25 bp, Homo sapien
aatgccgtgcccgtgaacacagact

SEQ ID NO: 1678454 - DNA, 25 bp, Homo sapien
gccgcgagacagaagcctgcataat

SEQ ID NO: 1678455 - DNA, 25 bp, Homo sapien
cccagtacatacaaggcgctgggta

SEQ ID NO: 1678456 - DNA, 25 bp, Homo sapien
ggtaaagggagaagccgcgagacag

SEQ ID NO: 1678457 - DNA, 25 bp, Homo sapien
acatacaaggcgctgggtaaaggga

SEQ ID NO: 1678458 - DNA, 25 bp, Homo sapien
atgccagggggtccgtcgtttcgtg

SEQ ID NO: 1678459 - DNA, 25 bp, Homo sapien
ttcctgacacttgctctgccatagc

SEQ ID NO: 1678460 - DNA, 25 bp, Homo sapien
ctgacacttgctctgccatagcgct

SEQ ID NO: 1678461 - DNA, 25 bp, Homo sapien
tgccatagcgctggtcagccccttg

SEQ ID NO: 1678462 - DNA, 25 bp, Homo sapien
ccttggataaacgtctctcttggcc

SEQ ID NO: 1678463 - DNA, 25 bp, Homo sapien
cagtgtggatgactcctacgcttat

SEQ ID NO: 1678464 - DNA, 25 bp, Homo sapien
taattaatgcttgcgaagagctata

SEQ ID NO: 1678465 - DNA, 25 bp, Homo sapien
caatagctaccgctaaactccttgg

SEQ ID NO: 1678466 - DNA, 25 bp, Homo sapien
caaacatcacacagggtaggcagtt

SEQ ID NO: 1678467 - DNA, 25 bp, Homo sapien
tgcctgtataatccacatggaagga

SEQ ID NO: 1678468 - DNA, 25 bp, Homo sapien
tcacacagggtaggcagttgcctgt

SEQ ID NO: 1678469 - DNA, 25 bp, Homo sapien
cagttgcctgtataatccacatgga

SEQ ID NO: 1678470 - DNA, 25 bp, Homo sapien
gaagcattaaactttagggcaggga

SEQ ID NO: 1678471 - DNA, 25 bp, Homo sapien
caagggatgaagctatgggtttaga

SEQ ID NO: 1678472 - DNA, 25 bp, Homo sapien
tttagaagcattaaactttagggca

SEQ ID NO: 1678473 - DNA, 25 bp, Homo sapien
aacaaatcattaaacacaagggatg

SEQ ID NO: 1678474 - DNA, 25 bp, Homo sapien
cctttccttaggaaccctcatattg

SEQ ID NO: 1678475 - DNA, 25 bp, Homo sapien
tgtcctttaatcttactaaggtgta

SEQ ID NO: 1678476 - DNA, 25 bp, Homo sapien
ttaatcttactaaggtgtaaatgac

SEQ ID NO: 1678477 - DNA, 25 bp, Homo sapien
cttactaaggtgtaaatgactactg

SEQ ID NO: 1678478 - DNA, 25 bp, Homo sapien
ctgtcccacgagacttgctatcctt

SEQ ID NO: 1678479 - DNA, 25 bp, Homo sapien
tcccacgagacttgctatccttcat

SEQ ID NO: 1678480 - DNA, 25 bp, Homo sapien
actcagaagcaaatgtgtcagatga

SEQ ID NO: 1678481 - DNA, 25 bp, Homo sapien
cacgagacttgctatccttcatcct

SEQ ID NO: 1678482 - DNA, 25 bp, Homo sapien
agaaggctctcttgtttgggcattt

SEQ ID NO: 1678483 - DNA, 25 bp, Homo sapien
atctgcagaattggcccagaccctg

SEQ ID NO: 1678484 - DNA, 25 bp, Homo sapien
gatgaaaagtggtgccctcccaggg

SEQ ID NO: 1678485 - DNA, 25 bp, Homo sapien
tagcgaaccgctgtgactaaacgga

SEQ ID NO: 1678486 - DNA, 25 bp, Homo sapien
gttggagaagcgtgtgctgttggct

SEQ ID NO: 1678487 - DNA, 25 bp, Homo sapien
cttgggttggagaagcgtgtgctgt

SEQ ID NO: 1678488 - DNA, 25 bp, Homo sapien
ttcagagtatgtcgcttgggttgga

SEQ ID NO: 1678489 - DNA, 25 bp, Homo sapien
ctttcagagtatgtcgcttgggttg

SEQ ID NO: 1678490 - DNA, 25 bp, Homo sapien
ggccgcagccaccttcttccccttg

SEQ ID NO: 1678491 - DNA, 25 bp, Homo sapien
gcttcttcatgacagcaggggccgc

SEQ ID NO: 1678492 - DNA, 25 bp, Homo sapien
cttcatgacagcaggggccgcagcc

SEQ ID NO: 1678493 - DNA, 25 bp, Homo sapien
ccgcagccaccttcttccccttggc

SEQ ID NO: 1678494 - DNA, 25 bp, Homo sapien
aagtgggtgaggtctcttttgggct

SEQ ID NO: 1678495 - DNA, 25 bp, Homo sapien
acaggggattcaccacttgcttgac

SEQ ID NO: 1678496 - DNA, 25 bp, Homo sapien
ggcctttcctcaaacaggggattca

SEQ ID NO: 1678497 - DNA, 25 bp, Homo sapien
agtgggtgaggtctcttttgggctg

SEQ ID NO: 1678498 - DNA, 25 bp, Homo sapien
gcactttcagctgcctatagaggat

SEQ ID NO: 1678499 - DNA, 25 bp, Homo sapien
ggaggcactttcagctgcctataga

SEQ ID NO: 1678500 - DNA, 25 bp, Homo sapien
ctttcagctgcctatagaggatggc

SEQ ID NO: 1678501 - DNA, 25 bp, Homo sapien
ttcagctgcctatagaggatggctc

SEQ ID NO: 1678502 - DNA, 25 bp, Homo sapien
tgtttggtggtccagggcttgggtg

SEQ ID NO: 1678503 - DNA, 25 bp, Homo sapien
ctaagtagctgtttggtggtccagg

SEQ ID NO: 1678504 - DNA, 25 bp, Homo sapien
tagctgtttggtggtccagggcttg

SEQ ID NO: 1678505 - DNA, 25 bp, Homo sapien
gctgtttggtggtccagggcttggg

SEQ ID NO: 1678506 - DNA, 25 bp, Homo sapien
cagtgggatgcacgttgtgtgcaat

SEQ ID NO: 1678507 - DNA, 25 bp, Homo sapien
aggcaagaagcccaccagctcagtg

SEQ ID NO: 1678508 - DNA, 25 bp, Homo sapien
caccagctcagtgggatgcacgttg

SEQ ID NO: 1678509 - DNA, 25 bp, Homo sapien
cagctcagtgggatgcacgttgtgt

SEQ ID NO: 1678510 - DNA, 25 bp, Homo sapien
tttaagtacagaaaactcagcagtg

SEQ ID NO: 1678511 - DNA, 25 bp, Homo sapien
taagtacagaaaactcagcagtgta

SEQ ID NO: 1678512 - DNA, 25 bp, Homo sapien
tttttaagtacagaaaactcagcag

SEQ ID NO: 1678513 - DNA, 25 bp, Homo sapien
tatttttaagtacagaaaactcagc

SEQ ID NO: 1678514 - DNA, 25 bp, Homo sapien
gagtacctggtatagacacacacca

SEQ ID NO: 1678515 - DNA, 25 bp, Homo sapien
ccttcgatgctgagtacctggtata

SEQ ID NO: 1678516 - DNA, 25 bp, Homo sapien
gctgagtacctggtatagacacaca

SEQ ID NO: 1678517 - DNA, 25 bp, Homo sapien
gatgctgagtacctggtatagacac

SEQ ID NO: 1678518 - DNA, 25 bp, Homo sapien
tctgggaagaaatgcgagagcacct

SEQ ID NO: 1678519 - DNA, 25 bp, Homo sapien
gatgcttgcccaggacagataaggg

SEQ ID NO: 1678520 - DNA, 25 bp, Homo sapien
attaaggaaacctcaggatgcttgc

SEQ ID NO: 1678521 - DNA, 25 bp, Homo sapien
tcttcccttctgaacagctctcagg

SEQ ID NO: 1678522 - DNA, 25 bp, Homo sapien
tgctatataccatttgcatatttca

SEQ ID NO: 1678523 - DNA, 25 bp, Homo sapien
atgctatataccatttgcatatttc

SEQ ID NO: 1678524 - DNA, 25 bp, Homo sapien
gctatataccatttgcatatttcaa

SEQ ID NO: 1678525 - DNA, 25 bp, Homo sapien
tgagcagacatggaagaaaaggtta

SEQ ID NO: 1678526 - DNA, 25 bp, Homo sapien
ctgagcagacatggaagaaaaggtt

SEQ ID NO: 1678527 - DNA, 25 bp, Homo sapien
gagcagacatggaagaaaaggttat

SEQ ID NO: 1678528 - DNA, 25 bp, Homo sapien
tcttcatgatatctatgtgtttgtc

SEQ ID NO: 1678529 - DNA, 25 bp, Homo sapien
tcatgatatctatgtgtttgtcttc

SEQ ID NO: 1678530 - DNA, 25 bp, Homo sapien
catgatatctatgtgtttgtcttct

SEQ ID NO: 1678531 - DNA, 25 bp, Homo sapien
tcttgatcacattcccttgtcatga

SEQ ID NO: 1678532 - DNA, 25 bp, Homo sapien
tctgagaaggctgccgagctcctag

SEQ ID NO: 1678533 - DNA, 25 bp, Homo sapien
tctctgtcgactgtgcttctgagaa

SEQ ID NO: 1678534 - DNA, 25 bp, Homo sapien
cagactggcccagtggacgatgcga

SEQ ID NO: 1678535 - DNA, 25 bp, Homo sapien
ctagcacggcgagggcccttttaga

SEQ ID NO: 1678536 - DNA, 25 bp, Homo sapien
ggcacacttgataactgaggtaaaa

SEQ ID NO: 1678537 - DNA, 25 bp, Homo sapien
tcagaaaccattagctcttgagaac

SEQ ID NO: 1678538 - DNA, 25 bp, Homo sapien
taaaagtttgaacgggcacacttga

SEQ ID NO: 1678539 - DNA, 25 bp, Homo sapien
ctggatgatggatcagggttgttga

SEQ ID NO: 1678540 - DNA, 25 bp, Homo sapien
agccctgggcagttttgacaaacag

SEQ ID NO: 1678541 - DNA, 25 bp, Homo sapien
aaagtatgctagaaatcaccccagc

SEQ ID NO: 1678542 - DNA, 25 bp, Homo sapien
ccctgggcagttttgacaaacagag

SEQ ID NO: 1678543 - DNA, 25 bp, Homo sapien
gcgctaaaggctactatagttttaa

SEQ ID NO: 1678544 - DNA, 25 bp, Homo sapien
cacatccgtatcatgggtgaaaagc

SEQ ID NO: 1678545 - DNA, 25 bp, Homo sapien
tatcatgggtgaaaagccagagtgg

SEQ ID NO: 1678546 - DNA, 25 bp, Homo sapien
tccgtatcatgggtgaaaagccaga

SEQ ID NO: 1678547 - DNA, 25 bp, Homo sapien
ccaccacatccgtatcatgggtgaa

SEQ ID NO: 1678548 - DNA, 25 bp, Homo sapien
agagatgctgtgcctccggtgctca

SEQ ID NO: 1678549 - DNA, 25 bp, Homo sapien
gagatgctgtgcctccggtgctcac

SEQ ID NO: 1678550 - DNA, 25 bp, Homo sapien
gagagatgctgtgcctccggtgctc

SEQ ID NO: 1678551 - DNA, 25 bp, Homo sapien
gcctggccagcgctccgaagtggtg

SEQ ID NO: 1678552 - DNA, 25 bp, Homo sapien
tgacacttccccatggcgcctggcc

SEQ ID NO: 1678553 - DNA, 25 bp, Homo sapien
gcgctccgaagtggtgaggtgcaca

SEQ ID NO: 1678554 - DNA, 25 bp, Homo sapien
gtcctgacacttccccatggcgcct

SEQ ID NO: 1678555 - DNA, 25 bp, Homo sapien
tttggtgttttggaccacagcttct

SEQ ID NO: 1678556 - DNA, 25 bp, Homo sapien
tgaatttggtgttttggaccacagc

SEQ ID NO: 1678557 - DNA, 25 bp, Homo sapien
ccagctctgaacctcttgctgctag

SEQ ID NO: 1678558 - DNA, 25 bp, Homo sapien
ctaggtcatgctaaattttgctaaa

SEQ ID NO: 1678559 - DNA, 25 bp, Homo sapien
gcctctggttcggagcatgaaggat

SEQ ID NO: 1678560 - DNA, 25 bp, Homo sapien
ctctggttcggagcatgaaggatga

SEQ ID NO: 1678561 - DNA, 25 bp, Homo sapien
caacaggcctctggttcggagcatg

SEQ ID NO: 1678562 - DNA, 25 bp, Homo sapien
caggcctctggttcggagcatgaag

SEQ ID NO: 1678563 - DNA, 25 bp, Homo sapien
tccatgtacacaggattttgattca

SEQ ID NO: 1678564 - DNA, 25 bp, Homo sapien
tgttccatgtacacaggattttgat

SEQ ID NO: 1678565 - DNA, 25 bp, Homo sapien
ctggttgttccatgtacacaggatt

SEQ ID NO: 1678566 - DNA, 25 bp, Homo sapien
gttgttccatgtacacaggattttg

SEQ ID NO: 1678567 - DNA, 25 bp, Homo sapien
tttccatatcggtatgatactgtac

SEQ ID NO: 1678568 - DNA, 25 bp, Homo sapien
tcatattttagagtaaagaagtaaa

SEQ ID NO: 1678569 - DNA, 25 bp, Homo sapien
ggtatgatactgtacattgaatttg

SEQ ID NO: 1678570 - DNA, 25 bp, Homo sapien
aattatttccatatcggtatgatac

SEQ ID NO: 1678571 - DNA, 25 bp, Homo sapien
ttagccacaccaaatgggcctctga

SEQ ID NO: 1678572 - DNA, 25 bp, Homo sapien
tctgttggatgcatccttagccaca

SEQ ID NO: 1678573 - DNA, 25 bp, Homo sapien
gggcctctgaataggcccagaaaac

SEQ ID NO: 1678574 - DNA, 25 bp, Homo sapien
ctgtcgaagcgtctctggctagaag

SEQ ID NO: 1678575 - DNA, 25 bp, Homo sapien
ctgaaatcaaagcatagtggttggg

SEQ ID NO: 1678576 - DNA, 25 bp, Homo sapien
taggatagagtagcctgagggattt

SEQ ID NO: 1678577 - DNA, 25 bp, Homo sapien
ctctaggccctggagatcttgacag

SEQ ID NO: 1678578 - DNA, 25 bp, Homo sapien
ttaaatagatacggctatgagctga

SEQ ID NO: 1678579 - DNA, 25 bp, Homo sapien
gggaaagagaagaggcacccaatgt

SEQ ID NO: 1678580 - DNA, 25 bp, Homo sapien
aaagagaagaggcacccaatgtatg

SEQ ID NO: 1678581 - DNA, 25 bp, Homo sapien
ggaaagagaagaggcacccaatgta

SEQ ID NO: 1678582 - DNA, 25 bp, Homo sapien
agagaagaggcacccaatgtatgtt

SEQ ID NO: 1678583 - DNA, 25 bp, Homo sapien
gaaaatgtatcacctttcggcggga

SEQ ID NO: 1678584 - DNA, 25 bp, Homo sapien
aataatggttagatgccatgaagta

SEQ ID NO: 1678585 - DNA, 25 bp, Homo sapien
caaagggaatgccaaccttctctcc

SEQ ID NO: 1678586 - DNA, 25 bp, Homo sapien
ggcaatgccttaactaaatgcttgt

SEQ ID NO: 1678587 - DNA, 25 bp, Homo sapien
cttaactaaatgcttgttgtcaggc

SEQ ID NO: 1678588 - DNA, 25 bp, Homo sapien
gatgtgaaccagcaaagttctttcc

SEQ ID NO: 1678589 - DNA, 25 bp, Homo sapien
tatcacaggacttttatgtgtttgc

SEQ ID NO: 1678590 - DNA, 25 bp, Homo sapien
tttgcatgatgtgaaccagcaaagt

SEQ ID NO: 1678591 - DNA, 25 bp, Homo sapien
tcacaggacttttatgtgtttgcat

SEQ ID NO: 1678592 - DNA, 25 bp, Homo sapien
gatgtgattggttctctggaagtca

SEQ ID NO: 1678593 - DNA, 25 bp, Homo sapien
tgtggaatggaagtccctggctttc

SEQ ID NO: 1678594 - DNA, 25 bp, Homo sapien
gcttgtgctcataagcagtctgtgg

SEQ ID NO: 1678595 - DNA, 25 bp, Homo sapien
caaataactctttcacgctgctgct

SEQ ID NO: 1678596 - DNA, 25 bp, Homo sapien
ttctttggcaggcattcaaggcttc

SEQ ID NO: 1678597 - DNA, 25 bp, Homo sapien
gcattgttccaacattattcccact

SEQ ID NO: 1678598 - DNA, 25 bp, Homo sapien
acctgcctttccagcattgttccaa

SEQ ID NO: 1678599 - DNA, 25 bp, Homo sapien
ggcttctgtgatctgccatcacctg

SEQ ID NO: 1678600 - DNA, 25 bp, Homo sapien
gcttttgtcagaagccctctgactg

SEQ ID NO: 1678601 - DNA, 25 bp, Homo sapien
ctagatgcggcagggcatgagacgg

SEQ ID NO: 1678602 - DNA, 25 bp, Homo sapien
gcagggcatgagacggcaggaccag

SEQ ID NO: 1678603 - DNA, 25 bp, Homo sapien
agaagctgccccgaagtgcttttgt

SEQ ID NO: 1678604 - DNA, 25 bp, Homo sapien
aggagcgtgtgcagtgctgagcatg

SEQ ID NO: 1678605 - DNA, 25 bp, Homo sapien
tcattcaccctggtgcgtggtattc

SEQ ID NO: 1678606 - DNA, 25 bp, Homo sapien
caatcagctgaggagcgtgtgcagt

SEQ ID NO: 1678607 - DNA, 25 bp, Homo sapien
caccctggtgcgtggtattccatag

SEQ ID NO: 1678608 - DNA, 25 bp, Homo sapien
tggctcaccgcaatctctgccaccc

SEQ ID NO: 1678609 - DNA, 25 bp, Homo sapien
cggagttttgctctcgttgcctagg

SEQ ID NO: 1678610 - DNA, 25 bp, Homo sapien
caggtgtgcgtcaccacacttggct

SEQ ID NO: 1678611 - DNA, 25 bp, Homo sapien
acggagttttgctctcgttgcctag

SEQ ID NO: 1678612 - DNA, 25 bp, Homo sapien
gattttcttctttggcgactcagct

SEQ ID NO: 1678613 - DNA, 25 bp, Homo sapien
ttctttggcgactcagctattttct

SEQ ID NO: 1678614 - DNA, 25 bp, Homo sapien
aggtatgtgatcctctttgcttggg

SEQ ID NO: 1678615 - DNA, 25 bp, Homo sapien
tatgtgatcctctttgcttgggtga

SEQ ID NO: 1678616 - DNA, 25 bp, Homo sapien
gaaggggaactaacagaagaatgtg

SEQ ID NO: 1678617 - DNA, 25 bp, Homo sapien
gggaactaacagaagaatgtgtctg

SEQ ID NO: 1678618 - DNA, 25 bp, Homo sapien
aggggaactaacagaagaatgtgtc

SEQ ID NO: 1678619 - DNA, 25 bp, Homo sapien
ggaactaacagaagaatgtgtctgt

SEQ ID NO: 1678620 - DNA, 25 bp, Homo sapien
caggcactaggagccttcttcaaga

SEQ ID NO: 1678621 - DNA, 25 bp, Homo sapien
gttatggctgtcttacccaatacaa

SEQ ID NO: 1678622 - DNA, 25 bp, Homo sapien
ggtgcacctatgctggttttgccat

SEQ ID NO: 1678623 - DNA, 25 bp, Homo sapien
aaatgaggaagctattacaggcact

SEQ ID NO: 1678624 - DNA, 25 bp, Homo sapien
ctgtgtaccccatgttccttattaa

SEQ ID NO: 1678625 - DNA, 25 bp, Homo sapien
cacgcaaggtgttgccataaatcat

SEQ ID NO: 1678626 - DNA, 25 bp, Homo sapien
aacgggaagaactgtgtaccccatg

SEQ ID NO: 1678627 - DNA, 25 bp, Homo sapien
tttatttaatgagcatgactcacgc

SEQ ID NO: 1678628 - DNA, 25 bp, Homo sapien
gccatccccacggaaaactgcccac

SEQ ID NO: 1678629 - DNA, 25 bp, Homo sapien
ccatccccacggaaaactgcccacg

SEQ ID NO: 1678630 - DNA, 25 bp, Homo sapien
catccccacggaaaactgcccacgt

SEQ ID NO: 1678631 - DNA, 25 bp, Homo sapien
tcccgccatccccacggaaaactgc

SEQ ID NO: 1678632 - DNA, 25 bp, Homo sapien
gattgagaaccttctctgtaattgt

SEQ ID NO: 1678633 - DNA, 25 bp, Homo sapien
agaatactggtgattgagaaccttc

SEQ ID NO: 1678634 - DNA, 25 bp, Homo sapien
ttgagaaccttctctgtaattgtag

SEQ ID NO: 1678635 - DNA, 25 bp, Homo sapien
ttccagaatactggtgattgagaac

SEQ ID NO: 1678636 - DNA, 25 bp, Homo sapien
cttatttgaatctaacattgcgctg

SEQ ID NO: 1678637 - DNA, 25 bp, Homo sapien
gaatctaacattgcgctgaacccag

SEQ ID NO: 1678638 - DNA, 25 bp, Homo sapien
taacattgcgctgaacccagctcca

SEQ ID NO: 1678639 - DNA, 25 bp, Homo sapien
catttcgctgctgcatttgtgaagt

SEQ ID NO: 1678640 - DNA, 25 bp, Homo sapien
cgcccttcaacacttctctgatggg

SEQ ID NO: 1678641 - DNA, 25 bp, Homo sapien
ttcccactgtcttggaggagcgatg

SEQ ID NO: 1678642 - DNA, 25 bp, Homo sapien
acacttctctgatgggcactttccc

SEQ ID NO: 1678643 - DNA, 25 bp, Homo sapien
ccccttatgatgtttgtagttggcc

SEQ ID NO: 1678644 - DNA, 25 bp, Homo sapien
gaagtgtgtacggagaagagttcct

SEQ ID NO: 1678645 - DNA, 25 bp, Homo sapien
cgacgtcacagaagtgtgtacggag

SEQ ID NO: 1678646 - DNA, 25 bp, Homo sapien
agttcctgccagctcaagtattgtc

SEQ ID NO: 1678647 - DNA, 25 bp, Homo sapien
caagtattgtctcctctgatcagag

SEQ ID NO: 1678648 - DNA, 25 bp, Homo sapien
gcagaccgatccagagagaagtatc

SEQ ID NO: 1678649 - DNA, 25 bp, Homo sapien
tgcaggtggcatggttttagcagac

SEQ ID NO: 1678650 - DNA, 25 bp, Homo sapien
gagaagtatctgcattacagttaga

SEQ ID NO: 1678651 - DNA, 25 bp, Homo sapien
gtggcatggttttagcagaccgatc

SEQ ID NO: 1678652 - DNA, 25 bp, Homo sapien
ccaatgtagttgctaataattgtca

SEQ ID NO: 1678653 - DNA, 25 bp, Homo sapien
tgcaccccacatctacagagggtcc

SEQ ID NO: 1678654 - DNA, 25 bp, Homo sapien
cactgttgacgccagcattgcattt

SEQ ID NO: 1678655 - DNA, 25 bp, Homo sapien
tacagagggtccactgttgacgcca

SEQ ID NO: 1678656 - DNA, 25 bp, Homo sapien
gcccgtcggaagcagattatgaagg

SEQ ID NO: 1678657 - DNA, 25 bp, Homo sapien
caaagtggacctgagaacgagcccg

SEQ ID NO: 1678658 - DNA, 25 bp, Homo sapien
gagaacgagcccgtcggaagcagat

SEQ ID NO: 1678659 - DNA, 25 bp, Homo sapien
gaaggggcctatgttttgaatatgc

SEQ ID NO: 1678660 - DNA, 25 bp, Homo sapien
tcatatctctggcaatgggcattca

SEQ ID NO: 1678661 - DNA, 25 bp, Homo sapien
atctctggcaatgggcattcaggcc

SEQ ID NO: 1678662 - DNA, 25 bp, Homo sapien
tcaaattgctgtcctccaacaaggc

SEQ ID NO: 1678663 - DNA, 25 bp, Homo sapien
gatcatatgtgtctgctctgccttt

SEQ ID NO: 1678664 - DNA, 25 bp, Homo sapien
taaaaacgtagccagtgtgtggtgt

SEQ ID NO: 1678665 - DNA, 25 bp, Homo sapien
gagtttgggtaaatgctggggccat

SEQ ID NO: 1678666 - DNA, 25 bp, Homo sapien
gccattctgggatgctgtagggtga

SEQ ID NO: 1678667 - DNA, 25 bp, Homo sapien
tgtggctggcactgatcctgagagt

SEQ ID NO: 1678668 - DNA, 25 bp, Homo sapien
tgcatcccaaaccaagcacatcatg

SEQ ID NO: 1678669 - DNA, 25 bp, Homo sapien
gcgtttccagtgtgatgcatcccaa

SEQ ID NO: 1678670 - DNA, 25 bp, Homo sapien
tgtgcagtctctccgaccagaaacc

SEQ ID NO: 1678671 - DNA, 25 bp, Homo sapien
tcctgaggttccgtgggcgtttcca

SEQ ID NO: 1678672 - DNA, 25 bp, Homo sapien
tgtcaccatcgtcttgcagatcagc

SEQ ID NO: 1678673 - DNA, 25 bp, Homo sapien
tcactgtcaccatcgtcttgcagat

SEQ ID NO: 1678674 - DNA, 25 bp, Homo sapien
actgtcaccatcgtcttgcagatca

SEQ ID NO: 1678675 - DNA, 25 bp, Homo sapien
gtcactgtcaccatcgtcttgcaga

SEQ ID NO: 1678676 - DNA, 25 bp, Homo sapien
ctggggatgcataagatgaaaatac

SEQ ID NO: 1678677 - DNA, 25 bp, Homo sapien
gggatgcataagatgaaaatacacg

SEQ ID NO: 1678678 - DNA, 25 bp, Homo sapien
ggggatgcataagatgaaaatacac

SEQ ID NO: 1678679 - DNA, 25 bp, Homo sapien
gaactggggatgcataagatgaaaa

SEQ ID NO: 1678680 - DNA, 25 bp, Homo sapien
ccatttgttaatgcttcagacaagg

SEQ ID NO: 1678681 - DNA, 25 bp, Homo sapien
agccatttgttaatgcttcagacaa

SEQ ID NO: 1678682 - DNA, 25 bp, Homo sapien
gccatttgttaatgcttcagacaag

SEQ ID NO: 1678683 - DNA, 25 bp, Homo sapien
atcttctttagggatatccttcctc

SEQ ID NO: 1678684 - DNA, 25 bp, Homo sapien
ctgccttgcctggaccattagccct

SEQ ID NO: 1678685 - DNA, 25 bp, Homo sapien
tcttctttagggatatccttcctcc

SEQ ID NO: 1678686 - DNA, 25 bp, Homo sapien
cctggaccattagccctgctctcgg

SEQ ID NO: 1678687 - DNA, 25 bp, Homo sapien
cattgtatccgatctgggttggcca

SEQ ID NO: 1678688 - DNA, 25 bp, Homo sapien
ccgcaccattgtatccgatctgggt

SEQ ID NO: 1678689 - DNA, 25 bp, Homo sapien
ccgatctgggttggccaccggtgtt

SEQ ID NO: 1678690 - DNA, 25 bp, Homo sapien
caatgctgcccatggctaatgtggt

SEQ ID NO: 1678691 - DNA, 25 bp, Homo sapien
aggccccagataggaggagtgctca

SEQ ID NO: 1678692 - DNA, 25 bp, Homo sapien
gggacctgccgcaggctgcccttag

SEQ ID NO: 1678693 - DNA, 25 bp, Homo sapien
tctgcaggctgcgaagtaatcggat

SEQ ID NO: 1678694 - DNA, 25 bp, Homo sapien
ttagccggcgatgccatctgcaggc

SEQ ID NO: 1678695 - DNA, 25 bp, Homo sapien
gagcccgcggctggaagatgcaact

SEQ ID NO: 1678696 - DNA, 25 bp, Homo sapien
aggagcccgcggctggaagatgcaa

SEQ ID NO: 1678697 - DNA, 25 bp, Homo sapien
cccgcggctggaagatgcaactgag

SEQ ID NO: 1678698 - DNA, 25 bp, Homo sapien
ctgtttgggccaggagcccgcggct

SEQ ID NO: 1678699 - DNA, 25 bp, Homo sapien
agctcgctgctcactgaggcggact

SEQ ID NO: 1678700 - DNA, 25 bp, Homo sapien
ccgtcccggtgtgaaagcaaacaca

SEQ ID NO: 1678701 - DNA, 25 bp, Homo sapien
cttgccgtcccggtgtgaaagcaaa

SEQ ID NO: 1678702 - DNA, 25 bp, Homo sapien
actccgcttgccgtcccggtgtgaa

SEQ ID NO: 1678703 - DNA, 25 bp, Homo sapien
tggcgagtgtctgggggcggctggc

SEQ ID NO: 1678704 - DNA, 25 bp, Homo sapien
gcccgggcctggacggtggattaga

SEQ ID NO: 1678705 - DNA, 25 bp, Homo sapien
cgggcctggacggtggattagagat

SEQ ID NO: 1678706 - DNA, 25 bp, Homo sapien
ggcctggacggtggattagagatgg

SEQ ID NO: 1678707 - DNA, 25 bp, Homo sapien
catccccggttcctttggactggcg

SEQ ID NO: 1678708 - DNA, 25 bp, Homo sapien
tgtttgctagaaagacaccctgaga

SEQ ID NO: 1678709 - DNA, 25 bp, Homo sapien
catgcaaatagaatggagccgggca

SEQ ID NO: 1678710 - DNA, 25 bp, Homo sapien
aaattcatctgtaatcgggacccgc

SEQ ID NO: 1678711 - DNA, 25 bp, Homo sapien
aaaatggatcgctttcctcggccca

SEQ ID NO: 1678712 - DNA, 25 bp, Homo sapien
atcggcgccatcacaaagggtcagg

SEQ ID NO: 1678713 - DNA, 25 bp, Homo sapien
gacataatttcatccgagcgctatc

SEQ ID NO: 1678714 - DNA, 25 bp, Homo sapien
ttcatccgagcgctatcggcgccat

SEQ ID NO: 1678715 - DNA, 25 bp, Homo sapien
cgcagctgcggcgaacccgggtcat

SEQ ID NO: 1678716 - DNA, 25 bp, Homo sapien
tccggcgtggaaacctagcaagctt

SEQ ID NO: 1678717 - DNA, 25 bp, Homo sapien
agctttcctgaactgcccgggacgt

SEQ ID NO: 1678718 - DNA, 25 bp, Homo sapien
tgccctgaatcgcaaattttcacgg

SEQ ID NO: 1678719 - DNA, 25 bp, Homo sapien
tggagcccagcgtctgtcggagaat

SEQ ID NO: 1678720 - DNA, 25 bp, Homo sapien
ctgtctttgtcgctgattgatgctc

SEQ ID NO: 1678721 - DNA, 25 bp, Homo sapien
ttgtcgctgattgatgctcctttgt

SEQ ID NO: 1678722 - DNA, 25 bp, Homo sapien
cgttaaatctgtctttgtcgctgat

SEQ ID NO: 1678723 - DNA, 25 bp, Homo sapien
taatacgttaaatctgtctttgtcg

SEQ ID NO: 1678724 - DNA, 25 bp, Homo sapien
gatttagcaaacgtatggacagcca

SEQ ID NO: 1678725 - DNA, 25 bp, Homo sapien
tagggaatctctaaccagtcatggg

SEQ ID NO: 1678726 - DNA, 25 bp, Homo sapien
gactgcgatgctgggctacttagga

SEQ ID NO: 1678727 - DNA, 25 bp, Homo sapien
ttaattagtgcacgggttgggatcc

SEQ ID NO: 1678728 - DNA, 25 bp, Homo sapien
ttccacatccctatagttacctggg

SEQ ID NO: 1678729 - DNA, 25 bp, Homo sapien
tactaaccaccagaatggcaagggc

SEQ ID NO: 1678730 - DNA, 25 bp, Homo sapien
gagtgggcaatggattcagaaggaa

SEQ ID NO: 1678731 - DNA, 25 bp, Homo sapien
gaaggaagcagtaatcttcaaagga

SEQ ID NO: 1678732 - DNA, 25 bp, Homo sapien
aggatggataacatccttcaaaacc

SEQ ID NO: 1678733 - DNA, 25 bp, Homo sapien
catgtcttaagaacgagaaatcact

SEQ ID NO: 1678734 - DNA, 25 bp, Homo sapien
aaacagtaaaggatggataacatcc

SEQ ID NO: 1678735 - DNA, 25 bp, Homo sapien
cgagaaatcacttcattatggttat

SEQ ID NO: 1678736 - DNA, 25 bp, Homo sapien
gatgtccaggctaaggaagactgtg

SEQ ID NO: 1678737 - DNA, 25 bp, Homo sapien
ttctacagtcctagagcatagtggg

SEQ ID NO: 1678738 - DNA, 25 bp, Homo sapien
tttacggcataaagctccaggtagc

SEQ ID NO: 1678739 - DNA, 25 bp, Homo sapien
ccggattaactaaatggatgagcca

SEQ ID NO: 1678740 - DNA, 25 bp, Homo sapien
tcgagtgtccatggattctcggcgc

SEQ ID NO: 1678741 - DNA, 25 bp, Homo sapien
gcataattgctcgagtgtccatgga

SEQ ID NO: 1678742 - DNA, 25 bp, Homo sapien
cttcagcgtggaggcataattgctc

SEQ ID NO: 1678743 - DNA, 25 bp, Homo sapien
gattctcggcgctttgtccctcgct

SEQ ID NO: 1678744 - DNA, 25 bp, Homo sapien
aatacgcgttgagcgggcatcctgg

SEQ ID NO: 1678745 - DNA, 25 bp, Homo sapien
cgttgagcgggcatcctggaccgaa

SEQ ID NO: 1678746 - DNA, 25 bp, Homo sapien
gagcgggcatcctggaccgaactac

SEQ ID NO: 1678747 - DNA, 25 bp, Homo sapien
cttccaatacgcgttgagcgggcat

SEQ ID NO: 1678748 - DNA, 25 bp, Homo sapien
atccatgtttccgtagtgcttagtg

SEQ ID NO: 1678749 - DNA, 25 bp, Homo sapien
gaaacacatccatgtttccgtagtg

SEQ ID NO: 1678750 - DNA, 25 bp, Homo sapien
gattatccaagttgtgcatttgaag

SEQ ID NO: 1678751 - DNA, 25 bp, Homo sapien
ttgattatccaagttgtgcatttga

SEQ ID NO: 1678752 - DNA, 25 bp, Homo sapien
cggttctgaggcaagagtactgaaa

SEQ ID NO: 1678753 - DNA, 25 bp, Homo sapien
cattgcttgggtaaaagggctgtaa

SEQ ID NO: 1678754 - DNA, 25 bp, Homo sapien
taaaaatcgggtcaactcacaagag

SEQ ID NO: 1678755 - DNA, 25 bp, Homo sapien
tcatcccagttacagatctcctaag

SEQ ID NO: 1678756 - DNA, 25 bp, Homo sapien
tcaagttagaggacggcgtgaagcc

SEQ ID NO: 1678757 - DNA, 25 bp, Homo sapien
aataagcagctgaacccattgtttc

SEQ ID NO: 1678758 - DNA, 25 bp, Homo sapien
ggcaattgctccttgcaataagcag

SEQ ID NO: 1678759 - DNA, 25 bp, Homo sapien
tcatttagatattccactgtgtctg

SEQ ID NO: 1678760 - DNA, 25 bp, Homo sapien
gagttcagagcagggtatcatttag

SEQ ID NO: 1678761 - DNA, 25 bp, Homo sapien
aattatatgcgcttcatgggactga

SEQ ID NO: 1678762 - DNA, 25 bp, Homo sapien
tattggaccctggaaagattttgaa

SEQ ID NO: 1678763 - DNA, 25 bp, Homo sapien
gggaatcagtgttcacgtctctgta

SEQ ID NO: 1678764 - DNA, 25 bp, Homo sapien
actttctctggcaacacgattcgca

SEQ ID NO: 1678765 - DNA, 25 bp, Homo sapien
tttgaataggaaggctgatggctgc

SEQ ID NO: 1678766 - DNA, 25 bp, Homo sapien
ctgctgaggtctctctagaggagca

SEQ ID NO: 1678767 - DNA, 25 bp, Homo sapien
tgttcgcaagatgctactgtttctg

SEQ ID NO: 1678768 - DNA, 25 bp, Homo sapien
gatggctgcagcataatgttcgcaa

SEQ ID NO: 1678769 - DNA, 25 bp, Homo sapien
taattggcgcatgcgttcttccgga

SEQ ID NO: 1678770 - DNA, 25 bp, Homo sapien
tcttccggagctggagctaatggca

SEQ ID NO: 1678771 - DNA, 25 bp, Homo sapien
taaggtatagcgtggagttcgtctg

SEQ ID NO: 1678772 - DNA, 25 bp, Homo sapien
gaaacaagctctgcggagagggctt

SEQ ID NO: 1678773 - DNA, 25 bp, Homo sapien
aaagcctgggatccggccctggccg

SEQ ID NO: 1678774 - DNA, 25 bp, Homo sapien
catctctagagagcacccttgacgg

SEQ ID NO: 1678775 - DNA, 25 bp, Homo sapien
gatttgggggtgatccacgacgccc

SEQ ID NO: 1678776 - DNA, 25 bp, Homo sapien
tcaaggcagaaacgcaggccaggct

SEQ ID NO: 1678777 - DNA, 25 bp, Homo sapien
aactaagtagcaaatccaagcagag

SEQ ID NO: 1678778 - DNA, 25 bp, Homo sapien
ctaagtagcaaatccaagcagaggg

SEQ ID NO: 1678779 - DNA, 25 bp, Homo sapien
actaagtagcaaatccaagcagagg

SEQ ID NO: 1678780 - DNA, 25 bp, Homo sapien
taagtagcaaatccaagcagaggga

SEQ ID NO: 1678781 - DNA, 25 bp, Homo sapien
tcggatggatccgagccgggctccc

SEQ ID NO: 1678782 - DNA, 25 bp, Homo sapien
cagtcgcggcaggatagagaccgtg

SEQ ID NO: 1678783 - DNA, 25 bp, Homo sapien
cgccgcgcgaatcggtggttcaagt

SEQ ID NO: 1678784 - DNA, 25 bp, Homo sapien
accgtgggttcgaccagctgaaggc

SEQ ID NO: 1678785 - DNA, 25 bp, Homo sapien
ctctctgcgctctctccttcggtct

SEQ ID NO: 1678786 - DNA, 25 bp, Homo sapien
ctccctctctgcgctctctccttcg

SEQ ID NO: 1678787 - DNA, 25 bp, Homo sapien
ccctctctgcgctctctccttcggt

SEQ ID NO: 1678788 - DNA, 25 bp, Homo sapien
gcagacacattctccctctctgcgc

SEQ ID NO: 1678789 - DNA, 25 bp, Homo sapien
acaactttggccgtggtgggcaagc

SEQ ID NO: 1678790 - DNA, 25 bp, Homo sapien
tactgtactggtctgggctttggcc

SEQ ID NO: 1678791 - DNA, 25 bp, Homo sapien
ggatgaacttgcacccctagaggga

SEQ ID NO: 1678792 - DNA, 25 bp, Homo sapien
tttatgtgaacgatgtgtcacccgc

SEQ ID NO: 1678793 - DNA, 25 bp, Homo sapien
gcatcttcctgtaagcgggttcaac

SEQ ID NO: 1678794 - DNA, 25 bp, Homo sapien
tccctctgagctacaggatcgacgc

SEQ ID NO: 1678795 - DNA, 25 bp, Homo sapien
cagaacgaccgtgggaatccttgcg

SEQ ID NO: 1678796 - DNA, 25 bp, Homo sapien
ttaagaccactgatcccagctgcgg

SEQ ID NO: 1678797 - DNA, 25 bp, Homo sapien
gaacatgggcttttgaagcaattgc

SEQ ID NO: 1678798 - DNA, 25 bp, Homo sapien
gcctgtgcactcctcgtgttatctt

SEQ ID NO: 1678799 - DNA, 25 bp, Homo sapien
ggaaaagaagaacatgggcttttga

SEQ ID NO: 1678800 - DNA, 25 bp, Homo sapien
aagcaattgctggcaactgggcact

SEQ ID NO: 1678801 - DNA, 25 bp, Homo sapien
gggacaaactttccccagcgcagcg

SEQ ID NO: 1678802 - DNA, 25 bp, Homo sapien
caagtacgaggactgcgaggtaagc

SEQ ID NO: 1678803 - DNA, 25 bp, Homo sapien
ttgcaaccagctgcgaaacgcgggt

SEQ ID NO: 1678804 - DNA, 25 bp, Homo sapien
tggtttccctactttgaagctcgtg

SEQ ID NO: 1678805 - DNA, 25 bp, Homo sapien
ctccacttgggtgcgagaccgagag

SEQ ID NO: 1678806 - DNA, 25 bp, Homo sapien
ttcacgccgatccatgaaaatgctt

SEQ ID NO: 1678807 - DNA, 25 bp, Homo sapien
gaccgagaggggcatatccgttcac

SEQ ID NO: 1678808 - DNA, 25 bp, Homo sapien
ccagagagtagctccacttgggtgc

SEQ ID NO: 1678809 - DNA, 25 bp, Homo sapien
ggtactggcgagcaattggactatt

SEQ ID NO: 1678810 - DNA, 25 bp, Homo sapien
ggcggcagattgtggtactggcgag

SEQ ID NO: 1678811 - DNA, 25 bp, Homo sapien
caattggactattgttgatatgcta

SEQ ID NO: 1678812 - DNA, 25 bp, Homo sapien
ttgatatgctaatgaggcgattagg

SEQ ID NO: 1678813 - DNA, 25 bp, Homo sapien
gaaggttttatcagttcgcaggctg

SEQ ID NO: 1678814 - DNA, 25 bp, Homo sapien
gcggagctcgaggaaggttttatca

SEQ ID NO: 1678815 - DNA, 25 bp, Homo sapien
tcgcggcgtagagaggcctttatac

SEQ ID NO: 1678816 - DNA, 25 bp, Homo sapien
gctggagtgcgctctagaagcaagt

SEQ ID NO: 1678817 - DNA, 25 bp, Homo sapien
gacggtatctagacttgcaggcaca

SEQ ID NO: 1678818 - DNA, 25 bp, Homo sapien
taagggattgcaaaccccagcagag

SEQ ID NO: 1678819 - DNA, 25 bp, Homo sapien
aaaaatcctggagtgacttcgccgg

SEQ ID NO: 1678820 - DNA, 25 bp, Homo sapien
caaaagggcagctcggatcgtggta

SEQ ID NO: 1678821 - DNA, 25 bp, Homo sapien
cagtctggacgagtaggtggctccc

SEQ ID NO: 1678822 - DNA, 25 bp, Homo sapien
gaaaactagagcagattaacacagc

SEQ ID NO: 1678823 - DNA, 25 bp, Homo sapien
agcacgcccgcgttagtagcatcac

SEQ ID NO: 1678824 - DNA, 25 bp, Homo sapien
aaaagcccggactgaccagtctgga

SEQ ID NO: 1678825 - DNA, 25 bp, Homo sapien
ggcggggaccagtcgccaggagcgc

SEQ ID NO: 1678826 - DNA, 25 bp, Homo sapien
gggaccagtcgccaggagcgcagag

SEQ ID NO: 1678827 - DNA, 25 bp, Homo sapien
ccggcggggaccagtcgccaggagc

SEQ ID NO: 1678828 - DNA, 25 bp, Homo sapien
gcggggaccagtcgccaggagcgca

SEQ ID NO: 1678829 - DNA, 25 bp, Homo sapien
gggaaaggctctgagcggtgcagca

SEQ ID NO: 1678830 - DNA, 25 bp, Homo sapien
agggaaggacgcaaatctggcagga

SEQ ID NO: 1678831 - DNA, 25 bp, Homo sapien
gaaaggctctgagcggtgcagcagg

SEQ ID NO: 1678832 - DNA, 25 bp, Homo sapien
ggctctgagcggtgcagcaggtgtt

SEQ ID NO: 1678833 - DNA, 25 bp, Homo sapien
gcagctggctctccggaatggttgt

SEQ ID NO: 1678834 - DNA, 25 bp, Homo sapien
ggaacccggagagcggatgaagctg

SEQ ID NO: 1678835 - DNA, 25 bp, Homo sapien
gaacggaggtgggtcgccaagtgca

SEQ ID NO: 1678836 - DNA, 25 bp, Homo sapien
aagtgcagttagtggccttgggcct

SEQ ID NO: 1678837 - DNA, 25 bp, Homo sapien
tttgccctaatccaattggagagtc

SEQ ID NO: 1678838 - DNA, 25 bp, Homo sapien
ctttgagtagcccaattctccttct

SEQ ID NO: 1678839 - DNA, 25 bp, Homo sapien
cctgtggttgctggtaattctcctg

SEQ ID NO: 1678840 - DNA, 25 bp, Homo sapien
ggagagtcatgccactcagtttccc

SEQ ID NO: 1678841 - DNA, 25 bp, Homo sapien
atctttagcttctcggcctctgggc

SEQ ID NO: 1678842 - DNA, 25 bp, Homo sapien
tccagggcatctttagcttctcggc

SEQ ID NO: 1678843 - DNA, 25 bp, Homo sapien
cagggcatctttagcttctcggcct

SEQ ID NO: 1678844 - DNA, 25 bp, Homo sapien
ggcatctttagcttctcggcctctg

SEQ ID NO: 1678845 - DNA, 25 bp, Homo sapien
tgcacctgtcgcctaaggccgagag

SEQ ID NO: 1678846 - DNA, 25 bp, Homo sapien
tgctgcacctgtcgcctaaggccga

SEQ ID NO: 1678847 - DNA, 25 bp, Homo sapien
cctgtcgcctaaggccgagagggcc

SEQ ID NO: 1678848 - DNA, 25 bp, Homo sapien
gcacctgtcgcctaaggccgagagg

SEQ ID NO: 1678849 - DNA, 25 bp, Homo sapien
cagaagtgcaaactcgttccgatag

SEQ ID NO: 1678850 - DNA, 25 bp, Homo sapien
tttatgacagggtgtgataagtggt

SEQ ID NO: 1678851 - DNA, 25 bp, Homo sapien
actcgttccgatagtggttccgcac

SEQ ID NO: 1678852 - DNA, 25 bp, Homo sapien
acagggtgtgataagtggtgatttt

SEQ ID NO: 1678853 - DNA, 25 bp, Homo sapien
tgctacattaggaatggctgcagaa

SEQ ID NO: 1678854 - DNA, 25 bp, Homo sapien
aatggatctgctacattaggaatgg

SEQ ID NO: 1678855 - DNA, 25 bp, Homo sapien
gatctgctacattaggaatggctgc

SEQ ID NO: 1678856 - DNA, 25 bp, Homo sapien
ccaaaatggatctgctacattagga

SEQ ID NO: 1678857 - DNA, 25 bp, Homo sapien
tttgcatacctagggctgagacacg

SEQ ID NO: 1678858 - DNA, 25 bp, Homo sapien
tcaacgccgccaagagatgtcgcga

SEQ ID NO: 1678859 - DNA, 25 bp, Homo sapien
taagttggctaattcgaatgcagag

SEQ ID NO: 1678860 - DNA, 25 bp, Homo sapien
gaatgcagagcggtttgagacgttt

SEQ ID NO: 1678861 - DNA, 25 bp, Homo sapien
gccagagggtcagcggcccagacct

SEQ ID NO: 1678862 - DNA, 25 bp, Homo sapien
cagggacctttacgtacaaatgtag

SEQ ID NO: 1678863 - DNA, 25 bp, Homo sapien
agctgcgtgcagagcagcgagccca

SEQ ID NO: 1678864 - DNA, 25 bp, Homo sapien
tccaggaaaagacatccgagcctct

SEQ ID NO: 1678865 - DNA, 25 bp, Homo sapien
tggcgaaaaccaagggttcactctc

SEQ ID NO: 1678866 - DNA, 25 bp, Homo sapien
gcgaaaaccaagggttcactctctg

SEQ ID NO: 1678867 - DNA, 25 bp, Homo sapien
atggcgaaaaccaagggttcactct

SEQ ID NO: 1678868 - DNA, 25 bp, Homo sapien
cgaaaaccaagggttcactctctgt

SEQ ID NO: 1678869 - DNA, 25 bp, Homo sapien
tgcatagccttgtaaccaactctat

SEQ ID NO: 1678870 - DNA, 25 bp, Homo sapien
gcaagtgagcatttgctagcttcag

SEQ ID NO: 1678871 - DNA, 25 bp, Homo sapien
tgagcacctttttcttgctgcatag

SEQ ID NO: 1678872 - DNA, 25 bp, Homo sapien
tctattataatagaacttgttcctc

SEQ ID NO: 1678873 - DNA, 25 bp, Homo sapien
accctgggcacacctctcaatctcc

SEQ ID NO: 1678874 - DNA, 25 bp, Homo sapien
tgtggaaagaaatcagtcaagctct

SEQ ID NO: 1678875 - DNA, 25 bp, Homo sapien
cacatgttgtggaaaattggctgag

SEQ ID NO: 1678876 - DNA, 25 bp, Homo sapien
aatgcattggtttggcctcagacgt

SEQ ID NO: 1678877 - DNA, 25 bp, Homo sapien
taattcccacaaacagatgctagga

SEQ ID NO: 1678878 - DNA, 25 bp, Homo sapien
cactggagaaaagtgcttgccacag

SEQ ID NO: 1678879 - DNA, 25 bp, Homo sapien
cactgtgaaaggattattacaacca

SEQ ID NO: 1678880 - DNA, 25 bp, Homo sapien
caagtacatatatccaaggtgcaca

SEQ ID NO: 1678881 - DNA, 25 bp, Homo sapien
caaccgaactctctgtccactggag

SEQ ID NO: 1678882 - DNA, 25 bp, Homo sapien
caatataggcaaaataggctcgtgc

SEQ ID NO: 1678883 - DNA, 25 bp, Homo sapien
cctcagtgttcagcgtagggaccca

SEQ ID NO: 1678884 - DNA, 25 bp, Homo sapien
ggagactagctgagcaaaagccacc

SEQ ID NO: 1678885 - DNA, 25 bp, Homo sapien
tcgtgctgtcttggagactagctga

SEQ ID NO: 1678886 - DNA, 25 bp, Homo sapien
ccagtgaaagataactggaatgaac

SEQ ID NO: 1678887 - DNA, 25 bp, Homo sapien
actggaatgaacagctccattactc

SEQ ID NO: 1678888 - DNA, 25 bp, Homo sapien
tcagtccagtgaaagataactggaa

SEQ ID NO: 1678889 - DNA, 25 bp, Homo sapien
ggaatgaacagctccattactctta

SEQ ID NO: 1678890 - DNA, 25 bp, Homo sapien
gggtttgccatgagtctcagcacag

SEQ ID NO: 1678891 - DNA, 25 bp, Homo sapien
aatgctccttggaatgcggtcggcc

SEQ ID NO: 1678892 - DNA, 25 bp, Homo sapien
tcagaggaaatgctccttggaatgc

SEQ ID NO: 1678893 - DNA, 25 bp, Homo sapien
cggctgcacccacgcctgtgaggga

SEQ ID NO: 1678894 - DNA, 25 bp, Homo sapien
gaagagagagcgtaacagcaaggtc

SEQ ID NO: 1678895 - DNA, 25 bp, Homo sapien
gcagaaactagaattcatggtcctc

SEQ ID NO: 1678896 - DNA, 25 bp, Homo sapien
agagcgtaacagcaaggtctgtgca

SEQ ID NO: 1678897 - DNA, 25 bp, Homo sapien
caaatccacctgcagtatggcagaa

SEQ ID NO: 1678898 - DNA, 25 bp, Homo sapien
ttcaggattgcccttagtgttcgtt

SEQ ID NO: 1678899 - DNA, 25 bp, Homo sapien
tcatctgatgttgcctagaccaaaa

SEQ ID NO: 1678900 - DNA, 25 bp, Homo sapien
cgttttcatctgatgttgcctagac

SEQ ID NO: 1678901 - DNA, 25 bp, Homo sapien
gcccttagtgttcgttttcatctga

SEQ ID NO: 1678902 - DNA, 25 bp, Homo sapien
ggagataaggctgtaaacagtacag

SEQ ID NO: 1678903 - DNA, 25 bp, Homo sapien
tgtaaacagtacaggatgcaattca

SEQ ID NO: 1678904 - DNA, 25 bp, Homo sapien
aaacagtacaggatgcaattcaccc

SEQ ID NO: 1678905 - DNA, 25 bp, Homo sapien
taaggctgtaaacagtacaggatgc

SEQ ID NO: 1678906 - DNA, 25 bp, Homo sapien
catgagcgagtggttcacatcagca

SEQ ID NO: 1678907 - DNA, 25 bp, Homo sapien
tcagattgtcgttgaaggagcacac

SEQ ID NO: 1678908 - DNA, 25 bp, Homo sapien
tcagtgcttaccacccatgagcgag

SEQ ID NO: 1678909 - DNA, 25 bp, Homo sapien
gattcaaagctcgaccagaactgga

SEQ ID NO: 1678910 - DNA, 25 bp, Homo sapien
tggcctagtttcttatgctttgagg

SEQ ID NO: 1678911 - DNA, 25 bp, Homo sapien
gcttttaacgttttagcagatgatg

SEQ ID NO: 1678912 - DNA, 25 bp, Homo sapien
cactcacaggcaagaatgtactact

SEQ ID NO: 1678913 - DNA, 25 bp, Homo sapien
tacaatcaatcacctacactcacag

SEQ ID NO: 1678914 - DNA, 25 bp, Homo sapien
tgggagcagctcgaagggaaggaca

SEQ ID NO: 1678915 - DNA, 25 bp, Homo sapien
agcagctcgaagggaaggacatgtc

SEQ ID NO: 1678916 - DNA, 25 bp, Homo sapien
ggagcagctcgaagggaaggacatg

SEQ ID NO: 1678917 - DNA, 25 bp, Homo sapien
gcagctcgaagggaaggacatgtct

SEQ ID NO: 1678918 - DNA, 25 bp, Homo sapien
gggaactcggcttcgtctttggaca

SEQ ID NO: 1678919 - DNA, 25 bp, Homo sapien
ggaactcggcttcgtctttggacac

SEQ ID NO: 1678920 - DNA, 25 bp, Homo sapien
tcagtctttgcggatgaccatgaca

SEQ ID NO: 1678921 - DNA, 25 bp, Homo sapien
gcctggagatccctgtgtagaacag

SEQ ID NO: 1678922 - DNA, 25 bp, Homo sapien
tgtagaacagagactccctctcaga

SEQ ID NO: 1678923 - DNA, 25 bp, Homo sapien
cacagagacgtttgtgaagcagctc

SEQ ID NO: 1678924 - DNA, 25 bp, Homo sapien
attcttgcccacaggtgttgatgac

SEQ ID NO: 1678925 - DNA, 25 bp, Homo sapien
ttgcccacaggtgttgatgacgtac

SEQ ID NO: 1678926 - DNA, 25 bp, Homo sapien
tcaggggaattcttgcccacaggtg

SEQ ID NO: 1678927 - DNA, 25 bp, Homo sapien
tcttgcccacaggtgttgatgacgt

SEQ ID NO: 1678928 - DNA, 25 bp, Homo sapien
tccaagtgcatgtatttggtccttc

SEQ ID NO: 1678929 - DNA, 25 bp, Homo sapien
caagtgcatgtatttggtccttctg

SEQ ID NO: 1678930 - DNA, 25 bp, Homo sapien
gctccaagtgcatgtatttggtcct

SEQ ID NO: 1678931 - DNA, 25 bp, Homo sapien
aagtgcatgtatttggtccttctga

SEQ ID NO: 1678932 - DNA, 25 bp, Homo sapien
caggagagtcagtatcttttgacca

SEQ ID NO: 1678933 - DNA, 25 bp, Homo sapien
aattcccttgtaagggccacatagg

SEQ ID NO: 1678934 - DNA, 25 bp, Homo sapien
tcaagtaaatcaatggcccttaggt

SEQ ID NO: 1678935 - DNA, 25 bp, Homo sapien
gtcacccagaaatgctcatcaggag

SEQ ID NO: 1678936 - DNA, 25 bp, Homo sapien
tgtagattggaaatcaagttccaca

SEQ ID NO: 1678937 - DNA, 25 bp, Homo sapien
tatgtagattggaaatcaagttcca

SEQ ID NO: 1678938 - DNA, 25 bp, Homo sapien
tttatgtagattggaaatcaagttc

SEQ ID NO: 1678939 - DNA, 25 bp, Homo sapien
gactttatgtagattggaaatcaag

SEQ ID NO: 1678940 - DNA, 25 bp, Homo sapien
tcagttcccaggagggtaagattgc

SEQ ID NO: 1678941 - DNA, 25 bp, Homo sapien
cagttcccaggagggtaagattgcc

SEQ ID NO: 1678942 - DNA, 25 bp, Homo sapien
ctcagttcccaggagggtaagattg

SEQ ID NO: 1678943 - DNA, 25 bp, Homo sapien
aatataaaacatccacgcagcccat

SEQ ID NO: 1678944 - DNA, 25 bp, Homo sapien
tcagcgatttaacagaggtaacacg

SEQ ID NO: 1678945 - DNA, 25 bp, Homo sapien
catttgagtaccagcctattggacc

SEQ ID NO: 1678946 - DNA, 25 bp, Homo sapien
gaggtaacacgagaagaccagctcc

SEQ ID NO: 1678947 - DNA, 25 bp, Homo sapien
gaagtgaacgttgttctttcctaca

SEQ ID NO: 1678948 - DNA, 25 bp, Homo sapien
gcccagtaggcccatcatgtaatga

SEQ ID NO: 1678949 - DNA, 25 bp, Homo sapien
gatggaaaaccctcgtgcccagtag

SEQ ID NO: 1678950 - DNA, 25 bp, Homo sapien
taaatgccagacagtaccaagtacc

SEQ ID NO: 1678951 - DNA, 25 bp, Homo sapien
gcctgctcttcgaatttacaactca

SEQ ID NO: 1678952 - DNA, 25 bp, Homo sapien
ttagttgcagggtaacgaacacttg

SEQ ID NO: 1678953 - DNA, 25 bp, Homo sapien
tccagacattgcagacatagaagca

SEQ ID NO: 1678954 - DNA, 25 bp, Homo sapien
ggcctagttctatccctccagacat

SEQ ID NO: 1678955 - DNA, 25 bp, Homo sapien
tagaacctggagttattcctgttga

SEQ ID NO: 1678956 - DNA, 25 bp, Homo sapien
ggtgtgccttgggtattatcttcac

SEQ ID NO: 1678957 - DNA, 25 bp, Homo sapien
cctgttgatttttccgctaacccag

SEQ ID NO: 1678958 - DNA, 25 bp, Homo sapien
ttatcttcacaatcactactttaga

SEQ ID NO: 1678959 - DNA, 25 bp, Homo sapien
ggcgccgagctcatgtattcctcat

SEQ ID NO: 1678960 - DNA, 25 bp, Homo sapien
ctgtgagtccatgccaatcagatta

SEQ ID NO: 1678961 - DNA, 25 bp, Homo sapien
aacgtcagcgacgagttttgtatga

SEQ ID NO: 1678962 - DNA, 25 bp, Homo sapien
gaaagcatgttccattggcgccgag

SEQ ID NO: 1678963 - DNA, 25 bp, Homo sapien
tcttgtcccggccagagtctagtaa

SEQ ID NO: 1678964 - DNA, 25 bp, Homo sapien
tctgcaagtcatcggctctaagacc

SEQ ID NO: 1678965 - DNA, 25 bp, Homo sapien
tatttgcttaaactgcactgccaag

SEQ ID NO: 1678966 - DNA, 25 bp, Homo sapien
gggtgaggtgaccattctgcaagtc

SEQ ID NO: 1678967 - DNA, 25 bp, Homo sapien
ttgcatttggcttgcctgttctcct

SEQ ID NO: 1678968 - DNA, 25 bp, Homo sapien
tgtcccttcagttcacggttctggt

SEQ ID NO: 1678969 - DNA, 25 bp, Homo sapien
cctcttcacttaccactaggttgca

SEQ ID NO: 1678970 - DNA, 25 bp, Homo sapien
aaatcatcctcgtgatggctgaagc

SEQ ID NO: 1678971 - DNA, 25 bp, Homo sapien
aaaagacagtgcttccaagagccca

SEQ ID NO: 1678972 - DNA, 25 bp, Homo sapien
ctaaaaagacagtgcttccaagagc

SEQ ID NO: 1678973 - DNA, 25 bp, Homo sapien
aaagacagtgcttccaagagcccat

SEQ ID NO: 1678974 - DNA, 25 bp, Homo sapien
taaaaagacagtgcttccaagagcc

SEQ ID NO: 1678975 - DNA, 25 bp, Homo sapien
ctcccataactcagtattgtaaaca

SEQ ID NO: 1678976 - DNA, 25 bp, Homo sapien
ctaacagtgaagcattggacagagc

SEQ ID NO: 1678977 - DNA, 25 bp, Homo sapien
ctgctaacagtgaagcattggacag

SEQ ID NO: 1678978 - DNA, 25 bp, Homo sapien
cccataactcagtattgtaaacaaa

SEQ ID NO: 1678979 - DNA, 25 bp, Homo sapien
tcatcaagggtagttttcaatgcat

SEQ ID NO: 1678980 - DNA, 25 bp, Homo sapien
tagcttcatcaagggtagttttcaa

SEQ ID NO: 1678981 - DNA, 25 bp, Homo sapien
ctcatagcaggtagcttcatcaagg

SEQ ID NO: 1678982 - DNA, 25 bp, Homo sapien
tagcaggtagcttcatcaagggtag

SEQ ID NO: 1678983 - DNA, 25 bp, Homo sapien
ccttgtgagagccacgtaggccgtg

SEQ ID NO: 1678984 - DNA, 25 bp, Homo sapien
gtatttagtccgtccaacagcgtgg

SEQ ID NO: 1678985 - DNA, 25 bp, Homo sapien
gatccaggtgcacacagtagacatt

SEQ ID NO: 1678986 - DNA, 25 bp, Homo sapien
cactgtgtaagctaaagggaaccca

SEQ ID NO: 1678987 - DNA, 25 bp, Homo sapien
ttatatggccagtgttccttcggtc

SEQ ID NO: 1678988 - DNA, 25 bp, Homo sapien
tatggccagtgttccttcggtcttt

SEQ ID NO: 1678989 - DNA, 25 bp, Homo sapien
tatatggccagtgttccttcggtct

SEQ ID NO: 1678990 - DNA, 25 bp, Homo sapien
atggccagtgttccttcggtctttt

SEQ ID NO: 1678991 - DNA, 25 bp, Homo sapien
tgcgctcagcctagaaatctttaag

SEQ ID NO: 1678992 - DNA, 25 bp, Homo sapien
tgcgttgcgcttaaaggagaataag

SEQ ID NO: 1678993 - DNA, 25 bp, Homo sapien
gcctggccatgctttagatttttga

SEQ ID NO: 1678994 - DNA, 25 bp, Homo sapien
caaaaggatgggagcttcaacagag

SEQ ID NO: 1678995 - DNA, 25 bp, Homo sapien
taggtaaagacaccgatccctcttc

SEQ ID NO: 1678996 - DNA, 25 bp, Homo sapien
caatgtctccccgtatagtagggtg

SEQ ID NO: 1678997 - DNA, 25 bp, Homo sapien
tctacttccaaaacgacagagttgg

SEQ ID NO: 1678998 - DNA, 25 bp, Homo sapien
tagggtggccagacctgaagagtct

SEQ ID NO: 1678999 - DNA, 25 bp, Homo sapien
ggaagctgcccgttttattcccagc

SEQ ID NO: 1679000 - DNA, 25 bp, Homo sapien
agctgcccgttttattcccagctcc

SEQ ID NO: 1679001 - DNA, 25 bp, Homo sapien
aggaagctgcccgttttattcccag

SEQ ID NO: 1679002 - DNA, 25 bp, Homo sapien
gaagctgcccgttttattcccagct

SEQ ID NO: 1679003 - DNA, 25 bp, Homo sapien
gaggccatccggtccaatccttgag

SEQ ID NO: 1679004 - DNA, 25 bp, Homo sapien
tggtcagggtcctccggcagtgttc

SEQ ID NO: 1679005 - DNA, 25 bp, Homo sapien
gggtgtaaaaatccagctccaatag

SEQ ID NO: 1679006 - DNA, 25 bp, Homo sapien
gagtcccctgattaggatcacagac

SEQ ID NO: 1679007 - DNA, 25 bp, Homo sapien
taaaatttgattttagatctatggc

SEQ ID NO: 1679008 - DNA, 25 bp, Homo sapien
ccattatagcattcctattgggcag

SEQ ID NO: 1679009 - DNA, 25 bp, Homo sapien
ttgattttagatctatggctcccat

SEQ ID NO: 1679010 - DNA, 25 bp, Homo sapien
tatagcattcctattgggcagtgct

SEQ ID NO: 1679011 - DNA, 25 bp, Homo sapien
gacacagagagcacttgctgtcaag

SEQ ID NO: 1679012 - DNA, 25 bp, Homo sapien
ggacacagagagcacttgctgtcaa

SEQ ID NO: 1679013 - DNA, 25 bp, Homo sapien
gggacacagagagcacttgctgtca

SEQ ID NO: 1679014 - DNA, 25 bp, Homo sapien
ttggggctacataaagggcagctgc

SEQ ID NO: 1679015 - DNA, 25 bp, Homo sapien
agacgtcagccgcagcctgagaggt

SEQ ID NO: 1679016 - DNA, 25 bp, Homo sapien
gtcacagctgattggacaacttggg

SEQ ID NO: 1679017 - DNA, 25 bp, Homo sapien
gaacggggatcctcattgtttaata

SEQ ID NO: 1679018 - DNA, 25 bp, Homo sapien
gctttgcttttttaaaccacatgac

SEQ ID NO: 1679019 - DNA, 25 bp, Homo sapien
caagctttgcttttttaaaccacat

SEQ ID NO: 1679020 - DNA, 25 bp, Homo sapien
agctttgcttttttaaaccacatga

SEQ ID NO: 1679021 - DNA, 25 bp, Homo sapien
aagctttgcttttttaaaccacatg

SEQ ID NO: 1679022 - DNA, 25 bp, Homo sapien
tcttctagggaagtgattaatgcca

SEQ ID NO: 1679023 - DNA, 25 bp, Homo sapien
gacaatggttagcaaagataagatc

SEQ ID NO: 1679024 - DNA, 25 bp, Homo sapien
caggccatttaccaccttcctaaga

SEQ ID NO: 1679025 - DNA, 25 bp, Homo sapien
gatcacttgcagattaaactcttcc

SEQ ID NO: 1679026 - DNA, 25 bp, Homo sapien
tgagatctacacaaattgttaagat

SEQ ID NO: 1679027 - DNA, 25 bp, Homo sapien
gcccgggcatagagggaactgagat

SEQ ID NO: 1679028 - DNA, 25 bp, Homo sapien
gaattcaatctgacgccaagctttg

SEQ ID NO: 1679029 - DNA, 25 bp, Homo sapien
tttggagcacaaaggacaaactgct

SEQ ID NO: 1679030 - DNA, 25 bp, Homo sapien
tgatctgtgcgggtaaaccactgtg

SEQ ID NO: 1679031 - DNA, 25 bp, Homo sapien
acttatggacacatgcaagggaaca

SEQ ID NO: 1679032 - DNA, 25 bp, Homo sapien
tgcaagagctgggaggaaaaggata

SEQ ID NO: 1679033 - DNA, 25 bp, Homo sapien
cgtgcaagagctgggaggaaaagga

SEQ ID NO: 1679034 - DNA, 25 bp, Homo sapien
caagagctgggaggaaaaggatata

SEQ ID NO: 1679035 - DNA, 25 bp, Homo sapien
agagctgggaggaaaaggatataga

SEQ ID NO: 1679036 - DNA, 25 bp, Homo sapien
gaatcgattccgtttcatcccgaga

SEQ ID NO: 1679037 - DNA, 25 bp, Homo sapien
tgttggagacgctgggaatcgattc

SEQ ID NO: 1679038 - DNA, 25 bp, Homo sapien
ttaaatccccgtggcaggttgctga

SEQ ID NO: 1679039 - DNA, 25 bp, Homo sapien
caacccacgggatagaaaatagctt

SEQ ID NO: 1679040 - DNA, 25 bp, Homo sapien
gaaattatgaagaggtaacgcattg

SEQ ID NO: 1679041 - DNA, 25 bp, Homo sapien
agaaattatgaagaggtaacgcatt

SEQ ID NO: 1679042 - DNA, 25 bp, Homo sapien
agaggtaacgcattgataaaggcat

SEQ ID NO: 1679043 - DNA, 25 bp, Homo sapien
tatgaagaggtaacgcattgataaa

SEQ ID NO: 1679044 - DNA, 25 bp, Homo sapien
gatgtgcaaacttgagtcagcctca

SEQ ID NO: 1679045 - DNA, 25 bp, Homo sapien
tggagatccctccatagacaacggg

SEQ ID NO: 1679046 - DNA, 25 bp, Homo sapien
gataacgtacttccatgagacctcg

SEQ ID NO: 1679047 - DNA, 25 bp, Homo sapien
tgtaaatagccctgaagagccttgc

SEQ ID NO: 1679048 - DNA, 25 bp, Homo sapien
tagtccgtccaattgcatgagctgg

SEQ ID NO: 1679049 - DNA, 25 bp, Homo sapien
tgtccttggaccactggagcaaatc

SEQ ID NO: 1679050 - DNA, 25 bp, Homo sapien
ggagcaaatcaacagcccgtgggtc

SEQ ID NO: 1679051 - DNA, 25 bp, Homo sapien
cccgtgggtcatgcagaacaaagtt

SEQ ID NO: 1679052 - DNA, 25 bp, Homo sapien
gcatgaaatatggaattgtacgtac

SEQ ID NO: 1679053 - DNA, 25 bp, Homo sapien
tttgcatgaaatatggaattgtacg

SEQ ID NO: 1679054 - DNA, 25 bp, Homo sapien
ttgcatgaaatatggaattgtacgt

SEQ ID NO: 1679055 - DNA, 25 bp, Homo sapien
tgcatgaaatatggaattgtacgta

SEQ ID NO: 1679056 - DNA, 25 bp, Homo sapien
ctggaggagctctcgcctctaattc

SEQ ID NO: 1679057 - DNA, 25 bp, Homo sapien
caggcagttgctctctggaggagct

SEQ ID NO: 1679058 - DNA, 25 bp, Homo sapien
cctctccaggcagttgctctctgga

SEQ ID NO: 1679059 - DNA, 25 bp, Homo sapien
atggaccgcaatggccttcctctcc

SEQ ID NO: 1679060 - DNA, 25 bp, Homo sapien
ctgaaaggcatcccttgcagaatca

SEQ ID NO: 1679061 - DNA, 25 bp, Homo sapien
tgcagaatcagacaggacagaccac

SEQ ID NO: 1679062 - DNA, 25 bp, Homo sapien
gttatcctgaaaggcatcccttgca

SEQ ID NO: 1679063 - DNA, 25 bp, Homo sapien
gaatcagacaggacagaccactgac

SEQ ID NO: 1679064 - DNA, 25 bp, Homo sapien
ggatatcctttctccctgaaccagg

SEQ ID NO: 1679065 - DNA, 25 bp, Homo sapien
caggatatcctttctccctgaacca

SEQ ID NO: 1679066 - DNA, 25 bp, Homo sapien
aggatatcctttctccctgaaccag

SEQ ID NO: 1679067 - DNA, 25 bp, Homo sapien
aatataagggtgtaccggaagtcag

SEQ ID NO: 1679068 - DNA, 25 bp, Homo sapien
agtcagaagttacggctgtcacagc

SEQ ID NO: 1679069 - DNA, 25 bp, Homo sapien
tgacttagagcaatcattacaaagc

SEQ ID NO: 1679070 - DNA, 25 bp, Homo sapien
cagcctgatgctctgtaacgtgggt

SEQ ID NO: 1679071 - DNA, 25 bp, Homo sapien
tctgaggttgagagaatttgacaaa

SEQ ID NO: 1679072 - DNA, 25 bp, Homo sapien
aatcaaagtaggaaacacgatattt

SEQ ID NO: 1679073 - DNA, 25 bp, Homo sapien
atcaaagtaggaaacacgatatttt

SEQ ID NO: 1679074 - DNA, 25 bp, Homo sapien
gatcatgtgatcccttctgaggttg

SEQ ID NO: 1679075 - DNA, 25 bp, Homo sapien
ccaggagtaaccactgtgaaaagca

SEQ ID NO: 1679076 - DNA, 25 bp, Homo sapien
ccagggatgggaatttggaccaagc

SEQ ID NO: 1679077 - DNA, 25 bp, Homo sapien
ggttgtacccatcaaggtcccatgc

SEQ ID NO: 1679078 - DNA, 25 bp, Homo sapien
aggtctcccttaagctgccgctgga

SEQ ID NO: 1679079 - DNA, 25 bp, Homo sapien
gcatgttacaaaggccatcctgtca

SEQ ID NO: 1679080 - DNA, 25 bp, Homo sapien
aagggaatccatacacagcttctaa

SEQ ID NO: 1679081 - DNA, 25 bp, Homo sapien
gggaagggaatccatacacagcttc

SEQ ID NO: 1679082 - DNA, 25 bp, Homo sapien
gatcatgggtgcatgttacaaaggc

SEQ ID NO: 1679083 - DNA, 25 bp, Homo sapien
ctagcaaccccactgggagacaaaa

SEQ ID NO: 1679084 - DNA, 25 bp, Homo sapien
tagcaaccccactgggagacaaaat

SEQ ID NO: 1679085 - DNA, 25 bp, Homo sapien
ttcccttctggtgttaactgcccag

SEQ ID NO: 1679086 - DNA, 25 bp, Homo sapien
ctggtgttaactgcccagctgttaa

SEQ ID NO: 1679087 - DNA, 25 bp, Homo sapien
cagttaaaggtggggcaaggcatat

SEQ ID NO: 1679088 - DNA, 25 bp, Homo sapien
ttaaaggtggggcaaggcatattca

SEQ ID NO: 1679089 - DNA, 25 bp, Homo sapien
tcatcagttaaaggtggggcaaggc

SEQ ID NO: 1679090 - DNA, 25 bp, Homo sapien
catcagttaaaggtggggcaaggca

SEQ ID NO: 1679091 - DNA, 25 bp, Homo sapien
gtatccggcttcttgagtgcttctg

SEQ ID NO: 1679092 - DNA, 25 bp, Homo sapien
tatccggcttcttgagtgcttctga

SEQ ID NO: 1679093 - DNA, 25 bp, Homo sapien
tgtatccggcttcttgagtgcttct

SEQ ID NO: 1679094 - DNA, 25 bp, Homo sapien
ccacctaccttggcctcccaaagtg

SEQ ID NO: 1679095 - DNA, 25 bp, Homo sapien
ggattatagatgtgtccagctaatt

SEQ ID NO: 1679096 - DNA, 25 bp, Homo sapien
cacctaccttggcctcccaaagtgc

SEQ ID NO: 1679097 - DNA, 25 bp, Homo sapien
gggattatagatgtgtccagctaat

SEQ ID NO: 1679098 - DNA, 25 bp, Homo sapien
ggccggtgagttcacagagggcagc

SEQ ID NO: 1679099 - DNA, 25 bp, Homo sapien
agctggtgaagggtcagacgagcag

SEQ ID NO: 1679100 - DNA, 25 bp, Homo sapien
ggcacagtgcgggaagctggtgaag

SEQ ID NO: 1679101 - DNA, 25 bp, Homo sapien
gtcagacgagcagggccggtgagtt

SEQ ID NO: 1679102 - DNA, 25 bp, Homo sapien
caggtgagtttacaaaggctgaggc

SEQ ID NO: 1679103 - DNA, 25 bp, Homo sapien
tcattaatcttccacgagctctgct

SEQ ID NO: 1679104 - DNA, 25 bp, Homo sapien
ttcatcaccctctgcagaatgagtg

SEQ ID NO: 1679105 - DNA, 25 bp, Homo sapien
ggacctactctcaaatccttgccgt

SEQ ID NO: 1679106 - DNA, 25 bp, Homo sapien
agtggctggccctagcagtaggttt

SEQ ID NO: 1679107 - DNA, 25 bp, Homo sapien
cagactgagactagcatgtgatgcc

SEQ ID NO: 1679108 - DNA, 25 bp, Homo sapien
tctgctctgcccactctagttggct

SEQ ID NO: 1679109 - DNA, 25 bp, Homo sapien
cagtaaataattgggcaggcaaagc

SEQ ID NO: 1679110 - DNA, 25 bp, Homo sapien
cttgtgccagttggaacagctgctc

SEQ ID NO: 1679111 - DNA, 25 bp, Homo sapien
gccggggcttgtgccagttggaaca

SEQ ID NO: 1679112 - DNA, 25 bp, Homo sapien
gggcttgtgccagttggaacagctg

SEQ ID NO: 1679113 - DNA, 25 bp, Homo sapien
ctgccggggcttgtgccagttggaa

SEQ ID NO: 1679114 - DNA, 25 bp, Homo sapien
gaatttcgacagcttctccggaggg

SEQ ID NO: 1679115 - DNA, 25 bp, Homo sapien
aatcctcctgtatcctctgcttcgg

SEQ ID NO: 1679116 - DNA, 25 bp, Homo sapien
ctggagatgcggtgcgtccctctct

SEQ ID NO: 1679117 - DNA, 25 bp, Homo sapien
tctgcttcggtgtctcgtccatcct

SEQ ID NO: 1679118 - DNA, 25 bp, Homo sapien
gagcagagtgaaagcaaaaaagcag

SEQ ID NO: 1679119 - DNA, 25 bp, Homo sapien
cagagtgaaagcaaaaaagcagtac

SEQ ID NO: 1679120 - DNA, 25 bp, Homo sapien
gcagagtgaaagcaaaaaagcagta

SEQ ID NO: 1679121 - DNA, 25 bp, Homo sapien
ctgagcagagtgaaagcaaaaaagc

SEQ ID NO: 1679122 - DNA, 25 bp, Homo sapien
cattttctctaaggcgtgattacag

SEQ ID NO: 1679123 - DNA, 25 bp, Homo sapien
aaatacctttcactggaactgttca

SEQ ID NO: 1679124 - DNA, 25 bp, Homo sapien
ctcataactttttggcgggctcaat

SEQ ID NO: 1679125 - DNA, 25 bp, Homo sapien
gcaagggacacttcgcaaaggtgat

SEQ ID NO: 1679126 - DNA, 25 bp, Homo sapien
ttgtgatgtagtgattctgggtcag

SEQ ID NO: 1679127 - DNA, 25 bp, Homo sapien
gatgtagtgattctgggtcaggtaa

SEQ ID NO: 1679128 - DNA, 25 bp, Homo sapien
tgtagtgattctgggtcaggtaatc

SEQ ID NO: 1679129 - DNA, 25 bp, Homo sapien
gtgatgtagtgattctgggtcaggt

SEQ ID NO: 1679130 - DNA, 25 bp, Homo sapien
gatgctgaactatctcccggttggt

SEQ ID NO: 1679131 - DNA, 25 bp, Homo sapien
tatagatagccctaaagagcctttc

SEQ ID NO: 1679132 - DNA, 25 bp, Homo sapien
gacaaagtctctggtaagcgccaca

SEQ ID NO: 1679133 - DNA, 25 bp, Homo sapien
taggcagtgccaaagtagatggtca

SEQ ID NO: 1679134 - DNA, 25 bp, Homo sapien
gaagccattataaagcctggagcaa

SEQ ID NO: 1679135 - DNA, 25 bp, Homo sapien
tcacagacaatatggcacctaaaat

SEQ ID NO: 1679136 - DNA, 25 bp, Homo sapien
gagttctgcacttcatcgcggttgg

SEQ ID NO: 1679137 - DNA, 25 bp, Homo sapien
ggtgttctatcagcaagagttctgc

SEQ ID NO: 1679138 - DNA, 25 bp, Homo sapien
ctaaagagcttgtgcttgtagattc

SEQ ID NO: 1679139 - DNA, 25 bp, Homo sapien
aagagcttgtgcttgtagattcagc

SEQ ID NO: 1679140 - DNA, 25 bp, Homo sapien
aaagagcttgtgcttgtagattcag

SEQ ID NO: 1679141 - DNA, 25 bp, Homo sapien
gagcttgtgcttgtagattcagctt

SEQ ID NO: 1679142 - DNA, 25 bp, Homo sapien
taattcatacggcacactgtctcct

SEQ ID NO: 1679143 - DNA, 25 bp, Homo sapien
tggcggactctgaaggtacatggcc

SEQ ID NO: 1679144 - DNA, 25 bp, Homo sapien
ctcatgtctaattcatacggcacac

SEQ ID NO: 1679145 - DNA, 25 bp, Homo sapien
aggtacatggcctcatgtctaattc

SEQ ID NO: 1679146 - DNA, 25 bp, Homo sapien
gaggtgaggcgtcactcatgtacac

SEQ ID NO: 1679147 - DNA, 25 bp, Homo sapien
tttacaagggacctgtaccattgag

SEQ ID NO: 1679148 - DNA, 25 bp, Homo sapien
tctgcatctggactgacacgggtgc

SEQ ID NO: 1679149 - DNA, 25 bp, Homo sapien
taccattgagatgtatgaggtttcc

SEQ ID NO: 1679150 - DNA, 25 bp, Homo sapien
tgtaggaaaagccaccataactgcc

SEQ ID NO: 1679151 - DNA, 25 bp, Homo sapien
gataactgacagcaccagctttgaa

SEQ ID NO: 1679152 - DNA, 25 bp, Homo sapien
agtcggagagacaagcattgctacc

SEQ ID NO: 1679153 - DNA, 25 bp, Homo sapien
cacagtttggtcctcattttgggag

SEQ ID NO: 1679154 - DNA, 25 bp, Homo sapien
aaattaggcaggctttgtgactccc

SEQ ID NO: 1679155 - DNA, 25 bp, Homo sapien
gagtttgagtactactgtattccag

SEQ ID NO: 1679156 - DNA, 25 bp, Homo sapien
taggcaggctttgtgactcccacct

SEQ ID NO: 1679157 - DNA, 25 bp, Homo sapien
ctgcagtgagtttgagtactactgt

SEQ ID NO: 1679158 - DNA, 25 bp, Homo sapien
ctccactttatagctctgaggtttc

SEQ ID NO: 1679159 - DNA, 25 bp, Homo sapien
gtcactccactttatagctctgagg

SEQ ID NO: 1679160 - DNA, 25 bp, Homo sapien
tccatgtcactccactttatagctc

SEQ ID NO: 1679161 - DNA, 25 bp, Homo sapien
ttatagctctgaggtttccagtcca

SEQ ID NO: 1679162 - DNA, 25 bp, Homo sapien
ccaacaggcagtggcctagaagcat

SEQ ID NO: 1679163 - DNA, 25 bp, Homo sapien
ggcttctccaataactaacagattg

SEQ ID NO: 1679164 - DNA, 25 bp, Homo sapien
gactgtgtcttgaagcctctggctt

SEQ ID NO: 1679165 - DNA, 25 bp, Homo sapien
taacagattggtctaaatatagcag

SEQ ID NO: 1679166 - DNA, 25 bp, Homo sapien
cacacaggacaattgctggttgact

SEQ ID NO: 1679167 - DNA, 25 bp, Homo sapien
acaagaatggtaggaagttgcaacc

SEQ ID NO: 1679168 - DNA, 25 bp, Homo sapien
tacattagaaaccaagaggctgcag

SEQ ID NO: 1679169 - DNA, 25 bp, Homo sapien
gaagggttgggccttgtgtctcaca

SEQ ID NO: 1679170 - DNA, 25 bp, Homo sapien
aatatgattgtgcagtctcagccca

SEQ ID NO: 1679171 - DNA, 25 bp, Homo sapien
tctccgactaactacaactgtgcca

SEQ ID NO: 1679172 - DNA, 25 bp, Homo sapien
gaatactagaggtactctccgacta

SEQ ID NO: 1679173 - DNA, 25 bp, Homo sapien
tgccaatggtacaggattcaaatga

SEQ ID NO: 1679174 - DNA, 25 bp, Homo sapien
gtctccgtttccatagatacaaata

SEQ ID NO: 1679175 - DNA, 25 bp, Homo sapien
tccgtttccatagatacaaatacca

SEQ ID NO: 1679176 - DNA, 25 bp, Homo sapien
taagtctccgtttccatagatacaa

SEQ ID NO: 1679177 - DNA, 25 bp, Homo sapien
tttaagtctccgtttccatagatac

SEQ ID NO: 1679178 - DNA, 25 bp, Homo sapien
aacttgttagcaaacaggcttggtg

SEQ ID NO: 1679179 - DNA, 25 bp, Homo sapien
tgattgagggttctttcgcgatgcc

SEQ ID NO: 1679180 - DNA, 25 bp, Homo sapien
ggtattaagctcaaacttgttagca

SEQ ID NO: 1679181 - DNA, 25 bp, Homo sapien
cattccacagtaagggggtaggtat

SEQ ID NO: 1679182 - DNA, 25 bp, Homo sapien
cagctgggttgtatcgcagtttcac

SEQ ID NO: 1679183 - DNA, 25 bp, Homo sapien
tcacattgagggttaaggctccaac

SEQ ID NO: 1679184 - DNA, 25 bp, Homo sapien
gatacagtagtttcagggcattccc

SEQ ID NO: 1679185 - DNA, 25 bp, Homo sapien
tctggtcaccttagtgggactggcc

SEQ ID NO: 1679186 - DNA, 25 bp, Homo sapien
gaagacatgacatagggaccagcct

SEQ ID NO: 1679187 - DNA, 25 bp, Homo sapien
gagtaatgatacaaagataacagct

SEQ ID NO: 1679188 - DNA, 25 bp, Homo sapien
aatgatacaaagataacagctccaa

SEQ ID NO: 1679189 - DNA, 25 bp, Homo sapien
tgaagagtaatgatacaaagataac

SEQ ID NO: 1679190 - DNA, 25 bp, Homo sapien
tataatttgaagagtaatgatacaa

SEQ ID NO: 1679191 - DNA, 25 bp, Homo sapien
aagggcttgatattcaccacctacg

SEQ ID NO: 1679192 - DNA, 25 bp, Homo sapien
tttagggctgcgtcacagatgtgca

SEQ ID NO: 1679193 - DNA, 25 bp, Homo sapien
aacattgtggataaagcgcttggca

SEQ ID NO: 1679194 - DNA, 25 bp, Homo sapien
acttgcaccgtcttcccatttaggg

SEQ ID NO: 1679195 - DNA, 25 bp, Homo sapien
caattttaaagtcaatcgtggccgc

SEQ ID NO: 1679196 - DNA, 25 bp, Homo sapien
cgtggccgccttatcaacgtgaata

SEQ ID NO: 1679197 - DNA, 25 bp, Homo sapien
tggtcattacatatgccaaagggaa

SEQ ID NO: 1679198 - DNA, 25 bp, Homo sapien
cattttgaggcatgtaaatagccca

SEQ ID NO: 1679199 - DNA, 25 bp, Homo sapien
tgaggatataaatgcatttgagaag

SEQ ID NO: 1679200 - DNA, 25 bp, Homo sapien
tgtgaggatataaatgcatttgaga

SEQ ID NO: 1679201 - DNA, 25 bp, Homo sapien
aggatataaatgcatttgagaagca

SEQ ID NO: 1679202 - DNA, 25 bp, Homo sapien
ctgtgaggatataaatgcatttgag

SEQ ID NO: 1679203 - DNA, 25 bp, Homo sapien
ccactgaacagttgatgctataaga

SEQ ID NO: 1679204 - DNA, 25 bp, Homo sapien
aagatctctcatgcaggccaggtcc

SEQ ID NO: 1679205 - DNA, 25 bp, Homo sapien
gatgctataagatctctcatgcagg

SEQ ID NO: 1679206 - DNA, 25 bp, Homo sapien
cctggattttccaccataaataata

SEQ ID NO: 1679207 - DNA, 25 bp, Homo sapien
tgtaagggcaacgtaacttgagcca

SEQ ID NO: 1679208 - DNA, 25 bp, Homo sapien
gactgtaggtatcttgagaccgctg

SEQ ID NO: 1679209 - DNA, 25 bp, Homo sapien
gagaccgctggagtaactcaatggc

SEQ ID NO: 1679210 - DNA, 25 bp, Homo sapien
gacaaaagcgtgtgctctggttctg

SEQ ID NO: 1679211 - DNA, 25 bp, Homo sapien
ccgtgtataaggaattaagggcact

SEQ ID NO: 1679212 - DNA, 25 bp, Homo sapien
tatgactgagccttttctaaaagga

SEQ ID NO: 1679213 - DNA, 25 bp, Homo sapien
taattcgaccgtgtataaggaatta

SEQ ID NO: 1679214 - DNA, 25 bp, Homo sapien
atatgactgagccttttctaaaagg

SEQ ID NO: 1679215 - DNA, 25 bp, Homo sapien
ttttaacatgataacgtccttacac

SEQ ID NO: 1679216 - DNA, 25 bp, Homo sapien
tgataacgtccttacactagaaaag

SEQ ID NO: 1679217 - DNA, 25 bp, Homo sapien
gtccttacactagaaaagaaatgtc

SEQ ID NO: 1679218 - DNA, 25 bp, Homo sapien
tagattaaatcagactggggcaatg

SEQ ID NO: 1679219 - DNA, 25 bp, Homo sapien
gaaggtcaagggagtaaaatgtgta

SEQ ID NO: 1679220 - DNA, 25 bp, Homo sapien
gaagtgatggtgtttagttatgcaa

SEQ ID NO: 1679221 - DNA, 25 bp, Homo sapien
gacagtaggtattatgaatggcaaa

SEQ ID NO: 1679222 - DNA, 25 bp, Homo sapien
tgttataggactgtggatttccaga

SEQ ID NO: 1679223 - DNA, 25 bp, Homo sapien
agatgtgtctattctggcaggagcc

SEQ ID NO: 1679224 - DNA, 25 bp, Homo sapien
gaacaagctgccttcaggtggaaag

SEQ ID NO: 1679225 - DNA, 25 bp, Homo sapien
gatgctacagttgttgccaccaaag

SEQ ID NO: 1679226 - DNA, 25 bp, Homo sapien
caggagccagagttcactgccaata

SEQ ID NO: 1679227 - DNA, 25 bp, Homo sapien
ctgaaggcaccgagggcaaaaccag

SEQ ID NO: 1679228 - DNA, 25 bp, Homo sapien
gaaggcaccgagggcaaaaccagag

SEQ ID NO: 1679229 - DNA, 25 bp, Homo sapien
aaggcaccgagggcaaaaccagagg

SEQ ID NO: 1679230 - DNA, 25 bp, Homo sapien
tgaaggcaccgagggcaaaaccaga

SEQ ID NO: 1679231 - DNA, 25 bp, Homo sapien
gactgggctgtgaaaatgactgact

SEQ ID NO: 1679232 - DNA, 25 bp, Homo sapien
gaggattttatcacgcagtagcatt

SEQ ID NO: 1679233 - DNA, 25 bp, Homo sapien
tgaaaaacttgctacatcgtccctt

SEQ ID NO: 1679234 - DNA, 25 bp, Homo sapien
tcattttgccgaagttcagtgagga

SEQ ID NO: 1679235 - DNA, 25 bp, Homo sapien
ttacaggaacgtgctgccatgcgcc

SEQ ID NO: 1679236 - DNA, 25 bp, Homo sapien
gtgtgtttaccctcccttgactaga

SEQ ID NO: 1679237 - DNA, 25 bp, Homo sapien
tctcaaagtgctagcgtgaccagaa

SEQ ID NO: 1679238 - DNA, 25 bp, Homo sapien
aaaatgaagctatggaacctcacag

SEQ ID NO: 1679239 - DNA, 25 bp, Homo sapien
cttcctgtaaatcctcctattctct

SEQ ID NO: 1679240 - DNA, 25 bp, Homo sapien
tggattggaactgagcataacttcc

SEQ ID NO: 1679241 - DNA, 25 bp, Homo sapien
tacaggatgtaaaaagccatttaat

SEQ ID NO: 1679242 - DNA, 25 bp, Homo sapien
tccaaatacaggatgtaaaaagcca

SEQ ID NO: 1679243 - DNA, 25 bp, Homo sapien
tagtgtaagcgtacctcattaaggg

SEQ ID NO: 1679244 - DNA, 25 bp, Homo sapien
gcagtgattcagtcttaggttataa

SEQ ID NO: 1679245 - DNA, 25 bp, Homo sapien
tttcattttatgcatggctgtggca

SEQ ID NO: 1679246 - DNA, 25 bp, Homo sapien
ttttatgtgtcctcggccttgaaca

SEQ ID NO: 1679247 - DNA, 25 bp, Homo sapien
cagtctagtggaaatccttgtattc

SEQ ID NO: 1679248 - DNA, 25 bp, Homo sapien
ctgccagctttgtccacgccaaatg

SEQ ID NO: 1679249 - DNA, 25 bp, Homo sapien
tttactttctacgtcatctgccagc

SEQ ID NO: 1679250 - DNA, 25 bp, Homo sapien
tgaaatgctgttgacaaactaattc

SEQ ID NO: 1679251 - DNA, 25 bp, Homo sapien
cagacatatttgtcccttacgcctt

SEQ ID NO: 1679252 - DNA, 25 bp, Homo sapien
gggctggacctcataatcttaaact

SEQ ID NO: 1679253 - DNA, 25 bp, Homo sapien
gctggggctggacctcataatctta

SEQ ID NO: 1679254 - DNA, 25 bp, Homo sapien
catatttgtcccttacgcctttggg

SEQ ID NO: 1679255 - DNA, 25 bp, Homo sapien
gaattatacgtcaggctccagggct

SEQ ID NO: 1679256 - DNA, 25 bp, Homo sapien
tctgcatcggcgctcgaattatacg

SEQ ID NO: 1679257 - DNA, 25 bp, Homo sapien
taagtcgcctgtaacgtggaaacac

SEQ ID NO: 1679258 - DNA, 25 bp, Homo sapien
taaagatgccacatgaggaggttct

SEQ ID NO: 1679259 - DNA, 25 bp, Homo sapien
gtgtacagcgaacccaaagaggacc

SEQ ID NO: 1679260 - DNA, 25 bp, Homo sapien
aggacctgctcgtagcaaccagcga

SEQ ID NO: 1679261 - DNA, 25 bp, Homo sapien
tcgtggtcgccgcaagcctcgggct

SEQ ID NO: 1679262 - DNA, 25 bp, Homo sapien
ctcgggctccgggtgtacagcgaac

SEQ ID NO: 1679263 - DNA, 25 bp, Homo sapien
tgagcatggtgagtgaagtcagcca

SEQ ID NO: 1679264 - DNA, 25 bp, Homo sapien
ccagtgaccacaaaacgactattta

SEQ ID NO: 1679265 - DNA, 25 bp, Homo sapien
aaacgactatttacagctactgctg

SEQ ID NO: 1679266 - DNA, 25 bp, Homo sapien
ttttcatgtcataaatgtgaattgt

SEQ ID NO: 1679267 - DNA, 25 bp, Homo sapien
catcccagatacagatgagtccatc

SEQ ID NO: 1679268 - DNA, 25 bp, Homo sapien
tctttgcatcccagatacagatgag

SEQ ID NO: 1679269 - DNA, 25 bp, Homo sapien
ttgtgagctttaattgacttcaggc

SEQ ID NO: 1679270 - DNA, 25 bp, Homo sapien
tttaattgacttcaggcattcccat

SEQ ID NO: 1679271 - DNA, 25 bp, Homo sapien
caaaagttagtccccaacttgactg

SEQ ID NO: 1679272 - DNA, 25 bp, Homo sapien
ctggcacatcgagaatgccaaaggg

SEQ ID NO: 1679273 - DNA, 25 bp, Homo sapien
aacttgactggcacatcgagaatgc

SEQ ID NO: 1679274 - DNA, 25 bp, Homo sapien
aagttagtccccaacttgactggca

SEQ ID NO: 1679275 - DNA, 25 bp, Homo sapien
ttatctgtaccaaccgacagggcca

SEQ ID NO: 1679276 - DNA, 25 bp, Homo sapien
gggccaacttgccagatgggtgaat

SEQ ID NO: 1679277 - DNA, 25 bp, Homo sapien
ccaacttgccagatgggtgaataga

SEQ ID NO: 1679278 - DNA, 25 bp, Homo sapien
tgtaccaaccgacagggccaacttg

SEQ ID NO: 1679279 - DNA, 25 bp, Homo sapien
ggtgtgatcaccaactaacttttac

SEQ ID NO: 1679280 - DNA, 25 bp, Homo sapien
caggaagctcacttacggtgtgatc

SEQ ID NO: 1679281 - DNA, 25 bp, Homo sapien
aattcacagctatgatgactgcagc

SEQ ID NO: 1679282 - DNA, 25 bp, Homo sapien
gaagacctgctatcttccttacagc

SEQ ID NO: 1679283 - DNA, 25 bp, Homo sapien
tattttttatgaatgctgatcttcc

SEQ ID NO: 1679284 - DNA, 25 bp, Homo sapien
tttttatgaatgctgatcttccttc

SEQ ID NO: 1679285 - DNA, 25 bp, Homo sapien
ttatattttttatgaatgctgatct

SEQ ID NO: 1679286 - DNA, 25 bp, Homo sapien
tttatgaatgctgatcttccttcta

SEQ ID NO: 1679287 - DNA, 25 bp, Homo sapien
taactacatactgctctcctcttgg

SEQ ID NO: 1679288 - DNA, 25 bp, Homo sapien
gcagtgtcaagctgatagatgtcta

SEQ ID NO: 1679289 - DNA, 25 bp, Homo sapien
tggggaccattctactatgtgagca

SEQ ID NO: 1679290 - DNA, 25 bp, Homo sapien
gatggtgccactaatggatgcagtg

SEQ ID NO: 1679291 - DNA, 25 bp, Homo sapien
gttttcatgagctttaaattcgcag

SEQ ID NO: 1679292 - DNA, 25 bp, Homo sapien
cagaggcacactagtgaatcacagt

SEQ ID NO: 1679293 - DNA, 25 bp, Homo sapien
actagtgaatcacagtcaaaaaacc

SEQ ID NO: 1679294 - DNA, 25 bp, Homo sapien
taaattcgcagaggcacactagtga

SEQ ID NO: 1679295 - DNA, 25 bp, Homo sapien
tattaagactagacatatacaccaa

SEQ ID NO: 1679296 - DNA, 25 bp, Homo sapien
tttattaagactagacatatacacc

SEQ ID NO: 1679297 - DNA, 25 bp, Homo sapien
ttattaagactagacatatacacca

SEQ ID NO: 1679298 - DNA, 25 bp, Homo sapien
gacatagaacatgcaaatggatcac

SEQ ID NO: 1679299 - DNA, 25 bp, Homo sapien
tattagtacatctggaatgggcgac

SEQ ID NO: 1679300 - DNA, 25 bp, Homo sapien
taagagtcagataaaaccgggttca

SEQ ID NO: 1679301 - DNA, 25 bp, Homo sapien
taccttgtgtaaatgacagtccaga

SEQ ID NO: 1679302 - DNA, 25 bp, Homo sapien
gctgggcatatagatgaagcaaaac

SEQ ID NO: 1679303 - DNA, 25 bp, Homo sapien
ggatctcggctatctcagctaacca

SEQ ID NO: 1679304 - DNA, 25 bp, Homo sapien
tcatgtaacttgcaggcttaaaacc

SEQ ID NO: 1679305 - DNA, 25 bp, Homo sapien
ctactttaaaataagatgggagagg

SEQ ID NO: 1679306 - DNA, 25 bp, Homo sapien
ccatcactcgatgctgaaacaataa

SEQ ID NO: 1679307 - DNA, 25 bp, Homo sapien
tgaaaccatcactcgatgctgaaac

SEQ ID NO: 1679308 - DNA, 25 bp, Homo sapien
aaccatcactcgatgctgaaacaat

SEQ ID NO: 1679309 - DNA, 25 bp, Homo sapien
gatgaaaccatcactcgatgctgaa

SEQ ID NO: 1679310 - DNA, 25 bp, Homo sapien
atgtctgccactttgtctagccaca

SEQ ID NO: 1679311 - DNA, 25 bp, Homo sapien
atttcacagagtaaagatgggggaa

SEQ ID NO: 1679312 - DNA, 25 bp, Homo sapien
gtctgccactttgtctagccacact

SEQ ID NO: 1679313 - DNA, 25 bp, Homo sapien
tttcacagagtaaagatgggggaac

SEQ ID NO: 1679314 - DNA, 25 bp, Homo sapien
ctgtgtcaccaggctcctttttgcc

SEQ ID NO: 1679315 - DNA, 25 bp, Homo sapien
ctgtcacctgttaaaccgcgtttct

SEQ ID NO: 1679316 - DNA, 25 bp, Homo sapien
ttcttactgtcacctgttaaaccgc

SEQ ID NO: 1679317 - DNA, 25 bp, Homo sapien
cttggttgatatcaggccactttct

SEQ ID NO: 1679318 - DNA, 25 bp, Homo sapien
ttcctcttcttttccaacatttcta

SEQ ID NO: 1679319 - DNA, 25 bp, Homo sapien
tcctcttcttttccaacatttctac

SEQ ID NO: 1679320 - DNA, 25 bp, Homo sapien
agagttctttcaggagacatctgtg

SEQ ID NO: 1679321 - DNA, 25 bp, Homo sapien
agttctttcaggagacatctgtgat

SEQ ID NO: 1679322 - DNA, 25 bp, Homo sapien
aaagagttctttcaggagacatctg

SEQ ID NO: 1679323 - DNA, 25 bp, Homo sapien
gagttctttcaggagacatctgtga

SEQ ID NO: 1679324 - DNA, 25 bp, Homo sapien
tattatatatcaacatgatacataa

SEQ ID NO: 1679325 - DNA, 25 bp, Homo sapien
aaaattacatgacacattaacatat

SEQ ID NO: 1679326 - DNA, 25 bp, Homo sapien
gaaggtgggcatagctatacgagca

SEQ ID NO: 1679327 - DNA, 25 bp, Homo sapien
gcaacaagctggatcaatgcccaga

SEQ ID NO: 1679328 - DNA, 25 bp, Homo sapien
gatggagaacagaccgctggtgcca

SEQ ID NO: 1679329 - DNA, 25 bp, Homo sapien
tggcttatgacaacagatgggatca

SEQ ID NO: 1679330 - DNA, 25 bp, Homo sapien
atgcgccctgcattcagcgggtgga

SEQ ID NO: 1679331 - DNA, 25 bp, Homo sapien
ggcttgagccgccaagtagcagcat

SEQ ID NO: 1679332 - DNA, 25 bp, Homo sapien
cagcatgcgccctgcattcagcggg

SEQ ID NO: 1679333 - DNA, 25 bp, Homo sapien
ttgagccgccaagtagcagcatgcg

SEQ ID NO: 1679334 - DNA, 25 bp, Homo sapien
caagccgcaggaatgactgcgaggt

SEQ ID NO: 1679335 - DNA, 25 bp, Homo sapien
ggctgtctacaagggcgcgcaagcc

SEQ ID NO: 1679336 - DNA, 25 bp, Homo sapien
actgcgaggtgtcgccggaaatgca

SEQ ID NO: 1679337 - DNA, 25 bp, Homo sapien
gaaggccccggctgtctacaagggc

SEQ ID NO: 1679338 - DNA, 25 bp, Homo sapien
tgaccagctctaaaatcagggaatg

SEQ ID NO: 1679339 - DNA, 25 bp, Homo sapien
taaaccctgaacagatgctgaccat

SEQ ID NO: 1679340 - DNA, 25 bp, Homo sapien
ttttaatcacataggcccacgggaa

SEQ ID NO: 1679341 - DNA, 25 bp, Homo sapien
gtgcttagcacctagtaaaccctga

SEQ ID NO: 1679342 - DNA, 25 bp, Homo sapien
cttcactgtaccatgaggataacac

SEQ ID NO: 1679343 - DNA, 25 bp, Homo sapien
cactgtaccatgaggataacactgg

SEQ ID NO: 1679344 - DNA, 25 bp, Homo sapien
ctgtaccatgaggataacactggta

SEQ ID NO: 1679345 - DNA, 25 bp, Homo sapien
aagtctcagtattcttcactgtacc

SEQ ID NO: 1679346 - DNA, 25 bp, Homo sapien
agaggtagttaaaagcacagctctc

SEQ ID NO: 1679347 - DNA, 25 bp, Homo sapien
gctctccagcagtcagaaagaagtg

SEQ ID NO: 1679348 - DNA, 25 bp, Homo sapien
ctccagcagtcagaaagaagtgtgt

SEQ ID NO: 1679349 - DNA, 25 bp, Homo sapien
ctggatcagaggtagttaaaagcac

SEQ ID NO: 1679350 - DNA, 25 bp, Homo sapien
cttctctgtccagacaggagactac

SEQ ID NO: 1679351 - DNA, 25 bp, Homo sapien
tgtccagacaggagactaccccagg

SEQ ID NO: 1679352 - DNA, 25 bp, Homo sapien
ttttctcttctctgtccagacagga

SEQ ID NO: 1679353 - DNA, 25 bp, Homo sapien
tctgtccagacaggagactacccca

SEQ ID NO: 1679354 - DNA, 25 bp, Homo sapien
ctgcttttacatagccaatgatccc

SEQ ID NO: 1679355 - DNA, 25 bp, Homo sapien
cgtagccaaagccaaaccaatgcaa

SEQ ID NO: 1679356 - DNA, 25 bp, Homo sapien
aatgatcccaccagaagcaaccagt

SEQ ID NO: 1679357 - DNA, 25 bp, Homo sapien
gcaaccagtgctgcgtagccaaagc

SEQ ID NO: 1679358 - DNA, 25 bp, Homo sapien
cagtctgtgtaggccagaggtttcc

SEQ ID NO: 1679359 - DNA, 25 bp, Homo sapien
tcctctaataggcagggcacttcca

SEQ ID NO: 1679360 - DNA, 25 bp, Homo sapien
cctctaataggcagggcacttccat

SEQ ID NO: 1679361 - DNA, 25 bp, Homo sapien
tctcctctaataggcagggcacttc

SEQ ID NO: 1679362 - DNA, 25 bp, Homo sapien
ttctctcctctaataggcagggcac

SEQ ID NO: 1679363 - DNA, 25 bp, Homo sapien
caaacgttccttggatcctgagaca

SEQ ID NO: 1679364 - DNA, 25 bp, Homo sapien
ccaggccggctagactgccaaagag

SEQ ID NO: 1679365 - DNA, 25 bp, Homo sapien
agacagctggtaagcacccaggccg

SEQ ID NO: 1679366 - DNA, 25 bp, Homo sapien
acccaaacgttccttggatcctgag

SEQ ID NO: 1679367 - DNA, 25 bp, Homo sapien
aagatcagggagaagacacccaaag

SEQ ID NO: 1679368 - DNA, 25 bp, Homo sapien
taaaggtctggagaagatcagggag

SEQ ID NO: 1679369 - DNA, 25 bp, Homo sapien
taaaaggaggaatacaaatacaaga

SEQ ID NO: 1679370 - DNA, 25 bp, Homo sapien
ggatcctggccagtgtaaaggtctg

SEQ ID NO: 1679371 - DNA, 25 bp, Homo sapien
gagacaagcacatctgaatatcaat

SEQ ID NO: 1679372 - DNA, 25 bp, Homo sapien
gacaagcacatctgaatatcaatgc

SEQ ID NO: 1679373 - DNA, 25 bp, Homo sapien
aggagacaagcacatctgaatatca

SEQ ID NO: 1679374 - DNA, 25 bp, Homo sapien
aagcacatctgaatatcaatgcggg

SEQ ID NO: 1679375 - DNA, 25 bp, Homo sapien
gacagggagcatgggacattcaccc

SEQ ID NO: 1679376 - DNA, 25 bp, Homo sapien
tcccactgggtatctgtcgaagcac

SEQ ID NO: 1679377 - DNA, 25 bp, Homo sapien
tgagtaagaggtgccagaccacatg

SEQ ID NO: 1679378 - DNA, 25 bp, Homo sapien
ggacagtatatgcagaggccctgtg

SEQ ID NO: 1679379 - DNA, 25 bp, Homo sapien
atgccagccaaggtaccagatgtag

SEQ ID NO: 1679380 - DNA, 25 bp, Homo sapien
aatgccagccaaggtaccagatgta

SEQ ID NO: 1679381 - DNA, 25 bp, Homo sapien
cacctggcctacaactaaagttttg

SEQ ID NO: 1679382 - DNA, 25 bp, Homo sapien
gagattttcctgactcagtgtccca

SEQ ID NO: 1679383 - DNA, 25 bp, Homo sapien
gagttcagcagcacaatttcggctc

SEQ ID NO: 1679384 - DNA, 25 bp, Homo sapien
ctggagttcagcagcacaatttcgg

SEQ ID NO: 1679385 - DNA, 25 bp, Homo sapien
tgagctggatcctaacccaactgcc

SEQ ID NO: 1679386 - DNA, 25 bp, Homo sapien
ggtagcatcacaactatgatcagag

SEQ ID NO: 1679387 - DNA, 25 bp, Homo sapien
tgattaatggtagactctccagcgt

SEQ ID NO: 1679388 - DNA, 25 bp, Homo sapien
tgctctagaccttgctccacactga

SEQ ID NO: 1679389 - DNA, 25 bp, Homo sapien
gttgaacatactaactccaactttg

SEQ ID NO: 1679390 - DNA, 25 bp, Homo sapien
tgttgaacatactaactccaacttt

SEQ ID NO: 1679391 - DNA, 25 bp, Homo sapien
ttgaacatactaactccaactttgg

SEQ ID NO: 1679392 - DNA, 25 bp, Homo sapien
ctgaaagctgacacctaacatttta

SEQ ID NO: 1679393 - DNA, 25 bp, Homo sapien
ctctatgagggtcttattaagctct

SEQ ID NO: 1679394 - DNA, 25 bp, Homo sapien
tcttgtgttacatactcgccacctc

SEQ ID NO: 1679395 - DNA, 25 bp, Homo sapien
tcttcatcagtctaagctggaacat

SEQ ID NO: 1679396 - DNA, 25 bp, Homo sapien
atgagacactgtgcccggccggttt

SEQ ID NO: 1679397 - DNA, 25 bp, Homo sapien
ctacaggggcgtgcaaccacacccg

SEQ ID NO: 1679398 - DNA, 25 bp, Homo sapien
gagacactgtgcccggccggttttc

SEQ ID NO: 1679399 - DNA, 25 bp, Homo sapien
gcatgagacactgtgcccggccggt

SEQ ID NO: 1679400 - DNA, 25 bp, Homo sapien
cggtagaagcaagatggcgttggtt

SEQ ID NO: 1679401 - DNA, 25 bp, Homo sapien
gcttggacggtagaagcaagatggc

SEQ ID NO: 1679402 - DNA, 25 bp, Homo sapien
cttcccacagttagttcagcccaca

SEQ ID NO: 1679403 - DNA, 25 bp, Homo sapien
tcagcccacaccagaatgaacaagg

SEQ ID NO: 1679404 - DNA, 25 bp, Homo sapien
ccctgcatcccgggggcggggagtg

SEQ ID NO: 1679405 - DNA, 25 bp, Homo sapien
catcccgggggcggggagtgaggcg

SEQ ID NO: 1679406 - DNA, 25 bp, Homo sapien
gcgccctgcatcccgggggcgggga

SEQ ID NO: 1679407 - DNA, 25 bp, Homo sapien
tgcatcccgggggcggggagtgagg

SEQ ID NO: 1679408 - DNA, 25 bp, Homo sapien
ttggagagaggtgagcggagaatgg

SEQ ID NO: 1679409 - DNA, 25 bp, Homo sapien
aggtgagcggagaatggggacagtg

SEQ ID NO: 1679410 - DNA, 25 bp, Homo sapien
gggcggggcttgagccgcggattac

SEQ ID NO: 1679411 - DNA, 25 bp, Homo sapien
gtgagcggagaatggggacagtggg

SEQ ID NO: 1679412 - DNA, 25 bp, Homo sapien
aaacgcgattgcgtgcgcgctgcgc

SEQ ID NO: 1679413 - DNA, 25 bp, Homo sapien
agccaggtctctccggaaacgcgat

SEQ ID NO: 1679414 - DNA, 25 bp, Homo sapien
agtccactacggagcgcaagccgcg

SEQ ID NO: 1679415 - DNA, 25 bp, Homo sapien
agaaaggcgggacgtcgtggcgcgt

SEQ ID NO: 1679416 - DNA, 25 bp, Homo sapien
cacacggcataaaggcccgctgaat

SEQ ID NO: 1679417 - DNA, 25 bp, Homo sapien
cagacggccgtgaaactcctaaata

SEQ ID NO: 1679418 - DNA, 25 bp, Homo sapien
aaggagaaaagcaccgaccacacgg

SEQ ID NO: 1679419 - DNA, 25 bp, Homo sapien
ggacgaaaagcagacggccgtgaaa

SEQ ID NO: 1679420 - DNA, 25 bp, Homo sapien
tcaggtgctccgagcatccacagcc

SEQ ID NO: 1679421 - DNA, 25 bp, Homo sapien
cacagcctcttttaagacaagcaga

SEQ ID NO: 1679422 - DNA, 25 bp, Homo sapien
ccacagcctcttttaagacaagcag

SEQ ID NO: 1679423 - DNA, 25 bp, Homo sapien
gtgctccgagcatccacagcctctt

SEQ ID NO: 1679424 - DNA, 25 bp, Homo sapien
ggaaagcaatgcatacgccgtttat

SEQ ID NO: 1679425 - DNA, 25 bp, Homo sapien
gtcagaatcacatgtgacattgcac

SEQ ID NO: 1679426 - DNA, 25 bp, Homo sapien
gacattgcacccttggaaaaacagc

SEQ ID NO: 1679427 - DNA, 25 bp, Homo sapien
ttctgtatgcagtgaacctaacaag

SEQ ID NO: 1679428 - DNA, 25 bp, Homo sapien
tcagtccagaaaggagactacccca

SEQ ID NO: 1679429 - DNA, 25 bp, Homo sapien
tcttctcagtccagaaaggagacta

SEQ ID NO: 1679430 - DNA, 25 bp, Homo sapien
tctcagtccagaaaggagactaccc

SEQ ID NO: 1679431 - DNA, 25 bp, Homo sapien
tcttctcttctcagtccagaaagga

SEQ ID NO: 1679432 - DNA, 25 bp, Homo sapien
ctgtttttacatagccaacgatccc

SEQ ID NO: 1679433 - DNA, 25 bp, Homo sapien
ccagaaacaaccagtgctgtgtagc

SEQ ID NO: 1679434 - DNA, 25 bp, Homo sapien
tagccaaagccaaaccaatgcaaag

SEQ ID NO: 1679435 - DNA, 25 bp, Homo sapien
atagccaacgatcccaccagaaaca

SEQ ID NO: 1679436 - DNA, 25 bp, Homo sapien
cccaggccggctagactgccgaaga

SEQ ID NO: 1679437 - DNA, 25 bp, Homo sapien
tacagctggtaagcacccaggccgg

SEQ ID NO: 1679438 - DNA, 25 bp, Homo sapien
cgttccttggatcctgatacagctg

SEQ ID NO: 1679439 - DNA, 25 bp, Homo sapien
cccaaacgttccttggatcctgata

SEQ ID NO: 1679440 - DNA, 25 bp, Homo sapien
tgtccgtgctgctcacagggtacct

SEQ ID NO: 1679441 - DNA, 25 bp, Homo sapien
gctcacagggtacctttccagtcct

SEQ ID NO: 1679442 - DNA, 25 bp, Homo sapien
cgtgctgctcacagggtacctttcc

SEQ ID NO: 1679443 - DNA, 25 bp, Homo sapien
actgtccgtgctgctcacagggtac

SEQ ID NO: 1679444 - DNA, 25 bp, Homo sapien
ttttctctacaataggtgtgaggtc

SEQ ID NO: 1679445 - DNA, 25 bp, Homo sapien
tttttctctacaataggtgtgaggt

SEQ ID NO: 1679446 - DNA, 25 bp, Homo sapien
aggagacaagcacatctgaatatca

SEQ ID NO: 1679447 - DNA, 25 bp, Homo sapien
gacaagcacatctgaatatcaatgc

SEQ ID NO: 1679448 - DNA, 25 bp, Homo sapien
gagacaagcacatctgaatatcaat

SEQ ID NO: 1679449 - DNA, 25 bp, Homo sapien
aagcacatctgaatatcaatgcggg

SEQ ID NO: 1679450 - DNA, 25 bp, Homo sapien
accaacaaaagtaacagatgtagcg

SEQ ID NO: 1679451 - DNA, 25 bp, Homo sapien
ccaacaaaagtaacagatgtagcgg

SEQ ID NO: 1679452 - DNA, 25 bp, Homo sapien
ctacaggcatgaattttccatagta

SEQ ID NO: 1679453 - DNA, 25 bp, Homo sapien
aattttccatagtagtaggatctca

SEQ ID NO: 1679454 - DNA, 25 bp, Homo sapien
gcatgaattttccatagtagtagga

SEQ ID NO: 1679455 - DNA, 25 bp, Homo sapien
ggcatgaattttccatagtagtagg

SEQ ID NO: 1679456 - DNA, 25 bp, Homo sapien
cagatgtcatcaacatacgaactcc

SEQ ID NO: 1679457 - DNA, 25 bp, Homo sapien
aatcagatgtcatcaacatacgaac

SEQ ID NO: 1679458 - DNA, 25 bp, Homo sapien
tgtcatcaacatacgaactccaact

SEQ ID NO: 1679459 - DNA, 25 bp, Homo sapien
gatgtcatcaacatacgaactccaa

SEQ ID NO: 1679460 - DNA, 25 bp, Homo sapien
gctcatgttacatgctcaccacctc

SEQ ID NO: 1679461 - DNA, 25 bp, Homo sapien
taagctcatgttacatgctcaccac

SEQ ID NO: 1679462 - DNA, 25 bp, Homo sapien
aataagctcatgttacatgctcacc

SEQ ID NO: 1679463 - DNA, 25 bp, Homo sapien
aagctcatgttacatgctcaccacc

SEQ ID NO: 1679464 - DNA, 25 bp, Homo sapien
gtgggatgactgaacccaagagttt

SEQ ID NO: 1679465 - DNA, 25 bp, Homo sapien
ccaaggagagagaatcgcatgagac

SEQ ID NO: 1679466 - DNA, 25 bp, Homo sapien
agtggccatgctcattaccccagca

SEQ ID NO: 1679467 - DNA, 25 bp, Homo sapien
aggagagagaatcgcatgagaccag

SEQ ID NO: 1679468 - DNA, 25 bp, Homo sapien
ggtcagtgagccaattctagtccat

SEQ ID NO: 1679469 - DNA, 25 bp, Homo sapien
aaattagccgggaagcctctcaggt

SEQ ID NO: 1679470 - DNA, 25 bp, Homo sapien
gctcccggctatcaaaggcattaaa

SEQ ID NO: 1679471 - DNA, 25 bp, Homo sapien
gagaaagtgctcctaaccgaaatta

SEQ ID NO: 1679472 - DNA, 25 bp, Homo sapien
ggttctcttggctggacatcattaa

SEQ ID NO: 1679473 - DNA, 25 bp, Homo sapien
aagatgaagtgtgccagctggttcc

SEQ ID NO: 1679474 - DNA, 25 bp, Homo sapien
caaggtgacaatcaagcccaatggc

SEQ ID NO: 1679475 - DNA, 25 bp, Homo sapien
taaatagacacttcgaactttgggc

SEQ ID NO: 1679476 - DNA, 25 bp, Homo sapien
gaagttagtagcttgtcaggaccac

SEQ ID NO: 1679477 - DNA, 25 bp, Homo sapien
tccaatggctataactaaagggctc

SEQ ID NO: 1679478 - DNA, 25 bp, Homo sapien
tgaaaggacctgtcaaaccatggag

SEQ ID NO: 1679479 - DNA, 25 bp, Homo sapien
taccagtttgacctgtggcccacat

SEQ ID NO: 1679480 - DNA, 25 bp, Homo sapien
gtagagatggggcaggatgatctcg

SEQ ID NO: 1679481 - DNA, 25 bp, Homo sapien
agtagagatggggcaggatgatctc

SEQ ID NO: 1679482 - DNA, 25 bp, Homo sapien
tagtagagatggggcaggatgatct

SEQ ID NO: 1679483 - DNA, 25 bp, Homo sapien
taaatattaatcactctcaagtggt

SEQ ID NO: 1679484 - DNA, 25 bp, Homo sapien
gtcttccagtcatgccagttgggtg

SEQ ID NO: 1679485 - DNA, 25 bp, Homo sapien
tctacagatggtgataggaggaaag

SEQ ID NO: 1679486 - DNA, 25 bp, Homo sapien
ctctcaagtggtcaatgcaaatcct

SEQ ID NO: 1679487 - DNA, 25 bp, Homo sapien
ctctcaatgcaacggcttcaggtag

SEQ ID NO: 1679488 - DNA, 25 bp, Homo sapien
cagaggatccacttagcacctctca

SEQ ID NO: 1679489 - DNA, 25 bp, Homo sapien
gcacctctcaatgcaacggcttcag

SEQ ID NO: 1679490 - DNA, 25 bp, Homo sapien
cacttagcacctctcaatgcaacgg

SEQ ID NO: 1679491 - DNA, 25 bp, Homo sapien
cagagcccagtgtcgagacgtgtaa

SEQ ID NO: 1679492 - DNA, 25 bp, Homo sapien
cgtgagagacaacggacacagagcc

SEQ ID NO: 1679493 - DNA, 25 bp, Homo sapien
tgaagcctgatatgccgtgagagac

SEQ ID NO: 1679494 - DNA, 25 bp, Homo sapien
tagatcttgacatcctagtggccag

SEQ ID NO: 1679495 - DNA, 25 bp, Homo sapien
tttatagaggaaatcaagcaaataa

SEQ ID NO: 1679496 - DNA, 25 bp, Homo sapien
tcttaagcatgaacaaccacttttt

SEQ ID NO: 1679497 - DNA, 25 bp, Homo sapien
tctgtgctggtcttcttaaattaat

SEQ ID NO: 1679498 - DNA, 25 bp, Homo sapien
taattttgcgatctatattcctgga

SEQ ID NO: 1679499 - DNA, 25 bp, Homo sapien
gtaattataactttgtacagtatgt

SEQ ID NO: 1679500 - DNA, 25 bp, Homo sapien
ttttaagcctaagattacatttgga

SEQ ID NO: 1679501 - DNA, 25 bp, Homo sapien
gttaatatccttatggttacaagaa

SEQ ID NO: 1679502 - DNA, 25 bp, Homo sapien
acatattttagagtgaccaatttta

SEQ ID NO: 1679503 - DNA, 25 bp, Homo sapien
tcctgagttcttagtcacgtgtctg

SEQ ID NO: 1679504 - DNA, 25 bp, Homo sapien
gaatatacgctcaaaacaagtgaca

SEQ ID NO: 1679505 - DNA, 25 bp, Homo sapien
cctgctacaccaagggttgggccaa

SEQ ID NO: 1679506 - DNA, 25 bp, Homo sapien
tcacgtgtctgttttccctgctaca

SEQ ID NO: 1679507 - DNA, 25 bp, Homo sapien
ccttagagaactgataatgggtaac

SEQ ID NO: 1679508 - DNA, 25 bp, Homo sapien
gcaaaagctcaactgcctggagaca

SEQ ID NO: 1679509 - DNA, 25 bp, Homo sapien
cgcacccagctggtagttgcctata

SEQ ID NO: 1679510 - DNA, 25 bp, Homo sapien
atccagctcgcggaaagcaaaagct

SEQ ID NO: 1679511 - DNA, 25 bp, Homo sapien
tcattgcaacttccacaacttgggt

SEQ ID NO: 1679512 - DNA, 25 bp, Homo sapien
cagctcattgcaacttccacaactt

SEQ ID NO: 1679513 - DNA, 25 bp, Homo sapien
gctcattgcaacttccacaacttgg

SEQ ID NO: 1679514 - DNA, 25 bp, Homo sapien
cattgcaacttccacaacttgggtt

SEQ ID NO: 1679515 - DNA, 25 bp, Homo sapien
tactgacctgctactactaaccggc

SEQ ID NO: 1679516 - DNA, 25 bp, Homo sapien
taaccggctgtgtacttggagcaag

SEQ ID NO: 1679517 - DNA, 25 bp, Homo sapien
ctgtaacttacgatgggactgcacc

SEQ ID NO: 1679518 - DNA, 25 bp, Homo sapien
tatactacaaggactggcggatctg

SEQ ID NO: 1679519 - DNA, 25 bp, Homo sapien
accatctgttaagctcctgcctaaa

SEQ ID NO: 1679520 - DNA, 25 bp, Homo sapien
caggtaaggattaattcaaatccag

SEQ ID NO: 1679521 - DNA, 25 bp, Homo sapien
ggctgggtttcttgcccaagatcag

SEQ ID NO: 1679522 - DNA, 25 bp, Homo sapien
tcaatggtcttgtacaattctaggc

SEQ ID NO: 1679523 - DNA, 25 bp, Homo sapien
gagacggaatgtcgcttcattgccc

SEQ ID NO: 1679524 - DNA, 25 bp, Homo sapien
gaccactgatgtagtatatgggaga

SEQ ID NO: 1679525 - DNA, 25 bp, Homo sapien
ctatagttaagatcaaggttgtggc

SEQ ID NO: 1679526 - DNA, 25 bp, Homo sapien
taggtactccttcctaatctgtgtg

SEQ ID NO: 1679527 - DNA, 25 bp, Homo sapien
gatatttttgagagcacattcacat

SEQ ID NO: 1679528 - DNA, 25 bp, Homo sapien
agatatttttgagagcacattcaca

SEQ ID NO: 1679529 - DNA, 25 bp, Homo sapien
catgacatagtatggaagtcttcac

SEQ ID NO: 1679530 - DNA, 25 bp, Homo sapien
tacagaaattgggtacagtagtccc

SEQ ID NO: 1679531 - DNA, 25 bp, Homo sapien
cagtagtcccctgaatctgcagttt

SEQ ID NO: 1679532 - DNA, 25 bp, Homo sapien
cctgcagtacggtgcaataagatat

SEQ ID NO: 1679533 - DNA, 25 bp, Homo sapien
cttgtgcatgaaaggcattcagtac

SEQ ID NO: 1679534 - DNA, 25 bp, Homo sapien
tgcccttacatgtatggaacgctcc

SEQ ID NO: 1679535 - DNA, 25 bp, Homo sapien
ctgagtcataaaagtggtaggaggc

SEQ ID NO: 1679536 - DNA, 25 bp, Homo sapien
aggactatgatttcggagcctccca

SEQ ID NO: 1679537 - DNA, 25 bp, Homo sapien
tgccatgcatatgcgagggacgctg

SEQ ID NO: 1679538 - DNA, 25 bp, Homo sapien
catgatgaatagaacgaccgtgaga

SEQ ID NO: 1679539 - DNA, 25 bp, Homo sapien
ccgtgagatcttgggcaggctacta

SEQ ID NO: 1679540 - DNA, 25 bp, Homo sapien
tcagcagtgttcaggatcagtaccc

SEQ ID NO: 1679541 - DNA, 25 bp, Homo sapien
tctaaaccatatgtgcactcgtgcc

SEQ ID NO: 1679542 - DNA, 25 bp, Homo sapien
ttcaccaatgactgataactctcag

SEQ ID NO: 1679543 - DNA, 25 bp, Homo sapien
tgctttccacttagaatgaggttgc

SEQ ID NO: 1679544 - DNA, 25 bp, Homo sapien
gaatatagagcagggcgaatcacct

SEQ ID NO: 1679545 - DNA, 25 bp, Homo sapien
cactgtatagggaatgatggctgct

SEQ ID NO: 1679546 - DNA, 25 bp, Homo sapien
cagggccaaccatagtttatgtgca

SEQ ID NO: 1679547 - DNA, 25 bp, Homo sapien
ctttgaagctcatgtgggctaatga

SEQ ID NO: 1679548 - DNA, 25 bp, Homo sapien
tgataaatgcctcgcacagggccaa

SEQ ID NO: 1679549 - DNA, 25 bp, Homo sapien
tactcaggctgagagtaacccggaa

SEQ ID NO: 1679550 - DNA, 25 bp, Homo sapien
acagctctggttaatcatttcaaat

SEQ ID NO: 1679551 - DNA, 25 bp, Homo sapien
taacccggaattttacatacagctc

SEQ ID NO: 1679552 - DNA, 25 bp, Homo sapien
tgagtgtactctaaaccattattgg

SEQ ID NO: 1679553 - DNA, 25 bp, Homo sapien
tgaagctattcagctcatgaccgaa

SEQ ID NO: 1679554 - DNA, 25 bp, Homo sapien
ttgggatccaaagaaacgaccgaca

SEQ ID NO: 1679555 - DNA, 25 bp, Homo sapien
cagcaagccaggtaagaggagtctt

SEQ ID NO: 1679556 - DNA, 25 bp, Homo sapien
agagtgactggccagaaggatacca

SEQ ID NO: 1679557 - DNA, 25 bp, Homo sapien
tgcccagctgacactgtacagacag

SEQ ID NO: 1679558 - DNA, 25 bp, Homo sapien
caaggatctttgttcacagtcagcc

SEQ ID NO: 1679559 - DNA, 25 bp, Homo sapien
gggttaaggattgcaagaagccaga

SEQ ID NO: 1679560 - DNA, 25 bp, Homo sapien
tgggtaatatacacgacaaggatct

SEQ ID NO: 1679561 - DNA, 25 bp, Homo sapien
tactgcccatccacctttgaaattg

SEQ ID NO: 1679562 - DNA, 25 bp, Homo sapien
ctgacacacagatggaacagggtct

SEQ ID NO: 1679563 - DNA, 25 bp, Homo sapien
cccagggacaagtgaggtcgatgaa

SEQ ID NO: 1679564 - DNA, 25 bp, Homo sapien
tattttcataggtatcgtgcccctg

SEQ ID NO: 1679565 - DNA, 25 bp, Homo sapien
tagcagactttgtgttggactcacc

SEQ ID NO: 1679566 - DNA, 25 bp, Homo sapien
gagggcttgcagtattctcaatgaa

SEQ ID NO: 1679567 - DNA, 25 bp, Homo sapien
gagaattgagagtgtcttccattta

SEQ ID NO: 1679568 - DNA, 25 bp, Homo sapien
ctacagaagaggagtcagttgagga

SEQ ID NO: 1679569 - DNA, 25 bp, Homo sapien
gacttggatacaattttggatacct

SEQ ID NO: 1679570 - DNA, 25 bp, Homo sapien
gtctctgaagaaacttaatcatgcc

SEQ ID NO: 1679571 - DNA, 25 bp, Homo sapien
tacctttgcatggttaagtcagaca

SEQ ID NO: 1679572 - DNA, 25 bp, Homo sapien
taattattacacttagcattgatgc

SEQ ID NO: 1679573 - DNA, 25 bp, Homo sapien
gaagagtccgcctgaaattacatgg

SEQ ID NO: 1679574 - DNA, 25 bp, Homo sapien
cacctccacccatctgtatggagag

SEQ ID NO: 1679575 - DNA, 25 bp, Homo sapien
gatgttcagaacgtgtgtgtgatct

SEQ ID NO: 1679576 - DNA, 25 bp, Homo sapien
ggatgaggaggcaaaccacgccaca

SEQ ID NO: 1679577 - DNA, 25 bp, Homo sapien
catgcagtatctactgtgtgttggg

SEQ ID NO: 1679578 - DNA, 25 bp, Homo sapien
tctgccacatgcagtatctactgtg

SEQ ID NO: 1679579 - DNA, 25 bp, Homo sapien
tgtgtctgccacatgcagtatctac

SEQ ID NO: 1679580 - DNA, 25 bp, Homo sapien
ctactgtgtgttgggcagtgctcca

SEQ ID NO: 1679581 - DNA, 25 bp, Homo sapien
gtgccaccactactgtacttcagct

SEQ ID NO: 1679582 - DNA, 25 bp, Homo sapien
caccactactgtacttcagcttagg

SEQ ID NO: 1679583 - DNA, 25 bp, Homo sapien
ccactactgtacttcagcttaggtg

SEQ ID NO: 1679584 - DNA, 25 bp, Homo sapien
ccaagatagtgccaccactactgta

SEQ ID NO: 1679585 - DNA, 25 bp, Homo sapien
gcctacctgaaagacctcacttaaa

SEQ ID NO: 1679586 - DNA, 25 bp, Homo sapien
ttcagatactgtcacaccgtgaaag

SEQ ID NO: 1679587 - DNA, 25 bp, Homo sapien
ggcatatttgtactggctgttggca

SEQ ID NO: 1679588 - DNA, 25 bp, Homo sapien
cagtcatatcagatttgggcctacc

SEQ ID NO: 1679589 - DNA, 25 bp, Homo sapien
ttcaagacagggttccattctgtcg

SEQ ID NO: 1679590 - DNA, 25 bp, Homo sapien
gaagtgcaacatcaaggtatctgct

SEQ ID NO: 1679591 - DNA, 25 bp, Homo sapien
tgtagacagccatatcctctctagg

SEQ ID NO: 1679592 - DNA, 25 bp, Homo sapien
gatcttctcgttgtgcatgtctgtg

SEQ ID NO: 1679593 - DNA, 25 bp, Homo sapien
taattggccgaagtttcagtcatcc

SEQ ID NO: 1679594 - DNA, 25 bp, Homo sapien
tggctcactcttggtttgctagggc

SEQ ID NO: 1679595 - DNA, 25 bp, Homo sapien
tctgatggcagtcagataattggcc

SEQ ID NO: 1679596 - DNA, 25 bp, Homo sapien
aatttagaagtagcttagctgggta

SEQ ID NO: 1679597 - DNA, 25 bp, Homo sapien
tgggactacaagcgtgccatcaagt

SEQ ID NO: 1679598 - DNA, 25 bp, Homo sapien
ctacaagcgtgccatcaagtccagc

SEQ ID NO: 1679599 - DNA, 25 bp, Homo sapien
gactacaagcgtgccatcaagtcca

SEQ ID NO: 1679600 - DNA, 25 bp, Homo sapien
gggactacaagcgtgccatcaagtc

SEQ ID NO: 1679601 - DNA, 25 bp, Homo sapien
actcgctaccatcattaccatgcaa

SEQ ID NO: 1679602 - DNA, 25 bp, Homo sapien
accatcattaccatgcaaccagagg

SEQ ID NO: 1679603 - DNA, 25 bp, Homo sapien
tcctgaataacactcgctaccatca

SEQ ID NO: 1679604 - DNA, 25 bp, Homo sapien
tcccttctcaagtcatatgtccttt

SEQ ID NO: 1679605 - DNA, 25 bp, Homo sapien
cggcccttcaattcccgaggcttga

SEQ ID NO: 1679606 - DNA, 25 bp, Homo sapien
ccttcaattcccgaggcttgaccgg

SEQ ID NO: 1679607 - DNA, 25 bp, Homo sapien
caattcccgaggcttgaccgggagg

SEQ ID NO: 1679608 - DNA, 25 bp, Homo sapien
ttccagcttttcgatcgggccccgc

SEQ ID NO: 1679609 - DNA, 25 bp, Homo sapien
aagacgccggagcttcacaagggag

SEQ ID NO: 1679610 - DNA, 25 bp, Homo sapien
aggcgcggacaggtaatccccagcg

SEQ ID NO: 1679611 - DNA, 25 bp, Homo sapien
gcagcaggcgcggacaggtaatccc

SEQ ID NO: 1679612 - DNA, 25 bp, Homo sapien
cacaagggagcgaacgaggtaagca

SEQ ID NO: 1679613 - DNA, 25 bp, Homo sapien
gcaggtgcctcattctattgctaac

SEQ ID NO: 1679614 - DNA, 25 bp, Homo sapien
gatctaccctatcttgtttgcagcc

SEQ ID NO: 1679615 - DNA, 25 bp, Homo sapien
tccctaagcattggaacacagtgct

SEQ ID NO: 1679616 - DNA, 25 bp, Homo sapien
gaaaccatccctatatgaaaagcca

SEQ ID NO: 1679617 - DNA, 25 bp, Homo sapien
caagcttgaaatttgtagagcaggc

SEQ ID NO: 1679618 - DNA, 25 bp, Homo sapien
tgaaatttgtagagcaggccagcag

SEQ ID NO: 1679619 - DNA, 25 bp, Homo sapien
catgtgattgtgagggctagcaagc

SEQ ID NO: 1679620 - DNA, 25 bp, Homo sapien
tgagggctagcaagcttgaaatttg

SEQ ID NO: 1679621 - DNA, 25 bp, Homo sapien
tggcaaaaggacatgcaatccaatg

SEQ ID NO: 1679622 - DNA, 25 bp, Homo sapien
gacatgcaatccaatggaaagagct

SEQ ID NO: 1679623 - DNA, 25 bp, Homo sapien
aaggacatgcaatccaatggaaaga

SEQ ID NO: 1679624 - DNA, 25 bp, Homo sapien
ggcaaaaggacatgcaatccaatgg

SEQ ID NO: 1679625 - DNA, 25 bp, Homo sapien
gctacttcattggatggtgcagaaa

SEQ ID NO: 1679626 - DNA, 25 bp, Homo sapien
cgtagtcgccatatatagctagtgg

SEQ ID NO: 1679627 - DNA, 25 bp, Homo sapien
gaagccatgaagagttcccaatttg

SEQ ID NO: 1679628 - DNA, 25 bp, Homo sapien
gaggacatgtccatcgtcacaggga

SEQ ID NO: 1679629 - DNA, 25 bp, Homo sapien
gctatgtgcgcttcatctacagcag

SEQ ID NO: 1679630 - DNA, 25 bp, Homo sapien
tctttgaccaattccgagagtggcc

SEQ ID NO: 1679631 - DNA, 25 bp, Homo sapien
atgagaagaaggcacagcgtcacct

SEQ ID NO: 1679632 - DNA, 25 bp, Homo sapien
cacatcctcaagaagtcgtgcctgg

SEQ ID NO: 1679633 - DNA, 25 bp, Homo sapien
aaagcgcgagcgagttgggcagatg

SEQ ID NO: 1679634 - DNA, 25 bp, Homo sapien
tttcagaaccctgggcggaaagcgc

SEQ ID NO: 1679635 - DNA, 25 bp, Homo sapien
gcgcgagcgagttgggcagatgccg

SEQ ID NO: 1679636 - DNA, 25 bp, Homo sapien
accctgggcggaaagcgcgagcgag

SEQ ID NO: 1679637 - DNA, 25 bp, Homo sapien
cctctatcaagggatctgccgtgag

SEQ ID NO: 1679638 - DNA, 25 bp, Homo sapien
tcagcacgggctttgcggtgccaag

SEQ ID NO: 1679639 - DNA, 25 bp, Homo sapien
gaaggcactaatcctgcaagaggcg

SEQ ID NO: 1679640 - DNA, 25 bp, Homo sapien
gagcgtggaccacccttagcttcct

SEQ ID NO: 1679641 - DNA, 25 bp, Homo sapien
gatggacttttctaagcaagcctca

SEQ ID NO: 1679642 - DNA, 25 bp, Homo sapien
atggacttttctaagcaagcctcac

SEQ ID NO: 1679643 - DNA, 25 bp, Homo sapien
atcgcgggatggacttttctaagca

SEQ ID NO: 1679644 - DNA, 25 bp, Homo sapien
ccaatcgcgggatggacttttctaa

SEQ ID NO: 1679645 - DNA, 25 bp, Homo sapien
ggcaggcttctctgaccgactggga

SEQ ID NO: 1679646 - DNA, 25 bp, Homo sapien
gaggaggaccccagctagaagataa

SEQ ID NO: 1679647 - DNA, 25 bp, Homo sapien
gacagatctcttcgttcccagctag

SEQ ID NO: 1679648 - DNA, 25 bp, Homo sapien
gctaggacccttcggctttgactgg

SEQ ID NO: 1679649 - DNA, 25 bp, Homo sapien
tattagatagaaaacttaatcatct

SEQ ID NO: 1679650 - DNA, 25 bp, Homo sapien
taatcaagacaggaacagctgtgag

SEQ ID NO: 1679651 - DNA, 25 bp, Homo sapien
tgtccttccaaagtctatggtgcaa

SEQ ID NO: 1679652 - DNA, 25 bp, Homo sapien
tgtgagtataagctattgtgagtca

SEQ ID NO: 1679653 - DNA, 25 bp, Homo sapien
gagactcaagaagcgcgtgcaagta

SEQ ID NO: 1679654 - DNA, 25 bp, Homo sapien
caactgtaattgacgaatccgcccc

SEQ ID NO: 1679655 - DNA, 25 bp, Homo sapien
tggcggaccgctcttcgagtcgagt

SEQ ID NO: 1679656 - DNA, 25 bp, Homo sapien
tgcaagtaactagcgcacacaggcc

SEQ ID NO: 1679657 - DNA, 25 bp, Homo sapien
gtcctgtcttccttaataggctgca

SEQ ID NO: 1679658 - DNA, 25 bp, Homo sapien
cccagtcctgtcttccttaataggc

SEQ ID NO: 1679659 - DNA, 25 bp, Homo sapien
cttcccagtcctgtcttccttaata

SEQ ID NO: 1679660 - DNA, 25 bp, Homo sapien
tcttccttaataggctgcaaagcat

SEQ ID NO: 1679661 - DNA, 25 bp, Homo sapien
gaatgcatccgtaataagtgattga

SEQ ID NO: 1679662 - DNA, 25 bp, Homo sapien
tttattgatctgtcaagacggtata

SEQ ID NO: 1679663 - DNA, 25 bp, Homo sapien
tcaagacggtataatagaagacgat

SEQ ID NO: 1679664 - DNA, 25 bp, Homo sapien
tgaaatcctttatcatggaatgcat

SEQ ID NO: 1679665 - DNA, 25 bp, Homo sapien
ctttgggatcagtccctgccgaatt

SEQ ID NO: 1679666 - DNA, 25 bp, Homo sapien
aggccatctacgaggaatcgctgaa

SEQ ID NO: 1679667 - DNA, 25 bp, Homo sapien
tacgaggaatcgctgaatacatttc

SEQ ID NO: 1679668 - DNA, 25 bp, Homo sapien
gccgaattagcagaggttcatcttc

SEQ ID NO: 1679669 - DNA, 25 bp, Homo sapien
cagatgccgttataaaggcactcgc

SEQ ID NO: 1679670 - DNA, 25 bp, Homo sapien
gatgccgttataaaggcactcgcca

SEQ ID NO: 1679671 - DNA, 25 bp, Homo sapien
ttccagatgccgttataaaggcact

SEQ ID NO: 1679672 - DNA, 25 bp, Homo sapien
tccagatgccgttataaaggcactc

SEQ ID NO: 1679673 - DNA, 25 bp, Homo sapien
aagaaatgtccctctacgcagcaga

SEQ ID NO: 1679674 - DNA, 25 bp, Homo sapien
gacgaacaactcttgcaggagtcag

SEQ ID NO: 1679675 - DNA, 25 bp, Homo sapien
catgattttaactgagactggtcac

SEQ ID NO: 1679676 - DNA, 25 bp, Homo sapien
taagaacgtttgtgagagctctcca

SEQ ID NO: 1679677 - DNA, 25 bp, Homo sapien
cttccgaggtcagaattcctgttgt

SEQ ID NO: 1679678 - DNA, 25 bp, Homo sapien
ttccgaggtcagaattcctgttgtt

SEQ ID NO: 1679679 - DNA, 25 bp, Homo sapien
cttctataacacaaatcagcgacgt

SEQ ID NO: 1679680 - DNA, 25 bp, Homo sapien
taacacaaatcagcgacgtgtctga

SEQ ID NO: 1679681 - DNA, 25 bp, Homo sapien
atcagcgacgtgtctgaggctaggc

SEQ ID NO: 1679682 - DNA, 25 bp, Homo sapien
caaatcagcgacgtgtctgaggcta

SEQ ID NO: 1679683 - DNA, 25 bp, Homo sapien
cttcactactactcctggaaataat

SEQ ID NO: 1679684 - DNA, 25 bp, Homo sapien
cttctggtattaagggttgtgagca

SEQ ID NO: 1679685 - DNA, 25 bp, Homo sapien
ttctggtattaagggttgtgagcat

SEQ ID NO: 1679686 - DNA, 25 bp, Homo sapien
tcttctggtattaagggttgtgagc

SEQ ID NO: 1679687 - DNA, 25 bp, Homo sapien
aagtaggaaggaatccaacatctga

SEQ ID NO: 1679688 - DNA, 25 bp, Homo sapien
gtaggaaggaatccaacatctgaat

SEQ ID NO: 1679689 - DNA, 25 bp, Homo sapien
ctaagtaggaaggaatccaacatct

SEQ ID NO: 1679690 - DNA, 25 bp, Homo sapien
taagtaggaaggaatccaacatctg

SEQ ID NO: 1679691 - DNA, 25 bp, Homo sapien
cttttctgtcaccaggaatcctaag

SEQ ID NO: 1679692 - DNA, 25 bp, Homo sapien
ctcctgttgaagcaaatgatttaca

SEQ ID NO: 1679693 - DNA, 25 bp, Homo sapien
tgaagcaaatgatttacagtctttt

SEQ ID NO: 1679694 - DNA, 25 bp, Homo sapien
tcttttctgtcaccaggaatcctaa

SEQ ID NO: 1679695 - DNA, 25 bp, Homo sapien
catgccttctgacaaagggaatttt

SEQ ID NO: 1679696 - DNA, 25 bp, Homo sapien
ataagatgacacatgccttctgaca

SEQ ID NO: 1679697 - DNA, 25 bp, Homo sapien
tcgagggacagcgtgcaaaatgcag

SEQ ID NO: 1679698 - DNA, 25 bp, Homo sapien
tttctctcttctcgagggacagcgt

SEQ ID NO: 1679699 - DNA, 25 bp, Homo sapien
ttgaagtccagaacattccagactt

SEQ ID NO: 1679700 - DNA, 25 bp, Homo sapien
tgaagtccagaacattccagacttt

SEQ ID NO: 1679701 - DNA, 25 bp, Homo sapien
tttgaagtccagaacattccagact

SEQ ID NO: 1679702 - DNA, 25 bp, Homo sapien
ctttgaagtccagaacattccagac

SEQ ID NO: 1679703 - DNA, 25 bp, Homo sapien
gaaacatttagataaatcacattta

SEQ ID NO: 1679704 - DNA, 25 bp, Homo sapien
aaacatttagataaatcacatttaa

SEQ ID NO: 1679705 - DNA, 25 bp, Homo sapien
tgaaacatttagataaatcacattt

SEQ ID NO: 1679706 - DNA, 25 bp, Homo sapien
ctgaaacatttagataaatcacatt

SEQ ID NO: 1679707 - DNA, 25 bp, Homo sapien
cacccacagtcaagagtgtccttgc

SEQ ID NO: 1679708 - DNA, 25 bp, Homo sapien
ccacagtcaagagtgtccttgcaag

SEQ ID NO: 1679709 - DNA, 25 bp, Homo sapien
acccacagtcaagagtgtccttgca

SEQ ID NO: 1679710 - DNA, 25 bp, Homo sapien
cccacagtcaagagtgtccttgcaa

SEQ ID NO: 1679711 - DNA, 25 bp, Homo sapien
catttatggacaagttcatcccttg

SEQ ID NO: 1679712 - DNA, 25 bp, Homo sapien
tttttaatcgtcagtctacacagcg

SEQ ID NO: 1679713 - DNA, 25 bp, Homo sapien
aattctcgatccttaatttctttga

SEQ ID NO: 1679714 - DNA, 25 bp, Homo sapien
gacttcatcatcaaaccatttatgg

SEQ ID NO: 1679715 - DNA, 25 bp, Homo sapien
caccaagtctgttgtttaggtgatt

SEQ ID NO: 1679716 - DNA, 25 bp, Homo sapien
ggtgattgagaaaacgtctactgtc

SEQ ID NO: 1679717 - DNA, 25 bp, Homo sapien
gtttaggtgattgagaaaacgtcta

SEQ ID NO: 1679718 - DNA, 25 bp, Homo sapien
ttggtcaccaagtctgttgtttagg

SEQ ID NO: 1679719 - DNA, 25 bp, Homo sapien
aagcagcaatacacggaaatgaata

SEQ ID NO: 1679720 - DNA, 25 bp, Homo sapien
aaagcagcaatacacggaaatgaat

SEQ ID NO: 1679721 - DNA, 25 bp, Homo sapien
agcaatacacggaaatgaatacacc

SEQ ID NO: 1679722 - DNA, 25 bp, Homo sapien
cagactcagttctagagagaaggaa

SEQ ID NO: 1679723 - DNA, 25 bp, Homo sapien
gactcagttctagagagaaggaatg

SEQ ID NO: 1679724 - DNA, 25 bp, Homo sapien
agactcagttctagagagaaggaat

SEQ ID NO: 1679725 - DNA, 25 bp, Homo sapien
ttctctaatttttcatccgctggtt

SEQ ID NO: 1679726 - DNA, 25 bp, Homo sapien
gaagtcgatccaaaatttctctaat

SEQ ID NO: 1679727 - DNA, 25 bp, Homo sapien
tctaatttttcatccgctggttttc

SEQ ID NO: 1679728 - DNA, 25 bp, Homo sapien
tcctaggttgaagtcgatccaaaat

SEQ ID NO: 1679729 - DNA, 25 bp, Homo sapien
tcagcattgtctatataaaaagtga

SEQ ID NO: 1679730 - DNA, 25 bp, Homo sapien
ctcagcattgtctatataaaaagtg

SEQ ID NO: 1679731 - DNA, 25 bp, Homo sapien
agcattgtctatataaaaagtgaca

SEQ ID NO: 1679732 - DNA, 25 bp, Homo sapien
cagcattgtctatataaaaagtgac

SEQ ID NO: 1679733 - DNA, 25 bp, Homo sapien
ccttcggaagtgtcactgagtccca

SEQ ID NO: 1679734 - DNA, 25 bp, Homo sapien
tcaccgcttccttcggaagtgtcac

SEQ ID NO: 1679735 - DNA, 25 bp, Homo sapien
gctgaaattcatcaccgcttccttc

SEQ ID NO: 1679736 - DNA, 25 bp, Homo sapien
aattcatcaccgcttccttcggaag

SEQ ID NO: 1679737 - DNA, 25 bp, Homo sapien
agtgctggtctagagtaagcctcca

SEQ ID NO: 1679738 - DNA, 25 bp, Homo sapien
tccccaaaatactaatcttgccgga

SEQ ID NO: 1679739 - DNA, 25 bp, Homo sapien
caaaatactaatcttgccggacatt

SEQ ID NO: 1679740 - DNA, 25 bp, Homo sapien
tcttgccggacattttactcatcac

SEQ ID NO: 1679741 - DNA, 25 bp, Homo sapien
cttgtgatatgttgaactgcaaatc

SEQ ID NO: 1679742 - DNA, 25 bp, Homo sapien
gctgataatcatgggcttcttcagg

SEQ ID NO: 1679743 - DNA, 25 bp, Homo sapien
tctttgtagctgataatcatgggct

SEQ ID NO: 1679744 - DNA, 25 bp, Homo sapien
tgtcttctcctaaagcttgaatgga

SEQ ID NO: 1679745 - DNA, 25 bp, Homo sapien
tcaaggccactgggactctccctgt

SEQ ID NO: 1679746 - DNA, 25 bp, Homo sapien
gagattttcgtctggtcaggcaaca

SEQ ID NO: 1679747 - DNA, 25 bp, Homo sapien
ttctgaggagattttcgtctggtca

SEQ ID NO: 1679748 - DNA, 25 bp, Homo sapien
ccctgtcttctttatcagacttact

SEQ ID NO: 1679749 - DNA, 25 bp, Homo sapien
tattaggcagcggtcatcttcagca

SEQ ID NO: 1679750 - DNA, 25 bp, Homo sapien
ggctcagattggtcatttaagtgga

SEQ ID NO: 1679751 - DNA, 25 bp, Homo sapien
gcactcataaactccaccatgttag

SEQ ID NO: 1679752 - DNA, 25 bp, Homo sapien
tcagaggcaggttccccaataacag

SEQ ID NO: 1679753 - DNA, 25 bp, Homo sapien
tgttgcgggaagtcagggaccccga

SEQ ID NO: 1679754 - DNA, 25 bp, Homo sapien
gatggtggatgactgttcaaaagca

SEQ ID NO: 1679755 - DNA, 25 bp, Homo sapien
gaagtacccttctagaagactgggc

SEQ ID NO: 1679756 - DNA, 25 bp, Homo sapien
ccaagttgctgttgtataggatgac

SEQ ID NO: 1679757 - DNA, 25 bp, Homo sapien
taaaacgtttgcaacagaagagatg

SEQ ID NO: 1679758 - DNA, 25 bp, Homo sapien
tactggtccaagatagttcactggt

SEQ ID NO: 1679759 - DNA, 25 bp, Homo sapien
tctttttctggttactggtccaaga

SEQ ID NO: 1679760 - DNA, 25 bp, Homo sapien
tctggttactggtccaagatagttc

SEQ ID NO: 1679761 - DNA, 25 bp, Homo sapien
gatagttcactggtacttgaatctt

SEQ ID NO: 1679762 - DNA, 25 bp, Homo sapien
ttggtctttctcatggccactgcca

SEQ ID NO: 1679763 - DNA, 25 bp, Homo sapien
actactgggagggaaaactggcaag

SEQ ID NO: 1679764 - DNA, 25 bp, Homo sapien
ggtctttctcatggccactgccact

SEQ ID NO: 1679765 - DNA, 25 bp, Homo sapien
cactgccactactgggagggaaaac

SEQ ID NO: 1679766 - DNA, 25 bp, Homo sapien
tttctgggcagaatcttcagcagtc

SEQ ID NO: 1679767 - DNA, 25 bp, Homo sapien
aagcaaaactatcttggaatttttg

SEQ ID NO: 1679768 - DNA, 25 bp, Homo sapien
gatgtggtgttattttgctcgggta

SEQ ID NO: 1679769 - DNA, 25 bp, Homo sapien
ctgttttctgggcagaatcttcagc

SEQ ID NO: 1679770 - DNA, 25 bp, Homo sapien
gagtgcttcaaggaagagagctcac

SEQ ID NO: 1679771 - DNA, 25 bp, Homo sapien
tctgagtgcttcaaggaagagagct

SEQ ID NO: 1679772 - DNA, 25 bp, Homo sapien
aggaagagagctcactcagtgagtg

SEQ ID NO: 1679773 - DNA, 25 bp, Homo sapien
ttcaaggaagagagctcactcagtg

SEQ ID NO: 1679774 - DNA, 25 bp, Homo sapien
gcttatgtttcaagctagtactttc

SEQ ID NO: 1679775 - DNA, 25 bp, Homo sapien
tcaagctagtactttctgttagtga

SEQ ID NO: 1679776 - DNA, 25 bp, Homo sapien
ttctcagcttatgtttcaagctagt

SEQ ID NO: 1679777 - DNA, 25 bp, Homo sapien
gctagtactttctgttagtgattct

SEQ ID NO: 1679778 - DNA, 25 bp, Homo sapien
gaaaccttcttcgaagtggcagtgc

SEQ ID NO: 1679779 - DNA, 25 bp, Homo sapien
ggaacatcgtgtaaataacctggtc

SEQ ID NO: 1679780 - DNA, 25 bp, Homo sapien
cactagttacatccaccaaagagag

SEQ ID NO: 1679781 - DNA, 25 bp, Homo sapien
tcagggacatggaaatcactagact

SEQ ID NO: 1679782 - DNA, 25 bp, Homo sapien
ctatgtgcgagaggcagggcgatgc

SEQ ID NO: 1679783 - DNA, 25 bp, Homo sapien
tatgtgcgagaggcagggcgatgcg

SEQ ID NO: 1679784 - DNA, 25 bp, Homo sapien
atgtgcgagaggcagggcgatgcgg

SEQ ID NO: 1679785 - DNA, 25 bp, Homo sapien
acttctcttttgtcacatgcctgtc

SEQ ID NO: 1679786 - DNA, 25 bp, Homo sapien
tcattccatgaatatgtggacgtta

SEQ ID NO: 1679787 - DNA, 25 bp, Homo sapien
ttcaatttcactaattcattccatg

SEQ ID NO: 1679788 - DNA, 25 bp, Homo sapien
cacatgcctgtctagttgctgttgg

SEQ ID NO: 1679789 - DNA, 25 bp, Homo sapien
atctgctggtgacacgggcacatcg

SEQ ID NO: 1679790 - DNA, 25 bp, Homo sapien
cacatcggcgctatgctgaaggcta

SEQ ID NO: 1679791 - DNA, 25 bp, Homo sapien
gagagactcgaacatagattcccat

SEQ ID NO: 1679792 - DNA, 25 bp, Homo sapien
ctgaaggctacgtcataaacgaggc

SEQ ID NO: 1679793 - DNA, 25 bp, Homo sapien
tatcattcggtgcatcgactaggca

SEQ ID NO: 1679794 - DNA, 25 bp, Homo sapien
ccaagtatcgaagcacgatgtctac

SEQ ID NO: 1679795 - DNA, 25 bp, Homo sapien
tgtcccctgcctgttgctaatgagt

SEQ ID NO: 1679796 - DNA, 25 bp, Homo sapien
tgtgaagagtaccatctgaaacttg

SEQ ID NO: 1679797 - DNA, 25 bp, Homo sapien
gtgacttagcaaaactaccttctgg

SEQ ID NO: 1679798 - DNA, 25 bp, Homo sapien
gttgtgacttagcaaaactaccttc

SEQ ID NO: 1679799 - DNA, 25 bp, Homo sapien
tgtgacttagcaaaactaccttctg

SEQ ID NO: 1679800 - DNA, 25 bp, Homo sapien
cttcttccaatcttgattgttgtga

SEQ ID NO: 1679801 - DNA, 25 bp, Homo sapien
aatggcagaaccgttcaagttctct

SEQ ID NO: 1679802 - DNA, 25 bp, Homo sapien
gaatggcagaaccgttcaagttctc

SEQ ID NO: 1679803 - DNA, 25 bp, Homo sapien
tctctggcacaacttctagggatga

SEQ ID NO: 1679804 - DNA, 25 bp, Homo sapien
agaatggcagaaccgttcaagttct

SEQ ID NO: 1679805 - DNA, 25 bp, Homo sapien
agttttattaggcaatccggtgctt

SEQ ID NO: 1679806 - DNA, 25 bp, Homo sapien
taggcaatccggtgctttctttgca

SEQ ID NO: 1679807 - DNA, 25 bp, Homo sapien
ttctgaattaaacggacgctttctg

SEQ ID NO: 1679808 - DNA, 25 bp, Homo sapien
tgaattaaacggacgctttctgtac

SEQ ID NO: 1679809 - DNA, 25 bp, Homo sapien
ggtatccgacattgcccagtgtgca

SEQ ID NO: 1679810 - DNA, 25 bp, Homo sapien
tccgacattgcccagtgtgcatttg

SEQ ID NO: 1679811 - DNA, 25 bp, Homo sapien
ctcactctcataccaagcacagggc

SEQ ID NO: 1679812 - DNA, 25 bp, Homo sapien
acagggcctggtatccgacattgcc

SEQ ID NO: 1679813 - DNA, 25 bp, Homo sapien
aatatcattgggatcgcttggatgt

SEQ ID NO: 1679814 - DNA, 25 bp, Homo sapien
gacagcagactttcttaataagtca

SEQ ID NO: 1679815 - DNA, 25 bp, Homo sapien
gattacaaggatacttcagactctt

SEQ ID NO: 1679816 - DNA, 25 bp, Homo sapien
taataagtcatctgattacaaggat

SEQ ID NO: 1679817 - DNA, 25 bp, Homo sapien
tatcctgcttaagactgctcaactc

SEQ ID NO: 1679818 - DNA, 25 bp, Homo sapien
tttgaaagcgctctagtttattgag

SEQ ID NO: 1679819 - DNA, 25 bp, Homo sapien
gaagaaccaaattttgaaagcgctc

SEQ ID NO: 1679820 - DNA, 25 bp, Homo sapien
tgttccagggcctgaatatcctgct

SEQ ID NO: 1679821 - DNA, 25 bp, Homo sapien
ggaaagatccgaagtcagaaaatgt

SEQ ID NO: 1679822 - DNA, 25 bp, Homo sapien
aagtagctagcgttatttttccctg

SEQ ID NO: 1679823 - DNA, 25 bp, Homo sapien
ccctgggaaagatccgaagtcagaa

SEQ ID NO: 1679824 - DNA, 25 bp, Homo sapien
tttccctgggaaagatccgaagtca

SEQ ID NO: 1679825 - DNA, 25 bp, Homo sapien
aagattgcagatcagcagactgttt

SEQ ID NO: 1679826 - DNA, 25 bp, Homo sapien
gaaagattgcagatcagcagactgt

SEQ ID NO: 1679827 - DNA, 25 bp, Homo sapien
gattgcagatcagcagactgtttcc

SEQ ID NO: 1679828 - DNA, 25 bp, Homo sapien
cagaaagattgcagatcagcagact

SEQ ID NO: 1679829 - DNA, 25 bp, Homo sapien
ttgtaaggccctttgcacatcaagg

SEQ ID NO: 1679830 - DNA, 25 bp, Homo sapien
cctttgcacatcaaggactcagccc

SEQ ID NO: 1679831 - DNA, 25 bp, Homo sapien
tttgcacatcaaggactcagcccag

SEQ ID NO: 1679832 - DNA, 25 bp, Homo sapien
ctcttgtaaggccctttgcacatca

SEQ ID NO: 1679833 - DNA, 25 bp, Homo sapien
ttatgaagtctgagttgaattgaac

SEQ ID NO: 1679834 - DNA, 25 bp, Homo sapien
gctgcaatcataaaaccaggctttg

SEQ ID NO: 1679835 - DNA, 25 bp, Homo sapien
ctgagggctgcaatcataaaaccag

SEQ ID NO: 1679836 - DNA, 25 bp, Homo sapien
aatcataaaaccaggctttggcttt

SEQ ID NO: 1679837 - DNA, 25 bp, Homo sapien
tgagggctgcaatcataaaaccagg

SEQ ID NO: 1679838 - DNA, 25 bp, Homo sapien
gaattcctctgtaatgtaatctgga

SEQ ID NO: 1679839 - DNA, 25 bp, Homo sapien
atacacatatttgtagggtacttct

SEQ ID NO: 1679840 - DNA, 25 bp, Homo sapien
agatttgtctgctaaggtttcccat

SEQ ID NO: 1679841 - DNA, 25 bp, Homo sapien
gtaatctggatcatacacatatttg

SEQ ID NO: 1679842 - DNA, 25 bp, Homo sapien
tctttctcttcgtcttcaggcagcc

SEQ ID NO: 1679843 - DNA, 25 bp, Homo sapien
taacaaggcctgagccaacaataac

SEQ ID NO: 1679844 - DNA, 25 bp, Homo sapien
gccaacaataaccttgctctttctc

SEQ ID NO: 1679845 - DNA, 25 bp, Homo sapien
tctcttcgtcttcaggcagcccagg

SEQ ID NO: 1679846 - DNA, 25 bp, Homo sapien
gataataacccaactgcaaactacc

SEQ ID NO: 1679847 - DNA, 25 bp, Homo sapien
aaaaagcaacaccactccaagttgt

SEQ ID NO: 1679848 - DNA, 25 bp, Homo sapien
aatgcgtacagagcacgaagtctgg

SEQ ID NO: 1679849 - DNA, 25 bp, Homo sapien
catatattctatctgaactcagcag

SEQ ID NO: 1679850 - DNA, 25 bp, Homo sapien
tgtatgtgcaatttcatccactcaa

SEQ ID NO: 1679851 - DNA, 25 bp, Homo sapien
ctagagcatctagtaattaataaca

SEQ ID NO: 1679852 - DNA, 25 bp, Homo sapien
gcatctagtaattaataacaacatg

SEQ ID NO: 1679853 - DNA, 25 bp, Homo sapien
aacttcactagagcatctagtaatt

SEQ ID NO: 1679854 - DNA, 25 bp, Homo sapien
gttggctgaggttccaagtgcaaaa

SEQ ID NO: 1679855 - DNA, 25 bp, Homo sapien
aggcctggttggctgaggttccaag

SEQ ID NO: 1679856 - DNA, 25 bp, Homo sapien
ctgcctgagggcaaagcaaatcctc

SEQ ID NO: 1679857 - DNA, 25 bp, Homo sapien
gaggttggttcacgcaggcctggtt

SEQ ID NO: 1679858 - DNA, 25 bp, Homo sapien
agacagctcatgtagaaccagctcc

SEQ ID NO: 1679859 - DNA, 25 bp, Homo sapien
gcagtggccctagaaacaaatgata

SEQ ID NO: 1679860 - DNA, 25 bp, Homo sapien
tcctattcttttcaagctagtttag

SEQ ID NO: 1679861 - DNA, 25 bp, Homo sapien
ctgagactgaagcactgtacgtaag

SEQ ID NO: 1679862 - DNA, 25 bp, Homo sapien
gacataccgaaaaaagccaatgaag

SEQ ID NO: 1679863 - DNA, 25 bp, Homo sapien
acataccgaaaaaagccaatgaaga

SEQ ID NO: 1679864 - DNA, 25 bp, Homo sapien
cataccgaaaaaagccaatgaagaa

SEQ ID NO: 1679865 - DNA, 25 bp, Homo sapien
catgaacttgggttctgcggatgca

SEQ ID NO: 1679866 - DNA, 25 bp, Homo sapien
caaatcagtagagttcctggacaca

SEQ ID NO: 1679867 - DNA, 25 bp, Homo sapien
tgcagaggaggaacgtgatcacaca

SEQ ID NO: 1679868 - DNA, 25 bp, Homo sapien
aaatttctataggtagccaaggtgc

SEQ ID NO: 1679869 - DNA, 25 bp, Homo sapien
gttgcggccgtaccttatgatggtc

SEQ ID NO: 1679870 - DNA, 25 bp, Homo sapien
tgagactgacttgagggccttagga

SEQ ID NO: 1679871 - DNA, 25 bp, Homo sapien
tgacctcccaccattagcaaggatg

SEQ ID NO: 1679872 - DNA, 25 bp, Homo sapien
tcagacattaagacggttgcggccg

SEQ ID NO: 1679873 - DNA, 25 bp, Homo sapien
accacaaaccagtgcataccataca

SEQ ID NO: 1679874 - DNA, 25 bp, Homo sapien
ccacaaaccagtgcataccatacag

SEQ ID NO: 1679875 - DNA, 25 bp, Homo sapien
taccacaaaccagtgcataccatac

SEQ ID NO: 1679876 - DNA, 25 bp, Homo sapien
tctcaggggtatcctcaccttgtat

SEQ ID NO: 1679877 - DNA, 25 bp, Homo sapien
gaatcacacttctctccgcgtacat

SEQ ID NO: 1679878 - DNA, 25 bp, Homo sapien
caccttgtataatcttggaatcaca

SEQ ID NO: 1679879 - DNA, 25 bp, Homo sapien
tcttggaatcacacttctctccgcg

SEQ ID NO: 1679880 - DNA, 25 bp, Homo sapien
tttgagcagcgtgagagcagaccat

SEQ ID NO: 1679881 - DNA, 25 bp, Homo sapien
tacctgaacgggtattttgagcagc

SEQ ID NO: 1679882 - DNA, 25 bp, Homo sapien
tctgtggcggagctgggaaatacct

SEQ ID NO: 1679883 - DNA, 25 bp, Homo sapien
gacttctcctctggttgcttgagga

SEQ ID NO: 1679884 - DNA, 25 bp, Homo sapien
tcccgaagacatacgtttccttgaa

SEQ ID NO: 1679885 - DNA, 25 bp, Homo sapien
tagtaggtgccagtcaatgttagtc

SEQ ID NO: 1679886 - DNA, 25 bp, Homo sapien
gctgaatctaatgcatgctccatat

SEQ ID NO: 1679887 - DNA, 25 bp, Homo sapien
tccatatcaacttcccgaggctgtc

SEQ ID NO: 1679888 - DNA, 25 bp, Homo sapien
tgaataaaggaatggaatgcctctt

SEQ ID NO: 1679889 - DNA, 25 bp, Homo sapien
tgaaccttagcaaacaagctgaaac

SEQ ID NO: 1679890 - DNA, 25 bp, Homo sapien
tagctctacaaatgttggaaaatgg

SEQ ID NO: 1679891 - DNA, 25 bp, Homo sapien
cagtgctagtatataaaatcctcaa

SEQ ID NO: 1679892 - DNA, 25 bp, Homo sapien
tattaggccacactgattcctggtg

SEQ ID NO: 1679893 - DNA, 25 bp, Homo sapien
ggcatccctggatattaggccacac

SEQ ID NO: 1679894 - DNA, 25 bp, Homo sapien
ccagggcatccctggatattaggcc

SEQ ID NO: 1679895 - DNA, 25 bp, Homo sapien
ccctggatattaggccacactgatt

SEQ ID NO: 1679896 - DNA, 25 bp, Homo sapien
gacacaacttctgacacaggaggct

SEQ ID NO: 1679897 - DNA, 25 bp, Homo sapien
gaggcttgcaggtaacacactccac

SEQ ID NO: 1679898 - DNA, 25 bp, Homo sapien
gactctgctggacaccgattcttgt

SEQ ID NO: 1679899 - DNA, 25 bp, Homo sapien
tgccgttcataccaggtgtcccaga

SEQ ID NO: 1679900 - DNA, 25 bp, Homo sapien
cagttccaaggtgtcctgaatacag

SEQ ID NO: 1679901 - DNA, 25 bp, Homo sapien
atctccaaggagttttatattcact

SEQ ID NO: 1679902 - DNA, 25 bp, Homo sapien
gaaatctccaaggagttttatattc

SEQ ID NO: 1679903 - DNA, 25 bp, Homo sapien
ccagaaactggtacagttccaaggt

SEQ ID NO: 1679904 - DNA, 25 bp, Homo sapien
ccatgtccaggattaacgtgcaaca

SEQ ID NO: 1679905 - DNA, 25 bp, Homo sapien
ggattaacgtgcaacagtctgcttg

SEQ ID NO: 1679906 - DNA, 25 bp, Homo sapien
gctgtcctggatgtccgtagtacaa

SEQ ID NO: 1679907 - DNA, 25 bp, Homo sapien
tgtccgtagtacaacacttcactcc

SEQ ID NO: 1679908 - DNA, 25 bp, Homo sapien
accgcccgccgacgcctggagcgga

SEQ ID NO: 1679909 - DNA, 25 bp, Homo sapien
agaacggcgtttcccgcgcgcggca

SEQ ID NO: 1679910 - DNA, 25 bp, Homo sapien
gcctggagcggagaacggcgtttcc

SEQ ID NO: 1679911 - DNA, 25 bp, Homo sapien
gccgacgcctggagcggagaacggc

SEQ ID NO: 1679912 - DNA, 25 bp, Homo sapien
cgcccgcccgggtcgccgcgccaca

SEQ ID NO: 1679913 - DNA, 25 bp, Homo sapien
cctggacagcgcatcgccgcccgcc

SEQ ID NO: 1679914 - DNA, 25 bp, Homo sapien
cgcccgggtcgccgcgccacagccg

SEQ ID NO: 1679915 - DNA, 25 bp, Homo sapien
tggacagcgcatcgccgcccgcccg

SEQ ID NO: 1679916 - DNA, 25 bp, Homo sapien
aactgtaagcaagaccagcgtgccc

SEQ ID NO: 1679917 - DNA, 25 bp, Homo sapien
gtgcccgccctgcacgatactgctt

SEQ ID NO: 1679918 - DNA, 25 bp, Homo sapien
gctccgtggacgttgagccgccgcg

SEQ ID NO: 1679919 - DNA, 25 bp, Homo sapien
gcagcggctgccgatctgggcagcg

SEQ ID NO: 1679920 - DNA, 25 bp, Homo sapien
taaacctaagaaacccagactgcgc

SEQ ID NO: 1679921 - DNA, 25 bp, Homo sapien
cagactgcgcaaacctgcaggaaca

SEQ ID NO: 1679922 - DNA, 25 bp, Homo sapien
tgctcagggccgttatccgaactga

SEQ ID NO: 1679923 - DNA, 25 bp, Homo sapien
ggagcgggacagagactcttgctca

SEQ ID NO: 1679924 - DNA, 25 bp, Homo sapien
tctgttcacagtgaagagggtgcgc

SEQ ID NO: 1679925 - DNA, 25 bp, Homo sapien
taggaggccaccgttctgttcacag

SEQ ID NO: 1679926 - DNA, 25 bp, Homo sapien
gccaccgttctgttcacagtgaaga

SEQ ID NO: 1679927 - DNA, 25 bp, Homo sapien
ttcacagtgaagagggtgcgctcac

SEQ ID NO: 1679928 - DNA, 25 bp, Homo sapien
gagacacactttctgaacctataaa

SEQ ID NO: 1679929 - DNA, 25 bp, Homo sapien
tagcactgtcatctattaatcggtc

SEQ ID NO: 1679930 - DNA, 25 bp, Homo sapien
gagatccaggctttagcactgtcat

SEQ ID NO: 1679931 - DNA, 25 bp, Homo sapien
tattaatcggtcttctctaactcct

SEQ ID NO: 1679932 - DNA, 25 bp, Homo sapien
ggcacacgtatgcctattaacaaac

SEQ ID NO: 1679933 - DNA, 25 bp, Homo sapien
atggcacacgtatgcctattaacaa

SEQ ID NO: 1679934 - DNA, 25 bp, Homo sapien
gcacacgtatgcctattaacaaacc

SEQ ID NO: 1679935 - DNA, 25 bp, Homo sapien
cacacgtatgcctattaacaaacct

SEQ ID NO: 1679936 - DNA, 25 bp, Homo sapien
ggaattcaacagaccctgtgggtac

SEQ ID NO: 1679937 - DNA, 25 bp, Homo sapien
cactgctagtaccatgttcagtgtc

SEQ ID NO: 1679938 - DNA, 25 bp, Homo sapien
gaattgtcgctattactggaattca

SEQ ID NO: 1679939 - DNA, 25 bp, Homo sapien
gtgtcactatcagaaacatggagaa

SEQ ID NO: 1679940 - DNA, 25 bp, Homo sapien
tctaatacgtttactcaggcagcgg

SEQ ID NO: 1679941 - DNA, 25 bp, Homo sapien
gcctagaggttgagaacatgaactc

SEQ ID NO: 1679942 - DNA, 25 bp, Homo sapien
gttgatttagattgaccacatggcc

SEQ ID NO: 1679943 - DNA, 25 bp, Homo sapien
tggaaggcagagatcaaacatcatt

SEQ ID NO: 1679944 - DNA, 25 bp, Homo sapien
tatcagcagggggaataatgttcat

SEQ ID NO: 1679945 - DNA, 25 bp, Homo sapien
tcagcagggggaataatgttcatca

SEQ ID NO: 1679946 - DNA, 25 bp, Homo sapien
tggtatcagcagggggaataatgtt

SEQ ID NO: 1679947 - DNA, 25 bp, Homo sapien
gtatcagcagggggaataatgttca

SEQ ID NO: 1679948 - DNA, 25 bp, Homo sapien
tgtagctcaatatcaagacactggt

SEQ ID NO: 1679949 - DNA, 25 bp, Homo sapien
gaaagtaaggccaccatgcaaaaaa

SEQ ID NO: 1679950 - DNA, 25 bp, Homo sapien
taatttaagtccagctaacagtagc

SEQ ID NO: 1679951 - DNA, 25 bp, Homo sapien
gataactaagttattgcaggcctgc

SEQ ID NO: 1679952 - DNA, 25 bp, Homo sapien
gacatccagtgactatcccatgcag

SEQ ID NO: 1679953 - DNA, 25 bp, Homo sapien
tcctgtgggttcagccaagagtcct

SEQ ID NO: 1679954 - DNA, 25 bp, Homo sapien
ttttgtcgcagaaagcgtcagtgtc

SEQ ID NO: 1679955 - DNA, 25 bp, Homo sapien
ggacaactctgaagggccattctag

SEQ ID NO: 1679956 - DNA, 25 bp, Homo sapien
atgtggacgcgaaaactcaatcatc

SEQ ID NO: 1679957 - DNA, 25 bp, Homo sapien
atctcacatgtggacgcgaaaactc

SEQ ID NO: 1679958 - DNA, 25 bp, Homo sapien
atgtgccaatgacaaggctcaaggg

SEQ ID NO: 1679959 - DNA, 25 bp, Homo sapien
tgccaatgacaaggctcaagggagg

SEQ ID NO: 1679960 - DNA, 25 bp, Homo sapien
ggaatcctggattagtgtagcctta

SEQ ID NO: 1679961 - DNA, 25 bp, Homo sapien
tcctggattagtgtagccttaaggc

SEQ ID NO: 1679962 - DNA, 25 bp, Homo sapien
ctgaagcctggttggctttgactga

SEQ ID NO: 1679963 - DNA, 25 bp, Homo sapien
tgatcgggctgacccagaaaagttc

SEQ ID NO: 1679964 - DNA, 25 bp, Homo sapien
cacaggaataaaggggcggctgaaa

SEQ ID NO: 1679965 - DNA, 25 bp, Homo sapien
caggaataaaggggcggctgaaaat

SEQ ID NO: 1679966 - DNA, 25 bp, Homo sapien
gaataaaggggcggctgaaaataca

SEQ ID NO: 1679967 - DNA, 25 bp, Homo sapien
ctaaagcctcacaaattttagccat

SEQ ID NO: 1679968 - DNA, 25 bp, Homo sapien
ttagccattcgatcattaaatatcg

SEQ ID NO: 1679969 - DNA, 25 bp, Homo sapien
cagatttcgatccaaatgttttatc

SEQ ID NO: 1679970 - DNA, 25 bp, Homo sapien
catagtaggtgctcgtcagatttcg

SEQ ID NO: 1679971 - DNA, 25 bp, Homo sapien
ttcctcctctgctatttccttccat

SEQ ID NO: 1679972 - DNA, 25 bp, Homo sapien
ctttcctcctctgctatttccttcc

SEQ ID NO: 1679973 - DNA, 25 bp, Homo sapien
tttcctcctctgctatttccttcca

SEQ ID NO: 1679974 - DNA, 25 bp, Homo sapien
gcctttggtcttgctcaagtcgcct

SEQ ID NO: 1679975 - DNA, 25 bp, Homo sapien
aagtcgcctcagtcggacgaccgtg

SEQ ID NO: 1679976 - DNA, 25 bp, Homo sapien
gccttctccaaagccgcggatctgg

SEQ ID NO: 1679977 - DNA, 25 bp, Homo sapien
tcggacgaccgtgggctggccttct

SEQ ID NO: 1679978 - DNA, 25 bp, Homo sapien
tggtggagtcgggacggcgttgtct

SEQ ID NO: 1679979 - DNA, 25 bp, Homo sapien
agaatgcaccgccactcgggcttcg

SEQ ID NO: 1679980 - DNA, 25 bp, Homo sapien
gcgttgtctcgcagggactacaact

SEQ ID NO: 1679981 - DNA, 25 bp, Homo sapien
tcgggacggcgttgtctcgcaggga

SEQ ID NO: 1679982 - DNA, 25 bp, Homo sapien
caagctcgcctcctccgcggcgcgg

SEQ ID NO: 1679983 - DNA, 25 bp, Homo sapien
cgcctcctccgcggcgcggggtcgg

SEQ ID NO: 1679984 - DNA, 25 bp, Homo sapien
aagctcgcctcctccgcggcgcggg

SEQ ID NO: 1679985 - DNA, 25 bp, Homo sapien
ctcgcctcctccgcggcgcggggtc

SEQ ID NO: 1679986 - DNA, 25 bp, Homo sapien
gccacaaggccctcgtcgctgtcca

SEQ ID NO: 1679987 - DNA, 25 bp, Homo sapien
tcgctgtccacccgtgtctctgaga

SEQ ID NO: 1679988 - DNA, 25 bp, Homo sapien
agaccccagggatgccagatgtcag

SEQ ID NO: 1679989 - DNA, 25 bp, Homo sapien
ggctgtagcggcttctccgccccag

SEQ ID NO: 1679990 - DNA, 25 bp, Homo sapien
gacgccgcgcgcctgtagggaggac

SEQ ID NO: 1679991 - DNA, 25 bp, Homo sapien
tctagtccctcatcgccccggagag

SEQ ID NO: 1679992 - DNA, 25 bp, Homo sapien
ccagagaccccagcggtcggatgcg

SEQ ID NO: 1679993 - DNA, 25 bp, Homo sapien
tcggatgcgcttccatggcggacgc

SEQ ID NO: 1679994 - DNA, 25 bp, Homo sapien
cgcaaaggcgggcactgtgggaccg

SEQ ID NO: 1679995 - DNA, 25 bp, Homo sapien
aaggcgggcactgtgggaccgcccg

SEQ ID NO: 1679996 - DNA, 25 bp, Homo sapien
cggcgcaaaggcgggcactgtggga

SEQ ID NO: 1679997 - DNA, 25 bp, Homo sapien
ggcggcgcaaaggcgggcactgtgg

SEQ ID NO: 1679998 - DNA, 25 bp, Homo sapien
ggcgcggctgggcgccggggcggca

SEQ ID NO: 1679999 - DNA, 25 bp, Homo sapien
gggcgccaggcgcggctgggcgccg

SEQ ID NO: 1680000 - DNA, 25 bp, Homo sapien
gcgcggctgggcgccggggcggcat

SEQ ID NO: 1680001 - DNA, 25 bp, Homo sapien
ggcgggcgccaggcgcggctgggcg

SEQ ID NO: 1680002 - DNA, 25 bp, Homo sapien
gctggcgcggacggcggtgagcgcg

SEQ ID NO: 1680003 - DNA, 25 bp, Homo sapien
gcagaagggcagtcggctcggggcg

SEQ ID NO: 1680004 - DNA, 25 bp, Homo sapien
ctggcgcggacggcggtgagcgcgg

SEQ ID NO: 1680005 - DNA, 25 bp, Homo sapien
ggggcagaagggcagtcggctcggg

SEQ ID NO: 1680006 - DNA, 25 bp, Homo sapien
caagcagagtcagcccgacgctgtg

SEQ ID NO: 1680007 - DNA, 25 bp, Homo sapien
gagtcagcccgacgctgtgccacat

SEQ ID NO: 1680008 - DNA, 25 bp, Homo sapien
gcgtggccacgaacacaagcagagt

SEQ ID NO: 1680009 - DNA, 25 bp, Homo sapien
catcagcagcaggacgatcagcagc

SEQ ID NO: 1680010 - DNA, 25 bp, Homo sapien
aatgcaggccaaggttacaatctgg

SEQ ID NO: 1680011 - DNA, 25 bp, Homo sapien
tcgaatgcaggccaaggttacaatc

SEQ ID NO: 1680012 - DNA, 25 bp, Homo sapien
tgcaggccaaggttacaatctgggc

SEQ ID NO: 1680013 - DNA, 25 bp, Homo sapien
cttcgaatgcaggccaaggttacaa

SEQ ID NO: 1680014 - DNA, 25 bp, Homo sapien
agactctcaaaagggcttgtgaccg

SEQ ID NO: 1680015 - DNA, 25 bp, Homo sapien
cagactctcaaaagggcttgtgacc

SEQ ID NO: 1680016 - DNA, 25 bp, Homo sapien
acctttggtccatactgcaaaaagg

SEQ ID NO: 1680017 - DNA, 25 bp, Homo sapien
ctgaggtcatttgctcagcattatc

SEQ ID NO: 1680018 - DNA, 25 bp, Homo sapien
caagcactaggagaaggttctcgtg

SEQ ID NO: 1680019 - DNA, 25 bp, Homo sapien
tacgcttctctctgtagattgctcc

SEQ ID NO: 1680020 - DNA, 25 bp, Homo sapien
tgcacagcggctccattttcctcta

SEQ ID NO: 1680021 - DNA, 25 bp, Homo sapien
aaggatagacaataacgattgctgg

SEQ ID NO: 1680022 - DNA, 25 bp, Homo sapien
tagacaataacgattgctggtgaga

SEQ ID NO: 1680023 - DNA, 25 bp, Homo sapien
tccaaaggatagacaataacgattg

SEQ ID NO: 1680024 - DNA, 25 bp, Homo sapien
cataaattagtaacaccactatgga

SEQ ID NO: 1680025 - DNA, 25 bp, Homo sapien
tccgaagtagctggccttacgggcg

SEQ ID NO: 1680026 - DNA, 25 bp, Homo sapien
gagccaccacgcccggccatggcat

SEQ ID NO: 1680027 - DNA, 25 bp, Homo sapien
cacaccaccatgcccagctgatttt

SEQ ID NO: 1680028 - DNA, 25 bp, Homo sapien
accaccatgcccagctgatttttgt

SEQ ID NO: 1680029 - DNA, 25 bp, Homo sapien
ctttggcgagcggatctgattctgt

SEQ ID NO: 1680030 - DNA, 25 bp, Homo sapien
ctcctttggcgagcggatctgattc

SEQ ID NO: 1680031 - DNA, 25 bp, Homo sapien
ggtgccctcctttggcgagcggatc

SEQ ID NO: 1680032 - DNA, 25 bp, Homo sapien
ccctcctttggcgagcggatctgat

SEQ ID NO: 1680033 - DNA, 25 bp, Homo sapien
tatatggcttacatgtaaatctttt

SEQ ID NO: 1680034 - DNA, 25 bp, Homo sapien
tagtaaatttcaaagcgaagtcagt

SEQ ID NO: 1680035 - DNA, 25 bp, Homo sapien
tttcaaagcgaagtcagtaaaagac

SEQ ID NO: 1680036 - DNA, 25 bp, Homo sapien
cttcagtcattagtaaatttcaaag

SEQ ID NO: 1680037 - DNA, 25 bp, Homo sapien
tcaagcctttaatgtttaccagatc

SEQ ID NO: 1680038 - DNA, 25 bp, Homo sapien
aaaagccaaggaataagtgtataag

SEQ ID NO: 1680039 - DNA, 25 bp, Homo sapien
gtttaccagatctgcaccagtgcaa

SEQ ID NO: 1680040 - DNA, 25 bp, Homo sapien
gccaaggaataagtgtataagtaga

SEQ ID NO: 1680041 - DNA, 25 bp, Homo sapien
cgatcatttctccagcgacgaatat

SEQ ID NO: 1680042 - DNA, 25 bp, Homo sapien
taaagggatgacacgatgacaagct

SEQ ID NO: 1680043 - DNA, 25 bp, Homo sapien
catttgataccaacaaaacacatgt

SEQ ID NO: 1680044 - DNA, 25 bp, Homo sapien
cacatgcacacggtaggagcgttac

SEQ ID NO: 1680045 - DNA, 25 bp, Homo sapien
catcaattcctagggttttggcaac

SEQ ID NO: 1680046 - DNA, 25 bp, Homo sapien
cagaacgtctctcccggtgttgtca

SEQ ID NO: 1680047 - DNA, 25 bp, Homo sapien
gaaacagcgctttgagttaaacaga

SEQ ID NO: 1680048 - DNA, 25 bp, Homo sapien
cactgacgaaacgtagtacagcttc

SEQ ID NO: 1680049 - DNA, 25 bp, Homo sapien
caaacacggaaacctggcaagagag

SEQ ID NO: 1680050 - DNA, 25 bp, Homo sapien
caagagagtcattttacagctaagc

SEQ ID NO: 1680051 - DNA, 25 bp, Homo sapien
cataaagtcctcctatacaaaggga

SEQ ID NO: 1680052 - DNA, 25 bp, Homo sapien
cagagttcagttgagacaaacacgg

SEQ ID NO: 1680053 - DNA, 25 bp, Homo sapien
tcaaaagatggcatgctgatcacca

SEQ ID NO: 1680054 - DNA, 25 bp, Homo sapien
ccaacttggaggatcgtgttaaaca

SEQ ID NO: 1680055 - DNA, 25 bp, Homo sapien
tattccattagtcgcttgagagtcc

SEQ ID NO: 1680056 - DNA, 25 bp, Homo sapien
cctattgtcaagcagcaagatggca

SEQ ID NO: 1680057 - DNA, 25 bp, Homo sapien
gagaagtagacgcatccctggtgcc

SEQ ID NO: 1680058 - DNA, 25 bp, Homo sapien
caaagaaaatgtaccaagccctggc

SEQ ID NO: 1680059 - DNA, 25 bp, Homo sapien
tgataaaggccctaggacctggcgt

SEQ ID NO: 1680060 - DNA, 25 bp, Homo sapien
gacctggcgtataagctcacatgaa

SEQ ID NO: 1680061 - DNA, 25 bp, Homo sapien
gatgtacagtcaaattaccatatcc

SEQ ID NO: 1680062 - DNA, 25 bp, Homo sapien
gcaccaatttgatagacaggttcat

SEQ ID NO: 1680063 - DNA, 25 bp, Homo sapien
tcctctttatgactcttgcaccaat

SEQ ID NO: 1680064 - DNA, 25 bp, Homo sapien
tactaacaattagatactgaatgcc

SEQ ID NO: 1680065 - DNA, 25 bp, Homo sapien
gaaacagtactgagagaccacaatc

SEQ ID NO: 1680066 - DNA, 25 bp, Homo sapien
ggtgcaatagtgtgccccagatcca

SEQ ID NO: 1680067 - DNA, 25 bp, Homo sapien
gctgtcctagccagaatgttctatg

SEQ ID NO: 1680068 - DNA, 25 bp, Homo sapien
gagtgacacccttgtcctgttctga

SEQ ID NO: 1680069 - DNA, 25 bp, Homo sapien
taagtcaacgttttcatagatcgag

SEQ ID NO: 1680070 - DNA, 25 bp, Homo sapien
tgggtgaccaagcagaatcaagtac

SEQ ID NO: 1680071 - DNA, 25 bp, Homo sapien
tcaagtacagttgatcaagcagggt

SEQ ID NO: 1680072 - DNA, 25 bp, Homo sapien
gacttattacataccaaacacgtgg

SEQ ID NO: 1680073 - DNA, 25 bp, Homo sapien
tgtctcctaactgtcaattttccag

SEQ ID NO: 1680074 - DNA, 25 bp, Homo sapien
tcagcagggaatgatgttaaatgaa

SEQ ID NO: 1680075 - DNA, 25 bp, Homo sapien
agagtcagcagggaatgatgttaaa

SEQ ID NO: 1680076 - DNA, 25 bp, Homo sapien
tttgtctcctaactgtcaattttcc

SEQ ID NO: 1680077 - DNA, 25 bp, Homo sapien
tggctactgaggatttgaaacatac

SEQ ID NO: 1680078 - DNA, 25 bp, Homo sapien
ggctattctactggacagcacggta

SEQ ID NO: 1680079 - DNA, 25 bp, Homo sapien
agtcaatattatcagcagttcacag

SEQ ID NO: 1680080 - DNA, 25 bp, Homo sapien
gctgaataacagtcacatatggcta

SEQ ID NO: 1680081 - DNA, 25 bp, Homo sapien
gaagcacattatctatgatcttttg

SEQ ID NO: 1680082 - DNA, 25 bp, Homo sapien
cattatctatgatcttttggcccag

SEQ ID NO: 1680083 - DNA, 25 bp, Homo sapien
tatgcctgactgaattaagcttgct

SEQ ID NO: 1680084 - DNA, 25 bp, Homo sapien
atatgcctgactgaattaagcttgc

SEQ ID NO: 1680085 - DNA, 25 bp, Homo sapien
tgtttagaggccaggaccacagtta

SEQ ID NO: 1680086 - DNA, 25 bp, Homo sapien
ccaaaagccctcttgcggagcaaat

SEQ ID NO: 1680087 - DNA, 25 bp, Homo sapien
ccttgtgatgattctgagcctggca

SEQ ID NO: 1680088 - DNA, 25 bp, Homo sapien
catgatggccaagtgcccaaaagcc

SEQ ID NO: 1680089 - DNA, 25 bp, Homo sapien
atgcccagctgttcaagcgctcttt

SEQ ID NO: 1680090 - DNA, 25 bp, Homo sapien
aatgcccagctgttcaagcgctctt

SEQ ID NO: 1680091 - DNA, 25 bp, Homo sapien
aaatgcccagctgttcaagcgctct

SEQ ID NO: 1680092 - DNA, 25 bp, Homo sapien
gaagcgggagctgcaacgagttgaa

SEQ ID NO: 1680093 - DNA, 25 bp, Homo sapien
tgcctcccggaactcatcctccaca

SEQ ID NO: 1680094 - DNA, 25 bp, Homo sapien
tcctccacaacaagatgaagcggga

SEQ ID NO: 1680095 - DNA, 25 bp, Homo sapien
ccacaacaagatgaagcgggagctg

SEQ ID NO: 1680096 - DNA, 25 bp, Homo sapien
gcactggtcactaccgactggcggt

SEQ ID NO: 1680097 - DNA, 25 bp, Homo sapien
gtctccagcctaatggcactggtca

SEQ ID NO: 1680098 - DNA, 25 bp, Homo sapien
tacggatatatggaaagacacatca

SEQ ID NO: 1680099 - DNA, 25 bp, Homo sapien
gcccttgagatgggtgtctccagcc

SEQ ID NO: 1680100 - DNA, 25 bp, Homo sapien
tcggacagtcagtgggctctcagaa

SEQ ID NO: 1680101 - DNA, 25 bp, Homo sapien
tacaactgtgacattccaggagctg

SEQ ID NO: 1680102 - DNA, 25 bp, Homo sapien
gatgctaaaggctctcgggacttgg

SEQ ID NO: 1680103 - DNA, 25 bp, Homo sapien
tcagaacgacgcatatgatgtcccc

SEQ ID NO: 1680104 - DNA, 25 bp, Homo sapien
tcaaaggttttagccaggtcttcca

SEQ ID NO: 1680105 - DNA, 25 bp, Homo sapien
atgggtcacggccaaatgttggcag

SEQ ID NO: 1680106 - DNA, 25 bp, Homo sapien
cttccaaaatgggtcacggccaaat

SEQ ID NO: 1680107 - DNA, 25 bp, Homo sapien
cggccaaatgttggcaggaaatgat

SEQ ID NO: 1680108 - DNA, 25 bp, Homo sapien
actttttctactgaggggcagaact

SEQ ID NO: 1680109 - DNA, 25 bp, Homo sapien
ggtgatatgcccgcttcaggttccc

SEQ ID NO: 1680110 - DNA, 25 bp, Homo sapien
aggtgatatgcccgcttcaggttcc

SEQ ID NO: 1680111 - DNA, 25 bp, Homo sapien
ctactgaggggcagaacttcctttg

SEQ ID NO: 1680112 - DNA, 25 bp, Homo sapien
caagtcagagaagcctaagccttca

SEQ ID NO: 1680113 - DNA, 25 bp, Homo sapien
gcagagatacggactcatcttccct

SEQ ID NO: 1680114 - DNA, 25 bp, Homo sapien
gacttcttccccttgtatctgctgg

SEQ ID NO: 1680115 - DNA, 25 bp, Homo sapien
catcttcccttggattgatgtcaaa

SEQ ID NO: 1680116 - DNA, 25 bp, Homo sapien
cacgacaacgatgctgcctagaggt

SEQ ID NO: 1680117 - DNA, 25 bp, Homo sapien
gctgcctagaggtgataaactgact

SEQ ID NO: 1680118 - DNA, 25 bp, Homo sapien
gataaactgacttgtggcttttcag

SEQ ID NO: 1680119 - DNA, 25 bp, Homo sapien
ttgtactgcccacgacaacgatgct

SEQ ID NO: 1680120 - DNA, 25 bp, Homo sapien
ggtcaggctcccgatctgcgtcatt

SEQ ID NO: 1680121 - DNA, 25 bp, Homo sapien
gtagttgcgaacactagtttcaggg

SEQ ID NO: 1680122 - DNA, 25 bp, Homo sapien
tggccttcctgtttgctccgtagtt

SEQ ID NO: 1680123 - DNA, 25 bp, Homo sapien
caggctcccgatctgcgtcattatc

SEQ ID NO: 1680124 - DNA, 25 bp, Homo sapien
actgggccttactggtgttgaacac

SEQ ID NO: 1680125 - DNA, 25 bp, Homo sapien
taaactgcgattggcattcatggag

SEQ ID NO: 1680126 - DNA, 25 bp, Homo sapien
ttactggtgttgaacaccttgccaa

SEQ ID NO: 1680127 - DNA, 25 bp, Homo sapien
aagctaacttctccgaccgaacaca

SEQ ID NO: 1680128 - DNA, 25 bp, Homo sapien
cgtggttagctttactctttatgga

SEQ ID NO: 1680129 - DNA, 25 bp, Homo sapien
aaaggcaactgataaagtgactgac

SEQ ID NO: 1680130 - DNA, 25 bp, Homo sapien
aaatctaaaggcaactgataaagtg

SEQ ID NO: 1680131 - DNA, 25 bp, Homo sapien
tattcaatgatctcatcgtggttag

SEQ ID NO: 1680132 - DNA, 25 bp, Homo sapien
agagttctaagatgagtctcggtca

SEQ ID NO: 1680133 - DNA, 25 bp, Homo sapien
caagctgaaagctgtgcctgcgggt

SEQ ID NO: 1680134 - DNA, 25 bp, Homo sapien
gtgtatgcgtgttccttactgtcag

SEQ ID NO: 1680135 - DNA, 25 bp, Homo sapien
tcccttgtgtgtcccggagagttct

SEQ ID NO: 1680136 - DNA, 25 bp, Homo sapien
tgaagtataaggtaagagagtgcct

SEQ ID NO: 1680137 - DNA, 25 bp, Homo sapien
gccgaaatgaagtataaggtaagag

SEQ ID NO: 1680138 - DNA, 25 bp, Homo sapien
cgctgccgaaatgaagtataaggta

SEQ ID NO: 1680139 - DNA, 25 bp, Homo sapien
aatgaagtataaggtaagagagtgc

SEQ ID NO: 1680140 - DNA, 25 bp, Homo sapien
caatatgtgtgacccgcaactctga

SEQ ID NO: 1680141 - DNA, 25 bp, Homo sapien
actgaaggtcgctcaatatgtgtga

SEQ ID NO: 1680142 - DNA, 25 bp, Homo sapien
tcagcaaagccactgaaggtcgctc

SEQ ID NO: 1680143 - DNA, 25 bp, Homo sapien
ggtcgctcaatatgtgtgacccgca

SEQ ID NO: 1680144 - DNA, 25 bp, Homo sapien
ggaatcctagggctgctgcataaat

SEQ ID NO: 1680145 - DNA, 25 bp, Homo sapien
ggaggcccagagttctagccaattt

SEQ ID NO: 1680146 - DNA, 25 bp, Homo sapien
tgcccaccggagtgctggcaagtgc

SEQ ID NO: 1680147 - DNA, 25 bp, Homo sapien
caggagggtctctatgggaatccta

SEQ ID NO: 1680148 - DNA, 25 bp, Homo sapien
ttctagcctcctcttgattttttgc

SEQ ID NO: 1680149 - DNA, 25 bp, Homo sapien
atgccagtgcccagttgcagctgga

SEQ ID NO: 1680150 - DNA, 25 bp, Homo sapien
tggaaaatcattagaatggcatccg

SEQ ID NO: 1680151 - DNA, 25 bp, Homo sapien
atggcatccggtgccatttccctca

SEQ ID NO: 1680152 - DNA, 25 bp, Homo sapien
aatggcaaagctcggaagtagattg

SEQ ID NO: 1680153 - DNA, 25 bp, Homo sapien
ctggagaatggcaaagctcggaagt

SEQ ID NO: 1680154 - DNA, 25 bp, Homo sapien
gagaatggcaaagctcggaagtaga

SEQ ID NO: 1680155 - DNA, 25 bp, Homo sapien
tggagaatggcaaagctcggaagta

SEQ ID NO: 1680156 - DNA, 25 bp, Homo sapien
tccgcccccggagctatgctggatg

SEQ ID NO: 1680157 - DNA, 25 bp, Homo sapien
ctccgcccccggagctatgctggat

SEQ ID NO: 1680158 - DNA, 25 bp, Homo sapien
gatggcttccggaggccagtgtgcg

SEQ ID NO: 1680159 - DNA, 25 bp, Homo sapien
gaagatggcttccggaggccagtgt

SEQ ID NO: 1680160 - DNA, 25 bp, Homo sapien
gattcctttcatgcgctcacgagcg

SEQ ID NO: 1680161 - DNA, 25 bp, Homo sapien
accaggccttgtattatccggattc

SEQ ID NO: 1680162 - DNA, 25 bp, Homo sapien
atgcgctcacgagcgccagctggcg

SEQ ID NO: 1680163 - DNA, 25 bp, Homo sapien
tgtattatccggattcctttcatgc

SEQ ID NO: 1680164 - DNA, 25 bp, Homo sapien
gtgggcagaaaggaatgctccgtcc

SEQ ID NO: 1680165 - DNA, 25 bp, Homo sapien
tccgttcggcaagtcaagggtggac

SEQ ID NO: 1680166 - DNA, 25 bp, Homo sapien
gaatgctccgtccatactccgttcg

SEQ ID NO: 1680167 - DNA, 25 bp, Homo sapien
ttatttccgggctcagtgggcagaa

SEQ ID NO: 1680168 - DNA, 25 bp, Homo sapien
gaacccatgacagcagtggactgag

SEQ ID NO: 1680169 - DNA, 25 bp, Homo sapien
ccatctgcctttgcctgtcactgga

SEQ ID NO: 1680170 - DNA, 25 bp, Homo sapien
tgggccctgggatccatctgccttt

SEQ ID NO: 1680171 - DNA, 25 bp, Homo sapien
cctttgcctgtcactggaacccatg

SEQ ID NO: 1680172 - DNA, 25 bp, Homo sapien
caagcagcctttatcttgatgtggg

SEQ ID NO: 1680173 - DNA, 25 bp, Homo sapien
gttgcagggcagtcgtctgaagccc

SEQ ID NO: 1680174 - DNA, 25 bp, Homo sapien
tggagccatgaacagtcacatgtcg

SEQ ID NO: 1680175 - DNA, 25 bp, Homo sapien
gtcacatgtcgttcattctgatgcg

SEQ ID NO: 1680176 - DNA, 25 bp, Homo sapien
aagcccacgcgagccaacagaacat

SEQ ID NO: 1680177 - DNA, 25 bp, Homo sapien
agaaggaagcccacgcgagccaaca

SEQ ID NO: 1680178 - DNA, 25 bp, Homo sapien
tgtgtaccaggagggcagatccaga

SEQ ID NO: 1680179 - DNA, 25 bp, Homo sapien
acactcaccacgtgtgtaccaggag

SEQ ID NO: 1680180 - DNA, 25 bp, Homo sapien
gcccacttcaggacccagacagcca

SEQ ID NO: 1680181 - DNA, 25 bp, Homo sapien
cgcccacttcaggacccagacagcc

SEQ ID NO: 1680182 - DNA, 25 bp, Homo sapien
cccacttcaggacccagacagccat

SEQ ID NO: 1680183 - DNA, 25 bp, Homo sapien
gctcctgaggtggatgtctgactgt

SEQ ID NO: 1680184 - DNA, 25 bp, Homo sapien
cctgaggtggatgtctgactgtgtc

SEQ ID NO: 1680185 - DNA, 25 bp, Homo sapien
tcctctagtctcaacgtctctctcc

SEQ ID NO: 1680186 - DNA, 25 bp, Homo sapien
gtgctcctgaggtggatgtctgact

SEQ ID NO: 1680187 - DNA, 25 bp, Homo sapien
ctcagctttctcacaaccaaaactg

SEQ ID NO: 1680188 - DNA, 25 bp, Homo sapien
tacaggtaatgagtgggcctcagct

SEQ ID NO: 1680189 - DNA, 25 bp, Homo sapien
cactcctacaggtaatgagtgggcc

SEQ ID NO: 1680190 - DNA, 25 bp, Homo sapien
ctgagatcctgatgtgagtcccgct

SEQ ID NO: 1680191 - DNA, 25 bp, Homo sapien
tcagacgataaattggcttccaaag

SEQ ID NO: 1680192 - DNA, 25 bp, Homo sapien
tgttatgacttgcatggcttcaggt

SEQ ID NO: 1680193 - DNA, 25 bp, Homo sapien
gattacaggagaagaactcagacga

SEQ ID NO: 1680194 - DNA, 25 bp, Homo sapien
ggcttcaggtagttcagaacctgca

SEQ ID NO: 1680195 - DNA, 25 bp, Homo sapien
tgcccagagtgactccactggtctc

SEQ ID NO: 1680196 - DNA, 25 bp, Homo sapien
ttcacatgaactgtccagggcttgg

SEQ ID NO: 1680197 - DNA, 25 bp, Homo sapien
tgctccttcacatgaactgtccagg

SEQ ID NO: 1680198 - DNA, 25 bp, Homo sapien
agtcctgcccagagtgactccactg

SEQ ID NO: 1680199 - DNA, 25 bp, Homo sapien
gcagagcagcacaaaggtcaggcat

SEQ ID NO: 1680200 - DNA, 25 bp, Homo sapien
ggcagagcagcacaaaggtcaggca

SEQ ID NO: 1680201 - DNA, 25 bp, Homo sapien
ctggcagagcagcacaaaggtcagg

SEQ ID NO: 1680202 - DNA, 25 bp, Homo sapien
tggcagagcagcacaaaggtcaggc

SEQ ID NO: 1680203 - DNA, 25 bp, Homo sapien
tcacattgccgagaaagtaagtctt

SEQ ID NO: 1680204 - DNA, 25 bp, Homo sapien
cctttgcaagtcaggtccgggcaca

SEQ ID NO: 1680205 - DNA, 25 bp, Homo sapien
aagggtctcattaaaccacagccct

SEQ ID NO: 1680206 - DNA, 25 bp, Homo sapien
gcttccctggcgatctgagagctag

SEQ ID NO: 1680207 - DNA, 25 bp, Homo sapien
gaatgttgccaccaatctgtcacta

SEQ ID NO: 1680208 - DNA, 25 bp, Homo sapien
gccagtagaatgttgccaccaatct

SEQ ID NO: 1680209 - DNA, 25 bp, Homo sapien
cagctaggccagtagaatgttgcca

SEQ ID NO: 1680210 - DNA, 25 bp, Homo sapien
taggccagtagaatgttgccaccaa

SEQ ID NO: 1680211 - DNA, 25 bp, Homo sapien
tgaattccatgaatagctctgttca

SEQ ID NO: 1680212 - DNA, 25 bp, Homo sapien
gaattccatgaatagctctgttcat

SEQ ID NO: 1680213 - DNA, 25 bp, Homo sapien
ctgaattccatgaatagctctgttc

SEQ ID NO: 1680214 - DNA, 25 bp, Homo sapien
actgccagagagaaacgactggctg

SEQ ID NO: 1680215 - DNA, 25 bp, Homo sapien
acatttgcagggagcactgccagag

SEQ ID NO: 1680216 - DNA, 25 bp, Homo sapien
gataaggtcatggtacattacaagc

SEQ ID NO: 1680217 - DNA, 25 bp, Homo sapien
tcaaatagtcgacatcaagggatac

SEQ ID NO: 1680218 - DNA, 25 bp, Homo sapien
atacgagtggaaagaactcctgtgt

SEQ ID NO: 1680219 - DNA, 25 bp, Homo sapien
gaaatggacacaggcaaataggcaa

SEQ ID NO: 1680220 - DNA, 25 bp, Homo sapien
taacggaatcgtaaggctgtctgga

SEQ ID NO: 1680221 - DNA, 25 bp, Homo sapien
aaatggagtctccttaacggaatcg

SEQ ID NO: 1680222 - DNA, 25 bp, Homo sapien
cttcaagagggagtgtgtgggacat

SEQ ID NO: 1680223 - DNA, 25 bp, Homo sapien
tatctcggggcctttcacttccagc

SEQ ID NO: 1680224 - DNA, 25 bp, Homo sapien
tcgtggtccagtcagggactctcct

SEQ ID NO: 1680225 - DNA, 25 bp, Homo sapien
gtcagggactctcctggacagctgt

SEQ ID NO: 1680226 - DNA, 25 bp, Homo sapien
tcatgggctccagtatctcggggcc

SEQ ID NO: 1680227 - DNA, 25 bp, Homo sapien
cagtagcaaggaaatcgtacaagct

SEQ ID NO: 1680228 - DNA, 25 bp, Homo sapien
ggaaatcgtacaagctcagtggctc

SEQ ID NO: 1680229 - DNA, 25 bp, Homo sapien
agtgctgcagtgaaccgcagtagca

SEQ ID NO: 1680230 - DNA, 25 bp, Homo sapien
gcagtgaaccgcagtagcaaggaaa

SEQ ID NO: 1680231 - DNA, 25 bp, Homo sapien
ctgaccaaggtccagaaaataaaca

SEQ ID NO: 1680232 - DNA, 25 bp, Homo sapien
ccaaggtccagaaaataaacaggag

SEQ ID NO: 1680233 - DNA, 25 bp, Homo sapien
tgaccaaggtccagaaaataaacag

SEQ ID NO: 1680234 - DNA, 25 bp, Homo sapien
agctgcattgcagaaattacactgt

SEQ ID NO: 1680235 - DNA, 25 bp, Homo sapien
cagctgcattgcagaaattacactg

SEQ ID NO: 1680236 - DNA, 25 bp, Homo sapien
tgcattgcagaaattacactgtcaa

SEQ ID NO: 1680237 - DNA, 25 bp, Homo sapien
gctgcattgcagaaattacactgtc

SEQ ID NO: 1680238 - DNA, 25 bp, Homo sapien
tcaaccaaacaaaatggagcccctc

SEQ ID NO: 1680239 - DNA, 25 bp, Homo sapien
caaccaaacaaaatggagcccctca

SEQ ID NO: 1680240 - DNA, 25 bp, Homo sapien
ggactttgacattggtgacctacag

SEQ ID NO: 1680241 - DNA, 25 bp, Homo sapien
tggactttgacattggtgacctaca

SEQ ID NO: 1680242 - DNA, 25 bp, Homo sapien
gactttgacattggtgacctacaga

SEQ ID NO: 1680243 - DNA, 25 bp, Homo sapien
ttggactttgacattggtgacctac

SEQ ID NO: 1680244 - DNA, 25 bp, Homo sapien
cttcaaccattcaacttccattcgg

SEQ ID NO: 1680245 - DNA, 25 bp, Homo sapien
cattcggccattcctcaagaaaatc

SEQ ID NO: 1680246 - DNA, 25 bp, Homo sapien
gtttctctgtttgccagtcaccttc

SEQ ID NO: 1680247 - DNA, 25 bp, Homo sapien
aaccattcaacttccattcggccat

SEQ ID NO: 1680248 - DNA, 25 bp, Homo sapien
gtgctgccacaacgctcagagcatg

SEQ ID NO: 1680249 - DNA, 25 bp, Homo sapien
gcttcctggaggaacagatgctgcc

SEQ ID NO: 1680250 - DNA, 25 bp, Homo sapien
catactaatgagctgcaggctgaca

SEQ ID NO: 1680251 - DNA, 25 bp, Homo sapien
gctttcggagcgcatggctgttgct

SEQ ID NO: 1680252 - DNA, 25 bp, Homo sapien
ggttaactaagacactcagccggca

SEQ ID NO: 1680253 - DNA, 25 bp, Homo sapien
aattttaatacggtggccgcagagc

SEQ ID NO: 1680254 - DNA, 25 bp, Homo sapien
cacggaagccagatactagcaaagg

SEQ ID NO: 1680255 - DNA, 25 bp, Homo sapien
tcctatgcaagcacacaggtgacgt

SEQ ID NO: 1680256 - DNA, 25 bp, Homo sapien
gatacatgcacgttctatcaatgct

SEQ ID NO: 1680257 - DNA, 25 bp, Homo sapien
cgtgcccggcctgatacatgcacgt

SEQ ID NO: 1680258 - DNA, 25 bp, Homo sapien
cctttggcttactgacaagtaagga

SEQ ID NO: 1680259 - DNA, 25 bp, Homo sapien
ctatcaatgctctctacctttggct

SEQ ID NO: 1680260 - DNA, 25 bp, Homo sapien
ggcaaagtagagacaaagggtcacc

SEQ ID NO: 1680261 - DNA, 25 bp, Homo sapien
gctcaagttgttctgctttaaagga

SEQ ID NO: 1680262 - DNA, 25 bp, Homo sapien
gcccaagggtctggcaccataggaa

SEQ ID NO: 1680263 - DNA, 25 bp, Homo sapien
tgcacaccggcctttagctttagct

SEQ ID NO: 1680264 - DNA, 25 bp, Homo sapien
ccagagctgactcaaccattccagg

SEQ ID NO: 1680265 - DNA, 25 bp, Homo sapien
cagagctgactcaaccattccaggg

SEQ ID NO: 1680266 - DNA, 25 bp, Homo sapien
tcaaccattccaggggaagattggt

SEQ ID NO: 1680267 - DNA, 25 bp, Homo sapien
cattccaggggaagattggtaagaa

SEQ ID NO: 1680268 - DNA, 25 bp, Homo sapien
tgtgcgtcaaaaccctaaagaactg

SEQ ID NO: 1680269 - DNA, 25 bp, Homo sapien
gctaagctcccagttcccaaagtga

SEQ ID NO: 1680270 - DNA, 25 bp, Homo sapien
tcagggaggacatctgcaagcgtgc

SEQ ID NO: 1680271 - DNA, 25 bp, Homo sapien
gacccctacactgaagttggctgga

SEQ ID NO: 1680272 - DNA, 25 bp, Homo sapien
gatcagagcttttacgcaaacagag

SEQ ID NO: 1680273 - DNA, 25 bp, Homo sapien
caaccaggaggccagttggcctgca

SEQ ID NO: 1680274 - DNA, 25 bp, Homo sapien
ttttacgcaaacagagcaggtgcag

SEQ ID NO: 1680275 - DNA, 25 bp, Homo sapien
tctgagatcagagcttttacgcaaa

SEQ ID NO: 1680276 - DNA, 25 bp, Homo sapien
gtgaactatgaacatctcagcctag

SEQ ID NO: 1680277 - DNA, 25 bp, Homo sapien
tctctaagctagataggccaaggat

SEQ ID NO: 1680278 - DNA, 25 bp, Homo sapien
tctgttcccgattagtatgctgagg

SEQ ID NO: 1680279 - DNA, 25 bp, Homo sapien
ctcagcctagaaggataatgtgacc

SEQ ID NO: 1680280 - DNA, 25 bp, Homo sapien
tggtgacgtgggactcagtactttc

SEQ ID NO: 1680281 - DNA, 25 bp, Homo sapien
caaatatggagctcctgagagtgag

SEQ ID NO: 1680282 - DNA, 25 bp, Homo sapien
gaaaaatgataagccctttgctggg

SEQ ID NO: 1680283 - DNA, 25 bp, Homo sapien
catgggactccatccgaaaaatgat

SEQ ID NO: 1680284 - DNA, 25 bp, Homo sapien
tgtctctgtaacccctctagccttt

SEQ ID NO: 1680285 - DNA, 25 bp, Homo sapien
gggacttgccagcttgctactccac

SEQ ID NO: 1680286 - DNA, 25 bp, Homo sapien
tttctgggggacttgccagcttgct

SEQ ID NO: 1680287 - DNA, 25 bp, Homo sapien
accctgcccacgtgaaacccttgct

SEQ ID NO: 1680288 - DNA, 25 bp, Homo sapien
tgtcaaccacgccacttcaagatgt

SEQ ID NO: 1680289 - DNA, 25 bp, Homo sapien
tgagcctcgttccaatagcagtgcc

SEQ ID NO: 1680290 - DNA, 25 bp, Homo sapien
ttgagtggcacccaagactgagcct

SEQ ID NO: 1680291 - DNA, 25 bp, Homo sapien
cacacactagtgatggaagcctgca

SEQ ID NO: 1680292 - DNA, 25 bp, Homo sapien
gcatccttcttcaaaccgtaactgg

SEQ ID NO: 1680293 - DNA, 25 bp, Homo sapien
ttttcaggttcagagaagatggagc

SEQ ID NO: 1680294 - DNA, 25 bp, Homo sapien
cctaacatgagcaaagtagcatcct

SEQ ID NO: 1680295 - DNA, 25 bp, Homo sapien
tcttggagctataagcaccattagg

SEQ ID NO: 1680296 - DNA, 25 bp, Homo sapien
gatccgctccagcatttgaataaca

SEQ ID NO: 1680297 - DNA, 25 bp, Homo sapien
ccagcatttgaataacagcctgatt

SEQ ID NO: 1680298 - DNA, 25 bp, Homo sapien
aacagcctgattgaaaaacaaagct

SEQ ID NO: 1680299 - DNA, 25 bp, Homo sapien
cctgattgaaaaacaaagctctact

SEQ ID NO: 1680300 - DNA, 25 bp, Homo sapien
ggaaccatttggactggaatgcagg

SEQ ID NO: 1680301 - DNA, 25 bp, Homo sapien
gagagccttgtgcacctagtgggtc

SEQ ID NO: 1680302 - DNA, 25 bp, Homo sapien
gaagtgaagctggtatggcccttgc

SEQ ID NO: 1680303 - DNA, 25 bp, Homo sapien
cttgcaaaacgggaaggacacagaa

SEQ ID NO: 1680304 - DNA, 25 bp, Homo sapien
caggcaataacaaattctactgagg

SEQ ID NO: 1680305 - DNA, 25 bp, Homo sapien
acatgatatatgtggccatgggcag

SEQ ID NO: 1680306 - DNA, 25 bp, Homo sapien
tatgccctgaaagaatatcaggctt

SEQ ID NO: 1680307 - DNA, 25 bp, Homo sapien
attcttaatttatgccctgaaagaa

SEQ ID NO: 1680308 - DNA, 25 bp, Homo sapien
tatctaggtaccttggcttagccaa

SEQ ID NO: 1680309 - DNA, 25 bp, Homo sapien
aattaaccatctcagatactgtatc

SEQ ID NO: 1680310 - DNA, 25 bp, Homo sapien
gaagaatgtttgatcaatatctagg

SEQ ID NO: 1680311 - DNA, 25 bp, Homo sapien
cacctacattatggaaggtcatttg

SEQ ID NO: 1680312 - DNA, 25 bp, Homo sapien
actgtagttaccagtgagaggtgac

SEQ ID NO: 1680313 - DNA, 25 bp, Homo sapien
agccctcgtttgctcttggcgtctc

SEQ ID NO: 1680314 - DNA, 25 bp, Homo sapien
acaatgtactagcagccctcgtttg

SEQ ID NO: 1680315 - DNA, 25 bp, Homo sapien
tactagcagccctcgtttgctcttg

SEQ ID NO: 1680316 - DNA, 25 bp, Homo sapien
ggctgtcctctggacccaaaaccca

SEQ ID NO: 1680317 - DNA, 25 bp, Homo sapien
gttaggacactcaggatcagtcagg

SEQ ID NO: 1680318 - DNA, 25 bp, Homo sapien
ctctggacccaaaacccatggttag

SEQ ID NO: 1680319 - DNA, 25 bp, Homo sapien
caaaacccatggttaggacactcag

SEQ ID NO: 1680320 - DNA, 25 bp, Homo sapien
ccgggtcttaagctgtagaaaactg

SEQ ID NO: 1680321 - DNA, 25 bp, Homo sapien
tctcccatcaagaaccgggtcttaa

SEQ ID NO: 1680322 - DNA, 25 bp, Homo sapien
cttaagctgtagaaaactgtcagca

SEQ ID NO: 1680323 - DNA, 25 bp, Homo sapien
aaaactgtcagcatacaagtatttg

SEQ ID NO: 1680324 - DNA, 25 bp, Homo sapien
gccttccaagatcttgcttccagaa

SEQ ID NO: 1680325 - DNA, 25 bp, Homo sapien
ggccatggcaggtgttggttaaaga

SEQ ID NO: 1680326 - DNA, 25 bp, Homo sapien
tttgcacagtcctaagaaatgacct

SEQ ID NO: 1680327 - DNA, 25 bp, Homo sapien
gagatgaaagaactactagaatcaa

SEQ ID NO: 1680328 - DNA, 25 bp, Homo sapien
ctgtttcataagttgggtggcccca

SEQ ID NO: 1680329 - DNA, 25 bp, Homo sapien
tgtttcataagttgggtggccccag

SEQ ID NO: 1680330 - DNA, 25 bp, Homo sapien
agcagtaaagcctttctctgtttca

SEQ ID NO: 1680331 - DNA, 25 bp, Homo sapien
cagtaaagcctttctctgtttcata

SEQ ID NO: 1680332 - DNA, 25 bp, Homo sapien
accgtgaccttctcccagcagaggg

SEQ ID NO: 1680333 - DNA, 25 bp, Homo sapien
ctgtcatcttggaccgtgaccttct

SEQ ID NO: 1680334 - DNA, 25 bp, Homo sapien
ttggaccgtgaccttctcccagcag

SEQ ID NO: 1680335 - DNA, 25 bp, Homo sapien
agcagaggggactttctgattgtcc

SEQ ID NO: 1680336 - DNA, 25 bp, Homo sapien
tttgtttcattatccaccggtgcct

SEQ ID NO: 1680337 - DNA, 25 bp, Homo sapien
catttcatgcttgtctactccagta

SEQ ID NO: 1680338 - DNA, 25 bp, Homo sapien
gtgccttggagccatgaactttccc

SEQ ID NO: 1680339 - DNA, 25 bp, Homo sapien
cggaaacgtctctggaaaattcatt

SEQ ID NO: 1680340 - DNA, 25 bp, Homo sapien
gctcaagttttagaaatccagattt

SEQ ID NO: 1680341 - DNA, 25 bp, Homo sapien
ctcaagttttagaaatccagatttt

SEQ ID NO: 1680342 - DNA, 25 bp, Homo sapien
tgctctgagcgatattgcagtgctt

SEQ ID NO: 1680343 - DNA, 25 bp, Homo sapien
tgcagtgctttgcagaacccgggca

SEQ ID NO: 1680344 - DNA, 25 bp, Homo sapien
gcagaatccacttgcaacaccaggg

SEQ ID NO: 1680345 - DNA, 25 bp, Homo sapien
cagcccacctgggtaattcagaagc

SEQ ID NO: 1680346 - DNA, 25 bp, Homo sapien
tcgcaaccagaggtctgaagagcac

SEQ ID NO: 1680347 - DNA, 25 bp, Homo sapien
ggtgaccctgcgctgagagtaatcg

SEQ ID NO: 1680348 - DNA, 25 bp, Homo sapien
cccttcactaagtttgctccaagtg

SEQ ID NO: 1680349 - DNA, 25 bp, Homo sapien
agctgattaaggcaagcgcccttca

SEQ ID NO: 1680350 - DNA, 25 bp, Homo sapien
ccatgaaaagcgtgaaagcacggtc

SEQ ID NO: 1680351 - DNA, 25 bp, Homo sapien
catattttgcaggactcttcagcca

SEQ ID NO: 1680352 - DNA, 25 bp, Homo sapien
gactggcgacgttgggactattttc

SEQ ID NO: 1680353 - DNA, 25 bp, Homo sapien
cacggtcaggattacagggacagcc

SEQ ID NO: 1680354 - DNA, 25 bp, Homo sapien
tatccaaggtaagagttgaggtgct

SEQ ID NO: 1680355 - DNA, 25 bp, Homo sapien
tgtttcaggtcataagaatctgtcc

SEQ ID NO: 1680356 - DNA, 25 bp, Homo sapien
tggtcttcccgaaccagtctggact

SEQ ID NO: 1680357 - DNA, 25 bp, Homo sapien
tactgagatgcctgcaaggaacaca

SEQ ID NO: 1680358 - DNA, 25 bp, Homo sapien
tctgccctacagaatagctttaaca

SEQ ID NO: 1680359 - DNA, 25 bp, Homo sapien
tggaatagtgccctctgccctacag

SEQ ID NO: 1680360 - DNA, 25 bp, Homo sapien
cctacagaatagctttaacaaacaa

SEQ ID NO: 1680361 - DNA, 25 bp, Homo sapien
gtgccctctgccctacagaatagct

SEQ ID NO: 1680362 - DNA, 25 bp, Homo sapien
tgctgaaagtggttgagatcttgtc

SEQ ID NO: 1680363 - DNA, 25 bp, Homo sapien
gcgtggagcttcatggtgtcttgaa

SEQ ID NO: 1680364 - DNA, 25 bp, Homo sapien
acaagatgaccagatgcgtggagct

SEQ ID NO: 1680365 - DNA, 25 bp, Homo sapien
cattctccgcaaagctttgctgaaa

SEQ ID NO: 1680366 - DNA, 25 bp, Homo sapien
tccatcctccattcacaagaaaggc

SEQ ID NO: 1680367 - DNA, 25 bp, Homo sapien
agtttgctgggtgtcatagcagatg

SEQ ID NO: 1680368 - DNA, 25 bp, Homo sapien
gatgcagtaggcagactgctcggac

SEQ ID NO: 1680369 - DNA, 25 bp, Homo sapien
aggcagactgctcggaccagctcca

SEQ ID NO: 1680370 - DNA, 25 bp, Homo sapien
tggaaaacctgactatggaatttgt

SEQ ID NO: 1680371 - DNA, 25 bp, Homo sapien
tgaccatgaacgtggtttacccagt

SEQ ID NO: 1680372 - DNA, 25 bp, Homo sapien
aaacctgactatggaatttgtgctg

SEQ ID NO: 1680373 - DNA, 25 bp, Homo sapien
tacccagtgcaaggcttgtccattg

SEQ ID NO: 1680374 - DNA, 25 bp, Homo sapien
tgcagttgggaactgcatacaagtt

SEQ ID NO: 1680375 - DNA, 25 bp, Homo sapien
ttcttccatgtgcagttgggaactg

SEQ ID NO: 1680376 - DNA, 25 bp, Homo sapien
ccatgtgcagttgggaactgcatac

SEQ ID NO: 1680377 - DNA, 25 bp, Homo sapien
tttcttccatgtgcagttgggaact

SEQ ID NO: 1680378 - DNA, 25 bp, Homo sapien
ctttcaaggtcttgtagtaacctga

SEQ ID NO: 1680379 - DNA, 25 bp, Homo sapien
taacctgaaggccagattgggcttc

SEQ ID NO: 1680380 - DNA, 25 bp, Homo sapien
gtcttgtagtaacctgaaggccaga

SEQ ID NO: 1680381 - DNA, 25 bp, Homo sapien
tgtagtaacctgaaggccagattgg

SEQ ID NO: 1680382 - DNA, 25 bp, Homo sapien
gctcccaaagcaatagatgatcctc

SEQ ID NO: 1680383 - DNA, 25 bp, Homo sapien
taagccaggtcacaccagaattcct

SEQ ID NO: 1680384 - DNA, 25 bp, Homo sapien
ccagtgcagctcttgtagatctcaa

SEQ ID NO: 1680385 - DNA, 25 bp, Homo sapien
tgagcctaaccaataccggtgattg

SEQ ID NO: 1680386 - DNA, 25 bp, Homo sapien
taagctgttctatgaccgaggccac

SEQ ID NO: 1680387 - DNA, 25 bp, Homo sapien
caggaccttcagtaacatgtagaca

SEQ ID NO: 1680388 - DNA, 25 bp, Homo sapien
cagcatcaagtatggttgtcaaccc

SEQ ID NO: 1680389 - DNA, 25 bp, Homo sapien
taagtcagctgagtacacattggca

SEQ ID NO: 1680390 - DNA, 25 bp, Homo sapien
catattcagaagattaggaagacca

SEQ ID NO: 1680391 - DNA, 25 bp, Homo sapien
gattaccataccagacaaaagcatt

SEQ ID NO: 1680392 - DNA, 25 bp, Homo sapien
aagaaaaagagtacccctgcagtag

SEQ ID NO: 1680393 - DNA, 25 bp, Homo sapien
gaagaccactagagtaatatactgt

SEQ ID NO: 1680394 - DNA, 25 bp, Homo sapien
tggaaggaacactacagcaatgccc

SEQ ID NO: 1680395 - DNA, 25 bp, Homo sapien
cccagcatgctcaagccaggtattt

SEQ ID NO: 1680396 - DNA, 25 bp, Homo sapien
tatgcacttgtactctagttaggca

SEQ ID NO: 1680397 - DNA, 25 bp, Homo sapien
ccagtgtgtcttgcataaccttgac

SEQ ID NO: 1680398 - DNA, 25 bp, Homo sapien
tcagttgtaacttctatgccattgg

SEQ ID NO: 1680399 - DNA, 25 bp, Homo sapien
taacttctatgccattggctctccc

SEQ ID NO: 1680400 - DNA, 25 bp, Homo sapien
ccattctcagtttcagttgtaactt

SEQ ID NO: 1680401 - DNA, 25 bp, Homo sapien
gttgtaacttctatgccattggctc

SEQ ID NO: 1680402 - DNA, 25 bp, Homo sapien
gctcatcttactcatcctatgtcct

SEQ ID NO: 1680403 - DNA, 25 bp, Homo sapien
tatgtcctaaatgtgggtgcttccc

SEQ ID NO: 1680404 - DNA, 25 bp, Homo sapien
tccagaccgggtgttccctcttgcg

SEQ ID NO: 1680405 - DNA, 25 bp, Homo sapien
gggtgttccctcttgcgcttgctca

SEQ ID NO: 1680406 - DNA, 25 bp, Homo sapien
atctggcctattgtaaaagtatgag

SEQ ID NO: 1680407 - DNA, 25 bp, Homo sapien
ttttctaccctcaaagaccttagca

SEQ ID NO: 1680408 - DNA, 25 bp, Homo sapien
tgggttaattgggaaactaatgaca

SEQ ID NO: 1680409 - DNA, 25 bp, Homo sapien
gaccttagcatctatttaagggaga

SEQ ID NO: 1680410 - DNA, 25 bp, Homo sapien
aaactgtccagagacaacctagagg

SEQ ID NO: 1680411 - DNA, 25 bp, Homo sapien
gggaacacccattagccttagtcat

SEQ ID NO: 1680412 - DNA, 25 bp, Homo sapien
tctcatgtaagtgagggaacaccca

SEQ ID NO: 1680413 - DNA, 25 bp, Homo sapien
cagagacaacctagaggaaagcttt

SEQ ID NO: 1680414 - DNA, 25 bp, Homo sapien
tgctgcaccgacaggttgatcatgg

SEQ ID NO: 1680415 - DNA, 25 bp, Homo sapien
tgcaccgacaggttgatcatggagt

SEQ ID NO: 1680416 - DNA, 25 bp, Homo sapien
ccgacaggttgatcatggagtggtc

SEQ ID NO: 1680417 - DNA, 25 bp, Homo sapien
aggttgatcatggagtggtcgcccc

SEQ ID NO: 1680418 - DNA, 25 bp, Homo sapien
aaaagtaaatcgaccattgtgggca

SEQ ID NO: 1680419 - DNA, 25 bp, Homo sapien
tatgaagctaacacgcttagaccgc

SEQ ID NO: 1680420 - DNA, 25 bp, Homo sapien
gaaatgcgctcaagtctcagcacta

SEQ ID NO: 1680421 - DNA, 25 bp, Homo sapien
tcagcactaaagctactccgcgcgt

SEQ ID NO: 1680422 - DNA, 25 bp, Homo sapien
tccaaggtatgcctgcacaaatata

SEQ ID NO: 1680423 - DNA, 25 bp, Homo sapien
taccggcaatcatcatgtaaagtca

SEQ ID NO: 1680424 - DNA, 25 bp, Homo sapien
ttccattcgaagaaaccagtgtcct

SEQ ID NO: 1680425 - DNA, 25 bp, Homo sapien
taacaatatattccttaccggcaat

SEQ ID NO: 1680426 - DNA, 25 bp, Homo sapien
taaacacgtgagtaacgtgttgcgc

SEQ ID NO: 1680427 - DNA, 25 bp, Homo sapien
cgctatgacattaggacggccatga

SEQ ID NO: 1680428 - DNA, 25 bp, Homo sapien
caggcagtacagtaggtctgttgac

SEQ ID NO: 1680429 - DNA, 25 bp, Homo sapien
gccatgatctcagtaggtgacagaa

SEQ ID NO: 1680430 - DNA, 25 bp, Homo sapien
gacagagatgactcttccctgccta

SEQ ID NO: 1680431 - DNA, 25 bp, Homo sapien
tgctgactgcaatgacagagatgac

SEQ ID NO: 1680432 - DNA, 25 bp, Homo sapien
caccatggacaaacagagaagagaa

SEQ ID NO: 1680433 - DNA, 25 bp, Homo sapien
catcgctccagttacagaagccaga

SEQ ID NO: 1680434 - DNA, 25 bp, Homo sapien
ccacagatggagatggcctgaaaac

SEQ ID NO: 1680435 - DNA, 25 bp, Homo sapien
gacggaaacctactcatgaaaatta

SEQ ID NO: 1680436 - DNA, 25 bp, Homo sapien
ggtaatgtacacttctgagaacggg

SEQ ID NO: 1680437 - DNA, 25 bp, Homo sapien
tgatgtggtatctaagcggctaact

SEQ ID NO: 1680438 - DNA, 25 bp, Homo sapien
tcaaagtgtagcgaggatccttgaa

SEQ ID NO: 1680439 - DNA, 25 bp, Homo sapien
gctactctgtaaatgcccgctactg

SEQ ID NO: 1680440 - DNA, 25 bp, Homo sapien
taccagcgcttccaaaggggccatg

SEQ ID NO: 1680441 - DNA, 25 bp, Homo sapien
agtacagtctgtccaacgccccata

SEQ ID NO: 1680442 - DNA, 25 bp, Homo sapien
acaccaatgttaacctgataggcag

SEQ ID NO: 1680443 - DNA, 25 bp, Homo sapien
tatttagcactcatacgggatttag

SEQ ID NO: 1680444 - DNA, 25 bp, Homo sapien
tgataggcagctaaacaaggtgctt

SEQ ID NO: 1680445 - DNA, 25 bp, Homo sapien
agtgcaatcacttgaacaccagagg

SEQ ID NO: 1680446 - DNA, 25 bp, Homo sapien
ttggattaaacagcaaggctaccag

SEQ ID NO: 1680447 - DNA, 25 bp, Homo sapien
gataataactgcaggacactctaca

SEQ ID NO: 1680448 - DNA, 25 bp, Homo sapien
tccatactgagaaaagtactgcctc

SEQ ID NO: 1680449 - DNA, 25 bp, Homo sapien
catgctattggtaattcctctggaa

SEQ ID NO: 1680450 - DNA, 25 bp, Homo sapien
tgcagtttatttgaggcctcctgac

SEQ ID NO: 1680451 - DNA, 25 bp, Homo sapien
tggggagctgatttcactataaaca

SEQ ID NO: 1680452 - DNA, 25 bp, Homo sapien
actgtaattagtttgggcatgtagg

SEQ ID NO: 1680453 - DNA, 25 bp, Homo sapien
tgggcatgtaggagttccttctttg

SEQ ID NO: 1680454 - DNA, 25 bp, Homo sapien
ggaactgtcccatggttcggaagac

SEQ ID NO: 1680455 - DNA, 25 bp, Homo sapien
gcagtgaaatgtatgctgcaaatac

SEQ ID NO: 1680456 - DNA, 25 bp, Homo sapien
catttaggacttcacttatcctagg

SEQ ID NO: 1680457 - DNA, 25 bp, Homo sapien
cactgtttggtaaacattaagatct

SEQ ID NO: 1680458 - DNA, 25 bp, Homo sapien
caggccctgaagatagccatcattt

SEQ ID NO: 1680459 - DNA, 25 bp, Homo sapien
tgtcacagccatgatatctcagtta

SEQ ID NO: 1680460 - DNA, 25 bp, Homo sapien
tttggagggataacaggctaactct

SEQ ID NO: 1680461 - DNA, 25 bp, Homo sapien
cacattttacggagtatgaactgag

SEQ ID NO: 1680462 - DNA, 25 bp, Homo sapien
taatttaatcctgcttgcactggcc

SEQ ID NO: 1680463 - DNA, 25 bp, Homo sapien
ggcatcgttactccctgaattacat

SEQ ID NO: 1680464 - DNA, 25 bp, Homo sapien
tccaagatgttataacaaggacggg

SEQ ID NO: 1680465 - DNA, 25 bp, Homo sapien
tcagaaattgctccaggcatcgtta

SEQ ID NO: 1680466 - DNA, 25 bp, Homo sapien
taacaattcagagtttcacccgatt

SEQ ID NO: 1680467 - DNA, 25 bp, Homo sapien
taacaaaacacaggatgtagggcgc

SEQ ID NO: 1680468 - DNA, 25 bp, Homo sapien
gactcagacgattgattatgcaccg

SEQ ID NO: 1680469 - DNA, 25 bp, Homo sapien
aaaatgcacggtggtcagtgaagcc

SEQ ID NO: 1680470 - DNA, 25 bp, Homo sapien
tccttaagtgagaagagcaaacctg

SEQ ID NO: 1680471 - DNA, 25 bp, Homo sapien
gctgtaggccacactatgggaaaac

SEQ ID NO: 1680472 - DNA, 25 bp, Homo sapien
ctgaagttcagtcctgattgaagac

SEQ ID NO: 1680473 - DNA, 25 bp, Homo sapien
agttcagtcctgattgaagaccctg

SEQ ID NO: 1680474 - DNA, 25 bp, Homo sapien
tgagtgcaggggcacgtgtgtcccc

SEQ ID NO: 1680475 - DNA, 25 bp, Homo sapien
ccagttgcaaacttgggttttatat

SEQ ID NO: 1680476 - DNA, 25 bp, Homo sapien
ttttatatgagggtaccacattcat

SEQ ID NO: 1680477 - DNA, 25 bp, Homo sapien
ttgggttttatatgagggtaccaca

SEQ ID NO: 1680478 - DNA, 25 bp, Homo sapien
ggttttatatgagggtaccacattc

SEQ ID NO: 1680479 - DNA, 25 bp, Homo sapien
tcagaaactcatagcttgaagcctg

SEQ ID NO: 1680480 - DNA, 25 bp, Homo sapien
tgctcccttccgtggaaccctgtga

SEQ ID NO: 1680481 - DNA, 25 bp, Homo sapien
tgacccccagtgtgtgggtttctgg

SEQ ID NO: 1680482 - DNA, 25 bp, Homo sapien
tggaaccctgtgacattcggcccag

SEQ ID NO: 1680483 - DNA, 25 bp, Homo sapien
tcccataaggagctttgtgtcaaca

SEQ ID NO: 1680484 - DNA, 25 bp, Homo sapien
tgtgtcaacatgatatgactctcca

SEQ ID NO: 1680485 - DNA, 25 bp, Homo sapien
tatagaactgggcagagatcatctg

SEQ ID NO: 1680486 - DNA, 25 bp, Homo sapien
tgtttttctcaggatcgtctcctcc

SEQ ID NO: 1680487 - DNA, 25 bp, Homo sapien
cagctgactcctaccaccgtcatgg

SEQ ID NO: 1680488 - DNA, 25 bp, Homo sapien
tgtctttccatagcacaccctgtcc

SEQ ID NO: 1680489 - DNA, 25 bp, Homo sapien
ttccgtgcttccaggtcagcctcag

SEQ ID NO: 1680490 - DNA, 25 bp, Homo sapien
aacttatcatttatctgcttgcgtg

SEQ ID NO: 1680491 - DNA, 25 bp, Homo sapien
gattgtaggaggaccaatgctcaag

SEQ ID NO: 1680492 - DNA, 25 bp, Homo sapien
tcaacggagattgtaggaggaccaa

SEQ ID NO: 1680493 - DNA, 25 bp, Homo sapien
aggaccaatgctcaagttcagggac

SEQ ID NO: 1680494 - DNA, 25 bp, Homo sapien
tcaagttcagggacaaaggggacat

SEQ ID NO: 1680495 - DNA, 25 bp, Homo sapien
ttcgcagaggtaacagataaagtcc

SEQ ID NO: 1680496 - DNA, 25 bp, Homo sapien
gggccattcgcagaggtaacagata

SEQ ID NO: 1680497 - DNA, 25 bp, Homo sapien
cttccaggggccattcgcagaggta

SEQ ID NO: 1680498 - DNA, 25 bp, Homo sapien
cgcagaggtaacagataaagtccaa

SEQ ID NO: 1680499 - DNA, 25 bp, Homo sapien
tagctcagcattgcacatgagccca

SEQ ID NO: 1680500 - DNA, 25 bp, Homo sapien
caggtggattcagtcaacatgtatc

SEQ ID NO: 1680501 - DNA, 25 bp, Homo sapien
gcccaaataagtgcagggatgaaac

SEQ ID NO: 1680502 - DNA, 25 bp, Homo sapien
ggatgaaacagagtcaatgccttct

SEQ ID NO: 1680503 - DNA, 25 bp, Homo sapien
gctgattggctgctgctgctggaac

SEQ ID NO: 1680504 - DNA, 25 bp, Homo sapien
ttagctgattggctgctgctgctgg

SEQ ID NO: 1680505 - DNA, 25 bp, Homo sapien
tgattggctgctgctgctggaactc

SEQ ID NO: 1680506 - DNA, 25 bp, Homo sapien
attggctgctgctgctggaactcac

SEQ ID NO: 1680507 - DNA, 25 bp, Homo sapien
ccagtgatcaagaggtcctgtctgt

SEQ ID NO: 1680508 - DNA, 25 bp, Homo sapien
tagcttctccagtgatcaagaggtc

SEQ ID NO: 1680509 - DNA, 25 bp, Homo sapien
tgaatagcttctccagtgatcaaga

SEQ ID NO: 1680510 - DNA, 25 bp, Homo sapien
tggtgttctgatgagttctttgtac

SEQ ID NO: 1680511 - DNA, 25 bp, Homo sapien
gaatctctacccttagacatccttg

SEQ ID NO: 1680512 - DNA, 25 bp, Homo sapien
atcaaacctcccgacaatgctggca

SEQ ID NO: 1680513 - DNA, 25 bp, Homo sapien
gacatccttgaagccagtgctctga

SEQ ID NO: 1680514 - DNA, 25 bp, Homo sapien
tgtctgttggtagaagaaaggctgc

SEQ ID NO: 1680515 - DNA, 25 bp, Homo sapien
tggttttccttatcagacgcgtgga

SEQ ID NO: 1680516 - DNA, 25 bp, Homo sapien
tgcacctgtcctcacccgtgttttg

SEQ ID NO: 1680517 - DNA, 25 bp, Homo sapien
acagctgcggtttgttgtgttcgct

SEQ ID NO: 1680518 - DNA, 25 bp, Homo sapien
gcgtgtatttgtgggacttcctaga

SEQ ID NO: 1680519 - DNA, 25 bp, Homo sapien
cacacgtggtgggtccactggaatt

SEQ ID NO: 1680520 - DNA, 25 bp, Homo sapien
tgagcagcaaggatcaatggacatg

SEQ ID NO: 1680521 - DNA, 25 bp, Homo sapien
gcatgttgcatgtcactactcagct

SEQ ID NO: 1680522 - DNA, 25 bp, Homo sapien
gggcatcgcgaacactgtatgtgaa

SEQ ID NO: 1680523 - DNA, 25 bp, Homo sapien
actgagtgcctcaggagagtgagct

SEQ ID NO: 1680524 - DNA, 25 bp, Homo sapien
aactccctaatcctgagtccactga

SEQ ID NO: 1680525 - DNA, 25 bp, Homo sapien
ggaatcacctgagtcatagcccctc

SEQ ID NO: 1680526 - DNA, 25 bp, Homo sapien
ccacgacagaggttcaggttccaca

SEQ ID NO: 1680527 - DNA, 25 bp, Homo sapien
cacgtcttcacattcaaagcctttg

SEQ ID NO: 1680528 - DNA, 25 bp, Homo sapien
gaagctgtaggtcacgtcttcacat

SEQ ID NO: 1680529 - DNA, 25 bp, Homo sapien
cctttgcttagcctggcctgtttta

SEQ ID NO: 1680530 - DNA, 25 bp, Homo sapien
tatagatctggccacatcttccagc

SEQ ID NO: 1680531 - DNA, 25 bp, Homo sapien
tggcaactctccctttgaccgaggt

SEQ ID NO: 1680532 - DNA, 25 bp, Homo sapien
ggggtggtagacctccaagcttctg

SEQ ID NO: 1680533 - DNA, 25 bp, Homo sapien
tttccaaggtcagctgaggggggcc

SEQ ID NO: 1680534 - DNA, 25 bp, Homo sapien
tctttgtgggggtggtagacctcca

SEQ ID NO: 1680535 - DNA, 25 bp, Homo sapien
cagatccagaagttgccacttcaat

SEQ ID NO: 1680536 - DNA, 25 bp, Homo sapien
gatccagaagttgccacttcaattg

SEQ ID NO: 1680537 - DNA, 25 bp, Homo sapien
caggccagatccagaagttgccact

SEQ ID NO: 1680538 - DNA, 25 bp, Homo sapien
ccagaagttgccacttcaattgggt

SEQ ID NO: 1680539 - DNA, 25 bp, Homo sapien
attgctctgggatggaagaccttcc

SEQ ID NO: 1680540 - DNA, 25 bp, Homo sapien
ttttcaccagttctagagggagcct

SEQ ID NO: 1680541 - DNA, 25 bp, Homo sapien
tcagaggatattgctcccaaagggc

SEQ ID NO: 1680542 - DNA, 25 bp, Homo sapien
ggtcatggcacaccttttgggaagg

SEQ ID NO: 1680543 - DNA, 25 bp, Homo sapien
gttcccatgtagggtcctctgaaca

SEQ ID NO: 1680544 - DNA, 25 bp, Homo sapien
aagatggaagtttgatggctgtgta

SEQ ID NO: 1680545 - DNA, 25 bp, Homo sapien
tcctctgaacaagtaatgaagatgg

SEQ ID NO: 1680546 - DNA, 25 bp, Homo sapien
tagtgacatagtgatatcgctgctg

SEQ ID NO: 1680547 - DNA, 25 bp, Homo sapien
ttttaactgcttgtatctgatctga

SEQ ID NO: 1680548 - DNA, 25 bp, Homo sapien
cttagtgcagatgcttaaccagcat

SEQ ID NO: 1680549 - DNA, 25 bp, Homo sapien
ttaaccagcatagcgtcctacagcc

SEQ ID NO: 1680550 - DNA, 25 bp, Homo sapien
atctgatctgaactggctcacccct

SEQ ID NO: 1680551 - DNA, 25 bp, Homo sapien
caaagcgctagcaaataagaaaggc

SEQ ID NO: 1680552 - DNA, 25 bp, Homo sapien
cctgaactgccacagtgtactgcca

SEQ ID NO: 1680553 - DNA, 25 bp, Homo sapien
ccaaagcgctagcaaataagaaagg

SEQ ID NO: 1680554 - DNA, 25 bp, Homo sapien
ccacagtgtactgccaaagcgctag

SEQ ID NO: 1680555 - DNA, 25 bp, Homo sapien
ggcaatcccgtcatcaaagcctggg

SEQ ID NO: 1680556 - DNA, 25 bp, Homo sapien
tagacactggtaaggcaaacaccgg

SEQ ID NO: 1680557 - DNA, 25 bp, Homo sapien
gatgctaccatccaaaaggactgct

SEQ ID NO: 1680558 - DNA, 25 bp, Homo sapien
ttgataccaagcatgtgggaagggc

SEQ ID NO: 1680559 - DNA, 25 bp, Homo sapien
agtgtactccacaatctcctgactg

SEQ ID NO: 1680560 - DNA, 25 bp, Homo sapien
gcctgggtagtacattcagtgtact

SEQ ID NO: 1680561 - DNA, 25 bp, Homo sapien
attcagtgtactccacaatctcctg

SEQ ID NO: 1680562 - DNA, 25 bp, Homo sapien
ctccacaatctcctgactgcacatt

SEQ ID NO: 1680563 - DNA, 25 bp, Homo sapien
tgttgaagcatttggagcatcctcc

SEQ ID NO: 1680564 - DNA, 25 bp, Homo sapien
ttgaagcatttggagcatcctccat

SEQ ID NO: 1680565 - DNA, 25 bp, Homo sapien
tactgttgaagcatttggagcatcc

SEQ ID NO: 1680566 - DNA, 25 bp, Homo sapien
ctctgtttactgttgaagcatttgg

SEQ ID NO: 1680567 - DNA, 25 bp, Homo sapien
cttattttggttattcttcttggct

SEQ ID NO: 1680568 - DNA, 25 bp, Homo sapien
tggttattcttcttggctacctgac

SEQ ID NO: 1680569 - DNA, 25 bp, Homo sapien
tattttggttattcttcttggctac

SEQ ID NO: 1680570 - DNA, 25 bp, Homo sapien
tttggttattcttcttggctacctg

SEQ ID NO: 1680571 - DNA, 25 bp, Homo sapien
tctgcctgctaacagtgttcatggc

SEQ ID NO: 1680572 - DNA, 25 bp, Homo sapien
tcatgtcgtccacaggcttgtctct

SEQ ID NO: 1680573 - DNA, 25 bp, Homo sapien
attttcattgagtttgcttccctgc

SEQ ID NO: 1680574 - DNA, 25 bp, Homo sapien
gatcacggcactgtccatttatagg

SEQ ID NO: 1680575 - DNA, 25 bp, Homo sapien
tggctgaagggaggaccatgtcccc

SEQ ID NO: 1680576 - DNA, 25 bp, Homo sapien
gaacctgtggcatagtacatactgt

SEQ ID NO: 1680577 - DNA, 25 bp, Homo sapien
catgtccccttaaagaaggaacctg

SEQ ID NO: 1680578 - DNA, 25 bp, Homo sapien
tccaaaccagttcacccatccagat

SEQ ID NO: 1680579 - DNA, 25 bp, Homo sapien
gggaacctggccctgtgcggcacaa

SEQ ID NO: 1680580 - DNA, 25 bp, Homo sapien
tgccactgtgactggtctctgggtc

SEQ ID NO: 1680581 - DNA, 25 bp, Homo sapien
tctctgggtctggatgttcctcctt

SEQ ID NO: 1680582 - DNA, 25 bp, Homo sapien
cctgtgcggcacaaagtcatgccat

SEQ ID NO: 1680583 - DNA, 25 bp, Homo sapien
ttagcaatttgctgcataaacttca

SEQ ID NO: 1680584 - DNA, 25 bp, Homo sapien
cttgttccagttagcaatttgctgc

SEQ ID NO: 1680585 - DNA, 25 bp, Homo sapien
tagcaatttgctgcataaacttcat

SEQ ID NO: 1680586 - DNA, 25 bp, Homo sapien
gttccagttagcaatttgctgcata

SEQ ID NO: 1680587 - DNA, 25 bp, Homo sapien
cgatgcagacggcattcacggaagg

SEQ ID NO: 1680588 - DNA, 25 bp, Homo sapien
ctgggagaggtagtgtgaaatcata

SEQ ID NO: 1680589 - DNA, 25 bp, Homo sapien
gctgatggcagcactacgatgcaga

SEQ ID NO: 1680590 - DNA, 25 bp, Homo sapien
ggcagcactacgatgcagacggcat

SEQ ID NO: 1680591 - DNA, 25 bp, Homo sapien
ctacttatgggtcataatttgaaca

SEQ ID NO: 1680592 - DNA, 25 bp, Homo sapien
tacttatgggtcataatttgaacac

SEQ ID NO: 1680593 - DNA, 25 bp, Homo sapien
aagggggatccccaagatgacagcc

SEQ ID NO: 1680594 - DNA, 25 bp, Homo sapien
cccaagatgacagccaagaagatgc

SEQ ID NO: 1680595 - DNA, 25 bp, Homo sapien
agatgacagccaagaagatgctaag

SEQ ID NO: 1680596 - DNA, 25 bp, Homo sapien
gatccccaagatgacagccaagaag

SEQ ID NO: 1680597 - DNA, 25 bp, Homo sapien
tcgcttattgggaatgggattgaaa

SEQ ID NO: 1680598 - DNA, 25 bp, Homo sapien
gaatcgtggttctgtggtcgcttat

SEQ ID NO: 1680599 - DNA, 25 bp, Homo sapien
tagggcttaacgaaaatgccgcggc

SEQ ID NO: 1680600 - DNA, 25 bp, Homo sapien
ccattcattctagggcttaacgaaa

SEQ ID NO: 1680601 - DNA, 25 bp, Homo sapien
caggcctgtatggaggattgcatgc

SEQ ID NO: 1680602 - DNA, 25 bp, Homo sapien
gctcctttgggacgccaagcctggc

SEQ ID NO: 1680603 - DNA, 25 bp, Homo sapien
tcctctgttagcagctgctctgcta

SEQ ID NO: 1680604 - DNA, 25 bp, Homo sapien
catgctttcatcttgccgctccttt

SEQ ID NO: 1680605 - DNA, 25 bp, Homo sapien
ggtgctactctcatcagggtcctac

SEQ ID NO: 1680606 - DNA, 25 bp, Homo sapien
gctactctcatcagggtcctacgat

SEQ ID NO: 1680607 - DNA, 25 bp, Homo sapien
ctctcatcagggtcctacgatgatt

SEQ ID NO: 1680608 - DNA, 25 bp, Homo sapien
actctcatcagggtcctacgatgat

SEQ ID NO: 1680609 - DNA, 25 bp, Homo sapien
ccgccagaggaacgcaaaagaagta

SEQ ID NO: 1680610 - DNA, 25 bp, Homo sapien
tatgtaggccgccagaggaacgcaa

SEQ ID NO: 1680611 - DNA, 25 bp, Homo sapien
gaggcactagtcagccccttggaga

SEQ ID NO: 1680612 - DNA, 25 bp, Homo sapien
gattttattccaacttgctactgtc

SEQ ID NO: 1680613 - DNA, 25 bp, Homo sapien
caaattctgactcccatggctggct

SEQ ID NO: 1680614 - DNA, 25 bp, Homo sapien
gagcgcatccggttgtagattacag

SEQ ID NO: 1680615 - DNA, 25 bp, Homo sapien
gaatttccgtcgcagcagaatccca

SEQ ID NO: 1680616 - DNA, 25 bp, Homo sapien
caaggcttgggtgtaagagcgcatc

SEQ ID NO: 1680617 - DNA, 25 bp, Homo sapien
atcctatgagactgctccagcccag

SEQ ID NO: 1680618 - DNA, 25 bp, Homo sapien
tggcaacagcctgtcagatcctatg

SEQ ID NO: 1680619 - DNA, 25 bp, Homo sapien
aggactacagaccaaggcctacagc

SEQ ID NO: 1680620 - DNA, 25 bp, Homo sapien
accaaggcctacagcctggcaacag

SEQ ID NO: 1680621 - DNA, 25 bp, Homo sapien
ctgtgagtcctttcacagggtttga

SEQ ID NO: 1680622 - DNA, 25 bp, Homo sapien
aaatcgttgctgaatgaggcccgcg

SEQ ID NO: 1680623 - DNA, 25 bp, Homo sapien
ggatattcaatgctgtataaattag

SEQ ID NO: 1680624 - DNA, 25 bp, Homo sapien
cacgcagggccgctatctgtgagtc

SEQ ID NO: 1680625 - DNA, 25 bp, Homo sapien
aaagagcccgctgtggattaccctc

SEQ ID NO: 1680626 - DNA, 25 bp, Homo sapien
ccttgatggacacatgccaggagtc

SEQ ID NO: 1680627 - DNA, 25 bp, Homo sapien
gaaaatcatcccacaagagatatgg

SEQ ID NO: 1680628 - DNA, 25 bp, Homo sapien
tgtcagggcccctaagaccataggt

SEQ ID NO: 1680629 - DNA, 25 bp, Homo sapien
ccattgtgccatccctcagtggaga

SEQ ID NO: 1680630 - DNA, 25 bp, Homo sapien
tacttggagagaagctcaaccactg

SEQ ID NO: 1680631 - DNA, 25 bp, Homo sapien
gcaggttcaatgtctcagcaggcca

SEQ ID NO: 1680632 - DNA, 25 bp, Homo sapien
gctgttgacaaacgtccctgatggg

SEQ ID NO: 1680633 - DNA, 25 bp, Homo sapien
tgtgtaaagtattgcatgccccgta

SEQ ID NO: 1680634 - DNA, 25 bp, Homo sapien
tgttaagggttagcacaccatgccc

SEQ ID NO: 1680635 - DNA, 25 bp, Homo sapien
acagttccagtgatatccccaagca

SEQ ID NO: 1680636 - DNA, 25 bp, Homo sapien
caggtgtccctgctagtgtgtaaag

SEQ ID NO: 1680637 - DNA, 25 bp, Homo sapien
gaacaattgccttccatcgccagtg

SEQ ID NO: 1680638 - DNA, 25 bp, Homo sapien
ggcatttggtactaggtgcctctgc

SEQ ID NO: 1680639 - DNA, 25 bp, Homo sapien
tatggcagccagagtaatgacgggc

SEQ ID NO: 1680640 - DNA, 25 bp, Homo sapien
ctgggaaatcaccactatggcagcc

SEQ ID NO: 1680641 - DNA, 25 bp, Homo sapien
tttaaggaagaaagtgcaccggctc

SEQ ID NO: 1680642 - DNA, 25 bp, Homo sapien
cctgcaggtgccctatttaaggaag

SEQ ID NO: 1680643 - DNA, 25 bp, Homo sapien
cttcggctgagcaaggcaccctttt

SEQ ID NO: 1680644 - DNA, 25 bp, Homo sapien
cagattgtctcggtgaggcctgcag

SEQ ID NO: 1680645 - DNA, 25 bp, Homo sapien
ctttgggggccacacagcacttagt

SEQ ID NO: 1680646 - DNA, 25 bp, Homo sapien
ggctttgggggccacacagcactta

SEQ ID NO: 1680647 - DNA, 25 bp, Homo sapien
ggccacacagcacttagtaacccac

SEQ ID NO: 1680648 - DNA, 25 bp, Homo sapien
gggggccacacagcacttagtaacc

SEQ ID NO: 1680649 - DNA, 25 bp, Homo sapien
cataagcctgagaagtaaccgtgag

SEQ ID NO: 1680650 - DNA, 25 bp, Homo sapien
ctagagaggcccgtgtgccataagc

SEQ ID NO: 1680651 - DNA, 25 bp, Homo sapien
tttttattgatggagaaggcccgga

SEQ ID NO: 1680652 - DNA, 25 bp, Homo sapien
aaggcccggaggatctgagtaatgc

SEQ ID NO: 1680653 - DNA, 25 bp, Homo sapien
ctgaaataaacttagaataagtaga

SEQ ID NO: 1680654 - DNA, 25 bp, Homo sapien
agaaaggataaatcagggagcagca

SEQ ID NO: 1680655 - DNA, 25 bp, Homo sapien
tgggcttttctgggcggccaaaata

SEQ ID NO: 1680656 - DNA, 25 bp, Homo sapien
tagaataagtagatgccgttacgtc

SEQ ID NO: 1680657 - DNA, 25 bp, Homo sapien
tttgtcgcaggtgttagtttgtcag

SEQ ID NO: 1680658 - DNA, 25 bp, Homo sapien
cagctttgtcgcaggtgttagtttg

SEQ ID NO: 1680659 - DNA, 25 bp, Homo sapien
tcaattcagctttgtcgcaggtgtt

SEQ ID NO: 1680660 - DNA, 25 bp, Homo sapien
aattcagctttgtcgcaggtgttag

SEQ ID NO: 1680661 - DNA, 25 bp, Homo sapien
caatggtgtacttgttgtgggccac

SEQ ID NO: 1680662 - DNA, 25 bp, Homo sapien
cactgcagaagttgttccggcaaac

SEQ ID NO: 1680663 - DNA, 25 bp, Homo sapien
tagtgatagatttagcacctcggcc

SEQ ID NO: 1680664 - DNA, 25 bp, Homo sapien
aaagaattccggctgctagcaattg

SEQ ID NO: 1680665 - DNA, 25 bp, Homo sapien
tatccagatgagcagcggcagcccc

SEQ ID NO: 1680666 - DNA, 25 bp, Homo sapien
tgggcctggaaatccccgtccagag

SEQ ID NO: 1680667 - DNA, 25 bp, Homo sapien
gagtgttgatctctgtcttgagctc

SEQ ID NO: 1680668 - DNA, 25 bp, Homo sapien
gagaggcggttgcatggccaggtga

SEQ ID NO: 1680669 - DNA, 25 bp, Homo sapien
tggcttggatggagaggcggttgca

SEQ ID NO: 1680670 - DNA, 25 bp, Homo sapien
aaggtgaggccacgtctaaatagct

SEQ ID NO: 1680671 - DNA, 25 bp, Homo sapien
ggtgaggccacgtctaaatagctta

SEQ ID NO: 1680672 - DNA, 25 bp, Homo sapien
gtgaggccacgtctaaatagcttac

SEQ ID NO: 1680673 - DNA, 25 bp, Homo sapien
aggtgaggccacgtctaaatagctt

SEQ ID NO: 1680674 - DNA, 25 bp, Homo sapien
tcaggtatgatgctgcctgctcacc

SEQ ID NO: 1680675 - DNA, 25 bp, Homo sapien
gatgagatactctggaagacatcca

SEQ ID NO: 1680676 - DNA, 25 bp, Homo sapien
tcttgcgaagtgagttcccacccac

SEQ ID NO: 1680677 - DNA, 25 bp, Homo sapien
gctgttgccattcattggtcaggta

SEQ ID NO: 1680678 - DNA, 25 bp, Homo sapien
aatagaggtttcattaaaggatggc

SEQ ID NO: 1680679 - DNA, 25 bp, Homo sapien
ctaagccttatagatagaaacgtgg

SEQ ID NO: 1680680 - DNA, 25 bp, Homo sapien
aattcctgcgcagtccaattcccta

SEQ ID NO: 1680681 - DNA, 25 bp, Homo sapien
gggaagttgcctctgaacgcccact

SEQ ID NO: 1680682 - DNA, 25 bp, Homo sapien
agaggaggaccaacagagggtttgg

SEQ ID NO: 1680683 - DNA, 25 bp, Homo sapien
atagagaggaggaccaacagagggt

SEQ ID NO: 1680684 - DNA, 25 bp, Homo sapien
ctggccatagagaggaggaccaaca

SEQ ID NO: 1680685 - DNA, 25 bp, Homo sapien
tagagaggaggaccaacagagggtt

SEQ ID NO: 1680686 - DNA, 25 bp, Homo sapien
ggtccttagggcctccatgagtcca

SEQ ID NO: 1680687 - DNA, 25 bp, Homo sapien
gtccttagggcctccatgagtccat

SEQ ID NO: 1680688 - DNA, 25 bp, Homo sapien
ggggtccttagggcctccatgagtc

SEQ ID NO: 1680689 - DNA, 25 bp, Homo sapien
ctggggtccttagggcctccatgag

SEQ ID NO: 1680690 - DNA, 25 bp, Homo sapien
gtgaggcatggtcatccaggtgagc

SEQ ID NO: 1680691 - DNA, 25 bp, Homo sapien
gaggtgaggcatggtcatccaggtg

SEQ ID NO: 1680692 - DNA, 25 bp, Homo sapien
ggtgaggcatggtcatccaggtgag

SEQ ID NO: 1680693 - DNA, 25 bp, Homo sapien
aggtgaggcatggtcatccaggtga

SEQ ID NO: 1680694 - DNA, 25 bp, Homo sapien
ctgtaaagatggagtgttgaactaa

SEQ ID NO: 1680695 - DNA, 25 bp, Homo sapien
gatggagtgttgaactaaatttagg

SEQ ID NO: 1680696 - DNA, 25 bp, Homo sapien
taaagatggagtgttgaactaaatt

SEQ ID NO: 1680697 - DNA, 25 bp, Homo sapien
agatggagtgttgaactaaatttag

SEQ ID NO: 1680698 - DNA, 25 bp, Homo sapien
agttacttcggcttctgatggtgca

SEQ ID NO: 1680699 - DNA, 25 bp, Homo sapien
tgcctcccactcacagttacttcgg

SEQ ID NO: 1680700 - DNA, 25 bp, Homo sapien
cactcacagttacttcggcttctga

SEQ ID NO: 1680701 - DNA, 25 bp, Homo sapien
tcggcttctgatggtgcactggaaa

SEQ ID NO: 1680702 - DNA, 25 bp, Homo sapien
tctgtgatgtgtccgagggcagtgt

SEQ ID NO: 1680703 - DNA, 25 bp, Homo sapien
gatcctgtggtaccagggtctgtga

SEQ ID NO: 1680704 - DNA, 25 bp, Homo sapien
gcatctctcttcagttgaatcagag

SEQ ID NO: 1680705 - DNA, 25 bp, Homo sapien
agcactgctacatgggcgactcctc

SEQ ID NO: 1680706 - DNA, 25 bp, Homo sapien
tactgtgcattgtgccaacactgca

SEQ ID NO: 1680707 - DNA, 25 bp, Homo sapien
tcctggagtggttaacaagtactgt

SEQ ID NO: 1680708 - DNA, 25 bp, Homo sapien
cagctaatcagaatgagtggctctt

SEQ ID NO: 1680709 - DNA, 25 bp, Homo sapien
cactgctcaatggatataagaagag

SEQ ID NO: 1680710 - DNA, 25 bp, Homo sapien
ctatggcagacggatatctgggtat

SEQ ID NO: 1680711 - DNA, 25 bp, Homo sapien
tggcagacggatatctgggtatctg

SEQ ID NO: 1680712 - DNA, 25 bp, Homo sapien
tatctgggtatctgtccaatatttc

SEQ ID NO: 1680713 - DNA, 25 bp, Homo sapien
cagacggatatctgggtatctgtcc

SEQ ID NO: 1680714 - DNA, 25 bp, Homo sapien
tctctgccaagtggtgcgataaaac

SEQ ID NO: 1680715 - DNA, 25 bp, Homo sapien
gtggtgcgataaaacttgtgagaac

SEQ ID NO: 1680716 - DNA, 25 bp, Homo sapien
gcctctacccaagcctttttctctg

SEQ ID NO: 1680717 - DNA, 25 bp, Homo sapien
tgaggtagctgatgcatctgcatcc

SEQ ID NO: 1680718 - DNA, 25 bp, Homo sapien
gaggatatgaccagacttgctccct

SEQ ID NO: 1680719 - DNA, 25 bp, Homo sapien
cctatcatgggaaacaggtgtttgc

SEQ ID NO: 1680720 - DNA, 25 bp, Homo sapien
ggatcggcctgacccaaattcactg

SEQ ID NO: 1680721 - DNA, 25 bp, Homo sapien
gaatttaaatccaagatgccggccc

SEQ ID NO: 1680722 - DNA, 25 bp, Homo sapien
tgatccaggcttctttatctgtatg

SEQ ID NO: 1680723 - DNA, 25 bp, Homo sapien
tctttatctgtatgttcgtgctggt

SEQ ID NO: 1680724 - DNA, 25 bp, Homo sapien
tgtatgttcgtgctggttacaggca

SEQ ID NO: 1680725 - DNA, 25 bp, Homo sapien
tgttcgtgctggttacaggcagtcc

SEQ ID NO: 1680726 - DNA, 25 bp, Homo sapien
cattggaggaatcttgtaggatcag

SEQ ID NO: 1680727 - DNA, 25 bp, Homo sapien
taggatcaggaaacactgtgcttgt

SEQ ID NO: 1680728 - DNA, 25 bp, Homo sapien
gaggaatcttgtaggatcaggaaac

SEQ ID NO: 1680729 - DNA, 25 bp, Homo sapien
cttgtaggatcaggaaacactgtgc

SEQ ID NO: 1680730 - DNA, 25 bp, Homo sapien
agtagctgtgagttggccgtgccac

SEQ ID NO: 1680731 - DNA, 25 bp, Homo sapien
gtgccactgggggagatctaccatc

SEQ ID NO: 1680732 - DNA, 25 bp, Homo sapien
agtcactaaggatgtagtagctgtg

SEQ ID NO: 1680733 - DNA, 25 bp, Homo sapien
actgggggagatctaccatcagggc

SEQ ID NO: 1680734 - DNA, 25 bp, Homo sapien
tcaaagtcatgaagaaagccggcat

SEQ ID NO: 1680735 - DNA, 25 bp, Homo sapien
ggaatacatatactccccaagagag

SEQ ID NO: 1680736 - DNA, 25 bp, Homo sapien
gcatagcttgaaagaaggaagctcc

SEQ ID NO: 1680737 - DNA, 25 bp, Homo sapien
tagcagcttcaaatcaggccagaca

SEQ ID NO: 1680738 - DNA, 25 bp, Homo sapien
atttaatattctagggtatagttca

SEQ ID NO: 1680739 - DNA, 25 bp, Homo sapien
ttaatattctagggtatagttcagt

SEQ ID NO: 1680740 - DNA, 25 bp, Homo sapien
aacttccattgcctccccctcagcc

SEQ ID NO: 1680741 - DNA, 25 bp, Homo sapien
tcaccgcaaatagaaaagctgtacc

SEQ ID NO: 1680742 - DNA, 25 bp, Homo sapien
tacgtgaatggttcaggtgggccat

SEQ ID NO: 1680743 - DNA, 25 bp, Homo sapien
tgcttagtacgtgaatggttcaggt

SEQ ID NO: 1680744 - DNA, 25 bp, Homo sapien
gggcaggatgtcaatacttgttctt

SEQ ID NO: 1680745 - DNA, 25 bp, Homo sapien
tcttctgactgtctctgcttagtac

SEQ ID NO: 1680746 - DNA, 25 bp, Homo sapien
caaattcacggtcatcagaggaggc

SEQ ID NO: 1680747 - DNA, 25 bp, Homo sapien
tcgagagtttttcagttggtaatcc

SEQ ID NO: 1680748 - DNA, 25 bp, Homo sapien
catgacgcattttgggactcgagat

SEQ ID NO: 1680749 - DNA, 25 bp, Homo sapien
gttcagggttgagttcatgacgcat

SEQ ID NO: 1680750 - DNA, 25 bp, Homo sapien
gatcttgacatatctgcaggctaca

SEQ ID NO: 1680751 - DNA, 25 bp, Homo sapien
tgtgtaacagtgctcaagaatactt

SEQ ID NO: 1680752 - DNA, 25 bp, Homo sapien
tcaaggccaaaaacattatctgcta

SEQ ID NO: 1680753 - DNA, 25 bp, Homo sapien
tagtctaaactgcaaggcttatact

SEQ ID NO: 1680754 - DNA, 25 bp, Homo sapien
tccatggtcccgtgttaccctctcc

SEQ ID NO: 1680755 - DNA, 25 bp, Homo sapien
cctctccatggtcccgtgttaccct

SEQ ID NO: 1680756 - DNA, 25 bp, Homo sapien
tctccatggtcccgtgttaccctct

SEQ ID NO: 1680757 - DNA, 25 bp, Homo sapien
catggtcccgtgttaccctctccat

SEQ ID NO: 1680758 - DNA, 25 bp, Homo sapien
cattttctcctattcgccttggtga

SEQ ID NO: 1680759 - DNA, 25 bp, Homo sapien
ccttggtgacatcttagccttgagg

SEQ ID NO: 1680760 - DNA, 25 bp, Homo sapien
cactgtttgtgtgccagcctggcag

SEQ ID NO: 1680761 - DNA, 25 bp, Homo sapien
tgtttttgcacgtccactggagccg

SEQ ID NO: 1680762 - DNA, 25 bp, Homo sapien
tctctgagaagttgggttcttctgt

SEQ ID NO: 1680763 - DNA, 25 bp, Homo sapien
ctctctgagaagttgggttcttctg

SEQ ID NO: 1680764 - DNA, 25 bp, Homo sapien
gaattcctcataagctatgtccaca

SEQ ID NO: 1680765 - DNA, 25 bp, Homo sapien
tgaaagaattcctcataagctatgt

SEQ ID NO: 1680766 - DNA, 25 bp, Homo sapien
gtccacaagtggcatactgaggaac

SEQ ID NO: 1680767 - DNA, 25 bp, Homo sapien
tgtccacaagtggcatactgaggaa

SEQ ID NO: 1680768 - DNA, 25 bp, Homo sapien
agttctcagtgggatattgaaggag

SEQ ID NO: 1680769 - DNA, 25 bp, Homo sapien
ggtgagttctcagtgggatattgaa

SEQ ID NO: 1680770 - DNA, 25 bp, Homo sapien
tctgcttgagtagaggacggggtga

SEQ ID NO: 1680771 - DNA, 25 bp, Homo sapien
gaaagttcacgatttggcagtggtg

SEQ ID NO: 1680772 - DNA, 25 bp, Homo sapien
caaattaatggagacaggataaaca

SEQ ID NO: 1680773 - DNA, 25 bp, Homo sapien
tggagacaggataaacacatggaaa

SEQ ID NO: 1680774 - DNA, 25 bp, Homo sapien
tggaagattacaaattaatggagac

SEQ ID NO: 1680775 - DNA, 25 bp, Homo sapien
gattacaaattaatggagacaggat

SEQ ID NO: 1680776 - DNA, 25 bp, Homo sapien
ctgtgcctccactttacaccaacag

SEQ ID NO: 1680777 - DNA, 25 bp, Homo sapien
tgtgcctccactttacaccaacaga

SEQ ID NO: 1680778 - DNA, 25 bp, Homo sapien
tcccttatgggtcaaaatatccgca

SEQ ID NO: 1680779 - DNA, 25 bp, Homo sapien
tcgggaccatcactaacaaaacact

SEQ ID NO: 1680780 - DNA, 25 bp, Homo sapien
tcattaggttagcagtctcgggacc

SEQ ID NO: 1680781 - DNA, 25 bp, Homo sapien
gattactaataaagaaggacggcag

SEQ ID NO: 1680782 - DNA, 25 bp, Homo sapien
tgatgttatctagtgcaccgcctcc

SEQ ID NO: 1680783 - DNA, 25 bp, Homo sapien
tgatcctggagacttgcaccgtatg

SEQ ID NO: 1680784 - DNA, 25 bp, Homo sapien
tttcctgctagacgcacagcgggag

SEQ ID NO: 1680785 - DNA, 25 bp, Homo sapien
tgcgccgccgagaagatagacagat

SEQ ID NO: 1680786 - DNA, 25 bp, Homo sapien
tgggatccctccttcacttgacaac

SEQ ID NO: 1680787 - DNA, 25 bp, Homo sapien
ggcggcgcctgggatccctccttca

SEQ ID NO: 1680788 - DNA, 25 bp, Homo sapien
gccgcggctcgggatctccgcgacc

SEQ ID NO: 1680789 - DNA, 25 bp, Homo sapien
gcctgggatccctccttcacttgac

SEQ ID NO: 1680790 - DNA, 25 bp, Homo sapien
ccaagggtctcccgcacgcagccat

SEQ ID NO: 1680791 - DNA, 25 bp, Homo sapien
gtgccaagggtctcccgcacgcagc

SEQ ID NO: 1680792 - DNA, 25 bp, Homo sapien
tgccaagggtctcccgcacgcagcc

SEQ ID NO: 1680793 - DNA, 25 bp, Homo sapien
cggcgagggcgcccagaagtgccaa

SEQ ID NO: 1680794 - DNA, 25 bp, Homo sapien
caaaatgcgtctgcggctggaaggc

SEQ ID NO: 1680795 - DNA, 25 bp, Homo sapien
caccctcttgcaaaatgcgtctgcg

SEQ ID NO: 1680796 - DNA, 25 bp, Homo sapien
ctcttgcaaaatgcgtctgcggctg

SEQ ID NO: 1680797 - DNA, 25 bp, Homo sapien
tgcaaaatgcgtctgcggctggaag

SEQ ID NO: 1680798 - DNA, 25 bp, Homo sapien
cattgtagcgactaggacgagtgat

SEQ ID NO: 1680799 - DNA, 25 bp, Homo sapien
gactaggacgagtgataaaccgttc

SEQ ID NO: 1680800 - DNA, 25 bp, Homo sapien
cagcagcattgtagcgactaggacg

SEQ ID NO: 1680801 - DNA, 25 bp, Homo sapien
agacagcagcattgtagcgactagg

SEQ ID NO: 1680802 - DNA, 25 bp, Homo sapien
gataaagcaagccaccaaaaggcag

SEQ ID NO: 1680803 - DNA, 25 bp, Homo sapien
agctccataaactcaacatacatca

SEQ ID NO: 1680804 - DNA, 25 bp, Homo sapien
caacatacatcaattaatccatgtg

SEQ ID NO: 1680805 - DNA, 25 bp, Homo sapien
aagcaagccaccaaaaggcagctcc

SEQ ID NO: 1680806 - DNA, 25 bp, Homo sapien
tctgggatgaatttgtttagttcga

SEQ ID NO: 1680807 - DNA, 25 bp, Homo sapien
ctcttagatttctgggatgaatttg

SEQ ID NO: 1680808 - DNA, 25 bp, Homo sapien
gggatgaatttgtttagttcgaggc

SEQ ID NO: 1680809 - DNA, 25 bp, Homo sapien
gatgaatttgtttagttcgaggcat

SEQ ID NO: 1680810 - DNA, 25 bp, Homo sapien
gggtgccctccctggacagataaag

SEQ ID NO: 1680811 - DNA, 25 bp, Homo sapien
cacggaggccataaaattgactgca

SEQ ID NO: 1680812 - DNA, 25 bp, Homo sapien
tgtgcaaactagaacagggtgccct

SEQ ID NO: 1680813 - DNA, 25 bp, Homo sapien
taaagcagggcccatgtctccaaat

SEQ ID NO: 1680814 - DNA, 25 bp, Homo sapien
gtcggtgtcaaaacggcacccacca

SEQ ID NO: 1680815 - DNA, 25 bp, Homo sapien
gataggtcggtgtcaaaacggcacc

SEQ ID NO: 1680816 - DNA, 25 bp, Homo sapien
caaaattcttcaacctcacaaagga

SEQ ID NO: 1680817 - DNA, 25 bp, Homo sapien
cctcacaaaggataggtcggtgtca

SEQ ID NO: 1680818 - DNA, 25 bp, Homo sapien
gaacccaggacaacatgctaagcct

SEQ ID NO: 1680819 - DNA, 25 bp, Homo sapien
agtccagtgacccttctccacggaa

SEQ ID NO: 1680820 - DNA, 25 bp, Homo sapien
agagccaccccgtgcagtccagtga

SEQ ID NO: 1680821 - DNA, 25 bp, Homo sapien
tgctaagcctttcttctgaacacca

SEQ ID NO: 1680822 - DNA, 25 bp, Homo sapien
gggaaatccactctaaccaagcaat

SEQ ID NO: 1680823 - DNA, 25 bp, Homo sapien
ttctctgccaatatatccttcctgt

SEQ ID NO: 1680824 - DNA, 25 bp, Homo sapien
cattcattcttctaccaaagtctaa

SEQ ID NO: 1680825 - DNA, 25 bp, Homo sapien
aagaaagttgactcctccgcgaggt

SEQ ID NO: 1680826 - DNA, 25 bp, Homo sapien
catgataagactaaggaccaaaggg

SEQ ID NO: 1680827 - DNA, 25 bp, Homo sapien
gaagtaaaacgtcccatccacagag

SEQ ID NO: 1680828 - DNA, 25 bp, Homo sapien
gaaaaaccacagactaggtgcggtg

SEQ ID NO: 1680829 - DNA, 25 bp, Homo sapien
tgcctctgcagtttagccaaattga

SEQ ID NO: 1680830 - DNA, 25 bp, Homo sapien
gctgctcatgggtggtgatatcccc

SEQ ID NO: 1680831 - DNA, 25 bp, Homo sapien
cattgtgtgacaggactaaactctt

SEQ ID NO: 1680832 - DNA, 25 bp, Homo sapien
tcataaaagatttgcaccacctggt

SEQ ID NO: 1680833 - DNA, 25 bp, Homo sapien
ttgataaaagcccagatcccttcct

SEQ ID NO: 1680834 - DNA, 25 bp, Homo sapien
cttggtactgtcttcgtgagagtga

SEQ ID NO: 1680835 - DNA, 25 bp, Homo sapien
acagaccgactgatagtttggatat

SEQ ID NO: 1680836 - DNA, 25 bp, Homo sapien
ttgtattgtaatgcccaatgctgga

SEQ ID NO: 1680837 - DNA, 25 bp, Homo sapien
catgttgtattgtaatgcccaatgc

SEQ ID NO: 1680838 - DNA, 25 bp, Homo sapien
tagcctctatggttctttaaactgg

SEQ ID NO: 1680839 - DNA, 25 bp, Homo sapien
taaaaacaagcattctgtattcgcc

SEQ ID NO: 1680840 - DNA, 25 bp, Homo sapien
tattggttggaaggccaagaattgc

SEQ ID NO: 1680841 - DNA, 25 bp, Homo sapien
ttagagagtgtatccaggtaccatg

SEQ ID NO: 1680842 - DNA, 25 bp, Homo sapien
gccatgacaggtcggccatccccat

SEQ ID NO: 1680843 - DNA, 25 bp, Homo sapien
cagccatgacaggtcggccatcccc

SEQ ID NO: 1680844 - DNA, 25 bp, Homo sapien
agccatgacaggtcggccatcccca

SEQ ID NO: 1680845 - DNA, 25 bp, Homo sapien
gggatatccaacagtaacagcttcc

SEQ ID NO: 1680846 - DNA, 25 bp, Homo sapien
tctgaggacttcacatctacatctg

SEQ ID NO: 1680847 - DNA, 25 bp, Homo sapien
ctaatcgtttatcagctctgccatt

SEQ ID NO: 1680848 - DNA, 25 bp, Homo sapien
ttcaggccctactgggggatatcca

SEQ ID NO: 1680849 - DNA, 25 bp, Homo sapien
gagaatatgcgtactaacacaattt

SEQ ID NO: 1680850 - DNA, 25 bp, Homo sapien
gagtgagaatatgcgtactaacaca

SEQ ID NO: 1680851 - DNA, 25 bp, Homo sapien
gtgagaatatgcgtactaacacaat

SEQ ID NO: 1680852 - DNA, 25 bp, Homo sapien
gaatatgcgtactaacacaattttt

SEQ ID NO: 1680853 - DNA, 25 bp, Homo sapien
tgccagtgacaatagtcaggtacat

SEQ ID NO: 1680854 - DNA, 25 bp, Homo sapien
tattgccagtgacaatagtcaggta

SEQ ID NO: 1680855 - DNA, 25 bp, Homo sapien
tgtattgccagtgacaatagtcagg

SEQ ID NO: 1680856 - DNA, 25 bp, Homo sapien
ctgtattgccagtgacaatagtcag

SEQ ID NO: 1680857 - DNA, 25 bp, Homo sapien
ctctggacacaatggcatcgccacc

SEQ ID NO: 1680858 - DNA, 25 bp, Homo sapien
atcgccaccagggatgacgttagca

SEQ ID NO: 1680859 - DNA, 25 bp, Homo sapien
ccaccagggatgacgttagcaggat

SEQ ID NO: 1680860 - DNA, 25 bp, Homo sapien
ttgaatgtaaccctgaacaaagcgt

SEQ ID NO: 1680861 - DNA, 25 bp, Homo sapien
cttttgtaatcctttccagaattgg

SEQ ID NO: 1680862 - DNA, 25 bp, Homo sapien
aatcctttccagaattggtaattct

SEQ ID NO: 1680863 - DNA, 25 bp, Homo sapien
taaacaatgtcctcttcttttgtaa

SEQ ID NO: 1680864 - DNA, 25 bp, Homo sapien
ctaaacaatgtcctcttcttttgta

SEQ ID NO: 1680865 - DNA, 25 bp, Homo sapien
gacaatgcggaccaagtcaaacgaa

SEQ ID NO: 1680866 - DNA, 25 bp, Homo sapien
cagcaccaagcctgacaatgcggac

SEQ ID NO: 1680867 - DNA, 25 bp, Homo sapien
caagcctgacaatgcggaccaagtc

SEQ ID NO: 1680868 - DNA, 25 bp, Homo sapien
gaccaagtcaaacgaaacacagacc

SEQ ID NO: 1680869 - DNA, 25 bp, Homo sapien
ttctgagaaaagcttggtctactgg

SEQ ID NO: 1680870 - DNA, 25 bp, Homo sapien
tgagaaaagcttggtctactggtac

SEQ ID NO: 1680871 - DNA, 25 bp, Homo sapien
agaaaagcttggtctactggtactg

SEQ ID NO: 1680872 - DNA, 25 bp, Homo sapien
aaaagcttggtctactggtactggg

SEQ ID NO: 1680873 - DNA, 25 bp, Homo sapien
ctgtactatgtgttggagcaaatcc

SEQ ID NO: 1680874 - DNA, 25 bp, Homo sapien
tctgtctgccttatcaaagctgctg

SEQ ID NO: 1680875 - DNA, 25 bp, Homo sapien
ctgtctgccttatcaaagctgctgc

SEQ ID NO: 1680876 - DNA, 25 bp, Homo sapien
gatgccacgtttggatatttccagg

SEQ ID NO: 1680877 - DNA, 25 bp, Homo sapien
gaggagttcatctgatggaccaaat

SEQ ID NO: 1680878 - DNA, 25 bp, Homo sapien
tacaaagcttggcaactcggatgaa

SEQ ID NO: 1680879 - DNA, 25 bp, Homo sapien
gaccaaatatacaggatggatagag

SEQ ID NO: 1680880 - DNA, 25 bp, Homo sapien
tctgccccattaagttctttttgtg

SEQ ID NO: 1680881 - DNA, 25 bp, Homo sapien
tgccccattaagttctttttgtgct

SEQ ID NO: 1680882 - DNA, 25 bp, Homo sapien
cttctgccccattaagttctttttg

SEQ ID NO: 1680883 - DNA, 25 bp, Homo sapien
catttctgtaggtgactgctatcat

SEQ ID NO: 1680884 - DNA, 25 bp, Homo sapien
gtaacatttctgtaggtgactgcta

SEQ ID NO: 1680885 - DNA, 25 bp, Homo sapien
cgtaacatttctgtaggtgactgct

SEQ ID NO: 1680886 - DNA, 25 bp, Homo sapien
aacatttctgtaggtgactgctatc

SEQ ID NO: 1680887 - DNA, 25 bp, Homo sapien
tgaatcctaactcttttatcctgga

SEQ ID NO: 1680888 - DNA, 25 bp, Homo sapien
tggccattgtctgaatcctaactct

SEQ ID NO: 1680889 - DNA, 25 bp, Homo sapien
cattgtctgaatcctaactctttta

SEQ ID NO: 1680890 - DNA, 25 bp, Homo sapien
tgtctgaatcctaactcttttatcc

SEQ ID NO: 1680891 - DNA, 25 bp, Homo sapien
gaaaagtgacaactgatgtgaagtg

SEQ ID NO: 1680892 - DNA, 25 bp, Homo sapien
ctatgatatagctgggttagcacaa

SEQ ID NO: 1680893 - DNA, 25 bp, Homo sapien
ccagtgagatgtggcaacattatgc

SEQ ID NO: 1680894 - DNA, 25 bp, Homo sapien
gctaacaagataactgacactgatg

SEQ ID NO: 1680895 - DNA, 25 bp, Homo sapien
ttaaatctatctattaaagagtgac

SEQ ID NO: 1680896 - DNA, 25 bp, Homo sapien
tatctattaaagagtgactggagtt

SEQ ID NO: 1680897 - DNA, 25 bp, Homo sapien
aatctatctattaaagagtgactgg

SEQ ID NO: 1680898 - DNA, 25 bp, Homo sapien
tctatctattaaagagtgactggag

SEQ ID NO: 1680899 - DNA, 25 bp, Homo sapien
acaacaaacaattggtaacattgta

SEQ ID NO: 1680900 - DNA, 25 bp, Homo sapien
caacaaacaattggtaacattgtac

SEQ ID NO: 1680901 - DNA, 25 bp, Homo sapien
aacaaacaattggtaacattgtaca

SEQ ID NO: 1680902 - DNA, 25 bp, Homo sapien
gagtcacattgttcatcgaggtcac

SEQ ID NO: 1680903 - DNA, 25 bp, Homo sapien
gacaaggtgctcagttctggctcca

SEQ ID NO: 1680904 - DNA, 25 bp, Homo sapien
aatttggcaggatcagcgccttcgg

SEQ ID NO: 1680905 - DNA, 25 bp, Homo sapien
tccgaagcactatgaagaacggcga

SEQ ID NO: 1680906 - DNA, 25 bp, Homo sapien
gcattgccccttgctcattcttctg

SEQ ID NO: 1680907 - DNA, 25 bp, Homo sapien
gattttgcagatttgtcagtgatcc

SEQ ID NO: 1680908 - DNA, 25 bp, Homo sapien
aacctgttcaagtttggcattctct

SEQ ID NO: 1680909 - DNA, 25 bp, Homo sapien
ctgtgaaacctgaacaccccggaag

SEQ ID NO: 1680910 - DNA, 25 bp, Homo sapien
gcgactgtgtagaattagccggact

SEQ ID NO: 1680911 - DNA, 25 bp, Homo sapien
gcatctggttgcaagacaagaccca

SEQ ID NO: 1680912 - DNA, 25 bp, Homo sapien
gtcacacagggatagggtcgctctc

SEQ ID NO: 1680913 - DNA, 25 bp, Homo sapien
gactcgtgggacaagaacaagccac

SEQ ID NO: 1680914 - DNA, 25 bp, Homo sapien
actagaaagttcaggcttgggatcc

SEQ ID NO: 1680915 - DNA, 25 bp, Homo sapien
tggctgtacgtttgtcacctgaagg

SEQ ID NO: 1680916 - DNA, 25 bp, Homo sapien
caactttcggtaactctgtcacagc

SEQ ID NO: 1680917 - DNA, 25 bp, Homo sapien
tgacatggtggaccacaactttcgg

SEQ ID NO: 1680918 - DNA, 25 bp, Homo sapien
tcttgggagtaatcggtagcctgct

SEQ ID NO: 1680919 - DNA, 25 bp, Homo sapien
tactgctgaataacctgtggtcggc

SEQ ID NO: 1680920 - DNA, 25 bp, Homo sapien
gattcatgtcgcctttctggtggga

SEQ ID NO: 1680921 - DNA, 25 bp, Homo sapien
tcgtcttgacagtgaggttctccgc

SEQ ID NO: 1680922 - DNA, 25 bp, Homo sapien
agtttcctatacctgtttctacaag

SEQ ID NO: 1680923 - DNA, 25 bp, Homo sapien
ttgtccctcgcccttgatgagactt

SEQ ID NO: 1680924 - DNA, 25 bp, Homo sapien
tggtccatgtaactcagaacagtaa

SEQ ID NO: 1680925 - DNA, 25 bp, Homo sapien
ttgctcctcactgacatggcttcac

SEQ ID NO: 1680926 - DNA, 25 bp, Homo sapien
gggcccctggcaacaaggtgaatat

SEQ ID NO: 1680927 - DNA, 25 bp, Homo sapien
catgatggtcgacagcttgggatcc

SEQ ID NO: 1680928 - DNA, 25 bp, Homo sapien
tcaggcttgtcaaatgagttgggcc

SEQ ID NO: 1680929 - DNA, 25 bp, Homo sapien
tgggatccatggtctgctcagggcc

SEQ ID NO: 1680930 - DNA, 25 bp, Homo sapien
ctgaagttctcctctgagagcgtct

SEQ ID NO: 1680931 - DNA, 25 bp, Homo sapien
gtgaggatgagacccgtcccgagaa

SEQ ID NO: 1680932 - DNA, 25 bp, Homo sapien
agcgtctgatagtgcaagctggtga

SEQ ID NO: 1680933 - DNA, 25 bp, Homo sapien
tctcctctgagagcgtctgatagtg

SEQ ID NO: 1680934 - DNA, 25 bp, Homo sapien
gatgcagtacgcctcatttcccggt

SEQ ID NO: 1680935 - DNA, 25 bp, Homo sapien
ggaatgttctatctcagccagacgg

SEQ ID NO: 1680936 - DNA, 25 bp, Homo sapien
aagatatttgccgtaccagtgggcc

SEQ ID NO: 1680937 - DNA, 25 bp, Homo sapien
tctttctaagagaggcacatgccca

SEQ ID NO: 1680938 - DNA, 25 bp, Homo sapien
taccctgcgtagacacttgcagaga

SEQ ID NO: 1680939 - DNA, 25 bp, Homo sapien
agatgtactagtgagctgaggcccc

SEQ ID NO: 1680940 - DNA, 25 bp, Homo sapien
tctgcctgcagatccttaacctgag

SEQ ID NO: 1680941 - DNA, 25 bp, Homo sapien
tttttatctggcttgctaccctgcg

SEQ ID NO: 1680942 - DNA, 25 bp, Homo sapien
tgaaaacctgacaatgcaattggta

SEQ ID NO: 1680943 - DNA, 25 bp, Homo sapien
gaaaacctgacaatgcaattggtat

SEQ ID NO: 1680944 - DNA, 25 bp, Homo sapien
aaaacctgacaatgcaattggtatt

SEQ ID NO: 1680945 - DNA, 25 bp, Homo sapien
gtgaaaacctgacaatgcaattggt

SEQ ID NO: 1680946 - DNA, 25 bp, Homo sapien
gttgctgatgtcacacaatgatctg

SEQ ID NO: 1680947 - DNA, 25 bp, Homo sapien
acaggattagaagagcaagatgggc

SEQ ID NO: 1680948 - DNA, 25 bp, Homo sapien
cagaggatgcgaattagacatgctg

SEQ ID NO: 1680949 - DNA, 25 bp, Homo sapien
caatgatctgttccaactggatctg

SEQ ID NO: 1680950 - DNA, 25 bp, Homo sapien
gcagggatgtgagtgtagcaaaaca

SEQ ID NO: 1680951 - DNA, 25 bp, Homo sapien
gattgggcagatcttgggtcactag

SEQ ID NO: 1680952 - DNA, 25 bp, Homo sapien
gcagcatgaatgatgatggcacctt

SEQ ID NO: 1680953 - DNA, 25 bp, Homo sapien
gaacactactctgcaggcgtatggg

SEQ ID NO: 1680954 - DNA, 25 bp, Homo sapien
tctcgaactcaaagcctctaaaggt

SEQ ID NO: 1680955 - DNA, 25 bp, Homo sapien
attttcatctttggcccgcttctgg

SEQ ID NO: 1680956 - DNA, 25 bp, Homo sapien
ctaaaggtctcacgtctgttgcaca

SEQ ID NO: 1680957 - DNA, 25 bp, Homo sapien
gaaagcatccttttactcgaagctg

SEQ ID NO: 1680958 - DNA, 25 bp, Homo sapien
gctcttggatgttcactttgtcacc

SEQ ID NO: 1680959 - DNA, 25 bp, Homo sapien
tgaaggagcaggtgaacttcgaact

SEQ ID NO: 1680960 - DNA, 25 bp, Homo sapien
ttttccaacatcacaccgtccaggg

SEQ ID NO: 1680961 - DNA, 25 bp, Homo sapien
tataacgacaaatttagagcatcct

SEQ ID NO: 1680962 - DNA, 25 bp, Homo sapien
caagtgcaacttttgtgggcaaacc

SEQ ID NO: 1680963 - DNA, 25 bp, Homo sapien
tctgccttaagagataacaccatgt

SEQ ID NO: 1680964 - DNA, 25 bp, Homo sapien
ggatttggattactggcgcttactg

SEQ ID NO: 1680965 - DNA, 25 bp, Homo sapien
tctgaggcaaatgcaacgacttctg

SEQ ID NO: 1680966 - DNA, 25 bp, Homo sapien
cattataaggtaaagcagaagcccc

SEQ ID NO: 1680967 - DNA, 25 bp, Homo sapien
ttaaaacatggcagagtacagagca

SEQ ID NO: 1680968 - DNA, 25 bp, Homo sapien
gagatggaaaagagctagctactcc

SEQ ID NO: 1680969 - DNA, 25 bp, Homo sapien
tgctctgttgcaccgaccagtctta

SEQ ID NO: 1680970 - DNA, 25 bp, Homo sapien
atttcagaggcatctttattgctga

SEQ ID NO: 1680971 - DNA, 25 bp, Homo sapien
ctgtggacttttgattacctaatgc

SEQ ID NO: 1680972 - DNA, 25 bp, Homo sapien
tggacttttgattacctaatgctct

SEQ ID NO: 1680973 - DNA, 25 bp, Homo sapien
tgtggacttttgattacctaatgct

SEQ ID NO: 1680974 - DNA, 25 bp, Homo sapien
ttaaggaattttctttatcttgctc

SEQ ID NO: 1680975 - DNA, 25 bp, Homo sapien
gattaaggaattttctttatcttgc

SEQ ID NO: 1680976 - DNA, 25 bp, Homo sapien
aaggaattttctttatcttgctcac

SEQ ID NO: 1680977 - DNA, 25 bp, Homo sapien
tgattaaggaattttctttatcttg

SEQ ID NO: 1680978 - DNA, 25 bp, Homo sapien
ctccatcaaatattttaattcttct

SEQ ID NO: 1680979 - DNA, 25 bp, Homo sapien
cctccatcaaatattttaattcttc

SEQ ID NO: 1680980 - DNA, 25 bp, Homo sapien
tactcaaccaataacaattttatgc

SEQ ID NO: 1680981 - DNA, 25 bp, Homo sapien
gattggacactatgcctctgagaaa

SEQ ID NO: 1680982 - DNA, 25 bp, Homo sapien
aaggcacaacttttatactcaacca

SEQ ID NO: 1680983 - DNA, 25 bp, Homo sapien
tatgcatgtgtaacagaatattcca

SEQ ID NO: 1680984 - DNA, 25 bp, Homo sapien
taggtttcttacaacgtattccaca

SEQ ID NO: 1680985 - DNA, 25 bp, Homo sapien
cctgcctcggacatatacatactct

SEQ ID NO: 1680986 - DNA, 25 bp, Homo sapien
ggcggacatctgtatgggttcgtat

SEQ ID NO: 1680987 - DNA, 25 bp, Homo sapien
gtgtttctttaacatgctaggtttc

SEQ ID NO: 1680988 - DNA, 25 bp, Homo sapien
tcttcaatcttttagcacccagcga

SEQ ID NO: 1680989 - DNA, 25 bp, Homo sapien
ttttaatgattagttctgagacttc

SEQ ID NO: 1680990 - DNA, 25 bp, Homo sapien
ttcctaaaatcagacaataaaacag

SEQ ID NO: 1680991 - DNA, 25 bp, Homo sapien
ccagcgaatttacttgtgatcatga

SEQ ID NO: 1680992 - DNA, 25 bp, Homo sapien
tctcagacatgttttcacgattacc

SEQ ID NO: 1680993 - DNA, 25 bp, Homo sapien
cctgacggaggaagcaaacatttaa

SEQ ID NO: 1680994 - DNA, 25 bp, Homo sapien
caagaaacttgtacagggcaaaatt

SEQ ID NO: 1680995 - DNA, 25 bp, Homo sapien
ttcatgaataaggagcctgacggag

SEQ ID NO: 1680996 - DNA, 25 bp, Homo sapien
tactgagacgcctaaatccacacat

SEQ ID NO: 1680997 - DNA, 25 bp, Homo sapien
taaacctactgagacgcctaaatcc

SEQ ID NO: 1680998 - DNA, 25 bp, Homo sapien
ctattaaacctactgagacgcctaa

SEQ ID NO: 1680999 - DNA, 25 bp, Homo sapien
ctgagacgcctaaatccacacattt

SEQ ID NO: 1681000 - DNA, 25 bp, Homo sapien
tgggagctcaggtgagtgcgtgaat

SEQ ID NO: 1681001 - DNA, 25 bp, Homo sapien
gctcaggtgagtgcgtgaataatct

SEQ ID NO: 1681002 - DNA, 25 bp, Homo sapien
ggagctcaggtgagtgcgtgaataa

SEQ ID NO: 1681003 - DNA, 25 bp, Homo sapien
ggtgggagctcaggtgagtgcgtga

SEQ ID NO: 1681004 - DNA, 25 bp, Homo sapien
ccacaaatatggagctgctgagcag

SEQ ID NO: 1681005 - DNA, 25 bp, Homo sapien
ctggctctgctcatgacatgctgaa

SEQ ID NO: 1681006 - DNA, 25 bp, Homo sapien
gctgagcagtgcaaggcactgcgct

SEQ ID NO: 1681007 - DNA, 25 bp, Homo sapien
taagtgcttctggtgagcacacgtt

SEQ ID NO: 1681008 - DNA, 25 bp, Homo sapien
tcctcaaaattggtcagagataaat

SEQ ID NO: 1681009 - DNA, 25 bp, Homo sapien
cactttggagaagtaaacaaacgct

SEQ ID NO: 1681010 - DNA, 25 bp, Homo sapien
atgaacaggtttattcttcctcaaa

SEQ ID NO: 1681011 - DNA, 25 bp, Homo sapien
ttctctgatgagttagaacacatga

SEQ ID NO: 1681012 - DNA, 25 bp, Homo sapien
gaattgctctgtatcactgaagacg

SEQ ID NO: 1681013 - DNA, 25 bp, Homo sapien
taccttgtcccttttctagtcagtg

SEQ ID NO: 1681014 - DNA, 25 bp, Homo sapien
gtaatgaacgtacttgctgaaactc

SEQ ID NO: 1681015 - DNA, 25 bp, Homo sapien
cataggtaggtcaatcagtcagcaa

SEQ ID NO: 1681016 - DNA, 25 bp, Homo sapien
tttgatcccgtcactatgttagctg

SEQ ID NO: 1681017 - DNA, 25 bp, Homo sapien
cttcaggaactctcgtaaggcaggt

SEQ ID NO: 1681018 - DNA, 25 bp, Homo sapien
gaatttgatcccgtcactatgttag

SEQ ID NO: 1681019 - DNA, 25 bp, Homo sapien
ttgatcccgtcactatgttagctgg

SEQ ID NO: 1681020 - DNA, 25 bp, Homo sapien
ttctctgatgatagtttgtattctg

SEQ ID NO: 1681021 - DNA, 25 bp, Homo sapien
ctgatgatagtttgtattctgtggg

SEQ ID NO: 1681022 - DNA, 25 bp, Homo sapien
ctctgatgatagtttgtattctgtg

SEQ ID NO: 1681023 - DNA, 25 bp, Homo sapien
gatgatagtttgtattctgtgggat

SEQ ID NO: 1681024 - DNA, 25 bp, Homo sapien
agctgcatccaagtctgcaaaggac

SEQ ID NO: 1681025 - DNA, 25 bp, Homo sapien
atttccagctgcatccaagtctgca

SEQ ID NO: 1681026 - DNA, 25 bp, Homo sapien
tgatttccagctgcatccaagtctg

SEQ ID NO: 1681027 - DNA, 25 bp, Homo sapien
ttccagctgcatccaagtctgcaaa

SEQ ID NO: 1681028 - DNA, 25 bp, Homo sapien
gactctgtgatactgcttactttgc

SEQ ID NO: 1681029 - DNA, 25 bp, Homo sapien
tctctgctagaggagaccactgtca

SEQ ID NO: 1681030 - DNA, 25 bp, Homo sapien
tcaaaagtcgtactgataaaagacc

SEQ ID NO: 1681031 - DNA, 25 bp, Homo sapien
tctgcgaggacaagaacgaggactt

SEQ ID NO: 1681032 - DNA, 25 bp, Homo sapien
aaacccatgttagtctatgcctaga

SEQ ID NO: 1681033 - DNA, 25 bp, Homo sapien
tattccggttgcagccatctatagc

SEQ ID NO: 1681034 - DNA, 25 bp, Homo sapien
tctatagcctggatcctaagttagc

SEQ ID NO: 1681035 - DNA, 25 bp, Homo sapien
gaatcatcagaaaggtcaacaatga

SEQ ID NO: 1681036 - DNA, 25 bp, Homo sapien
cttcttttggttgacacaggcatgt

SEQ ID NO: 1681037 - DNA, 25 bp, Homo sapien
ttcttcttttggttgacacaggcat

SEQ ID NO: 1681038 - DNA, 25 bp, Homo sapien
tcttcttttggttgacacaggcatg

SEQ ID NO: 1681039 - DNA, 25 bp, Homo sapien
cttcttcttttggttgacacaggca

SEQ ID NO: 1681040 - DNA, 25 bp, Homo sapien
tgtgtaccccagaaaagcaatcggt

SEQ ID NO: 1681041 - DNA, 25 bp, Homo sapien
gcaatcggtgatcctgacatcctcg

SEQ ID NO: 1681042 - DNA, 25 bp, Homo sapien
gacatcctcgtcagtactcacaggg

SEQ ID NO: 1681043 - DNA, 25 bp, Homo sapien
ggacctggaagtgtctacagacgga

SEQ ID NO: 1681044 - DNA, 25 bp, Homo sapien
ggaggaagtcttacagatgatgggc

SEQ ID NO: 1681045 - DNA, 25 bp, Homo sapien
caggaggaagtcttacagatgatgg

SEQ ID NO: 1681046 - DNA, 25 bp, Homo sapien
gaggaagtcttacagatgatgggct

SEQ ID NO: 1681047 - DNA, 25 bp, Homo sapien
agcaggaggaagtcttacagatgat

SEQ ID NO: 1681048 - DNA, 25 bp, Homo sapien
caaacgtggagtatgtgaggccagc

SEQ ID NO: 1681049 - DNA, 25 bp, Homo sapien
taaggtgtcctcgattgctgctggg

SEQ ID NO: 1681050 - DNA, 25 bp, Homo sapien
gataggaatacatggcacaacactg

SEQ ID NO: 1681051 - DNA, 25 bp, Homo sapien
caacggctacttgactgactgaggg

SEQ ID NO: 1681052 - DNA, 25 bp, Homo sapien
gctcctaaaaggcacaattgtctat

SEQ ID NO: 1681053 - DNA, 25 bp, Homo sapien
ggaggacagacccattttcaaagac

SEQ ID NO: 1681054 - DNA, 25 bp, Homo sapien
gattgcacaaagattagtcatgagt

SEQ ID NO: 1681055 - DNA, 25 bp, Homo sapien
aaagttactgtcttacacaaggagg

SEQ ID NO: 1681056 - DNA, 25 bp, Homo sapien
gtcatctacaaagatctcacacact

SEQ ID NO: 1681057 - DNA, 25 bp, Homo sapien
tcacacactgttccgccagctgaca

SEQ ID NO: 1681058 - DNA, 25 bp, Homo sapien
tcccttctggatggtgccgcgtcat

SEQ ID NO: 1681059 - DNA, 25 bp, Homo sapien
catcctcccttagtgaatgcacaga

SEQ ID NO: 1681060 - DNA, 25 bp, Homo sapien
gatcactgtagaacatatctccaag

SEQ ID NO: 1681061 - DNA, 25 bp, Homo sapien
tgctaaagcgagtctgctccacaga

SEQ ID NO: 1681062 - DNA, 25 bp, Homo sapien
caagaactccataacgtagctggca

SEQ ID NO: 1681063 - DNA, 25 bp, Homo sapien
tagctggcaccccagacatttgcac

SEQ ID NO: 1681064 - DNA, 25 bp, Homo sapien
cagtttgccagaggtgccatcactc

SEQ ID NO: 1681065 - DNA, 25 bp, Homo sapien
gagaaatacctgtgccctccggacg

SEQ ID NO: 1681066 - DNA, 25 bp, Homo sapien
agtttctagtacgaagtcaaatgtc

SEQ ID NO: 1681067 - DNA, 25 bp, Homo sapien
ggcaatcacctactttacctgagaa

SEQ ID NO: 1681068 - DNA, 25 bp, Homo sapien
aagttctggagagccaacgtgaaca

SEQ ID NO: 1681069 - DNA, 25 bp, Homo sapien
ttcctgcagaattatcaagtcctga

SEQ ID NO: 1681070 - DNA, 25 bp, Homo sapien
gaattatcaagtcctgaaagttctg

SEQ ID NO: 1681071 - DNA, 25 bp, Homo sapien
tcctgaaagttctggagagccaacg

SEQ ID NO: 1681072 - DNA, 25 bp, Homo sapien
tggactccagacatatcaacaggct

SEQ ID NO: 1681073 - DNA, 25 bp, Homo sapien
cactcagaataggaactcgaccaga

SEQ ID NO: 1681074 - DNA, 25 bp, Homo sapien
aattgcaaatgctcacgtggctgga

SEQ ID NO: 1681075 - DNA, 25 bp, Homo sapien
cctcaaggtgagaaagcggctgacc

SEQ ID NO: 1681076 - DNA, 25 bp, Homo sapien
taagcatgacaaaccggttccaaaa

SEQ ID NO: 1681077 - DNA, 25 bp, Homo sapien
cgagcagcctttttacatgtgagag

SEQ ID NO: 1681078 - DNA, 25 bp, Homo sapien
ccaaaacctcttatactccgtgtag

SEQ ID NO: 1681079 - DNA, 25 bp, Homo sapien
tattttgttcgagcagcctttttac

SEQ ID NO: 1681080 - DNA, 25 bp, Homo sapien
catctgtactgcttcaggtgcctgg

SEQ ID NO: 1681081 - DNA, 25 bp, Homo sapien
caagccagagttgctctctcttaga

SEQ ID NO: 1681082 - DNA, 25 bp, Homo sapien
gatgagcaaagacctacccatagga

SEQ ID NO: 1681083 - DNA, 25 bp, Homo sapien
gagccattgggatcttgatgagcaa

SEQ ID NO: 1681084 - DNA, 25 bp, Homo sapien
catgtgtttcagagctagctccagc

SEQ ID NO: 1681085 - DNA, 25 bp, Homo sapien
tgtgtttcagagctagctccagctc

SEQ ID NO: 1681086 - DNA, 25 bp, Homo sapien
cccatgtgtttcagagctagctcca

SEQ ID NO: 1681087 - DNA, 25 bp, Homo sapien
tcccatgtgtttcagagctagctcc

SEQ ID NO: 1681088 - DNA, 25 bp, Homo sapien
aaagccgtgggtttggacagactca

SEQ ID NO: 1681089 - DNA, 25 bp, Homo sapien
aatgacatgcatcctctaaaagagc

SEQ ID NO: 1681090 - DNA, 25 bp, Homo sapien
aaggacagtttttatcccaacagca

SEQ ID NO: 1681091 - DNA, 25 bp, Homo sapien
gacctccctcgaagtcacagctggg

SEQ ID NO: 1681092 - DNA, 25 bp, Homo sapien
tattagtcaccaacaggcaacgtgc

SEQ ID NO: 1681093 - DNA, 25 bp, Homo sapien
cagaggcgcgtctgacttggacagc

SEQ ID NO: 1681094 - DNA, 25 bp, Homo sapien
gcttcaggtccctcaaagcgctgcg

SEQ ID NO: 1681095 - DNA, 25 bp, Homo sapien
tccagccccagacaatgttattgtg

SEQ ID NO: 1681096 - DNA, 25 bp, Homo sapien
ttctggagctccttggcaagccaca

SEQ ID NO: 1681097 - DNA, 25 bp, Homo sapien
gagctccttggcaagccacaaacag

SEQ ID NO: 1681098 - DNA, 25 bp, Homo sapien
ctggagctccttggcaagccacaaa

SEQ ID NO: 1681099 - DNA, 25 bp, Homo sapien
ggagctccttggcaagccacaaaca

SEQ ID NO: 1681100 - DNA, 25 bp, Homo sapien
gaatgctgcctgttgaaaatccggc

SEQ ID NO: 1681101 - DNA, 25 bp, Homo sapien
cacccctcttgaagcaggctcaggg

SEQ ID NO: 1681102 - DNA, 25 bp, Homo sapien
caggctcagggaaatgctgtggaat

SEQ ID NO: 1681103 - DNA, 25 bp, Homo sapien
tgctgtggaatgctgcctgttgaaa

SEQ ID NO: 1681104 - DNA, 25 bp, Homo sapien
ctttatccatcagggacgagcagga

SEQ ID NO: 1681105 - DNA, 25 bp, Homo sapien
ggcagaagtagacacactctttatc

SEQ ID NO: 1681106 - DNA, 25 bp, Homo sapien
aggagcagcgcttggaccggcggag

SEQ ID NO: 1681107 - DNA, 25 bp, Homo sapien
cgttctcacccaccgcgctgagctc

SEQ ID NO: 1681108 - DNA, 25 bp, Homo sapien
ggagccagcgctaatgaatgactag

SEQ ID NO: 1681109 - DNA, 25 bp, Homo sapien
tcccatgagaagcacaggttgcact

SEQ ID NO: 1681110 - DNA, 25 bp, Homo sapien
gatactgctaaaagtgccaccgtca

SEQ ID NO: 1681111 - DNA, 25 bp, Homo sapien
tcctcatttgaaacgtgcagtggcc

SEQ ID NO: 1681112 - DNA, 25 bp, Homo sapien
tttcctgcttggcaaaaattccagc

SEQ ID NO: 1681113 - DNA, 25 bp, Homo sapien
tccaagtccatacggaacaacgtgc

SEQ ID NO: 1681114 - DNA, 25 bp, Homo sapien
catctattttcacggtctgttgcct

SEQ ID NO: 1681115 - DNA, 25 bp, Homo sapien
tgtgggaagtaaattctccaaggct

SEQ ID NO: 1681116 - DNA, 25 bp, Homo sapien
gctttaccctgactttcaatgtctc

SEQ ID NO: 1681117 - DNA, 25 bp, Homo sapien
tttaccctgactttcaatgtctctg

SEQ ID NO: 1681118 - DNA, 25 bp, Homo sapien
ttcagctttaccctgactttcaatg

SEQ ID NO: 1681119 - DNA, 25 bp, Homo sapien
cagctttaccctgactttcaatgtc

SEQ ID NO: 1681120 - DNA, 25 bp, Homo sapien
tcccaagcttggaacagtcttttcc

SEQ ID NO: 1681121 - DNA, 25 bp, Homo sapien
ttcctttcttatgattattccagtc

SEQ ID NO: 1681122 - DNA, 25 bp, Homo sapien
gtttgtcttaggtgttcctctgaac

SEQ ID NO: 1681123 - DNA, 25 bp, Homo sapien
tcctctcactaactgctgataaata

SEQ ID NO: 1681124 - DNA, 25 bp, Homo sapien
cactatgtgaccctgccttgaggaa

SEQ ID NO: 1681125 - DNA, 25 bp, Homo sapien
aagaagcatacagtaggcccagagc

SEQ ID NO: 1681126 - DNA, 25 bp, Homo sapien
agcctgcccctatgcttagaatggg

SEQ ID NO: 1681127 - DNA, 25 bp, Homo sapien
tagaatctggcacaaacaaaacctg

SEQ ID NO: 1681128 - DNA, 25 bp, Homo sapien
aaagatgatttgacgctgtttctca

SEQ ID NO: 1681129 - DNA, 25 bp, Homo sapien
tgggtcacataacgctctctggagg

SEQ ID NO: 1681130 - DNA, 25 bp, Homo sapien
caatgtgctcggttgtgggtcacat

SEQ ID NO: 1681131 - DNA, 25 bp, Homo sapien
gggcttgcctttcagcttgggatca

SEQ ID NO: 1681132 - DNA, 25 bp, Homo sapien
aatgttttgaacgaggacgctggtc

SEQ ID NO: 1681133 - DNA, 25 bp, Homo sapien
tgctctgatcccagccagggtggag

SEQ ID NO: 1681134 - DNA, 25 bp, Homo sapien
tccgtggaggctatggcttcagaca

SEQ ID NO: 1681135 - DNA, 25 bp, Homo sapien
ggatgccacccgaattcgaatgtga

SEQ ID NO: 1681136 - DNA, 25 bp, Homo sapien
ctcttggaatccactgaactggtta

SEQ ID NO: 1681137 - DNA, 25 bp, Homo sapien
gaatccactgaactggttaccctca

SEQ ID NO: 1681138 - DNA, 25 bp, Homo sapien
tggaatccactgaactggttaccct

SEQ ID NO: 1681139 - DNA, 25 bp, Homo sapien
cttggaatccactgaactggttacc

SEQ ID NO: 1681140 - DNA, 25 bp, Homo sapien
actgcctgggccactaagaagcctg

SEQ ID NO: 1681141 - DNA, 25 bp, Homo sapien
cattcatgggcccagtttctccctg

SEQ ID NO: 1681142 - DNA, 25 bp, Homo sapien
gcctgtggaatgctagagtcagaca

SEQ ID NO: 1681143 - DNA, 25 bp, Homo sapien
actgtagcagaccattcatgggccc

SEQ ID NO: 1681144 - DNA, 25 bp, Homo sapien
attcttctatgagaaagtggcattt

SEQ ID NO: 1681145 - DNA, 25 bp, Homo sapien
cattcttctatgagaaagtggcatt

SEQ ID NO: 1681146 - DNA, 25 bp, Homo sapien
ttcttctatgagaaagtggcatttc

SEQ ID NO: 1681147 - DNA, 25 bp, Homo sapien
tgctacttctgtccgtgcattccaa

SEQ ID NO: 1681148 - DNA, 25 bp, Homo sapien
aggccagtcattcctgatgctcttt

SEQ ID NO: 1681149 - DNA, 25 bp, Homo sapien
agtcaaattcgccaagctgcagaag

SEQ ID NO: 1681150 - DNA, 25 bp, Homo sapien
caacaaggaattgcttgcacacagg

SEQ ID NO: 1681151 - DNA, 25 bp, Homo sapien
gacaggtgcccctttcagtagacac

SEQ ID NO: 1681152 - DNA, 25 bp, Homo sapien
ggtctgtaagaacagcattctggag

SEQ ID NO: 1681153 - DNA, 25 bp, Homo sapien
tgtctcactgacaaacccttgggcc

SEQ ID NO: 1681154 - DNA, 25 bp, Homo sapien
ttagtcaagatgtggtgaaaccaaa

SEQ ID NO: 1681155 - DNA, 25 bp, Homo sapien
tccagggggagttatcagtgttcca

SEQ ID NO: 1681156 - DNA, 25 bp, Homo sapien
acagtggaaacttcttgggattggg

SEQ ID NO: 1681157 - DNA, 25 bp, Homo sapien
ctgcagtattctccagggggagtta

SEQ ID NO: 1681158 - DNA, 25 bp, Homo sapien
caaggacagtggaaacttcttggga

SEQ ID NO: 1681159 - DNA, 25 bp, Homo sapien
tgtgactggctgcttggtttcctag

SEQ ID NO: 1681160 - DNA, 25 bp, Homo sapien
tggtttcctagcagtcaaagccaac

SEQ ID NO: 1681161 - DNA, 25 bp, Homo sapien
gctgcttggtttcctagcagtcaaa

SEQ ID NO: 1681162 - DNA, 25 bp, Homo sapien
ctagcagtcaaagccaacagccaca

SEQ ID NO: 1681163 - DNA, 25 bp, Homo sapien
taaatcaggcatcagagcgacacca

SEQ ID NO: 1681164 - DNA, 25 bp, Homo sapien
tggtggcacctcaagcagaactgtc

SEQ ID NO: 1681165 - DNA, 25 bp, Homo sapien
taatcagaatgaactggtgtcctga

SEQ ID NO: 1681166 - DNA, 25 bp, Homo sapien
cctgatgaacctttgatcttcccga

SEQ ID NO: 1681167 - DNA, 25 bp, Homo sapien
aagagtcaagattttatggcccgct

SEQ ID NO: 1681168 - DNA, 25 bp, Homo sapien
tcttcaaccttgtcccatggcatgg

SEQ ID NO: 1681169 - DNA, 25 bp, Homo sapien
tgcacagtgcttggccagatttggg

SEQ ID NO: 1681170 - DNA, 25 bp, Homo sapien
gctctataggcataaacgtctcggc

SEQ ID NO: 1681171 - DNA, 25 bp, Homo sapien
aaagatctggagcctcgatgatccc

SEQ ID NO: 1681172 - DNA, 25 bp, Homo sapien
aagatctggagcctcgatgatccca

SEQ ID NO: 1681173 - DNA, 25 bp, Homo sapien
aaatctgacaactgtatgagtctgc

SEQ ID NO: 1681174 - DNA, 25 bp, Homo sapien
tgtcaggagccaggtagtcaaggta

SEQ ID NO: 1681175 - DNA, 25 bp, Homo sapien
taggtcccaaccagcaaatctgaca

SEQ ID NO: 1681176 - DNA, 25 bp, Homo sapien
aactgtatgagtctgcactcctggc

SEQ ID NO: 1681177 - DNA, 25 bp, Homo sapien
ctgggagggcttcttcacatcccac

SEQ ID NO: 1681178 - DNA, 25 bp, Homo sapien
ggagggcttcttcacatcccaccat

SEQ ID NO: 1681179 - DNA, 25 bp, Homo sapien
gggagggcttcttcacatcccacca

SEQ ID NO: 1681180 - DNA, 25 bp, Homo sapien
tgggagggcttcttcacatcccacc

SEQ ID NO: 1681181 - DNA, 25 bp, Homo sapien
ctggacagttggaagtcagatgaat

SEQ ID NO: 1681182 - DNA, 25 bp, Homo sapien
tggacagttggaagtcagatgaatt

SEQ ID NO: 1681183 - DNA, 25 bp, Homo sapien
ggtagtatttcagctctgatgggag

SEQ ID NO: 1681184 - DNA, 25 bp, Homo sapien
actaggaattagcactgctgaagga

SEQ ID NO: 1681185 - DNA, 25 bp, Homo sapien
aggattcctgtaaagacactaggaa

SEQ ID NO: 1681186 - DNA, 25 bp, Homo sapien
ccagtctgccgggtagtatttcagc

SEQ ID NO: 1681187 - DNA, 25 bp, Homo sapien
cacatcccaacacgaatcagcagga

SEQ ID NO: 1681188 - DNA, 25 bp, Homo sapien
tttctatgtgggctagcagcaggtg

SEQ ID NO: 1681189 - DNA, 25 bp, Homo sapien
acacgaatcagcaggactgtacctg

SEQ ID NO: 1681190 - DNA, 25 bp, Homo sapien
ttctatgtgggctagcagcaggtga

SEQ ID NO: 1681191 - DNA, 25 bp, Homo sapien
tcagaggtgagctctgcatcgtttc

SEQ ID NO: 1681192 - DNA, 25 bp, Homo sapien
gtcagctgtcacacggcttgtcttg

SEQ ID NO: 1681193 - DNA, 25 bp, Homo sapien
tgcatcgtttcgtcagctgtcacac

SEQ ID NO: 1681194 - DNA, 25 bp, Homo sapien
acggcttgtcttgcgcttgggcttc

SEQ ID NO: 1681195 - DNA, 25 bp, Homo sapien
tagccctaattagcctcagagcctg

SEQ ID NO: 1681196 - DNA, 25 bp, Homo sapien
tctcagtgtccataagaccatgagg

SEQ ID NO: 1681197 - DNA, 25 bp, Homo sapien
cattggcccattgtcctctcagtgt

SEQ ID NO: 1681198 - DNA, 25 bp, Homo sapien
gcaccctcaagtctggtagccctaa

SEQ ID NO: 1681199 - DNA, 25 bp, Homo sapien
ccagcactgtgctcctctgagtaag

SEQ ID NO: 1681200 - DNA, 25 bp, Homo sapien
gaatgacatgaactcttgggcatct

SEQ ID NO: 1681201 - DNA, 25 bp, Homo sapien
catgcaactctggatgggactgctg

SEQ ID NO: 1681202 - DNA, 25 bp, Homo sapien
gaagccatattgcaagttcaccacc

SEQ ID NO: 1681203 - DNA, 25 bp, Homo sapien
ctagacaaagagaagcccttgagaa

SEQ ID NO: 1681204 - DNA, 25 bp, Homo sapien
gaaaaaggccccagcaagaatttga

SEQ ID NO: 1681205 - DNA, 25 bp, Homo sapien
gaaagggcttctagaaagcacagaa

SEQ ID NO: 1681206 - DNA, 25 bp, Homo sapien
agcaagaatttgaaagggcttctag

SEQ ID NO: 1681207 - DNA, 25 bp, Homo sapien
gggcggacacatgaacaagtctgca

SEQ ID NO: 1681208 - DNA, 25 bp, Homo sapien
ccccttctccagagggcggacacat

SEQ ID NO: 1681209 - DNA, 25 bp, Homo sapien
acatgaacaagtctgcacagacgct

SEQ ID NO: 1681210 - DNA, 25 bp, Homo sapien
tgaacaagtctgcacagacgctttc

SEQ ID NO: 1681211 - DNA, 25 bp, Homo sapien
tggtggtcctcccatgtgctcagca

SEQ ID NO: 1681212 - DNA, 25 bp, Homo sapien
cagatctctcccagttatttgtagg

SEQ ID NO: 1681213 - DNA, 25 bp, Homo sapien
gcctgcttgtgcctgtcagtacctg

SEQ ID NO: 1681214 - DNA, 25 bp, Homo sapien
acactggtacatgtgatgcccacta

SEQ ID NO: 1681215 - DNA, 25 bp, Homo sapien
aagtcatttcagtaaccaaaatctt

SEQ ID NO: 1681216 - DNA, 25 bp, Homo sapien
taagtcatttcagtaaccaaaatct

SEQ ID NO: 1681217 - DNA, 25 bp, Homo sapien
ttaagtcatttcagtaaccaaaatc

SEQ ID NO: 1681218 - DNA, 25 bp, Homo sapien
actgatttttcattcccgaaacagt

SEQ ID NO: 1681219 - DNA, 25 bp, Homo sapien
aactgatttttcattcccgaaacag

SEQ ID NO: 1681220 - DNA, 25 bp, Homo sapien
gctttaatctggaacacatctgctg

SEQ ID NO: 1681221 - DNA, 25 bp, Homo sapien
ctttgctttaatctggaacacatct

SEQ ID NO: 1681222 - DNA, 25 bp, Homo sapien
ctttaatctggaacacatctgctgc

SEQ ID NO: 1681223 - DNA, 25 bp, Homo sapien
ttgctttaatctggaacacatctgc

SEQ ID NO: 1681224 - DNA, 25 bp, Homo sapien
catggtttcaccaaaatcttttctt

SEQ ID NO: 1681225 - DNA, 25 bp, Homo sapien
catggtcacatttgcatccaaatgt

SEQ ID NO: 1681226 - DNA, 25 bp, Homo sapien
cagtctatgtctttctccatggttt

SEQ ID NO: 1681227 - DNA, 25 bp, Homo sapien
cagctaatttccagttctcctgaga

SEQ ID NO: 1681228 - DNA, 25 bp, Homo sapien
ggaaaggaaagcctgtccatcttct

SEQ ID NO: 1681229 - DNA, 25 bp, Homo sapien
gacggaaaggaaagcctgtccatct

SEQ ID NO: 1681230 - DNA, 25 bp, Homo sapien
acggaaaggaaagcctgtccatctt

SEQ ID NO: 1681231 - DNA, 25 bp, Homo sapien
agacggaaaggaaagcctgtccatc

SEQ ID NO: 1681232 - DNA, 25 bp, Homo sapien
cgcatgacatcagactgcttctttc

SEQ ID NO: 1681233 - DNA, 25 bp, Homo sapien
agaaagcgcatgacatcagactgct

SEQ ID NO: 1681234 - DNA, 25 bp, Homo sapien
cttctttctccatagctcctggatg

SEQ ID NO: 1681235 - DNA, 25 bp, Homo sapien
tttctccatagctcctggatgtact

SEQ ID NO: 1681236 - DNA, 25 bp, Homo sapien
gcgtccaactcgctcctctgcaacg

SEQ ID NO: 1681237 - DNA, 25 bp, Homo sapien
tgcaacggactgaaggcttcgagca

SEQ ID NO: 1681238 - DNA, 25 bp, Homo sapien
cagtcggcgcgctttatcaggccgg

SEQ ID NO: 1681239 - DNA, 25 bp, Homo sapien
gccttgtagcccagtcggcgcgctt

SEQ ID NO: 1681240 - DNA, 25 bp, Homo sapien
ctccaagctgcccggcgagagccac

SEQ ID NO: 1681241 - DNA, 25 bp, Homo sapien
cgccttctccaagctgcccggcgag

SEQ ID NO: 1681242 - DNA, 25 bp, Homo sapien
gccttctccaagctgcccggcgaga

SEQ ID NO: 1681243 - DNA, 25 bp, Homo sapien
cttctccaagctgcccggcgagagc

SEQ ID NO: 1681244 - DNA, 25 bp, Homo sapien
tattaagtatgaattttacagactt

SEQ ID NO: 1681245 - DNA, 25 bp, Homo sapien
tgtttattaagtatgaattttacag

SEQ ID NO: 1681246 - DNA, 25 bp, Homo sapien
tttattaagtatgaattttacagac

SEQ ID NO: 1681247 - DNA, 25 bp, Homo sapien
tgtcctaaattgtttattaagtatg

SEQ ID NO: 1681248 - DNA, 25 bp, Homo sapien
gagggttgcttagtctccaattttg

SEQ ID NO: 1681249 - DNA, 25 bp, Homo sapien
gtgtgagggttgcttagtctccaat

SEQ ID NO: 1681250 - DNA, 25 bp, Homo sapien
tgcttagtctccaattttgcctgag

SEQ ID NO: 1681251 - DNA, 25 bp, Homo sapien
gggttgcttagtctccaattttgcc

SEQ ID NO: 1681252 - DNA, 25 bp, Homo sapien
cgggacccctgctgcctcgaggtgt

SEQ ID NO: 1681253 - DNA, 25 bp, Homo sapien
ggcaggctgcttgccgggacccctg

SEQ ID NO: 1681254 - DNA, 25 bp, Homo sapien
gacccctgctgcctcgaggtgtgtc

SEQ ID NO: 1681255 - DNA, 25 bp, Homo sapien
ctgggattgggcaggctgcttgccg

SEQ ID NO: 1681256 - DNA, 25 bp, Homo sapien
ctaggagaagtggtagtggattcca

SEQ ID NO: 1681257 - DNA, 25 bp, Homo sapien
tccaggaacctccagggtaatgaga

SEQ ID NO: 1681258 - DNA, 25 bp, Homo sapien
tgcagggccagaatcgccgtgatag

SEQ ID NO: 1681259 - DNA, 25 bp, Homo sapien
gaatcgccgtgatagactccagcct

SEQ ID NO: 1681260 - DNA, 25 bp, Homo sapien
caggctcagtagctagcttagaaga

SEQ ID NO: 1681261 - DNA, 25 bp, Homo sapien
tcacacacaggctcagtagctagct

SEQ ID NO: 1681262 - DNA, 25 bp, Homo sapien
ctcagtagctagcttagaagagttt

SEQ ID NO: 1681263 - DNA, 25 bp, Homo sapien
cacacaggctcagtagctagcttag

SEQ ID NO: 1681264 - DNA, 25 bp, Homo sapien
cctcttctgcgtatggtgacatcat

SEQ ID NO: 1681265 - DNA, 25 bp, Homo sapien
catttttggaagaagtggtgattcc

SEQ ID NO: 1681266 - DNA, 25 bp, Homo sapien
ttgactgcttggttgcaatttccca

SEQ ID NO: 1681267 - DNA, 25 bp, Homo sapien
ctcctcttgtattggagttagtggg

SEQ ID NO: 1681268 - DNA, 25 bp, Homo sapien
gcttttatccgggtatgcttgcaaa

SEQ ID NO: 1681269 - DNA, 25 bp, Homo sapien
atagagaagtgcacataagtgactg

SEQ ID NO: 1681270 - DNA, 25 bp, Homo sapien
tccctccagtgttatagagaagtgc

SEQ ID NO: 1681271 - DNA, 25 bp, Homo sapien
aagtgcacataagtgactgtacggg

SEQ ID NO: 1681272 - DNA, 25 bp, Homo sapien
taattcagttgcattctgactagga

SEQ ID NO: 1681273 - DNA, 25 bp, Homo sapien
aattcagttgcattctgactaggac

SEQ ID NO: 1681274 - DNA, 25 bp, Homo sapien
tagtccctttggctatggacatctg

SEQ ID NO: 1681275 - DNA, 25 bp, Homo sapien
ctttttcatactccccagctccctc

SEQ ID NO: 1681276 - DNA, 25 bp, Homo sapien
ccagctccctcttgcaaaggacaca

SEQ ID NO: 1681277 - DNA, 25 bp, Homo sapien
atggacatctgtttgctcaacatta

SEQ ID NO: 1681278 - DNA, 25 bp, Homo sapien
tccagcaatacagccaagagttagt

SEQ ID NO: 1681279 - DNA, 25 bp, Homo sapien
cagcaatacagccaagagttagttc

SEQ ID NO: 1681280 - DNA, 25 bp, Homo sapien
tacagccaagagttagttcttcctc

SEQ ID NO: 1681281 - DNA, 25 bp, Homo sapien
aatacagccaagagttagttcttcc

SEQ ID NO: 1681282 - DNA, 25 bp, Homo sapien
tccctgcttggtaatatatgccttg

SEQ ID NO: 1681283 - DNA, 25 bp, Homo sapien
tgtttttgcctcagatggtattccc

SEQ ID NO: 1681284 - DNA, 25 bp, Homo sapien
gcttggtaatatatgccttgacttt

SEQ ID NO: 1681285 - DNA, 25 bp, Homo sapien
catctttgaggtgagacgtgtgagg

SEQ ID NO: 1681286 - DNA, 25 bp, Homo sapien
gtttttgagagcattgtcatcaagt

SEQ ID NO: 1681287 - DNA, 25 bp, Homo sapien
gcattgtcatcaagtttgactatca

SEQ ID NO: 1681288 - DNA, 25 bp, Homo sapien
gatgtaaaataacaggattgcatgg

SEQ ID NO: 1681289 - DNA, 25 bp, Homo sapien
aataacaggattgcatggatggttt

SEQ ID NO: 1681290 - DNA, 25 bp, Homo sapien
taaatgaggaaagtattaggtctgc

SEQ ID NO: 1681291 - DNA, 25 bp, Homo sapien
ggacgacattcagtcacatccttcc

SEQ ID NO: 1681292 - DNA, 25 bp, Homo sapien
tctgcaggacgacattcagtcacat

SEQ ID NO: 1681293 - DNA, 25 bp, Homo sapien
gaaagtattaggtctgcaggacgac

SEQ ID NO: 1681294 - DNA, 25 bp, Homo sapien
tatcttcatgtgttattgatttccg

SEQ ID NO: 1681295 - DNA, 25 bp, Homo sapien
cagtagatacctggctaataatatc

SEQ ID NO: 1681296 - DNA, 25 bp, Homo sapien
tattgatttccggaggtatttacaa

SEQ ID NO: 1681297 - DNA, 25 bp, Homo sapien
agatacctggctaataatatcttca

SEQ ID NO: 1681298 - DNA, 25 bp, Homo sapien
tgcaggcccgctgactttgaggagt

SEQ ID NO: 1681299 - DNA, 25 bp, Homo sapien
cgagggtcctgcgtcattctgagca

SEQ ID NO: 1681300 - DNA, 25 bp, Homo sapien
tctagcatatccctgggagccgcag

SEQ ID NO: 1681301 - DNA, 25 bp, Homo sapien
gtgtcagtaggctcctttccccaga

SEQ ID NO: 1681302 - DNA, 25 bp, Homo sapien
gcctgggctgataaacaatacagca

SEQ ID NO: 1681303 - DNA, 25 bp, Homo sapien
taaacactctgccttgttacaaagg

SEQ ID NO: 1681304 - DNA, 25 bp, Homo sapien
gcatgtactcagcttcataaacact

SEQ ID NO: 1681305 - DNA, 25 bp, Homo sapien
aaactcgccgtgataggacttgacc

SEQ ID NO: 1681306 - DNA, 25 bp, Homo sapien
tccccgaggaagtggtgactgatgt

SEQ ID NO: 1681307 - DNA, 25 bp, Homo sapien
catttccgtatggatgaaaagccag

SEQ ID NO: 1681308 - DNA, 25 bp, Homo sapien
tctgtctttgtgttccatttccgta

SEQ ID NO: 1681309 - DNA, 25 bp, Homo sapien
tccattgttcggaatttacatgaac

SEQ ID NO: 1681310 - DNA, 25 bp, Homo sapien
tatgcgtcaactgggtggcaaactc

SEQ ID NO: 1681311 - DNA, 25 bp, Homo sapien
tgggtggcaaactcagtggcctctc

SEQ ID NO: 1681312 - DNA, 25 bp, Homo sapien
aagttgcttcttatgcgtcaactgg

SEQ ID NO: 1681313 - DNA, 25 bp, Homo sapien
gcttcttatgcgtcaactgggtggc

SEQ ID NO: 1681314 - DNA, 25 bp, Homo sapien
tcaatgctggtttccacttgctgac

SEQ ID NO: 1681315 - DNA, 25 bp, Homo sapien
ggaaagtcaaacaaccgtcaggtga

SEQ ID NO: 1681316 - DNA, 25 bp, Homo sapien
gctgacacctgtaaactaagaggca

SEQ ID NO: 1681317 - DNA, 25 bp, Homo sapien
gttgcaacccatgcagggaaaggca

SEQ ID NO: 1681318 - DNA, 25 bp, Homo sapien
ggcagtctctcaatagaaacacctg

SEQ ID NO: 1681319 - DNA, 25 bp, Homo sapien
tggtcccatccacaaattcacaaag

SEQ ID NO: 1681320 - DNA, 25 bp, Homo sapien
ctggtcccatccacaaattcacaaa

SEQ ID NO: 1681321 - DNA, 25 bp, Homo sapien
agctccacttcccgtacccatcaat

SEQ ID NO: 1681322 - DNA, 25 bp, Homo sapien
agccaaagctttgcatacctcaaat

SEQ ID NO: 1681323 - DNA, 25 bp, Homo sapien
gagctgtttctttccaatctcagcc

SEQ ID NO: 1681324 - DNA, 25 bp, Homo sapien
ttctttccaatctcagccaaagctt

SEQ ID NO: 1681325 - DNA, 25 bp, Homo sapien
gccaaagctttgcatacctcaaatc

SEQ ID NO: 1681326 - DNA, 25 bp, Homo sapien
tcctccgtaccatttctttccgctg

SEQ ID NO: 1681327 - DNA, 25 bp, Homo sapien
cgtaccatttctttccgctgtacca

SEQ ID NO: 1681328 - DNA, 25 bp, Homo sapien
gtaccatttctttccgctgtaccat

SEQ ID NO: 1681329 - DNA, 25 bp, Homo sapien
ctccgtaccatttctttccgctgta

SEQ ID NO: 1681330 - DNA, 25 bp, Homo sapien
ccctgtgctcattttggctccaagt

SEQ ID NO: 1681331 - DNA, 25 bp, Homo sapien
tccctgtgctcattttggctccaag

SEQ ID NO: 1681332 - DNA, 25 bp, Homo sapien
ttccctgtgctcattttggctccaa

SEQ ID NO: 1681333 - DNA, 25 bp, Homo sapien
gatttgacctttcactctcctgtta

SEQ ID NO: 1681334 - DNA, 25 bp, Homo sapien
cctactttgtggatggcgattgaaa

SEQ ID NO: 1681335 - DNA, 25 bp, Homo sapien
gatccaaggtgagttatttccaaat

SEQ ID NO: 1681336 - DNA, 25 bp, Homo sapien
cctgttaagttatactatcccagca

SEQ ID NO: 1681337 - DNA, 25 bp, Homo sapien
aactgagcaagaaatcaaaatagac

SEQ ID NO: 1681338 - DNA, 25 bp, Homo sapien
gtaactgagcaagaaatcaaaatag

SEQ ID NO: 1681339 - DNA, 25 bp, Homo sapien
ctgagcaagaaatcaaaatagacaa

SEQ ID NO: 1681340 - DNA, 25 bp, Homo sapien
taactgagcaagaaatcaaaataga

SEQ ID NO: 1681341 - DNA, 25 bp, Homo sapien
ataaacttgggtctccaccagttgg

SEQ ID NO: 1681342 - DNA, 25 bp, Homo sapien
cataaacttgggtctccaccagttg

SEQ ID NO: 1681343 - DNA, 25 bp, Homo sapien
ctcttcagagcatattgtggtaacc

SEQ ID NO: 1681344 - DNA, 25 bp, Homo sapien
gtcagaactcttcttgggacatttc

SEQ ID NO: 1681345 - DNA, 25 bp, Homo sapien
gaacctgtgatatctcccacgggct

SEQ ID NO: 1681346 - DNA, 25 bp, Homo sapien
tataagctgctttagaccattgtca

SEQ ID NO: 1681347 - DNA, 25 bp, Homo sapien
tccattgtcacctctgtctggcccc

SEQ ID NO: 1681348 - DNA, 25 bp, Homo sapien
aaggcaaataaatccccagagcttc

SEQ ID NO: 1681349 - DNA, 25 bp, Homo sapien
caaataaatccccagagcttccatt

SEQ ID NO: 1681350 - DNA, 25 bp, Homo sapien
ccagagcttccattgtcacctctgt

SEQ ID NO: 1681351 - DNA, 25 bp, Homo sapien
tgctaaacctgaaagctactacctt

SEQ ID NO: 1681352 - DNA, 25 bp, Homo sapien
cttgtgggtaccttttctctgaata

SEQ ID NO: 1681353 - DNA, 25 bp, Homo sapien
caatagatttttgtctgcccctgct

SEQ ID NO: 1681354 - DNA, 25 bp, Homo sapien
gacttgtcttgccttcttgtgggta

SEQ ID NO: 1681355 - DNA, 25 bp, Homo sapien
gcaagaggagcaggaatatcaggaa

SEQ ID NO: 1681356 - DNA, 25 bp, Homo sapien
aaggagattttatcccaggcaagag

SEQ ID NO: 1681357 - DNA, 25 bp, Homo sapien
ggagagaaaaggagattttatccca

SEQ ID NO: 1681358 - DNA, 25 bp, Homo sapien
gagaaaaggagattttatcccaggc

SEQ ID NO: 1681359 - DNA, 25 bp, Homo sapien
gcaaccagcgcctttggctcatttg

SEQ ID NO: 1681360 - DNA, 25 bp, Homo sapien
cagcgcctttggctcatttgtcaaa

SEQ ID NO: 1681361 - DNA, 25 bp, Homo sapien
gactcagaggcaaccagcgcctttg

SEQ ID NO: 1681362 - DNA, 25 bp, Homo sapien
ctcatttgtcaaaggagggtaaatt

SEQ ID NO: 1681363 - DNA, 25 bp, Homo sapien
attcaacacatctgttggtggcagg

SEQ ID NO: 1681364 - DNA, 25 bp, Homo sapien
ggctctgctgatcgcctggtgagga

SEQ ID NO: 1681365 - DNA, 25 bp, Homo sapien
tttagtctctgcattcaacacatct

SEQ ID NO: 1681366 - DNA, 25 bp, Homo sapien
cacagtttagtctctgcattcaaca

SEQ ID NO: 1681367 - DNA, 25 bp, Homo sapien
tctctccccaataacagtgagtggg

SEQ ID NO: 1681368 - DNA, 25 bp, Homo sapien
ccactctctccccaataacagtgag

SEQ ID NO: 1681369 - DNA, 25 bp, Homo sapien
caataacagtgagtggggggaccct

SEQ ID NO: 1681370 - DNA, 25 bp, Homo sapien
actctctccccaataacagtgagtg

SEQ ID NO: 1681371 - DNA, 25 bp, Homo sapien
cttgccattgattgaatcattgcta

SEQ ID NO: 1681372 - DNA, 25 bp, Homo sapien
tgccattgattgaatcattgctata

SEQ ID NO: 1681373 - DNA, 25 bp, Homo sapien
ttgattgaatcattgctataacaag

SEQ ID NO: 1681374 - DNA, 25 bp, Homo sapien
ccattgattgaatcattgctataac

SEQ ID NO: 1681375 - DNA, 25 bp, Homo sapien
atgtctctggtggtcatatttttac

SEQ ID NO: 1681376 - DNA, 25 bp, Homo sapien
actcatttttaagcctttatagtgc

SEQ ID NO: 1681377 - DNA, 25 bp, Homo sapien
tgaagatgtctctggtggtcatatt

SEQ ID NO: 1681378 - DNA, 25 bp, Homo sapien
cattgtaaggatgaagatgtctctg

SEQ ID NO: 1681379 - DNA, 25 bp, Homo sapien
cacttgtccaactttctgagtaatc

SEQ ID NO: 1681380 - DNA, 25 bp, Homo sapien
gtagtcaatgtcacttgtccaactt

SEQ ID NO: 1681381 - DNA, 25 bp, Homo sapien
gggccagcagtccttctagtagtca

SEQ ID NO: 1681382 - DNA, 25 bp, Homo sapien
ccagcagtccttctagtagtcaatg

SEQ ID NO: 1681383 - DNA, 25 bp, Homo sapien
tgtagcatttgtagagctcccagag

SEQ ID NO: 1681384 - DNA, 25 bp, Homo sapien
ttctgttagttttgcgtggctccca

SEQ ID NO: 1681385 - DNA, 25 bp, Homo sapien
gttttgcgtggctcccattaggaac

SEQ ID NO: 1681386 - DNA, 25 bp, Homo sapien
cagagagaggagttcatgctttctg

SEQ ID NO: 1681387 - DNA, 25 bp, Homo sapien
tctagtcagaccacacttgctggcc

SEQ ID NO: 1681388 - DNA, 25 bp, Homo sapien
cacttgctggcctctaatgatattt

SEQ ID NO: 1681389 - DNA, 25 bp, Homo sapien
ttctagtcagaccacacttgctggc

SEQ ID NO: 1681390 - DNA, 25 bp, Homo sapien
ctcttctagtcagaccacacttgct

SEQ ID NO: 1681391 - DNA, 25 bp, Homo sapien
ctgggaacttatctcctggtacccg

SEQ ID NO: 1681392 - DNA, 25 bp, Homo sapien
agagggacagatgacttggatttga

SEQ ID NO: 1681393 - DNA, 25 bp, Homo sapien
tatctcctggtacccggagagggac

SEQ ID NO: 1681394 - DNA, 25 bp, Homo sapien
gacagatgacttggatttgatccta

SEQ ID NO: 1681395 - DNA, 25 bp, Homo sapien
gcttatgctctttttcagatctgga

SEQ ID NO: 1681396 - DNA, 25 bp, Homo sapien
gagtcttgcttatgctctttttcag

SEQ ID NO: 1681397 - DNA, 25 bp, Homo sapien
tttttcagatctggaatggtttttc

SEQ ID NO: 1681398 - DNA, 25 bp, Homo sapien
cctgagagtcttgcttatgctcttt

SEQ ID NO: 1681399 - DNA, 25 bp, Homo sapien
tcagatgtaccagtcgttgtggcca

SEQ ID NO: 1681400 - DNA, 25 bp, Homo sapien
tgtaccagtcgttgtggccacagtg

SEQ ID NO: 1681401 - DNA, 25 bp, Homo sapien
gatgtaccagtcgttgtggccacag

SEQ ID NO: 1681402 - DNA, 25 bp, Homo sapien
tctggaattttctgtacactctcat

SEQ ID NO: 1681403 - DNA, 25 bp, Homo sapien
tcctcctcgtaagtatcttctgtac

SEQ ID NO: 1681404 - DNA, 25 bp, Homo sapien
tcttctgtaccttcggttcccactg

SEQ ID NO: 1681405 - DNA, 25 bp, Homo sapien
tccagccaataatcaagtctagtca

SEQ ID NO: 1681406 - DNA, 25 bp, Homo sapien
tcggttcccactgcctcatcgtttt

SEQ ID NO: 1681407 - DNA, 25 bp, Homo sapien
agacagccacgctggatgaggtgca

SEQ ID NO: 1681408 - DNA, 25 bp, Homo sapien
cgctggatgaggtgcacactggaca

SEQ ID NO: 1681409 - DNA, 25 bp, Homo sapien
acagccacgctggatgaggtgcaca

SEQ ID NO: 1681410 - DNA, 25 bp, Homo sapien
aggtgcacactggacaatatggtgg

SEQ ID NO: 1681411 - DNA, 25 bp, Homo sapien
tactttctaatcatgaaggctgctc

SEQ ID NO: 1681412 - DNA, 25 bp, Homo sapien
tccagtagggtttggtgcaacacca

SEQ ID NO: 1681413 - DNA, 25 bp, Homo sapien
ttttatgctgagctgcaaaacaagg

SEQ ID NO: 1681414 - DNA, 25 bp, Homo sapien
gcaaaacaaggcaggtagtcataat

SEQ ID NO: 1681415 - DNA, 25 bp, Homo sapien
catcaaatccacatgcatacatcat

SEQ ID NO: 1681416 - DNA, 25 bp, Homo sapien
acaagagccgttccagccagagtgt

SEQ ID NO: 1681417 - DNA, 25 bp, Homo sapien
tcttgctaaatattcccggtgaaag

SEQ ID NO: 1681418 - DNA, 25 bp, Homo sapien
ccagagtgtctttgatcttgctaaa

SEQ ID NO: 1681419 - DNA, 25 bp, Homo sapien
tctgtcagcggtaaaacaagagccg

SEQ ID NO: 1681420 - DNA, 25 bp, Homo sapien
agccgttgtgagtgttgatcctcag

SEQ ID NO: 1681421 - DNA, 25 bp, Homo sapien
cattaagtgtcagccgttgtgagtg

SEQ ID NO: 1681422 - DNA, 25 bp, Homo sapien
ttgataaatagcgtcattaagtgtc

SEQ ID NO: 1681423 - DNA, 25 bp, Homo sapien
tgtgagtgttgatcctcagctcatc

SEQ ID NO: 1681424 - DNA, 25 bp, Homo sapien
tgttccaaacacagagttttgagag

SEQ ID NO: 1681425 - DNA, 25 bp, Homo sapien
ccttgatgttccaaacacagagttt

SEQ ID NO: 1681426 - DNA, 25 bp, Homo sapien
agttttgagagaaaacactggaaca

SEQ ID NO: 1681427 - DNA, 25 bp, Homo sapien
aaacacagagttttgagagaaaaca

SEQ ID NO: 1681428 - DNA, 25 bp, Homo sapien
agctgactcaacatccaagagtctg

SEQ ID NO: 1681429 - DNA, 25 bp, Homo sapien
agaagaatctttgagctgactcaac

SEQ ID NO: 1681430 - DNA, 25 bp, Homo sapien
cttgagctccttgactgtagaagaa

SEQ ID NO: 1681431 - DNA, 25 bp, Homo sapien
gagctccttgactgtagaagaatct

SEQ ID NO: 1681432 - DNA, 25 bp, Homo sapien
cattttctagtccttccagctccgg

SEQ ID NO: 1681433 - DNA, 25 bp, Homo sapien
tcccatgcattttctagtccttcca

SEQ ID NO: 1681434 - DNA, 25 bp, Homo sapien
atggtgacaattctgaccactccac

SEQ ID NO: 1681435 - DNA, 25 bp, Homo sapien
gatcttggagcccacggtcttctta

SEQ ID NO: 1681436 - DNA, 25 bp, Homo sapien
ggttcgatacaagcttgaatccggc

SEQ ID NO: 1681437 - DNA, 25 bp, Homo sapien
tcctcggagccttgccgttggttcg

SEQ ID NO: 1681438 - DNA, 25 bp, Homo sapien
gagccttgccgttggttcgatacaa

SEQ ID NO: 1681439 - DNA, 25 bp, Homo sapien
tacaagcttgaatccggccaatgtg

SEQ ID NO: 1681440 - DNA, 25 bp, Homo sapien
tgctctatgtgagcgtgccgcgccc

SEQ ID NO: 1681441 - DNA, 25 bp, Homo sapien
aagtgcacactacggtctccttcac

SEQ ID NO: 1681442 - DNA, 25 bp, Homo sapien
gtcccagctccgtgcgtggagttac

SEQ ID NO: 1681443 - DNA, 25 bp, Homo sapien
tccgtgcgtggagttactacttctg

SEQ ID NO: 1681444 - DNA, 25 bp, Homo sapien
gaagaggctcgcgcacgggggaggg

SEQ ID NO: 1681445 - DNA, 25 bp, Homo sapien
gaggaagaggctcgcgcacggggga

SEQ ID NO: 1681446 - DNA, 25 bp, Homo sapien
ggagaggaagaggctcgcgcacggg

SEQ ID NO: 1681447 - DNA, 25 bp, Homo sapien
aagaggctcgcgcacgggggagggg

SEQ ID NO: 1681448 - DNA, 25 bp, Homo sapien
cgaggatgccgccattaatgtggga

SEQ ID NO: 1681449 - DNA, 25 bp, Homo sapien
ggcaggagcagggtcgcccggcgag

SEQ ID NO: 1681450 - DNA, 25 bp, Homo sapien
gaggcaggagcagggtcgcccggcg

SEQ ID NO: 1681451 - DNA, 25 bp, Homo sapien
ctccgaggatgccgccattaatgtg

SEQ ID NO: 1681452 - DNA, 25 bp, Homo sapien
taaaggagatcctggcctctgcgag

SEQ ID NO: 1681453 - DNA, 25 bp, Homo sapien
tacggcgtgtcgctcttggagcgca

SEQ ID NO: 1681454 - DNA, 25 bp, Homo sapien
cggatgggccgccggtctatatcat

SEQ ID NO: 1681455 - DNA, 25 bp, Homo sapien
ttggagcgcactctccggatgggcc

SEQ ID NO: 1681456 - DNA, 25 bp, Homo sapien
agtcacctaacgtgcattctccaga

SEQ ID NO: 1681457 - DNA, 25 bp, Homo sapien
ccttttcacttaattcgatctgggc

SEQ ID NO: 1681458 - DNA, 25 bp, Homo sapien
tcgatctgggccactttgggcacca

SEQ ID NO: 1681459 - DNA, 25 bp, Homo sapien
catcaagtcacctaacgtgcattct

SEQ ID NO: 1681460 - DNA, 25 bp, Homo sapien
caatcatctatcaatgtttgtgtct

SEQ ID NO: 1681461 - DNA, 25 bp, Homo sapien
tgttttaatctttgatgtgtctggg

SEQ ID NO: 1681462 - DNA, 25 bp, Homo sapien
ggtaaccttcgacagatatattgac

SEQ ID NO: 1681463 - DNA, 25 bp, Homo sapien
tgtgtctactaaatgctgaacagaa

SEQ ID NO: 1681464 - DNA, 25 bp, Homo sapien
ccagttctgactgccattgtcctct

SEQ ID NO: 1681465 - DNA, 25 bp, Homo sapien
tttttgtagacccatccatccttat

SEQ ID NO: 1681466 - DNA, 25 bp, Homo sapien
tccatccttataggaaaccatagca

SEQ ID NO: 1681467 - DNA, 25 bp, Homo sapien
ggaaaccatagcaagccagttctga

SEQ ID NO: 1681468 - DNA, 25 bp, Homo sapien
ttctgagtttaggattagccccgag

SEQ ID NO: 1681469 - DNA, 25 bp, Homo sapien
tcacagtgagttccagccattcttt

SEQ ID NO: 1681470 - DNA, 25 bp, Homo sapien
cagggtaatttgcaccttaagtgta

SEQ ID NO: 1681471 - DNA, 25 bp, Homo sapien
tagccccgagaaatccaccaattaa

SEQ ID NO: 1681472 - DNA, 25 bp, Homo sapien
gatttttctttttcaccttgactca

SEQ ID NO: 1681473 - DNA, 25 bp, Homo sapien
atttttctttttcaccttgactcat

SEQ ID NO: 1681474 - DNA, 25 bp, Homo sapien
ttcgctgattacagccagggtcatg

SEQ ID NO: 1681475 - DNA, 25 bp, Homo sapien
gcttcttcgctgattacagccaggg

SEQ ID NO: 1681476 - DNA, 25 bp, Homo sapien
gtcccgcaccaaaactgttgggaga

SEQ ID NO: 1681477 - DNA, 25 bp, Homo sapien
ccggaaggcatttataggtcccgca

SEQ ID NO: 1681478 - DNA, 25 bp, Homo sapien
cctgactgtacagcctctaaatctt

SEQ ID NO: 1681479 - DNA, 25 bp, Homo sapien
gctcctgactgtacagcctctaaat

SEQ ID NO: 1681480 - DNA, 25 bp, Homo sapien
tcatctgctcctgactgtacagcct

SEQ ID NO: 1681481 - DNA, 25 bp, Homo sapien
tctgctcctgactgtacagcctcta

SEQ ID NO: 1681482 - DNA, 25 bp, Homo sapien
tgttcactggaataggtaatctctc

SEQ ID NO: 1681483 - DNA, 25 bp, Homo sapien
catactcgactctgtgaactgagca

SEQ ID NO: 1681484 - DNA, 25 bp, Homo sapien
tgggaagagatatgcacagtcagct

SEQ ID NO: 1681485 - DNA, 25 bp, Homo sapien
tcatgaacctagagagtcagcccaa

SEQ ID NO: 1681486 - DNA, 25 bp, Homo sapien
ttgtgagctgctgtggggccaacac

SEQ ID NO: 1681487 - DNA, 25 bp, Homo sapien
gggccaacacagtcactgagagaag

SEQ ID NO: 1681488 - DNA, 25 bp, Homo sapien
caacacagtcactgagagaagtcat

SEQ ID NO: 1681489 - DNA, 25 bp, Homo sapien
cagtcactgagagaagtcatcccat

SEQ ID NO: 1681490 - DNA, 25 bp, Homo sapien
ctggtttgagcatgtcgctgtttac

SEQ ID NO: 1681491 - DNA, 25 bp, Homo sapien
gtttgagcatgtcgctgtttacgct

SEQ ID NO: 1681492 - DNA, 25 bp, Homo sapien
ggtttgagcatgtcgctgtttacgc

SEQ ID NO: 1681493 - DNA, 25 bp, Homo sapien
tggtttgagcatgtcgctgtttacg

SEQ ID NO: 1681494 - DNA, 25 bp, Homo sapien
aaaaatgactactagtaatttgcct

SEQ ID NO: 1681495 - DNA, 25 bp, Homo sapien
aatagtatgactgccaaattgtgca

SEQ ID NO: 1681496 - DNA, 25 bp, Homo sapien
atttgcctgagaatagtatgactgc

SEQ ID NO: 1681497 - DNA, 25 bp, Homo sapien
aatgactactagtaatttgcctgag

SEQ ID NO: 1681498 - DNA, 25 bp, Homo sapien
tcatgttccataggaccagagtggg

SEQ ID NO: 1681499 - DNA, 25 bp, Homo sapien
cattcttcatgttccataggaccag

SEQ ID NO: 1681500 - DNA, 25 bp, Homo sapien
gaacacagtggggactcaaaaccac

SEQ ID NO: 1681501 - DNA, 25 bp, Homo sapien
tttcattcttcatgttccataggac

SEQ ID NO: 1681502 - DNA, 25 bp, Homo sapien
tgaacaatgcgaaagcaagagggct

SEQ ID NO: 1681503 - DNA, 25 bp, Homo sapien
cagtgtccctgacgtgctggagaaa

SEQ ID NO: 1681504 - DNA, 25 bp, Homo sapien
tgtggcccatcagggtaagtgagca

SEQ ID NO: 1681505 - DNA, 25 bp, Homo sapien
tgaaaagcctctaaggcaccagtgt

SEQ ID NO: 1681506 - DNA, 25 bp, Homo sapien
ggatgttacctgactcaaacagtag

SEQ ID NO: 1681507 - DNA, 25 bp, Homo sapien
tacagtcctgtggttcccaactcat

SEQ ID NO: 1681508 - DNA, 25 bp, Homo sapien
tattctatcaagacttcccctgaag

SEQ ID NO: 1681509 - DNA, 25 bp, Homo sapien
taaggtctggctaagaggagacagt

SEQ ID NO: 1681510 - DNA, 25 bp, Homo sapien
tgtactggctacctcctccagcaaa

SEQ ID NO: 1681511 - DNA, 25 bp, Homo sapien
gctttcccctatgctcccactgtac

SEQ ID NO: 1681512 - DNA, 25 bp, Homo sapien
cagcaaagcagctatcctcctgcat

SEQ ID NO: 1681513 - DNA, 25 bp, Homo sapien
tccagcaaagcagctatcctcctgc

SEQ ID NO: 1681514 - DNA, 25 bp, Homo sapien
aagggcctgaattaggattttgtga

SEQ ID NO: 1681515 - DNA, 25 bp, Homo sapien
agggcctgaattaggattttgtgac

SEQ ID NO: 1681516 - DNA, 25 bp, Homo sapien
aataagggcctgaattaggattttg

SEQ ID NO: 1681517 - DNA, 25 bp, Homo sapien
taagggcctgaattaggattttgtg

SEQ ID NO: 1681518 - DNA, 25 bp, Homo sapien
ggaggatgccggaacatgagccttt

SEQ ID NO: 1681519 - DNA, 25 bp, Homo sapien
gacctcccaggtatggagtctcagg

SEQ ID NO: 1681520 - DNA, 25 bp, Homo sapien
ggatggggtctcaggttggagtccc

SEQ ID NO: 1681521 - DNA, 25 bp, Homo sapien
ttgttgtcactttctggcaggtgga

SEQ ID NO: 1681522 - DNA, 25 bp, Homo sapien
tgtaatctacgactgataataaaac

SEQ ID NO: 1681523 - DNA, 25 bp, Homo sapien
aataaaacaagccaacggagcatct

SEQ ID NO: 1681524 - DNA, 25 bp, Homo sapien
aactcccttatgtaatctacgactg

SEQ ID NO: 1681525 - DNA, 25 bp, Homo sapien
aaaacaagccaacggagcatcttcc

SEQ ID NO: 1681526 - DNA, 25 bp, Homo sapien
gagacataaaggaaaccgagtatgg

SEQ ID NO: 1681527 - DNA, 25 bp, Homo sapien
tgtcggctgccacggagacataaag

SEQ ID NO: 1681528 - DNA, 25 bp, Homo sapien
accgagtatggtgcctgccttcaga

SEQ ID NO: 1681529 - DNA, 25 bp, Homo sapien
gctgccacggagacataaaggaaac

SEQ ID NO: 1681530 - DNA, 25 bp, Homo sapien
gcagactggctagctcccaattcag

SEQ ID NO: 1681531 - DNA, 25 bp, Homo sapien
taggcggtaactggctcatgactgt

SEQ ID NO: 1681532 - DNA, 25 bp, Homo sapien
gaagatcgggacattgaggcacagt

SEQ ID NO: 1681533 - DNA, 25 bp, Homo sapien
cactatcaacacagggcagcaagag

SEQ ID NO: 1681534 - DNA, 25 bp, Homo sapien
ccatttaaggtagcattggtggaca

SEQ ID NO: 1681535 - DNA, 25 bp, Homo sapien
aattaagagccttttatgcagttcc

SEQ ID NO: 1681536 - DNA, 25 bp, Homo sapien
tttatgcagttccaatccagagcca

SEQ ID NO: 1681537 - DNA, 25 bp, Homo sapien
ccaatccagagccatttaaggtagc

SEQ ID NO: 1681538 - DNA, 25 bp, Homo sapien
ttattggaacaaagctgtcaactca

SEQ ID NO: 1681539 - DNA, 25 bp, Homo sapien
gaacaaagctgtcaactcattagaa

SEQ ID NO: 1681540 - DNA, 25 bp, Homo sapien
tagctctgtatgaacatgaggaaga

SEQ ID NO: 1681541 - DNA, 25 bp, Homo sapien
taaagaattcttttcatagctctgt

SEQ ID NO: 1681542 - DNA, 25 bp, Homo sapien
tttaagtaggtaactgcaaaagtca

SEQ ID NO: 1681543 - DNA, 25 bp, Homo sapien
cagtgacaattcataattagtggga

SEQ ID NO: 1681544 - DNA, 25 bp, Homo sapien
ccactttaagccgagaattttatga

SEQ ID NO: 1681545 - DNA, 25 bp, Homo sapien
tataaacacgctataggaaatgtac

SEQ ID NO: 1681546 - DNA, 25 bp, Homo sapien
caacagtcgtctccttgattaaggg

SEQ ID NO: 1681547 - DNA, 25 bp, Homo sapien
tcaggcctgtcgtactgcaacagtc

SEQ ID NO: 1681548 - DNA, 25 bp, Homo sapien
caaggtcaaatccttcaggcctgtc

SEQ ID NO: 1681549 - DNA, 25 bp, Homo sapien
tgattaagggttaggccagggagcg

SEQ ID NO: 1681550 - DNA, 25 bp, Homo sapien
gaacacagtcttcttttctgttatg

SEQ ID NO: 1681551 - DNA, 25 bp, Homo sapien
aagtcgatccctggacacaggctcc

SEQ ID NO: 1681552 - DNA, 25 bp, Homo sapien
ctttttctacaagtcgatccctgga

SEQ ID NO: 1681553 - DNA, 25 bp, Homo sapien
tcataaggtcccagaaagttccact

SEQ ID NO: 1681554 - DNA, 25 bp, Homo sapien
cagaaagttccactgctgtgataca

SEQ ID NO: 1681555 - DNA, 25 bp, Homo sapien
tattgttaattgtgagggctctgca

SEQ ID NO: 1681556 - DNA, 25 bp, Homo sapien
tgcacttaagtcttccagaactact

SEQ ID NO: 1681557 - DNA, 25 bp, Homo sapien
tgtgagggctctgcacttaagtctt

SEQ ID NO: 1681558 - DNA, 25 bp, Homo sapien
cacactgaagcctaagcgctttatt

SEQ ID NO: 1681559 - DNA, 25 bp, Homo sapien
tcatacaaggaaacgaaggtctggc

SEQ ID NO: 1681560 - DNA, 25 bp, Homo sapien
acaaggaaacgaaggtctggctgac

SEQ ID NO: 1681561 - DNA, 25 bp, Homo sapien
tgttcatacaaggaaacgaaggtct

SEQ ID NO: 1681562 - DNA, 25 bp, Homo sapien
tatgtgttcatacaaggaaacgaag

SEQ ID NO: 1681563 - DNA, 25 bp, Homo sapien
tccaatcagacccatcattcatgtc

SEQ ID NO: 1681564 - DNA, 25 bp, Homo sapien
gggttgcagacaactcagcatcctc

SEQ ID NO: 1681565 - DNA, 25 bp, Homo sapien
tctccaaagagttcggcctgaagct

SEQ ID NO: 1681566 - DNA, 25 bp, Homo sapien
tcctcacattccccgacatagggta

SEQ ID NO: 1681567 - DNA, 25 bp, Homo sapien
agatccgagagtcaatgacttccag

SEQ ID NO: 1681568 - DNA, 25 bp, Homo sapien
cagatccgagagtcaatgacttcca

SEQ ID NO: 1681569 - DNA, 25 bp, Homo sapien
tcaatgacttccagagattgccatg

SEQ ID NO: 1681570 - DNA, 25 bp, Homo sapien
gggatgtggccctaaacagtaagta

SEQ ID NO: 1681571 - DNA, 25 bp, Homo sapien
tatctctgtgataagagccatcccc

SEQ ID NO: 1681572 - DNA, 25 bp, Homo sapien
agccatcccccagtgtatgccggtg

SEQ ID NO: 1681573 - DNA, 25 bp, Homo sapien
tcttctcttgtctcgggcttgtaag

SEQ ID NO: 1681574 - DNA, 25 bp, Homo sapien
tgggcggagccttgtaggtaccaat

SEQ ID NO: 1681575 - DNA, 25 bp, Homo sapien
tgacttctcaattaccccaaatcag

SEQ ID NO: 1681576 - DNA, 25 bp, Homo sapien
tcagcctacaaagacatggcatgtg

SEQ ID NO: 1681577 - DNA, 25 bp, Homo sapien
gaaagaagattgagtgggcggagcc

SEQ ID NO: 1681578 - DNA, 25 bp, Homo sapien
tgtgtttctctgcaatatctccatc

SEQ ID NO: 1681579 - DNA, 25 bp, Homo sapien
tggtgaaatcgatgaaagagtcttg

SEQ ID NO: 1681580 - DNA, 25 bp, Homo sapien
tttctctgtctgctattattatgtg

SEQ ID NO: 1681581 - DNA, 25 bp, Homo sapien
tctgtctgctattattatgtgtttc

SEQ ID NO: 1681582 - DNA, 25 bp, Homo sapien
tgcattctctgacatcttattgaag

SEQ ID NO: 1681583 - DNA, 25 bp, Homo sapien
gctgcattctctgacatcttattga

SEQ ID NO: 1681584 - DNA, 25 bp, Homo sapien
atgtactgctgcattctctgacatc

SEQ ID NO: 1681585 - DNA, 25 bp, Homo sapien
ctgctgcattctctgacatcttatt

SEQ ID NO: 1681586 - DNA, 25 bp, Homo sapien
gtccaagacaatcctgtcagtgagt

SEQ ID NO: 1681587 - DNA, 25 bp, Homo sapien
tgtggtgatgaacacgaatgatgag

SEQ ID NO: 1681588 - DNA, 25 bp, Homo sapien
ctgtatgcagcatgtctaaaggact

SEQ ID NO: 1681589 - DNA, 25 bp, Homo sapien
gtcatgggggaaagaagttgaacta

SEQ ID NO: 1681590 - DNA, 25 bp, Homo sapien
aacacgaatgatgagaaacttcggg

SEQ ID NO: 1681591 - DNA, 25 bp, Homo sapien
agattccgtgggcaacaggaccaag

SEQ ID NO: 1681592 - DNA, 25 bp, Homo sapien
cagacacttttctgggccctagaga

SEQ ID NO: 1681593 - DNA, 25 bp, Homo sapien
caagctcctgtctgcttgcagctca

SEQ ID NO: 1681594 - DNA, 25 bp, Homo sapien
gccctagagattccgtgggcaacag

SEQ ID NO: 1681595 - DNA, 25 bp, Homo sapien
ggtctaggtccgacgcaaggcagtt

SEQ ID NO: 1681596 - DNA, 25 bp, Homo sapien
cagtaccagatgcacatggaaaggc

SEQ ID NO: 1681597 - DNA, 25 bp, Homo sapien
gggatgtgtggcaacctcactctag

SEQ ID NO: 1681598 - DNA, 25 bp, Homo sapien
agttccacgggaccttccctgcatt

SEQ ID NO: 1681599 - DNA, 25 bp, Homo sapien
gacaggcagagatagaggctcattc

SEQ ID NO: 1681600 - DNA, 25 bp, Homo sapien
cattggtagatctttcttgctgcca

SEQ ID NO: 1681601 - DNA, 25 bp, Homo sapien
cttgtctgtgggaagagtgtactcc

SEQ ID NO: 1681602 - DNA, 25 bp, Homo sapien
cccagcacgcattgattaggacatg

SEQ ID NO: 1681603 - DNA, 25 bp, Homo sapien
gagctgacactatgtttacccgagg

SEQ ID NO: 1681604 - DNA, 25 bp, Homo sapien
gatggagcaatcgaacattcaagag

SEQ ID NO: 1681605 - DNA, 25 bp, Homo sapien
gaaaatccaggttatgcccctcagc

SEQ ID NO: 1681606 - DNA, 25 bp, Homo sapien
cctagaagttcatccaatggacgaa

SEQ ID NO: 1681607 - DNA, 25 bp, Homo sapien
gccaaactgagctttcatgccagtc

SEQ ID NO: 1681608 - DNA, 25 bp, Homo sapien
ccactttgccacccttgggatgcct

SEQ ID NO: 1681609 - DNA, 25 bp, Homo sapien
agccaaactgagctttcatgccagt

SEQ ID NO: 1681610 - DNA, 25 bp, Homo sapien
cttttatcagatgggaacaatttaa

SEQ ID NO: 1681611 - DNA, 25 bp, Homo sapien
aacttggtttctgatcggatattgc

SEQ ID NO: 1681612 - DNA, 25 bp, Homo sapien
tgtatgtctaccttgggtttttctg

SEQ ID NO: 1681613 - DNA, 25 bp, Homo sapien
tattctgcatgatctctttccaagg

SEQ ID NO: 1681614 - DNA, 25 bp, Homo sapien
tgagcatgagtgaagcactacagta

SEQ ID NO: 1681615 - DNA, 25 bp, Homo sapien
atccttcaactagaagtcgtttgga

SEQ ID NO: 1681616 - DNA, 25 bp, Homo sapien
ttctgagtgagcatgagtgaagcac

SEQ ID NO: 1681617 - DNA, 25 bp, Homo sapien
gtcgtttggatttctgagtgagcat

SEQ ID NO: 1681618 - DNA, 25 bp, Homo sapien
agcacagtttgtatttggagatcat

SEQ ID NO: 1681619 - DNA, 25 bp, Homo sapien
aagcacagtttgtatttggagatca

SEQ ID NO: 1681620 - DNA, 25 bp, Homo sapien
aaagcacagtttgtatttggagatc

SEQ ID NO: 1681621 - DNA, 25 bp, Homo sapien
aaaaagcacagtttgtatttggaga

SEQ ID NO: 1681622 - DNA, 25 bp, Homo sapien
gaaatgctacaaaggcggaatcttc

SEQ ID NO: 1681623 - DNA, 25 bp, Homo sapien
caaaggcggaatcttcaggacttga

SEQ ID NO: 1681624 - DNA, 25 bp, Homo sapien
tcttcaggacttgatgggcagcttt

SEQ ID NO: 1681625 - DNA, 25 bp, Homo sapien
aaagccagaaatgctacaaaggcgg

SEQ ID NO: 1681626 - DNA, 25 bp, Homo sapien
ataaatcctgttgggaggaatgagg

SEQ ID NO: 1681627 - DNA, 25 bp, Homo sapien
atcctgttgggaggaatgagggtcc

SEQ ID NO: 1681628 - DNA, 25 bp, Homo sapien
aaatcctgttgggaggaatgagggt

SEQ ID NO: 1681629 - DNA, 25 bp, Homo sapien
ctataaatcctgttgggaggaatga

SEQ ID NO: 1681630 - DNA, 25 bp, Homo sapien
caagaggacgcccaagagttggcac

SEQ ID NO: 1681631 - DNA, 25 bp, Homo sapien
ggcactgctggtcccattcttgctt

SEQ ID NO: 1681632 - DNA, 25 bp, Homo sapien
tagagaattgtccacctgtactggg

SEQ ID NO: 1681633 - DNA, 25 bp, Homo sapien
ggaacacagttcgagcccaagagga

SEQ ID NO: 1681634 - DNA, 25 bp, Homo sapien
tccccctctaaaggcagccaaacca

SEQ ID NO: 1681635 - DNA, 25 bp, Homo sapien
ttctcttagctccttgaacagggct

SEQ ID NO: 1681636 - DNA, 25 bp, Homo sapien
tctcttagctccttgaacagggctc

SEQ ID NO: 1681637 - DNA, 25 bp, Homo sapien
ctcttagctccttgaacagggctca

SEQ ID NO: 1681638 - DNA, 25 bp, Homo sapien
tgatttgggacttcaagactccaga

SEQ ID NO: 1681639 - DNA, 25 bp, Homo sapien
catgctctgttacagtcctgggaga

SEQ ID NO: 1681640 - DNA, 25 bp, Homo sapien
tccctagagcctgcaaaaggaccgt

SEQ ID NO: 1681641 - DNA, 25 bp, Homo sapien
tgagcccagttaacaccaaggattg

SEQ ID NO: 1681642 - DNA, 25 bp, Homo sapien
gagaggtagtgacatccggtcacga

SEQ ID NO: 1681643 - DNA, 25 bp, Homo sapien
aagtggcgagtgagaggtagtgaca

SEQ ID NO: 1681644 - DNA, 25 bp, Homo sapien
tagtgacatccggtcacgaactctc

SEQ ID NO: 1681645 - DNA, 25 bp, Homo sapien
caggaagtggcgagtgagaggtagt

SEQ ID NO: 1681646 - DNA, 25 bp, Homo sapien
tctctgtcttctctacgttacctag

SEQ ID NO: 1681647 - DNA, 25 bp, Homo sapien
cattcacgggaactttctctgtctt

SEQ ID NO: 1681648 - DNA, 25 bp, Homo sapien
tacgttacctagcttgcaaagtggg

SEQ ID NO: 1681649 - DNA, 25 bp, Homo sapien
tcaaaaggtgacgacgtcttcaccg

SEQ ID NO: 1681650 - DNA, 25 bp, Homo sapien
tcctccctgccaagtcaatgccact

SEQ ID NO: 1681651 - DNA, 25 bp, Homo sapien
tgccaagtcaatgccactgccaatc

SEQ ID NO: 1681652 - DNA, 25 bp, Homo sapien
aatgccactgccaatctcggaagcc

SEQ ID NO: 1681653 - DNA, 25 bp, Homo sapien
cttcctccctgccaagtcaatgcca

SEQ ID NO: 1681654 - DNA, 25 bp, Homo sapien
gggttgtcagttactcgagtattca

SEQ ID NO: 1681655 - DNA, 25 bp, Homo sapien
ttttcactgggttgtcagttactcg

SEQ ID NO: 1681656 - DNA, 25 bp, Homo sapien
tggctcgagtgcaatgcaccaattg

SEQ ID NO: 1681657 - DNA, 25 bp, Homo sapien
aatgcaccaattgtttttcactggg

SEQ ID NO: 1681658 - DNA, 25 bp, Homo sapien
gcaaccggttgcagaaacagggaac

SEQ ID NO: 1681659 - DNA, 25 bp, Homo sapien
tcggccgtccccaatctctgggagt

SEQ ID NO: 1681660 - DNA, 25 bp, Homo sapien
tccccaatctctgggagtcttctga

SEQ ID NO: 1681661 - DNA, 25 bp, Homo sapien
ctgcgttttacttgacattggaggc

SEQ ID NO: 1681662 - DNA, 25 bp, Homo sapien
ttcacagagccccagtccttagaag

SEQ ID NO: 1681663 - DNA, 25 bp, Homo sapien
gagccccagtccttagaagcccagc

SEQ ID NO: 1681664 - DNA, 25 bp, Homo sapien
cagtccttagaagcccagctggcgt

SEQ ID NO: 1681665 - DNA, 25 bp, Homo sapien
ttagaagcccagctggcgtctccaa

SEQ ID NO: 1681666 - DNA, 25 bp, Homo sapien
taggtggccacccatctggcatgaa

SEQ ID NO: 1681667 - DNA, 25 bp, Homo sapien
tcagacgtctctaaagtggcagcct

SEQ ID NO: 1681668 - DNA, 25 bp, Homo sapien
tgtgacctgcgggtactcagacgtc

SEQ ID NO: 1681669 - DNA, 25 bp, Homo sapien
tcactcagagcccagaacagttggc

SEQ ID NO: 1681670 - DNA, 25 bp, Homo sapien
tgaaaatacacatgctacacacgcc

SEQ ID NO: 1681671 - DNA, 25 bp, Homo sapien
ctgaaaatacacatgctacacacgc

SEQ ID NO: 1681672 - DNA, 25 bp, Homo sapien
tctttgctcccacatgcatccgcct

SEQ ID NO: 1681673 - DNA, 25 bp, Homo sapien
ctttcttaaattgagcaacagtctc

SEQ ID NO: 1681674 - DNA, 25 bp, Homo sapien
tcctggctttccaatagctgtgctt

SEQ ID NO: 1681675 - DNA, 25 bp, Homo sapien
caacagtctcctcaagtgtcgggct

SEQ ID NO: 1681676 - DNA, 25 bp, Homo sapien
gaggcatctacactaacaccgtggg

SEQ ID NO: 1681677 - DNA, 25 bp, Homo sapien
catgatttcagacgccaatgcctac

SEQ ID NO: 1681678 - DNA, 25 bp, Homo sapien
gatattggcagctccatcaaaggaa

SEQ ID NO: 1681679 - DNA, 25 bp, Homo sapien
ctatcctatgaacccggcccgagga

SEQ ID NO: 1681680 - DNA, 25 bp, Homo sapien
tgaactctttcaaactaacatcttg

SEQ ID NO: 1681681 - DNA, 25 bp, Homo sapien
gatattattctaaggacactttcct

SEQ ID NO: 1681682 - DNA, 25 bp, Homo sapien
tataatttgcccaaactgagagaag

SEQ ID NO: 1681683 - DNA, 25 bp, Homo sapien
aaggcagtgaaaacttgaatgcctc

SEQ ID NO: 1681684 - DNA, 25 bp, Homo sapien
ggctgtccggagacaagggctactt

SEQ ID NO: 1681685 - DNA, 25 bp, Homo sapien
cgctgtgacccagtggtagagtgca

SEQ ID NO: 1681686 - DNA, 25 bp, Homo sapien
ggagacaagggctactttgtccttg

SEQ ID NO: 1681687 - DNA, 25 bp, Homo sapien
cttgttggaccctccctggtgtggg

SEQ ID NO: 1681688 - DNA, 25 bp, Homo sapien
tctgcacttcccatatttgtgagaa

SEQ ID NO: 1681689 - DNA, 25 bp, Homo sapien
tgtgagaatacctcagctatgagct

SEQ ID NO: 1681690 - DNA, 25 bp, Homo sapien
tggaagaagcgtcagttcctctgca

SEQ ID NO: 1681691 - DNA, 25 bp, Homo sapien
atctgtgggcgcctgcaaatcacct

SEQ ID NO: 1681692 - DNA, 25 bp, Homo sapien
tgtgcaaatggtcccggtaacggtg

SEQ ID NO: 1681693 - DNA, 25 bp, Homo sapien
aagtgtgcaaatggtcccggtaacg

SEQ ID NO: 1681694 - DNA, 25 bp, Homo sapien
gcaaatggtcccggtaacggtgcag

SEQ ID NO: 1681695 - DNA, 25 bp, Homo sapien
caaagtgtgcaaatggtcccggtaa

SEQ ID NO: 1681696 - DNA, 25 bp, Homo sapien
tttgaatggaggatccaggctgcta

SEQ ID NO: 1681697 - DNA, 25 bp, Homo sapien
tgtttgaatggaggatccaggctgc

SEQ ID NO: 1681698 - DNA, 25 bp, Homo sapien
gaatggaggatccaggctgctacca

SEQ ID NO: 1681699 - DNA, 25 bp, Homo sapien
ttcctgtttgaatggaggatccagg

SEQ ID NO: 1681700 - DNA, 25 bp, Homo sapien
tcatccaagaagatccatcaggacg

SEQ ID NO: 1681701 - DNA, 25 bp, Homo sapien
cagaatcagatgttcgcagaagcaa

SEQ ID NO: 1681702 - DNA, 25 bp, Homo sapien
ggacgcagttaaaagcagaatcaga

SEQ ID NO: 1681703 - DNA, 25 bp, Homo sapien
gttcgcagaagcaatactacattta

SEQ ID NO: 1681704 - DNA, 25 bp, Homo sapien
gagccctggacacatatgagaacac

SEQ ID NO: 1681705 - DNA, 25 bp, Homo sapien
gatttcatcacaatatcagaacgga

SEQ ID NO: 1681706 - DNA, 25 bp, Homo sapien
taaaggaatgatccacgacccaggc

SEQ ID NO: 1681707 - DNA, 25 bp, Homo sapien
gagtagacggagcaagatttcatca

SEQ ID NO: 1681708 - DNA, 25 bp, Homo sapien
gtgggagtggagtggtctcctggcc

SEQ ID NO: 1681709 - DNA, 25 bp, Homo sapien
tggtccaccagggacaatgtgctca

SEQ ID NO: 1681710 - DNA, 25 bp, Homo sapien
gtccaccagggacaatgtgctcagt

SEQ ID NO: 1681711 - DNA, 25 bp, Homo sapien
cctggtccaccagggacaatgtgct

SEQ ID NO: 1681712 - DNA, 25 bp, Homo sapien
atgacagtctctggccaacacagac

SEQ ID NO: 1681713 - DNA, 25 bp, Homo sapien
aatatgacagtctctggccaacaca

SEQ ID NO: 1681714 - DNA, 25 bp, Homo sapien
gaagaaaggttaaatatgacagtct

SEQ ID NO: 1681715 - DNA, 25 bp, Homo sapien
tgaagaaaggttaaatatgacagtc

SEQ ID NO: 1681716 - DNA, 25 bp, Homo sapien
tacgtaagcacgataaaaatctttc

SEQ ID NO: 1681717 - DNA, 25 bp, Homo sapien
ttcctacgtaagcacgataaaaatc

SEQ ID NO: 1681718 - DNA, 25 bp, Homo sapien
gaatttttcctacgtaagcacgata

SEQ ID NO: 1681719 - DNA, 25 bp, Homo sapien
tggaatttttcctacgtaagcacga

SEQ ID NO: 1681720 - DNA, 25 bp, Homo sapien
caaataacaggtaaagaaaagtgct

SEQ ID NO: 1681721 - DNA, 25 bp, Homo sapien
tcaaataacaggtaaagaaaagtgc

SEQ ID NO: 1681722 - DNA, 25 bp, Homo sapien
tcaagcaactgccaactcatttgga

SEQ ID NO: 1681723 - DNA, 25 bp, Homo sapien
aactcatttggacctgatctagacc

SEQ ID NO: 1681724 - DNA, 25 bp, Homo sapien
gccaactcatttggacctgatctag

SEQ ID NO: 1681725 - DNA, 25 bp, Homo sapien
gcaactgccaactcatttggacctg

SEQ ID NO: 1681726 - DNA, 25 bp, Homo sapien
attgcatagttattgtgaatataca

SEQ ID NO: 1681727 - DNA, 25 bp, Homo sapien
cagatgtaacatctctaattgcata

SEQ ID NO: 1681728 - DNA, 25 bp, Homo sapien
tctctaattgcatagttattgtgaa

SEQ ID NO: 1681729 - DNA, 25 bp, Homo sapien
aacatctctaattgcatagttattg

SEQ ID NO: 1681730 - DNA, 25 bp, Homo sapien
tattcctacttcttccactatcagc

SEQ ID NO: 1681731 - DNA, 25 bp, Homo sapien
ctattcctacttcttccactatcag

SEQ ID NO: 1681732 - DNA, 25 bp, Homo sapien
gcaaagagaaaagtggctgaacacc

SEQ ID NO: 1681733 - DNA, 25 bp, Homo sapien
cctcttgtgagggtttcagcctagc

SEQ ID NO: 1681734 - DNA, 25 bp, Homo sapien
aacacacccgtagaatgctgccatg

SEQ ID NO: 1681735 - DNA, 25 bp, Homo sapien
tcgtctctgggaaagatcaccttca

SEQ ID NO: 1681736 - DNA, 25 bp, Homo sapien
aagtattcagttggcaggtaacgga

SEQ ID NO: 1681737 - DNA, 25 bp, Homo sapien
taacggaatgacctgttgtaatcac

SEQ ID NO: 1681738 - DNA, 25 bp, Homo sapien
tattgccggcctctttagaaagtat

SEQ ID NO: 1681739 - DNA, 25 bp, Homo sapien
tgtaatcactgaacactgacatatt

SEQ ID NO: 1681740 - DNA, 25 bp, Homo sapien
taactgggagatgtctatggaacct

SEQ ID NO: 1681741 - DNA, 25 bp, Homo sapien
cacttgcaacatggtgtccaagaca

SEQ ID NO: 1681742 - DNA, 25 bp, Homo sapien
gctacctggttatgccgtgcagtga

SEQ ID NO: 1681743 - DNA, 25 bp, Homo sapien
taagagccaagaatagcactcagag

SEQ ID NO: 1681744 - DNA, 25 bp, Homo sapien
tacagagatcccctgggcttacagc

SEQ ID NO: 1681745 - DNA, 25 bp, Homo sapien
tatctatgggcaggacttcgaggag

SEQ ID NO: 1681746 - DNA, 25 bp, Homo sapien
tctcgcctgaagcaaatgcaagcct

SEQ ID NO: 1681747 - DNA, 25 bp, Homo sapien
tagggaatttcctgcctctacagag

SEQ ID NO: 1681748 - DNA, 25 bp, Homo sapien
gaaatccgatcacccctctctgtta

SEQ ID NO: 1681749 - DNA, 25 bp, Homo sapien
cagtgagggtctatgattaacaaac

SEQ ID NO: 1681750 - DNA, 25 bp, Homo sapien
tcttcctgagctattccgtatggta

SEQ ID NO: 1681751 - DNA, 25 bp, Homo sapien
cagaccctgagtttactagcatgaa

SEQ ID NO: 1681752 - DNA, 25 bp, Homo sapien
atcatcacgcaatgtataaatgttt

SEQ ID NO: 1681753 - DNA, 25 bp, Homo sapien
ggatatgctaactatcctgatttaa

SEQ ID NO: 1681754 - DNA, 25 bp, Homo sapien
gatttaatcatcacgcaatgtataa

SEQ ID NO: 1681755 - DNA, 25 bp, Homo sapien
ttttgaatattctcgccacaaaaaa

SEQ ID NO: 1681756 - DNA, 25 bp, Homo sapien
ttgtcgtggattcccacatgccctt

SEQ ID NO: 1681757 - DNA, 25 bp, Homo sapien
ttacagttcctcaacaacaccatgc

SEQ ID NO: 1681758 - DNA, 25 bp, Homo sapien
gctgctccagatgacttacagttcc

SEQ ID NO: 1681759 - DNA, 25 bp, Homo sapien
tctgatcatagcagtgagggtgcca

SEQ ID NO: 1681760 - DNA, 25 bp, Homo sapien
tcaagcttttctgttaatacattca

SEQ ID NO: 1681761 - DNA, 25 bp, Homo sapien
actcctcaagcttttctgttaatac

SEQ ID NO: 1681762 - DNA, 25 bp, Homo sapien
tcctcaagcttttctgttaatacat

SEQ ID NO: 1681763 - DNA, 25 bp, Homo sapien
aactcctcaagcttttctgttaata

SEQ ID NO: 1681764 - DNA, 25 bp, Homo sapien
tgtttcacacggaaagcgctgcact

SEQ ID NO: 1681765 - DNA, 25 bp, Homo sapien
cactgggaaacctcgggtgcaagct

SEQ ID NO: 1681766 - DNA, 25 bp, Homo sapien
cagcaaattaccctctccggcgggt

SEQ ID NO: 1681767 - DNA, 25 bp, Homo sapien
ccttgactttcactggagcagacaa

SEQ ID NO: 1681768 - DNA, 25 bp, Homo sapien
tctctcggggtctcacgtgcacatc

SEQ ID NO: 1681769 - DNA, 25 bp, Homo sapien
tgaagctaccttcactctcaagagc

SEQ ID NO: 1681770 - DNA, 25 bp, Homo sapien
tcagcaccagctactgagagcctgc

SEQ ID NO: 1681771 - DNA, 25 bp, Homo sapien
tcaagagctccagggcggaacgcca

SEQ ID NO: 1681772 - DNA, 25 bp, Homo sapien
gcgcggcgaacggagcgcaaacctc

SEQ ID NO: 1681773 - DNA, 25 bp, Homo sapien
aacctccccggcttcgctgagcgcg

SEQ ID NO: 1681774 - DNA, 25 bp, Homo sapien
cggcttcgctgagcgcgtgggctcc

SEQ ID NO: 1681775 - DNA, 25 bp, Homo sapien
ttcgctgagcgcgtgggctccgcca

SEQ ID NO: 1681776 - DNA, 25 bp, Homo sapien
tttttgggtttctcggcgctcgcgc

SEQ ID NO: 1681777 - DNA, 25 bp, Homo sapien
ttgggtttctcggcgctcgcgcctg

SEQ ID NO: 1681778 - DNA, 25 bp, Homo sapien
tctttttgggtttctcggcgctcgc

SEQ ID NO: 1681779 - DNA, 25 bp, Homo sapien
ttttgggtttctcggcgctcgcgcc

SEQ ID NO: 1681780 - DNA, 25 bp, Homo sapien
ttgacagtggatcacaaaggacacg

SEQ ID NO: 1681781 - DNA, 25 bp, Homo sapien
tgatctccttgcctagttgacagtg

SEQ ID NO: 1681782 - DNA, 25 bp, Homo sapien
gtggatcacaaaggacacgttgttg

SEQ ID NO: 1681783 - DNA, 25 bp, Homo sapien
ccttgcctagttgacagtggatcac

SEQ ID NO: 1681784 - DNA, 25 bp, Homo sapien
tttgggcatcattccagcagggacc

SEQ ID NO: 1681785 - DNA, 25 bp, Homo sapien
ggtctttgggcatcattccagcagg

SEQ ID NO: 1681786 - DNA, 25 bp, Homo sapien
gcggcactccaaaaatcacagccat

SEQ ID NO: 1681787 - DNA, 25 bp, Homo sapien
gaccagcagcggcactccaaaaatc

SEQ ID NO: 1681788 - DNA, 25 bp, Homo sapien
cctgttcggtgagctgctcgggaac

SEQ ID NO: 1681789 - DNA, 25 bp, Homo sapien
accgcctggagggtcgcgcaaatgc

SEQ ID NO: 1681790 - DNA, 25 bp, Homo sapien
ggtcgcgcaaatgcacagccacaca

SEQ ID NO: 1681791 - DNA, 25 bp, Homo sapien
agaggcttctgcctggtccgcgccg

SEQ ID NO: 1681792 - DNA, 25 bp, Homo sapien
tgatgaatgaggaaccaggcacact

SEQ ID NO: 1681793 - DNA, 25 bp, Homo sapien
ccaagtggcctcttcggtgatgaat

SEQ ID NO: 1681794 - DNA, 25 bp, Homo sapien
gaagcaccttcctctatagagcctg

SEQ ID NO: 1681795 - DNA, 25 bp, Homo sapien
caaattgcaaatcgcttccagagaa

SEQ ID NO: 1681796 - DNA, 25 bp, Homo sapien
cataggtgtactgctgcctcctgca

SEQ ID NO: 1681797 - DNA, 25 bp, Homo sapien
ctgccggaggcaagttcctagggat

SEQ ID NO: 1681798 - DNA, 25 bp, Homo sapien
tcatcataggtgtactgctgcctcc

SEQ ID NO: 1681799 - DNA, 25 bp, Homo sapien
cctagggatgctttcatcataggtg

SEQ ID NO: 1681800 - DNA, 25 bp, Homo sapien
gcagagccacacaagtagtaataat

SEQ ID NO: 1681801 - DNA, 25 bp, Homo sapien
cagctgcttgaattggtgcttcttc

SEQ ID NO: 1681802 - DNA, 25 bp, Homo sapien
tagtaataattgtgggaaaccacag

SEQ ID NO: 1681803 - DNA, 25 bp, Homo sapien
aatgtcagcagagccacacaagtag

SEQ ID NO: 1681804 - DNA, 25 bp, Homo sapien
ggagtcagaacgcatcgccgccagc

SEQ ID NO: 1681805 - DNA, 25 bp, Homo sapien
cgagggagtcagaacgcatcgccgc

SEQ ID NO: 1681806 - DNA, 25 bp, Homo sapien
agggagtcagaacgcatcgccgcca

SEQ ID NO: 1681807 - DNA, 25 bp, Homo sapien
agtcagaacgcatcgccgccagcct

SEQ ID NO: 1681808 - DNA, 25 bp, Homo sapien
tcccaggttggcaaacttacttctc

SEQ ID NO: 1681809 - DNA, 25 bp, Homo sapien
ccatttccaaggcttgaaaatcctt

SEQ ID NO: 1681810 - DNA, 25 bp, Homo sapien
ctgctgacgtgtgtttgaacttttc

SEQ ID NO: 1681811 - DNA, 25 bp, Homo sapien
caaggcttgaaaatccttcccaggt

SEQ ID NO: 1681812 - DNA, 25 bp, Homo sapien
tcataggttcacaagccctgggcag

SEQ ID NO: 1681813 - DNA, 25 bp, Homo sapien
tatatcatgcatgccaggaggtcac

SEQ ID NO: 1681814 - DNA, 25 bp, Homo sapien
cattccggcatgtggtggacactca

SEQ ID NO: 1681815 - DNA, 25 bp, Homo sapien
gacacattgtagatttccacggcca

SEQ ID NO: 1681816 - DNA, 25 bp, Homo sapien
tcccagctacgtggcttccctaaag

SEQ ID NO: 1681817 - DNA, 25 bp, Homo sapien
tcctagtcacgagaattgtcattgc

SEQ ID NO: 1681818 - DNA, 25 bp, Homo sapien
tcccaaaggacaccaatgatgagtt

SEQ ID NO: 1681819 - DNA, 25 bp, Homo sapien
tgatgagttgtctatgcccaccgga

SEQ ID NO: 1681820 - DNA, 25 bp, Homo sapien
tattttcgagccttctgacttgcca

SEQ ID NO: 1681821 - DNA, 25 bp, Homo sapien
tctgcttttcgaaaggatactgtgc

SEQ ID NO: 1681822 - DNA, 25 bp, Homo sapien
tctgacttgccaccaatttctgctt

SEQ ID NO: 1681823 - DNA, 25 bp, Homo sapien
aacatctcttcctctatcgtgcata

SEQ ID NO: 1681824 - DNA, 25 bp, Homo sapien
ctgcaattctttgtgaattgttaac

SEQ ID NO: 1681825 - DNA, 25 bp, Homo sapien
ctgtttttaggctttatggatctta

SEQ ID NO: 1681826 - DNA, 25 bp, Homo sapien
atttattctcagtcagttctaagta

SEQ ID NO: 1681827 - DNA, 25 bp, Homo sapien
gctttatgctatatctcacatgtgt

SEQ ID NO: 1681828 - DNA, 25 bp, Homo sapien
tattcgtttaatgctgaatgtataa

SEQ ID NO: 1681829 - DNA, 25 bp, Homo sapien
cgttagatcatcagaagaggagaca

SEQ ID NO: 1681830 - DNA, 25 bp, Homo sapien
cccaggtgaagactgcgaggtcaca

SEQ ID NO: 1681831 - DNA, 25 bp, Homo sapien
taaaagagccagtctgagtgaccag

SEQ ID NO: 1681832 - DNA, 25 bp, Homo sapien
tactggaggtgacaaacgttagatc

SEQ ID NO: 1681833 - DNA, 25 bp, Homo sapien
agactaaaactagcccttgttgtga

SEQ ID NO: 1681834 - DNA, 25 bp, Homo sapien
ccataaggctcacaaattacagaag

SEQ ID NO: 1681835 - DNA, 25 bp, Homo sapien
cagggtttcataacacactcaatat

SEQ ID NO: 1681836 - DNA, 25 bp, Homo sapien
cagaagactttgactgaggctagtg

SEQ ID NO: 1681837 - DNA, 25 bp, Homo sapien
tgtgtgagcgcagacacaacctcac

SEQ ID NO: 1681838 - DNA, 25 bp, Homo sapien
agaaatgtgttctcatcccttaggc

SEQ ID NO: 1681839 - DNA, 25 bp, Homo sapien
tcccttaggcttaactctgaattca

SEQ ID NO: 1681840 - DNA, 25 bp, Homo sapien
ctgaaagcaccccttctcaagcatg

SEQ ID NO: 1681841 - DNA, 25 bp, Homo sapien
cagttcagttatctgcctattggta

SEQ ID NO: 1681842 - DNA, 25 bp, Homo sapien
caatagtgtccacgagaactggagc

SEQ ID NO: 1681843 - DNA, 25 bp, Homo sapien
tgcctattggtagcctcctcaatag

SEQ ID NO: 1681844 - DNA, 25 bp, Homo sapien
gagccataatgattgcatcttgttg

SEQ ID NO: 1681845 - DNA, 25 bp, Homo sapien
agcagcgtgcttcgacagtcagcct

SEQ ID NO: 1681846 - DNA, 25 bp, Homo sapien
cttcctggactctgtccttaactca

SEQ ID NO: 1681847 - DNA, 25 bp, Homo sapien
agcgtgcttcgacagtcagccttcc

SEQ ID NO: 1681848 - DNA, 25 bp, Homo sapien
tggccagcagcgtgcttcgacagtc

SEQ ID NO: 1681849 - DNA, 25 bp, Homo sapien
taccatcccaaaccactcctacact

SEQ ID NO: 1681850 - DNA, 25 bp, Homo sapien
tcggcctcctctaaattgctaccat

SEQ ID NO: 1681851 - DNA, 25 bp, Homo sapien
tctaaattgctaccatcccaaacca

SEQ ID NO: 1681852 - DNA, 25 bp, Homo sapien
cttcggcctcctctaaattgctacc

SEQ ID NO: 1681853 - DNA, 25 bp, Homo sapien
ggctcccagaatgacagggcggttc

SEQ ID NO: 1681854 - DNA, 25 bp, Homo sapien
gacagggcggttccaaatacaccag

SEQ ID NO: 1681855 - DNA, 25 bp, Homo sapien
ctaacagcgactccgcagggcagct

SEQ ID NO: 1681856 - DNA, 25 bp, Homo sapien
gtggccctggcgatctaaagacctt

SEQ ID NO: 1681857 - DNA, 25 bp, Homo sapien
taaactctcatattatggtcaattg

SEQ ID NO: 1681858 - DNA, 25 bp, Homo sapien
aactctcatattatggtcaattgat

SEQ ID NO: 1681859 - DNA, 25 bp, Homo sapien
agaaataaactctcatattatggtc

SEQ ID NO: 1681860 - DNA, 25 bp, Homo sapien
aataaactctcatattatggtcaat

SEQ ID NO: 1681861 - DNA, 25 bp, Homo sapien
agtgacatgctggaaagagatggct

SEQ ID NO: 1681862 - DNA, 25 bp, Homo sapien
agagatggcttatttcttctatggc

SEQ ID NO: 1681863 - DNA, 25 bp, Homo sapien
caagttaaagtgacatgctggaaag

SEQ ID NO: 1681864 - DNA, 25 bp, Homo sapien
caccaatttccaagttaaagtgaca

SEQ ID NO: 1681865 - DNA, 25 bp, Homo sapien
tcttaggctccaagctggaacagcc

SEQ ID NO: 1681866 - DNA, 25 bp, Homo sapien
tccggaggtgatactgtctaaaggt

SEQ ID NO: 1681867 - DNA, 25 bp, Homo sapien
aaatggtgtgaaaatatcttctgag

SEQ ID NO: 1681868 - DNA, 25 bp, Homo sapien
aaccattcagttacccagtgcacct

SEQ ID NO: 1681869 - DNA, 25 bp, Homo sapien
tccttcaggactcctcgctttatca

SEQ ID NO: 1681870 - DNA, 25 bp, Homo sapien
caggactcctcgctttatcagctct

SEQ ID NO: 1681871 - DNA, 25 bp, Homo sapien
tcaggactcctcgctttatcagctc

SEQ ID NO: 1681872 - DNA, 25 bp, Homo sapien
ggactcctcgctttatcagctcttc

SEQ ID NO: 1681873 - DNA, 25 bp, Homo sapien
gaaacgattttgctgccggtaacta

SEQ ID NO: 1681874 - DNA, 25 bp, Homo sapien
gctgtcagggtccatgcatcgctgg

SEQ ID NO: 1681875 - DNA, 25 bp, Homo sapien
cggtaactagctagagtcatgtgcg

SEQ ID NO: 1681876 - DNA, 25 bp, Homo sapien
tccatgcatcgctggtggaaacgat

SEQ ID NO: 1681877 - DNA, 25 bp, Homo sapien
cctgccctgccatgagttcacagga

SEQ ID NO: 1681878 - DNA, 25 bp, Homo sapien
ctgccctgccatgagttcacaggag

SEQ ID NO: 1681879 - DNA, 25 bp, Homo sapien
ttcacaggaggggtccaggtaagca

SEQ ID NO: 1681880 - DNA, 25 bp, Homo sapien
taagcagttagaaagggtggtttca

SEQ ID NO: 1681881 - DNA, 25 bp, Homo sapien
ttggagcacctcatatgagcaggga

SEQ ID NO: 1681882 - DNA, 25 bp, Homo sapien
cttcattggatatagagagttcccc

SEQ ID NO: 1681883 - DNA, 25 bp, Homo sapien
gactggctccatttcggacagggca

SEQ ID NO: 1681884 - DNA, 25 bp, Homo sapien
catgatgtctgacggttggagcacc

SEQ ID NO: 1681885 - DNA, 25 bp, Homo sapien
caaccacatgatacacaggagacat

SEQ ID NO: 1681886 - DNA, 25 bp, Homo sapien
ggggacaaccacatgatacacagga

SEQ ID NO: 1681887 - DNA, 25 bp, Homo sapien
gggacaaccacatgatacacaggag

SEQ ID NO: 1681888 - DNA, 25 bp, Homo sapien
gacaaccacatgatacacaggagac

SEQ ID NO: 1681889 - DNA, 25 bp, Homo sapien
ctgttaagtggttggcaatcctggt

SEQ ID NO: 1681890 - DNA, 25 bp, Homo sapien
tggttggcaatcctggtagtgggtt

SEQ ID NO: 1681891 - DNA, 25 bp, Homo sapien
gggcagtagcaggactggtttggct

SEQ ID NO: 1681892 - DNA, 25 bp, Homo sapien
cagtagcaggactggtttggctgaa

SEQ ID NO: 1681893 - DNA, 25 bp, Homo sapien
gatgttggacatgccccagtttatt

SEQ ID NO: 1681894 - DNA, 25 bp, Homo sapien
gactcagcagggaacacatcagatt

SEQ ID NO: 1681895 - DNA, 25 bp, Homo sapien
tcacaggaacaattgagagacatgc

SEQ ID NO: 1681896 - DNA, 25 bp, Homo sapien
taataagccttgtacccacgtgcct

SEQ ID NO: 1681897 - DNA, 25 bp, Homo sapien
agacatctggcctccgtgaggaccg

SEQ ID NO: 1681898 - DNA, 25 bp, Homo sapien
catgataacatacacaaccctggca

SEQ ID NO: 1681899 - DNA, 25 bp, Homo sapien
tgataacatacacaaccctggcacc

SEQ ID NO: 1681900 - DNA, 25 bp, Homo sapien
cgtcctcagatctggaatcataacc

SEQ ID NO: 1681901 - DNA, 25 bp, Homo sapien
ctagggatgatcactcgcctggcgt

SEQ ID NO: 1681902 - DNA, 25 bp, Homo sapien
gggatgatcactcgcctggcgtttt

SEQ ID NO: 1681903 - DNA, 25 bp, Homo sapien
gccttggtcaaaggcaaaatgtgct

SEQ ID NO: 1681904 - DNA, 25 bp, Homo sapien
ttttgccttggtcaaaggcaaaatg

SEQ ID NO: 1681905 - DNA, 25 bp, Homo sapien
ggacacccctgtgttataggacaat

SEQ ID NO: 1681906 - DNA, 25 bp, Homo sapien
aaggcctcgtgcttccctgtgtcac

SEQ ID NO: 1681907 - DNA, 25 bp, Homo sapien
tttaggaagcccatcatcccgaggc

SEQ ID NO: 1681908 - DNA, 25 bp, Homo sapien
tacataaaccgtgtggcatagcgtc

SEQ ID NO: 1681909 - DNA, 25 bp, Homo sapien
tcgcttggtgtatggtgctgcctga

SEQ ID NO: 1681910 - DNA, 25 bp, Homo sapien
aatgctcagcatatacaaggagctg

SEQ ID NO: 1681911 - DNA, 25 bp, Homo sapien
ctcagggtgctaaatcgcttggtgt

SEQ ID NO: 1681912 - DNA, 25 bp, Homo sapien
catatacaaggagctgagaatcact

SEQ ID NO: 1681913 - DNA, 25 bp, Homo sapien
gcctctggatttcccgataaccacg

SEQ ID NO: 1681914 - DNA, 25 bp, Homo sapien
ctggcctctggatttcccgataacc

SEQ ID NO: 1681915 - DNA, 25 bp, Homo sapien
tctggatttcccgataaccacgctc

SEQ ID NO: 1681916 - DNA, 25 bp, Homo sapien
tggatttcccgataaccacgctcct

SEQ ID NO: 1681917 - DNA, 25 bp, Homo sapien
tcatgactttctttggaggtagcgg

SEQ ID NO: 1681918 - DNA, 25 bp, Homo sapien
tcttctgggctgtgtaggacaccag

SEQ ID NO: 1681919 - DNA, 25 bp, Homo sapien
gacagtttcactggcagacaaggca

SEQ ID NO: 1681920 - DNA, 25 bp, Homo sapien
tcatggccagcgttttgttgagctc

SEQ ID NO: 1681921 - DNA, 25 bp, Homo sapien
cacattcctaagtcatggtccaaat

SEQ ID NO: 1681922 - DNA, 25 bp, Homo sapien
tcacattcctaagtcatggtccaaa

SEQ ID NO: 1681923 - DNA, 25 bp, Homo sapien
cattcctaagtcatggtccaaatcc

SEQ ID NO: 1681924 - DNA, 25 bp, Homo sapien
acattcctaagtcatggtccaaatc

SEQ ID NO: 1681925 - DNA, 25 bp, Homo sapien
caggggaaagcgcaagcacagtccc

SEQ ID NO: 1681926 - DNA, 25 bp, Homo sapien
cagcatatccggagtgcgatggata

SEQ ID NO: 1681927 - DNA, 25 bp, Homo sapien
tatccggagtgcgatggataagcct

SEQ ID NO: 1681928 - DNA, 25 bp, Homo sapien
catatccggagtgcgatggataagc

SEQ ID NO: 1681929 - DNA, 25 bp, Homo sapien
gaagtacacgatagatggcctccag

SEQ ID NO: 1681930 - DNA, 25 bp, Homo sapien
ctccagggtggcgaagggtgatgaa

SEQ ID NO: 1681931 - DNA, 25 bp, Homo sapien
ggatttccacattgggtattatagg

SEQ ID NO: 1681932 - DNA, 25 bp, Homo sapien
cactccattccaactgcgcttggat

SEQ ID NO: 1681933 - DNA, 25 bp, Homo sapien
aagaagtggaacaggggacccgctg

SEQ ID NO: 1681934 - DNA, 25 bp, Homo sapien
agtggaacaggggacccgctgctca

SEQ ID NO: 1681935 - DNA, 25 bp, Homo sapien
aagtggaacaggggacccgctgctc

SEQ ID NO: 1681936 - DNA, 25 bp, Homo sapien
tggaacaggggacccgctgctcaga

SEQ ID NO: 1681937 - DNA, 25 bp, Homo sapien
ggtgaccccatcacccgagtgcaac

SEQ ID NO: 1681938 - DNA, 25 bp, Homo sapien
ctttggtgaccccatcacccgagtg

SEQ ID NO: 1681939 - DNA, 25 bp, Homo sapien
cccatcacccgagtgcaacccagag

SEQ ID NO: 1681940 - DNA, 25 bp, Homo sapien
cctgctttggtgaccccatcacccg

SEQ ID NO: 1681941 - DNA, 25 bp, Homo sapien
tggtgtataatgagctgtcgtcgtc

SEQ ID NO: 1681942 - DNA, 25 bp, Homo sapien
agtcttcgtagtctgactcatgagg

SEQ ID NO: 1681943 - DNA, 25 bp, Homo sapien
catcacattcaatcacaacagttgg

SEQ ID NO: 1681944 - DNA, 25 bp, Homo sapien
caacagttggcacttgtcttatttc

SEQ ID NO: 1681945 - DNA, 25 bp, Homo sapien
ccctggtgatgagttaagatgaacg

SEQ ID NO: 1681946 - DNA, 25 bp, Homo sapien
ctggtgatgagttaagatgaacgca

SEQ ID NO: 1681947 - DNA, 25 bp, Homo sapien
cctggtgatgagttaagatgaacgc

SEQ ID NO: 1681948 - DNA, 25 bp, Homo sapien
tggtgatgagttaagatgaacgcac

SEQ ID NO: 1681949 - DNA, 25 bp, Homo sapien
ggaaatctcaagagacagaaaagat

SEQ ID NO: 1681950 - DNA, 25 bp, Homo sapien
aaatctcaagagacagaaaagatca

SEQ ID NO: 1681951 - DNA, 25 bp, Homo sapien
gggatctgtgtctgcagaagttcag

SEQ ID NO: 1681952 - DNA, 25 bp, Homo sapien
gagatgagagtccaacaggcagcag

SEQ ID NO: 1681953 - DNA, 25 bp, Homo sapien
ttgctgagtttgatggctaaggagt

SEQ ID NO: 1681954 - DNA, 25 bp, Homo sapien
agtttgatggctaaggagtccttcc

SEQ ID NO: 1681955 - DNA, 25 bp, Homo sapien
cagctctcgcttggagggcctgttg

SEQ ID NO: 1681956 - DNA, 25 bp, Homo sapien
gatggctaaggagtccttcctgcag

SEQ ID NO: 1681957 - DNA, 25 bp, Homo sapien
tcttttgctagaacctggagagcta

SEQ ID NO: 1681958 - DNA, 25 bp, Homo sapien
ggaggcagagggtgccgctgtccta

SEQ ID NO: 1681959 - DNA, 25 bp, Homo sapien
ctaaaggcccactgccagggaggca

SEQ ID NO: 1681960 - DNA, 25 bp, Homo sapien
gaacctggagagctaaaggcccact

SEQ ID NO: 1681961 - DNA, 25 bp, Homo sapien
ggggctctccttgtactgtagcaga

SEQ ID NO: 1681962 - DNA, 25 bp, Homo sapien
tggggctctccttgtactgtagcag

SEQ ID NO: 1681963 - DNA, 25 bp, Homo sapien
ctggggctctccttgtactgtagca

SEQ ID NO: 1681964 - DNA, 25 bp, Homo sapien
gggctctccttgtactgtagcagag

SEQ ID NO: 1681965 - DNA, 25 bp, Homo sapien
gccagatgctctggcatctcactcc

SEQ ID NO: 1681966 - DNA, 25 bp, Homo sapien
agccagatgctctggcatctcactc

SEQ ID NO: 1681967 - DNA, 25 bp, Homo sapien
gaagagctagccgttccctaggtga

SEQ ID NO: 1681968 - DNA, 25 bp, Homo sapien
gactgggccagtcgatcctctgttg

SEQ ID NO: 1681969 - DNA, 25 bp, Homo sapien
tagagatgcatccaactagaagtgg

SEQ ID NO: 1681970 - DNA, 25 bp, Homo sapien
gcttccaagagcttctacatagaga

SEQ ID NO: 1681971 - DNA, 25 bp, Homo sapien
tcagtgtagattgaagctatcagcg

SEQ ID NO: 1681972 - DNA, 25 bp, Homo sapien
atcagcgtcactaggtgctttaacc

SEQ ID NO: 1681973 - DNA, 25 bp, Homo sapien
agtgccagtttccacgccttcagtg

SEQ ID NO: 1681974 - DNA, 25 bp, Homo sapien
cagtttccacgccttcagtgtagat

SEQ ID NO: 1681975 - DNA, 25 bp, Homo sapien
ggacactaagtaagtccaagttgaa

SEQ ID NO: 1681976 - DNA, 25 bp, Homo sapien
ttggagtggtaattcacagtgacac

SEQ ID NO: 1681977 - DNA, 25 bp, Homo sapien
caagttgaattgacatcatagagcc

SEQ ID NO: 1681978 - DNA, 25 bp, Homo sapien
agtgacacgtatccagggacactaa

SEQ ID NO: 1681979 - DNA, 25 bp, Homo sapien
tgaaaaatgtacagactgccggggc

SEQ ID NO: 1681980 - DNA, 25 bp, Homo sapien
taacggtgctctccaagatgtggct

SEQ ID NO: 1681981 - DNA, 25 bp, Homo sapien
caacatgcggtactgggcttgcaga

SEQ ID NO: 1681982 - DNA, 25 bp, Homo sapien
ggcagccgcaagtcacagatgcaga

SEQ ID NO: 1681983 - DNA, 25 bp, Homo sapien
cagccgatgcttagggaaactagaa

SEQ ID NO: 1681984 - DNA, 25 bp, Homo sapien
ttctcaagccagccgatgcttaggg

SEQ ID NO: 1681985 - DNA, 25 bp, Homo sapien
tcccctgaaaaaatacccatcaatg

SEQ ID NO: 1681986 - DNA, 25 bp, Homo sapien
tgtctgtcaccgacacctattcgcg

SEQ ID NO: 1681987 - DNA, 25 bp, Homo sapien
ttaggaactgtggctggcaagggag

SEQ ID NO: 1681988 - DNA, 25 bp, Homo sapien
tcatccttatcactctcaataaaat

SEQ ID NO: 1681989 - DNA, 25 bp, Homo sapien
cttcatcatccttatcactctcaat

SEQ ID NO: 1681990 - DNA, 25 bp, Homo sapien
cggaagacctaacttctcctcctct

SEQ ID NO: 1681991 - DNA, 25 bp, Homo sapien
gatatttattttcaagctaagcctg

SEQ ID NO: 1681992 - DNA, 25 bp, Homo sapien
gcaaaaacaggaacatacttctcac

SEQ ID NO: 1681993 - DNA, 25 bp, Homo sapien
attttcaagctaagcctgcatggca

SEQ ID NO: 1681994 - DNA, 25 bp, Homo sapien
aacatacttctcacacctgctgata

SEQ ID NO: 1681995 - DNA, 25 bp, Homo sapien
cctgcaggacttggaatctagcttc

SEQ ID NO: 1681996 - DNA, 25 bp, Homo sapien
tgcaggacttggaatctagcttcag

SEQ ID NO: 1681997 - DNA, 25 bp, Homo sapien
ttcctgcaggacttggaatctagct

SEQ ID NO: 1681998 - DNA, 25 bp, Homo sapien
cttttcctgcaggacttggaatcta

SEQ ID NO: 1681999 - DNA, 25 bp, Homo sapien
gccaggagacgggtggcaggaatcc

SEQ ID NO: 1682000 - DNA, 25 bp, Homo sapien
ggtggcaggaatcccgatcctttcc

SEQ ID NO: 1682001 - DNA, 25 bp, Homo sapien
cgggtggcaggaatcccgatccttt

SEQ ID NO: 1682002 - DNA, 25 bp, Homo sapien
agacgggtggcaggaatcccgatcc

SEQ ID NO: 1682003 - DNA, 25 bp, Homo sapien
tggttaacatagaaagctgagcagc

SEQ ID NO: 1682004 - DNA, 25 bp, Homo sapien
gacgacgtggtcacctgtatgaatc

SEQ ID NO: 1682005 - DNA, 25 bp, Homo sapien
cgacgtggtcacctgtatgaatcat

SEQ ID NO: 1682006 - DNA, 25 bp, Homo sapien
ctggtgcatctcttaagtactggtt

SEQ ID NO: 1682007 - DNA, 25 bp, Homo sapien
ctttgggaggcttggcacacctggt

SEQ ID NO: 1682008 - DNA, 25 bp, Homo sapien
gaagcaggtgtacaggatatctcct

SEQ ID NO: 1682009 - DNA, 25 bp, Homo sapien
gcagtgatgtgcaagctcttaggaa

SEQ ID NO: 1682010 - DNA, 25 bp, Homo sapien
taactcatgcaactagatggatggg

SEQ ID NO: 1682011 - DNA, 25 bp, Homo sapien
tagaacataaagaggtctgtggccc

SEQ ID NO: 1682012 - DNA, 25 bp, Homo sapien
catgagcctgcaatgacgcaatggg

SEQ ID NO: 1682013 - DNA, 25 bp, Homo sapien
tctgtctgcagagaacaatggctgc

SEQ ID NO: 1682014 - DNA, 25 bp, Homo sapien
gcgtgaaatttagccaccgtacatg

SEQ ID NO: 1682015 - DNA, 25 bp, Homo sapien
tggccccaggcaagtggactgcaac

SEQ ID NO: 1682016 - DNA, 25 bp, Homo sapien
ctttccttgtggcctcctaacttgg

SEQ ID NO: 1682017 - DNA, 25 bp, Homo sapien
aactcagacgggactcttttcttca

SEQ ID NO: 1682018 - DNA, 25 bp, Homo sapien
tctctccctcccttgaggctaaagc

SEQ ID NO: 1682019 - DNA, 25 bp, Homo sapien
gtcagtggctggagttcttgttcca

SEQ ID NO: 1682020 - DNA, 25 bp, Homo sapien
gagacagtcagtggctggagttctt

SEQ ID NO: 1682021 - DNA, 25 bp, Homo sapien
cctcaatttcaagcccaggagaggc

SEQ ID NO: 1682022 - DNA, 25 bp, Homo sapien
tctgaaagactgactctcgccacca

SEQ ID NO: 1682023 - DNA, 25 bp, Homo sapien
catatcatagcctccttgggtcatt

SEQ ID NO: 1682024 - DNA, 25 bp, Homo sapien
tagcctccttgggtcattaatttcc

SEQ ID NO: 1682025 - DNA, 25 bp, Homo sapien
ttttggaccatatcatagcctcctt

SEQ ID NO: 1682026 - DNA, 25 bp, Homo sapien
tccttgggtcattaatttcctcggc

SEQ ID NO: 1682027 - DNA, 25 bp, Homo sapien
caaaatgttcctctgttccagttcc

SEQ ID NO: 1682028 - DNA, 25 bp, Homo sapien
gtttcaaaatgttcctctgttccag

SEQ ID NO: 1682029 - DNA, 25 bp, Homo sapien
tgcagttggcctctggctcagccgc

SEQ ID NO: 1682030 - DNA, 25 bp, Homo sapien
tgttccagttcctctgcagttggcc

SEQ ID NO: 1682031 - DNA, 25 bp, Homo sapien
cattttgcgatgtctcaggtgggaa

SEQ ID NO: 1682032 - DNA, 25 bp, Homo sapien
caatgctttccgcagaggcgcaagg

SEQ ID NO: 1682033 - DNA, 25 bp, Homo sapien
taatttgcaactatgtggccaggac

SEQ ID NO: 1682034 - DNA, 25 bp, Homo sapien
gccgcccgtgagcttctaaagaata

SEQ ID NO: 1682035 - DNA, 25 bp, Homo sapien
tgtagaaaggcagcacaagaaacag

SEQ ID NO: 1682036 - DNA, 25 bp, Homo sapien
aaggcagcacaagaaacagccacat

SEQ ID NO: 1682037 - DNA, 25 bp, Homo sapien
tagaaaggcagcacaagaaacagcc

SEQ ID NO: 1682038 - DNA, 25 bp, Homo sapien
tttgtagaaaggcagcacaagaaac

SEQ ID NO: 1682039 - DNA, 25 bp, Homo sapien
tcccactagcacaagtggtgtaagg

SEQ ID NO: 1682040 - DNA, 25 bp, Homo sapien
cacaagtggtgtaaggtcagagcag

SEQ ID NO: 1682041 - DNA, 25 bp, Homo sapien
gagcagaaatcaggcccttgagggc

SEQ ID NO: 1682042 - DNA, 25 bp, Homo sapien
tggtgtaaggtcagagcagaaatca

SEQ ID NO: 1682043 - DNA, 25 bp, Homo sapien
cgcgcccggccttgggacaggtctt

SEQ ID NO: 1682044 - DNA, 25 bp, Homo sapien
ccgcgcccggccttgggacaggtct

SEQ ID NO: 1682045 - DNA, 25 bp, Homo sapien
ggtatagtccttgtgtctggtgccc

SEQ ID NO: 1682046 - DNA, 25 bp, Homo sapien
cagagtgtgggatacaattgcctgc

SEQ ID NO: 1682047 - DNA, 25 bp, Homo sapien
tcagaagagtagactgcagagcctg

SEQ ID NO: 1682048 - DNA, 25 bp, Homo sapien
tggaagcacagatatcagcgtagca

SEQ ID NO: 1682049 - DNA, 25 bp, Homo sapien
tgcatcctttggaccttggcaggct

SEQ ID NO: 1682050 - DNA, 25 bp, Homo sapien
tgctttccaaactacctgcgttgtt

SEQ ID NO: 1682051 - DNA, 25 bp, Homo sapien
tttcaaattgctactgagcaggctg

SEQ ID NO: 1682052 - DNA, 25 bp, Homo sapien
aacagtgttgtgtacaggtgcatcc

SEQ ID NO: 1682053 - DNA, 25 bp, Homo sapien
tcctgttcctcttgttcattccgag

SEQ ID NO: 1682054 - DNA, 25 bp, Homo sapien
gttagcctcctcttgatctctctct

SEQ ID NO: 1682055 - DNA, 25 bp, Homo sapien
tttcgggttagcctcctcttgatct

SEQ ID NO: 1682056 - DNA, 25 bp, Homo sapien
gggttagcctcctcttgatctctct

SEQ ID NO: 1682057 - DNA, 25 bp, Homo sapien
tagccttcggggcatctggaacctg

SEQ ID NO: 1682058 - DNA, 25 bp, Homo sapien
ggcatctggaacctgaagtccttcc

SEQ ID NO: 1682059 - DNA, 25 bp, Homo sapien
gccttcggggcatctggaacctgaa

SEQ ID NO: 1682060 - DNA, 25 bp, Homo sapien
ttcggggcatctggaacctgaagtc

SEQ ID NO: 1682061 - DNA, 25 bp, Homo sapien
tcctgtctgtgaacttgcaggtgtg

SEQ ID NO: 1682062 - DNA, 25 bp, Homo sapien
agagatggacccagtcagccagaag

SEQ ID NO: 1682063 - DNA, 25 bp, Homo sapien
gccagaagggttgaccatggcactt

SEQ ID NO: 1682064 - DNA, 25 bp, Homo sapien
cgatggatgcatcgcatagtgagtg

SEQ ID NO: 1682065 - DNA, 25 bp, Homo sapien
tcactgaagcggatgaggatctttc

SEQ ID NO: 1682066 - DNA, 25 bp, Homo sapien
acctccacgtagtcactgaagcgga

SEQ ID NO: 1682067 - DNA, 25 bp, Homo sapien
tcatagtcctgagcgtcagccacct

SEQ ID NO: 1682068 - DNA, 25 bp, Homo sapien
gggtccacggcttatctgccctgcg

SEQ ID NO: 1682069 - DNA, 25 bp, Homo sapien
ctacacgctccccagcggtgagccc

SEQ ID NO: 1682070 - DNA, 25 bp, Homo sapien
tacacgctccccagcggtgagccca

SEQ ID NO: 1682071 - DNA, 25 bp, Homo sapien
acacgctccccagcggtgagcccag

SEQ ID NO: 1682072 - DNA, 25 bp, Homo sapien
cagcgagacccagcagacggtcctg

SEQ ID NO: 1682073 - DNA, 25 bp, Homo sapien
cagcaccatcccctatacggaaggg

SEQ ID NO: 1682074 - DNA, 25 bp, Homo sapien
gcagcctttccgcagattatctgtg

SEQ ID NO: 1682075 - DNA, 25 bp, Homo sapien
aatccctcgttggatgccggcagca

SEQ ID NO: 1682076 - DNA, 25 bp, Homo sapien
gatttatgccctatttccctcctgg

SEQ ID NO: 1682077 - DNA, 25 bp, Homo sapien
tgttaagtgtctactcaattcatga

SEQ ID NO: 1682078 - DNA, 25 bp, Homo sapien
taagtgtctactcaattcatgaact

SEQ ID NO: 1682079 - DNA, 25 bp, Homo sapien
cattgagctcctttcggatggcagc

SEQ ID NO: 1682080 - DNA, 25 bp, Homo sapien
gtgtctactcaattcatgaacttcc

SEQ ID NO: 1682081 - DNA, 25 bp, Homo sapien
cttggggtcgttggtagtctggtgc

SEQ ID NO: 1682082 - DNA, 25 bp, Homo sapien
cgttggtagtctggtgcttatcaga

SEQ ID NO: 1682083 - DNA, 25 bp, Homo sapien
gtcgttggtagtctggtgcttatca

SEQ ID NO: 1682084 - DNA, 25 bp, Homo sapien
gttggtagtctggtgcttatcagac

SEQ ID NO: 1682085 - DNA, 25 bp, Homo sapien
tttctccttgacctaagttttcaca

SEQ ID NO: 1682086 - DNA, 25 bp, Homo sapien
tctccttgacctaagttttcacaaa

SEQ ID NO: 1682087 - DNA, 25 bp, Homo sapien
ttctccttgacctaagttttcacaa

SEQ ID NO: 1682088 - DNA, 25 bp, Homo sapien
gctgccaaaggtgcaggattcaaca

SEQ ID NO: 1682089 - DNA, 25 bp, Homo sapien
ccgtgagagggaggtgcgagcttcc

SEQ ID NO: 1682090 - DNA, 25 bp, Homo sapien
cagggaggttcttgaccgtgagagg

SEQ ID NO: 1682091 - DNA, 25 bp, Homo sapien
caggattcaacagtccaatctccca

SEQ ID NO: 1682092 - DNA, 25 bp, Homo sapien
gatttacatcgtaatggggaagtga

SEQ ID NO: 1682093 - DNA, 25 bp, Homo sapien
catagcactcaagaggaattcgact

SEQ ID NO: 1682094 - DNA, 25 bp, Homo sapien
aatggggaagtgaataaataccagc

SEQ ID NO: 1682095 - DNA, 25 bp, Homo sapien
aaataccagcacttatggttcttat

SEQ ID NO: 1682096 - DNA, 25 bp, Homo sapien
tcggaccgccgagccatcacttttg

SEQ ID NO: 1682097 - DNA, 25 bp, Homo sapien
aagtgggaccagcagctcggaccgc

SEQ ID NO: 1682098 - DNA, 25 bp, Homo sapien
ctgccagacagtcttcagtcagggc

SEQ ID NO: 1682099 - DNA, 25 bp, Homo sapien
cacataaaatcctgattgtgtttcc

SEQ ID NO: 1682100 - DNA, 25 bp, Homo sapien
taatcagcttcaaggcgcacagaga

SEQ ID NO: 1682101 - DNA, 25 bp, Homo sapien
gccaagtgtagaagtccaaccagat

SEQ ID NO: 1682102 - DNA, 25 bp, Homo sapien
caaatgtcatgtctggagccagtac

SEQ ID NO: 1682103 - DNA, 25 bp, Homo sapien
ttcttggcatcaacttcaaagggcc

SEQ ID NO: 1682104 - DNA, 25 bp, Homo sapien
tgggagccgttcatgcctgcaaaaa

SEQ ID NO: 1682105 - DNA, 25 bp, Homo sapien
cctatcatgggaggagtccggtcaa

SEQ ID NO: 1682106 - DNA, 25 bp, Homo sapien
gaaagctgcaatgggcctcgttagg

SEQ ID NO: 1682107 - DNA, 25 bp, Homo sapien
gagggcctgcgagctctgttatgaa

SEQ ID NO: 1682108 - DNA, 25 bp, Homo sapien
taccatgcagtttctgtatgtacaa

SEQ ID NO: 1682109 - DNA, 25 bp, Homo sapien
aagaaactgcatacatcatcagaga

SEQ ID NO: 1682110 - DNA, 25 bp, Homo sapien
cctcatacagccatcatctgttaaa

SEQ ID NO: 1682111 - DNA, 25 bp, Homo sapien
tgtacaaaacctaggccacagagat

SEQ ID NO: 1682112 - DNA, 25 bp, Homo sapien
aatgttgaggaaggccggacgcagt

SEQ ID NO: 1682113 - DNA, 25 bp, Homo sapien
aaggacagttgacattttagatatt

SEQ ID NO: 1682114 - DNA, 25 bp, Homo sapien
aaaaggacagttgacattttagata

SEQ ID NO: 1682115 - DNA, 25 bp, Homo sapien
aaaatgttgaggaaggccggacgca

SEQ ID NO: 1682116 - DNA, 25 bp, Homo sapien
atgaaggcacttgggagggtaggtc

SEQ ID NO: 1682117 - DNA, 25 bp, Homo sapien
cggcttcgggatgaggccccatgaa

SEQ ID NO: 1682118 - DNA, 25 bp, Homo sapien
gattgatggcggcttcgggatgagg

SEQ ID NO: 1682119 - DNA, 25 bp, Homo sapien
aggcacttgggagggtaggtcccag

SEQ ID NO: 1682120 - DNA, 25 bp, Homo sapien
ctgagttgggagacatgactctcat

SEQ ID NO: 1682121 - DNA, 25 bp, Homo sapien
aaagatcatggctgccgtcatccag

SEQ ID NO: 1682122 - DNA, 25 bp, Homo sapien
ggcagaaagatcatggctgccgtca

SEQ ID NO: 1682123 - DNA, 25 bp, Homo sapien
catccaggtgggagaacctttttca

SEQ ID NO: 1682124 - DNA, 25 bp, Homo sapien
agacagtggaggcaggtaccaagag

SEQ ID NO: 1682125 - DNA, 25 bp, Homo sapien
cttgatgggtaagacagtggaggca

SEQ ID NO: 1682126 - DNA, 25 bp, Homo sapien
gacagtggaggcaggtaccaagagg

SEQ ID NO: 1682127 - DNA, 25 bp, Homo sapien
acagtggaggcaggtaccaagaggg

SEQ ID NO: 1682128 - DNA, 25 bp, Homo sapien
tgtcactacggatgccacactgcag

SEQ ID NO: 1682129 - DNA, 25 bp, Homo sapien
cacactgtcactacggatgccacac

SEQ ID NO: 1682130 - DNA, 25 bp, Homo sapien
actgtcactacggatgccacactgc

SEQ ID NO: 1682131 - DNA, 25 bp, Homo sapien
acactgtcactacggatgccacact

SEQ ID NO: 1682132 - DNA, 25 bp, Homo sapien
ctcattgagttccaaggttgcctac

SEQ ID NO: 1682133 - DNA, 25 bp, Homo sapien
gaggtggtcaccacaacatggccac

SEQ ID NO: 1682134 - DNA, 25 bp, Homo sapien
caacatggccacatcaatagcatcc

SEQ ID NO: 1682135 - DNA, 25 bp, Homo sapien
ccttgttaaaccctgattgtccctg

SEQ ID NO: 1682136 - DNA, 25 bp, Homo sapien
gtgaccacatgagccgcagcgtctt

SEQ ID NO: 1682137 - DNA, 25 bp, Homo sapien
gaattctggctcagggtagatgcat

SEQ ID NO: 1682138 - DNA, 25 bp, Homo sapien
ataggaaacaccaagcctttgtgac

SEQ ID NO: 1682139 - DNA, 25 bp, Homo sapien
cagcaatggtatctccacataggaa

SEQ ID NO: 1682140 - DNA, 25 bp, Homo sapien
ttggtgattaaggaacagacagcat

SEQ ID NO: 1682141 - DNA, 25 bp, Homo sapien
acactggacaaggtgtcagtgacca

SEQ ID NO: 1682142 - DNA, 25 bp, Homo sapien
cacactggacaaggtgtcagtgacc

SEQ ID NO: 1682143 - DNA, 25 bp, Homo sapien
gttggtgattggtgattaaggaaca

SEQ ID NO: 1682144 - DNA, 25 bp, Homo sapien
cttcatgcatgacggcctcggtcgc

SEQ ID NO: 1682145 - DNA, 25 bp, Homo sapien
caggactgtctgagataagaagttc

SEQ ID NO: 1682146 - DNA, 25 bp, Homo sapien
ccacagggttgctgcgtgagaccaa

SEQ ID NO: 1682147 - DNA, 25 bp, Homo sapien
tactctgatgccgtccctggtcagg

SEQ ID NO: 1682148 - DNA, 25 bp, Homo sapien
tcagtccgaaagtctacagaaagtc

SEQ ID NO: 1682149 - DNA, 25 bp, Homo sapien
caagtcgaattcagtccgaaagtct

SEQ ID NO: 1682150 - DNA, 25 bp, Homo sapien
gaaagtcgactttgcccagctcctt

SEQ ID NO: 1682151 - DNA, 25 bp, Homo sapien
gtttatttgtctctgattgctcagg

SEQ ID NO: 1682152 - DNA, 25 bp, Homo sapien
gccgtggctcctagatcagctgatg

SEQ ID NO: 1682153 - DNA, 25 bp, Homo sapien
caaagagccgtttctccttgagact

SEQ ID NO: 1682154 - DNA, 25 bp, Homo sapien
caaatgaaactgtccgtggctcttg

SEQ ID NO: 1682155 - DNA, 25 bp, Homo sapien
tggctcttggcacaagccgtggctc

SEQ ID NO: 1682156 - DNA, 25 bp, Homo sapien
tttaagacatctgctcccgaaagct

SEQ ID NO: 1682157 - DNA, 25 bp, Homo sapien
tcattacgcgttttatgctgctgac

SEQ ID NO: 1682158 - DNA, 25 bp, Homo sapien
tactcttttgtgcacagacgctgga

SEQ ID NO: 1682159 - DNA, 25 bp, Homo sapien
tgaaacgccaaatctaacttggtct

SEQ ID NO: 1682160 - DNA, 25 bp, Homo sapien
tacactactctggaggcgagcctag

SEQ ID NO: 1682161 - DNA, 25 bp, Homo sapien
gcagcttaagtacggccctagggct

SEQ ID NO: 1682162 - DNA, 25 bp, Homo sapien
cacggcgggagaaactacactactc

SEQ ID NO: 1682163 - DNA, 25 bp, Homo sapien
tcttccctaggcaagaacctcgagg

SEQ ID NO: 1682164 - DNA, 25 bp, Homo sapien
acaaggttagggatctttgcttcgg

SEQ ID NO: 1682165 - DNA, 25 bp, Homo sapien
tgtcagtttcacaaggttagggatc

SEQ ID NO: 1682166 - DNA, 25 bp, Homo sapien
tatcctgagtccatagaacagcgcc

SEQ ID NO: 1682167 - DNA, 25 bp, Homo sapien
tttgcttcggtagctgatgtatcct

SEQ ID NO: 1682168 - DNA, 25 bp, Homo sapien
cagagttgtgtgttacgtaatcggt

SEQ ID NO: 1682169 - DNA, 25 bp, Homo sapien
catgctctgggttgctagctggcaa

SEQ ID NO: 1682170 - DNA, 25 bp, Homo sapien
cttggattctcaatcagagctacca

SEQ ID NO: 1682171 - DNA, 25 bp, Homo sapien
gagactcctgaaagatgtcacaccc

SEQ ID NO: 1682172 - DNA, 25 bp, Homo sapien
ctaacacggagctgtagcggtatga

SEQ ID NO: 1682173 - DNA, 25 bp, Homo sapien
tgttatgctgttggtgccaccgaca

SEQ ID NO: 1682174 - DNA, 25 bp, Homo sapien
ggtatgaaagggctccttcctaagc

SEQ ID NO: 1682175 - DNA, 25 bp, Homo sapien
caccgacagccccagtactctggga

SEQ ID NO: 1682176 - DNA, 25 bp, Homo sapien
taaggccaaactactgtggaagctg

SEQ ID NO: 1682177 - DNA, 25 bp, Homo sapien
gatgcccgttgtgatctctgcgatg

SEQ ID NO: 1682178 - DNA, 25 bp, Homo sapien
tgcgatgctcgatgctcggagccag

SEQ ID NO: 1682179 - DNA, 25 bp, Homo sapien
tggcctgtgccgctctgacgtggct

SEQ ID NO: 1682180 - DNA, 25 bp, Homo sapien
cagcaggatgcaacatctgatgttc

SEQ ID NO: 1682181 - DNA, 25 bp, Homo sapien
gctccactcagcctgctgtcagcac

SEQ ID NO: 1682182 - DNA, 25 bp, Homo sapien
tgcaacatctgatgttctgccagga

SEQ ID NO: 1682183 - DNA, 25 bp, Homo sapien
cctgttcagcaggatgcaacatctg

SEQ ID NO: 1682184 - DNA, 25 bp, Homo sapien
aatgtgtttcaagggcctcgatgca

SEQ ID NO: 1682185 - DNA, 25 bp, Homo sapien
tcgttcccatcaatgtgcgaatggc

SEQ ID NO: 1682186 - DNA, 25 bp, Homo sapien
tgcatgcctgtttcgttcccatcaa

SEQ ID NO: 1682187 - DNA, 25 bp, Homo sapien
gcctcgatgcaaggaggcagtgctt

SEQ ID NO: 1682188 - DNA, 25 bp, Homo sapien
gcagtgtgaattcctaaatagaggg

SEQ ID NO: 1682189 - DNA, 25 bp, Homo sapien
tctctcctaccaagctgggcaagag

SEQ ID NO: 1682190 - DNA, 25 bp, Homo sapien
caagaagacagcacaaagtatgggt

SEQ ID NO: 1682191 - DNA, 25 bp, Homo sapien
tactgcggtgttaaggtagccctgc

SEQ ID NO: 1682192 - DNA, 25 bp, Homo sapien
tggctgctggcagggacagccgcat

SEQ ID NO: 1682193 - DNA, 25 bp, Homo sapien
ctgctggctgctggcagggacagcc

SEQ ID NO: 1682194 - DNA, 25 bp, Homo sapien
ttctgctgacgctggctgctggctg

SEQ ID NO: 1682195 - DNA, 25 bp, Homo sapien
gctggctgctggcagggacagccgc

SEQ ID NO: 1682196 - DNA, 25 bp, Homo sapien
gtgagctccttggacgctgcatttg

SEQ ID NO: 1682197 - DNA, 25 bp, Homo sapien
ctccttggacgctgcatttgtgcac

SEQ ID NO: 1682198 - DNA, 25 bp, Homo sapien
tccaggaaagcccattaatcaaaac

SEQ ID NO: 1682199 - DNA, 25 bp, Homo sapien
gagctccttggacgctgcatttgtg

SEQ ID NO: 1682200 - DNA, 25 bp, Homo sapien
gccattgactggtctgagccctgac

SEQ ID NO: 1682201 - DNA, 25 bp, Homo sapien
tggccattgactggtctgagccctg

SEQ ID NO: 1682202 - DNA, 25 bp, Homo sapien
ctgccccgtggtggccattgactgg

SEQ ID NO: 1682203 - DNA, 25 bp, Homo sapien
tggtggccattgactggtctgagcc

SEQ ID NO: 1682204 - DNA, 25 bp, Homo sapien
cagatgtctgtactttactggttcc

SEQ ID NO: 1682205 - DNA, 25 bp, Homo sapien
tagaaatgggagcagacgtgaaagc

SEQ ID NO: 1682206 - DNA, 25 bp, Homo sapien
gtttatagtgacgtccctggagcca

SEQ ID NO: 1682207 - DNA, 25 bp, Homo sapien
tactggttccttgttccgagaacat

SEQ ID NO: 1682208 - DNA, 25 bp, Homo sapien
tgtggatcctcacttggtaatgaag

SEQ ID NO: 1682209 - DNA, 25 bp, Homo sapien
gccctggagccacgggttggattca

SEQ ID NO: 1682210 - DNA, 25 bp, Homo sapien
tgactggctcctatcacagactgga

SEQ ID NO: 1682211 - DNA, 25 bp, Homo sapien
ttactgcgtctgaggaaaccgggct

SEQ ID NO: 1682212 - DNA, 25 bp, Homo sapien
agcgggttgtagaaagggatcatcc

SEQ ID NO: 1682213 - DNA, 25 bp, Homo sapien
tggaaatgctgtcaatgagcgggtt

SEQ ID NO: 1682214 - DNA, 25 bp, Homo sapien
tgctgtcaatgagcgggttgtagaa

SEQ ID NO: 1682215 - DNA, 25 bp, Homo sapien
ttgtagaaagggatcatcctaattc

SEQ ID NO: 1682216 - DNA, 25 bp, Homo sapien
ctgctctggtctctgaagtaaaggc

SEQ ID NO: 1682217 - DNA, 25 bp, Homo sapien
tctggtctctgaagtaaaggctttc

SEQ ID NO: 1682218 - DNA, 25 bp, Homo sapien
ctgaagtaaaggctttccttgggct

SEQ ID NO: 1682219 - DNA, 25 bp, Homo sapien
tggtctctgaagtaaaggctttcct

SEQ ID NO: 1682220 - DNA, 25 bp, Homo sapien
tctgctggctgcctagaaagctctg

SEQ ID NO: 1682221 - DNA, 25 bp, Homo sapien
ctgctggctgcctagaaagctctgt

SEQ ID NO: 1682222 - DNA, 25 bp, Homo sapien
gtctgctggctgcctagaaagctct

SEQ ID NO: 1682223 - DNA, 25 bp, Homo sapien
tgtgggacaccaagccccattgacg

SEQ ID NO: 1682224 - DNA, 25 bp, Homo sapien
aggttcgtgtctggttcctggtcca

SEQ ID NO: 1682225 - DNA, 25 bp, Homo sapien
tggcccagatggcacagtaagagct

SEQ ID NO: 1682226 - DNA, 25 bp, Homo sapien
taagagctggagtctgatgaatctg

SEQ ID NO: 1682227 - DNA, 25 bp, Homo sapien
cacaatgtcacgaggctcagcctgg

SEQ ID NO: 1682228 - DNA, 25 bp, Homo sapien
gggctgctaaagattccgtagaggc

SEQ ID NO: 1682229 - DNA, 25 bp, Homo sapien
ccatcggggacttgcgatttttctc

SEQ ID NO: 1682230 - DNA, 25 bp, Homo sapien
cttcccacgcttggtggccacaatg

SEQ ID NO: 1682231 - DNA, 25 bp, Homo sapien
catggactttcctatctctgtggtg

SEQ ID NO: 1682232 - DNA, 25 bp, Homo sapien
gacctgtgagtctttgaacccagct

SEQ ID NO: 1682233 - DNA, 25 bp, Homo sapien
aaagacgatctgtttccacatggac

SEQ ID NO: 1682234 - DNA, 25 bp, Homo sapien
ctgtggtgcccaggatgcttagacc

SEQ ID NO: 1682235 - DNA, 25 bp, Homo sapien
aaagggagctctttcagctcacagc

SEQ ID NO: 1682236 - DNA, 25 bp, Homo sapien
ccaaagggagctctttcagctcaca

SEQ ID NO: 1682237 - DNA, 25 bp, Homo sapien
gtccgcttctgatggagggccaaag

SEQ ID NO: 1682238 - DNA, 25 bp, Homo sapien
tcagaaagtccgcttctgatggagg

SEQ ID NO: 1682239 - DNA, 25 bp, Homo sapien
tgtctgccgcataggagaccagctc

SEQ ID NO: 1682240 - DNA, 25 bp, Homo sapien
gcagagcatcctggttgatggcata

SEQ ID NO: 1682241 - DNA, 25 bp, Homo sapien
gcccaaaatgagatagctccagtct

SEQ ID NO: 1682242 - DNA, 25 bp, Homo sapien
cgttcttaaagcagcaagctggcag

SEQ ID NO: 1682243 - DNA, 25 bp, Homo sapien
gtaggtatcctgatgggagggagtc

SEQ ID NO: 1682244 - DNA, 25 bp, Homo sapien
agatggagtgtcctcaggtaggtat

SEQ ID NO: 1682245 - DNA, 25 bp, Homo sapien
caggtaggtatcctgatgggaggga

SEQ ID NO: 1682246 - DNA, 25 bp, Homo sapien
gaaaagttggagatggagtgtcctc

SEQ ID NO: 1682247 - DNA, 25 bp, Homo sapien
tgggagagtcggctctctgactgac

SEQ ID NO: 1682248 - DNA, 25 bp, Homo sapien
tctgactgactctcatggtttgggc

SEQ ID NO: 1682249 - DNA, 25 bp, Homo sapien
gcagataagcgcctttgggaactgg

SEQ ID NO: 1682250 - DNA, 25 bp, Homo sapien
aagttgtaggcattctgggtgaagc

SEQ ID NO: 1682251 - DNA, 25 bp, Homo sapien
gaacttgacctctatattcccataa

SEQ ID NO: 1682252 - DNA, 25 bp, Homo sapien
ggtgcttgacttctgtgctcccatg

SEQ ID NO: 1682253 - DNA, 25 bp, Homo sapien
taggtgcttgacttctgtgctccca

SEQ ID NO: 1682254 - DNA, 25 bp, Homo sapien
ttaggtgcttgacttctgtgctccc

SEQ ID NO: 1682255 - DNA, 25 bp, Homo sapien
gcttgacttctgtgctcccatgtac

SEQ ID NO: 1682256 - DNA, 25 bp, Homo sapien
tccaagaacgtattgatgaagggag

SEQ ID NO: 1682257 - DNA, 25 bp, Homo sapien
caatatactttaagtgcaaagttgc

SEQ ID NO: 1682258 - DNA, 25 bp, Homo sapien
tcaattagtctatgtcaaattggtt

SEQ ID NO: 1682259 - DNA, 25 bp, Homo sapien
tcacattggtatgttgttataccaa

SEQ ID NO: 1682260 - DNA, 25 bp, Homo sapien
gcagccacacatgctcctaaactgg

SEQ ID NO: 1682261 - DNA, 25 bp, Homo sapien
agccacacatgctcctaaactggaa

SEQ ID NO: 1682262 - DNA, 25 bp, Homo sapien
cagccacacatgctcctaaactgga

SEQ ID NO: 1682263 - DNA, 25 bp, Homo sapien
gacataaagagatcgcatgctattg

SEQ ID NO: 1682264 - DNA, 25 bp, Homo sapien
gagtagtagctctcaacagttggct

SEQ ID NO: 1682265 - DNA, 25 bp, Homo sapien
taagcagtaatggttcgagaggaat

SEQ ID NO: 1682266 - DNA, 25 bp, Homo sapien
tagacttgtttgacgcagggtcgca

SEQ ID NO: 1682267 - DNA, 25 bp, Homo sapien
gatgtggcctacacgtgtgattcgc

SEQ ID NO: 1682268 - DNA, 25 bp, Homo sapien
gataagccactttaggattagcagg

SEQ ID NO: 1682269 - DNA, 25 bp, Homo sapien
tgggatccctgcttccatgcaaggc

SEQ ID NO: 1682270 - DNA, 25 bp, Homo sapien
gccagagtgggcctggtgtatccct

SEQ ID NO: 1682271 - DNA, 25 bp, Homo sapien
ggactcagaattggggaaaccatct

SEQ ID NO: 1682272 - DNA, 25 bp, Homo sapien
tggactcagaattggggaaaccatc

SEQ ID NO: 1682273 - DNA, 25 bp, Homo sapien
gctgtccattgagaggccagatcat

SEQ ID NO: 1682274 - DNA, 25 bp, Homo sapien
cattgagaggccagatcatttgtgg

SEQ ID NO: 1682275 - DNA, 25 bp, Homo sapien
gtgctgtccattgagaggccagatc

SEQ ID NO: 1682276 - DNA, 25 bp, Homo sapien
tgtccattgagaggccagatcattt

SEQ ID NO: 1682277 - DNA, 25 bp, Homo sapien
aaggcctcgtcaatgtcaaagccct

SEQ ID NO: 1682278 - DNA, 25 bp, Homo sapien
ggcctcgtcaatgtcaaagcccttc

SEQ ID NO: 1682279 - DNA, 25 bp, Homo sapien
tcgtcaatgtcaaagcccttcccat

SEQ ID NO: 1682280 - DNA, 25 bp, Homo sapien
atgaaggcctcgtcaatgtcaaagc

SEQ ID NO: 1682281 - DNA, 25 bp, Homo sapien
aagatttactatcccttgcagtggg

SEQ ID NO: 1682282 - DNA, 25 bp, Homo sapien
tcccacatgacgcaggaacagggct

SEQ ID NO: 1682283 - DNA, 25 bp, Homo sapien
tgcagcagggctttagtagatacct

SEQ ID NO: 1682284 - DNA, 25 bp, Homo sapien
gctgctctgaagatttactatccct

SEQ ID NO: 1682285 - DNA, 25 bp, Homo sapien
gagcactgagtgaaatgatttttgg

SEQ ID NO: 1682286 - DNA, 25 bp, Homo sapien
aggtgattgcgtttttctctttggg

SEQ ID NO: 1682287 - DNA, 25 bp, Homo sapien
tatcaatttgtcgtagagccgagga

SEQ ID NO: 1682288 - DNA, 25 bp, Homo sapien
tttggtctatcaatttgtcgtagag

SEQ ID NO: 1682289 - DNA, 25 bp, Homo sapien
ttccagttcttgcttgaggtctctt

SEQ ID NO: 1682290 - DNA, 25 bp, Homo sapien
tccagttcttgcttgaggtctcttc

SEQ ID NO: 1682291 - DNA, 25 bp, Homo sapien
cagttcttgcttgaggtctcttctg

SEQ ID NO: 1682292 - DNA, 25 bp, Homo sapien
gttcttgcttgaggtctcttctgga

SEQ ID NO: 1682293 - DNA, 25 bp, Homo sapien
cttttgggatggtgagtaaggccac

SEQ ID NO: 1682294 - DNA, 25 bp, Homo sapien
aacttgtttggcgtcatcagctgag

SEQ ID NO: 1682295 - DNA, 25 bp, Homo sapien
cattgccacgccagcggaaataagg

SEQ ID NO: 1682296 - DNA, 25 bp, Homo sapien
gaagtttctccatgggagtgcaagg

SEQ ID NO: 1682297 - DNA, 25 bp, Homo sapien
catgtcatcgtttcccctttcagga

SEQ ID NO: 1682298 - DNA, 25 bp, Homo sapien
gtatctggcagtgctagagacctgg

SEQ ID NO: 1682299 - DNA, 25 bp, Homo sapien
gaaaagccccagctgattggcgtga

SEQ ID NO: 1682300 - DNA, 25 bp, Homo sapien
tgctgccaggtatggagtatctggc

SEQ ID NO: 1682301 - DNA, 25 bp, Homo sapien
gaacaaagcttataaccagatgaag

SEQ ID NO: 1682302 - DNA, 25 bp, Homo sapien
ccagatgaagcgaatagtagaacag

SEQ ID NO: 1682303 - DNA, 25 bp, Homo sapien
tagtagaacagattagaagggagga

SEQ ID NO: 1682304 - DNA, 25 bp, Homo sapien
aacacaaagcttataacaagaacaa

SEQ ID NO: 1682305 - DNA, 25 bp, Homo sapien
ttagtttagcgtgagattgcagatg

SEQ ID NO: 1682306 - DNA, 25 bp, Homo sapien
gcagatgttaccatcggctggaatt

SEQ ID NO: 1682307 - DNA, 25 bp, Homo sapien
catcggctggaattatttcgtctgc

SEQ ID NO: 1682308 - DNA, 25 bp, Homo sapien
tagcgtgagattgcagatgttacca

SEQ ID NO: 1682309 - DNA, 25 bp, Homo sapien
ggaagatcagatgccgataataggg

SEQ ID NO: 1682310 - DNA, 25 bp, Homo sapien
cacgtgtgtagattgcaggctggag

SEQ ID NO: 1682311 - DNA, 25 bp, Homo sapien
ttggacgcgcttccccacgtgtgta

SEQ ID NO: 1682312 - DNA, 25 bp, Homo sapien
tccgcgagaagaggaaagttactcc

SEQ ID NO: 1682313 - DNA, 25 bp, Homo sapien
caccgcggctagattggctacagga

SEQ ID NO: 1682314 - DNA, 25 bp, Homo sapien
tacactagccgcattgatgaggtgc

SEQ ID NO: 1682315 - DNA, 25 bp, Homo sapien
catcaggacgtggacttggtgtgca

SEQ ID NO: 1682316 - DNA, 25 bp, Homo sapien
tcatcccgctgctgaaagacgaggg

SEQ ID NO: 1682317 - DNA, 25 bp, Homo sapien
ccgggcgccttgcccggtgcacggc

SEQ ID NO: 1682318 - DNA, 25 bp, Homo sapien
cgggcgccttgcccggtgcacggcg

SEQ ID NO: 1682319 - DNA, 25 bp, Homo sapien
tccagggggcttcgaagcctccggc

SEQ ID NO: 1682320 - DNA, 25 bp, Homo sapien
gacactgccgcagtcaccgttctga

SEQ ID NO: 1682321 - DNA, 25 bp, Homo sapien
gcgctgccgcgggagcgcagcctga

SEQ ID NO: 1682322 - DNA, 25 bp, Homo sapien
gttctgaggcgccccgagcttgctc

SEQ ID NO: 1682323 - DNA, 25 bp, Homo sapien
cactatattgcagttatctgtttgc

SEQ ID NO: 1682324 - DNA, 25 bp, Homo sapien
tttgatgcacaaagccatgagttcc

SEQ ID NO: 1682325 - DNA, 25 bp, Homo sapien
ttagctctgtattctcagtgagcat

SEQ ID NO: 1682326 - DNA, 25 bp, Homo sapien
tttgcttgtttgatgcacaaagcca

SEQ ID NO: 1682327 - DNA, 25 bp, Homo sapien
tgggtgccttccaagagtgattgaa

SEQ ID NO: 1682328 - DNA, 25 bp, Homo sapien
atttggttagcaattctgggtgcct

SEQ ID NO: 1682329 - DNA, 25 bp, Homo sapien
cagaggatgatgtgaacacctgtat

SEQ ID NO: 1682330 - DNA, 25 bp, Homo sapien
tgtatgtcccgtgacctccacaaat

SEQ ID NO: 1682331 - DNA, 25 bp, Homo sapien
tgctgtggccctgcattcggttctg

SEQ ID NO: 1682332 - DNA, 25 bp, Homo sapien
caatggatggagcattagctttgtt

SEQ ID NO: 1682333 - DNA, 25 bp, Homo sapien
gccctgcattcggttctgcctcagt

SEQ ID NO: 1682334 - DNA, 25 bp, Homo sapien
ccaacatgttgactaactgtgtgtg

SEQ ID NO: 1682335 - DNA, 25 bp, Homo sapien
actggtggatggacgaagagcaaac

SEQ ID NO: 1682336 - DNA, 25 bp, Homo sapien
ttggagctgctacctgctttagatg

SEQ ID NO: 1682337 - DNA, 25 bp, Homo sapien
tggacgaagagcaaacacactggtc

SEQ ID NO: 1682338 - DNA, 25 bp, Homo sapien
tttggagctgctacctgctttagat

SEQ ID NO: 1682339 - DNA, 25 bp, Homo sapien
tcttcttcatctcctgtcaggacat

SEQ ID NO: 1682340 - DNA, 25 bp, Homo sapien
gcaactcttcttcatctcctgtcag

SEQ ID NO: 1682341 - DNA, 25 bp, Homo sapien
ttcttcatctcctgtcaggacatac

SEQ ID NO: 1682342 - DNA, 25 bp, Homo sapien
actcttcttcatctcctgtcaggac

SEQ ID NO: 1682343 - DNA, 25 bp, Homo sapien
aaaattctctcccatcttgtcaatg

SEQ ID NO: 1682344 - DNA, 25 bp, Homo sapien
aaaaattctctcccatcttgtcaat

SEQ ID NO: 1682345 - DNA, 25 bp, Homo sapien
taggttttgtcagttcggaccttgc

SEQ ID NO: 1682346 - DNA, 25 bp, Homo sapien
aatccagcagggtaggttttgtcag

SEQ ID NO: 1682347 - DNA, 25 bp, Homo sapien
acttggcttcctcaggtgtaataca

SEQ ID NO: 1682348 - DNA, 25 bp, Homo sapien
ggcttcctcaggtgtaatacaatgt

SEQ ID NO: 1682349 - DNA, 25 bp, Homo sapien
tagcagatggtgtgagcatcatgag

SEQ ID NO: 1682350 - DNA, 25 bp, Homo sapien
taatacaatgtacagcaaagtgacc

SEQ ID NO: 1682351 - DNA, 25 bp, Homo sapien
ccagtgtaacttgatgaaatcaagt

SEQ ID NO: 1682352 - DNA, 25 bp, Homo sapien
tctccaaatcaatacgaatggtatc

SEQ ID NO: 1682353 - DNA, 25 bp, Homo sapien
tctttcatgtgaaacacgtcaaaag

SEQ ID NO: 1682354 - DNA, 25 bp, Homo sapien
cttcacaggttagcaccttcagtca

SEQ ID NO: 1682355 - DNA, 25 bp, Homo sapien
agatctgacatgtcacgcagggacc

SEQ ID NO: 1682356 - DNA, 25 bp, Homo sapien
tgacatgtcacgcagggaccatttc

SEQ ID NO: 1682357 - DNA, 25 bp, Homo sapien
cgtacaaagatctgacatgtcacgc

SEQ ID NO: 1682358 - DNA, 25 bp, Homo sapien
atttttaattacgtacaaagatctg

SEQ ID NO: 1682359 - DNA, 25 bp, Homo sapien
cacatctccggctgtttttggtaca

SEQ ID NO: 1682360 - DNA, 25 bp, Homo sapien
aaggccatttatgagactctccaag

SEQ ID NO: 1682361 - DNA, 25 bp, Homo sapien
ctgaggcccatagcacgctcagagc

SEQ ID NO: 1682362 - DNA, 25 bp, Homo sapien
tgcaaatgctaccactacccaaagg

SEQ ID NO: 1682363 - DNA, 25 bp, Homo sapien
gccagtatatgggatgctgcttaaa

SEQ ID NO: 1682364 - DNA, 25 bp, Homo sapien
aggagccagtatatgggatgctgct

SEQ ID NO: 1682365 - DNA, 25 bp, Homo sapien
gatgctgcttaaatagatcgtgctc

SEQ ID NO: 1682366 - DNA, 25 bp, Homo sapien
tgcttaaatagatcgtgctccccac

SEQ ID NO: 1682367 - DNA, 25 bp, Homo sapien
cagcctgagctgtgcgtgcgtttcc

SEQ ID NO: 1682368 - DNA, 25 bp, Homo sapien
tgacagcctgagctgtgcgtgcgtt

SEQ ID NO: 1682369 - DNA, 25 bp, Homo sapien
cctgagctgtgcgtgcgtttcccgc

SEQ ID NO: 1682370 - DNA, 25 bp, Homo sapien
tgagctgtgcgtgcgtttcccgccc

SEQ ID NO: 1682371 - DNA, 25 bp, Homo sapien
tcctgattatcaggagaaagccctt

SEQ ID NO: 1682372 - DNA, 25 bp, Homo sapien
gcattgccctgaccttcaagggctc

SEQ ID NO: 1682373 - DNA, 25 bp, Homo sapien
tgccctgaccttcaagggctccgga

SEQ ID NO: 1682374 - DNA, 25 bp, Homo sapien
cctgaccttcaagggctccggattt

SEQ ID NO: 1682375 - DNA, 25 bp, Homo sapien
caagggtccttgcattgccctgacc

SEQ ID NO: 1682376 - DNA, 25 bp, Homo sapien
tgtcattgctggctgccaaaagatt

SEQ ID NO: 1682377 - DNA, 25 bp, Homo sapien
gccaaaagattggagaatgtgggaa

SEQ ID NO: 1682378 - DNA, 25 bp, Homo sapien
gatccagaggtggttcattggcctg

SEQ ID NO: 1682379 - DNA, 25 bp, Homo sapien
gtgggaaaggcaagatccagaggtg

SEQ ID NO: 1682380 - DNA, 25 bp, Homo sapien
ttgggcataaccattaaatctacgg

SEQ ID NO: 1682381 - DNA, 25 bp, Homo sapien
cggtcaaaagaatgctgttggtccc

SEQ ID NO: 1682382 - DNA, 25 bp, Homo sapien
attaaatctacggtcaaaagaatgc

SEQ ID NO: 1682383 - DNA, 25 bp, Homo sapien
taacttgttgggcataaccattaaa

SEQ ID NO: 1682384 - DNA, 25 bp, Homo sapien
tcttctacattattttgaaagcttg

SEQ ID NO: 1682385 - DNA, 25 bp, Homo sapien
cattattttgaaagcttgtttgaag

SEQ ID NO: 1682386 - DNA, 25 bp, Homo sapien
aggagggacacacatagagtggtaa

SEQ ID NO: 1682387 - DNA, 25 bp, Homo sapien
ctacattattttgaaagcttgtttg

SEQ ID NO: 1682388 - DNA, 25 bp, Homo sapien
ccaggctgggcttctagaggagtac

SEQ ID NO: 1682389 - DNA, 25 bp, Homo sapien
gatcggatgaatgatgttttgggca

SEQ ID NO: 1682390 - DNA, 25 bp, Homo sapien
tagaggagtacctccatctgcccag

SEQ ID NO: 1682391 - DNA, 25 bp, Homo sapien
gggcatcctgaaagaacatgatcgt

SEQ ID NO: 1682392 - DNA, 25 bp, Homo sapien
cttgtgcttcttgcattcttttctc

SEQ ID NO: 1682393 - DNA, 25 bp, Homo sapien
tgtttataaagctgcctccatggcc

SEQ ID NO: 1682394 - DNA, 25 bp, Homo sapien
cattcttttctcccgcaagcagaga

SEQ ID NO: 1682395 - DNA, 25 bp, Homo sapien
ctagtgtttataaagctgcctccat

SEQ ID NO: 1682396 - DNA, 25 bp, Homo sapien
attcaaaagctaagcctacaggaaa

SEQ ID NO: 1682397 - DNA, 25 bp, Homo sapien
tcaaaagctaagcctacaggaaacc

SEQ ID NO: 1682398 - DNA, 25 bp, Homo sapien
ttcaaaagctaagcctacaggaaac

SEQ ID NO: 1682399 - DNA, 25 bp, Homo sapien
aattcaaaagctaagcctacaggaa

SEQ ID NO: 1682400 - DNA, 25 bp, Homo sapien
gcaggggtaataggaccgactcttg

SEQ ID NO: 1682401 - DNA, 25 bp, Homo sapien
ataggaccgactcttgtctgtctca

SEQ ID NO: 1682402 - DNA, 25 bp, Homo sapien
ggagactatacttcaagaggacctt

SEQ ID NO: 1682403 - DNA, 25 bp, Homo sapien
actatacttcaagaggaccttgagc

SEQ ID NO: 1682404 - DNA, 25 bp, Homo sapien
ttcataacacaagcttttctttctg

SEQ ID NO: 1682405 - DNA, 25 bp, Homo sapien
taacacaagcttttctttctgcctc

SEQ ID NO: 1682406 - DNA, 25 bp, Homo sapien
gcttcataacacaagcttttctttc

SEQ ID NO: 1682407 - DNA, 25 bp, Homo sapien
cataacacaagcttttctttctgcc

SEQ ID NO: 1682408 - DNA, 25 bp, Homo sapien
actacagtttctagacagaccctta

SEQ ID NO: 1682409 - DNA, 25 bp, Homo sapien
tgaggatgagtgaccaggtatccac

SEQ ID NO: 1682410 - DNA, 25 bp, Homo sapien
tgttttccgaaacatgaggatgagt

SEQ ID NO: 1682411 - DNA, 25 bp, Homo sapien
tatccacttgcctgtgcgtctcttc

SEQ ID NO: 1682412 - DNA, 25 bp, Homo sapien
ctaaggtctgaagccgggcagcagg

SEQ ID NO: 1682413 - DNA, 25 bp, Homo sapien
taaggtctgaagccgggcagcaggt

SEQ ID NO: 1682414 - DNA, 25 bp, Homo sapien
tgttaatcctttcaattggaagaag

SEQ ID NO: 1682415 - DNA, 25 bp, Homo sapien
tatattccatcaagatccaggcacc

SEQ ID NO: 1682416 - DNA, 25 bp, Homo sapien
caggcccgatatgtagccttcacca

SEQ ID NO: 1682417 - DNA, 25 bp, Homo sapien
gagacagtgccagttattgcaaact

SEQ ID NO: 1682418 - DNA, 25 bp, Homo sapien
gtggctccgcatgtccccgttccct

SEQ ID NO: 1682419 - DNA, 25 bp, Homo sapien
cttggattccggcttgccaccagca

SEQ ID NO: 1682420 - DNA, 25 bp, Homo sapien
aattgcttgcgggcatgtcagtgga

SEQ ID NO: 1682421 - DNA, 25 bp, Homo sapien
ttccttttcttggattccggcttgc

SEQ ID NO: 1682422 - DNA, 25 bp, Homo sapien
cgcaatgacgagtgcactctgactg

SEQ ID NO: 1682423 - DNA, 25 bp, Homo sapien
gcaatgacgagtgcactctgactgc

SEQ ID NO: 1682424 - DNA, 25 bp, Homo sapien
gaacgcaatgacgagtgcactctga

SEQ ID NO: 1682425 - DNA, 25 bp, Homo sapien
ctcgaacgcaatgacgagtgcactc

SEQ ID NO: 1682426 - DNA, 25 bp, Homo sapien
cgcagtcccgcgagagcagtgcttg

SEQ ID NO: 1682427 - DNA, 25 bp, Homo sapien
agcccgagcgggagaggccgcggag

SEQ ID NO: 1682428 - DNA, 25 bp, Homo sapien
gcagtgcttggtcgggacctcgaag

SEQ ID NO: 1682429 - DNA, 25 bp, Homo sapien
tcgggacctcgaagccggagcccga

SEQ ID NO: 1682430 - DNA, 25 bp, Homo sapien
gcgcccccgaatacagtctcccacg

SEQ ID NO: 1682431 - DNA, 25 bp, Homo sapien
gctcgcgcccccgaatacagtctcc

SEQ ID NO: 1682432 - DNA, 25 bp, Homo sapien
gggcagctcgcgcccccgaatacag

SEQ ID NO: 1682433 - DNA, 25 bp, Homo sapien
cgaatacagtctcccacgccccgcc

SEQ ID NO: 1682434 - DNA, 25 bp, Homo sapien
gcacatgctgccggcccgctaagag

SEQ ID NO: 1682435 - DNA, 25 bp, Homo sapien
tcctagaggcgctgtgtcccgaccg

SEQ ID NO: 1682436 - DNA, 25 bp, Homo sapien
agagctctgggtacccccggagcgc

SEQ ID NO: 1682437 - DNA, 25 bp, Homo sapien
agaggcgctgtgtcccgaccgcgct

SEQ ID NO: 1682438 - DNA, 25 bp, Homo sapien
agttcatcactttcccgggcttccg

SEQ ID NO: 1682439 - DNA, 25 bp, Homo sapien
gtcgtctccaccctcctatttgttg

SEQ ID NO: 1682440 - DNA, 25 bp, Homo sapien
ttgatacccggcctctgacccagtt

SEQ ID NO: 1682441 - DNA, 25 bp, Homo sapien
actgggacttcatcctcccggctac

SEQ ID NO: 1682442 - DNA, 25 bp, Homo sapien
agtaaaaaggtatcccatgttcgcg

SEQ ID NO: 1682443 - DNA, 25 bp, Homo sapien
caagacaatgatgctcactctcaca

SEQ ID NO: 1682444 - DNA, 25 bp, Homo sapien
taagatgttatcagcatgatccctg

SEQ ID NO: 1682445 - DNA, 25 bp, Homo sapien
tcagtgtagtactagatgtcctagc

SEQ ID NO: 1682446 - DNA, 25 bp, Homo sapien
gccagagaaggacgttacaagaaga

SEQ ID NO: 1682447 - DNA, 25 bp, Homo sapien
aagccagagaaggacgttacaagaa

SEQ ID NO: 1682448 - DNA, 25 bp, Homo sapien
aaagccagagaaggacgttacaaga

SEQ ID NO: 1682449 - DNA, 25 bp, Homo sapien
ccagagaaggacgttacaagaagaa

SEQ ID NO: 1682450 - DNA, 25 bp, Homo sapien
agcctgtatgttctctgtgaaaaag

SEQ ID NO: 1682451 - DNA, 25 bp, Homo sapien
aaaagcctgtatgttctctgtgaaa

SEQ ID NO: 1682452 - DNA, 25 bp, Homo sapien
atgttctctgtgaaaaaggggggca

SEQ ID NO: 1682453 - DNA, 25 bp, Homo sapien
tgttctctgtgaaaaaggggggcac

SEQ ID NO: 1682454 - DNA, 25 bp, Homo sapien
ggcaggcagtggttctagtttccac

SEQ ID NO: 1682455 - DNA, 25 bp, Homo sapien
caaggcaccattgtgacagttagag

SEQ ID NO: 1682456 - DNA, 25 bp, Homo sapien
gaaattaagaacaatgtcacctgga

SEQ ID NO: 1682457 - DNA, 25 bp, Homo sapien
gaaaacatcctttgtgccaacatgt

SEQ ID NO: 1682458 - DNA, 25 bp, Homo sapien
ggagacatcaatataatacagactt

SEQ ID NO: 1682459 - DNA, 25 bp, Homo sapien
gagacatcaatataatacagacttc

SEQ ID NO: 1682460 - DNA, 25 bp, Homo sapien
aatacagacttctaatttgatccag

SEQ ID NO: 1682461 - DNA, 25 bp, Homo sapien
caatataatacagacttctaatttg

SEQ ID NO: 1682462 - DNA, 25 bp, Homo sapien
agatggttgtctccacggctgcttt

SEQ ID NO: 1682463 - DNA, 25 bp, Homo sapien
aagatggttgtctccacggctgctt

SEQ ID NO: 1682464 - DNA, 25 bp, Homo sapien
caatgcgaatagactgaactgtacc

SEQ ID NO: 1682465 - DNA, 25 bp, Homo sapien
attgagtatagggtgggaaacgcta

SEQ ID NO: 1682466 - DNA, 25 bp, Homo sapien
gggattagctacacaacaatgcgaa

SEQ ID NO: 1682467 - DNA, 25 bp, Homo sapien
cgctatgtaaggagattagagctga

SEQ ID NO: 1682468 - DNA, 25 bp, Homo sapien
tctgtagttctaatgcttgaggcgg

SEQ ID NO: 1682469 - DNA, 25 bp, Homo sapien
ctgtagttctaatgcttgaggcggg

SEQ ID NO: 1682470 - DNA, 25 bp, Homo sapien
ttgtctgtagttctaatgcttgagg

SEQ ID NO: 1682471 - DNA, 25 bp, Homo sapien
cagggtttgtctgtagttctaatgc

SEQ ID NO: 1682472 - DNA, 25 bp, Homo sapien
gaacttggccgagccattttcaggc

SEQ ID NO: 1682473 - DNA, 25 bp, Homo sapien
aaatctggtttcgtgtggacgctgg

SEQ ID NO: 1682474 - DNA, 25 bp, Homo sapien
ggcttcaggccacaatatagctggg

SEQ ID NO: 1682475 - DNA, 25 bp, Homo sapien
aatcaatcgacttgggacaatctgg

SEQ ID NO: 1682476 - DNA, 25 bp, Homo sapien
ctaagatactgaagccgggaatgcc

SEQ ID NO: 1682477 - DNA, 25 bp, Homo sapien
atgccccaccctggatatggagatc

SEQ ID NO: 1682478 - DNA, 25 bp, Homo sapien
ctggatatggagatcttccaaggat

SEQ ID NO: 1682479 - DNA, 25 bp, Homo sapien
taagatactgaagccgggaatgccc

SEQ ID NO: 1682480 - DNA, 25 bp, Homo sapien
cccaagtgctatgccaagcacttta

SEQ ID NO: 1682481 - DNA, 25 bp, Homo sapien
ccacagggacagcagctatggtggt

SEQ ID NO: 1682482 - DNA, 25 bp, Homo sapien
tacgtggatcacaaggtgggatttt

SEQ ID NO: 1682483 - DNA, 25 bp, Homo sapien
gccaagcactttacgtggatcacaa

SEQ ID NO: 1682484 - DNA, 25 bp, Homo sapien
ctaaacagagtgaaatctttatcaa

SEQ ID NO: 1682485 - DNA, 25 bp, Homo sapien
cagagtgaaatctttatcaatccag

SEQ ID NO: 1682486 - DNA, 25 bp, Homo sapien
aacagagtgaaatctttatcaatcc

SEQ ID NO: 1682487 - DNA, 25 bp, Homo sapien
aaacagagtgaaatctttatcaatc

SEQ ID NO: 1682488 - DNA, 25 bp, Homo sapien
gctcctctgaaggtcggaacaccac

SEQ ID NO: 1682489 - DNA, 25 bp, Homo sapien
taacaccagctcctgagatgatgac

SEQ ID NO: 1682490 - DNA, 25 bp, Homo sapien
gagatgatgactatgtgctttgctt

SEQ ID NO: 1682491 - DNA, 25 bp, Homo sapien
tttctgcactaacaccagctcctga

SEQ ID NO: 1682492 - DNA, 25 bp, Homo sapien
ggtttcattcgacagaggcttttaa

SEQ ID NO: 1682493 - DNA, 25 bp, Homo sapien
tggtttcattcgacagaggctttta

SEQ ID NO: 1682494 - DNA, 25 bp, Homo sapien
cgacagaggcttttaatgttctgga

SEQ ID NO: 1682495 - DNA, 25 bp, Homo sapien
tcattcgacagaggcttttaatgtt

SEQ ID NO: 1682496 - DNA, 25 bp, Homo sapien
ctatctaggaaggaacgtggcagcc

SEQ ID NO: 1682497 - DNA, 25 bp, Homo sapien
taaatgcaatccacacctatctagg

SEQ ID NO: 1682498 - DNA, 25 bp, Homo sapien
tggtgctggctatacaactatgtcc

SEQ ID NO: 1682499 - DNA, 25 bp, Homo sapien
gaatgatgctaaccaaggtcttctg

SEQ ID NO: 1682500 - DNA, 25 bp, Homo sapien
ggagacaatgcaacgaataaaacaa

SEQ ID NO: 1682501 - DNA, 25 bp, Homo sapien
gtcttccaaagctagggatttcctg

SEQ ID NO: 1682502 - DNA, 25 bp, Homo sapien
agagcacggactgcaaagggccatg

SEQ ID NO: 1682503 - DNA, 25 bp, Homo sapien
ctataatgtgccagagttctggaaa

SEQ ID NO: 1682504 - DNA, 25 bp, Homo sapien
ggtgcagctcatcgatgttctgggt

SEQ ID NO: 1682505 - DNA, 25 bp, Homo sapien
cgccggtagtggtagaactcccaca

SEQ ID NO: 1682506 - DNA, 25 bp, Homo sapien
tctcacactcggctatggcgcggtg

SEQ ID NO: 1682507 - DNA, 25 bp, Homo sapien
tgttctgggtgatgaccacgactcg

SEQ ID NO: 1682508 - DNA, 25 bp, Homo sapien
ggtgccacgggacactaacatgtcc

SEQ ID NO: 1682509 - DNA, 25 bp, Homo sapien
cacgggacactaacatgtccccaaa

SEQ ID NO: 1682510 - DNA, 25 bp, Homo sapien
aggtgccacgggacactaacatgtc

SEQ ID NO: 1682511 - DNA, 25 bp, Homo sapien
gacactaacatgtccccaaaggaaa

SEQ ID NO: 1682512 - DNA, 25 bp, Homo sapien
tatgaaatgggtaccaggcaactgg

SEQ ID NO: 1682513 - DNA, 25 bp, Homo sapien
tcaaccctagtggacatgcgctgct

SEQ ID NO: 1682514 - DNA, 25 bp, Homo sapien
gagggagctcaacctaaatctaagg

SEQ ID NO: 1682515 - DNA, 25 bp, Homo sapien
taagccagtcaagagcatatgccct

SEQ ID NO: 1682516 - DNA, 25 bp, Homo sapien
gactcttgtaattctcagccacaac

SEQ ID NO: 1682517 - DNA, 25 bp, Homo sapien
gtaattctcagccacaactccacaa

SEQ ID NO: 1682518 - DNA, 25 bp, Homo sapien
gctggacaaattggactcttgtaat

SEQ ID NO: 1682519 - DNA, 25 bp, Homo sapien
aaagctggacaaattggactcttgt

SEQ ID NO: 1682520 - DNA, 25 bp, Homo sapien
caccagtggttgtactgccagtgag

SEQ ID NO: 1682521 - DNA, 25 bp, Homo sapien
tgcctggcagtatgtggtataaaac

SEQ ID NO: 1682522 - DNA, 25 bp, Homo sapien
tcaagacaaccctcggcaatacagt

SEQ ID NO: 1682523 - DNA, 25 bp, Homo sapien
gaccccaagccattaattaccagtg

SEQ ID NO: 1682524 - DNA, 25 bp, Homo sapien
gggaagtttctcaactgggatgctg

SEQ ID NO: 1682525 - DNA, 25 bp, Homo sapien
gaagtttctcaactgggatgctggc

SEQ ID NO: 1682526 - DNA, 25 bp, Homo sapien
ggaagtttctcaactgggatgctgg

SEQ ID NO: 1682527 - DNA, 25 bp, Homo sapien
cggggaagtttctcaactgggatgc

SEQ ID NO: 1682528 - DNA, 25 bp, Homo sapien
ggaacaccagtacaaatcagagttt

SEQ ID NO: 1682529 - DNA, 25 bp, Homo sapien
cctggaacaccagtacaaatcagag

SEQ ID NO: 1682530 - DNA, 25 bp, Homo sapien
tttggtaacctggaacaccagtaca

SEQ ID NO: 1682531 - DNA, 25 bp, Homo sapien
gtacaaatcagagttttctacctac

SEQ ID NO: 1682532 - DNA, 25 bp, Homo sapien
agttacaggtcagcccctatgcttt

SEQ ID NO: 1682533 - DNA, 25 bp, Homo sapien
ttcattgcctccctaaccctggatt

SEQ ID NO: 1682534 - DNA, 25 bp, Homo sapien
gctttctgtacactgggtaaccacc

SEQ ID NO: 1682535 - DNA, 25 bp, Homo sapien
tgatgttatttgaccagttacaggt

SEQ ID NO: 1682536 - DNA, 25 bp, Homo sapien
aaaaacactctaatccagccgggtg

SEQ ID NO: 1682537 - DNA, 25 bp, Homo sapien
aaaacactctaatccagccgggtgc

SEQ ID NO: 1682538 - DNA, 25 bp, Homo sapien
aacactctaatccagccgggtgcag

SEQ ID NO: 1682539 - DNA, 25 bp, Homo sapien
aaacactctaatccagccgggtgca

SEQ ID NO: 1682540 - DNA, 25 bp, Homo sapien
ttctccaaaccacacgacgtgaggt

SEQ ID NO: 1682541 - DNA, 25 bp, Homo sapien
acacgacgtgaggtcgcagcaagcc

SEQ ID NO: 1682542 - DNA, 25 bp, Homo sapien
tagacataaatcacagtgggcgagc

SEQ ID NO: 1682543 - DNA, 25 bp, Homo sapien
ctcctccagaatggcaggatccagg

SEQ ID NO: 1682544 - DNA, 25 bp, Homo sapien
taacggtaactatttctggatagca

SEQ ID NO: 1682545 - DNA, 25 bp, Homo sapien
gaactatgggcgatttctaatttcc

SEQ ID NO: 1682546 - DNA, 25 bp, Homo sapien
aggataccacaaagacctctcaaca

SEQ ID NO: 1682547 - DNA, 25 bp, Homo sapien
caatgtggcccaaaggctgctgttt

SEQ ID NO: 1682548 - DNA, 25 bp, Homo sapien
caaacaggatgggataaaacagggt

SEQ ID NO: 1682549 - DNA, 25 bp, Homo sapien
gatgaacaaacagccagacgacaag

SEQ ID NO: 1682550 - DNA, 25 bp, Homo sapien
tacacaaactcaggcaggtctgtgg

SEQ ID NO: 1682551 - DNA, 25 bp, Homo sapien
caaggcaagtacacggagatgaaca

SEQ ID NO: 1682552 - DNA, 25 bp, Homo sapien
ggctgctgggtacaccacagaggaa

SEQ ID NO: 1682553 - DNA, 25 bp, Homo sapien
gggtacaccacagaggaagtgccca

SEQ ID NO: 1682554 - DNA, 25 bp, Homo sapien
ctgctgggtacaccacagaggaagt

SEQ ID NO: 1682555 - DNA, 25 bp, Homo sapien
gctgggtacaccacagaggaagtgc

SEQ ID NO: 1682556 - DNA, 25 bp, Homo sapien
gttaaattcagccactggcacgccc

SEQ ID NO: 1682557 - DNA, 25 bp, Homo sapien
ggtctccgtgttaaattcagccact

SEQ ID NO: 1682558 - DNA, 25 bp, Homo sapien
atctgttcgtagctggggtggtctc

SEQ ID NO: 1682559 - DNA, 25 bp, Homo sapien
tccgtgttaaattcagccactggca

SEQ ID NO: 1682560 - DNA, 25 bp, Homo sapien
tctccctctcccatcagggtatccc

SEQ ID NO: 1682561 - DNA, 25 bp, Homo sapien
tccctctcccatcagggtatcccag

SEQ ID NO: 1682562 - DNA, 25 bp, Homo sapien
cctctcccatcagggtatcccagta

SEQ ID NO: 1682563 - DNA, 25 bp, Homo sapien
ctctcccatcagggtatcccagtac

SEQ ID NO: 1682564 - DNA, 25 bp, Homo sapien
tgaggttctgcaagggcatctccca

SEQ ID NO: 1682565 - DNA, 25 bp, Homo sapien
caaaatgatgatgtctgggctgcaa

SEQ ID NO: 1682566 - DNA, 25 bp, Homo sapien
cccaaacttgggaagcaggatcagt

SEQ ID NO: 1682567 - DNA, 25 bp, Homo sapien
cgaaatttcatgaggtggcacccag

SEQ ID NO: 1682568 - DNA, 25 bp, Homo sapien
tctaggactatataccaaggagtag

SEQ ID NO: 1682569 - DNA, 25 bp, Homo sapien
tccttcagtcgatggacgtttgggt

SEQ ID NO: 1682570 - DNA, 25 bp, Homo sapien
gactgcgccattgtacattctcatc

SEQ ID NO: 1682571 - DNA, 25 bp, Homo sapien
cactgtggttttgctactgaacatc

SEQ ID NO: 1682572 - DNA, 25 bp, Homo sapien
tttcaaacagacaggaggcttgagc

SEQ ID NO: 1682573 - DNA, 25 bp, Homo sapien
gggacatagctcaggtcctgcttca

SEQ ID NO: 1682574 - DNA, 25 bp, Homo sapien
gagctgcctagctccggtattacta

SEQ ID NO: 1682575 - DNA, 25 bp, Homo sapien
agtttatcctgtcccactcttcgag

SEQ ID NO: 1682576 - DNA, 25 bp, Homo sapien
tagagatgagatggagatcaaatga

SEQ ID NO: 1682577 - DNA, 25 bp, Homo sapien
attctttataataattagagatgag

SEQ ID NO: 1682578 - DNA, 25 bp, Homo sapien
ctttataataattagagatgagatg

SEQ ID NO: 1682579 - DNA, 25 bp, Homo sapien
taattctttataataattagagatg

SEQ ID NO: 1682580 - DNA, 25 bp, Homo sapien
cttgggttgtggaaatactccagtt

SEQ ID NO: 1682581 - DNA, 25 bp, Homo sapien
ctgctgctcagtccatggcatggga

SEQ ID NO: 1682582 - DNA, 25 bp, Homo sapien
tgcttttctacaatgatgacttgtt

SEQ ID NO: 1682583 - DNA, 25 bp, Homo sapien
ctgctcagtccatggcatgggaggt

SEQ ID NO: 1682584 - DNA, 25 bp, Homo sapien
tacagatacaggtggtgggcaaatt

SEQ ID NO: 1682585 - DNA, 25 bp, Homo sapien
taaacagtcctctcaattgctccag

SEQ ID NO: 1682586 - DNA, 25 bp, Homo sapien
taggatgagatgactatcaccagca

SEQ ID NO: 1682587 - DNA, 25 bp, Homo sapien
gcctaaggtgtcttgtgagatccaa

SEQ ID NO: 1682588 - DNA, 25 bp, Homo sapien
tgcagcgacagtcccatttttgcct

SEQ ID NO: 1682589 - DNA, 25 bp, Homo sapien
tgcctcagcgaatgtacaaatccta

SEQ ID NO: 1682590 - DNA, 25 bp, Homo sapien
gatcaacagggcacaacatagtggc

SEQ ID NO: 1682591 - DNA, 25 bp, Homo sapien
ggcacagtgggccaaaggtgctttg

SEQ ID NO: 1682592 - DNA, 25 bp, Homo sapien
caggaagagtcgttccacagggtcc

SEQ ID NO: 1682593 - DNA, 25 bp, Homo sapien
gggcttcaggaagagtcgttccaca

SEQ ID NO: 1682594 - DNA, 25 bp, Homo sapien
gcttcaggaagagtcgttccacagg

SEQ ID NO: 1682595 - DNA, 25 bp, Homo sapien
ttcaggaagagtcgttccacagggt

SEQ ID NO: 1682596 - DNA, 25 bp, Homo sapien
catttctcctctgcgtgtggcctag

SEQ ID NO: 1682597 - DNA, 25 bp, Homo sapien
atcaacaggttggattccagcgagg

SEQ ID NO: 1682598 - DNA, 25 bp, Homo sapien
ctgtgacttttgaatgtgggtgctc

SEQ ID NO: 1682599 - DNA, 25 bp, Homo sapien
tagattgttcagtactcagctcacc

SEQ ID NO: 1682600 - DNA, 25 bp, Homo sapien
tttataagtggttgcagttctgtcc

SEQ ID NO: 1682601 - DNA, 25 bp, Homo sapien
tactccaaggtagtaaagtgtatgg

SEQ ID NO: 1682602 - DNA, 25 bp, Homo sapien
gccactggaccaccctgtaaggttc

SEQ ID NO: 1682603 - DNA, 25 bp, Homo sapien
ccctaagcactgagttagctggtaa

SEQ ID NO: 1682604 - DNA, 25 bp, Homo sapien
gtaaagtgtacatcgagccctcagg

SEQ ID NO: 1682605 - DNA, 25 bp, Homo sapien
tctaattgcgctggtctgaacccgc

SEQ ID NO: 1682606 - DNA, 25 bp, Homo sapien
cctacacaaaggaccactgggattt

SEQ ID NO: 1682607 - DNA, 25 bp, Homo sapien
gaataaagttaacttggagcagccc

SEQ ID NO: 1682608 - DNA, 25 bp, Homo sapien
ggtccctagagaatgcacccgagtt

SEQ ID NO: 1682609 - DNA, 25 bp, Homo sapien
aaagaatggcttcgccggtccctag

SEQ ID NO: 1682610 - DNA, 25 bp, Homo sapien
cacccgagttttgtggtatatacac

SEQ ID NO: 1682611 - DNA, 25 bp, Homo sapien
cttcgccggtccctagagaatgcac

SEQ ID NO: 1682612 - DNA, 25 bp, Homo sapien
acagcagctggcccgtggcaaatgc

SEQ ID NO: 1682613 - DNA, 25 bp, Homo sapien
aacagcagctggcccgtggcaaatg

SEQ ID NO: 1682614 - DNA, 25 bp, Homo sapien
cagcagctggcccgtggcaaatgct

SEQ ID NO: 1682615 - DNA, 25 bp, Homo sapien
tgtcggccctgtgggaggggcgccc

SEQ ID NO: 1682616 - DNA, 25 bp, Homo sapien
taggatgtcggccctgtgggagggg

SEQ ID NO: 1682617 - DNA, 25 bp, Homo sapien
gcgcccttcctggtgccgggcccta

SEQ ID NO: 1682618 - DNA, 25 bp, Homo sapien
gatgtcggccctgtgggaggggcgc

SEQ ID NO: 1682619 - DNA, 25 bp, Homo sapien
tgtagatttggctgcgttcgctccg

SEQ ID NO: 1682620 - DNA, 25 bp, Homo sapien
tcacgctgtccggtgctcagaaaac

SEQ ID NO: 1682621 - DNA, 25 bp, Homo sapien
ggttccgtcgagtggatccagcttg

SEQ ID NO: 1682622 - DNA, 25 bp, Homo sapien
gaaatgcgctctagcagatggccgc

SEQ ID NO: 1682623 - DNA, 25 bp, Homo sapien
tctgccggcgaaagcggctggcaat

SEQ ID NO: 1682624 - DNA, 25 bp, Homo sapien
cctgtaggcagtgggcgtgtttctt

SEQ ID NO: 1682625 - DNA, 25 bp, Homo sapien
aagcggagcgcaagcctactttcat

SEQ ID NO: 1682626 - DNA, 25 bp, Homo sapien
ggatggaccccacggaaaatgctct

SEQ ID NO: 1682627 - DNA, 25 bp, Homo sapien
ctcgtccaccatcgcctccgccgac

SEQ ID NO: 1682628 - DNA, 25 bp, Homo sapien
acgccggggcgcgagacgctcgcgg

SEQ ID NO: 1682629 - DNA, 25 bp, Homo sapien
gcgcgagacgctcgcggtcggagct

SEQ ID NO: 1682630 - DNA, 25 bp, Homo sapien
tgggctgcccgagcaacagcccgtg

SEQ ID NO: 1682631 - DNA, 25 bp, Homo sapien
cctgggcgctggcgaaagtcagctc

SEQ ID NO: 1682632 - DNA, 25 bp, Homo sapien
gcgctggcgaaagtcagctcctccg

SEQ ID NO: 1682633 - DNA, 25 bp, Homo sapien
ctgcgcacggtctcccgcactcgcc

SEQ ID NO: 1682634 - DNA, 25 bp, Homo sapien
tgggcgctggcgaaagtcagctcct

SEQ ID NO: 1682635 - DNA, 25 bp, Homo sapien
ttcgatgaacagctcctcgcgtcgc

SEQ ID NO: 1682636 - DNA, 25 bp, Homo sapien
cttctgttcgatgaacagctcctcg

SEQ ID NO: 1682637 - DNA, 25 bp, Homo sapien
gatgaacagctcctcgcgtcgcttc

SEQ ID NO: 1682638 - DNA, 25 bp, Homo sapien
tgttcgatgaacagctcctcgcgtc

SEQ ID NO: 1682639 - DNA, 25 bp, Homo sapien
agtctgtgaagctgtggttaacttc

SEQ ID NO: 1682640 - DNA, 25 bp, Homo sapien
ttagtctgtgaagctgtggttaact

SEQ ID NO: 1682641 - DNA, 25 bp, Homo sapien
tagtctgtgaagctgtggttaactt

SEQ ID NO: 1682642 - DNA, 25 bp, Homo sapien
ggaaagcaatagtcactccctagta

SEQ ID NO: 1682643 - DNA, 25 bp, Homo sapien
tttaatagtttaggcacaggagaca

SEQ ID NO: 1682644 - DNA, 25 bp, Homo sapien
taaaatctgagagcctattagcagg

SEQ ID NO: 1682645 - DNA, 25 bp, Homo sapien
caaaaccactgactgcaatggcagt

SEQ ID NO: 1682646 - DNA, 25 bp, Homo sapien
ctttcacctttcctggcgatttctt

SEQ ID NO: 1682647 - DNA, 25 bp, Homo sapien
cacctttcctggcgatttcttgatg

SEQ ID NO: 1682648 - DNA, 25 bp, Homo sapien
ttcacctttcctggcgatttcttga

SEQ ID NO: 1682649 - DNA, 25 bp, Homo sapien
cttctttcacctttcctggcgattt

SEQ ID NO: 1682650 - DNA, 25 bp, Homo sapien
gccattcatatttgactggaaacat

SEQ ID NO: 1682651 - DNA, 25 bp, Homo sapien
gggccattcatatttgactggaaac

SEQ ID NO: 1682652 - DNA, 25 bp, Homo sapien
taagggccattcatatttgactgga

SEQ ID NO: 1682653 - DNA, 25 bp, Homo sapien
aagggccattcatatttgactggaa

SEQ ID NO: 1682654 - DNA, 25 bp, Homo sapien
cattttctaattagcattcacgtaa

SEQ ID NO: 1682655 - DNA, 25 bp, Homo sapien
taagcatccactacacaccaatgtg

SEQ ID NO: 1682656 - DNA, 25 bp, Homo sapien
tactggagttcactttaagcatcca

SEQ ID NO: 1682657 - DNA, 25 bp, Homo sapien
gaaatacagggaataggccccagct

SEQ ID NO: 1682658 - DNA, 25 bp, Homo sapien
ctttttcacagtcttcatttttctt

SEQ ID NO: 1682659 - DNA, 25 bp, Homo sapien
tgtactttaactttcttggagtcat

SEQ ID NO: 1682660 - DNA, 25 bp, Homo sapien
ttggagtcatttcctttttcacagt

SEQ ID NO: 1682661 - DNA, 25 bp, Homo sapien
ctgacagactgtactttttgtactt

SEQ ID NO: 1682662 - DNA, 25 bp, Homo sapien
agccaatactttaactctcttaaag

SEQ ID NO: 1682663 - DNA, 25 bp, Homo sapien
tagccaatactttaactctcttaaa

SEQ ID NO: 1682664 - DNA, 25 bp, Homo sapien
gaatgactgtctttgcatcagcacc

SEQ ID NO: 1682665 - DNA, 25 bp, Homo sapien
tgaagtgctgacagtaggctgcagt

SEQ ID NO: 1682666 - DNA, 25 bp, Homo sapien
catgactggcaatagtggtgaacaa

SEQ ID NO: 1682667 - DNA, 25 bp, Homo sapien
ggtgaacaacctttccattggaatg

SEQ ID NO: 1682668 - DNA, 25 bp, Homo sapien
gcaagtaatgatttggaccaccaag

SEQ ID NO: 1682669 - DNA, 25 bp, Homo sapien
caactcaaatgaatgcctgtggact

SEQ ID NO: 1682670 - DNA, 25 bp, Homo sapien
tacagacatcgtccacagtatcggc

SEQ ID NO: 1682671 - DNA, 25 bp, Homo sapien
tcttgtggctaaaacaccgatttgc

SEQ ID NO: 1682672 - DNA, 25 bp, Homo sapien
ggttaaataagaattacacatgctt

SEQ ID NO: 1682673 - DNA, 25 bp, Homo sapien
ataagaattacacatgcttactttc

SEQ ID NO: 1682674 - DNA, 25 bp, Homo sapien
taaataagaattacacatgcttact

SEQ ID NO: 1682675 - DNA, 25 bp, Homo sapien
ctgttgatcaatataaaaggttaaa

SEQ ID NO: 1682676 - DNA, 25 bp, Homo sapien
cagtagtcctgttggttcctggccc

SEQ ID NO: 1682677 - DNA, 25 bp, Homo sapien
gatcttggtcttttagccttacggc

SEQ ID NO: 1682678 - DNA, 25 bp, Homo sapien
tacggccaagtagcttttattctgg

SEQ ID NO: 1682679 - DNA, 25 bp, Homo sapien
aattatgtatgaaggcttgtgctgc

SEQ ID NO: 1682680 - DNA, 25 bp, Homo sapien
tgttggcaagagacaggaacttatt

SEQ ID NO: 1682681 - DNA, 25 bp, Homo sapien
ttggcaagagacaggaacttattta

SEQ ID NO: 1682682 - DNA, 25 bp, Homo sapien
cttgttggcaagagacaggaactta

SEQ ID NO: 1682683 - DNA, 25 bp, Homo sapien
ttgttggcaagagacaggaacttat

SEQ ID NO: 1682684 - DNA, 25 bp, Homo sapien
caagcattattcaaaaactggacag

SEQ ID NO: 1682685 - DNA, 25 bp, Homo sapien
cattattcaaaaactggacagcagc

SEQ ID NO: 1682686 - DNA, 25 bp, Homo sapien
cccaagcattattcaaaaactggac

SEQ ID NO: 1682687 - DNA, 25 bp, Homo sapien
ttattcaaaaactggacagcagctc

SEQ ID NO: 1682688 - DNA, 25 bp, Homo sapien
tattcaacatataaagctattagag

SEQ ID NO: 1682689 - DNA, 25 bp, Homo sapien
catataaagctattagagacaggag

SEQ ID NO: 1682690 - DNA, 25 bp, Homo sapien
acaggagaataaagctggatcttac

SEQ ID NO: 1682691 - DNA, 25 bp, Homo sapien
attagagacaggagaataaagctgg

SEQ ID NO: 1682692 - DNA, 25 bp, Homo sapien
tttctgaccatccaccgtcttttaa

SEQ ID NO: 1682693 - DNA, 25 bp, Homo sapien
tctgaccatccaccgtcttttaaac

SEQ ID NO: 1682694 - DNA, 25 bp, Homo sapien
tctttctgaccatccaccgtctttt

SEQ ID NO: 1682695 - DNA, 25 bp, Homo sapien
ttctgaccatccaccgtcttttaaa

SEQ ID NO: 1682696 - DNA, 25 bp, Homo sapien
aaagtacagattcttcatttagcat

SEQ ID NO: 1682697 - DNA, 25 bp, Homo sapien
gtacagattcttcatttagcattga

SEQ ID NO: 1682698 - DNA, 25 bp, Homo sapien
tacagattcttcatttagcattgat

SEQ ID NO: 1682699 - DNA, 25 bp, Homo sapien
agtacagattcttcatttagcattg

SEQ ID NO: 1682700 - DNA, 25 bp, Homo sapien
gaatgaaatgtggttgagcacttcc

SEQ ID NO: 1682701 - DNA, 25 bp, Homo sapien
gattgcaaggcacagttctactcca

SEQ ID NO: 1682702 - DNA, 25 bp, Homo sapien
taatagcaaattgtctacaggctgc

SEQ ID NO: 1682703 - DNA, 25 bp, Homo sapien
agttagagactttgctggaatatcc

SEQ ID NO: 1682704 - DNA, 25 bp, Homo sapien
cagtttactggcatccctggattag

SEQ ID NO: 1682705 - DNA, 25 bp, Homo sapien
aatgtagtgatataattaaccagcc

SEQ ID NO: 1682706 - DNA, 25 bp, Homo sapien
tagacctgatattgtggctgacaca

SEQ ID NO: 1682707 - DNA, 25 bp, Homo sapien
acttctacagatacagtgtcaattg

SEQ ID NO: 1682708 - DNA, 25 bp, Homo sapien
tatataaaaaccaaatatttagtca

SEQ ID NO: 1682709 - DNA, 25 bp, Homo sapien
ttgtattataacagtattacatgtc

SEQ ID NO: 1682710 - DNA, 25 bp, Homo sapien
gttgtattataacagtattacatgt

SEQ ID NO: 1682711 - DNA, 25 bp, Homo sapien
tgttgtattataacagtattacatg

SEQ ID NO: 1682712 - DNA, 25 bp, Homo sapien
ctgttgtattataacagtattacat

SEQ ID NO: 1682713 - DNA, 25 bp, Homo sapien
taagcattcaatcagtgtaacttgc

SEQ ID NO: 1682714 - DNA, 25 bp, Homo sapien
gatgacttctgttgtagactcacaa

SEQ ID NO: 1682715 - DNA, 25 bp, Homo sapien
tacaatcccgacctgttagtcccag

SEQ ID NO: 1682716 - DNA, 25 bp, Homo sapien
gcttcctagtttacagcatgatgca

SEQ ID NO: 1682717 - DNA, 25 bp, Homo sapien
cgattcagagagaacctgtgtgctc

SEQ ID NO: 1682718 - DNA, 25 bp, Homo sapien
gatccctggaacagcccagttggaa

SEQ ID NO: 1682719 - DNA, 25 bp, Homo sapien
tctactagcatattcagatccctgg

SEQ ID NO: 1682720 - DNA, 25 bp, Homo sapien
gaaatcagcttgacccgattcagag

SEQ ID NO: 1682721 - DNA, 25 bp, Homo sapien
ggaaacatttgtgagcataatagtt

SEQ ID NO: 1682722 - DNA, 25 bp, Homo sapien
tggaaacatttgtgagcataatagt

SEQ ID NO: 1682723 - DNA, 25 bp, Homo sapien
tctagatagggataaggtgagcaac

SEQ ID NO: 1682724 - DNA, 25 bp, Homo sapien
taacttctaagcaaatgccagctac

SEQ ID NO: 1682725 - DNA, 25 bp, Homo sapien
caaggccggatgatttgagggcaac

SEQ ID NO: 1682726 - DNA, 25 bp, Homo sapien
tatataagtagccaaagaacaaggc

SEQ ID NO: 1682727 - DNA, 25 bp, Homo sapien
tcaggccgccatagaaagaatgatc

SEQ ID NO: 1682728 - DNA, 25 bp, Homo sapien
gatccactttggacgagagctgcaa

SEQ ID NO: 1682729 - DNA, 25 bp, Homo sapien
caactgcatgctgaatactggatcc

SEQ ID NO: 1682730 - DNA, 25 bp, Homo sapien
tactggatcctagactcttgagagc

SEQ ID NO: 1682731 - DNA, 25 bp, Homo sapien
taaagagcaggagttctagagccag

SEQ ID NO: 1682732 - DNA, 25 bp, Homo sapien
tagtaaattgcctgtcccatcagca

SEQ ID NO: 1682733 - DNA, 25 bp, Homo sapien
gaattccatggcaatgttagatttc

SEQ ID NO: 1682734 - DNA, 25 bp, Homo sapien
gaataatccaaaaagctaatagcac

SEQ ID NO: 1682735 - DNA, 25 bp, Homo sapien
cagcgacatgtttggctttgaatac

SEQ ID NO: 1682736 - DNA, 25 bp, Homo sapien
cagcagttgattaacgaagacgtac

SEQ ID NO: 1682737 - DNA, 25 bp, Homo sapien
ttacatactagaaatcagtgctggg

SEQ ID NO: 1682738 - DNA, 25 bp, Homo sapien
cagcctaggagtggattgagtatga

SEQ ID NO: 1682739 - DNA, 25 bp, Homo sapien
gaattggctaatggattggatctga

SEQ ID NO: 1682740 - DNA, 25 bp, Homo sapien
ggcagtggataactctggaggactt

SEQ ID NO: 1682741 - DNA, 25 bp, Homo sapien
tacttagcagagtagaggtcgttgg

SEQ ID NO: 1682742 - DNA, 25 bp, Homo sapien
tggagacatcctgattggaatggat

SEQ ID NO: 1682743 - DNA, 25 bp, Homo sapien
tgaacaagtcttgaacatccagtgt

SEQ ID NO: 1682744 - DNA, 25 bp, Homo sapien
caaagaatcgtcagaggaactctca

SEQ ID NO: 1682745 - DNA, 25 bp, Homo sapien
tctacaagtgagctcatgggaacaa

SEQ ID NO: 1682746 - DNA, 25 bp, Homo sapien
ggcacttcacagaaggttcacgtca

SEQ ID NO: 1682747 - DNA, 25 bp, Homo sapien
taaatacagcgttgatatgctagac

SEQ ID NO: 1682748 - DNA, 25 bp, Homo sapien
gctcctggtaactgttgactggttt

SEQ ID NO: 1682749 - DNA, 25 bp, Homo sapien
caaaaccacagataaatgcggactg

SEQ ID NO: 1682750 - DNA, 25 bp, Homo sapien
cagggcgggactgaatccaatggca

SEQ ID NO: 1682751 - DNA, 25 bp, Homo sapien
tacccgttttttgagatatctgttg

SEQ ID NO: 1682752 - DNA, 25 bp, Homo sapien
tactctcagatagttggttgatggg

SEQ ID NO: 1682753 - DNA, 25 bp, Homo sapien
tagtctataactgttgtcagggttc

SEQ ID NO: 1682754 - DNA, 25 bp, Homo sapien
tctgttgcttcaaggataaaatgta

SEQ ID NO: 1682755 - DNA, 25 bp, Homo sapien
tggctgcaaataccctgatgattct

SEQ ID NO: 1682756 - DNA, 25 bp, Homo sapien
ttccctcgagctccagacaatgtgt

SEQ ID NO: 1682757 - DNA, 25 bp, Homo sapien
gaacttgacctcatatttggctgca

SEQ ID NO: 1682758 - DNA, 25 bp, Homo sapien
gaaataggcacacgattgtcaccat

SEQ ID NO: 1682759 - DNA, 25 bp, Homo sapien
gatgtgtgtatctgagcatccttac

SEQ ID NO: 1682760 - DNA, 25 bp, Homo sapien
ttaaaggagccacgttcagccgaga

SEQ ID NO: 1682761 - DNA, 25 bp, Homo sapien
tcttcgccggctcacatgttgtttt

SEQ ID NO: 1682762 - DNA, 25 bp, Homo sapien
tgttgttttggcagcacacatgcat

SEQ ID NO: 1682763 - DNA, 25 bp, Homo sapien
gctgccaaatggatgtactgtgtgt

SEQ ID NO: 1682764 - DNA, 25 bp, Homo sapien
gcctccggacgctctcctccggttc

SEQ ID NO: 1682765 - DNA, 25 bp, Homo sapien
tccggacgctctcctccggttctgg

SEQ ID NO: 1682766 - DNA, 25 bp, Homo sapien
ctgcggcctccggacgctctcctcc

SEQ ID NO: 1682767 - DNA, 25 bp, Homo sapien
catgtgagcatcagcacctactgct

SEQ ID NO: 1682768 - DNA, 25 bp, Homo sapien
caaaatctccgcgaagctcaggtac

SEQ ID NO: 1682769 - DNA, 25 bp, Homo sapien
tacctcatcggtgaactaaggacgg

SEQ ID NO: 1682770 - DNA, 25 bp, Homo sapien
aggaccctaggctgagactccggag

SEQ ID NO: 1682771 - DNA, 25 bp, Homo sapien
tcagaaccccgcgattgaggcggcc

SEQ ID NO: 1682772 - DNA, 25 bp, Homo sapien
ccttcaagttcaaaaatggtgggca

SEQ ID NO: 1682773 - DNA, 25 bp, Homo sapien
caaaggcggtaaatgatttgcaaac

SEQ ID NO: 1682774 - DNA, 25 bp, Homo sapien
tttccagaaggcaactagcagatga

SEQ ID NO: 1682775 - DNA, 25 bp, Homo sapien
gaatgaatggtagcctggaaatttc

SEQ ID NO: 1682776 - DNA, 25 bp, Homo sapien
tgaaaggcttgactcaaaccagaag

SEQ ID NO: 1682777 - DNA, 25 bp, Homo sapien
ggaattcgtctctgaacacttgaaa

SEQ ID NO: 1682778 - DNA, 25 bp, Homo sapien
caaaacctgcttgtgtgtacggttc

SEQ ID NO: 1682779 - DNA, 25 bp, Homo sapien
ttttccgttaagtatgccaagcacc

SEQ ID NO: 1682780 - DNA, 25 bp, Homo sapien
gaacgatgtccaatacctgaagcag

SEQ ID NO: 1682781 - DNA, 25 bp, Homo sapien
gaatctcacatggacggaacgtctg

SEQ ID NO: 1682782 - DNA, 25 bp, Homo sapien
taaccatagcgagatcctgaacaca

SEQ ID NO: 1682783 - DNA, 25 bp, Homo sapien
tgaacacatatcctctaggtgcagg

SEQ ID NO: 1682784 - DNA, 25 bp, Homo sapien
gactttctagctgagtggtgcacag

SEQ ID NO: 1682785 - DNA, 25 bp, Homo sapien
gaagattccacttagccggaccagg

SEQ ID NO: 1682786 - DNA, 25 bp, Homo sapien
gaagcttggtctcatctgtggtgca

SEQ ID NO: 1682787 - DNA, 25 bp, Homo sapien
gggtctccatgttcagggcacaatg

SEQ ID NO: 1682788 - DNA, 25 bp, Homo sapien
gctctgggattttatcgcctgtgga

SEQ ID NO: 1682789 - DNA, 25 bp, Homo sapien
tacgtgcctaacagtagctctggga

SEQ ID NO: 1682790 - DNA, 25 bp, Homo sapien
cgcctgtggatctaataaagtgtct

SEQ ID NO: 1682791 - DNA, 25 bp, Homo sapien
aataccagattgttggctgggtgcg

SEQ ID NO: 1682792 - DNA, 25 bp, Homo sapien
cagtaggcaggcgtttcacggaata

SEQ ID NO: 1682793 - DNA, 25 bp, Homo sapien
tatacatagaccttgtgaccacaga

SEQ ID NO: 1682794 - DNA, 25 bp, Homo sapien
gggtaccagatgagaccatgtctct

SEQ ID NO: 1682795 - DNA, 25 bp, Homo sapien
taccattgcatggtgcactcctcct

SEQ ID NO: 1682796 - DNA, 25 bp, Homo sapien
gagtcttcacatcaccaccctttta

SEQ ID NO: 1682797 - DNA, 25 bp, Homo sapien
tactttaataaatggagacgtggcc

SEQ ID NO: 1682798 - DNA, 25 bp, Homo sapien
gacgtggcctgaattgtagtattat

SEQ ID NO: 1682799 - DNA, 25 bp, Homo sapien
tagcatcatgttctcgagtcttcac

SEQ ID NO: 1682800 - DNA, 25 bp, Homo sapien
gcggcgtgtcacgtgcctcaccgct

SEQ ID NO: 1682801 - DNA, 25 bp, Homo sapien
gggcggcagcgaaacctcagcacgc

SEQ ID NO: 1682802 - DNA, 25 bp, Homo sapien
ccgtgggcctcagcggaagaccggg

SEQ ID NO: 1682803 - DNA, 25 bp, Homo sapien
tctctgcgctctccgacggtctggg

SEQ ID NO: 1682804 - DNA, 25 bp, Homo sapien
atgagccaagattgagccaccacac

SEQ ID NO: 1682805 - DNA, 25 bp, Homo sapien
caatgagccaagattgagccaccac

SEQ ID NO: 1682806 - DNA, 25 bp, Homo sapien
gcttgcttgtaatcccagttacgtg

SEQ ID NO: 1682807 - DNA, 25 bp, Homo sapien
gtgcttgcttgtaatcccagttacg

SEQ ID NO: 1682808 - DNA, 25 bp, Homo sapien
aacagacccagtagatctttcaggg

SEQ ID NO: 1682809 - DNA, 25 bp, Homo sapien
tgcaccggggacaatgagcccttga

SEQ ID NO: 1682810 - DNA, 25 bp, Homo sapien
gatctttcagggatagctctggcca

SEQ ID NO: 1682811 - DNA, 25 bp, Homo sapien
gttactacctgctaaaacagaccca

SEQ ID NO: 1682812 - DNA, 25 bp, Homo sapien
tcagtatgctaaaggtcacatccag

SEQ ID NO: 1682813 - DNA, 25 bp, Homo sapien
tagtaagagtatcagtatgctaaag

SEQ ID NO: 1682814 - DNA, 25 bp, Homo sapien
taagagtatcagtatgctaaaggtc

SEQ ID NO: 1682815 - DNA, 25 bp, Homo sapien
gagtatcagtatgctaaaggtcaca

SEQ ID NO: 1682816 - DNA, 25 bp, Homo sapien
tatgtgttttgacttgatcatagct

SEQ ID NO: 1682817 - DNA, 25 bp, Homo sapien
attatgtgttttgacttgatcatag

SEQ ID NO: 1682818 - DNA, 25 bp, Homo sapien
tgtgttttgacttgatcatagctca

SEQ ID NO: 1682819 - DNA, 25 bp, Homo sapien
actataagcattcaccaccatgtct

SEQ ID NO: 1682820 - DNA, 25 bp, Homo sapien
ttacaggagcccaccaccatatctg

SEQ ID NO: 1682821 - DNA, 25 bp, Homo sapien
atttttgtacttttagtggagacag

SEQ ID NO: 1682822 - DNA, 25 bp, Homo sapien
ctggctaatttttgtacttttagtg

SEQ ID NO: 1682823 - DNA, 25 bp, Homo sapien
attacaggagcccaccaccatatct

SEQ ID NO: 1682824 - DNA, 25 bp, Homo sapien
gctatctcagtttgagctagccaca

SEQ ID NO: 1682825 - DNA, 25 bp, Homo sapien
taagttagttatctcaagagagggc

SEQ ID NO: 1682826 - DNA, 25 bp, Homo sapien
aataagtgccgattaggtcatgaag

SEQ ID NO: 1682827 - DNA, 25 bp, Homo sapien
tccagaattgtaaactaaccagtgt

SEQ ID NO: 1682828 - DNA, 25 bp, Homo sapien
ttccccaaatacatcgagtcactag

SEQ ID NO: 1682829 - DNA, 25 bp, Homo sapien
cacttaggatggaggataaagcctt

SEQ ID NO: 1682830 - DNA, 25 bp, Homo sapien
cactagaacctttggaggtagagga

SEQ ID NO: 1682831 - DNA, 25 bp, Homo sapien
gtagatagattctgtattttcccca

SEQ ID NO: 1682832 - DNA, 25 bp, Homo sapien
gctggcatcagtgggcaccttttcc

SEQ ID NO: 1682833 - DNA, 25 bp, Homo sapien
ggtacttcttcaagcccgctgcaag

SEQ ID NO: 1682834 - DNA, 25 bp, Homo sapien
actaacaggacccttccttggctgt

SEQ ID NO: 1682835 - DNA, 25 bp, Homo sapien
ccttccttggctgtcgggtgggcct

SEQ ID NO: 1682836 - DNA, 25 bp, Homo sapien
gcagggctgtaacagggtcccacag

SEQ ID NO: 1682837 - DNA, 25 bp, Homo sapien
cctgaatgtcgtttagcttggtaaa

SEQ ID NO: 1682838 - DNA, 25 bp, Homo sapien
ctcctgaatgtcgtttagcttggta

SEQ ID NO: 1682839 - DNA, 25 bp, Homo sapien
tgaatgtcgtttagcttggtaaact

SEQ ID NO: 1682840 - DNA, 25 bp, Homo sapien
tcctgaatgtcgtttagcttggtaa

SEQ ID NO: 1682841 - DNA, 25 bp, Homo sapien
tttgtcaaacacctgatacctccag

SEQ ID NO: 1682842 - DNA, 25 bp, Homo sapien
attaagtctagctctaaatccatga

SEQ ID NO: 1682843 - DNA, 25 bp, Homo sapien
cttcaaaggaccacaattaagtcta

SEQ ID NO: 1682844 - DNA, 25 bp, Homo sapien
ttgtcaaacacctgatacctccagg

SEQ ID NO: 1682845 - DNA, 25 bp, Homo sapien
agagaggcgccgaggcaggcttgaa

SEQ ID NO: 1682846 - DNA, 25 bp, Homo sapien
ttgaagcccactcggacagtcgctc

SEQ ID NO: 1682847 - DNA, 25 bp, Homo sapien
ccagctcccacatagtttcaattcc

SEQ ID NO: 1682848 - DNA, 25 bp, Homo sapien
ggacagtcgctctccaactcagttg

SEQ ID NO: 1682849 - DNA, 25 bp, Homo sapien
taaacttgttcccaattgttgagca

SEQ ID NO: 1682850 - DNA, 25 bp, Homo sapien
tggatgacaataaacttgttcccaa

SEQ ID NO: 1682851 - DNA, 25 bp, Homo sapien
ctggatgacaataaacttgttccca

SEQ ID NO: 1682852 - DNA, 25 bp, Homo sapien
caataaacttgttcccaattgttga

SEQ ID NO: 1682853 - DNA, 25 bp, Homo sapien
tcagtggcaagtctgcgatggcagc

SEQ ID NO: 1682854 - DNA, 25 bp, Homo sapien
ggaagtcagtggcaagtctgcgatg

SEQ ID NO: 1682855 - DNA, 25 bp, Homo sapien
gggtggaagtcagtggcaagtctgc

SEQ ID NO: 1682856 - DNA, 25 bp, Homo sapien
aagtcagtggcaagtctgcgatggc

SEQ ID NO: 1682857 - DNA, 25 bp, Homo sapien
gattaccactctgtagcaataggcc

SEQ ID NO: 1682858 - DNA, 25 bp, Homo sapien
ggaacagttctctgatgagagcaca

SEQ ID NO: 1682859 - DNA, 25 bp, Homo sapien
tctagctgacactaactgctgagga

SEQ ID NO: 1682860 - DNA, 25 bp, Homo sapien
gaaagagcatcccaggtagcaaaaa

SEQ ID NO: 1682861 - DNA, 25 bp, Homo sapien
cctgagatattctgccatctacaat

SEQ ID NO: 1682862 - DNA, 25 bp, Homo sapien
gaaggtgttgtcaaataacgtgaga

SEQ ID NO: 1682863 - DNA, 25 bp, Homo sapien
tagtagtcaggcataactcttcttc

SEQ ID NO: 1682864 - DNA, 25 bp, Homo sapien
tctacaatgccagtagtagtcaggc

SEQ ID NO: 1682865 - DNA, 25 bp, Homo sapien
gaaggccatgcgtttggactccaag

SEQ ID NO: 1682866 - DNA, 25 bp, Homo sapien
ctgtagagtagaccagggcccttcc

SEQ ID NO: 1682867 - DNA, 25 bp, Homo sapien
tcctactccaaggtgtggaacatgc

SEQ ID NO: 1682868 - DNA, 25 bp, Homo sapien
aagttcttccgtgcttaagccactg

SEQ ID NO: 1682869 - DNA, 25 bp, Homo sapien
tgtcaggtaccacagtccagagcat

SEQ ID NO: 1682870 - DNA, 25 bp, Homo sapien
gaaaccggacactgtcagaggtccc

SEQ ID NO: 1682871 - DNA, 25 bp, Homo sapien
tcagaggtcccaatttgtcaggtac

SEQ ID NO: 1682872 - DNA, 25 bp, Homo sapien
tggaggaggaaaccggacactgtca

SEQ ID NO: 1682873 - DNA, 25 bp, Homo sapien
cagactcgcacgtgtctttaacatc

SEQ ID NO: 1682874 - DNA, 25 bp, Homo sapien
tactttctcagactcgcacgtgtct

SEQ ID NO: 1682875 - DNA, 25 bp, Homo sapien
tgctgtctactttctcagactcgca

SEQ ID NO: 1682876 - DNA, 25 bp, Homo sapien
gcacgtgtctttaacatctctgccg

SEQ ID NO: 1682877 - DNA, 25 bp, Homo sapien
gaacgctcactagtggacccatcag

SEQ ID NO: 1682878 - DNA, 25 bp, Homo sapien
tctcccaaactgatgcgcacaaatg

SEQ ID NO: 1682879 - DNA, 25 bp, Homo sapien
gatgttatctctaccccatgtccac

SEQ ID NO: 1682880 - DNA, 25 bp, Homo sapien
agcacggaacggacactgctgttca

SEQ ID NO: 1682881 - DNA, 25 bp, Homo sapien
gcgggcgggcggctttgtctctacg

SEQ ID NO: 1682882 - DNA, 25 bp, Homo sapien
ctcgcgcgaggagctagcgggctgg

SEQ ID NO: 1682883 - DNA, 25 bp, Homo sapien
gctttgtctctacggcgctgagccg

SEQ ID NO: 1682884 - DNA, 25 bp, Homo sapien
cccgtggaggaggagctcgcgcgag

SEQ ID NO: 1682885 - DNA, 25 bp, Homo sapien
gatggcacgccaagaaggaaaataa

SEQ ID NO: 1682886 - DNA, 25 bp, Homo sapien
ccaaaagcctcgatggcacgccaag

SEQ ID NO: 1682887 - DNA, 25 bp, Homo sapien
gcacagcccctcaagttggtgccag

SEQ ID NO: 1682888 - DNA, 25 bp, Homo sapien
ccctcaagttggtgccaggacggcg

SEQ ID NO: 1682889 - DNA, 25 bp, Homo sapien
acccagcagatgtcattaaaacaac

SEQ ID NO: 1682890 - DNA, 25 bp, Homo sapien
ctttcaaacccagcagatgtcatta

SEQ ID NO: 1682891 - DNA, 25 bp, Homo sapien
ttcaaacccagcagatgtcattaaa

SEQ ID NO: 1682892 - DNA, 25 bp, Homo sapien
gatgtcattaaaacaactaacgtaa

SEQ ID NO: 1682893 - DNA, 25 bp, Homo sapien
gggcactgctgaagtaccatcatct

SEQ ID NO: 1682894 - DNA, 25 bp, Homo sapien
tgcaaaatcatctaaacgggctctg

SEQ ID NO: 1682895 - DNA, 25 bp, Homo sapien
gaatgccctggcaacgaagtggcag

SEQ ID NO: 1682896 - DNA, 25 bp, Homo sapien
tgggcttgatggctaaagaccttcc

SEQ ID NO: 1682897 - DNA, 25 bp, Homo sapien
actctattaaagattaccgcaggat

SEQ ID NO: 1682898 - DNA, 25 bp, Homo sapien
ttaccgcaggatgcccacatgtcag

SEQ ID NO: 1682899 - DNA, 25 bp, Homo sapien
tattaaagattaccgcaggatgccc

SEQ ID NO: 1682900 - DNA, 25 bp, Homo sapien
taaagattaccgcaggatgcccaca

SEQ ID NO: 1682901 - DNA, 25 bp, Homo sapien
tctaagaacggctcttctgggcaag

SEQ ID NO: 1682902 - DNA, 25 bp, Homo sapien
tcatcaagtcctgcctctaagaacg

SEQ ID NO: 1682903 - DNA, 25 bp, Homo sapien
gccttgagctctggtagcatccctg

SEQ ID NO: 1682904 - DNA, 25 bp, Homo sapien
caaggccagctctagcaaacctatt

SEQ ID NO: 1682905 - DNA, 25 bp, Homo sapien
aaatctggcagcgatgcaaaaaggc

SEQ ID NO: 1682906 - DNA, 25 bp, Homo sapien
ggctttgattaaggtgcccctctga

SEQ ID NO: 1682907 - DNA, 25 bp, Homo sapien
gcaggataagtagtgaaagaaacca

SEQ ID NO: 1682908 - DNA, 25 bp, Homo sapien
catatttataaaggccacatgaagg

SEQ ID NO: 1682909 - DNA, 25 bp, Homo sapien
aaagtctatgatcttgtagaggcat

SEQ ID NO: 1682910 - DNA, 25 bp, Homo sapien
cctatgacaacactccagcactttg

SEQ ID NO: 1682911 - DNA, 25 bp, Homo sapien
cctctgtttcagattgtatcgattg

SEQ ID NO: 1682912 - DNA, 25 bp, Homo sapien
gattgtaacagattttgcactccag

SEQ ID NO: 1682913 - DNA, 25 bp, Homo sapien
caagtttacaaggatgttgttgtca

SEQ ID NO: 1682914 - DNA, 25 bp, Homo sapien
tcatcgggcaggctactaacttcat

SEQ ID NO: 1682915 - DNA, 25 bp, Homo sapien
cctttgcctccacaagtcaagttta

SEQ ID NO: 1682916 - DNA, 25 bp, Homo sapien
acaaggatgttgttgtcatcgggca

SEQ ID NO: 1682917 - DNA, 25 bp, Homo sapien
cacccggatggatgtctgaaacagc

SEQ ID NO: 1682918 - DNA, 25 bp, Homo sapien
gaaacagcagggacgtgcagttcca

SEQ ID NO: 1682919 - DNA, 25 bp, Homo sapien
tgacagagtcgaaactcgcaggcct

SEQ ID NO: 1682920 - DNA, 25 bp, Homo sapien
tacaccataagaataacgaggctcg

SEQ ID NO: 1682921 - DNA, 25 bp, Homo sapien
ccatgaatacgaaaggagggatcca

SEQ ID NO: 1682922 - DNA, 25 bp, Homo sapien
aattctagggtgttccaataccagg

SEQ ID NO: 1682923 - DNA, 25 bp, Homo sapien
ggatcgccgaccacagagagtgact

SEQ ID NO: 1682924 - DNA, 25 bp, Homo sapien
gctgtcagtgctccatgaagtgtga

SEQ ID NO: 1682925 - DNA, 25 bp, Homo sapien
tttcatcaataataaccgctgtatg

SEQ ID NO: 1682926 - DNA, 25 bp, Homo sapien
taaccgctgtatgagaagttccttc

SEQ ID NO: 1682927 - DNA, 25 bp, Homo sapien
taataaccgctgtatgagaagttcc

SEQ ID NO: 1682928 - DNA, 25 bp, Homo sapien
caataataaccgctgtatgagaagt

SEQ ID NO: 1682929 - DNA, 25 bp, Homo sapien
tacccatgtccagagctttctagaa

SEQ ID NO: 1682930 - DNA, 25 bp, Homo sapien
gaatgggcgcactgtacctgcatca

SEQ ID NO: 1682931 - DNA, 25 bp, Homo sapien
gactgccacaatacacggagacaca

SEQ ID NO: 1682932 - DNA, 25 bp, Homo sapien
gagaagcaaaacacatcgtacccat

SEQ ID NO: 1682933 - DNA, 25 bp, Homo sapien
caaggatttgttgtgtatacgctga

SEQ ID NO: 1682934 - DNA, 25 bp, Homo sapien
ttcagtccaattcaacaaggatttg

SEQ ID NO: 1682935 - DNA, 25 bp, Homo sapien
gagagattaacagctagactccctt

SEQ ID NO: 1682936 - DNA, 25 bp, Homo sapien
gttgtgtatacgctgaccattttcc

SEQ ID NO: 1682937 - DNA, 25 bp, Homo sapien
cagcagcgctggtcatgggaagatc

SEQ ID NO: 1682938 - DNA, 25 bp, Homo sapien
ggagccgtgagtcatacagcagcgc

SEQ ID NO: 1682939 - DNA, 25 bp, Homo sapien
gagacatctcctttgatatgttccg

SEQ ID NO: 1682940 - DNA, 25 bp, Homo sapien
ccagagttgtcaagcggccaggaga

SEQ ID NO: 1682941 - DNA, 25 bp, Homo sapien
gcagcaaaagtatgaggcacttgga

SEQ ID NO: 1682942 - DNA, 25 bp, Homo sapien
tctgcccaacggtgtccaccaagaa

SEQ ID NO: 1682943 - DNA, 25 bp, Homo sapien
aatcaatgctaacaggctggccgac

SEQ ID NO: 1682944 - DNA, 25 bp, Homo sapien
caccctcgcttctgtggttagcagg

SEQ ID NO: 1682945 - DNA, 25 bp, Homo sapien
ggtttaagtcctgagggatcatcca

SEQ ID NO: 1682946 - DNA, 25 bp, Homo sapien
aaagcgatgttctggtgttgctgag

SEQ ID NO: 1682947 - DNA, 25 bp, Homo sapien
tacgttctgattaaggagggattgg

SEQ ID NO: 1682948 - DNA, 25 bp, Homo sapien
gggggaagcatcctcccttcagatg

SEQ ID NO: 1682949 - DNA, 25 bp, Homo sapien
ctgcattctgtgatccgctgataac

SEQ ID NO: 1682950 - DNA, 25 bp, Homo sapien
acacgttccctggagtcactacagc

SEQ ID NO: 1682951 - DNA, 25 bp, Homo sapien
gcattctgtgatccgctgataacca

SEQ ID NO: 1682952 - DNA, 25 bp, Homo sapien
tgttcacacgttccctggagtcact

SEQ ID NO: 1682953 - DNA, 25 bp, Homo sapien
ttttctgaaactacacgcagggcca

SEQ ID NO: 1682954 - DNA, 25 bp, Homo sapien
gatgtcaagttgatagcaggacaaa

SEQ ID NO: 1682955 - DNA, 25 bp, Homo sapien
tttgacaacctgttaacaaggtgtg

SEQ ID NO: 1682956 - DNA, 25 bp, Homo sapien
aactctgtttcagtagggagcaaac

SEQ ID NO: 1682957 - DNA, 25 bp, Homo sapien
gataagcagttattacttggaagag

SEQ ID NO: 1682958 - DNA, 25 bp, Homo sapien
agagaggaagaaagcgaatgaaatg

SEQ ID NO: 1682959 - DNA, 25 bp, Homo sapien
catcctaagagagccatgaattctg

SEQ ID NO: 1682960 - DNA, 25 bp, Homo sapien
tccctccatcctaagagagccatga

SEQ ID NO: 1682961 - DNA, 25 bp, Homo sapien
taattgtacagtgatgcctggcccc

SEQ ID NO: 1682962 - DNA, 25 bp, Homo sapien
agagccaggttgatctgtaatagaa

SEQ ID NO: 1682963 - DNA, 25 bp, Homo sapien
tcaaacactagcaaatagtaaaaca

SEQ ID NO: 1682964 - DNA, 25 bp, Homo sapien
catctgcaggttgtcaaacactagc

SEQ ID NO: 1682965 - DNA, 25 bp, Homo sapien
tttgcacaaataagcgctgagtagg

SEQ ID NO: 1682966 - DNA, 25 bp, Homo sapien
tgcagttgaattgcttgtgaaagct

SEQ ID NO: 1682967 - DNA, 25 bp, Homo sapien
cagttggcagtagaaaaagatcctt

SEQ ID NO: 1682968 - DNA, 25 bp, Homo sapien
tataagcctgcagttgaattgcttg

SEQ ID NO: 1682969 - DNA, 25 bp, Homo sapien
ggctctgccattctgaagccaggag

SEQ ID NO: 1682970 - DNA, 25 bp, Homo sapien
agcagtaaggccacactggctctgc

SEQ ID NO: 1682971 - DNA, 25 bp, Homo sapien
cttgtgagcagtaaggccacactgg

SEQ ID NO: 1682972 - DNA, 25 bp, Homo sapien
gggccacaccctgaggacggcccat

SEQ ID NO: 1682973 - DNA, 25 bp, Homo sapien
atcactcctgtcagtgtctgcagaa

SEQ ID NO: 1682974 - DNA, 25 bp, Homo sapien
ctacagctctacacttccagcctct

SEQ ID NO: 1682975 - DNA, 25 bp, Homo sapien
tccagcctctgcatcactcctgtca

SEQ ID NO: 1682976 - DNA, 25 bp, Homo sapien
tctgcagaaacctcagggaaaggaa

SEQ ID NO: 1682977 - DNA, 25 bp, Homo sapien
taagaaagtctacacgataccagga

SEQ ID NO: 1682978 - DNA, 25 bp, Homo sapien
catggcgtggaattcagctgcaccc

SEQ ID NO: 1682979 - DNA, 25 bp, Homo sapien
gataccaggacaactgtcggccctg

SEQ ID NO: 1682980 - DNA, 25 bp, Homo sapien
tccccatgaggatcgagtgacccat

SEQ ID NO: 1682981 - DNA, 25 bp, Homo sapien
ggtatggaaaagtctggctgctgac

SEQ ID NO: 1682982 - DNA, 25 bp, Homo sapien
tggtatggaaaagtctggctgctga

SEQ ID NO: 1682983 - DNA, 25 bp, Homo sapien
ctgagccagtgactgtagggtagta

SEQ ID NO: 1682984 - DNA, 25 bp, Homo sapien
gaatctgagccagtgactgtagggt

SEQ ID NO: 1682985 - DNA, 25 bp, Homo sapien
actgacttcaggcctgcggctggcc

SEQ ID NO: 1682986 - DNA, 25 bp, Homo sapien
gaggcaggaatgacgtcctgtctcc

SEQ ID NO: 1682987 - DNA, 25 bp, Homo sapien
caagaccatgcctctgtttagtggc

SEQ ID NO: 1682988 - DNA, 25 bp, Homo sapien
tccattttagggatacgcgtccagc

SEQ ID NO: 1682989 - DNA, 25 bp, Homo sapien
tccccagggctttgtaccaagacca

SEQ ID NO: 1682990 - DNA, 25 bp, Homo sapien
tagtggcacacaacggaagcatcag

SEQ ID NO: 1682991 - DNA, 25 bp, Homo sapien
gtacccatgaaccatgcagggcatc

SEQ ID NO: 1682992 - DNA, 25 bp, Homo sapien
aaagggcatcccaagacagggagtg

SEQ ID NO: 1682993 - DNA, 25 bp, Homo sapien
cgaggtgggtgtatccattgggccc

SEQ ID NO: 1682994 - DNA, 25 bp, Homo sapien
cactacgacgatccggcctcgaggt

SEQ ID NO: 1682995 - DNA, 25 bp, Homo sapien
gagtgccgttgcaacactacgacga

SEQ ID NO: 1682996 - DNA, 25 bp, Homo sapien
taatgtatagtactacagtagtcac

SEQ ID NO: 1682997 - DNA, 25 bp, Homo sapien
aattttactatccatttgtctctaa

SEQ ID NO: 1682998 - DNA, 25 bp, Homo sapien
tacagtagtcacatatagtaagcat

SEQ ID NO: 1682999 - DNA, 25 bp, Homo sapien
gaatgagctaagacacagtagtaat

SEQ ID NO: 1683000 - DNA, 25 bp, Homo sapien
acaatcacagttgtctctctcagca

SEQ ID NO: 1683001 - DNA, 25 bp, Homo sapien
cggcttgtgtgacaattcctgccca

SEQ ID NO: 1683002 - DNA, 25 bp, Homo sapien
tgtcagggctatttaatacagtcca

SEQ ID NO: 1683003 - DNA, 25 bp, Homo sapien
gggaagatgaatattgcggccaggg

SEQ ID NO: 1683004 - DNA, 25 bp, Homo sapien
gaggtaactatcatagctggcacag

SEQ ID NO: 1683005 - DNA, 25 bp, Homo sapien
cattaggccccggttctggacttga

SEQ ID NO: 1683006 - DNA, 25 bp, Homo sapien
gctggcacagtttagttttcggtga

SEQ ID NO: 1683007 - DNA, 25 bp, Homo sapien
gctttgttctggtgtgctgcctctt

SEQ ID NO: 1683008 - DNA, 25 bp, Homo sapien
agacggtagtgacaagatcttgacc

SEQ ID NO: 1683009 - DNA, 25 bp, Homo sapien
gatcttgaccctaaaacttcatggt

SEQ ID NO: 1683010 - DNA, 25 bp, Homo sapien
gaatgaacgaatgagtggaacctca

SEQ ID NO: 1683011 - DNA, 25 bp, Homo sapien
caccctctgggtggcctttagtcag

SEQ ID NO: 1683012 - DNA, 25 bp, Homo sapien
ctgataaattgtcttgaaaatagcc

SEQ ID NO: 1683013 - DNA, 25 bp, Homo sapien
ccagagcccactgctatgggatcat

SEQ ID NO: 1683014 - DNA, 25 bp, Homo sapien
agagcccactgctatgggatcatgt

SEQ ID NO: 1683015 - DNA, 25 bp, Homo sapien
tagccaaactcaaaatggcaaagcc

SEQ ID NO: 1683016 - DNA, 25 bp, Homo sapien
gttttggtctggcagtggtcctaaa

SEQ ID NO: 1683017 - DNA, 25 bp, Homo sapien
tcctaaagatggaatagcagcattg

SEQ ID NO: 1683018 - DNA, 25 bp, Homo sapien
cagtggtcctaaagatggaatagca

SEQ ID NO: 1683019 - DNA, 25 bp, Homo sapien
tctggcagtggtcctaaagatggaa

SEQ ID NO: 1683020 - DNA, 25 bp, Homo sapien
ccagttgaacccagaaacagttcca

SEQ ID NO: 1683021 - DNA, 25 bp, Homo sapien
gaaggtatcaggacataaaattatc

SEQ ID NO: 1683022 - DNA, 25 bp, Homo sapien
ctgcgataaatatgaaggtatcagg

SEQ ID NO: 1683023 - DNA, 25 bp, Homo sapien
aaccacacatttgggaacactccat

SEQ ID NO: 1683024 - DNA, 25 bp, Homo sapien
gggacacttatagtcttcagaatct

SEQ ID NO: 1683025 - DNA, 25 bp, Homo sapien
agaatctggcttcaaatgttttggg

SEQ ID NO: 1683026 - DNA, 25 bp, Homo sapien
agggacacttatagtcttcagaatc

SEQ ID NO: 1683027 - DNA, 25 bp, Homo sapien
gctgggtcaggggatcccaagtcca

SEQ ID NO: 1683028 - DNA, 25 bp, Homo sapien
tcctctccttcctgtgtgagctggg

SEQ ID NO: 1683029 - DNA, 25 bp, Homo sapien
atcccaagtccagggtgcacttttt

SEQ ID NO: 1683030 - DNA, 25 bp, Homo sapien
ctccttcctgtgtgagctgggtcag

SEQ ID NO: 1683031 - DNA, 25 bp, Homo sapien
tgagaagattatgatgtcgcaaagg

SEQ ID NO: 1683032 - DNA, 25 bp, Homo sapien
attatgatgtcgcaaaggtaaaggc

SEQ ID NO: 1683033 - DNA, 25 bp, Homo sapien
tgatgtcgcaaaggtaaaggcagcc

SEQ ID NO: 1683034 - DNA, 25 bp, Homo sapien
taaaggcagcctttctcatgtctca

SEQ ID NO: 1683035 - DNA, 25 bp, Homo sapien
cagaaatgacagagcgtttatctct

SEQ ID NO: 1683036 - DNA, 25 bp, Homo sapien
agaaatgacagagcgtttatctcta

SEQ ID NO: 1683037 - DNA, 25 bp, Homo sapien
gaaatgacagagcgtttatctctac

SEQ ID NO: 1683038 - DNA, 25 bp, Homo sapien
ttccttgctgtcttgtagccctggg

SEQ ID NO: 1683039 - DNA, 25 bp, Homo sapien
gaaggtctcccccacgtgcacagac

SEQ ID NO: 1683040 - DNA, 25 bp, Homo sapien
gatggttctgaggaaggccagggaa

SEQ ID NO: 1683041 - DNA, 25 bp, Homo sapien
gggatgctgcagacatgatggttct

SEQ ID NO: 1683042 - DNA, 25 bp, Homo sapien
gaattcaagcaacatcagcggcagc

SEQ ID NO: 1683043 - DNA, 25 bp, Homo sapien
cactgaccctcaactgtgtttgcag

SEQ ID NO: 1683044 - DNA, 25 bp, Homo sapien
agcggcagcacatgagtagcctctg

SEQ ID NO: 1683045 - DNA, 25 bp, Homo sapien
ggtgctaacatagccctccatacgc

SEQ ID NO: 1683046 - DNA, 25 bp, Homo sapien
ctttggctgtcaaaaacagggtagc

SEQ ID NO: 1683047 - DNA, 25 bp, Homo sapien
cagggtagcttgagaaaatgggcac

SEQ ID NO: 1683048 - DNA, 25 bp, Homo sapien
tctaaagcagtgattgcaaatccag

SEQ ID NO: 1683049 - DNA, 25 bp, Homo sapien
gatcctattagagctcctttggctg

SEQ ID NO: 1683050 - DNA, 25 bp, Homo sapien
cagctctctacccagcctgacttcc

SEQ ID NO: 1683051 - DNA, 25 bp, Homo sapien
ctggctggactgatctgcaggatga

SEQ ID NO: 1683052 - DNA, 25 bp, Homo sapien
acccagctctctacccagcctgact

SEQ ID NO: 1683053 - DNA, 25 bp, Homo sapien
agcctgacttcctggctggactgat

SEQ ID NO: 1683054 - DNA, 25 bp, Homo sapien
atgactgctgccagcaatgggggca

SEQ ID NO: 1683055 - DNA, 25 bp, Homo sapien
gactgctgccagcaatgggggcaaa

SEQ ID NO: 1683056 - DNA, 25 bp, Homo sapien
tgccagcaatgggggcaaaacccat

SEQ ID NO: 1683057 - DNA, 25 bp, Homo sapien
tgctgccagcaatgggggcaaaacc

SEQ ID NO: 1683058 - DNA, 25 bp, Homo sapien
agagcttcttgcctttctgaaacca

SEQ ID NO: 1683059 - DNA, 25 bp, Homo sapien
gagcttcttgcctttctgaaaccac

SEQ ID NO: 1683060 - DNA, 25 bp, Homo sapien
gttcttcctcgaatgtacgagaggg

SEQ ID NO: 1683061 - DNA, 25 bp, Homo sapien
cctcgaatgtacgagaggggcttac

SEQ ID NO: 1683062 - DNA, 25 bp, Homo sapien
ttgtgttcttcctcgaatgtacgag

SEQ ID NO: 1683063 - DNA, 25 bp, Homo sapien
gtgttcttcctcgaatgtacgagag

SEQ ID NO: 1683064 - DNA, 25 bp, Homo sapien
accagacagtatttcgcagcgtgtg

SEQ ID NO: 1683065 - DNA, 25 bp, Homo sapien
cagtatttcgcagcgtgtgtctggc

SEQ ID NO: 1683066 - DNA, 25 bp, Homo sapien
tatttcgcagcgtgtgtctggcgtg

SEQ ID NO: 1683067 - DNA, 25 bp, Homo sapien
cagacagtatttcgcagcgtgtgtc

SEQ ID NO: 1683068 - DNA, 25 bp, Homo sapien
gcattttcaggctaactacagctac

SEQ ID NO: 1683069 - DNA, 25 bp, Homo sapien
ctgaggaagcattttcaggctaact

SEQ ID NO: 1683070 - DNA, 25 bp, Homo sapien
gaagagatctctgatgaaggccatt

SEQ ID NO: 1683071 - DNA, 25 bp, Homo sapien
atgaagagatctctgatgaaggcca

SEQ ID NO: 1683072 - DNA, 25 bp, Homo sapien
taaaatgcccaaatgcccgaactct

SEQ ID NO: 1683073 - DNA, 25 bp, Homo sapien
tctagagttaattaatattgccacc

SEQ ID NO: 1683074 - DNA, 25 bp, Homo sapien
tattgccaccctttgccctaaaatg

SEQ ID NO: 1683075 - DNA, 25 bp, Homo sapien
tgaccagtacccttgttccactatg

SEQ ID NO: 1683076 - DNA, 25 bp, Homo sapien
aagcgggtggcgcgccctcctagtc

SEQ ID NO: 1683077 - DNA, 25 bp, Homo sapien
ccgagttcgcgtcgctgctgcggct

SEQ ID NO: 1683078 - DNA, 25 bp, Homo sapien
gttcgggaacttccctgcgcgccag

SEQ ID NO: 1683079 - DNA, 25 bp, Homo sapien
ggctgcccttttatgcccgcgcgtt

SEQ ID NO: 1683080 - DNA, 25 bp, Homo sapien
cgcagctcaggagcagaagctggag

SEQ ID NO: 1683081 - DNA, 25 bp, Homo sapien
aggagcagaagctggaggccgcgcg

SEQ ID NO: 1683082 - DNA, 25 bp, Homo sapien
gcagaagctggaggccgcgcgacat

SEQ ID NO: 1683083 - DNA, 25 bp, Homo sapien
ggagcagaagctggaggccgcgcga

SEQ ID NO: 1683084 - DNA, 25 bp, Homo sapien
ccaccttcacctccggcgtcgcggg

SEQ ID NO: 1683085 - DNA, 25 bp, Homo sapien
cgtgtagggaacctgcggatcccag

SEQ ID NO: 1683086 - DNA, 25 bp, Homo sapien
cccaggagaccgtgtagggaacctg

SEQ ID NO: 1683087 - DNA, 25 bp, Homo sapien
acatcttcggagcaagccaccttca

SEQ ID NO: 1683088 - DNA, 25 bp, Homo sapien
ccacaaaggagatgaccactgataa

SEQ ID NO: 1683089 - DNA, 25 bp, Homo sapien
tatcccacaaaggagatgaccactg

SEQ ID NO: 1683090 - DNA, 25 bp, Homo sapien
ccaagggtatcccacaaaggagatg

SEQ ID NO: 1683091 - DNA, 25 bp, Homo sapien
gggaggaagccaagggtatcccaca

SEQ ID NO: 1683092 - DNA, 25 bp, Homo sapien
ggctcatgcatccacctgatgctct

SEQ ID NO: 1683093 - DNA, 25 bp, Homo sapien
gcagcaaggcctgttcttacacatg

SEQ ID NO: 1683094 - DNA, 25 bp, Homo sapien
gagcagcaaggcctgttcttacaca

SEQ ID NO: 1683095 - DNA, 25 bp, Homo sapien
ctccggctcatgcatccacctgatg

SEQ ID NO: 1683096 - DNA, 25 bp, Homo sapien
gacctctaacaactcaggatttgga

SEQ ID NO: 1683097 - DNA, 25 bp, Homo sapien
ccaactccaccatttagctagctgt

SEQ ID NO: 1683098 - DNA, 25 bp, Homo sapien
ttattaaatagttactctctggaag

SEQ ID NO: 1683099 - DNA, 25 bp, Homo sapien
tgcaaaagtggacaagttatttccc

SEQ ID NO: 1683100 - DNA, 25 bp, Homo sapien
gaagaggaccctttgttggatccca

SEQ ID NO: 1683101 - DNA, 25 bp, Homo sapien
caagatgctacatggtgccggagga

SEQ ID NO: 1683102 - DNA, 25 bp, Homo sapien
tgaaaacccactgcaagggactctg

SEQ ID NO: 1683103 - DNA, 25 bp, Homo sapien
tatatgtcactttcgaggcacctga

SEQ ID NO: 1683104 - DNA, 25 bp, Homo sapien
gcaatgtattgaaatcttgtcccta

SEQ ID NO: 1683105 - DNA, 25 bp, Homo sapien
aaagataaatcgattggctcatgcc

SEQ ID NO: 1683106 - DNA, 25 bp, Homo sapien
cacacccagtctattacaactttaa

SEQ ID NO: 1683107 - DNA, 25 bp, Homo sapien
taaaagataaatcgattggctcatg

SEQ ID NO: 1683108 - DNA, 25 bp, Homo sapien
agggattacggaaacatctttagag

SEQ ID NO: 1683109 - DNA, 25 bp, Homo sapien
tgcttttagtcttgccctacataaa

SEQ ID NO: 1683110 - DNA, 25 bp, Homo sapien
ccaggagtagccaggaagggattac

SEQ ID NO: 1683111 - DNA, 25 bp, Homo sapien
tgcccagctctattttgagctaatg

SEQ ID NO: 1683112 - DNA, 25 bp, Homo sapien
cagtagactggtcctccaagaaagc

SEQ ID NO: 1683113 - DNA, 25 bp, Homo sapien
cccaatttgggatatgcagtagact

SEQ ID NO: 1683114 - DNA, 25 bp, Homo sapien
tctaatcggtaaccccgaggactgc

SEQ ID NO: 1683115 - DNA, 25 bp, Homo sapien
caaccactggaagctaagaactgga

SEQ ID NO: 1683116 - DNA, 25 bp, Homo sapien
gctttgtcccctgggcttacatgcc

SEQ ID NO: 1683117 - DNA, 25 bp, Homo sapien
tcaaggcctgatttgaatcagaacc

SEQ ID NO: 1683118 - DNA, 25 bp, Homo sapien
accccgcaccaccatgtaaataagg

SEQ ID NO: 1683119 - DNA, 25 bp, Homo sapien
gactcctaatgataaggcaccccgc

SEQ ID NO: 1683120 - DNA, 25 bp, Homo sapien
gttgtcctagaagtcccaatctctg

SEQ ID NO: 1683121 - DNA, 25 bp, Homo sapien
tgagccccatttcgtgatctggagc

SEQ ID NO: 1683122 - DNA, 25 bp, Homo sapien
catgtgttagctgggtcatcttcca

SEQ ID NO: 1683123 - DNA, 25 bp, Homo sapien
caatctctgctctagggagaaactg

SEQ ID NO: 1683124 - DNA, 25 bp, Homo sapien
tactgggtctaacagacagagctgg

SEQ ID NO: 1683125 - DNA, 25 bp, Homo sapien
attggcattggactgagctggaacc

SEQ ID NO: 1683126 - DNA, 25 bp, Homo sapien
cactgagctggcgtgaagatactta

SEQ ID NO: 1683127 - DNA, 25 bp, Homo sapien
catatcgatcacacagaaagccctg

SEQ ID NO: 1683128 - DNA, 25 bp, Homo sapien
tgtgtctaggatggcctgaaaggcc

SEQ ID NO: 1683129 - DNA, 25 bp, Homo sapien
gaaataattagctcggcccagtccc

SEQ ID NO: 1683130 - DNA, 25 bp, Homo sapien
agagaccagagaccgaggcccatcc

SEQ ID NO: 1683131 - DNA, 25 bp, Homo sapien
gtccccattccgatgtccaatcttg

SEQ ID NO: 1683132 - DNA, 25 bp, Homo sapien
ccccttctgatgatagtgctgtccc

SEQ ID NO: 1683133 - DNA, 25 bp, Homo sapien
gcagagtgcacctgtatgtccccga

SEQ ID NO: 1683134 - DNA, 25 bp, Homo sapien
taggtttctctgcccatccgggtcc

SEQ ID NO: 1683135 - DNA, 25 bp, Homo sapien
ccatccgggtcctgcagagtgcacc

SEQ ID NO: 1683136 - DNA, 25 bp, Homo sapien
agtgcacctgtatgtccccgagttg

SEQ ID NO: 1683137 - DNA, 25 bp, Homo sapien
tctagagctacactccaaaagagag

SEQ ID NO: 1683138 - DNA, 25 bp, Homo sapien
gccacagatgtgatccaaagctcta

SEQ ID NO: 1683139 - DNA, 25 bp, Homo sapien
aatcaacggttgtacggaatcaggg

SEQ ID NO: 1683140 - DNA, 25 bp, Homo sapien
gacatgcttgcagcggatttccact

SEQ ID NO: 1683141 - DNA, 25 bp, Homo sapien
tttagcccagggacagacatgaagg

SEQ ID NO: 1683142 - DNA, 25 bp, Homo sapien
catggttgggtggaagaacaactcc

SEQ ID NO: 1683143 - DNA, 25 bp, Homo sapien
gagccaatggctagatctccagaga

SEQ ID NO: 1683144 - DNA, 25 bp, Homo sapien
ttcaagctctttcggcaagggtgcc

SEQ ID NO: 1683145 - DNA, 25 bp, Homo sapien
tgtgtctggctgcatgcgactctca

SEQ ID NO: 1683146 - DNA, 25 bp, Homo sapien
caggatgaacgacagtaacagtgac

SEQ ID NO: 1683147 - DNA, 25 bp, Homo sapien
tggctgcatgcgactctcacatggc

SEQ ID NO: 1683148 - DNA, 25 bp, Homo sapien
cgcgcactgtcgctctgtgtctggc

SEQ ID NO: 1683149 - DNA, 25 bp, Homo sapien
aaaaagtaagcgacatgtgaagcca

SEQ ID NO: 1683150 - DNA, 25 bp, Homo sapien
gacatgtgaagccattttaacagga

SEQ ID NO: 1683151 - DNA, 25 bp, Homo sapien
taagcgacatgtgaagccattttaa

SEQ ID NO: 1683152 - DNA, 25 bp, Homo sapien
ctttaaaaaagtaagcgacatgtga

SEQ ID NO: 1683153 - DNA, 25 bp, Homo sapien
gcaggacaatctccgctctgtattt

SEQ ID NO: 1683154 - DNA, 25 bp, Homo sapien
gccagcagcaggacaatctccgctc

SEQ ID NO: 1683155 - DNA, 25 bp, Homo sapien
caatctccgctctgtatttcttaaa

SEQ ID NO: 1683156 - DNA, 25 bp, Homo sapien
gcagcaggacaatctccgctctgta

SEQ ID NO: 1683157 - DNA, 25 bp, Homo sapien
aaaggaggctgatctatcccctggc

SEQ ID NO: 1683158 - DNA, 25 bp, Homo sapien
gaacctgcaaccaacagctcatggg

SEQ ID NO: 1683159 - DNA, 25 bp, Homo sapien
aagaatctctgagggctttgagcca

SEQ ID NO: 1683160 - DNA, 25 bp, Homo sapien
aacttctagcactgcgcctacaggg

SEQ ID NO: 1683161 - DNA, 25 bp, Homo sapien
ctcgttccatgccagctttagaaaa

SEQ ID NO: 1683162 - DNA, 25 bp, Homo sapien
ctgtcttgtgaggagtcactagccc

SEQ ID NO: 1683163 - DNA, 25 bp, Homo sapien
gagaaaagctcgttccatgccagct

SEQ ID NO: 1683164 - DNA, 25 bp, Homo sapien
aaagctcgttccatgccagctttag

SEQ ID NO: 1683165 - DNA, 25 bp, Homo sapien
gcatacatcgctgaaaaggtggcca

SEQ ID NO: 1683166 - DNA, 25 bp, Homo sapien
ggatgccatcttcagcgtaggctca

SEQ ID NO: 1683167 - DNA, 25 bp, Homo sapien
ccaggaggttgaccagatagctgca

SEQ ID NO: 1683168 - DNA, 25 bp, Homo sapien
catgtgatggttttcgaggcctgcc

SEQ ID NO: 1683169 - DNA, 25 bp, Homo sapien
gggcattcatatttcccaagaccct

SEQ ID NO: 1683170 - DNA, 25 bp, Homo sapien
acgggccagctgggggcattcatat

SEQ ID NO: 1683171 - DNA, 25 bp, Homo sapien
tgggggcattcatatttcccaagac

SEQ ID NO: 1683172 - DNA, 25 bp, Homo sapien
gctgggggcattcatatttcccaag

SEQ ID NO: 1683173 - DNA, 25 bp, Homo sapien
caagatcatgcacccagatagtggg

SEQ ID NO: 1683174 - DNA, 25 bp, Homo sapien
gaaaattcaaagagatgtccccaag

SEQ ID NO: 1683175 - DNA, 25 bp, Homo sapien
cattagcccatgcaacagccttgtg

SEQ ID NO: 1683176 - DNA, 25 bp, Homo sapien
aacatgagaaatggatagcaccctc

SEQ ID NO: 1683177 - DNA, 25 bp, Homo sapien
gggacagtgaacatataactcaagc

SEQ ID NO: 1683178 - DNA, 25 bp, Homo sapien
gccaagacagaggtaaaaacactaa

SEQ ID NO: 1683179 - DNA, 25 bp, Homo sapien
catatcttggagtgtgttaggctac

SEQ ID NO: 1683180 - DNA, 25 bp, Homo sapien
gcggctcccgtgtgtccatatcttg

SEQ ID NO: 1683181 - DNA, 25 bp, Homo sapien
tagtaaccattactcatttttccta

SEQ ID NO: 1683182 - DNA, 25 bp, Homo sapien
aaacttacatcatgggggttcattg

SEQ ID NO: 1683183 - DNA, 25 bp, Homo sapien
ggttcattgtacagattatgtaatc

SEQ ID NO: 1683184 - DNA, 25 bp, Homo sapien
cttatgagttgaatataaaacagaa

SEQ ID NO: 1683185 - DNA, 25 bp, Homo sapien
aacatcctagcactcatcccaaagt

SEQ ID NO: 1683186 - DNA, 25 bp, Homo sapien
cctagcactcatcccaaagtcggga

SEQ ID NO: 1683187 - DNA, 25 bp, Homo sapien
tttacaacatcctagcactcatccc

SEQ ID NO: 1683188 - DNA, 25 bp, Homo sapien
atcctagcactcatcccaaagtcgg

SEQ ID NO: 1683189 - DNA, 25 bp, Homo sapien
cacggtgcccggttgcattctgtta

SEQ ID NO: 1683190 - DNA, 25 bp, Homo sapien
gaaaacccaaggctggcaattgaaa

SEQ ID NO: 1683191 - DNA, 25 bp, Homo sapien
aattgaaaagacacgtgcaggagcc

SEQ ID NO: 1683192 - DNA, 25 bp, Homo sapien
taagcagcagctaggatcataagaa

SEQ ID NO: 1683193 - DNA, 25 bp, Homo sapien
tttccttgtgccaacaatccccgat

SEQ ID NO: 1683194 - DNA, 25 bp, Homo sapien
ttttccttgtgccaacaatccccga

SEQ ID NO: 1683195 - DNA, 25 bp, Homo sapien
aacaatccccgatccctctctgacc

SEQ ID NO: 1683196 - DNA, 25 bp, Homo sapien
atccccgatccctctctgaccaaag

SEQ ID NO: 1683197 - DNA, 25 bp, Homo sapien
gaacaacacagactgcccgtgaagg

SEQ ID NO: 1683198 - DNA, 25 bp, Homo sapien
aaagtggaaggacagcaaacaggtg

SEQ ID NO: 1683199 - DNA, 25 bp, Homo sapien
aaaggagcaaatagagaatttggca

SEQ ID NO: 1683200 - DNA, 25 bp, Homo sapien
aagtagctgaacaacacagactgcc

SEQ ID NO: 1683201 - DNA, 25 bp, Homo sapien
tccttgttccccaaattcagtcttc

SEQ ID NO: 1683202 - DNA, 25 bp, Homo sapien
ttcatccttgttccccaaattcagt

SEQ ID NO: 1683203 - DNA, 25 bp, Homo sapien
ttgttccccaaattcagtcttctcc

SEQ ID NO: 1683204 - DNA, 25 bp, Homo sapien
cagtcttctcccgatgcttcccatc

SEQ ID NO: 1683205 - DNA, 25 bp, Homo sapien
cacatagggtttacacacagttgtc

SEQ ID NO: 1683206 - DNA, 25 bp, Homo sapien
gtttacacacagttgtccatttgca

SEQ ID NO: 1683207 - DNA, 25 bp, Homo sapien
tacacacagttgtccatttgcatcc

SEQ ID NO: 1683208 - DNA, 25 bp, Homo sapien
tagggtttacacacagttgtccatt

SEQ ID NO: 1683209 - DNA, 25 bp, Homo sapien
agctaagtgttctgcccatcaccga

SEQ ID NO: 1683210 - DNA, 25 bp, Homo sapien
atcaccgagcgctggatgctgtccg

SEQ ID NO: 1683211 - DNA, 25 bp, Homo sapien
tctgttggtctgcaaaggacagcat

SEQ ID NO: 1683212 - DNA, 25 bp, Homo sapien
tgctgtccgcagcttgggagtgtcc

SEQ ID NO: 1683213 - DNA, 25 bp, Homo sapien
acttgggactccactgccaggaggg

SEQ ID NO: 1683214 - DNA, 25 bp, Homo sapien
agagggacacgaacaaggcactcct

SEQ ID NO: 1683215 - DNA, 25 bp, Homo sapien
agggacacgaacaaggcactcctgg

SEQ ID NO: 1683216 - DNA, 25 bp, Homo sapien
tacacttgggactccactgccagga

SEQ ID NO: 1683217 - DNA, 25 bp, Homo sapien
gatagaatgcatcatctttcagaag

SEQ ID NO: 1683218 - DNA, 25 bp, Homo sapien
gaagatagaatgcatcatctttcag

SEQ ID NO: 1683219 - DNA, 25 bp, Homo sapien
agatagaatgcatcatctttcagaa

SEQ ID NO: 1683220 - DNA, 25 bp, Homo sapien
tagaatgcatcatctttcagaagag

SEQ ID NO: 1683221 - DNA, 25 bp, Homo sapien
aagtgggcaatgagagatcaggtgc

SEQ ID NO: 1683222 - DNA, 25 bp, Homo sapien
caagtgggcaatgagagatcaggtg

SEQ ID NO: 1683223 - DNA, 25 bp, Homo sapien
agtgggcaatgagagatcaggtgca

SEQ ID NO: 1683224 - DNA, 25 bp, Homo sapien
gtgggcaatgagagatcaggtgcat

SEQ ID NO: 1683225 - DNA, 25 bp, Homo sapien
acgcagcgcggcactgccaccttgt

SEQ ID NO: 1683226 - DNA, 25 bp, Homo sapien
aaacttttgcgggaggctgcgctgg

SEQ ID NO: 1683227 - DNA, 25 bp, Homo sapien
agcccgccaggagagtgcgatgccc

SEQ ID NO: 1683228 - DNA, 25 bp, Homo sapien
atgccccggtccgttccggagcagg

SEQ ID NO: 1683229 - DNA, 25 bp, Homo sapien
cacatgtaggtaagtgcagccccag

SEQ ID NO: 1683230 - DNA, 25 bp, Homo sapien
tgactaccagggaatggaatccggg

SEQ ID NO: 1683231 - DNA, 25 bp, Homo sapien
aatccgggcttcgtggtgtagacaa

SEQ ID NO: 1683232 - DNA, 25 bp, Homo sapien
cccagtgtgaaaggcctgactacca

SEQ ID NO: 1683233 - DNA, 25 bp, Homo sapien
accctcaggtcctggcatgtgctgc

SEQ ID NO: 1683234 - DNA, 25 bp, Homo sapien
catgggtagcccctgttagctggca

SEQ ID NO: 1683235 - DNA, 25 bp, Homo sapien
ctcttctgcggatgcttttctgggt

SEQ ID NO: 1683236 - DNA, 25 bp, Homo sapien
ccctgttgttgccagttcaccagct

SEQ ID NO: 1683237 - DNA, 25 bp, Homo sapien
tgtctaagaggacggccactctgca

SEQ ID NO: 1683238 - DNA, 25 bp, Homo sapien
tgcagccacgactgcgcccctgaaa

SEQ ID NO: 1683239 - DNA, 25 bp, Homo sapien
cttcagctgacacagccaaggatgc

SEQ ID NO: 1683240 - DNA, 25 bp, Homo sapien
actgcgcccctgaaagcacaggaca

SEQ ID NO: 1683241 - DNA, 25 bp, Homo sapien
tgagatgctctagccaagtaggccg

SEQ ID NO: 1683242 - DNA, 25 bp, Homo sapien
tcaaacaacagataggcgcttggct

SEQ ID NO: 1683243 - DNA, 25 bp, Homo sapien
taaagggccttaccacagcgaggaa

SEQ ID NO: 1683244 - DNA, 25 bp, Homo sapien
cacatggaggaagtcatacccgggt

SEQ ID NO: 1683245 - DNA, 25 bp, Homo sapien
ccaagaagtccacagtagccctgaa

SEQ ID NO: 1683246 - DNA, 25 bp, Homo sapien
ggaatttggcgtctagagctgtcta

SEQ ID NO: 1683247 - DNA, 25 bp, Homo sapien
gaagataagagcagggctccagaag

SEQ ID NO: 1683248 - DNA, 25 bp, Homo sapien
ccttccttgattgtacctggttcca

SEQ ID NO: 1683249 - DNA, 25 bp, Homo sapien
ccagaagattctgagctgcccttgc

SEQ ID NO: 1683250 - DNA, 25 bp, Homo sapien
cccagcccctcttcagatcctgaag

SEQ ID NO: 1683251 - DNA, 25 bp, Homo sapien
tcccagcccctcttcagatcctgaa

SEQ ID NO: 1683252 - DNA, 25 bp, Homo sapien
ccagcccctcttcagatcctgaagt

SEQ ID NO: 1683253 - DNA, 25 bp, Homo sapien
ctcccagcccctcttcagatcctga

SEQ ID NO: 1683254 - DNA, 25 bp, Homo sapien
gcatgaggtggaccgggaatattcc

SEQ ID NO: 1683255 - DNA, 25 bp, Homo sapien
tattcccacgtgtggccctaggctt

SEQ ID NO: 1683256 - DNA, 25 bp, Homo sapien
cacattaaatcatgcccaaaccgga

SEQ ID NO: 1683257 - DNA, 25 bp, Homo sapien
tagggattctgtagcagaatttcca

SEQ ID NO: 1683258 - DNA, 25 bp, Homo sapien
gtaagtgtattaattatgcccaagg

SEQ ID NO: 1683259 - DNA, 25 bp, Homo sapien
ctgtgtacaccaggatgcgattctg

SEQ ID NO: 1683260 - DNA, 25 bp, Homo sapien
agtaagtgtattaattatgcccaag

SEQ ID NO: 1683261 - DNA, 25 bp, Homo sapien
caggatgcgattctgactagtaagt

SEQ ID NO: 1683262 - DNA, 25 bp, Homo sapien
ggttctcagagagctaaaagctgaa

SEQ ID NO: 1683263 - DNA, 25 bp, Homo sapien
gtgtaaataattcgaccattgtgga

SEQ ID NO: 1683264 - DNA, 25 bp, Homo sapien
tcttgcgcagtctacgtctaccaga

SEQ ID NO: 1683265 - DNA, 25 bp, Homo sapien
ggagctacacgtgaaagtttgttac

SEQ ID NO: 1683266 - DNA, 25 bp, Homo sapien
gcagcaatccagcaggtttttgtct

SEQ ID NO: 1683267 - DNA, 25 bp, Homo sapien
tgttcccttcaggaacgatgccatc

SEQ ID NO: 1683268 - DNA, 25 bp, Homo sapien
tcgtgtcacccgattctccatgttc

SEQ ID NO: 1683269 - DNA, 25 bp, Homo sapien
cagcaggtttttgtcttcgtgtcac

SEQ ID NO: 1683270 - DNA, 25 bp, Homo sapien
cggacactggaattcttgggtgttt

SEQ ID NO: 1683271 - DNA, 25 bp, Homo sapien
acggacactggaattcttgggtgtt

SEQ ID NO: 1683272 - DNA, 25 bp, Homo sapien
ctagggagccgttttgtccctgaga

SEQ ID NO: 1683273 - DNA, 25 bp, Homo sapien
gggagccgttttgtccctgagacac

SEQ ID NO: 1683274 - DNA, 25 bp, Homo sapien
acctgcatccaaatcgagccgtggg

SEQ ID NO: 1683275 - DNA, 25 bp, Homo sapien
caaatcgagccgtgggtaattatta

SEQ ID NO: 1683276 - DNA, 25 bp, Homo sapien
tcgagccgtgggtaattattactgt

SEQ ID NO: 1683277 - DNA, 25 bp, Homo sapien
catccaaatcgagccgtgggtaatt

SEQ ID NO: 1683278 - DNA, 25 bp, Homo sapien
ggaacttgagaaacacgaagttgct

SEQ ID NO: 1683279 - DNA, 25 bp, Homo sapien
cccaggaacttgagaaacacgaagt

SEQ ID NO: 1683280 - DNA, 25 bp, Homo sapien
aagccctcgccggtccccagcagcc

SEQ ID NO: 1683281 - DNA, 25 bp, Homo sapien
caggaacttgagaaacacgaagttg

SEQ ID NO: 1683282 - DNA, 25 bp, Homo sapien
gcctgtcacacggcccaacacccac

SEQ ID NO: 1683283 - DNA, 25 bp, Homo sapien
tcctcccccttggtggagcccaagc

SEQ ID NO: 1683284 - DNA, 25 bp, Homo sapien
ccaagctctcactctccagggaatt

SEQ ID NO: 1683285 - DNA, 25 bp, Homo sapien
agctctcactctccagggaattctc

SEQ ID NO: 1683286 - DNA, 25 bp, Homo sapien
gagcccaagctctcactctccaggg

SEQ ID NO: 1683287 - DNA, 25 bp, Homo sapien
gaggcaaagccacaagcgatgacag

SEQ ID NO: 1683288 - DNA, 25 bp, Homo sapien
agaggcaaagccacaagcgatgaca

SEQ ID NO: 1683289 - DNA, 25 bp, Homo sapien
caaaggcagcacgtcacccactgga

SEQ ID NO: 1683290 - DNA, 25 bp, Homo sapien
caccaaaggcagcacgtcacccact

SEQ ID NO: 1683291 - DNA, 25 bp, Homo sapien
aggcagcacgtcacccactggaggg

SEQ ID NO: 1683292 - DNA, 25 bp, Homo sapien
cagtgtggctagtgtgggaatgcca

SEQ ID NO: 1683293 - DNA, 25 bp, Homo sapien
tatccacagtgggagcccagacatc

SEQ ID NO: 1683294 - DNA, 25 bp, Homo sapien
ccacagtgggagcccagacatcaga

SEQ ID NO: 1683295 - DNA, 25 bp, Homo sapien
acagtgggagcccagacatcagagg

SEQ ID NO: 1683296 - DNA, 25 bp, Homo sapien
cagtgggagcccagacatcagaggt

SEQ ID NO: 1683297 - DNA, 25 bp, Homo sapien
gcctttgatccaaccttgacactgg

SEQ ID NO: 1683298 - DNA, 25 bp, Homo sapien
tgaccggttgccataaagcgccttt

SEQ ID NO: 1683299 - DNA, 25 bp, Homo sapien
tgatccaaccttgacactggtgggt

SEQ ID NO: 1683300 - DNA, 25 bp, Homo sapien
acgccaagctgttctggttgattct

SEQ ID NO: 1683301 - DNA, 25 bp, Homo sapien
tgggggctgccaatctccacataga

SEQ ID NO: 1683302 - DNA, 25 bp, Homo sapien
caggctgagggagacactcctgggc

SEQ ID NO: 1683303 - DNA, 25 bp, Homo sapien
caagctcgccgctgctgggatgaac

SEQ ID NO: 1683304 - DNA, 25 bp, Homo sapien
ggagctgtgtagagtccctccaggc

SEQ ID NO: 1683305 - DNA, 25 bp, Homo sapien
ctaacgtgtgtagagaattgtatgc

SEQ ID NO: 1683306 - DNA, 25 bp, Homo sapien
aaagccgcttgaaacttctaacgtg

SEQ ID NO: 1683307 - DNA, 25 bp, Homo sapien
gcatttgtgcccatccattcttgac

SEQ ID NO: 1683308 - DNA, 25 bp, Homo sapien
gacactataggattgccggatttag

SEQ ID NO: 1683309 - DNA, 25 bp, Homo sapien
gctaatttggaggtcagaactggtg

SEQ ID NO: 1683310 - DNA, 25 bp, Homo sapien
tctcctgcatctgcgttcaccctgg

SEQ ID NO: 1683311 - DNA, 25 bp, Homo sapien
gcatctgcgttcaccctggctaatt

SEQ ID NO: 1683312 - DNA, 25 bp, Homo sapien
caccctggctaatttggaggtcaga

SEQ ID NO: 1683313 - DNA, 25 bp, Homo sapien
gacgagttattcaaaaaccggcaca

SEQ ID NO: 1683314 - DNA, 25 bp, Homo sapien
ggctcataagtttcagatggagttg

SEQ ID NO: 1683315 - DNA, 25 bp, Homo sapien
caaaaaccggcacaggccccagttg

SEQ ID NO: 1683316 - DNA, 25 bp, Homo sapien
tattttggctcataagtttcagatg

SEQ ID NO: 1683317 - DNA, 25 bp, Homo sapien
cctgaagctgttgagttgatgcctt

SEQ ID NO: 1683318 - DNA, 25 bp, Homo sapien
aaaatacaagggtggaatagggctg

SEQ ID NO: 1683319 - DNA, 25 bp, Homo sapien
gagtgttttgaagtcgctagcaagc

SEQ ID NO: 1683320 - DNA, 25 bp, Homo sapien
taccacatctccttgggacctgaag

SEQ ID NO: 1683321 - DNA, 25 bp, Homo sapien
cttaccactttagaggccactagca

SEQ ID NO: 1683322 - DNA, 25 bp, Homo sapien
tgtagttattcttgcacatctgccg

SEQ ID NO: 1683323 - DNA, 25 bp, Homo sapien
ttagatctcactttatagtccaggc

SEQ ID NO: 1683324 - DNA, 25 bp, Homo sapien
ccgtgcatggcctgtttgggtaaag

SEQ ID NO: 1683325 - DNA, 25 bp, Homo sapien
agcacaatgaatccgcaggcctggg

SEQ ID NO: 1683326 - DNA, 25 bp, Homo sapien
acggtgttaaatgtgttagttgact

SEQ ID NO: 1683327 - DNA, 25 bp, Homo sapien
ttagcacaatgaatccgcaggcctg

SEQ ID NO: 1683328 - DNA, 25 bp, Homo sapien
taaatgtgttagttgactgaatctg

SEQ ID NO: 1683329 - DNA, 25 bp, Homo sapien
ctcttgtgacatcagttttattatc

SEQ ID NO: 1683330 - DNA, 25 bp, Homo sapien
tctcttctctgcagattgagtttcc

SEQ ID NO: 1683331 - DNA, 25 bp, Homo sapien
cttctctgcagattgagtttccctg

SEQ ID NO: 1683332 - DNA, 25 bp, Homo sapien
tcttgtgacatcagttttattatca

SEQ ID NO: 1683333 - DNA, 25 bp, Homo sapien
cagcttcccgcagatgcgcctagcc

SEQ ID NO: 1683334 - DNA, 25 bp, Homo sapien
ggcttcctgagccaccccgcagctt

SEQ ID NO: 1683335 - DNA, 25 bp, Homo sapien
agttcagggcagctccttgtcacca

SEQ ID NO: 1683336 - DNA, 25 bp, Homo sapien
ctgggaagatgcaaggagacagcct

SEQ ID NO: 1683337 - DNA, 25 bp, Homo sapien
ggcgattgtacccagatgtcacact

SEQ ID NO: 1683338 - DNA, 25 bp, Homo sapien
tgctgagtgttcctgactggcgatt

SEQ ID NO: 1683339 - DNA, 25 bp, Homo sapien
tactgggcatttataatgtcctgga

SEQ ID NO: 1683340 - DNA, 25 bp, Homo sapien
gtcacacttaactgttgatgttcag

SEQ ID NO: 1683341 - DNA, 25 bp, Homo sapien
cactgtatgtgcaggaccttgatcc

SEQ ID NO: 1683342 - DNA, 25 bp, Homo sapien
tggatcaaccatacagcatgaaagg

SEQ ID NO: 1683343 - DNA, 25 bp, Homo sapien
cagtgtgatgctccaaggtctggcc

SEQ ID NO: 1683344 - DNA, 25 bp, Homo sapien
tgtcattgggatggaccaaagccat

SEQ ID NO: 1683345 - DNA, 25 bp, Homo sapien
tttctggaccagccgtcccagagtg

SEQ ID NO: 1683346 - DNA, 25 bp, Homo sapien
ctggaccagccgtcccagagtggaa

SEQ ID NO: 1683347 - DNA, 25 bp, Homo sapien
ccaaatgatagcaatgggtagtgag

SEQ ID NO: 1683348 - DNA, 25 bp, Homo sapien
aatgggtagtgagggcggcggcctc

SEQ ID NO: 1683349 - DNA, 25 bp, Homo sapien
ccttggctggtttcgcttgtctctg

SEQ ID NO: 1683350 - DNA, 25 bp, Homo sapien
agttccttggctggtttcgcttgtc

SEQ ID NO: 1683351 - DNA, 25 bp, Homo sapien
ggagttccttggctggtttcgcttg

SEQ ID NO: 1683352 - DNA, 25 bp, Homo sapien
gctggtttcgcttgtctctgtggcc

SEQ ID NO: 1683353 - DNA, 25 bp, Homo sapien
taacaggaggtggtctccagtctcc

SEQ ID NO: 1683354 - DNA, 25 bp, Homo sapien
catttgcccttaaacctaacaggag

SEQ ID NO: 1683355 - DNA, 25 bp, Homo sapien
ttcaggttttgggtgctccatcagc

SEQ ID NO: 1683356 - DNA, 25 bp, Homo sapien
ttggtggagtcaaggaccagccctc

SEQ ID NO: 1683357 - DNA, 25 bp, Homo sapien
attatattccggcaaactgtgaata

SEQ ID NO: 1683358 - DNA, 25 bp, Homo sapien
ttatattccggcaaactgtgaatac

SEQ ID NO: 1683359 - DNA, 25 bp, Homo sapien
gatgagctaatttcccctgtaggct

SEQ ID NO: 1683360 - DNA, 25 bp, Homo sapien
cagatgagctaatttcccctgtagg

SEQ ID NO: 1683361 - DNA, 25 bp, Homo sapien
agctaatttcccctgtaggcttcat

SEQ ID NO: 1683362 - DNA, 25 bp, Homo sapien
ggacagatgagctaatttcccctgt

SEQ ID NO: 1683363 - DNA, 25 bp, Homo sapien
gaaggtgaggccctttctactggga

SEQ ID NO: 1683364 - DNA, 25 bp, Homo sapien
tacataagaaggtgaggccctttct

SEQ ID NO: 1683365 - DNA, 25 bp, Homo sapien
cctacataagaaggtgaggcccttt

SEQ ID NO: 1683366 - DNA, 25 bp, Homo sapien
ctcctacataagaaggtgaggccct

SEQ ID NO: 1683367 - DNA, 25 bp, Homo sapien
acaaagactcataacagtgtgccca

SEQ ID NO: 1683368 - DNA, 25 bp, Homo sapien
gactctttagacaaagactcataac

SEQ ID NO: 1683369 - DNA, 25 bp, Homo sapien
ctttagacaaagactcataacagtg

SEQ ID NO: 1683370 - DNA, 25 bp, Homo sapien
tccccatgactctttagacaaagac

SEQ ID NO: 1683371 - DNA, 25 bp, Homo sapien
cacttcgctatttctggtgcaggaa

SEQ ID NO: 1683372 - DNA, 25 bp, Homo sapien
tgacactccatgataacggcttcct

SEQ ID NO: 1683373 - DNA, 25 bp, Homo sapien
cactccatgataacggcttcctcag

SEQ ID NO: 1683374 - DNA, 25 bp, Homo sapien
aatccattctgctgattacacttcg

SEQ ID NO: 1683375 - DNA, 25 bp, Homo sapien
actttccaatttctcgctgttcatc

SEQ ID NO: 1683376 - DNA, 25 bp, Homo sapien
cactttccaatttctcgctgttcat

SEQ ID NO: 1683377 - DNA, 25 bp, Homo sapien
ttccaatttctcgctgttcatctct

SEQ ID NO: 1683378 - DNA, 25 bp, Homo sapien
tttccaatttctcgctgttcatctc

SEQ ID NO: 1683379 - DNA, 25 bp, Homo sapien
gaacattggtgactgagttatcaca

SEQ ID NO: 1683380 - DNA, 25 bp, Homo sapien
tcatttgcgtaaggaattctgatgc

SEQ ID NO: 1683381 - DNA, 25 bp, Homo sapien
caacaataaagacctcagcgccagc

SEQ ID NO: 1683382 - DNA, 25 bp, Homo sapien
cttgactggcagatgccaattggct

SEQ ID NO: 1683383 - DNA, 25 bp, Homo sapien
caggagaacaggacactatcaactg

SEQ ID NO: 1683384 - DNA, 25 bp, Homo sapien
tcctccaagtttagatgcaaagttc

SEQ ID NO: 1683385 - DNA, 25 bp, Homo sapien
caactgttcacttgtcggtcttcca

SEQ ID NO: 1683386 - DNA, 25 bp, Homo sapien
tattttaaagtatgcccctggctga

SEQ ID NO: 1683387 - DNA, 25 bp, Homo sapien
cacaggaattcctagcctacttgtg

SEQ ID NO: 1683388 - DNA, 25 bp, Homo sapien
ttctctaaccgtgattttcctctgc

SEQ ID NO: 1683389 - DNA, 25 bp, Homo sapien
gaattcctagcctacttgtgtaggg

SEQ ID NO: 1683390 - DNA, 25 bp, Homo sapien
ggtgcacacaggaattcctagccta

SEQ ID NO: 1683391 - DNA, 25 bp, Homo sapien
ctcgtctgaagtaataatcctttat

SEQ ID NO: 1683392 - DNA, 25 bp, Homo sapien
tctcgtctgaagtaataatccttta

SEQ ID NO: 1683393 - DNA, 25 bp, Homo sapien
tcgtctgaagtaataatcctttatt

SEQ ID NO: 1683394 - DNA, 25 bp, Homo sapien
gaattagaatctccatctggtgttg

SEQ ID NO: 1683395 - DNA, 25 bp, Homo sapien
gagttggacatctggtattttgaag

SEQ ID NO: 1683396 - DNA, 25 bp, Homo sapien
gggcagcgtatcagaagcaaccgtg

SEQ ID NO: 1683397 - DNA, 25 bp, Homo sapien
gcaaccgtgcagcttttatcagaat

SEQ ID NO: 1683398 - DNA, 25 bp, Homo sapien
cagctcgttctactgacaataatgg

SEQ ID NO: 1683399 - DNA, 25 bp, Homo sapien
gatttggcatgcatgcagctcgttc

SEQ ID NO: 1683400 - DNA, 25 bp, Homo sapien
tatttgtgaatgacctgatttggca

SEQ ID NO: 1683401 - DNA, 25 bp, Homo sapien
cagaagggccatgctttagtcatag

SEQ ID NO: 1683402 - DNA, 25 bp, Homo sapien
cagtccggatgccagataatcaaag

SEQ ID NO: 1683403 - DNA, 25 bp, Homo sapien
caaaggcctcaaatattgtgctaaa

SEQ ID NO: 1683404 - DNA, 25 bp, Homo sapien
tacccggcttaaatagttctgctta

SEQ ID NO: 1683405 - DNA, 25 bp, Homo sapien
gaatgtctactatacacctcgtgct

SEQ ID NO: 1683406 - DNA, 25 bp, Homo sapien
tgtctccactgtaatgcaaaaggta

SEQ ID NO: 1683407 - DNA, 25 bp, Homo sapien
catgtagttggatgtgagtaagttg

SEQ ID NO: 1683408 - DNA, 25 bp, Homo sapien
cactgtaatgcaaaaggtatgggca

SEQ ID NO: 1683409 - DNA, 25 bp, Homo sapien
actgggatctgtctccactgtaatg

SEQ ID NO: 1683410 - DNA, 25 bp, Homo sapien
tttagaggcactgacgcaccagctt

SEQ ID NO: 1683411 - DNA, 25 bp, Homo sapien
tctgggaggcctgattctacagctg

SEQ ID NO: 1683412 - DNA, 25 bp, Homo sapien
cggctctcatctgccgatagtctag

SEQ ID NO: 1683413 - DNA, 25 bp, Homo sapien
tctacagctgcccacggatgtttag

SEQ ID NO: 1683414 - DNA, 25 bp, Homo sapien
tttcctagaagacagcttagggaca

SEQ ID NO: 1683415 - DNA, 25 bp, Homo sapien
cactccccactggttggcatctcat

SEQ ID NO: 1683416 - DNA, 25 bp, Homo sapien
gacagcttagggacatttatctttc

SEQ ID NO: 1683417 - DNA, 25 bp, Homo sapien
cttagggacatttatctttcccctg

SEQ ID NO: 1683418 - DNA, 25 bp, Homo sapien
gaggaattttccgagagtgcgtgct

SEQ ID NO: 1683419 - DNA, 25 bp, Homo sapien
caagtcagttatgcttggctcaagc

SEQ ID NO: 1683420 - DNA, 25 bp, Homo sapien
caccagcacaggacggaggaatttt

SEQ ID NO: 1683421 - DNA, 25 bp, Homo sapien
taggtccgccgtgaatctaagtgca

SEQ ID NO: 1683422 - DNA, 25 bp, Homo sapien
cattccacgaaaatacgagattggg

SEQ ID NO: 1683423 - DNA, 25 bp, Homo sapien
gggcaaataaggatttgcattgaca

SEQ ID NO: 1683424 - DNA, 25 bp, Homo sapien
tcttctttgcacttatcatcattcc

SEQ ID NO: 1683425 - DNA, 25 bp, Homo sapien
aataaggatttgcattgacaggaca

SEQ ID NO: 1683426 - DNA, 25 bp, Homo sapien
gtgaatgctatatatagcccccagt

SEQ ID NO: 1683427 - DNA, 25 bp, Homo sapien
atgctatatatagcccccagttggc

SEQ ID NO: 1683428 - DNA, 25 bp, Homo sapien
ggtgaatgctatatatagcccccag

SEQ ID NO: 1683429 - DNA, 25 bp, Homo sapien
gaatgctatatatagcccccagttg

SEQ ID NO: 1683430 - DNA, 25 bp, Homo sapien
ttcacgtgtgttggtcaggagagac

SEQ ID NO: 1683431 - DNA, 25 bp, Homo sapien
ggtccagagcattatctaagcaggt

SEQ ID NO: 1683432 - DNA, 25 bp, Homo sapien
gagcaagcagacacgaattccatgg

SEQ ID NO: 1683433 - DNA, 25 bp, Homo sapien
gcagcacgttttgcaggaccagcag

SEQ ID NO: 1683434 - DNA, 25 bp, Homo sapien
taaccagaatccatttgaatcccaa

SEQ ID NO: 1683435 - DNA, 25 bp, Homo sapien
tcttcactcatattaaccagaatcc

SEQ ID NO: 1683436 - DNA, 25 bp, Homo sapien
tattgatattaccttcccttatttc

SEQ ID NO: 1683437 - DNA, 25 bp, Homo sapien
ttcagcaggagtactcagcaggaac

SEQ ID NO: 1683438 - DNA, 25 bp, Homo sapien
gatttcgttgacaaattcctcacca

SEQ ID NO: 1683439 - DNA, 25 bp, Homo sapien
agatttcctgatttcgttgacaaat

SEQ ID NO: 1683440 - DNA, 25 bp, Homo sapien
tttcctgatttcgttgacaaattcc

SEQ ID NO: 1683441 - DNA, 25 bp, Homo sapien
cctgatttcgttgacaaattcctca

SEQ ID NO: 1683442 - DNA, 25 bp, Homo sapien
gggatataaacccatgtcctctcct

SEQ ID NO: 1683443 - DNA, 25 bp, Homo sapien
tggaccaccttaggctcagccttgg

SEQ ID NO: 1683444 - DNA, 25 bp, Homo sapien
agcctatccactcctaagccaagaa

SEQ ID NO: 1683445 - DNA, 25 bp, Homo sapien
aaggctctgcgccatgcacttcagc

SEQ ID NO: 1683446 - DNA, 25 bp, Homo sapien
taataggctcaaattattatcctca

SEQ ID NO: 1683447 - DNA, 25 bp, Homo sapien
ctcttggtttgggagctgcagtgca

SEQ ID NO: 1683448 - DNA, 25 bp, Homo sapien
gcagcggcttctctatatggtggaa

SEQ ID NO: 1683449 - DNA, 25 bp, Homo sapien
cttgtgcaggtttgccaggctgtgc

SEQ ID NO: 1683450 - DNA, 25 bp, Homo sapien
ttgaccaggatttctacttcttctg

SEQ ID NO: 1683451 - DNA, 25 bp, Homo sapien
aactccttttctgccgtgactgcct

SEQ ID NO: 1683452 - DNA, 25 bp, Homo sapien
ttctgccgtgactgccttcttcccc

SEQ ID NO: 1683453 - DNA, 25 bp, Homo sapien
ttctacactccataggaggcttgac

SEQ ID NO: 1683454 - DNA, 25 bp, Homo sapien
gagagggaactaaacccctctgctg

SEQ ID NO: 1683455 - DNA, 25 bp, Homo sapien
agacactcacacgaacagtaccaca

SEQ ID NO: 1683456 - DNA, 25 bp, Homo sapien
agagatcacccttgtggagttccag

SEQ ID NO: 1683457 - DNA, 25 bp, Homo sapien
cagcctcaggctcattccatgagag

SEQ ID NO: 1683458 - DNA, 25 bp, Homo sapien
ttaggaagtaagaggaatttgagat

SEQ ID NO: 1683459 - DNA, 25 bp, Homo sapien
ctctgaccaaaaagtgtgctgctct

SEQ ID NO: 1683460 - DNA, 25 bp, Homo sapien
gaggatgcgtctttgtgaaactaca

SEQ ID NO: 1683461 - DNA, 25 bp, Homo sapien
tgaagctggcaacatcagagagcct

SEQ ID NO: 1683462 - DNA, 25 bp, Homo sapien
gctgcagccctataaagtctcgcca

SEQ ID NO: 1683463 - DNA, 25 bp, Homo sapien
cacatcagttgggtggtgccatgac

SEQ ID NO: 1683464 - DNA, 25 bp, Homo sapien
catgacctttatggaggcaccctgg

SEQ ID NO: 1683465 - DNA, 25 bp, Homo sapien
ggttgccttggagcagaaccctggc

SEQ ID NO: 1683466 - DNA, 25 bp, Homo sapien
tgcataacgatggaatttattttgt

SEQ ID NO: 1683467 - DNA, 25 bp, Homo sapien
taacgatggaatttattttgttcat

SEQ ID NO: 1683468 - DNA, 25 bp, Homo sapien
ctgcataacgatggaatttattttg

SEQ ID NO: 1683469 - DNA, 25 bp, Homo sapien
cataacgatggaatttattttgttc

SEQ ID NO: 1683470 - DNA, 25 bp, Homo sapien
tcatttcgtggaattgtttgtctcc

SEQ ID NO: 1683471 - DNA, 25 bp, Homo sapien
gacacactgacagcccttgtgcaac

SEQ ID NO: 1683472 - DNA, 25 bp, Homo sapien
gacagggagtaaattttcctcgaca

SEQ ID NO: 1683473 - DNA, 25 bp, Homo sapien
gttctccttccgcattgtttttcat

SEQ ID NO: 1683474 - DNA, 25 bp, Homo sapien
agcaaaacttcttcgagaagacaga

SEQ ID NO: 1683475 - DNA, 25 bp, Homo sapien
tctcagggtcgtcacaattggacac

SEQ ID NO: 1683476 - DNA, 25 bp, Homo sapien
aaaaccgtgaggtgaacattcagcc

SEQ ID NO: 1683477 - DNA, 25 bp, Homo sapien
gatatcctgataacgcctgagccct

SEQ ID NO: 1683478 - DNA, 25 bp, Homo sapien
cggcacaggcgatctttacagtcat

SEQ ID NO: 1683479 - DNA, 25 bp, Homo sapien
ccgtatggttaatcccaagaagcct

SEQ ID NO: 1683480 - DNA, 25 bp, Homo sapien
tatggttaatcccaagaagcctgtg

SEQ ID NO: 1683481 - DNA, 25 bp, Homo sapien
tggttaatcccaagaagcctgtgaa

SEQ ID NO: 1683482 - DNA, 25 bp, Homo sapien
cgtatggttaatcccaagaagcctg

SEQ ID NO: 1683483 - DNA, 25 bp, Homo sapien
ctcatcatccttcaaatgtggcctc

SEQ ID NO: 1683484 - DNA, 25 bp, Homo sapien
tcatccttcaaatgtggcctcgttc

SEQ ID NO: 1683485 - DNA, 25 bp, Homo sapien
caccagcctcttgagacccctcatc

SEQ ID NO: 1683486 - DNA, 25 bp, Homo sapien
tccttcaaatgtggcctcgttccac

SEQ ID NO: 1683487 - DNA, 25 bp, Homo sapien
cctgcactcaggaacattatgtgga

SEQ ID NO: 1683488 - DNA, 25 bp, Homo sapien
cttgttggaataactcgcactcttc

SEQ ID NO: 1683489 - DNA, 25 bp, Homo sapien
gtcccgagggagttgtctggctaca

SEQ ID NO: 1683490 - DNA, 25 bp, Homo sapien
tacatatctgacagctaagtcagag

SEQ ID NO: 1683491 - DNA, 25 bp, Homo sapien
gggcttgtgacccatcatggaccat

SEQ ID NO: 1683492 - DNA, 25 bp, Homo sapien
cctctgggcttgtgacccatcatgg

SEQ ID NO: 1683493 - DNA, 25 bp, Homo sapien
tgggcctctgggcttgtgacccatc

SEQ ID NO: 1683494 - DNA, 25 bp, Homo sapien
ctgggcttgtgacccatcatggacc

SEQ ID NO: 1683495 - DNA, 25 bp, Homo sapien
gtattgtgtcctgaggtttctccaa

SEQ ID NO: 1683496 - DNA, 25 bp, Homo sapien
tctccaatgagcaggaggcagcctg

SEQ ID NO: 1683497 - DNA, 25 bp, Homo sapien
ttgtgtcctgaggtttctccaatga

SEQ ID NO: 1683498 - DNA, 25 bp, Homo sapien
tgtcctgaggtttctccaatgagca

SEQ ID NO: 1683499 - DNA, 25 bp, Homo sapien
tcataatgaaagttctgcttgacag

SEQ ID NO: 1683500 - DNA, 25 bp, Homo sapien
gacagatgataatggctctagaggg

SEQ ID NO: 1683501 - DNA, 25 bp, Homo sapien
tcatgagggaagacaagtgtgtact

SEQ ID NO: 1683502 - DNA, 25 bp, Homo sapien
tctgcttgacagatgataatggctc

SEQ ID NO: 1683503 - DNA, 25 bp, Homo sapien
catcttttactctctaggtcctcat

SEQ ID NO: 1683504 - DNA, 25 bp, Homo sapien
cttgagcatatcctacgctgattcc

SEQ ID NO: 1683505 - DNA, 25 bp, Homo sapien
cctacgctgattccataacttttca

SEQ ID NO: 1683506 - DNA, 25 bp, Homo sapien
tggatccatgtgaactggtgttact

SEQ ID NO: 1683507 - DNA, 25 bp, Homo sapien
tgggactccaagcacaaagatgttc

SEQ ID NO: 1683508 - DNA, 25 bp, Homo sapien
gcacttggtgagtaatgggactcca

SEQ ID NO: 1683509 - DNA, 25 bp, Homo sapien
gccacactgggtcctgtaaagaagg

SEQ ID NO: 1683510 - DNA, 25 bp, Homo sapien
gatgcaggtaatttccacagccagt

SEQ ID NO: 1683511 - DNA, 25 bp, Homo sapien
catcagtgcctgtgtttgggaacct

SEQ ID NO: 1683512 - DNA, 25 bp, Homo sapien
ttgtagccaagtggtttctccagag

SEQ ID NO: 1683513 - DNA, 25 bp, Homo sapien
aatgcaccatcagtgcctgtgtttg

SEQ ID NO: 1683514 - DNA, 25 bp, Homo sapien
ttaaagatataattggacgtccttg

SEQ ID NO: 1683515 - DNA, 25 bp, Homo sapien
gtagagcggtttctggaggtaggtc

SEQ ID NO: 1683516 - DNA, 25 bp, Homo sapien
ccacgttttagctcctcaagcctgt

SEQ ID NO: 1683517 - DNA, 25 bp, Homo sapien
ctggatactggaaaagccgccccgt

SEQ ID NO: 1683518 - DNA, 25 bp, Homo sapien
caggaaaagcaccacgttttagctc

SEQ ID NO: 1683519 - DNA, 25 bp, Homo sapien
aaaagggtgtcaaggctgcaggatg

SEQ ID NO: 1683520 - DNA, 25 bp, Homo sapien
agctgccacagagtcaatgaaaagg

SEQ ID NO: 1683521 - DNA, 25 bp, Homo sapien
tgtttaagaaggagcctgatgacat

SEQ ID NO: 1683522 - DNA, 25 bp, Homo sapien
ctgatgacatcacgtcggcctcctg

SEQ ID NO: 1683523 - DNA, 25 bp, Homo sapien
actcattttgagttgaactacccac

SEQ ID NO: 1683524 - DNA, 25 bp, Homo sapien
tctgctgtgtaccagtatacgatga

SEQ ID NO: 1683525 - DNA, 25 bp, Homo sapien
tcaaggatgacactcactcgttgtg

SEQ ID NO: 1683526 - DNA, 25 bp, Homo sapien
cacccagccgcaaagactcattttg

SEQ ID NO: 1683527 - DNA, 25 bp, Homo sapien
ctcccagagcttcaagcccacacct

SEQ ID NO: 1683528 - DNA, 25 bp, Homo sapien
tccctgactctacagagccgttcag

SEQ ID NO: 1683529 - DNA, 25 bp, Homo sapien
tacagagccgttcagggctctagct

SEQ ID NO: 1683530 - DNA, 25 bp, Homo sapien
tctacagagccgttcagggctctag

SEQ ID NO: 1683531 - DNA, 25 bp, Homo sapien
gcagcgtgcctggcatttccatgaa

SEQ ID NO: 1683532 - DNA, 25 bp, Homo sapien
cagcgtgcctggcatttccatgaac

SEQ ID NO: 1683533 - DNA, 25 bp, Homo sapien
ctgattcgtgaagtaggctagcaac

SEQ ID NO: 1683534 - DNA, 25 bp, Homo sapien
taacccacgtcccatgccacgtgtg

SEQ ID NO: 1683535 - DNA, 25 bp, Homo sapien
ggcagcgttcttcactgattcgtga

SEQ ID NO: 1683536 - DNA, 25 bp, Homo sapien
gagtcaacggctttaactttggcag

SEQ ID NO: 1683537 - DNA, 25 bp, Homo sapien
ttcccagaccccaggggcagctcgg

SEQ ID NO: 1683538 - DNA, 25 bp, Homo sapien
tcccagaccccaggggcagctcggc

SEQ ID NO: 1683539 - DNA, 25 bp, Homo sapien
cagaccccaggggcagctcggccat

SEQ ID NO: 1683540 - DNA, 25 bp, Homo sapien
ctgtctccttcccagaccccagggg

SEQ ID NO: 1683541 - DNA, 25 bp, Homo sapien
tgctcacacacccagccagcagagc

SEQ ID NO: 1683542 - DNA, 25 bp, Homo sapien
cacctgctcacacacccagccagca

SEQ ID NO: 1683543 - DNA, 25 bp, Homo sapien
cagccagcagagcaccctgggtgca

SEQ ID NO: 1683544 - DNA, 25 bp, Homo sapien
gcaccctgggtgcatctggacagca

SEQ ID NO: 1683545 - DNA, 25 bp, Homo sapien
agaatttggccccaagggtgccagg

SEQ ID NO: 1683546 - DNA, 25 bp, Homo sapien
gcaaagatggaggtagatctaagtc

SEQ ID NO: 1683547 - DNA, 25 bp, Homo sapien
tggaggtagatctaagtcagcttgg

SEQ ID NO: 1683548 - DNA, 25 bp, Homo sapien
aatttggccccaagggtgccaggag

SEQ ID NO: 1683549 - DNA, 25 bp, Homo sapien
tcaaaggcttttgtagaagtcccaa

SEQ ID NO: 1683550 - DNA, 25 bp, Homo sapien
gaaaacaagctgcttgaagtcaaag

SEQ ID NO: 1683551 - DNA, 25 bp, Homo sapien
gttccccgtgaccaacaggtagaca

SEQ ID NO: 1683552 - DNA, 25 bp, Homo sapien
ttgaaaaaaatgatgtcagcaggct

SEQ ID NO: 1683553 - DNA, 25 bp, Homo sapien
taagccgtgtcatgggagcagtgag

SEQ ID NO: 1683554 - DNA, 25 bp, Homo sapien
ctaagccgtgtcatgggagcagtga

SEQ ID NO: 1683555 - DNA, 25 bp, Homo sapien
cgtgaaatcctttacttatgaattc

SEQ ID NO: 1683556 - DNA, 25 bp, Homo sapien
ttattactctttcccggagcatggc

SEQ ID NO: 1683557 - DNA, 25 bp, Homo sapien
ttctcccaagctggacgtgaaatcc

SEQ ID NO: 1683558 - DNA, 25 bp, Homo sapien
caggtcttcattggctgtggtgtag

SEQ ID NO: 1683559 - DNA, 25 bp, Homo sapien
tggtgggatccgggcagtggtcttc

SEQ ID NO: 1683560 - DNA, 25 bp, Homo sapien
gtgggatccgggcagtggtcttcat

SEQ ID NO: 1683561 - DNA, 25 bp, Homo sapien
tgctggtgggatccgggcagtggtc

SEQ ID NO: 1683562 - DNA, 25 bp, Homo sapien
ctctgctggtgggatccgggcagtg

SEQ ID NO: 1683563 - DNA, 25 bp, Homo sapien
ttttgagaaaggtcctcttctagaa

SEQ ID NO: 1683564 - DNA, 25 bp, Homo sapien
tgttttctcaacagggttttgagaa

SEQ ID NO: 1683565 - DNA, 25 bp, Homo sapien
aagccaggtagttccaaaggtcctg

SEQ ID NO: 1683566 - DNA, 25 bp, Homo sapien
tgagaaaggtcctcttctagaaagg

SEQ ID NO: 1683567 - DNA, 25 bp, Homo sapien
tttttcatggataggattattaaca

SEQ ID NO: 1683568 - DNA, 25 bp, Homo sapien
gataggattattaacatcattacca

SEQ ID NO: 1683569 - DNA, 25 bp, Homo sapien
tggataggattattaacatcattac

SEQ ID NO: 1683570 - DNA, 25 bp, Homo sapien
ctgtttttcatggataggattatta

SEQ ID NO: 1683571 - DNA, 25 bp, Homo sapien
gatctgctgttgaaagggagccagt

SEQ ID NO: 1683572 - DNA, 25 bp, Homo sapien
gggagcaccgcctcttttgtgccta

SEQ ID NO: 1683573 - DNA, 25 bp, Homo sapien
cagatttaatttgaacgacagcagc

SEQ ID NO: 1683574 - DNA, 25 bp, Homo sapien
gacaatgagctaattacagtctctc

SEQ ID NO: 1683575 - DNA, 25 bp, Homo sapien
ctgtgagtccttggccagagtattt

SEQ ID NO: 1683576 - DNA, 25 bp, Homo sapien
tgagtccttggccagagtatttcat

SEQ ID NO: 1683577 - DNA, 25 bp, Homo sapien
gtccttggccagagtatttcatgtt

SEQ ID NO: 1683578 - DNA, 25 bp, Homo sapien
ttggccagagtatttcatgttgttc

SEQ ID NO: 1683579 - DNA, 25 bp, Homo sapien
taggagggattggagacggtgggcg

SEQ ID NO: 1683580 - DNA, 25 bp, Homo sapien
cataggagggattggagacggtggg

SEQ ID NO: 1683581 - DNA, 25 bp, Homo sapien
ctgcataggagggattggagacggt

SEQ ID NO: 1683582 - DNA, 25 bp, Homo sapien
tgcataggagggattggagacggtg

SEQ ID NO: 1683583 - DNA, 25 bp, Homo sapien
tattcgcaagattgctgcgaaagct

SEQ ID NO: 1683584 - DNA, 25 bp, Homo sapien
gcagcagttttgcatattcgcaaga

SEQ ID NO: 1683585 - DNA, 25 bp, Homo sapien
tttgcatattcgcaagattgctgcg

SEQ ID NO: 1683586 - DNA, 25 bp, Homo sapien
gtgagcagcagttttgcatattcgc

SEQ ID NO: 1683587 - DNA, 25 bp, Homo sapien
cttctccgggatgggttagttctga

SEQ ID NO: 1683588 - DNA, 25 bp, Homo sapien
cctctttggtggttcgcttgtcagc

SEQ ID NO: 1683589 - DNA, 25 bp, Homo sapien
aaggccatcgaagggccaagagccc

SEQ ID NO: 1683590 - DNA, 25 bp, Homo sapien
tcatgagtccatggagtgtcgcaag

SEQ ID NO: 1683591 - DNA, 25 bp, Homo sapien
catccatgtgcaggccctatgctaa

SEQ ID NO: 1683592 - DNA, 25 bp, Homo sapien
tcatccatgtgcaggccctatgcta

SEQ ID NO: 1683593 - DNA, 25 bp, Homo sapien
tctaatcttccatgtacactgctgc

SEQ ID NO: 1683594 - DNA, 25 bp, Homo sapien
tttctttggcatcgacagtccttca

SEQ ID NO: 1683595 - DNA, 25 bp, Homo sapien
gcgtgcatatggctgaaagtccttt

SEQ ID NO: 1683596 - DNA, 25 bp, Homo sapien
ctgtgaagcagatctggtcacctca

SEQ ID NO: 1683597 - DNA, 25 bp, Homo sapien
acattttgggcttgagggaactggt

SEQ ID NO: 1683598 - DNA, 25 bp, Homo sapien
gcttgtccctttcggcagactgccg

SEQ ID NO: 1683599 - DNA, 25 bp, Homo sapien
attcctttgcgggactggcttgtcc

SEQ ID NO: 1683600 - DNA, 25 bp, Homo sapien
tgccgagcttggctatgcagagaat

SEQ ID NO: 1683601 - DNA, 25 bp, Homo sapien
caggtagagtgctatgctagggacc

SEQ ID NO: 1683602 - DNA, 25 bp, Homo sapien
tatatcagacatagaactgggcact

SEQ ID NO: 1683603 - DNA, 25 bp, Homo sapien
gctctggtcctgctagtggagcaca

SEQ ID NO: 1683604 - DNA, 25 bp, Homo sapien
tctagggcctctaagaaaagcaact

SEQ ID NO: 1683605 - DNA, 25 bp, Homo sapien
cttgatgggccagttgatgtgaaga

SEQ ID NO: 1683606 - DNA, 25 bp, Homo sapien
cttgcggctgtgaaactcttgggaa

SEQ ID NO: 1683607 - DNA, 25 bp, Homo sapien
gtataattcatcttgcggctgtgaa

SEQ ID NO: 1683608 - DNA, 25 bp, Homo sapien
tcttgggaaagtgacttgatgggcc

SEQ ID NO: 1683609 - DNA, 25 bp, Homo sapien
ttttcctcatgtaatgaaccaagta

SEQ ID NO: 1683610 - DNA, 25 bp, Homo sapien
tgatttccacgtgggcaactggcct

SEQ ID NO: 1683611 - DNA, 25 bp, Homo sapien
tctgatttccacgtgggcaactggc

SEQ ID NO: 1683612 - DNA, 25 bp, Homo sapien
tgtgggtctgatttccacgtgggca

SEQ ID NO: 1683613 - DNA, 25 bp, Homo sapien
tgatcgatcgttgacagtgtctcat

SEQ ID NO: 1683614 - DNA, 25 bp, Homo sapien
tgaatttggattcggccaccaagcc

SEQ ID NO: 1683615 - DNA, 25 bp, Homo sapien
tagtctgctagcatggtttttcagg

SEQ ID NO: 1683616 - DNA, 25 bp, Homo sapien
gacatttgaagccacaggatctgtg

SEQ ID NO: 1683617 - DNA, 25 bp, Homo sapien
tcttttggccttacttcactggcag

SEQ ID NO: 1683618 - DNA, 25 bp, Homo sapien
gaggccgagaagtcgtgcttcatat

SEQ ID NO: 1683619 - DNA, 25 bp, Homo sapien
atcttttggccttacttcactggca

SEQ ID NO: 1683620 - DNA, 25 bp, Homo sapien
cgagaagtcgtgcttcatatttgct

SEQ ID NO: 1683621 - DNA, 25 bp, Homo sapien
tagttgctcgacaagttccagttcc

SEQ ID NO: 1683622 - DNA, 25 bp, Homo sapien
tcttttcttgaggtgtattagcaac

SEQ ID NO: 1683623 - DNA, 25 bp, Homo sapien
ggtctggccaggactttgttttctc

SEQ ID NO: 1683624 - DNA, 25 bp, Homo sapien
acactttgttcatttgacagccatg

SEQ ID NO: 1683625 - DNA, 25 bp, Homo sapien
gatggtcttcttaggccagtcagga

SEQ ID NO: 1683626 - DNA, 25 bp, Homo sapien
tctgagtcgtgttcccaagcacaac

SEQ ID NO: 1683627 - DNA, 25 bp, Homo sapien
cacttggcaagtcccgatggtcttc

SEQ ID NO: 1683628 - DNA, 25 bp, Homo sapien
aatgcagtcctttgctgggcgggaa

SEQ ID NO: 1683629 - DNA, 25 bp, Homo sapien
tctgcactgtcactgaacttggtgc

SEQ ID NO: 1683630 - DNA, 25 bp, Homo sapien
caaggtgttgcgtttctgctctcag

SEQ ID NO: 1683631 - DNA, 25 bp, Homo sapien
gatccagacaggctctttcaaggtg

SEQ ID NO: 1683632 - DNA, 25 bp, Homo sapien
gacaaccctgtgaagttgggtgctt

SEQ ID NO: 1683633 - DNA, 25 bp, Homo sapien
ttggagtctttcatcagctttgggc

SEQ ID NO: 1683634 - DNA, 25 bp, Homo sapien
tctttcatcagctttgggccctttc

SEQ ID NO: 1683635 - DNA, 25 bp, Homo sapien
gagtctttcatcagctttgggccct

SEQ ID NO: 1683636 - DNA, 25 bp, Homo sapien
tcatcagctttgggccctttcctag

SEQ ID NO: 1683637 - DNA, 25 bp, Homo sapien
cccagtggtgttcggatgtccaaat

SEQ ID NO: 1683638 - DNA, 25 bp, Homo sapien
atcttcacccagtggtgttcggatg

SEQ ID NO: 1683639 - DNA, 25 bp, Homo sapien
ttcacccagtggtgttcggatgtcc

SEQ ID NO: 1683640 - DNA, 25 bp, Homo sapien
gtgttcggatgtccaaatttgccat

SEQ ID NO: 1683641 - DNA, 25 bp, Homo sapien
tggaggagagtaagctcgtgccacc

SEQ ID NO: 1683642 - DNA, 25 bp, Homo sapien
gccagtgggtgcaaggcatccctta

SEQ ID NO: 1683643 - DNA, 25 bp, Homo sapien
ggtgcaaggcatcccttagggacac

SEQ ID NO: 1683644 - DNA, 25 bp, Homo sapien
gactttcgtatagggatggctttgc

SEQ ID NO: 1683645 - DNA, 25 bp, Homo sapien
tggatgaaatgagaactcgggagac

SEQ ID NO: 1683646 - DNA, 25 bp, Homo sapien
tgtccaggtgtagagcagggtcaga

SEQ ID NO: 1683647 - DNA, 25 bp, Homo sapien
gtccaggtgtagagcagggtcagac

SEQ ID NO: 1683648 - DNA, 25 bp, Homo sapien
gtggatgaaatgagaactcgggaga

SEQ ID NO: 1683649 - DNA, 25 bp, Homo sapien
gaagattcaactttctggggaagtc

SEQ ID NO: 1683650 - DNA, 25 bp, Homo sapien
agggaattgcctgcggcgagccctt

SEQ ID NO: 1683651 - DNA, 25 bp, Homo sapien
agagacgttggtctgtgctgcacag

SEQ ID NO: 1683652 - DNA, 25 bp, Homo sapien
ctgttagccgatggtgacctttgaa

SEQ ID NO: 1683653 - DNA, 25 bp, Homo sapien
tcaaggagagacgttggtctgtgct

SEQ ID NO: 1683654 - DNA, 25 bp, Homo sapien
caatccagcttctgagagaggatct

SEQ ID NO: 1683655 - DNA, 25 bp, Homo sapien
cagtttagagtttccctccgaggca

SEQ ID NO: 1683656 - DNA, 25 bp, Homo sapien
ggcccgctcttggttgattcagttg

SEQ ID NO: 1683657 - DNA, 25 bp, Homo sapien
ttcttgtcccgacttgtcagaggcc

SEQ ID NO: 1683658 - DNA, 25 bp, Homo sapien
gaacatgaggatgtgaacctgagta

SEQ ID NO: 1683659 - DNA, 25 bp, Homo sapien
tgaacctgagtaagacggatctcta

SEQ ID NO: 1683660 - DNA, 25 bp, Homo sapien
agtaagacggatctctacccaaagg

SEQ ID NO: 1683661 - DNA, 25 bp, Homo sapien
gagctgtgaacatgaggatgtgaac

SEQ ID NO: 1683662 - DNA, 25 bp, Homo sapien
tcgtttgggtttagtgctggctgct

SEQ ID NO: 1683663 - DNA, 25 bp, Homo sapien
ggatgccacttgaatacgaaggtcg

SEQ ID NO: 1683664 - DNA, 25 bp, Homo sapien
ctcacgggtgcagtcgtttgggttt

SEQ ID NO: 1683665 - DNA, 25 bp, Homo sapien
tgatgccagaagcactcagtattga

SEQ ID NO: 1683666 - DNA, 25 bp, Homo sapien
tcctggatggcattagagggagcct

SEQ ID NO: 1683667 - DNA, 25 bp, Homo sapien
ggcaggatggagtgtgacaccacaa

SEQ ID NO: 1683668 - DNA, 25 bp, Homo sapien
tactctgtatgtgcccgttgttggg

SEQ ID NO: 1683669 - DNA, 25 bp, Homo sapien
gaggatggtggtctgtactctgtat

SEQ ID NO: 1683670 - DNA, 25 bp, Homo sapien
ttggagtaaatgattgctgtcagca

SEQ ID NO: 1683671 - DNA, 25 bp, Homo sapien
tctccagcacttccgcttcagggcc

SEQ ID NO: 1683672 - DNA, 25 bp, Homo sapien
ccagcacttccgcttcagggccagc

SEQ ID NO: 1683673 - DNA, 25 bp, Homo sapien
tccatcacaacccttcgggggtgct

SEQ ID NO: 1683674 - DNA, 25 bp, Homo sapien
ctcctcctggatccttgatccccct

SEQ ID NO: 1683675 - DNA, 25 bp, Homo sapien
cagccagatgatcgcagtgctcaga

SEQ ID NO: 1683676 - DNA, 25 bp, Homo sapien
gaagttccactcgtttgccatgtgt

SEQ ID NO: 1683677 - DNA, 25 bp, Homo sapien
ggcttgctctgcttaaaccgtgagt

SEQ ID NO: 1683678 - DNA, 25 bp, Homo sapien
cccgtcacgataagccagaagtatt

SEQ ID NO: 1683679 - DNA, 25 bp, Homo sapien
gatgacaaatgttatcaacaatatc

SEQ ID NO: 1683680 - DNA, 25 bp, Homo sapien
aagatgacaaatgttatcaacaata

SEQ ID NO: 1683681 - DNA, 25 bp, Homo sapien
gacaaatgttatcaacaatatccaa

SEQ ID NO: 1683682 - DNA, 25 bp, Homo sapien
tgacaaatgttatcaacaatatcca

SEQ ID NO: 1683683 - DNA, 25 bp, Homo sapien
gtcaccagggttctgtcttggagga

SEQ ID NO: 1683684 - DNA, 25 bp, Homo sapien
gtctgcagcactgcgagtcaccagg

SEQ ID NO: 1683685 - DNA, 25 bp, Homo sapien
tttggtcatgagtcgtgtgctggca

SEQ ID NO: 1683686 - DNA, 25 bp, Homo sapien
cttggaggagcactgtttggtcatg

SEQ ID NO: 1683687 - DNA, 25 bp, Homo sapien
gttctaaatacccagtgacacatat

SEQ ID NO: 1683688 - DNA, 25 bp, Homo sapien
tgggttgggtatgatggttctaaat

SEQ ID NO: 1683689 - DNA, 25 bp, Homo sapien
tccaccaacgtgcagcagtgggttg

SEQ ID NO: 1683690 - DNA, 25 bp, Homo sapien
tgacatttccaccaacgtgcagcag

SEQ ID NO: 1683691 - DNA, 25 bp, Homo sapien
tccagtggccctgagaatcacgatg

SEQ ID NO: 1683692 - DNA, 25 bp, Homo sapien
tataacatgaccttagaaatagcgc

SEQ ID NO: 1683693 - DNA, 25 bp, Homo sapien
gatggtcacgccattagaaggcagt

SEQ ID NO: 1683694 - DNA, 25 bp, Homo sapien
tctcctcagggaagtcagtctcgtg

SEQ ID NO: 1683695 - DNA, 25 bp, Homo sapien
ggtagctgatgggaacatttgttcc

SEQ ID NO: 1683696 - DNA, 25 bp, Homo sapien
tccttgtttctattggggacatgtt

SEQ ID NO: 1683697 - DNA, 25 bp, Homo sapien
tattggggacatgtttccattgagt

SEQ ID NO: 1683698 - DNA, 25 bp, Homo sapien
tccattgagtaaatcccctggccgc

SEQ ID NO: 1683699 - DNA, 25 bp, Homo sapien
ttctcccattgcactcttgcagagc

SEQ ID NO: 1683700 - DNA, 25 bp, Homo sapien
cccagtgcttggcttttggtacatg

SEQ ID NO: 1683701 - DNA, 25 bp, Homo sapien
ccagtgaccgggatctccctgaggg

SEQ ID NO: 1683702 - DNA, 25 bp, Homo sapien
tgcagagcatggtcctagcgtctcc

SEQ ID NO: 1683703 - DNA, 25 bp, Homo sapien
tttgcaatgctgttcggtctcagca

SEQ ID NO: 1683704 - DNA, 25 bp, Homo sapien
tggaacacccgttacttgcttgaat

SEQ ID NO: 1683705 - DNA, 25 bp, Homo sapien
catgtctgtgcaatccctgtgggtc

SEQ ID NO: 1683706 - DNA, 25 bp, Homo sapien
taagccatcatgacagaccctcgat

SEQ ID NO: 1683707 - DNA, 25 bp, Homo sapien
aaatccaaggatcggtgccaccgct

SEQ ID NO: 1683708 - DNA, 25 bp, Homo sapien
cattcagcacggttcgtggcttcca

SEQ ID NO: 1683709 - DNA, 25 bp, Homo sapien
tcctgagatcatgaatattgagaca

SEQ ID NO: 1683710 - DNA, 25 bp, Homo sapien
cggttcgtggcttccaaatccaagg

SEQ ID NO: 1683711 - DNA, 25 bp, Homo sapien
acttcttaaactctcctaatatacg

SEQ ID NO: 1683712 - DNA, 25 bp, Homo sapien
taaactctcctaatatacgaatcag

SEQ ID NO: 1683713 - DNA, 25 bp, Homo sapien
aactctcctaatatacgaatcagca

SEQ ID NO: 1683714 - DNA, 25 bp, Homo sapien
tcttaaactctcctaatatacgaat

SEQ ID NO: 1683715 - DNA, 25 bp, Homo sapien
attcccttgactttttacatctggt

SEQ ID NO: 1683716 - DNA, 25 bp, Homo sapien
gactttttacatctggttctattag

SEQ ID NO: 1683717 - DNA, 25 bp, Homo sapien
ccttgactttttacatctggttcta

SEQ ID NO: 1683718 - DNA, 25 bp, Homo sapien
tcccttgactttttacatctggttc

SEQ ID NO: 1683719 - DNA, 25 bp, Homo sapien
ctgtcagcgtgttaacttgttcttg

SEQ ID NO: 1683720 - DNA, 25 bp, Homo sapien
cagacaaaccctggaaggtagccca

SEQ ID NO: 1683721 - DNA, 25 bp, Homo sapien
aaccctggaaggtagcccacactgt

SEQ ID NO: 1683722 - DNA, 25 bp, Homo sapien
gcccacactgtcagcgtgttaactt

SEQ ID NO: 1683723 - DNA, 25 bp, Homo sapien
cccgctgattggtctaaggattttg

SEQ ID NO: 1683724 - DNA, 25 bp, Homo sapien
tggcagtgagccaaacactcccttc

SEQ ID NO: 1683725 - DNA, 25 bp, Homo sapien
gaacagatatactgcttgatcactg

SEQ ID NO: 1683726 - DNA, 25 bp, Homo sapien
gatcactgcatcgtaattggttttg

SEQ ID NO: 1683727 - DNA, 25 bp, Homo sapien
tatgtcaaaggctgtccagtcttct

SEQ ID NO: 1683728 - DNA, 25 bp, Homo sapien
gagacacagtggctatgtcaaaggc

SEQ ID NO: 1683729 - DNA, 25 bp, Homo sapien
gtcaaaggctgtccagtcttcttcc

SEQ ID NO: 1683730 - DNA, 25 bp, Homo sapien
ttgaagagacacagtggctatgtca

SEQ ID NO: 1683731 - DNA, 25 bp, Homo sapien
ctccttgttggggagtgtgatagtc

SEQ ID NO: 1683732 - DNA, 25 bp, Homo sapien
tgctcccctccttgttggggagtgt

SEQ ID NO: 1683733 - DNA, 25 bp, Homo sapien
ccttgttggggagtgtgatagtcct

SEQ ID NO: 1683734 - DNA, 25 bp, Homo sapien
cccctccttgttggggagtgtgata

SEQ ID NO: 1683735 - DNA, 25 bp, Homo sapien
gatgaccttttcacctccttccgga

SEQ ID NO: 1683736 - DNA, 25 bp, Homo sapien
aggatgaccttttcacctccttccg

SEQ ID NO: 1683737 - DNA, 25 bp, Homo sapien
atgaccttttcacctccttccggag

SEQ ID NO: 1683738 - DNA, 25 bp, Homo sapien
ctgtgtggacagcaggacatagccc

SEQ ID NO: 1683739 - DNA, 25 bp, Homo sapien
tgtgtggacagcaggacatagccca

SEQ ID NO: 1683740 - DNA, 25 bp, Homo sapien
gtgtggacagcaggacatagcccat

SEQ ID NO: 1683741 - DNA, 25 bp, Homo sapien
tgtcctgtctggacactcttaaagc

SEQ ID NO: 1683742 - DNA, 25 bp, Homo sapien
tgaatgtcctgtctggacactctta

SEQ ID NO: 1683743 - DNA, 25 bp, Homo sapien
tctgaatgtcctgtctggacactct

SEQ ID NO: 1683744 - DNA, 25 bp, Homo sapien
tgagaaatgccatctctgaatgtcc

SEQ ID NO: 1683745 - DNA, 25 bp, Homo sapien
aacagcaattcttagtggttctgac

SEQ ID NO: 1683746 - DNA, 25 bp, Homo sapien
acaacagcaattcttagtggttctg

SEQ ID NO: 1683747 - DNA, 25 bp, Homo sapien
ctttcttgttacacaacacaacagc

SEQ ID NO: 1683748 - DNA, 25 bp, Homo sapien
acacaacagcaattcttagtggttc

SEQ ID NO: 1683749 - DNA, 25 bp, Homo sapien
gaatccaaggtgcagaactcctttc

SEQ ID NO: 1683750 - DNA, 25 bp, Homo sapien
catgcactgagacttagtaaaaagg

SEQ ID NO: 1683751 - DNA, 25 bp, Homo sapien
ggaaggagagggtactccatgcact

SEQ ID NO: 1683752 - DNA, 25 bp, Homo sapien
ggcatttgtaagaagcaagtgggaa

SEQ ID NO: 1683753 - DNA, 25 bp, Homo sapien
tctggcacgcgtctggtgctcactc

SEQ ID NO: 1683754 - DNA, 25 bp, Homo sapien
cagtcaacatggctcggagtatggg

SEQ ID NO: 1683755 - DNA, 25 bp, Homo sapien
tgttgaacaggcatggctaccggga

SEQ ID NO: 1683756 - DNA, 25 bp, Homo sapien
tcactctggtcccagtcaacatggc

SEQ ID NO: 1683757 - DNA, 25 bp, Homo sapien
tctgcagtgatgaggccctggactg

SEQ ID NO: 1683758 - DNA, 25 bp, Homo sapien
ttttctgcccggcatgttgtcgtga

SEQ ID NO: 1683759 - DNA, 25 bp, Homo sapien
tgtcgtgatgtgtgttgctacgtgt

SEQ ID NO: 1683760 - DNA, 25 bp, Homo sapien
ggtgtcttctcgctgctgtatagta

SEQ ID NO: 1683761 - DNA, 25 bp, Homo sapien
tgaagcacgggtaagaagctctcgc

SEQ ID NO: 1683762 - DNA, 25 bp, Homo sapien
tattgccgtgtaggtactgggcgcc

SEQ ID NO: 1683763 - DNA, 25 bp, Homo sapien
gccttttaatgtgtcgtgaagcacg

SEQ ID NO: 1683764 - DNA, 25 bp, Homo sapien
gccaaccggtaagcagcaggctctt

SEQ ID NO: 1683765 - DNA, 25 bp, Homo sapien
aatgagagtgaaagcacagacttcc

SEQ ID NO: 1683766 - DNA, 25 bp, Homo sapien
tgtggccatcattctcccagactac

SEQ ID NO: 1683767 - DNA, 25 bp, Homo sapien
aagacttctctctggtaaacaggcc

SEQ ID NO: 1683768 - DNA, 25 bp, Homo sapien
gaaagtcctacaattgctgtggcca

SEQ ID NO: 1683769 - DNA, 25 bp, Homo sapien
tacgcattgtactccccatttgaca

SEQ ID NO: 1683770 - DNA, 25 bp, Homo sapien
acgcattgtactccccatttgacag

SEQ ID NO: 1683771 - DNA, 25 bp, Homo sapien
taggctttaagatacgcattgtact

SEQ ID NO: 1683772 - DNA, 25 bp, Homo sapien
aactggagtaggctttaagatacgc

SEQ ID NO: 1683773 - DNA, 25 bp, Homo sapien
aagcaattgaggatctggtaactaa

SEQ ID NO: 1683774 - DNA, 25 bp, Homo sapien
cgtggactcctcttgatagcagtgt

SEQ ID NO: 1683775 - DNA, 25 bp, Homo sapien
taccggtgaaagtgtgataatgaac

SEQ ID NO: 1683776 - DNA, 25 bp, Homo sapien
tgattactgagagctgccgtggact

SEQ ID NO: 1683777 - DNA, 25 bp, Homo sapien
gaagaacactagcaacaggatggga

SEQ ID NO: 1683778 - DNA, 25 bp, Homo sapien
gaggtccgttcctgcttgtggcaca

SEQ ID NO: 1683779 - DNA, 25 bp, Homo sapien
gggacctttaatacccactgacaga

SEQ ID NO: 1683780 - DNA, 25 bp, Homo sapien
gactgccaatgaagacccgctgtgt

SEQ ID NO: 1683781 - DNA, 25 bp, Homo sapien
aaatattttgtgccagtttcttcct

SEQ ID NO: 1683782 - DNA, 25 bp, Homo sapien
ctccagcacatgtcgaagtcaaagc

SEQ ID NO: 1683783 - DNA, 25 bp, Homo sapien
gctgagcacagatttttgacttcac

SEQ ID NO: 1683784 - DNA, 25 bp, Homo sapien
cacatgtcgaagtcaaagccaggct

SEQ ID NO: 1683785 - DNA, 25 bp, Homo sapien
gggttacccgaaagctgagtgtcat

SEQ ID NO: 1683786 - DNA, 25 bp, Homo sapien
gatctggggttacccgaaagctgag

SEQ ID NO: 1683787 - DNA, 25 bp, Homo sapien
tcctgagatctggggttacccgaaa

SEQ ID NO: 1683788 - DNA, 25 bp, Homo sapien
ctggggttacccgaaagctgagtgt

SEQ ID NO: 1683789 - DNA, 25 bp, Homo sapien
tcatggtctgctcgtttggactgca

SEQ ID NO: 1683790 - DNA, 25 bp, Homo sapien
gacctcctgggcgtttttatatcat

SEQ ID NO: 1683791 - DNA, 25 bp, Homo sapien
atcccatttgagaccttgacccaca

SEQ ID NO: 1683792 - DNA, 25 bp, Homo sapien
ggcgtttttatatcatcaaagtggc

SEQ ID NO: 1683793 - DNA, 25 bp, Homo sapien
gggtggccataaatagcttgctgca

SEQ ID NO: 1683794 - DNA, 25 bp, Homo sapien
gcagccccgcggctgatggtcgcgg

SEQ ID NO: 1683795 - DNA, 25 bp, Homo sapien
gtggccataaatagcttgctgcagc

SEQ ID NO: 1683796 - DNA, 25 bp, Homo sapien
cccgcggctgatggtcgcggtgcac

SEQ ID NO: 1683797 - DNA, 25 bp, Homo sapien
agagatgacttgagccaaaggttgt

SEQ ID NO: 1683798 - DNA, 25 bp, Homo sapien
gatgggtagagatgacttgagccaa

SEQ ID NO: 1683799 - DNA, 25 bp, Homo sapien
tgagggtaaggaaggcaagagtgtg

SEQ ID NO: 1683800 - DNA, 25 bp, Homo sapien
gtagagatgacttgagccaaaggtt

SEQ ID NO: 1683801 - DNA, 25 bp, Homo sapien
ccaggaatgcgaggaggtgtgggcc

SEQ ID NO: 1683802 - DNA, 25 bp, Homo sapien
ctggatggggccaaagattactgct

SEQ ID NO: 1683803 - DNA, 25 bp, Homo sapien
tactgctgacaattgagagcttgca

SEQ ID NO: 1683804 - DNA, 25 bp, Homo sapien
gacaattgagagcttgcagctccag

SEQ ID NO: 1683805 - DNA, 25 bp, Homo sapien
ctgcacaagtcgcgggtctagcttc

SEQ ID NO: 1683806 - DNA, 25 bp, Homo sapien
tttgcttgcaactggggccatggga

SEQ ID NO: 1683807 - DNA, 25 bp, Homo sapien
tgttttgcttgcaactggggccatg

SEQ ID NO: 1683808 - DNA, 25 bp, Homo sapien
gcttcaaaccactgttttgcttgca

SEQ ID NO: 1683809 - DNA, 25 bp, Homo sapien
ggcttcaaaccactgttttgcttgc

SEQ ID NO: 1683810 - DNA, 25 bp, Homo sapien
ggaatgggcttcatcagctatacat

SEQ ID NO: 1683811 - DNA, 25 bp, Homo sapien
aattcaagaattggtgttttcttca

SEQ ID NO: 1683812 - DNA, 25 bp, Homo sapien
tctgctccgtgatatgtgtgggttg

SEQ ID NO: 1683813 - DNA, 25 bp, Homo sapien
ggcgttttctgctccgtgatatgtg

SEQ ID NO: 1683814 - DNA, 25 bp, Homo sapien
tcttccattatttcgggtttcttca

SEQ ID NO: 1683815 - DNA, 25 bp, Homo sapien
ccattatttcgggtttcttcaccag

SEQ ID NO: 1683816 - DNA, 25 bp, Homo sapien
cattatttcgggtttcttcaccagg

SEQ ID NO: 1683817 - DNA, 25 bp, Homo sapien
tccattatttcgggtttcttcacca

SEQ ID NO: 1683818 - DNA, 25 bp, Homo sapien
tcatcccggtaggatcctgtcacac

SEQ ID NO: 1683819 - DNA, 25 bp, Homo sapien
gtgctaacttgttccccacactcat

SEQ ID NO: 1683820 - DNA, 25 bp, Homo sapien
ctctgttactgccacgctgttgatc

SEQ ID NO: 1683821 - DNA, 25 bp, Homo sapien
ggtatccctgatgagtgctaacttg

SEQ ID NO: 1683822 - DNA, 25 bp, Homo sapien
ctcttaggagttgttcctggagacc

SEQ ID NO: 1683823 - DNA, 25 bp, Homo sapien
gctgctcttaggagttgttcctgga

SEQ ID NO: 1683824 - DNA, 25 bp, Homo sapien
gcagctgctcttaggagttgttcct

SEQ ID NO: 1683825 - DNA, 25 bp, Homo sapien
tgctcttaggagttgttcctggaga

SEQ ID NO: 1683826 - DNA, 25 bp, Homo sapien
gaaaatggcttgtagtggggaggat

SEQ ID NO: 1683827 - DNA, 25 bp, Homo sapien
taacgaaatagaaggatacacatca

SEQ ID NO: 1683828 - DNA, 25 bp, Homo sapien
aattaacgaaatagaaggatacaca

SEQ ID NO: 1683829 - DNA, 25 bp, Homo sapien
aatggcttgtagtggggaggatgga

SEQ ID NO: 1683830 - DNA, 25 bp, Homo sapien
ctttcaatgccctttgccctatttg

SEQ ID NO: 1683831 - DNA, 25 bp, Homo sapien
gccctatttgtacgtcttgtgaccg

SEQ ID NO: 1683832 - DNA, 25 bp, Homo sapien
ggtatggattatgccctacccactg

SEQ ID NO: 1683833 - DNA, 25 bp, Homo sapien
cttgtgaccggtatggattatgccc

SEQ ID NO: 1683834 - DNA, 25 bp, Homo sapien
caagttcctgctgagtgtggctgtc

SEQ ID NO: 1683835 - DNA, 25 bp, Homo sapien
cctctgcggccctacggtaagtggc

SEQ ID NO: 1683836 - DNA, 25 bp, Homo sapien
agtagaaccttcttatctccctctc

SEQ ID NO: 1683837 - DNA, 25 bp, Homo sapien
tccttacatttgcttagagggatga

SEQ ID NO: 1683838 - DNA, 25 bp, Homo sapien
aaaggtatggagtgaagaatcagta

SEQ ID NO: 1683839 - DNA, 25 bp, Homo sapien
taaaggtatggagtgaagaatcagt

SEQ ID NO: 1683840 - DNA, 25 bp, Homo sapien
ttaaaggtatggagtgaagaatcag

SEQ ID NO: 1683841 - DNA, 25 bp, Homo sapien
tttaaaggtatggagtgaagaatca

SEQ ID NO: 1683842 - DNA, 25 bp, Homo sapien
tctgctcggcggtgttttgaggata

SEQ ID NO: 1683843 - DNA, 25 bp, Homo sapien
taattgtacaaagggatgggcagtt

SEQ ID NO: 1683844 - DNA, 25 bp, Homo sapien
tgcacccacatatctgtgagctctg

SEQ ID NO: 1683845 - DNA, 25 bp, Homo sapien
tattgtggtcttgatggccagtttc

SEQ ID NO: 1683846 - DNA, 25 bp, Homo sapien
cttcatgcttcctcaggtgatagga

SEQ ID NO: 1683847 - DNA, 25 bp, Homo sapien
ggctgagcttgcacgggctccttca

SEQ ID NO: 1683848 - DNA, 25 bp, Homo sapien
caatatcgaaatctgactggggcct

SEQ ID NO: 1683849 - DNA, 25 bp, Homo sapien
tcaatatcgaaatctgactggggcc

SEQ ID NO: 1683850 - DNA, 25 bp, Homo sapien
agcttgcacgggctccttcatgtcc

SEQ ID NO: 1683851 - DNA, 25 bp, Homo sapien
tcctgttgtactcgccctgtgattc

SEQ ID NO: 1683852 - DNA, 25 bp, Homo sapien
ccaaggcttttaaagctctgatttg

SEQ ID NO: 1683853 - DNA, 25 bp, Homo sapien
cgtatcctgttgtactcgccctgtg

SEQ ID NO: 1683854 - DNA, 25 bp, Homo sapien
tgtgattccatttatcccctccaag

SEQ ID NO: 1683855 - DNA, 25 bp, Homo sapien
cccagaagacaactccacctgatat

SEQ ID NO: 1683856 - DNA, 25 bp, Homo sapien
cacctgatatttgttgtaaaggccc

SEQ ID NO: 1683857 - DNA, 25 bp, Homo sapien
tcttataagaccaaagcatgacttg

SEQ ID NO: 1683858 - DNA, 25 bp, Homo sapien
catgacttgttggtacccagaagac

SEQ ID NO: 1683859 - DNA, 25 bp, Homo sapien
cctgggatgacccttgggcttctgc

SEQ ID NO: 1683860 - DNA, 25 bp, Homo sapien
tggctcgtgcctttatgctgtccct

SEQ ID NO: 1683861 - DNA, 25 bp, Homo sapien
tctttggctcgtgcctttatgctgt

SEQ ID NO: 1683862 - DNA, 25 bp, Homo sapien
tcttttctttggctcgtgcctttat

SEQ ID NO: 1683863 - DNA, 25 bp, Homo sapien
acagttagaggacacggagaagcca

SEQ ID NO: 1683864 - DNA, 25 bp, Homo sapien
ggcacagttagaggacacggagaag

SEQ ID NO: 1683865 - DNA, 25 bp, Homo sapien
tcggcatatccccatgaggcacagt

SEQ ID NO: 1683866 - DNA, 25 bp, Homo sapien
cacagttagaggacacggagaagcc

SEQ ID NO: 1683867 - DNA, 25 bp, Homo sapien
ccatgaatttgatacaaagtccaca

SEQ ID NO: 1683868 - DNA, 25 bp, Homo sapien
tggaccggggattctgctttgtgtc

SEQ ID NO: 1683869 - DNA, 25 bp, Homo sapien
tagcagctctcttccgctctggtga

SEQ ID NO: 1683870 - DNA, 25 bp, Homo sapien
ttgtgtccggctgccccgcagagat

SEQ ID NO: 1683871 - DNA, 25 bp, Homo sapien
gaactcgctgaacactgcctccttt

SEQ ID NO: 1683872 - DNA, 25 bp, Homo sapien
tgatccagtattcgctgtcctttga

SEQ ID NO: 1683873 - DNA, 25 bp, Homo sapien
gagaggtaaatgtgcccagagcagc

SEQ ID NO: 1683874 - DNA, 25 bp, Homo sapien
gctgccagacccttcgggactgatc

SEQ ID NO: 1683875 - DNA, 25 bp, Homo sapien
gccctttcattggagtagtcaacac

SEQ ID NO: 1683876 - DNA, 25 bp, Homo sapien
ggctaagtagccctttcattggagt

SEQ ID NO: 1683877 - DNA, 25 bp, Homo sapien
tgtacagcgcttgggctaagtagcc

SEQ ID NO: 1683878 - DNA, 25 bp, Homo sapien
ctctgtgtgtacagcgcttgggcta

SEQ ID NO: 1683879 - DNA, 25 bp, Homo sapien
actgtggggagaaacttgggcatcc

SEQ ID NO: 1683880 - DNA, 25 bp, Homo sapien
tgtggggagaaacttgggcatcccc

SEQ ID NO: 1683881 - DNA, 25 bp, Homo sapien
ggccctggtgtccccgacgcaggga

SEQ ID NO: 1683882 - DNA, 25 bp, Homo sapien
tgtccccgacgcagggaggaacaga

SEQ ID NO: 1683883 - DNA, 25 bp, Homo sapien
tcagcgtggctcgacaagtgctttg

SEQ ID NO: 1683884 - DNA, 25 bp, Homo sapien
gctcgacaagtgctttgggatctgc

SEQ ID NO: 1683885 - DNA, 25 bp, Homo sapien
cattccaggcccatccatcagcgtg

SEQ ID NO: 1683886 - DNA, 25 bp, Homo sapien
cgtggctcgacaagtgctttgggat

SEQ ID NO: 1683887 - DNA, 25 bp, Homo sapien
caattgtcttcgagggcaacgaggg

SEQ ID NO: 1683888 - DNA, 25 bp, Homo sapien
gccacgctagggttgcttgagagca

SEQ ID NO: 1683889 - DNA, 25 bp, Homo sapien
cgtgtcctgtgttcaaggtgcacgg

SEQ ID NO: 1683890 - DNA, 25 bp, Homo sapien
gggtcgcaggtttcaattgtcttcg

SEQ ID NO: 1683891 - DNA, 25 bp, Homo sapien
gtggcaagaaccggttgagtgtcct

SEQ ID NO: 1683892 - DNA, 25 bp, Homo sapien
tggcaagaaccggttgagtgtcctt

SEQ ID NO: 1683893 - DNA, 25 bp, Homo sapien
ggcaagaaccggttgagtgtccttc

SEQ ID NO: 1683894 - DNA, 25 bp, Homo sapien
ggtggcaagaaccggttgagtgtcc

SEQ ID NO: 1683895 - DNA, 25 bp, Homo sapien
cgggctttggtctttagagcctgac

SEQ ID NO: 1683896 - DNA, 25 bp, Homo sapien
tcacgggcagtgacattcaatccct

SEQ ID NO: 1683897 - DNA, 25 bp, Homo sapien
aaactccctgttccatcacgggcag

SEQ ID NO: 1683898 - DNA, 25 bp, Homo sapien
aggaagcaacgtgagcccaccacag

SEQ ID NO: 1683899 - DNA, 25 bp, Homo sapien
ctccttgttgtcctgaaacctgact

SEQ ID NO: 1683900 - DNA, 25 bp, Homo sapien
aacctgactctgtaggcagctgcca

SEQ ID NO: 1683901 - DNA, 25 bp, Homo sapien
tgttgtcctgaaacctgactctgta

SEQ ID NO: 1683902 - DNA, 25 bp, Homo sapien
ggctctaccctccttgttgtcctga

SEQ ID NO: 1683903 - DNA, 25 bp, Homo sapien
acaaatctgtcccgcttatcactag

SEQ ID NO: 1683904 - DNA, 25 bp, Homo sapien
aatctgtcccgcttatcactagcca

SEQ ID NO: 1683905 - DNA, 25 bp, Homo sapien
cgcttatcactagccacctcagcca

SEQ ID NO: 1683906 - DNA, 25 bp, Homo sapien
ccacaaatctgtcccgcttatcact

SEQ ID NO: 1683907 - DNA, 25 bp, Homo sapien
gtgttggactgcaggaagtaagact

SEQ ID NO: 1683908 - DNA, 25 bp, Homo sapien
tgtgttggactgcaggaagtaagac

SEQ ID NO: 1683909 - DNA, 25 bp, Homo sapien
ggttcccttccccacatcgcagtgg

SEQ ID NO: 1683910 - DNA, 25 bp, Homo sapien
gtggggatccccagggaatgcccac

SEQ ID NO: 1683911 - DNA, 25 bp, Homo sapien
cagatcatcccagcacgagccccac

SEQ ID NO: 1683912 - DNA, 25 bp, Homo sapien
cccagatcatcccagcacgagcccc

SEQ ID NO: 1683913 - DNA, 25 bp, Homo sapien
aacccagatcatcccagcacgagcc

SEQ ID NO: 1683914 - DNA, 25 bp, Homo sapien
ttaaacccagatcatcccagcacga

SEQ ID NO: 1683915 - DNA, 25 bp, Homo sapien
gtgctgggatgccatgcccagccca

SEQ ID NO: 1683916 - DNA, 25 bp, Homo sapien
aagggctgttaccatgtttgtttgt

SEQ ID NO: 1683917 - DNA, 25 bp, Homo sapien
gcaagaaggaggcttgtttcgggaa

SEQ ID NO: 1683918 - DNA, 25 bp, Homo sapien
cagctgcgtgactcctaagccattg

SEQ ID NO: 1683919 - DNA, 25 bp, Homo sapien
cacaatgcaatctcctgtgaaagtc

SEQ ID NO: 1683920 - DNA, 25 bp, Homo sapien
accacaatgcaatctcctgtgaaag

SEQ ID NO: 1683921 - DNA, 25 bp, Homo sapien
caatgcaatctcctgtgaaagtcag

SEQ ID NO: 1683922 - DNA, 25 bp, Homo sapien
aatgcaatctcctgtgaaagtcagg

SEQ ID NO: 1683923 - DNA, 25 bp, Homo sapien
tcctattagaagcaagattattatc

SEQ ID NO: 1683924 - DNA, 25 bp, Homo sapien
ttcaaaagccgttccatttaatgca

SEQ ID NO: 1683925 - DNA, 25 bp, Homo sapien
tatcttcagcatttagatggcgtgc

SEQ ID NO: 1683926 - DNA, 25 bp, Homo sapien
caacactgcattgaacagggttcct

SEQ ID NO: 1683927 - DNA, 25 bp, Homo sapien
cttccctgtgcacctgccatggctc

SEQ ID NO: 1683928 - DNA, 25 bp, Homo sapien
tccctgtgcacctgccatggctcca

SEQ ID NO: 1683929 - DNA, 25 bp, Homo sapien
ttccctgtgcacctgccatggctcc

SEQ ID NO: 1683930 - DNA, 25 bp, Homo sapien
ccctgtgcacctgccatggctccat

SEQ ID NO: 1683931 - DNA, 25 bp, Homo sapien
cagggtgagctaatttcatgacagc

SEQ ID NO: 1683932 - DNA, 25 bp, Homo sapien
catgacagctttctgcggtttagaa

SEQ ID NO: 1683933 - DNA, 25 bp, Homo sapien
tcttgctcctggttgggacacgctg

SEQ ID NO: 1683934 - DNA, 25 bp, Homo sapien
aattaagcatcatttcagggtgagc

SEQ ID NO: 1683935 - DNA, 25 bp, Homo sapien
gcctgtctggtcagattttgtccca

SEQ ID NO: 1683936 - DNA, 25 bp, Homo sapien
tggagcaggcctgtctggtcagatt

SEQ ID NO: 1683937 - DNA, 25 bp, Homo sapien
aggaagtttcccttagactggagca

SEQ ID NO: 1683938 - DNA, 25 bp, Homo sapien
gtttcccttagactggagcaggcct

SEQ ID NO: 1683939 - DNA, 25 bp, Homo sapien
tcattctatccaccgtcctgatggt

SEQ ID NO: 1683940 - DNA, 25 bp, Homo sapien
tctccgctgatttctctgagatggt

SEQ ID NO: 1683941 - DNA, 25 bp, Homo sapien
ctagtagtctgcactaagccctcgg

SEQ ID NO: 1683942 - DNA, 25 bp, Homo sapien
gcttggtaaacaggctctccgctga

SEQ ID NO: 1683943 - DNA, 25 bp, Homo sapien
ccattatttaatcgcaggtgcagaa

SEQ ID NO: 1683944 - DNA, 25 bp, Homo sapien
gaatagcccatattgcaatctggcc

SEQ ID NO: 1683945 - DNA, 25 bp, Homo sapien
gagaacattcttggcctgctgataa

SEQ ID NO: 1683946 - DNA, 25 bp, Homo sapien
gaaaccatacatgatcctttggctg

SEQ ID NO: 1683947 - DNA, 25 bp, Homo sapien
gacgggaggagatctagtgcctttc

SEQ ID NO: 1683948 - DNA, 25 bp, Homo sapien
tttcggccgtgtgccctgatgccgg

SEQ ID NO: 1683949 - DNA, 25 bp, Homo sapien
tggtttggtggcccatgtttcggac

SEQ ID NO: 1683950 - DNA, 25 bp, Homo sapien
ccatgtttcggacgggaggagatct

SEQ ID NO: 1683951 - DNA, 25 bp, Homo sapien
ctttctgatgcttcgatgttggctc

SEQ ID NO: 1683952 - DNA, 25 bp, Homo sapien
gctttctgatgcttcgatgttggct

SEQ ID NO: 1683953 - DNA, 25 bp, Homo sapien
tttctgatgcttcgatgttggctct

SEQ ID NO: 1683954 - DNA, 25 bp, Homo sapien
tctgatgcttcgatgttggctcttc

SEQ ID NO: 1683955 - DNA, 25 bp, Homo sapien
catgtgatactcagagacttgactt

SEQ ID NO: 1683956 - DNA, 25 bp, Homo sapien
gggtagctgggttgtactttctctc

SEQ ID NO: 1683957 - DNA, 25 bp, Homo sapien
tctccaagcatgtgatactcagaga

SEQ ID NO: 1683958 - DNA, 25 bp, Homo sapien
tcaatccatgggtcaacattctcca

SEQ ID NO: 1683959 - DNA, 25 bp, Homo sapien
cctggcaattcttgggtgtgtggcc

SEQ ID NO: 1683960 - DNA, 25 bp, Homo sapien
gaccctggcaattcttgggtgtgtg

SEQ ID NO: 1683961 - DNA, 25 bp, Homo sapien
ctggaccctggcaattcttgggtgt

SEQ ID NO: 1683962 - DNA, 25 bp, Homo sapien
tggcaattcttgggtgtgtggccat

SEQ ID NO: 1683963 - DNA, 25 bp, Homo sapien
tgggagagtctgctggctccgtggc

SEQ ID NO: 1683964 - DNA, 25 bp, Homo sapien
ttctgccttatccaagtgacttctg

SEQ ID NO: 1683965 - DNA, 25 bp, Homo sapien
tctgctggctccgtggcagtgtctg

SEQ ID NO: 1683966 - DNA, 25 bp, Homo sapien
tgtttctgccttatccaagtgactt

SEQ ID NO: 1683967 - DNA, 25 bp, Homo sapien
taaactgggcctgtactctgccagc

SEQ ID NO: 1683968 - DNA, 25 bp, Homo sapien
gccagaagctattcccagagacctt

SEQ ID NO: 1683969 - DNA, 25 bp, Homo sapien
gaggatggagaatcaggcgctcaca

SEQ ID NO: 1683970 - DNA, 25 bp, Homo sapien
tgccagcagtgggatcatcttaata

SEQ ID NO: 1683971 - DNA, 25 bp, Homo sapien
ttgtcgtttgccatgccctagaagg

SEQ ID NO: 1683972 - DNA, 25 bp, Homo sapien
tcctttcctccttacactattggcg

SEQ ID NO: 1683973 - DNA, 25 bp, Homo sapien
ttgccatgccctagaagggagtgga

SEQ ID NO: 1683974 - DNA, 25 bp, Homo sapien
tccttacactattggcggttgccat

SEQ ID NO: 1683975 - DNA, 25 bp, Homo sapien
aagcctaaggccagactttcaagac

SEQ ID NO: 1683976 - DNA, 25 bp, Homo sapien
cctaaggccagactttcaagaccag

SEQ ID NO: 1683977 - DNA, 25 bp, Homo sapien
acgccaagcctaaggccagactttc

SEQ ID NO: 1683978 - DNA, 25 bp, Homo sapien
cctgagcggcatggcaagaccatgt

SEQ ID NO: 1683979 - DNA, 25 bp, Homo sapien
tatggcccgtgatggcaaaagccac

SEQ ID NO: 1683980 - DNA, 25 bp, Homo sapien
cattactcctgggttttatggcccg

SEQ ID NO: 1683981 - DNA, 25 bp, Homo sapien
tcctcaccgtcaaactcccgtgctg

SEQ ID NO: 1683982 - DNA, 25 bp, Homo sapien
gagcattcagaacttttcccagttt

SEQ ID NO: 1683983 - DNA, 25 bp, Homo sapien
cagtgcagagccgtgggtgccacgt

SEQ ID NO: 1683984 - DNA, 25 bp, Homo sapien
gccagagtcaatttgaggacgccaa

SEQ ID NO: 1683985 - DNA, 25 bp, Homo sapien
tcaatttgaggacgccaagttctcc

SEQ ID NO: 1683986 - DNA, 25 bp, Homo sapien
ctttgccagccagagtcaatttgag

SEQ ID NO: 1683987 - DNA, 25 bp, Homo sapien
gaatgtaactttgttgaggccccga

SEQ ID NO: 1683988 - DNA, 25 bp, Homo sapien
tcaagtgcaaatagctcccagcctg

SEQ ID NO: 1683989 - DNA, 25 bp, Homo sapien
tgcactctggcattcacacaggcac

SEQ ID NO: 1683990 - DNA, 25 bp, Homo sapien
tgtgacctgccctcgggacttgtgg

SEQ ID NO: 1683991 - DNA, 25 bp, Homo sapien
gtgcggacacctcatcggcatcatg

SEQ ID NO: 1683992 - DNA, 25 bp, Homo sapien
catcatgtgtgacagttcagaactc

SEQ ID NO: 1683993 - DNA, 25 bp, Homo sapien
tgtgacagttcagaactcctaggct

SEQ ID NO: 1683994 - DNA, 25 bp, Homo sapien
agtggctactcactcccactactaa

SEQ ID NO: 1683995 - DNA, 25 bp, Homo sapien
tggctggcggtgacggagtaaattc

SEQ ID NO: 1683996 - DNA, 25 bp, Homo sapien
gtctcgctggctggcggtgacggag

SEQ ID NO: 1683997 - DNA, 25 bp, Homo sapien
tggcggtgacggagtaaattctgct

SEQ ID NO: 1683998 - DNA, 25 bp, Homo sapien
ctgagcatctgcgggtctcgctggc

SEQ ID NO: 1683999 - DNA, 25 bp, Homo sapien
tggaaactactgagtatggatttgc

SEQ ID NO: 1684000 - DNA, 25 bp, Homo sapien
caattaacccgtagggatctgtgtc

SEQ ID NO: 1684001 - DNA, 25 bp, Homo sapien
gcaacctcattgcaattaacccgta

SEQ ID NO: 1684002 - DNA, 25 bp, Homo sapien
gagtatggatttgcaacctcattgc

SEQ ID NO: 1684003 - DNA, 25 bp, Homo sapien
tgtgatagtcgttatacttttaatt

SEQ ID NO: 1684004 - DNA, 25 bp, Homo sapien
tgatagtcgttatacttttaattac

SEQ ID NO: 1684005 - DNA, 25 bp, Homo sapien
atgtgatagtcgttatacttttaat

SEQ ID NO: 1684006 - DNA, 25 bp, Homo sapien
gtgatagtcgttatacttttaatta

SEQ ID NO: 1684007 - DNA, 25 bp, Homo sapien
tgctccttccgccctttgacagaaa

SEQ ID NO: 1684008 - DNA, 25 bp, Homo sapien
taggatgtcataaagatggtgagac

SEQ ID NO: 1684009 - DNA, 25 bp, Homo sapien
tgtcctgctccttccgccctttgac

SEQ ID NO: 1684010 - DNA, 25 bp, Homo sapien
tgtcataaagatggtgagacattgt

SEQ ID NO: 1684011 - DNA, 25 bp, Homo sapien
ggaaaaaatcagatgtaggggcaga

SEQ ID NO: 1684012 - DNA, 25 bp, Homo sapien
ctcgaagaggatgaaccagaggcaa

SEQ ID NO: 1684013 - DNA, 25 bp, Homo sapien
tgagcaaacaacacacgagggaagt

SEQ ID NO: 1684014 - DNA, 25 bp, Homo sapien
ttgaagacctcgaagaggatgaacc

SEQ ID NO: 1684015 - DNA, 25 bp, Homo sapien
agatccaaggtgaaggctccgtttc

SEQ ID NO: 1684016 - DNA, 25 bp, Homo sapien
aaatggagttctcaggtgagcccac

SEQ ID NO: 1684017 - DNA, 25 bp, Homo sapien
cagcttgtgccaaatctcaggtgaa

SEQ ID NO: 1684018 - DNA, 25 bp, Homo sapien
gaattatgcctggattgccctggtc

SEQ ID NO: 1684019 - DNA, 25 bp, Homo sapien
ccagctagggaggttttcccatagc

SEQ ID NO: 1684020 - DNA, 25 bp, Homo sapien
cccagctagggaggttttcccatag

SEQ ID NO: 1684021 - DNA, 25 bp, Homo sapien
cagctagggaggttttcccatagct

SEQ ID NO: 1684022 - DNA, 25 bp, Homo sapien
agctagggaggttttcccatagctg

SEQ ID NO: 1684023 - DNA, 25 bp, Homo sapien
gctccactgtatacggcatacgagg

SEQ ID NO: 1684024 - DNA, 25 bp, Homo sapien
agtgctccactgtatacggcatacg

SEQ ID NO: 1684025 - DNA, 25 bp, Homo sapien
tagtatccagttaccagtgctccac

SEQ ID NO: 1684026 - DNA, 25 bp, Homo sapien
ttgtgtaggtagtatccagttacca

SEQ ID NO: 1684027 - DNA, 25 bp, Homo sapien
taagactcccactagagtggccacg

SEQ ID NO: 1684028 - DNA, 25 bp, Homo sapien
cttatcttgaagatgttgtattcac

SEQ ID NO: 1684029 - DNA, 25 bp, Homo sapien
gagtggccacgggaatattgttcat

SEQ ID NO: 1684030 - DNA, 25 bp, Homo sapien
gatgttgtattcacttaagactccc

SEQ ID NO: 1684031 - DNA, 25 bp, Homo sapien
gactgaaggcgtgtattgtggctca

SEQ ID NO: 1684032 - DNA, 25 bp, Homo sapien
tgtgaaacactaagctccgtgcctg

SEQ ID NO: 1684033 - DNA, 25 bp, Homo sapien
gaaaaagctaatgcctccccactgt

SEQ ID NO: 1684034 - DNA, 25 bp, Homo sapien
gcaggtgccactagtatagctctta

SEQ ID NO: 1684035 - DNA, 25 bp, Homo sapien
gataacaaagtcgttgaagacagga

SEQ ID NO: 1684036 - DNA, 25 bp, Homo sapien
gggtttatccaatcacgaactgaag

SEQ ID NO: 1684037 - DNA, 25 bp, Homo sapien
agttaagtggataattcctggacgc

SEQ ID NO: 1684038 - DNA, 25 bp, Homo sapien
gacttgccaggcattcgccacatgg

SEQ ID NO: 1684039 - DNA, 25 bp, Homo sapien
aatgtacaatctcataatcggattt

SEQ ID NO: 1684040 - DNA, 25 bp, Homo sapien
caatctcataatcggatttgtgctc

SEQ ID NO: 1684041 - DNA, 25 bp, Homo sapien
agggattcatcctgccttacagaga

SEQ ID NO: 1684042 - DNA, 25 bp, Homo sapien
tgaagggattcatcctgccttacag

SEQ ID NO: 1684043 - DNA, 25 bp, Homo sapien
cagatactcagggggctaaggcatg

SEQ ID NO: 1684044 - DNA, 25 bp, Homo sapien
gatactcagggggctaaggcatgag

SEQ ID NO: 1684045 - DNA, 25 bp, Homo sapien
ccagatactcagggggctaaggcat

SEQ ID NO: 1684046 - DNA, 25 bp, Homo sapien
agatactcagggggctaaggcatga

SEQ ID NO: 1684047 - DNA, 25 bp, Homo sapien
tgagtgttcttgtgggtctgtcctc

SEQ ID NO: 1684048 - DNA, 25 bp, Homo sapien
tcctgcttaggatttgttcttacat

SEQ ID NO: 1684049 - DNA, 25 bp, Homo sapien
gttcttacatctgccttgcaaagaa

SEQ ID NO: 1684050 - DNA, 25 bp, Homo sapien
tgtccccccttgtgagtgttcttgt

SEQ ID NO: 1684051 - DNA, 25 bp, Homo sapien
gatgaaatgcttcgtcattgctgtc

SEQ ID NO: 1684052 - DNA, 25 bp, Homo sapien
cacgaggcagttgactaactgggcc

SEQ ID NO: 1684053 - DNA, 25 bp, Homo sapien
tgctcttccaaccacattgtgaggg

SEQ ID NO: 1684054 - DNA, 25 bp, Homo sapien
cactggtttagtaggagttgcacga

SEQ ID NO: 1684055 - DNA, 25 bp, Homo sapien
gagtagcccctctgtagacagagca

SEQ ID NO: 1684056 - DNA, 25 bp, Homo sapien
gattgacccgtctgactagaatcac

SEQ ID NO: 1684057 - DNA, 25 bp, Homo sapien
gacccgtctgactagaatcacggct

SEQ ID NO: 1684058 - DNA, 25 bp, Homo sapien
ggcttcctgattgacccgtctgact

SEQ ID NO: 1684059 - DNA, 25 bp, Homo sapien
cctgattgacccgtctgactagaat

SEQ ID NO: 1684060 - DNA, 25 bp, Homo sapien
caaaccgaatgtttttcctgtcgca

SEQ ID NO: 1684061 - DNA, 25 bp, Homo sapien
gaatgtttttcctgtcgcaaatatg

SEQ ID NO: 1684062 - DNA, 25 bp, Homo sapien
cctgccaaaccgaatgtttttcctg

SEQ ID NO: 1684063 - DNA, 25 bp, Homo sapien
cctgtcgcaaatatgataaatcctg

SEQ ID NO: 1684064 - DNA, 25 bp, Homo sapien
aagcgtaactcccaccttagacctg

SEQ ID NO: 1684065 - DNA, 25 bp, Homo sapien
caattcttggtcactcttaaccaaa

SEQ ID NO: 1684066 - DNA, 25 bp, Homo sapien
cctggaggcgaatccttaaaagctg

SEQ ID NO: 1684067 - DNA, 25 bp, Homo sapien
tcccaccttagacctggaggcgaat

SEQ ID NO: 1684068 - DNA, 25 bp, Homo sapien
gagtgtttgaattgatatttttgaa

SEQ ID NO: 1684069 - DNA, 25 bp, Homo sapien
cactctgagtgtttgaattgatatt

SEQ ID NO: 1684070 - DNA, 25 bp, Homo sapien
agcatcctttgacccaaaacaggta

SEQ ID NO: 1684071 - DNA, 25 bp, Homo sapien
ccaaagcatcctttgacccaaaaca

SEQ ID NO: 1684072 - DNA, 25 bp, Homo sapien
tagcctcggaataaaacgtggcaga

SEQ ID NO: 1684073 - DNA, 25 bp, Homo sapien
cacttcccaaaaggcaaccgagagc

SEQ ID NO: 1684074 - DNA, 25 bp, Homo sapien
taggcacgttattggaagctttcag

SEQ ID NO: 1684075 - DNA, 25 bp, Homo sapien
cctggattcaaatcgcgccttggcc

SEQ ID NO: 1684076 - DNA, 25 bp, Homo sapien
taatcgctgaaacaaatgaagtagc

SEQ ID NO: 1684077 - DNA, 25 bp, Homo sapien
gtagcaggccctggcatagcgcttt

SEQ ID NO: 1684078 - DNA, 25 bp, Homo sapien
cctgtcgtgctggtttaatcgctga

SEQ ID NO: 1684079 - DNA, 25 bp, Homo sapien
aactttgtcaagtctcgcatcgcga

SEQ ID NO: 1684080 - DNA, 25 bp, Homo sapien
gcctccgctcgacccgcttggagga

SEQ ID NO: 1684081 - DNA, 25 bp, Homo sapien
cccaggagtgaagccccggcggctg

SEQ ID NO: 1684082 - DNA, 25 bp, Homo sapien
gaggacgtcgctggtggcccaggag

SEQ ID NO: 1684083 - DNA, 25 bp, Homo sapien
ctgcccctgggtcgcgaacgcgcct

SEQ ID NO: 1684084 - DNA, 25 bp, Homo sapien
ctgcttgtgccgtgcagccggtgtc

SEQ ID NO: 1684085 - DNA, 25 bp, Homo sapien
agccggtgtcacctcaggacagcgc

SEQ ID NO: 1684086 - DNA, 25 bp, Homo sapien
cttgtgccgtgcagccggtgtcacc

SEQ ID NO: 1684087 - DNA, 25 bp, Homo sapien
ggtgtcacctcaggacagcgcctcg

SEQ ID NO: 1684088 - DNA, 25 bp, Homo sapien
gtaggagtgccccaggacgcccggc

SEQ ID NO: 1684089 - DNA, 25 bp, Homo sapien
tgatcttctggaagttgtagtcccc

SEQ ID NO: 1684090 - DNA, 25 bp, Homo sapien
ggagagccgcctattcccggggcac

SEQ ID NO: 1684091 - DNA, 25 bp, Homo sapien
ctattcccggggcaccttagaatgg

SEQ ID NO: 1684092 - DNA, 25 bp, Homo sapien
cacggccgccccacgccagcccccg

SEQ ID NO: 1684093 - DNA, 25 bp, Homo sapien
cccccgccactgccttcgcgtctac

SEQ ID NO: 1684094 - DNA, 25 bp, Homo sapien
cagtgcgagcagaagagtcaactcc

SEQ ID NO: 1684095 - DNA, 25 bp, Homo sapien
tacatcagcgaaacgtgaaggtcct

SEQ ID NO: 1684096 - DNA, 25 bp, Homo sapien
gaaggtccttagtgtctgatccgta

SEQ ID NO: 1684097 - DNA, 25 bp, Homo sapien
gaagtcacgtttgtgctgcagcagc

SEQ ID NO: 1684098 - DNA, 25 bp, Homo sapien
ttggtggtggttgatcttgtaatcc

SEQ ID NO: 1684099 - DNA, 25 bp, Homo sapien
tcttgtaatccgacttttcttcctc

SEQ ID NO: 1684100 - DNA, 25 bp, Homo sapien
ttaaagccgtcagaaatttgcaaaa

SEQ ID NO: 1684101 - DNA, 25 bp, Homo sapien
caaaaggggacaattgcttcatgaa

SEQ ID NO: 1684102 - DNA, 25 bp, Homo sapien
tctgaatgatattcctcttgggtct

SEQ ID NO: 1684103 - DNA, 25 bp, Homo sapien
gatattcctcttgggtctttccttg

SEQ ID NO: 1684104 - DNA, 25 bp, Homo sapien
aatgatattcctcttgggtctttcc

SEQ ID NO: 1684105 - DNA, 25 bp, Homo sapien
cttctgaatgatattcctcttgggt

SEQ ID NO: 1684106 - DNA, 25 bp, Homo sapien
agtcaaaggatgtgttgttaggagc

SEQ ID NO: 1684107 - DNA, 25 bp, Homo sapien
gctttgtggctgcatccgaaacgga

SEQ ID NO: 1684108 - DNA, 25 bp, Homo sapien
acctcaacgaggtccggaatgggag

SEQ ID NO: 1684109 - DNA, 25 bp, Homo sapien
gggtgcggttctcgtccaagttcta

SEQ ID NO: 1684110 - DNA, 25 bp, Homo sapien
aagttctaccccatttgctttgtgg

SEQ ID NO: 1684111 - DNA, 25 bp, Homo sapien
ggtgggaagcgcgacgctccggagc

SEQ ID NO: 1684112 - DNA, 25 bp, Homo sapien
gaagcgcgacgctccggagcggaag

SEQ ID NO: 1684113 - DNA, 25 bp, Homo sapien
tgggaagcgcgacgctccggagcgg

SEQ ID NO: 1684114 - DNA, 25 bp, Homo sapien
ctggtgggaagcgcgacgctccgga

SEQ ID NO: 1684115 - DNA, 25 bp, Homo sapien
cctgatcaaatagtggtgaagcccc

SEQ ID NO: 1684116 - DNA, 25 bp, Homo sapien
tattgcagtgggagtcgtgctcaac

SEQ ID NO: 1684117 - DNA, 25 bp, Homo sapien
tattctccctaggaataaccaggca

SEQ ID NO: 1684118 - DNA, 25 bp, Homo sapien
aactcagcaggcatcccgggctttt

SEQ ID NO: 1684119 - DNA, 25 bp, Homo sapien
tttgtttaatggatggcccagcccc

SEQ ID NO: 1684120 - DNA, 25 bp, Homo sapien
gcctcagatacacccaagaatgtgg

SEQ ID NO: 1684121 - DNA, 25 bp, Homo sapien
caaactggttcctgcaagtctggag

SEQ ID NO: 1684122 - DNA, 25 bp, Homo sapien
catggtcccctaagcctcaaagtca

SEQ ID NO: 1684123 - DNA, 25 bp, Homo sapien
ttttgttaaccttctaggagcatgg

SEQ ID NO: 1684124 - DNA, 25 bp, Homo sapien
aaatccaattgagaccttttaggca

SEQ ID NO: 1684125 - DNA, 25 bp, Homo sapien
ggtggtggagcttgacagacttaca

SEQ ID NO: 1684126 - DNA, 25 bp, Homo sapien
cgcccggccctgtggctatgtattt

SEQ ID NO: 1684127 - DNA, 25 bp, Homo sapien
catagagcaatgaattaagcctgaa

SEQ ID NO: 1684128 - DNA, 25 bp, Homo sapien
ccagctgggtctgaacagaagcctt

SEQ ID NO: 1684129 - DNA, 25 bp, Homo sapien
caagactatcattgttaacctaggc

SEQ ID NO: 1684130 - DNA, 25 bp, Homo sapien
taacctaggcattattgggaaatat

SEQ ID NO: 1684131 - DNA, 25 bp, Homo sapien
cactgcgcactggaatggattcctc

SEQ ID NO: 1684132 - DNA, 25 bp, Homo sapien
gctggatccggccaacattacaagg

SEQ ID NO: 1684133 - DNA, 25 bp, Homo sapien
cattacaaggacaaccaactggtct

SEQ ID NO: 1684134 - DNA, 25 bp, Homo sapien
ccggagcagtagctgttaaaagaca

SEQ ID NO: 1684135 - DNA, 25 bp, Homo sapien
ggatataagtacacattctgcagaa

SEQ ID NO: 1684136 - DNA, 25 bp, Homo sapien
gccttcggaggcttgtcatgcttca

SEQ ID NO: 1684137 - DNA, 25 bp, Homo sapien
ttccatccaggctttcggatataag

SEQ ID NO: 1684138 - DNA, 25 bp, Homo sapien
gacgtgtgcatgtgaaagagctgca

SEQ ID NO: 1684139 - DNA, 25 bp, Homo sapien
ggaagaagctctcccatgttaaaaa

SEQ ID NO: 1684140 - DNA, 25 bp, Homo sapien
cagctgcgtgtgagcattctgccaa

SEQ ID NO: 1684141 - DNA, 25 bp, Homo sapien
aaagcaaattctttgcagctgcgtg

SEQ ID NO: 1684142 - DNA, 25 bp, Homo sapien
cattctgccaactgaagcacaggaa

SEQ ID NO: 1684143 - DNA, 25 bp, Homo sapien
acgcacacgcctgactttaagaggt

SEQ ID NO: 1684144 - DNA, 25 bp, Homo sapien
gagttagagccccgaacttccttga

SEQ ID NO: 1684145 - DNA, 25 bp, Homo sapien
ttttgttctgtagtctcactaatgc

SEQ ID NO: 1684146 - DNA, 25 bp, Homo sapien
cttgcctgccatgggcacacgcaca

SEQ ID NO: 1684147 - DNA, 25 bp, Homo sapien
taacgagaaacaggcactggcattt

SEQ ID NO: 1684148 - DNA, 25 bp, Homo sapien
cctaacgagaaacaggcactggcat

SEQ ID NO: 1684149 - DNA, 25 bp, Homo sapien
ctaacgagaaacaggcactggcatt

SEQ ID NO: 1684150 - DNA, 25 bp, Homo sapien
ttttgataaattctaggacattccc

SEQ ID NO: 1684151 - DNA, 25 bp, Homo sapien
tcttttgataaattctaggacattc

SEQ ID NO: 1684152 - DNA, 25 bp, Homo sapien
gatggttcagcacatcttttgataa

SEQ ID NO: 1684153 - DNA, 25 bp, Homo sapien
catcttttgataaattctaggacat

SEQ ID NO: 1684154 - DNA, 25 bp, Homo sapien
tctcctacaagctgctcagtgaaca

SEQ ID NO: 1684155 - DNA, 25 bp, Homo sapien
taactaggacatttatcaagtcgaa

SEQ ID NO: 1684156 - DNA, 25 bp, Homo sapien
aaaatggactggacactcgagggga

SEQ ID NO: 1684157 - DNA, 25 bp, Homo sapien
cttaggcagcttaaatagggaaggg

SEQ ID NO: 1684158 - DNA, 25 bp, Homo sapien
taaaggacaatggacagactagaag

SEQ ID NO: 1684159 - DNA, 25 bp, Homo sapien
aggacaatggacagactagaagaaa

SEQ ID NO: 1684160 - DNA, 25 bp, Homo sapien
acttaaaggacaatggacagactag

SEQ ID NO: 1684161 - DNA, 25 bp, Homo sapien
gcggagcacaaggtcggcagatcga

SEQ ID NO: 1684162 - DNA, 25 bp, Homo sapien
tcaagcctcaggttcaagattatcc

SEQ ID NO: 1684163 - DNA, 25 bp, Homo sapien
gttcaatgacgccatctgggctgac

SEQ ID NO: 1684164 - DNA, 25 bp, Homo sapien
atgacgccatctgggctgaccgcaa

SEQ ID NO: 1684165 - DNA, 25 bp, Homo sapien
aaagaggcagcagttgtaatatgga

SEQ ID NO: 1684166 - DNA, 25 bp, Homo sapien
tatgccctacaataagatctccttt

SEQ ID NO: 1684167 - DNA, 25 bp, Homo sapien
aagacttcaatagaagctcaaaggg

SEQ ID NO: 1684168 - DNA, 25 bp, Homo sapien
tgtaaccccacagggcctagttatg

SEQ ID NO: 1684169 - DNA, 25 bp, Homo sapien
aaaatccaagtaagattcaccattg

SEQ ID NO: 1684170 - DNA, 25 bp, Homo sapien
tttgctctcgccctgccttatggtg

SEQ ID NO: 1684171 - DNA, 25 bp, Homo sapien
tccactgctcactaacgagagaagc

SEQ ID NO: 1684172 - DNA, 25 bp, Homo sapien
tgtgtccctcgatgcttcccttgga

SEQ ID NO: 1684173 - DNA, 25 bp, Homo sapien
tcatctccggcttgggtaccagagc

SEQ ID NO: 1684174 - DNA, 25 bp, Homo sapien
tgcaaaacttgggttgaggccctca

SEQ ID NO: 1684175 - DNA, 25 bp, Homo sapien
tatatgcaaaacttgggttgaggcc

SEQ ID NO: 1684176 - DNA, 25 bp, Homo sapien
aacttgggttgaggccctcacacta

SEQ ID NO: 1684177 - DNA, 25 bp, Homo sapien
ccctcacactaaagtcacacgacat

SEQ ID NO: 1684178 - DNA, 25 bp, Homo sapien
taacaagctagttgctggccaagca

SEQ ID NO: 1684179 - DNA, 25 bp, Homo sapien
tgtcacgacacctatggagatgttt

SEQ ID NO: 1684180 - DNA, 25 bp, Homo sapien
tcacaggatgtaagcaggaagccaa

SEQ ID NO: 1684181 - DNA, 25 bp, Homo sapien
gaagccaagataaggccacagggcc

SEQ ID NO: 1684182 - DNA, 25 bp, Homo sapien
accccactgagtaggggccaaacat

SEQ ID NO: 1684183 - DNA, 25 bp, Homo sapien
gtgttgtgggaaacgaagtctgaaa

SEQ ID NO: 1684184 - DNA, 25 bp, Homo sapien
tagagaaaatctagggtctactaaa

SEQ ID NO: 1684185 - DNA, 25 bp, Homo sapien
actctcctgctaactctgacaggag

SEQ ID NO: 1684186 - DNA, 25 bp, Homo sapien
gatttgccacagatcctgtaaagga

SEQ ID NO: 1684187 - DNA, 25 bp, Homo sapien
cctgagtagcttccggccaaatgag

SEQ ID NO: 1684188 - DNA, 25 bp, Homo sapien
cactgagaaccatctgtgtggcgcc

SEQ ID NO: 1684189 - DNA, 25 bp, Homo sapien
cctaactggcctaactgagcaggaa

SEQ ID NO: 1684190 - DNA, 25 bp, Homo sapien
aaatgaggaccgctctgcgaactgc

SEQ ID NO: 1684191 - DNA, 25 bp, Homo sapien
tctgcaacttggacggactgggaga

SEQ ID NO: 1684192 - DNA, 25 bp, Homo sapien
tcactcatctagatatgggagtctg

SEQ ID NO: 1684193 - DNA, 25 bp, Homo sapien
aagggccttccgatgattgtctggc

SEQ ID NO: 1684194 - DNA, 25 bp, Homo sapien
gactgtaaccatgagctggctgctc

SEQ ID NO: 1684195 - DNA, 25 bp, Homo sapien
ctgtggcttgtgttaaggactttgc

SEQ ID NO: 1684196 - DNA, 25 bp, Homo sapien
gcttttgtattgtgcagaaaggcag

SEQ ID NO: 1684197 - DNA, 25 bp, Homo sapien
tttttgcaagccgaatcagagtgcc

SEQ ID NO: 1684198 - DNA, 25 bp, Homo sapien
gcagaaaggcagatcgaatatttac

SEQ ID NO: 1684199 - DNA, 25 bp, Homo sapien
cccacagattttatggaaggcacta

SEQ ID NO: 1684200 - DNA, 25 bp, Homo sapien
gaacgccagtgttttcgtcggaaca

SEQ ID NO: 1684201 - DNA, 25 bp, Homo sapien
tcggtttgcgggaaagatgctgaac

SEQ ID NO: 1684202 - DNA, 25 bp, Homo sapien
aagctccgacggcaatccattaaca

SEQ ID NO: 1684203 - DNA, 25 bp, Homo sapien
caacagcctgcgtagatgtgaacag

SEQ ID NO: 1684204 - DNA, 25 bp, Homo sapien
tttctgaatctgtacggcacactgc

SEQ ID NO: 1684205 - DNA, 25 bp, Homo sapien
tcagtgttggcagcagacttcccag

SEQ ID NO: 1684206 - DNA, 25 bp, Homo sapien
tgctctcaaggacagcatgctgccg

SEQ ID NO: 1684207 - DNA, 25 bp, Homo sapien
catacttgcatacaggccatgctaa

SEQ ID NO: 1684208 - DNA, 25 bp, Homo sapien
tgtcatacttgcatacaggccatgc

SEQ ID NO: 1684209 - DNA, 25 bp, Homo sapien
aaatttctgtgtcatacttgcatac

SEQ ID NO: 1684210 - DNA, 25 bp, Homo sapien
tctgtgtcatacttgcatacaggcc

SEQ ID NO: 1684211 - DNA, 25 bp, Homo sapien
gatgaagttcaacctcactttcagt

SEQ ID NO: 1684212 - DNA, 25 bp, Homo sapien
ctccaggtctactgaagtaaaaggt

SEQ ID NO: 1684213 - DNA, 25 bp, Homo sapien
cctcactttcagttcaagaggcaag

SEQ ID NO: 1684214 - DNA, 25 bp, Homo sapien
caacctcactttcagttcaagaggc

SEQ ID NO: 1684215 - DNA, 25 bp, Homo sapien
gaaacacaagagataatccttccaa

SEQ ID NO: 1684216 - DNA, 25 bp, Homo sapien
ggcccccgtataaagatgacatgca

SEQ ID NO: 1684217 - DNA, 25 bp, Homo sapien
tttaaagtgatcacaagcaaaatgt

SEQ ID NO: 1684218 - DNA, 25 bp, Homo sapien
gatttcctaggacacaaaaaggatg

SEQ ID NO: 1684219 - DNA, 25 bp, Homo sapien
tgttcaagatgtacttctagaccgc

SEQ ID NO: 1684220 - DNA, 25 bp, Homo sapien
aaagtacccttagacattcccacag

SEQ ID NO: 1684221 - DNA, 25 bp, Homo sapien
tctagaccgctgatccctaatagga

SEQ ID NO: 1684222 - DNA, 25 bp, Homo sapien
cacaccatcatgaagaaagggtctc

SEQ ID NO: 1684223 - DNA, 25 bp, Homo sapien
ttcctccggtaatgtggtcgtgacc

SEQ ID NO: 1684224 - DNA, 25 bp, Homo sapien
taatgtggtcgtgaccactgtgttg

SEQ ID NO: 1684225 - DNA, 25 bp, Homo sapien
ggtcgtgaccactgtgttgtatcaa

SEQ ID NO: 1684226 - DNA, 25 bp, Homo sapien
tgtgttgtatcaaactctggccaca

SEQ ID NO: 1684227 - DNA, 25 bp, Homo sapien
taattacaacacataacactctttc

SEQ ID NO: 1684228 - DNA, 25 bp, Homo sapien
gagtagttaattcctgaaataccgc

SEQ ID NO: 1684229 - DNA, 25 bp, Homo sapien
ccttgtacttaaggactatcttagg

SEQ ID NO: 1684230 - DNA, 25 bp, Homo sapien
gaagtctagtgagatgtccttgtac

SEQ ID NO: 1684231 - DNA, 25 bp, Homo sapien
tccagtcaatgaagtgtgggaagcc

SEQ ID NO: 1684232 - DNA, 25 bp, Homo sapien
gaagccttgttgaagcatgactcag

SEQ ID NO: 1684233 - DNA, 25 bp, Homo sapien
taagcgggcactactctaaactctg

SEQ ID NO: 1684234 - DNA, 25 bp, Homo sapien
ctatgtcatcttgcccttaagcggg

SEQ ID NO: 1684235 - DNA, 25 bp, Homo sapien
ttttatactcgagaagaaagcaaga

SEQ ID NO: 1684236 - DNA, 25 bp, Homo sapien
ttgacatttttatactcgagaagaa

SEQ ID NO: 1684237 - DNA, 25 bp, Homo sapien
ctgtatggtttcagcgaagaataaa

SEQ ID NO: 1684238 - DNA, 25 bp, Homo sapien
tgtatggtttcagcgaagaataaag

SEQ ID NO: 1684239 - DNA, 25 bp, Homo sapien
ttaatttgtactgttcctccagact

SEQ ID NO: 1684240 - DNA, 25 bp, Homo sapien
taaaacagtgcactttaatttgtac

SEQ ID NO: 1684241 - DNA, 25 bp, Homo sapien
ttgtactgttcctccagactgaaca

SEQ ID NO: 1684242 - DNA, 25 bp, Homo sapien
tactgttcctccagactgaacaatc

SEQ ID NO: 1684243 - DNA, 25 bp, Homo sapien
tcaccacgatcaattggcattcgat

SEQ ID NO: 1684244 - DNA, 25 bp, Homo sapien
aaaggatcattctaatgtgacaggc

SEQ ID NO: 1684245 - DNA, 25 bp, Homo sapien
aggctcctaacttctgagccagcag

SEQ ID NO: 1684246 - DNA, 25 bp, Homo sapien
gagccagcagcttattactagaaca

SEQ ID NO: 1684247 - DNA, 25 bp, Homo sapien
ctttttatcggcaactggactctcc

SEQ ID NO: 1684248 - DNA, 25 bp, Homo sapien
ttatcggcaactggactctcccctg

SEQ ID NO: 1684249 - DNA, 25 bp, Homo sapien
cgcaaactttttatcggcaactgga

SEQ ID NO: 1684250 - DNA, 25 bp, Homo sapien
attcttctgccgtccccttatctcc

SEQ ID NO: 1684251 - DNA, 25 bp, Homo sapien
ctacaaaataaagcctccgggattg

SEQ ID NO: 1684252 - DNA, 25 bp, Homo sapien
tccaggttggaagtggttccagtcc

SEQ ID NO: 1684253 - DNA, 25 bp, Homo sapien
caggaaacccctcttgcaggaaaca

SEQ ID NO: 1684254 - DNA, 25 bp, Homo sapien
tacccacagggtggccaaaacaggc

SEQ ID NO: 1684255 - DNA, 25 bp, Homo sapien
agacactcatgcttcacaggtagag

SEQ ID NO: 1684256 - DNA, 25 bp, Homo sapien
ggtcaagtcatttattacccaaatc

SEQ ID NO: 1684257 - DNA, 25 bp, Homo sapien
acagggaaatacctcgtggaaactg

SEQ ID NO: 1684258 - DNA, 25 bp, Homo sapien
caagggcactggtagtaacgacagg

SEQ ID NO: 1684259 - DNA, 25 bp, Homo sapien
tcttggcccactctggaatggccca

SEQ ID NO: 1684260 - DNA, 25 bp, Homo sapien
ctcttcttggcccactctggaatgg

SEQ ID NO: 1684261 - DNA, 25 bp, Homo sapien
tggaatggcccacaaaaccaagcac

SEQ ID NO: 1684262 - DNA, 25 bp, Homo sapien
cccactctggaatggcccacaaaac

SEQ ID NO: 1684263 - DNA, 25 bp, Homo sapien
cttataatcctctagcagaatccca

SEQ ID NO: 1684264 - DNA, 25 bp, Homo sapien
agacagcaaaggtgtgcctgcactc

SEQ ID NO: 1684265 - DNA, 25 bp, Homo sapien
gacagcaaaggtgtgcctgcactca

SEQ ID NO: 1684266 - DNA, 25 bp, Homo sapien
gcagaatcccagatgcagacagcaa

SEQ ID NO: 1684267 - DNA, 25 bp, Homo sapien
tctagaagaaggaggtacatccagt

SEQ ID NO: 1684268 - DNA, 25 bp, Homo sapien
gagatttccgactgctgggcagtgc

SEQ ID NO: 1684269 - DNA, 25 bp, Homo sapien
aaacatccacagaccacggtacggg

SEQ ID NO: 1684270 - DNA, 25 bp, Homo sapien
gaggtacatccagtcttcctgtccg

SEQ ID NO: 1684271 - DNA, 25 bp, Homo sapien
tacgtaccacccgttcttctgacca

SEQ ID NO: 1684272 - DNA, 25 bp, Homo sapien
aatgccttccgcatgctgcctcttc

SEQ ID NO: 1684273 - DNA, 25 bp, Homo sapien
cagcaatgccttccgcatgctgcct

SEQ ID NO: 1684274 - DNA, 25 bp, Homo sapien
ttcttctgaccacggaatcccatca

SEQ ID NO: 1684275 - DNA, 25 bp, Homo sapien
cacacttctagaggtatgcaaagct

SEQ ID NO: 1684276 - DNA, 25 bp, Homo sapien
acacttctagaggtatgcaaagctg

SEQ ID NO: 1684277 - DNA, 25 bp, Homo sapien
gcacacttctagaggtatgcaaagc

SEQ ID NO: 1684278 - DNA, 25 bp, Homo sapien
agcacacttctagaggtatgcaaag

SEQ ID NO: 1684279 - DNA, 25 bp, Homo sapien
tgaggatctttcacagaactggctc

SEQ ID NO: 1684280 - DNA, 25 bp, Homo sapien
aaacagaagctgttttctctcattg

SEQ ID NO: 1684281 - DNA, 25 bp, Homo sapien
acagaagctgttttctctcattgtt

SEQ ID NO: 1684282 - DNA, 25 bp, Homo sapien
tcttgaggatctttcacagaactgg

SEQ ID NO: 1684283 - DNA, 25 bp, Homo sapien
tttttggctgggaaacctgggcagc

SEQ ID NO: 1684284 - DNA, 25 bp, Homo sapien
tcccaggttcctcaagataagccac

SEQ ID NO: 1684285 - DNA, 25 bp, Homo sapien
ctgacagacccgtggagcagccatc

SEQ ID NO: 1684286 - DNA, 25 bp, Homo sapien
caggttcctcaagataagccaccaa

SEQ ID NO: 1684287 - DNA, 25 bp, Homo sapien
ctgcacctgacagacccgtggagca

SEQ ID NO: 1684288 - DNA, 25 bp, Homo sapien
cctgattgaaactgcagctttggcc

SEQ ID NO: 1684289 - DNA, 25 bp, Homo sapien
gaatgtggccatggaatctgctaag

SEQ ID NO: 1684290 - DNA, 25 bp, Homo sapien
tgaggcaccaaacattgaaggttcc

SEQ ID NO: 1684291 - DNA, 25 bp, Homo sapien
ggccaaaatggtcaacagagcttaa

SEQ ID NO: 1684292 - DNA, 25 bp, Homo sapien
cagagaggattaagtagtccattca

SEQ ID NO: 1684293 - DNA, 25 bp, Homo sapien
cacatatcaagaaatcaactgccct

SEQ ID NO: 1684294 - DNA, 25 bp, Homo sapien
tcaaatgaatatattcagagaggat

SEQ ID NO: 1684295 - DNA, 25 bp, Homo sapien
catatcaagaaatcaactgccctcc

SEQ ID NO: 1684296 - DNA, 25 bp, Homo sapien
gatgctctacaatcggcagttctag

SEQ ID NO: 1684297 - DNA, 25 bp, Homo sapien
tttgtgtccaatcccatgactactc

SEQ ID NO: 1684298 - DNA, 25 bp, Homo sapien
actactctatcccaggccgtaactg

SEQ ID NO: 1684299 - DNA, 25 bp, Homo sapien
tatcccaggccgtaactgctctggg

SEQ ID NO: 1684300 - DNA, 25 bp, Homo sapien
taggcattccgatgccagggcagat

SEQ ID NO: 1684301 - DNA, 25 bp, Homo sapien
gctttttaagcagggtaggcattcc

SEQ ID NO: 1684302 - DNA, 25 bp, Homo sapien
taaaacagtcccaagatttggaggc

SEQ ID NO: 1684303 - DNA, 25 bp, Homo sapien
tggagatttcccattccggtcaaga

SEQ ID NO: 1684304 - DNA, 25 bp, Homo sapien
tgactttattctgcacgtgatcaac

SEQ ID NO: 1684305 - DNA, 25 bp, Homo sapien
aggcgcaagactgactttattctgc

SEQ ID NO: 1684306 - DNA, 25 bp, Homo sapien
caagactgactttattctgcacgtg

SEQ ID NO: 1684307 - DNA, 25 bp, Homo sapien
gaaggcgcaagactgactttattct

SEQ ID NO: 1684308 - DNA, 25 bp, Homo sapien
ttctctatgatagcagatgataagc

SEQ ID NO: 1684309 - DNA, 25 bp, Homo sapien
ctatgatagcagatgataagcaggg

SEQ ID NO: 1684310 - DNA, 25 bp, Homo sapien
caaaggataaggattctctatgata

SEQ ID NO: 1684311 - DNA, 25 bp, Homo sapien
taaggattctctatgatagcagatg

SEQ ID NO: 1684312 - DNA, 25 bp, Homo sapien
taacatcgttgctagtggaggacac

SEQ ID NO: 1684313 - DNA, 25 bp, Homo sapien
gacacttgggatgcatcgtcctttt

SEQ ID NO: 1684314 - DNA, 25 bp, Homo sapien
tgaagaactaacatcgttgctagtg

SEQ ID NO: 1684315 - DNA, 25 bp, Homo sapien
gctggtcctaatcccttagactggt

SEQ ID NO: 1684316 - DNA, 25 bp, Homo sapien
tgaatgggctcacgttatcatgtgg

SEQ ID NO: 1684317 - DNA, 25 bp, Homo sapien
gatacgaaacctcatgattctggct

SEQ ID NO: 1684318 - DNA, 25 bp, Homo sapien
cagtccctggttgaaggtaccaata

SEQ ID NO: 1684319 - DNA, 25 bp, Homo sapien
gaaagcagggcatttgatacgaaac

SEQ ID NO: 1684320 - DNA, 25 bp, Homo sapien
tggtcctccaggtaaacataaagag

SEQ ID NO: 1684321 - DNA, 25 bp, Homo sapien
ggtcctccaggtaaacataaagaga

SEQ ID NO: 1684322 - DNA, 25 bp, Homo sapien
ctggtcctccaggtaaacataaaga

SEQ ID NO: 1684323 - DNA, 25 bp, Homo sapien
gaccgtggctagttccatttcctga

SEQ ID NO: 1684324 - DNA, 25 bp, Homo sapien
gcagcagttacggaaagggcaagca

SEQ ID NO: 1684325 - DNA, 25 bp, Homo sapien
gaacttccgcttttagtgaagctag

SEQ ID NO: 1684326 - DNA, 25 bp, Homo sapien
ccctgacggatggaaaacaaatgat

SEQ ID NO: 1684327 - DNA, 25 bp, Homo sapien
gacccaagtctagcaggaacaggaa

SEQ ID NO: 1684328 - DNA, 25 bp, Homo sapien
cacagccacaaagggttgccagaca

SEQ ID NO: 1684329 - DNA, 25 bp, Homo sapien
gaagctagtatgtttgccaggagcc

SEQ ID NO: 1684330 - DNA, 25 bp, Homo sapien
tgttcgccaacatctaaacctgcag

SEQ ID NO: 1684331 - DNA, 25 bp, Homo sapien
caagacatagacacaagctgctgga

SEQ ID NO: 1684332 - DNA, 25 bp, Homo sapien
tgaggaacacatcagcggaagacga

SEQ ID NO: 1684333 - DNA, 25 bp, Homo sapien
actggcaggccagtaagccatcgac

SEQ ID NO: 1684334 - DNA, 25 bp, Homo sapien
aacccaagaccctagcaagacatag

SEQ ID NO: 1684335 - DNA, 25 bp, Homo sapien
taccacctatggaaggctgtctgcg

SEQ ID NO: 1684336 - DNA, 25 bp, Homo sapien
cagaactctcctggcaatgggcatg

SEQ ID NO: 1684337 - DNA, 25 bp, Homo sapien
ttatgagggatacaactccaagccc

SEQ ID NO: 1684338 - DNA, 25 bp, Homo sapien
tgtgttctagaaagcaaccgtgtca

SEQ ID NO: 1684339 - DNA, 25 bp, Homo sapien
gcatggctgcgctctttgtgccggt

SEQ ID NO: 1684340 - DNA, 25 bp, Homo sapien
tgggagctggccctgaagctttgcc

SEQ ID NO: 1684341 - DNA, 25 bp, Homo sapien
ctctttgtgccggtgtgggagctgg

SEQ ID NO: 1684342 - DNA, 25 bp, Homo sapien
gctggccctgaagctttgccaactt

SEQ ID NO: 1684343 - DNA, 25 bp, Homo sapien
gttcgtgtctggcaaatgcaaaatg

SEQ ID NO: 1684344 - DNA, 25 bp, Homo sapien
agttcgtgtctggcaaatgcaaaat

SEQ ID NO: 1684345 - DNA, 25 bp, Homo sapien
ttcgtgtctggcaaatgcaaaatga

SEQ ID NO: 1684346 - DNA, 25 bp, Homo sapien
tcgtgtctggcaaatgcaaaatgac

SEQ ID NO: 1684347 - DNA, 25 bp, Homo sapien
aataaggtctgcctccggctgacag

SEQ ID NO: 1684348 - DNA, 25 bp, Homo sapien
tgacagtcaccctgtggcacaaggc

SEQ ID NO: 1684349 - DNA, 25 bp, Homo sapien
tttctaacccttggcatttcattgt

SEQ ID NO: 1684350 - DNA, 25 bp, Homo sapien
tcatctcgcagaagccaaataaggt

SEQ ID NO: 1684351 - DNA, 25 bp, Homo sapien
agtctagaggacaaggcctccatag

SEQ ID NO: 1684352 - DNA, 25 bp, Homo sapien
tctagaggacaaggcctccatagat

SEQ ID NO: 1684353 - DNA, 25 bp, Homo sapien
ctagaggacaaggcctccatagatg

SEQ ID NO: 1684354 - DNA, 25 bp, Homo sapien
caagtctagaggacaaggcctccat

SEQ ID NO: 1684355 - DNA, 25 bp, Homo sapien
caggtagactgacccaacacaactg

SEQ ID NO: 1684356 - DNA, 25 bp, Homo sapien
acacagtgtcagaggagggaaggct

SEQ ID NO: 1684357 - DNA, 25 bp, Homo sapien
aggagggaaggctacagaacccttg

SEQ ID NO: 1684358 - DNA, 25 bp, Homo sapien
agctgccaggtagactgacccaaca

SEQ ID NO: 1684359 - DNA, 25 bp, Homo sapien
gagagcttttttgcaaccaactgcc

SEQ ID NO: 1684360 - DNA, 25 bp, Homo sapien
gtcacattaacaaggcaacagcagg

SEQ ID NO: 1684361 - DNA, 25 bp, Homo sapien
tgcctgtcccaaaaagcactttaga

SEQ ID NO: 1684362 - DNA, 25 bp, Homo sapien
ggatattccgacaatcacagagctt

SEQ ID NO: 1684363 - DNA, 25 bp, Homo sapien
gagactgagcaaacttcctttgtgc

SEQ ID NO: 1684364 - DNA, 25 bp, Homo sapien
agttgtgctgggactattcggctga

SEQ ID NO: 1684365 - DNA, 25 bp, Homo sapien
gagggggtagcaatggctccactat

SEQ ID NO: 1684366 - DNA, 25 bp, Homo sapien
gaggtctgatatctgagtagctgga

SEQ ID NO: 1684367 - DNA, 25 bp, Homo sapien
cctccgccgatggttgcaaagtctt

SEQ ID NO: 1684368 - DNA, 25 bp, Homo sapien
atgtagattccacgtagacctccgc

SEQ ID NO: 1684369 - DNA, 25 bp, Homo sapien
tccgccgatggttgcaaagtcttac

SEQ ID NO: 1684370 - DNA, 25 bp, Homo sapien
tagacctccgccgatggttgcaaag

SEQ ID NO: 1684371 - DNA, 25 bp, Homo sapien
ttactccacgtagacctcaggctta

SEQ ID NO: 1684372 - DNA, 25 bp, Homo sapien
tactccacgtagacctcaggcttac

SEQ ID NO: 1684373 - DNA, 25 bp, Homo sapien
actctaccagcctcacagtctagtg

SEQ ID NO: 1684374 - DNA, 25 bp, Homo sapien
tgtcaaggattccaccgtgtcagcc

SEQ ID NO: 1684375 - DNA, 25 bp, Homo sapien
cacagagatggactatagacggcac

SEQ ID NO: 1684376 - DNA, 25 bp, Homo sapien
ccaagcgcggctagatatacctgaa

SEQ ID NO: 1684377 - DNA, 25 bp, Homo sapien
gagggcacaacatggtcagaggcca

SEQ ID NO: 1684378 - DNA, 25 bp, Homo sapien
tggcagcaaaaaggaagcctgcctt

SEQ ID NO: 1684379 - DNA, 25 bp, Homo sapien
gcaaaatgacctacagtcttattaa

SEQ ID NO: 1684380 - DNA, 25 bp, Homo sapien
gcctgtagcagggagaatcctcaca

SEQ ID NO: 1684381 - DNA, 25 bp, Homo sapien
ctccagaatttggtcgggcaccctc

SEQ ID NO: 1684382 - DNA, 25 bp, Homo sapien
gggagcactcatgaacaactggcat

SEQ ID NO: 1684383 - DNA, 25 bp, Homo sapien
gcactcatgaacaactggcatctcc

SEQ ID NO: 1684384 - DNA, 25 bp, Homo sapien
gggggagcactcatgaacaactggc

SEQ ID NO: 1684385 - DNA, 25 bp, Homo sapien
accagggggagcactcatgaacaac

SEQ ID NO: 1684386 - DNA, 25 bp, Homo sapien
ctccccaagcctggatatggcctga

SEQ ID NO: 1684387 - DNA, 25 bp, Homo sapien
tcctccaagggccacggccaatcca

SEQ ID NO: 1684388 - DNA, 25 bp, Homo sapien
gatatggcctgactgtcctccttgg

SEQ ID NO: 1684389 - DNA, 25 bp, Homo sapien
ttggcatcatcctccaagggccacg

SEQ ID NO: 1684390 - DNA, 25 bp, Homo sapien
ggtggctgttttgacgtcttctgtc

SEQ ID NO: 1684391 - DNA, 25 bp, Homo sapien
cctttcctgggggtcgactggcatg

SEQ ID NO: 1684392 - DNA, 25 bp, Homo sapien
gactggcatgaagatgaagcattgt

SEQ ID NO: 1684393 - DNA, 25 bp, Homo sapien
ggctgttttgacgtcttctgtctca

SEQ ID NO: 1684394 - DNA, 25 bp, Homo sapien
tatccaagttcaacggtggacctac

SEQ ID NO: 1684395 - DNA, 25 bp, Homo sapien
ttatccaagttcaacggtggaccta

SEQ ID NO: 1684396 - DNA, 25 bp, Homo sapien
tggccctggagaagtacccagaacg

SEQ ID NO: 1684397 - DNA, 25 bp, Homo sapien
atccctttgcccatgaagtgtctgg

SEQ ID NO: 1684398 - DNA, 25 bp, Homo sapien
cctttgcccatgaagtgtctggccc

SEQ ID NO: 1684399 - DNA, 25 bp, Homo sapien
tacccagaacgagctttgccttcat

SEQ ID NO: 1684400 - DNA, 25 bp, Homo sapien
ccacataagatgagtttctttgctg

SEQ ID NO: 1684401 - DNA, 25 bp, Homo sapien
atccacataagatgagtttctttgc

SEQ ID NO: 1684402 - DNA, 25 bp, Homo sapien
ttctttgctgtgatactcaagctat

SEQ ID NO: 1684403 - DNA, 25 bp, Homo sapien
tgatactcaagctattgttcctgcc

SEQ ID NO: 1684404 - DNA, 25 bp, Homo sapien
tgtgctatctttcagagcgcttacg

SEQ ID NO: 1684405 - DNA, 25 bp, Homo sapien
cttatttgatttaggagagaaaagg

SEQ ID NO: 1684406 - DNA, 25 bp, Homo sapien
tccttgtgggtagatcctattgccg

SEQ ID NO: 1684407 - DNA, 25 bp, Homo sapien
cataaatggttaatatcattcacca

SEQ ID NO: 1684408 - DNA, 25 bp, Homo sapien
taaaagcggatgtgaaatagactgg

SEQ ID NO: 1684409 - DNA, 25 bp, Homo sapien
gcagcacagctagccagctactgag

SEQ ID NO: 1684410 - DNA, 25 bp, Homo sapien
tcatctgccttgatataaaagcgga

SEQ ID NO: 1684411 - DNA, 25 bp, Homo sapien
tcttgcctgagggattactcccaat

SEQ ID NO: 1684412 - DNA, 25 bp, Homo sapien
tagaccagaacgcatcccattgaca

SEQ ID NO: 1684413 - DNA, 25 bp, Homo sapien
taaactgtttactacacaccgagag

SEQ ID NO: 1684414 - DNA, 25 bp, Homo sapien
ccattgacacaattgactatacaag

SEQ ID NO: 1684415 - DNA, 25 bp, Homo sapien
cccttaaatatgcacatgcgagtta

SEQ ID NO: 1684416 - DNA, 25 bp, Homo sapien
gacctatcagtgacaacagagatga

SEQ ID NO: 1684417 - DNA, 25 bp, Homo sapien
gagttcggggcgcagctgctttatc

SEQ ID NO: 1684418 - DNA, 25 bp, Homo sapien
tgctttatctgacctatcagtgaca

SEQ ID NO: 1684419 - DNA, 25 bp, Homo sapien
ttatctgacctatcagtgacaacag

SEQ ID NO: 1684420 - DNA, 25 bp, Homo sapien
ctcccgtgttgacctgctggaacca

SEQ ID NO: 1684421 - DNA, 25 bp, Homo sapien
tgtttccgtaagtcctgagccgacc

SEQ ID NO: 1684422 - DNA, 25 bp, Homo sapien
tgtgtttttgaacaggttccttctc

SEQ ID NO: 1684423 - DNA, 25 bp, Homo sapien
ctgtcagcccggtgatcgctgtgct

SEQ ID NO: 1684424 - DNA, 25 bp, Homo sapien
ggatttttctgcaaggcttgtacat

SEQ ID NO: 1684425 - DNA, 25 bp, Homo sapien
gtagcctatagctcaatggaaggtc

SEQ ID NO: 1684426 - DNA, 25 bp, Homo sapien
agtgacagtagcctatagctcaatg

SEQ ID NO: 1684427 - DNA, 25 bp, Homo sapien
gacagtagcctatagctcaatggaa

SEQ ID NO: 1684428 - DNA, 25 bp, Homo sapien
aatgaccggcccacccgtgagaaag

SEQ ID NO: 1684429 - DNA, 25 bp, Homo sapien
atgaccggcccacccgtgagaaagg

SEQ ID NO: 1684430 - DNA, 25 bp, Homo sapien
taaaatgaccggcccacccgtgaga

SEQ ID NO: 1684431 - DNA, 25 bp, Homo sapien
cactaaaatgaccggcccacccgtg

SEQ ID NO: 1684432 - DNA, 25 bp, Homo sapien
tagatgagcggatcgtggaactcct

SEQ ID NO: 1684433 - DNA, 25 bp, Homo sapien
tggttacacctgcacccagagatga

SEQ ID NO: 1684434 - DNA, 25 bp, Homo sapien
tagaacgattttcacaggaggcgct

SEQ ID NO: 1684435 - DNA, 25 bp, Homo sapien
tgtgctgaatctgcgtgacaaaccg

SEQ ID NO: 1684436 - DNA, 25 bp, Homo sapien
cacgccgtggatgagcccattcttg

SEQ ID NO: 1684437 - DNA, 25 bp, Homo sapien
taggtactggcagtaggcctcctgc

SEQ ID NO: 1684438 - DNA, 25 bp, Homo sapien
ttttcctgagcgaagagtcgccgcc

SEQ ID NO: 1684439 - DNA, 25 bp, Homo sapien
gcccatctcattaatcagccggaaa

SEQ ID NO: 1684440 - DNA, 25 bp, Homo sapien
tggatctgggcagctgtcgagcacc

SEQ ID NO: 1684441 - DNA, 25 bp, Homo sapien
gctggatctgggcagctgtcgagca

SEQ ID NO: 1684442 - DNA, 25 bp, Homo sapien
ctggatctgggcagctgtcgagcac

SEQ ID NO: 1684443 - DNA, 25 bp, Homo sapien
tggcagtgaggtgagcggatagaaa

SEQ ID NO: 1684444 - DNA, 25 bp, Homo sapien
gaaaacaagcgcacagagtccactg

SEQ ID NO: 1684445 - DNA, 25 bp, Homo sapien
aacagagaaaacaagcgcacagagt

SEQ ID NO: 1684446 - DNA, 25 bp, Homo sapien
tgaggtgagcggatagaaaacagag

SEQ ID NO: 1684447 - DNA, 25 bp, Homo sapien
tcagggatagctctccacagagagg

SEQ ID NO: 1684448 - DNA, 25 bp, Homo sapien
ggagacctggcggagacagggaaac

SEQ ID NO: 1684449 - DNA, 25 bp, Homo sapien
gcggagacagggaaacgctgcatgt

SEQ ID NO: 1684450 - DNA, 25 bp, Homo sapien
tcttccctccacagcgtgtgaatgg

SEQ ID NO: 1684451 - DNA, 25 bp, Homo sapien
cacagcgtgtgaatggtgagattca

SEQ ID NO: 1684452 - DNA, 25 bp, Homo sapien
caccacgcagagctccactatattt

SEQ ID NO: 1684453 - DNA, 25 bp, Homo sapien
cacgcagagctccactatatttccg

SEQ ID NO: 1684454 - DNA, 25 bp, Homo sapien
gcagagctccactatatttccgtga

SEQ ID NO: 1684455 - DNA, 25 bp, Homo sapien
gctccactatatttccgtgatgaaa

SEQ ID NO: 1684456 - DNA, 25 bp, Homo sapien
tgctcacggtccctacccgtgggca

SEQ ID NO: 1684457 - DNA, 25 bp, Homo sapien
cacacggctgctgggggcttcgcca

SEQ ID NO: 1684458 - DNA, 25 bp, Homo sapien
gacaccggtgccacagagagttgcg

SEQ ID NO: 1684459 - DNA, 25 bp, Homo sapien
ccacagagagttgcgtgctcacggt

SEQ ID NO: 1684460 - DNA, 25 bp, Homo sapien
tctgcaccaaggcagagtgcaatga

SEQ ID NO: 1684461 - DNA, 25 bp, Homo sapien
ataaaaaaggagggactgaattctg

SEQ ID NO: 1684462 - DNA, 25 bp, Homo sapien
actgaattctgcaccaaggcagagt

SEQ ID NO: 1684463 - DNA, 25 bp, Homo sapien
ttctgcaccaaggcagagtgcaatg

SEQ ID NO: 1684464 - DNA, 25 bp, Homo sapien
ccaagccgctcctgatagtctgttt

SEQ ID NO: 1684465 - DNA, 25 bp, Homo sapien
ttccatgcaaattccaagccgctcc

SEQ ID NO: 1684466 - DNA, 25 bp, Homo sapien
tgcaaattccaagccgctcctgata

SEQ ID NO: 1684467 - DNA, 25 bp, Homo sapien
aattccaagccgctcctgatagtct

SEQ ID NO: 1684468 - DNA, 25 bp, Homo sapien
ttctgccattgggtccacagtcgta

SEQ ID NO: 1684469 - DNA, 25 bp, Homo sapien
ctagaagtgatagggccacaacagg

SEQ ID NO: 1684470 - DNA, 25 bp, Homo sapien
tcgtagtcggcatggagacattggc

SEQ ID NO: 1684471 - DNA, 25 bp, Homo sapien
cgcagcgtccccctagaagtgatag

SEQ ID NO: 1684472 - DNA, 25 bp, Homo sapien
tctgcgcctcttcttcgatgcccct

SEQ ID NO: 1684473 - DNA, 25 bp, Homo sapien
tggtcgccttctctccacagaacca

SEQ ID NO: 1684474 - DNA, 25 bp, Homo sapien
agccttcactgaggttgcgacctgg

SEQ ID NO: 1684475 - DNA, 25 bp, Homo sapien
ctgttgccctgttcccaataacttc

SEQ ID NO: 1684476 - DNA, 25 bp, Homo sapien
cctgagagtccttgccatattaaca

SEQ ID NO: 1684477 - DNA, 25 bp, Homo sapien
gaaatatattctctaagaacccgca

SEQ ID NO: 1684478 - DNA, 25 bp, Homo sapien
ggagtgggaagactccaccaaggat

SEQ ID NO: 1684479 - DNA, 25 bp, Homo sapien
ccccatgagggccaaattgttctgc

SEQ ID NO: 1684480 - DNA, 25 bp, Homo sapien
agaacccgcagtgccaagaggagtg

SEQ ID NO: 1684481 - DNA, 25 bp, Homo sapien
gctgccccttggcgtccctgcggct

SEQ ID NO: 1684482 - DNA, 25 bp, Homo sapien
ccgctgccccttggcgtccctgcgg

SEQ ID NO: 1684483 - DNA, 25 bp, Homo sapien
gggccgctgccccttggcgtccctg

SEQ ID NO: 1684484 - DNA, 25 bp, Homo sapien
atgggccgctgccccttggcgtccc

SEQ ID NO: 1684485 - DNA, 25 bp, Homo sapien
aaagctgaaccctactgcaaatgag

SEQ ID NO: 1684486 - DNA, 25 bp, Homo sapien
ccctactgcaaatgaggccagacac

SEQ ID NO: 1684487 - DNA, 25 bp, Homo sapien
gaaccctactgcaaatgaggccaga

SEQ ID NO: 1684488 - DNA, 25 bp, Homo sapien
agaagcaaagctgaaccctactgca

SEQ ID NO: 1684489 - DNA, 25 bp, Homo sapien
gatattcctcgctgttcgataaaaa

SEQ ID NO: 1684490 - DNA, 25 bp, Homo sapien
tggggcaggctccttgctgaaacac

SEQ ID NO: 1684491 - DNA, 25 bp, Homo sapien
cacatgctcatgatattcctcgctg

SEQ ID NO: 1684492 - DNA, 25 bp, Homo sapien
cgctgttcgataaaaagttgttaga

SEQ ID NO: 1684493 - DNA, 25 bp, Homo sapien
cagcgtgaggggccccttctctcac

SEQ ID NO: 1684494 - DNA, 25 bp, Homo sapien
gcagcgtgaggggccccttctctca

SEQ ID NO: 1684495 - DNA, 25 bp, Homo sapien
taaataaacagatccggtctctgtc

SEQ ID NO: 1684496 - DNA, 25 bp, Homo sapien
gtaaataaacagatccggtctctgt

SEQ ID NO: 1684497 - DNA, 25 bp, Homo sapien
ggtaaataaacagatccggtctctg

SEQ ID NO: 1684498 - DNA, 25 bp, Homo sapien
aagttcacacggactcagctgggca

SEQ ID NO: 1684499 - DNA, 25 bp, Homo sapien
tggaagttcacacggactcagctgg

SEQ ID NO: 1684500 - DNA, 25 bp, Homo sapien
ctggaagttcacacggactcagctg

SEQ ID NO: 1684501 - DNA, 25 bp, Homo sapien
gaagttcacacggactcagctgggc

SEQ ID NO: 1684502 - DNA, 25 bp, Homo sapien
tgctgagagcccaccgacgtcagca

SEQ ID NO: 1684503 - DNA, 25 bp, Homo sapien
gccctgaaccagcagtccgggtttg

SEQ ID NO: 1684504 - DNA, 25 bp, Homo sapien
ttccacgaccaagcgctgctgagag

SEQ ID NO: 1684505 - DNA, 25 bp, Homo sapien
tttccctttccacgaccaagcgctg

SEQ ID NO: 1684506 - DNA, 25 bp, Homo sapien
taatcatgaccacaggccgggtgtc

SEQ ID NO: 1684507 - DNA, 25 bp, Homo sapien
gcggctgcagcacggtaatcatgac

SEQ ID NO: 1684508 - DNA, 25 bp, Homo sapien
aaacgcaacgcgtgctctggaagca

SEQ ID NO: 1684509 - DNA, 25 bp, Homo sapien
tgcggaagccacacgtgtcctagac

SEQ ID NO: 1684510 - DNA, 25 bp, Homo sapien
ggtgtccaccttgccgcagtgcact

SEQ ID NO: 1684511 - DNA, 25 bp, Homo sapien
ttctcttccactagcctccagtact

SEQ ID NO: 1684512 - DNA, 25 bp, Homo sapien
actgccacgtggcagtccttctctt

SEQ ID NO: 1684513 - DNA, 25 bp, Homo sapien
cactgccgtgagtgttggtgtccac

SEQ ID NO: 1684514 - DNA, 25 bp, Homo sapien
gtgacgcaggatggaccctgtgtta

SEQ ID NO: 1684515 - DNA, 25 bp, Homo sapien
gggaggacggtgaggttccatccat

SEQ ID NO: 1684516 - DNA, 25 bp, Homo sapien
gaggacggtgaggttccatccatgc

SEQ ID NO: 1684517 - DNA, 25 bp, Homo sapien
acgcaggatggaccctgtgttattg

SEQ ID NO: 1684518 - DNA, 25 bp, Homo sapien
gcagtcagcaccagtgtgtaagtag

SEQ ID NO: 1684519 - DNA, 25 bp, Homo sapien
cagcaccagtgtgtaagtagtcaat

SEQ ID NO: 1684520 - DNA, 25 bp, Homo sapien
tgtaagtagtcaatgtatggaaggt

SEQ ID NO: 1684521 - DNA, 25 bp, Homo sapien
cagtgtgtaagtagtcaatgtatgg

SEQ ID NO: 1684522 - DNA, 25 bp, Homo sapien
aaagagtccagcctcgatcagggat

SEQ ID NO: 1684523 - DNA, 25 bp, Homo sapien
gcatgccggtaaacgatcagacgac

SEQ ID NO: 1684524 - DNA, 25 bp, Homo sapien
cacagtcagcatggcatgaacagca

SEQ ID NO: 1684525 - DNA, 25 bp, Homo sapien
gaatgtttaatcaccccattagggc

SEQ ID NO: 1684526 - DNA, 25 bp, Homo sapien
tccaggagtgagtcttcaaaaagcc

SEQ ID NO: 1684527 - DNA, 25 bp, Homo sapien
aactcgggcctgaggtcactggcct

SEQ ID NO: 1684528 - DNA, 25 bp, Homo sapien
gccataagcaaacccacacggaaga

SEQ ID NO: 1684529 - DNA, 25 bp, Homo sapien
tgtgactcaacgtcaagccataagc

SEQ ID NO: 1684530 - DNA, 25 bp, Homo sapien
tcacaaggaatacgtggctccctcg

SEQ ID NO: 1684531 - DNA, 25 bp, Homo sapien
ggagcagcacctgataatgtcctca

SEQ ID NO: 1684532 - DNA, 25 bp, Homo sapien
accacagtgcatccgcgttgcgaga

SEQ ID NO: 1684533 - DNA, 25 bp, Homo sapien
tttatggagatctgacccacctggt

SEQ ID NO: 1684534 - DNA, 25 bp, Homo sapien
cagcagggtgtggaccacatcttcc

SEQ ID NO: 1684535 - DNA, 25 bp, Homo sapien
gcagcagggtgtggaccacatcttc

SEQ ID NO: 1684536 - DNA, 25 bp, Homo sapien
gcacagctgaggacatgatgaccac

SEQ ID NO: 1684537 - DNA, 25 bp, Homo sapien
gagcttctaaactgcactggtccaa

SEQ ID NO: 1684538 - DNA, 25 bp, Homo sapien
cagtcttcaggtgacgtatgcgcac

SEQ ID NO: 1684539 - DNA, 25 bp, Homo sapien
gaaaccatgttcaagtgcctaggag

SEQ ID NO: 1684540 - DNA, 25 bp, Homo sapien
gacacaaaggatcccgggaagcaga

SEQ ID NO: 1684541 - DNA, 25 bp, Homo sapien
ggaagcagacgacaaactggccact

SEQ ID NO: 1684542 - DNA, 25 bp, Homo sapien
caaagtgcacggtttcagacacgct

SEQ ID NO: 1684543 - DNA, 25 bp, Homo sapien
tccactgggtggtagcaaagtgcac

SEQ ID NO: 1684544 - DNA, 25 bp, Homo sapien
agaggagtcacatccctttagggtg

SEQ ID NO: 1684545 - DNA, 25 bp, Homo sapien
cattactaggcagctgtcaaggttc

SEQ ID NO: 1684546 - DNA, 25 bp, Homo sapien
cacgcacacgcagggatgcttctgt

SEQ ID NO: 1684547 - DNA, 25 bp, Homo sapien
tgagaaaggcaccacataccaggaa

SEQ ID NO: 1684548 - DNA, 25 bp, Homo sapien
tagctatatggcgacgcttcatttc

SEQ ID NO: 1684549 - DNA, 25 bp, Homo sapien
catggagaatggcttagctatatgg

SEQ ID NO: 1684550 - DNA, 25 bp, Homo sapien
gaatggcttagctatatggcgacgc

SEQ ID NO: 1684551 - DNA, 25 bp, Homo sapien
tgtgcaatctggtagagtaacttct

SEQ ID NO: 1684552 - DNA, 25 bp, Homo sapien
cacacgcaccccacaccggcctccc

SEQ ID NO: 1684553 - DNA, 25 bp, Homo sapien
cagcagaggggacacacgcacccca

SEQ ID NO: 1684554 - DNA, 25 bp, Homo sapien
agcagaggggacacacgcaccccac

SEQ ID NO: 1684555 - DNA, 25 bp, Homo sapien
acaccggcctccctgcagacacacc

SEQ ID NO: 1684556 - DNA, 25 bp, Homo sapien
catcgtggctgccatagcgtgcgga

SEQ ID NO: 1684557 - DNA, 25 bp, Homo sapien
gagtggaggccagcctcgaacagct

SEQ ID NO: 1684558 - DNA, 25 bp, Homo sapien
tccaactgcagccactttcgaggct

SEQ ID NO: 1684559 - DNA, 25 bp, Homo sapien
cgccaccgtgctgctgccatcgtgg

SEQ ID NO: 1684560 - DNA, 25 bp, Homo sapien
ctcactgcctcagaaagaatgggta

SEQ ID NO: 1684561 - DNA, 25 bp, Homo sapien
ttcgggcatgctctctgttccaggc

SEQ ID NO: 1684562 - DNA, 25 bp, Homo sapien
tccagtcgccatggaagggcttttc

SEQ ID NO: 1684563 - DNA, 25 bp, Homo sapien
tcaggccaagcactacatgcgaggg

SEQ ID NO: 1684564 - DNA, 25 bp, Homo sapien
ctaagctaggcttctgtactggaga

SEQ ID NO: 1684565 - DNA, 25 bp, Homo sapien
taggcttctgtactggagatgtgag

SEQ ID NO: 1684566 - DNA, 25 bp, Homo sapien
tcctaagctaggcttctgtactgga

SEQ ID NO: 1684567 - DNA, 25 bp, Homo sapien
aagctaggcttctgtactggagatg

SEQ ID NO: 1684568 - DNA, 25 bp, Homo sapien
aggcaccacacagcatatggggtgg

SEQ ID NO: 1684569 - DNA, 25 bp, Homo sapien
ggcaccacacagcatatggggtggg

SEQ ID NO: 1684570 - DNA, 25 bp, Homo sapien
caggcaccacacagcatatggggtg

SEQ ID NO: 1684571 - DNA, 25 bp, Homo sapien
gcaccacacagcatatggggtgggc

SEQ ID NO: 1684572 - DNA, 25 bp, Homo sapien
tcagcgagtgtgcagccgaaggggg

SEQ ID NO: 1684573 - DNA, 25 bp, Homo sapien
agcgagtgtgcagccgaagggggca

SEQ ID NO: 1684574 - DNA, 25 bp, Homo sapien
gcgagtgtgcagccgaagggggcac

SEQ ID NO: 1684575 - DNA, 25 bp, Homo sapien
cagcgagtgtgcagccgaagggggc

SEQ ID NO: 1684576 - DNA, 25 bp, Homo sapien
atggacaagcagagggacgcagagg

SEQ ID NO: 1684577 - DNA, 25 bp, Homo sapien
gacggcatgacacagtcacactggg

SEQ ID NO: 1684578 - DNA, 25 bp, Homo sapien
tgcaaacgttgaacctccaggatct

SEQ ID NO: 1684579 - DNA, 25 bp, Homo sapien
tgacgatctgactcatccgggagag

SEQ ID NO: 1684580 - DNA, 25 bp, Homo sapien
gatgaggacacaccgagtttttagc

SEQ ID NO: 1684581 - DNA, 25 bp, Homo sapien
accaaatggctctaggtaatacatt

SEQ ID NO: 1684582 - DNA, 25 bp, Homo sapien
taagaaccaaatggctctaggtaat

SEQ ID NO: 1684583 - DNA, 25 bp, Homo sapien
caaatggctctaggtaatacatttt

SEQ ID NO: 1684584 - DNA, 25 bp, Homo sapien
gaaccaaatggctctaggtaataca

SEQ ID NO: 1684585 - DNA, 25 bp, Homo sapien
taggcagcctatgggtaacagcaaa

SEQ ID NO: 1684586 - DNA, 25 bp, Homo sapien
tgaatagcgtgttccagcaagagga

SEQ ID NO: 1684587 - DNA, 25 bp, Homo sapien
tacagccctcagtgcatggaaatga

SEQ ID NO: 1684588 - DNA, 25 bp, Homo sapien
gaagcactgggattggcctaccatg

SEQ ID NO: 1684589 - DNA, 25 bp, Homo sapien
ttcacgctgactccaagtcctattc

SEQ ID NO: 1684590 - DNA, 25 bp, Homo sapien
tctgccggagggctcccatacttca

SEQ ID NO: 1684591 - DNA, 25 bp, Homo sapien
agggctcccatacttcacgctgact

SEQ ID NO: 1684592 - DNA, 25 bp, Homo sapien
tggcttctgccggagggctcccata

SEQ ID NO: 1684593 - DNA, 25 bp, Homo sapien
ccttgggcgggctgtccacaaagcc

SEQ ID NO: 1684594 - DNA, 25 bp, Homo sapien
cagtggacaccctgctgcctgaggc

SEQ ID NO: 1684595 - DNA, 25 bp, Homo sapien
tgcctgaggccacaggagagtgctg

SEQ ID NO: 1684596 - DNA, 25 bp, Homo sapien
agagtgctgggacagagaccctcac

SEQ ID NO: 1684597 - DNA, 25 bp, Homo sapien
ctgcaagcaagagcaggacacccga

SEQ ID NO: 1684598 - DNA, 25 bp, Homo sapien
tgcaagcaagagcaggacacccgaa

SEQ ID NO: 1684599 - DNA, 25 bp, Homo sapien
aagcaagagcaggacacccgaaggt

SEQ ID NO: 1684600 - DNA, 25 bp, Homo sapien
aagagcaggacacccgaaggtcagg

SEQ ID NO: 1684601 - DNA, 25 bp, Homo sapien
tcatcgtagcggtacatcaacttca

SEQ ID NO: 1684602 - DNA, 25 bp, Homo sapien
ttctgtttctccacgtggcgcagag

SEQ ID NO: 1684603 - DNA, 25 bp, Homo sapien
tcagccctcggcaggacttctgttt

SEQ ID NO: 1684604 - DNA, 25 bp, Homo sapien
cactccagacagaacacgacgtttt

SEQ ID NO: 1684605 - DNA, 25 bp, Homo sapien
cctggacatttgctgctaaggtgaa

SEQ ID NO: 1684606 - DNA, 25 bp, Homo sapien
cacaatgtggcgaccttcctcgtaa

SEQ ID NO: 1684607 - DNA, 25 bp, Homo sapien
ggcttatccagtgagacccaccact

SEQ ID NO: 1684608 - DNA, 25 bp, Homo sapien
gtgctcagccgcaaaggcttcgtta

SEQ ID NO: 1684609 - DNA, 25 bp, Homo sapien
gattcacagagcgctttccaggcag

SEQ ID NO: 1684610 - DNA, 25 bp, Homo sapien
ccatgattcacagagcgctttccag

SEQ ID NO: 1684611 - DNA, 25 bp, Homo sapien
atgattcacagagcgctttccaggc

SEQ ID NO: 1684612 - DNA, 25 bp, Homo sapien
ttcacagagcgctttccaggcagcc

SEQ ID NO: 1684613 - DNA, 25 bp, Homo sapien
cctgcaagggccagagacacaaatg

SEQ ID NO: 1684614 - DNA, 25 bp, Homo sapien
ggccagagacacaaatggctccaaa

SEQ ID NO: 1684615 - DNA, 25 bp, Homo sapien
cagtgtgcggttacaggaggacacc

SEQ ID NO: 1684616 - DNA, 25 bp, Homo sapien
agtgctctcacactaggctcggcgg

SEQ ID NO: 1684617 - DNA, 25 bp, Homo sapien
tagtcatggctgcttgaggtactga

SEQ ID NO: 1684618 - DNA, 25 bp, Homo sapien
gctggctcccatcacaagttaaagg

SEQ ID NO: 1684619 - DNA, 25 bp, Homo sapien
taaaggataagtggatgagctgcca

SEQ ID NO: 1684620 - DNA, 25 bp, Homo sapien
taaaacccatttaggcggctactgc

SEQ ID NO: 1684621 - DNA, 25 bp, Homo sapien
ttagctaccggccactgaacctggc

SEQ ID NO: 1684622 - DNA, 25 bp, Homo sapien
tgggaaccatgctgaccctggcagg

SEQ ID NO: 1684623 - DNA, 25 bp, Homo sapien
gaatgaaacatctgagggcctgatc

SEQ ID NO: 1684624 - DNA, 25 bp, Homo sapien
tatctgtcggcaccaaaaactgtgt

SEQ ID NO: 1684625 - DNA, 25 bp, Homo sapien
gccgcagatctgattgaccagactg

SEQ ID NO: 1684626 - DNA, 25 bp, Homo sapien
gtttttaccagacactttgccgcag

SEQ ID NO: 1684627 - DNA, 25 bp, Homo sapien
gagacagttctcaatgctgccgttt

SEQ ID NO: 1684628 - DNA, 25 bp, Homo sapien
catgatgagctcgaagcacttttgg

SEQ ID NO: 1684629 - DNA, 25 bp, Homo sapien
tactgtacacacaaccggagaaggg

SEQ ID NO: 1684630 - DNA, 25 bp, Homo sapien
tataaatcgaccacgggcgttggca

SEQ ID NO: 1684631 - DNA, 25 bp, Homo sapien
tcatctggcacacggcagaagacga

SEQ ID NO: 1684632 - DNA, 25 bp, Homo sapien
ttaggaaacaacgtccgccttcagc

SEQ ID NO: 1684633 - DNA, 25 bp, Homo sapien
ggaaagtacacagcaaggccataga

SEQ ID NO: 1684634 - DNA, 25 bp, Homo sapien
catagaaaccggacaaccacattgg

SEQ ID NO: 1684635 - DNA, 25 bp, Homo sapien
cataggacgttcctggcagtcacca

SEQ ID NO: 1684636 - DNA, 25 bp, Homo sapien
tcagtgcaatatgggtagctacggg

SEQ ID NO: 1684637 - DNA, 25 bp, Homo sapien
gggtcaaggcaaagctcagtcgtcc

SEQ ID NO: 1684638 - DNA, 25 bp, Homo sapien
gaatactggagaccagcgtgaaccc

SEQ ID NO: 1684639 - DNA, 25 bp, Homo sapien
caatctgtcagaacggtgtcatcct

SEQ ID NO: 1684640 - DNA, 25 bp, Homo sapien
gaggtgccagacctgtacctgggct

SEQ ID NO: 1684641 - DNA, 25 bp, Homo sapien
gaaccagtagttcagcaaaatggaa

SEQ ID NO: 1684642 - DNA, 25 bp, Homo sapien
tcccatagatgtcaggctcttgtgt

SEQ ID NO: 1684643 - DNA, 25 bp, Homo sapien
taacaggcaacagtgcacctaagtg

SEQ ID NO: 1684644 - DNA, 25 bp, Homo sapien
tgggatgctccagcgtggacccagt

SEQ ID NO: 1684645 - DNA, 25 bp, Homo sapien
agttgctccacagctagcaagtcag

SEQ ID NO: 1684646 - DNA, 25 bp, Homo sapien
gagaacgcgtctagcagatacctgc

SEQ ID NO: 1684647 - DNA, 25 bp, Homo sapien
gacgggcacgtactgcagttgctcc

SEQ ID NO: 1684648 - DNA, 25 bp, Homo sapien
cagctagcaagtcagcgggctggca

SEQ ID NO: 1684649 - DNA, 25 bp, Homo sapien
ccaacagtagggtggagctctctgc

SEQ ID NO: 1684650 - DNA, 25 bp, Homo sapien
gcaccaatgtctcatgtcatagaag

SEQ ID NO: 1684651 - DNA, 25 bp, Homo sapien
gtccatacagatacaccctggccga

SEQ ID NO: 1684652 - DNA, 25 bp, Homo sapien
gcatgctggcgcgatcggtttctga

SEQ ID NO: 1684653 - DNA, 25 bp, Homo sapien
gcagaaggggaagcagtcaccttct

SEQ ID NO: 1684654 - DNA, 25 bp, Homo sapien
cagaaggggaagcagtcaccttctt

SEQ ID NO: 1684655 - DNA, 25 bp, Homo sapien
gattctctgcccagtattccatgag

SEQ ID NO: 1684656 - DNA, 25 bp, Homo sapien
cttccagtttgtagggcagaagtgt

SEQ ID NO: 1684657 - DNA, 25 bp, Homo sapien
aagaatctgtgtgagggcccttcag

SEQ ID NO: 1684658 - DNA, 25 bp, Homo sapien
gtaggcaagctgtgactggattctc

SEQ ID NO: 1684659 - DNA, 25 bp, Homo sapien
cttccgatccatattcagccagctc

SEQ ID NO: 1684660 - DNA, 25 bp, Homo sapien
cctggcgatgggaaatctgaggcct

SEQ ID NO: 1684661 - DNA, 25 bp, Homo sapien
gctccaccctcctggcgatgggaaa

SEQ ID NO: 1684662 - DNA, 25 bp, Homo sapien
tccgatccatattcagccagctcca

SEQ ID NO: 1684663 - DNA, 25 bp, Homo sapien
tgaggtgggattggcgtagtcagga

SEQ ID NO: 1684664 - DNA, 25 bp, Homo sapien
gaagtgaggtgggattggcgtagtc

SEQ ID NO: 1684665 - DNA, 25 bp, Homo sapien
agtgaggtgggattggcgtagtcag

SEQ ID NO: 1684666 - DNA, 25 bp, Homo sapien
ttgaagtgaggtgggattggcgtag

SEQ ID NO: 1684667 - DNA, 25 bp, Homo sapien
acttgtttgtttccagcccatagaa

SEQ ID NO: 1684668 - DNA, 25 bp, Homo sapien
catgctggtgtttcccgtcagctgt

SEQ ID NO: 1684669 - DNA, 25 bp, Homo sapien
tagccatgaggattgtacttgtttg

SEQ ID NO: 1684670 - DNA, 25 bp, Homo sapien
cctcaaacgtctggcctgctgtgac

SEQ ID NO: 1684671 - DNA, 25 bp, Homo sapien
aagatgttactggaaatgggtccca

SEQ ID NO: 1684672 - DNA, 25 bp, Homo sapien
ctccagtgttgtcccttggtggttt

SEQ ID NO: 1684673 - DNA, 25 bp, Homo sapien
ggaagatgttactggaaatgggtcc

SEQ ID NO: 1684674 - DNA, 25 bp, Homo sapien
aattcagagtaaagtgaatgcaagt

SEQ ID NO: 1684675 - DNA, 25 bp, Homo sapien
ctttatgacccatttcgaactttga

SEQ ID NO: 1684676 - DNA, 25 bp, Homo sapien
ttgaaccaccattgcactgtcagtt

SEQ ID NO: 1684677 - DNA, 25 bp, Homo sapien
gaggatcagccttgacgatcgcttt

SEQ ID NO: 1684678 - DNA, 25 bp, Homo sapien
cgaactttgatacgaaaatcgctca

SEQ ID NO: 1684679 - DNA, 25 bp, Homo sapien
tgacatctctgtgtggtatttatat

SEQ ID NO: 1684680 - DNA, 25 bp, Homo sapien
tacatcatgccttgtcaggtagaag

SEQ ID NO: 1684681 - DNA, 25 bp, Homo sapien
tcttttagttggcatacgttatggc

SEQ ID NO: 1684682 - DNA, 25 bp, Homo sapien
gtattccttatctgttagccagagg

SEQ ID NO: 1684683 - DNA, 25 bp, Homo sapien
atggtactatatggatttatctaaa

SEQ ID NO: 1684684 - DNA, 25 bp, Homo sapien
gacttgatactgtcctctcttgact

SEQ ID NO: 1684685 - DNA, 25 bp, Homo sapien
tctggtcttggttgttgcctcctct

SEQ ID NO: 1684686 - DNA, 25 bp, Homo sapien
gacttcaacaccagtatcccagatg

SEQ ID NO: 1684687 - DNA, 25 bp, Homo sapien
taatgctggtgttcacttgtgctct

SEQ ID NO: 1684688 - DNA, 25 bp, Homo sapien
ctgctctgacatcggtggtaagcaa

SEQ ID NO: 1684689 - DNA, 25 bp, Homo sapien
ctgacatcggtggtaagcaagaacc

SEQ ID NO: 1684690 - DNA, 25 bp, Homo sapien
catcggtggtaagcaagaaccatgg

SEQ ID NO: 1684691 - DNA, 25 bp, Homo sapien
agaaccatggtgaagtcagcaacaa

SEQ ID NO: 1684692 - DNA, 25 bp, Homo sapien
gagctgttacgaccaaaggcctcag

SEQ ID NO: 1684693 - DNA, 25 bp, Homo sapien
cttttgagctgttacgaccaaaggc

SEQ ID NO: 1684694 - DNA, 25 bp, Homo sapien
tttgagctgttacgaccaaaggcct

SEQ ID NO: 1684695 - DNA, 25 bp, Homo sapien
ttgagctgttacgaccaaaggcctc

SEQ ID NO: 1684696 - DNA, 25 bp, Homo sapien
atgggtgtgcttgcgtgcttgcatt

SEQ ID NO: 1684697 - DNA, 25 bp, Homo sapien
cctgttagtacttcatggaattcct

SEQ ID NO: 1684698 - DNA, 25 bp, Homo sapien
tttagaaagttatggacgctcggag

SEQ ID NO: 1684699 - DNA, 25 bp, Homo sapien
catgagagtggccattattctcctg

SEQ ID NO: 1684700 - DNA, 25 bp, Homo sapien
tgttaatactatttgcacattgggc

SEQ ID NO: 1684701 - DNA, 25 bp, Homo sapien
tgcacattgggcgttgaataacaaa

SEQ ID NO: 1684702 - DNA, 25 bp, Homo sapien
aactgtcaaacgcttgagcacttac

SEQ ID NO: 1684703 - DNA, 25 bp, Homo sapien
ttgggcgttgaataacaaactgtca

SEQ ID NO: 1684704 - DNA, 25 bp, Homo sapien
acatgttttgtacggtttgactctg

SEQ ID NO: 1684705 - DNA, 25 bp, Homo sapien
tttgactctgcaaccctggtcaccg

SEQ ID NO: 1684706 - DNA, 25 bp, Homo sapien
ggtactgggcatacaggcagacatg

SEQ ID NO: 1684707 - DNA, 25 bp, Homo sapien
tacaggattttgcttatgtgaggca

SEQ ID NO: 1684708 - DNA, 25 bp, Homo sapien
tatgggtttattcacccccttgcaa

SEQ ID NO: 1684709 - DNA, 25 bp, Homo sapien
gcaaattcgcagaaacagcccctca

SEQ ID NO: 1684710 - DNA, 25 bp, Homo sapien
tattcacccccttgcaaattcgcag

SEQ ID NO: 1684711 - DNA, 25 bp, Homo sapien
ccccttgcaaattcgcagaaacagc

SEQ ID NO: 1684712 - DNA, 25 bp, Homo sapien
tttgtctaaacctctgaattgaagc

SEQ ID NO: 1684713 - DNA, 25 bp, Homo sapien
cactgaatacattatctcgaattta

SEQ ID NO: 1684714 - DNA, 25 bp, Homo sapien
tgtctaaacctctgaattgaagcaa

SEQ ID NO: 1684715 - DNA, 25 bp, Homo sapien
ttttgtctaaacctctgaattgaag

SEQ ID NO: 1684716 - DNA, 25 bp, Homo sapien
acagcaggattccagccaagggcca

SEQ ID NO: 1684717 - DNA, 25 bp, Homo sapien
caagggccatgtaaccctctcccaa

SEQ ID NO: 1684718 - DNA, 25 bp, Homo sapien
gggtatcgcccactcttgccttgct

SEQ ID NO: 1684719 - DNA, 25 bp, Homo sapien
ccttgctctggtggactctttgtct

SEQ ID NO: 1684720 - DNA, 25 bp, Homo sapien
ccatgtctctgattcccgtgtaccc

SEQ ID NO: 1684721 - DNA, 25 bp, Homo sapien
atgtctctgattcccgtgtaccctg

SEQ ID NO: 1684722 - DNA, 25 bp, Homo sapien
ggaagcctcttgctcccatgaaggg

SEQ ID NO: 1684723 - DNA, 25 bp, Homo sapien
tgctcccatgaaggggagtcccctg

SEQ ID NO: 1684724 - DNA, 25 bp, Homo sapien
tatcacatgcccagttaggtgaaac

SEQ ID NO: 1684725 - DNA, 25 bp, Homo sapien
tttctccctgccacaccaagagaag

SEQ ID NO: 1684726 - DNA, 25 bp, Homo sapien
gaaacttctttctgttttcgcagtg

SEQ ID NO: 1684727 - DNA, 25 bp, Homo sapien
ctgcagaggctatcacatgcccagt

SEQ ID NO: 1684728 - DNA, 25 bp, Homo sapien
gggggcaatgagcgactggcagctc

SEQ ID NO: 1684729 - DNA, 25 bp, Homo sapien
gaggtattcctatcagaaggctgtc

SEQ ID NO: 1684730 - DNA, 25 bp, Homo sapien
ggtattcctatcagaaggctgtctg

SEQ ID NO: 1684731 - DNA, 25 bp, Homo sapien
ggggcaatgagcgactggcagctcc

SEQ ID NO: 1684732 - DNA, 25 bp, Homo sapien
ccctagtcgtttgcctgaccattgc

SEQ ID NO: 1684733 - DNA, 25 bp, Homo sapien
ttcagtctttgcatcattcagttca

SEQ ID NO: 1684734 - DNA, 25 bp, Homo sapien
agtgacaggaatgaccaaacggtct

SEQ ID NO: 1684735 - DNA, 25 bp, Homo sapien
tcagttcaaggacgaaaatagcaat

SEQ ID NO: 1684736 - DNA, 25 bp, Homo sapien
tcttcaattctagtctctcagagtc

SEQ ID NO: 1684737 - DNA, 25 bp, Homo sapien
ttctatggtcaatctgcatcacaag

SEQ ID NO: 1684738 - DNA, 25 bp, Homo sapien
ggtcaatctgcatcacaagtatgca

SEQ ID NO: 1684739 - DNA, 25 bp, Homo sapien
gcatcacaagtatgcaaaaaccatt

SEQ ID NO: 1684740 - DNA, 25 bp, Homo sapien
attccctgctactttctggcctgtg

SEQ ID NO: 1684741 - DNA, 25 bp, Homo sapien
ggcctgtgttgctagaggtgaaact

SEQ ID NO: 1684742 - DNA, 25 bp, Homo sapien
tagaggtgaaactgccagaaggtga

SEQ ID NO: 1684743 - DNA, 25 bp, Homo sapien
agtcagattggctggtgtgaaattc

SEQ ID NO: 1684744 - DNA, 25 bp, Homo sapien
ttttgcttctaacacccagcacctg

SEQ ID NO: 1684745 - DNA, 25 bp, Homo sapien
tttgcttctaacacccagcacctgt

SEQ ID NO: 1684746 - DNA, 25 bp, Homo sapien
atgcttttgcttctaacacccagca

SEQ ID NO: 1684747 - DNA, 25 bp, Homo sapien
gcttttgcttctaacacccagcacc

SEQ ID NO: 1684748 - DNA, 25 bp, Homo sapien
tagatcggtaagcactgtcatttgg

SEQ ID NO: 1684749 - DNA, 25 bp, Homo sapien
ctgtagatcggtaagcactgtcatt

SEQ ID NO: 1684750 - DNA, 25 bp, Homo sapien
gatcggtaagcactgtcatttggtg

SEQ ID NO: 1684751 - DNA, 25 bp, Homo sapien
tgtagatcggtaagcactgtcattt

SEQ ID NO: 1684752 - DNA, 25 bp, Homo sapien
ggataattggagcttgcacctggcc

SEQ ID NO: 1684753 - DNA, 25 bp, Homo sapien
tcaagcacggcccttacagagggag

SEQ ID NO: 1684754 - DNA, 25 bp, Homo sapien
caacccttggttgtgatgcacgccc

SEQ ID NO: 1684755 - DNA, 25 bp, Homo sapien
ccccagttgtaaggtgttccgtgca

SEQ ID NO: 1684756 - DNA, 25 bp, Homo sapien
agcagggagaattggtgtttgtcat

SEQ ID NO: 1684757 - DNA, 25 bp, Homo sapien
cagcagggagaattggtgtttgtca

SEQ ID NO: 1684758 - DNA, 25 bp, Homo sapien
gcagggagaattggtgtttgtcatg

SEQ ID NO: 1684759 - DNA, 25 bp, Homo sapien
tctggaaagacatgtgcaatctgct

SEQ ID NO: 1684760 - DNA, 25 bp, Homo sapien
ggaaagacatgtgcaatctgcttaa

SEQ ID NO: 1684761 - DNA, 25 bp, Homo sapien
aagacatgtgcaatctgcttaattg

SEQ ID NO: 1684762 - DNA, 25 bp, Homo sapien
gacatgtgcaatctgcttaattgaa

SEQ ID NO: 1684763 - DNA, 25 bp, Homo sapien
tcagttgcctctcagatacggtaga

SEQ ID NO: 1684764 - DNA, 25 bp, Homo sapien
ctcagcgccaggagcgtcggagctg

SEQ ID NO: 1684765 - DNA, 25 bp, Homo sapien
gcaagattgacacgagctgcagcgc

SEQ ID NO: 1684766 - DNA, 25 bp, Homo sapien
gttgcctctcagatacggtagactc

SEQ ID NO: 1684767 - DNA, 25 bp, Homo sapien
agtacagcatgctttaaaccaaaga

SEQ ID NO: 1684768 - DNA, 25 bp, Homo sapien
gcatgctttaaaccaaagacaccca

SEQ ID NO: 1684769 - DNA, 25 bp, Homo sapien
catgctttaaaccaaagacacccat

SEQ ID NO: 1684770 - DNA, 25 bp, Homo sapien
acagcatgctttaaaccaaagacac

SEQ ID NO: 1684771 - DNA, 25 bp, Homo sapien
agtcacaagtatcaatacacttgac

SEQ ID NO: 1684772 - DNA, 25 bp, Homo sapien
tatcaatacacttgacgttattacc

SEQ ID NO: 1684773 - DNA, 25 bp, Homo sapien
cacttgacgttattaccaacaaggg

SEQ ID NO: 1684774 - DNA, 25 bp, Homo sapien
tcacaagtatcaatacacttgacgt

SEQ ID NO: 1684775 - DNA, 25 bp, Homo sapien
aagcccctaaactgcatcccattgt

SEQ ID NO: 1684776 - DNA, 25 bp, Homo sapien
attgtcagcattgtccccacgcttc

SEQ ID NO: 1684777 - DNA, 25 bp, Homo sapien
gaggttgtcccattcctcagaaacc

SEQ ID NO: 1684778 - DNA, 25 bp, Homo sapien
gctttacaaacttctccatattgca

SEQ ID NO: 1684779 - DNA, 25 bp, Homo sapien
caactagagccaagcaaacctctcc

SEQ ID NO: 1684780 - DNA, 25 bp, Homo sapien
gaccaggcctgatttcctgctttaa

SEQ ID NO: 1684781 - DNA, 25 bp, Homo sapien
cctgctttaaatcatgtggatctct

SEQ ID NO: 1684782 - DNA, 25 bp, Homo sapien
ctggcgaacctaagaccttgaaaag

SEQ ID NO: 1684783 - DNA, 25 bp, Homo sapien
tccacccaaagtatcagatctgtag

SEQ ID NO: 1684784 - DNA, 25 bp, Homo sapien
ttagctttccagcaatttgagcaca

SEQ ID NO: 1684785 - DNA, 25 bp, Homo sapien
tctcagtagtcttgctaagggtgta

SEQ ID NO: 1684786 - DNA, 25 bp, Homo sapien
tttgagcacatctcagtagtcttgc

SEQ ID NO: 1684787 - DNA, 25 bp, Homo sapien
ctaagggtgtatggagatgagtaat

SEQ ID NO: 1684788 - DNA, 25 bp, Homo sapien
gtccttggaaagagagcccagtagg

SEQ ID NO: 1684789 - DNA, 25 bp, Homo sapien
cagtaggatgtcgtgagcaagagca

SEQ ID NO: 1684790 - DNA, 25 bp, Homo sapien
ctatacgagagaggcatttctccca

SEQ ID NO: 1684791 - DNA, 25 bp, Homo sapien
gagagaggcatttctcccagtgtcc

SEQ ID NO: 1684792 - DNA, 25 bp, Homo sapien
ttgtcattagtcgtggagagcaggt

SEQ ID NO: 1684793 - DNA, 25 bp, Homo sapien
ggagaagtaggactcagtgaatcca

SEQ ID NO: 1684794 - DNA, 25 bp, Homo sapien
tcagtgaatccacggacattgtcat

SEQ ID NO: 1684795 - DNA, 25 bp, Homo sapien
acattgtcattagtcgtggagagca

SEQ ID NO: 1684796 - DNA, 25 bp, Homo sapien
gtaacatgtagctctaagtactcct

SEQ ID NO: 1684797 - DNA, 25 bp, Homo sapien
cagtaacatgtagctctaagtactc

SEQ ID NO: 1684798 - DNA, 25 bp, Homo sapien
acatgtagctctaagtactcctggg

SEQ ID NO: 1684799 - DNA, 25 bp, Homo sapien
aagtgcctccaaagatgtagagctg

SEQ ID NO: 1684800 - DNA, 25 bp, Homo sapien
tgatggatttaaaagcgttgccaat

SEQ ID NO: 1684801 - DNA, 25 bp, Homo sapien
ccaatagtattgatgtggctgacat

SEQ ID NO: 1684802 - DNA, 25 bp, Homo sapien
aattctgaagtgaacgaccaaccat

SEQ ID NO: 1684803 - DNA, 25 bp, Homo sapien
tctggtatcacactgatggatttaa

SEQ ID NO: 1684804 - DNA, 25 bp, Homo sapien
tatgtcactgggcaactctagagat

SEQ ID NO: 1684805 - DNA, 25 bp, Homo sapien
tcactgggcaactctagagatgcct

SEQ ID NO: 1684806 - DNA, 25 bp, Homo sapien
ggcaactctagagatgcctcctctt

SEQ ID NO: 1684807 - DNA, 25 bp, Homo sapien
tgtgcttatgtcactgggcaactct

SEQ ID NO: 1684808 - DNA, 25 bp, Homo sapien
gattgtctcctagactaagccttgt

SEQ ID NO: 1684809 - DNA, 25 bp, Homo sapien
cttgtcagattgtctcctagactaa

SEQ ID NO: 1684810 - DNA, 25 bp, Homo sapien
tagactaagccttgttccaaacagc

SEQ ID NO: 1684811 - DNA, 25 bp, Homo sapien
ctaagccttgttccaaacagctgct

SEQ ID NO: 1684812 - DNA, 25 bp, Homo sapien
agcctttatacccccagagttctgg

SEQ ID NO: 1684813 - DNA, 25 bp, Homo sapien
aggcaagcctttatacccccagagt

SEQ ID NO: 1684814 - DNA, 25 bp, Homo sapien
gcaagcctttatacccccagagttc

SEQ ID NO: 1684815 - DNA, 25 bp, Homo sapien
ctaggcaagcctttatacccccaga

SEQ ID NO: 1684816 - DNA, 25 bp, Homo sapien
ctgtcattcttcagtcctggcctac

SEQ ID NO: 1684817 - DNA, 25 bp, Homo sapien
tgagcaaccttctcctcattcagag

SEQ ID NO: 1684818 - DNA, 25 bp, Homo sapien
ttcactagtgggagtgcgtgcttga

SEQ ID NO: 1684819 - DNA, 25 bp, Homo sapien
gtgcttgagcaaccttctcctcatt

SEQ ID NO: 1684820 - DNA, 25 bp, Homo sapien
caaaggtgcagcttgctcttggggg

SEQ ID NO: 1684821 - DNA, 25 bp, Homo sapien
ttgggtttcacaggtgccatctcat

SEQ ID NO: 1684822 - DNA, 25 bp, Homo sapien
aggtgccatctcattaagtccccaa

SEQ ID NO: 1684823 - DNA, 25 bp, Homo sapien
tcacaggtgccatctcattaagtcc

SEQ ID NO: 1684824 - DNA, 25 bp, Homo sapien
tgccatctcattaagtccccaatca

SEQ ID NO: 1684825 - DNA, 25 bp, Homo sapien
tgttagtagcacaggacgtttggcg

SEQ ID NO: 1684826 - DNA, 25 bp, Homo sapien
gagacagagtgaggattgacagcat

SEQ ID NO: 1684827 - DNA, 25 bp, Homo sapien
tgaggattgacagcatgtgtttggt

SEQ ID NO: 1684828 - DNA, 25 bp, Homo sapien
gacgtttggcgtccctgtggagaca

SEQ ID NO: 1684829 - DNA, 25 bp, Homo sapien
gatcagcagtgtcgttgtctcccaa

SEQ ID NO: 1684830 - DNA, 25 bp, Homo sapien
cattgcttgttaagaccagcagcag

SEQ ID NO: 1684831 - DNA, 25 bp, Homo sapien
agaagttgatgggtcttttttatca

SEQ ID NO: 1684832 - DNA, 25 bp, Homo sapien
tttgtcttctgggaggccgacctca

SEQ ID NO: 1684833 - DNA, 25 bp, Homo sapien
cattattcacatttgggtcccccat

SEQ ID NO: 1684834 - DNA, 25 bp, Homo sapien
ccattattttatcattggctgtttt

SEQ ID NO: 1684835 - DNA, 25 bp, Homo sapien
attggctgttttccgcagcagcagg

SEQ ID NO: 1684836 - DNA, 25 bp, Homo sapien
aggccagagctgagcattattcaca

SEQ ID NO: 1684837 - DNA, 25 bp, Homo sapien
atgaggagaatctcttgggatccca

SEQ ID NO: 1684838 - DNA, 25 bp, Homo sapien
gaggagaatctcttgggatcccatc

SEQ ID NO: 1684839 - DNA, 25 bp, Homo sapien
tgaggagaatctcttgggatcccat

SEQ ID NO: 1684840 - DNA, 25 bp, Homo sapien
ccctgtgcgtccatgtcatccgcct

SEQ ID NO: 1684841 - DNA, 25 bp, Homo sapien
cgtccatgtcatccgccttcagtgt

SEQ ID NO: 1684842 - DNA, 25 bp, Homo sapien
tgtgcgtccatgtcatccgccttca

SEQ ID NO: 1684843 - DNA, 25 bp, Homo sapien
catgtcatccgccttcagtgtggcc

SEQ ID NO: 1684844 - DNA, 25 bp, Homo sapien
gactatgggcctcttttacaactgg

SEQ ID NO: 1684845 - DNA, 25 bp, Homo sapien
gaatgcttacagaatagtggtgcca

SEQ ID NO: 1684846 - DNA, 25 bp, Homo sapien
ggaagttcagtcgacatttgtacag

SEQ ID NO: 1684847 - DNA, 25 bp, Homo sapien
tatctatccagagggccatttgtgt

SEQ ID NO: 1684848 - DNA, 25 bp, Homo sapien
ggcttctgatgggtaacagtgccat

SEQ ID NO: 1684849 - DNA, 25 bp, Homo sapien
cagtgagtttggtgtcagggtccat

SEQ ID NO: 1684850 - DNA, 25 bp, Homo sapien
tgccatgtttccagtgagtttggtg

SEQ ID NO: 1684851 - DNA, 25 bp, Homo sapien
cctttgaattggcttctgatgggta

SEQ ID NO: 1684852 - DNA, 25 bp, Homo sapien
tggattttggaattgtacttttgga

SEQ ID NO: 1684853 - DNA, 25 bp, Homo sapien
tggagtttcttcgaacactcagaaa

SEQ ID NO: 1684854 - DNA, 25 bp, Homo sapien
gagtttcttcgaacactcagaaatg

SEQ ID NO: 1684855 - DNA, 25 bp, Homo sapien
ttttggagtttcttcgaacactcag

SEQ ID NO: 1684856 - DNA, 25 bp, Homo sapien
gaataggaaaattcgtgattcccaa

SEQ ID NO: 1684857 - DNA, 25 bp, Homo sapien
tttgttcgcaggtttggcataattg

SEQ ID NO: 1684858 - DNA, 25 bp, Homo sapien
tgttcgcaggtttggcataattgcg

SEQ ID NO: 1684859 - DNA, 25 bp, Homo sapien
aggaaaattcgtgattcccaatgta

SEQ ID NO: 1684860 - DNA, 25 bp, Homo sapien
cagtccagtctttctccttagctgt

SEQ ID NO: 1684861 - DNA, 25 bp, Homo sapien
cattctgagggtcaaaaactttctc

SEQ ID NO: 1684862 - DNA, 25 bp, Homo sapien
gtctcagtccagtctttctccttag

SEQ ID NO: 1684863 - DNA, 25 bp, Homo sapien
caagcccaccacttgctgggtttat

SEQ ID NO: 1684864 - DNA, 25 bp, Homo sapien
taaaggcaaaagattgtgtacatct

SEQ ID NO: 1684865 - DNA, 25 bp, Homo sapien
gaagctgccaaagcgcctttgctgt

SEQ ID NO: 1684866 - DNA, 25 bp, Homo sapien
ttgtaccgtacatgaagctgccaaa

SEQ ID NO: 1684867 - DNA, 25 bp, Homo sapien
ccaaagcgcctttgctgtgctgcca

SEQ ID NO: 1684868 - DNA, 25 bp, Homo sapien
acatgaagctgccaaagcgcctttg

SEQ ID NO: 1684869 - DNA, 25 bp, Homo sapien
tcacttcagaacaatctgcttggtg

SEQ ID NO: 1684870 - DNA, 25 bp, Homo sapien
cagtgggccgtctttcctctggagc

SEQ ID NO: 1684871 - DNA, 25 bp, Homo sapien
gggctggtggacagcctccatcagc

SEQ ID NO: 1684872 - DNA, 25 bp, Homo sapien
tacagggtaccagaggccaaccatt

SEQ ID NO: 1684873 - DNA, 25 bp, Homo sapien
gaccgcctctgactcagacctgctg

SEQ ID NO: 1684874 - DNA, 25 bp, Homo sapien
tattctcactcctctgacaactaga

SEQ ID NO: 1684875 - DNA, 25 bp, Homo sapien
ccatcgttgaggttgggcttttcaa

SEQ ID NO: 1684876 - DNA, 25 bp, Homo sapien
cagccaggccccatcgttgaggttg

SEQ ID NO: 1684877 - DNA, 25 bp, Homo sapien
agtgtctccattactcgcagcatgg

SEQ ID NO: 1684878 - DNA, 25 bp, Homo sapien
cagtgtctccattactcgcagcatg

SEQ ID NO: 1684879 - DNA, 25 bp, Homo sapien
ctcagtgtctccattactcgcagca

SEQ ID NO: 1684880 - DNA, 25 bp, Homo sapien
tgtctccattactcgcagcatggca

SEQ ID NO: 1684881 - DNA, 25 bp, Homo sapien
aatttgtactcctttatctttgcca

SEQ ID NO: 1684882 - DNA, 25 bp, Homo sapien
tttatctttgccatactttctgcaa

SEQ ID NO: 1684883 - DNA, 25 bp, Homo sapien
atttgtactcctttatctttgccat

SEQ ID NO: 1684884 - DNA, 25 bp, Homo sapien
ttaatttgtactcctttatctttgc

SEQ ID NO: 1684885 - DNA, 25 bp, Homo sapien
ctatgtggatccaatatccacatac

SEQ ID NO: 1684886 - DNA, 25 bp, Homo sapien
cacatactggatccaatatctatgt

SEQ ID NO: 1684887 - DNA, 25 bp, Homo sapien
tgtggatccaatatccacatattgg

SEQ ID NO: 1684888 - DNA, 25 bp, Homo sapien
gatccacgtattggatccaatatcc

SEQ ID NO: 1684889 - DNA, 25 bp, Homo sapien
gatgtggcatgagtcggcattagct

SEQ ID NO: 1684890 - DNA, 25 bp, Homo sapien
gctcagaggaaaactgctctgccct

SEQ ID NO: 1684891 - DNA, 25 bp, Homo sapien
gctaagatgcatcagatatcgtggg

SEQ ID NO: 1684892 - DNA, 25 bp, Homo sapien
tgggagccttggactagaggctgca

SEQ ID NO: 1684893 - DNA, 25 bp, Homo sapien
gatgtctccccttgcagtaagatga

SEQ ID NO: 1684894 - DNA, 25 bp, Homo sapien
gcaccaggtaagtgttcagaaagcc

SEQ ID NO: 1684895 - DNA, 25 bp, Homo sapien
tcctggtcagcagtgcatagggtca

SEQ ID NO: 1684896 - DNA, 25 bp, Homo sapien
cgatgctgcgggttagaattcctgg

SEQ ID NO: 1684897 - DNA, 25 bp, Homo sapien
cctccccaaccagtaggatgatggt

SEQ ID NO: 1684898 - DNA, 25 bp, Homo sapien
tgatggtggaactcattcctagaag

SEQ ID NO: 1684899 - DNA, 25 bp, Homo sapien
cattctggctttggtccgggccccg

SEQ ID NO: 1684900 - DNA, 25 bp, Homo sapien
gcatcccctccagtgcatgtctcat

SEQ ID NO: 1684901 - DNA, 25 bp, Homo sapien
cctgagaggcccgtctacatttgtc

SEQ ID NO: 1684902 - DNA, 25 bp, Homo sapien
catctagcaggtgcctcatgtcgtg

SEQ ID NO: 1684903 - DNA, 25 bp, Homo sapien
accaatcagtgcattcagagccagc

SEQ ID NO: 1684904 - DNA, 25 bp, Homo sapien
tcatgagtcaccaatcagtgcattc

SEQ ID NO: 1684905 - DNA, 25 bp, Homo sapien
ggaggacctgagaggagttgagcct

SEQ ID NO: 1684906 - DNA, 25 bp, Homo sapien
gtcatgataggctggaggacctgag

SEQ ID NO: 1684907 - DNA, 25 bp, Homo sapien
gacctgagaggagttgagccttggt

SEQ ID NO: 1684908 - DNA, 25 bp, Homo sapien
tcatgataggctggaggacctgaga

SEQ ID NO: 1684909 - DNA, 25 bp, Homo sapien
caagatcacctggatggttctggaa

SEQ ID NO: 1684910 - DNA, 25 bp, Homo sapien
catggagtattaagatgaatggatc

SEQ ID NO: 1684911 - DNA, 25 bp, Homo sapien
tgaatggatctagaaatattgcttc

SEQ ID NO: 1684912 - DNA, 25 bp, Homo sapien
acatagtgtgctgttcaagatcacc

SEQ ID NO: 1684913 - DNA, 25 bp, Homo sapien
ttgtcccattctacttggtccctca

SEQ ID NO: 1684914 - DNA, 25 bp, Homo sapien
tctgacagggcaccattgtcccatt

SEQ ID NO: 1684915 - DNA, 25 bp, Homo sapien
cagggcaccattgtcccattctact

SEQ ID NO: 1684916 - DNA, 25 bp, Homo sapien
tgtcccattctacttggtccctcat

SEQ ID NO: 1684917 - DNA, 25 bp, Homo sapien
gagtcagcctccctttgagaatagt

SEQ ID NO: 1684918 - DNA, 25 bp, Homo sapien
tgagcagcccaagctttcccctaca

SEQ ID NO: 1684919 - DNA, 25 bp, Homo sapien
cctggagcacctgcttgaagagtca

SEQ ID NO: 1684920 - DNA, 25 bp, Homo sapien
aagctttcccctacaccgacaggca

SEQ ID NO: 1684921 - DNA, 25 bp, Homo sapien
tcaatagcacacaggatggatacag

SEQ ID NO: 1684922 - DNA, 25 bp, Homo sapien
catcaatagcacacaggatggatac

SEQ ID NO: 1684923 - DNA, 25 bp, Homo sapien
gtgctttctaacaattcctccccat

SEQ ID NO: 1684924 - DNA, 25 bp, Homo sapien
acaattcctccccatgacaaagctg

SEQ ID NO: 1684925 - DNA, 25 bp, Homo sapien
cggctgggcaagaaccagacgaggt

SEQ ID NO: 1684926 - DNA, 25 bp, Homo sapien
aagaaccagacgaggtcaggtggac

SEQ ID NO: 1684927 - DNA, 25 bp, Homo sapien
tcaggtggacctgtggtagtgagcc

SEQ ID NO: 1684928 - DNA, 25 bp, Homo sapien
ggtggacctgtggtagtgagcccat

SEQ ID NO: 1684929 - DNA, 25 bp, Homo sapien
gagggaaagcaaaggtcctagcagc

SEQ ID NO: 1684930 - DNA, 25 bp, Homo sapien
ggcccattgagacatcctagagtcg

SEQ ID NO: 1684931 - DNA, 25 bp, Homo sapien
gagagaagtctcctctcccacaggc

SEQ ID NO: 1684932 - DNA, 25 bp, Homo sapien
catccccagtgagatagagagccct

SEQ ID NO: 1684933 - DNA, 25 bp, Homo sapien
caaacacagatagggaatcctgtag

SEQ ID NO: 1684934 - DNA, 25 bp, Homo sapien
ctttctctccaaacacagataggga

SEQ ID NO: 1684935 - DNA, 25 bp, Homo sapien
atttcctcgaagaagtcaccctgaa

SEQ ID NO: 1684936 - DNA, 25 bp, Homo sapien
gaatcctgtagcttcatttcctcga

SEQ ID NO: 1684937 - DNA, 25 bp, Homo sapien
cctggagagtttgacctgcagtttg

SEQ ID NO: 1684938 - DNA, 25 bp, Homo sapien
cagtttgcaaagatttttgcaatca

SEQ ID NO: 1684939 - DNA, 25 bp, Homo sapien
ctgttgcctggagagtttgacctgc

SEQ ID NO: 1684940 - DNA, 25 bp, Homo sapien
ctgcagtttgcaaagatttttgcaa

SEQ ID NO: 1684941 - DNA, 25 bp, Homo sapien
tgcatcaacagtccatcccactaga

SEQ ID NO: 1684942 - DNA, 25 bp, Homo sapien
ctgcatcaacagtccatcccactag

SEQ ID NO: 1684943 - DNA, 25 bp, Homo sapien
cagtccatcccactagacgctccat

SEQ ID NO: 1684944 - DNA, 25 bp, Homo sapien
tcaacagtccatcccactagacgct

SEQ ID NO: 1684945 - DNA, 25 bp, Homo sapien
tgagtatccacaactatatctcctc

SEQ ID NO: 1684946 - DNA, 25 bp, Homo sapien
gagtatccacaactatatctcctcc

SEQ ID NO: 1684947 - DNA, 25 bp, Homo sapien
agtatccacaactatatctcctcct

SEQ ID NO: 1684948 - DNA, 25 bp, Homo sapien
gtatccacaactatatctcctcctg

SEQ ID NO: 1684949 - DNA, 25 bp, Homo sapien
cgagctcatacagaccttttctcct

SEQ ID NO: 1684950 - DNA, 25 bp, Homo sapien
gaaacagcttcccatcgagctcata

SEQ ID NO: 1684951 - DNA, 25 bp, Homo sapien
gttctcccaatcctaagctcagaaa

SEQ ID NO: 1684952 - DNA, 25 bp, Homo sapien
aatcctaagctcagaaacagcttcc

SEQ ID NO: 1684953 - DNA, 25 bp, Homo sapien
ttgccaagaagggacttggaataga

SEQ ID NO: 1684954 - DNA, 25 bp, Homo sapien
caagaagggacttggaatagaagtg

SEQ ID NO: 1684955 - DNA, 25 bp, Homo sapien
tgccaagaagggacttggaatagaa

SEQ ID NO: 1684956 - DNA, 25 bp, Homo sapien
cttttgccaagaagggacttggaat

SEQ ID NO: 1684957 - DNA, 25 bp, Homo sapien
gcacatacttagtgtagtcatcagg

SEQ ID NO: 1684958 - DNA, 25 bp, Homo sapien
taccttgccaaggattttcattatt

SEQ ID NO: 1684959 - DNA, 25 bp, Homo sapien
atcgccctgaccctcggatatacaa

SEQ ID NO: 1684960 - DNA, 25 bp, Homo sapien
agtcatcaggcatgattataccttg

SEQ ID NO: 1684961 - DNA, 25 bp, Homo sapien
taggctagtcttcaccaaagacaga

SEQ ID NO: 1684962 - DNA, 25 bp, Homo sapien
gaccagctgccctagtcacaaggat

SEQ ID NO: 1684963 - DNA, 25 bp, Homo sapien
caatggcacaagaatgataggctag

SEQ ID NO: 1684964 - DNA, 25 bp, Homo sapien
cacaaggattggtattgattcagac

SEQ ID NO: 1684965 - DNA, 25 bp, Homo sapien
ggacactgttcaggacaacaagcat

SEQ ID NO: 1684966 - DNA, 25 bp, Homo sapien
ccattaggacactgttcaggacaac

SEQ ID NO: 1684967 - DNA, 25 bp, Homo sapien
cttgctgttccattaggacactgtt

SEQ ID NO: 1684968 - DNA, 25 bp, Homo sapien
tgttccattaggacactgttcagga

SEQ ID NO: 1684969 - DNA, 25 bp, Homo sapien
gatggatggaaccaacttggaggca

SEQ ID NO: 1684970 - DNA, 25 bp, Homo sapien
taaccttaacgaacttcttgtcata

SEQ ID NO: 1684971 - DNA, 25 bp, Homo sapien
ccttaacgaacttcttgtcatattt

SEQ ID NO: 1684972 - DNA, 25 bp, Homo sapien
caggcagttgatattggctgggttt

SEQ ID NO: 1684973 - DNA, 25 bp, Homo sapien
tggtttccccagatatgtaatattc

SEQ ID NO: 1684974 - DNA, 25 bp, Homo sapien
gtttccccagatatgtaatattctt

SEQ ID NO: 1684975 - DNA, 25 bp, Homo sapien
ggtttccccagatatgtaatattct

SEQ ID NO: 1684976 - DNA, 25 bp, Homo sapien
tcctggatggtttttgagcctcgat

SEQ ID NO: 1684977 - DNA, 25 bp, Homo sapien
tgcacagccatgaattctccctggg

SEQ ID NO: 1684978 - DNA, 25 bp, Homo sapien
ggctcttgtagtggacattgtcctg

SEQ ID NO: 1684979 - DNA, 25 bp, Homo sapien
cctttgcttgcaatttcgtcttggc

SEQ ID NO: 1684980 - DNA, 25 bp, Homo sapien
gtagaacgatgactgggaataccat

SEQ ID NO: 1684981 - DNA, 25 bp, Homo sapien
tcattaatggagagagcttcaacaa

SEQ ID NO: 1684982 - DNA, 25 bp, Homo sapien
taagatccatcttcttacatgagga

SEQ ID NO: 1684983 - DNA, 25 bp, Homo sapien
tattagagataaccccactggacac

SEQ ID NO: 1684984 - DNA, 25 bp, Homo sapien
tgtcgagtggtgactatcacttcat

SEQ ID NO: 1684985 - DNA, 25 bp, Homo sapien
caaccatgacgatgaggtttgtcga

SEQ ID NO: 1684986 - DNA, 25 bp, Homo sapien
taagatgctgtctacccagtttccc

SEQ ID NO: 1684987 - DNA, 25 bp, Homo sapien
taacatccgttgataattcttgtcc

SEQ ID NO: 1684988 - DNA, 25 bp, Homo sapien
cccaataatgtcctgtatagtgaaa

SEQ ID NO: 1684989 - DNA, 25 bp, Homo sapien
gattccacaacggttaacattttgc

SEQ ID NO: 1684990 - DNA, 25 bp, Homo sapien
tgtacagcggttgttctctattccc

SEQ ID NO: 1684991 - DNA, 25 bp, Homo sapien
tgagagtagattgaagacatgattc

SEQ ID NO: 1684992 - DNA, 25 bp, Homo sapien
taccaatggcagatgtaaggaagac

SEQ ID NO: 1684993 - DNA, 25 bp, Homo sapien
catcactggttgatttagcataccc

SEQ ID NO: 1684994 - DNA, 25 bp, Homo sapien
aactgaactttaatgagaagatgcc

SEQ ID NO: 1684995 - DNA, 25 bp, Homo sapien
gaaatcaagattccacccgggtgta

SEQ ID NO: 1684996 - DNA, 25 bp, Homo sapien
tctctttggtgtgcgcggggctgcc

SEQ ID NO: 1684997 - DNA, 25 bp, Homo sapien
tgtcctccgcggtggcgccgcactc

SEQ ID NO: 1684998 - DNA, 25 bp, Homo sapien
cccagccccggactcggagagggct

SEQ ID NO: 1684999 - DNA, 25 bp, Homo sapien
agctctgcggacccttgtccggggc

SEQ ID NO: 1685000 - DNA, 25 bp, Homo sapien
gtcctcgccgttggctttcgcctcc

SEQ ID NO: 1685001 - DNA, 25 bp, Homo sapien
ccggcctcgtcacataacacagcat

SEQ ID NO: 1685002 - DNA, 25 bp, Homo sapien
tcgccgttggctttcgcctccacct

SEQ ID NO: 1685003 - DNA, 25 bp, Homo sapien
accgcgtccggcctcgtcacataac

SEQ ID NO: 1685004 - DNA, 25 bp, Homo sapien
aaaacaaagttccacggctccaatg

SEQ ID NO: 1685005 - DNA, 25 bp, Homo sapien
tccttttaacgtctagggcatgacc

SEQ ID NO: 1685006 - DNA, 25 bp, Homo sapien
ggctccaatgataccaaaccacgag

SEQ ID NO: 1685007 - DNA, 25 bp, Homo sapien
aaaccacgagctctagtatggaggc

SEQ ID NO: 1685008 - DNA, 25 bp, Homo sapien
actgcagtccaaaatagtcaacttc

SEQ ID NO: 1685009 - DNA, 25 bp, Homo sapien
ctcctgtaagatgagatgaggctcc

SEQ ID NO: 1685010 - DNA, 25 bp, Homo sapien
agatccggtttctcaggtttagcca

SEQ ID NO: 1685011 - DNA, 25 bp, Homo sapien
cataaactttcacctttgctacccg

SEQ ID NO: 1685012 - DNA, 25 bp, Homo sapien
tgcagcggcccttctaaagggaacc

SEQ ID NO: 1685013 - DNA, 25 bp, Homo sapien
ggaactccgcatcaaaacaaacttg

SEQ ID NO: 1685014 - DNA, 25 bp, Homo sapien
ggacctgcatggaaaacctaagtta

SEQ ID NO: 1685015 - DNA, 25 bp, Homo sapien
ggaaaatgcactcagaccaagtagg

SEQ ID NO: 1685016 - DNA, 25 bp, Homo sapien
taacatccaggattagagcatttct

SEQ ID NO: 1685017 - DNA, 25 bp, Homo sapien
tcagaaaggtaggacagatttaaca

SEQ ID NO: 1685018 - DNA, 25 bp, Homo sapien
tgaacatttagtctgggactcacgg

SEQ ID NO: 1685019 - DNA, 25 bp, Homo sapien
gacgagtcagagtcaaactcatcac

SEQ ID NO: 1685020 - DNA, 25 bp, Homo sapien
ttctggctaaactcatgtcctggca

SEQ ID NO: 1685021 - DNA, 25 bp, Homo sapien
gcataaataagctcaaactgcacct

SEQ ID NO: 1685022 - DNA, 25 bp, Homo sapien
ggcccaaggcgtaacattctggcta

SEQ ID NO: 1685023 - DNA, 25 bp, Homo sapien
tctctgtcttaaggaaatgtccatg

SEQ ID NO: 1685024 - DNA, 25 bp, Homo sapien
gctacattagaccatgcctgtctaa

SEQ ID NO: 1685025 - DNA, 25 bp, Homo sapien
ctcccgatagctacattagaccatg

SEQ ID NO: 1685026 - DNA, 25 bp, Homo sapien
ccgatagctacattagaccatgcct

SEQ ID NO: 1685027 - DNA, 25 bp, Homo sapien
gatagctacattagaccatgcctgt

SEQ ID NO: 1685028 - DNA, 25 bp, Homo sapien
ggaggtgtgctgttaggaaactaaa

SEQ ID NO: 1685029 - DNA, 25 bp, Homo sapien
gacttgaagaatattgccacaaacg

SEQ ID NO: 1685030 - DNA, 25 bp, Homo sapien
agaaattacgctctgaaagacttga

SEQ ID NO: 1685031 - DNA, 25 bp, Homo sapien
aattactgcttatgtaaaagtggcc

SEQ ID NO: 1685032 - DNA, 25 bp, Homo sapien
tacactgttgcaggcctcaaaaggc

SEQ ID NO: 1685033 - DNA, 25 bp, Homo sapien
agcattctcagcaagccgtggttta

SEQ ID NO: 1685034 - DNA, 25 bp, Homo sapien
ctcaaaaggcttcttagatgaccat

SEQ ID NO: 1685035 - DNA, 25 bp, Homo sapien
cagcaagccgtggtttactacactg

SEQ ID NO: 1685036 - DNA, 25 bp, Homo sapien
aacccaaacatctgctaatctttaa

SEQ ID NO: 1685037 - DNA, 25 bp, Homo sapien
tagtaagaatgtgtaatagcctcaa

SEQ ID NO: 1685038 - DNA, 25 bp, Homo sapien
aaagaaatcatagtaagaatgtgta

SEQ ID NO: 1685039 - DNA, 25 bp, Homo sapien
tttattaacccaaacatctgctaat

SEQ ID NO: 1685040 - DNA, 25 bp, Homo sapien
ctctggaataaaagttgtgacccaa

SEQ ID NO: 1685041 - DNA, 25 bp, Homo sapien
tcagcctacttagcaatttcacagt

SEQ ID NO: 1685042 - DNA, 25 bp, Homo sapien
tctgatagaatcttaaggaactcta

SEQ ID NO: 1685043 - DNA, 25 bp, Homo sapien
caaaataagaactgcgtttctctgg

SEQ ID NO: 1685044 - DNA, 25 bp, Homo sapien
caagagggcctccttgatgtgcaag

SEQ ID NO: 1685045 - DNA, 25 bp, Homo sapien
gagggcctccttgatgtgcaagaaa

SEQ ID NO: 1685046 - DNA, 25 bp, Homo sapien
gccaagagggcctccttgatgtgca

SEQ ID NO: 1685047 - DNA, 25 bp, Homo sapien
acaagaggtggcctgccaagagggc

SEQ ID NO: 1685048 - DNA, 25 bp, Homo sapien
agagctcctcatagttatacttggc

SEQ ID NO: 1685049 - DNA, 25 bp, Homo sapien
agtctccaaacttggtctgggccag

SEQ ID NO: 1685050 - DNA, 25 bp, Homo sapien
cacagagctcctcatagttatactt

SEQ ID NO: 1685051 - DNA, 25 bp, Homo sapien
cagagctcctcatagttatacttgg

SEQ ID NO: 1685052 - DNA, 25 bp, Homo sapien
tgcaaaacttggtattcagctgaag

SEQ ID NO: 1685053 - DNA, 25 bp, Homo sapien
cacaatctgcaaaacttggtattca

SEQ ID NO: 1685054 - DNA, 25 bp, Homo sapien
tgccgacacaatctgcaaaacttgg

SEQ ID NO: 1685055 - DNA, 25 bp, Homo sapien
tctgcaaaacttggtattcagctga

SEQ ID NO: 1685056 - DNA, 25 bp, Homo sapien
cgcacagaatgccattctatgccat

SEQ ID NO: 1685057 - DNA, 25 bp, Homo sapien
atgccattctatgccatagttttcc

SEQ ID NO: 1685058 - DNA, 25 bp, Homo sapien
cagaatgccattctatgccatagtt

SEQ ID NO: 1685059 - DNA, 25 bp, Homo sapien
cacagaatgccattctatgccatag

SEQ ID NO: 1685060 - DNA, 25 bp, Homo sapien
cttcaggtccaaccccaatgagcag

SEQ ID NO: 1685061 - DNA, 25 bp, Homo sapien
ttacaaattgagattccttcaggtc

SEQ ID NO: 1685062 - DNA, 25 bp, Homo sapien
gtccaaccccaatgagcagtttctg

SEQ ID NO: 1685063 - DNA, 25 bp, Homo sapien
ctattaattgggctaaagtcatctt

SEQ ID NO: 1685064 - DNA, 25 bp, Homo sapien
gagacaggaagagaaaagaaagcag

SEQ ID NO: 1685065 - DNA, 25 bp, Homo sapien
aagagacaggaagagaaaagaaagc

SEQ ID NO: 1685066 - DNA, 25 bp, Homo sapien
ctaagagacaggaagagaaaagaaa

SEQ ID NO: 1685067 - DNA, 25 bp, Homo sapien
gacaggaagagaaaagaaagcagat

SEQ ID NO: 1685068 - DNA, 25 bp, Homo sapien
tagaatgcgtgcgtctctgttatcg

SEQ ID NO: 1685069 - DNA, 25 bp, Homo sapien
tgttatcgctcggtagagcccgctg

SEQ ID NO: 1685070 - DNA, 25 bp, Homo sapien
tcccagattccttggtgaccgtcaa

SEQ ID NO: 1685071 - DNA, 25 bp, Homo sapien
aacaagagcacgatgctgttcccag

SEQ ID NO: 1685072 - DNA, 25 bp, Homo sapien
gctgaggtgaccaagcacacgagat

SEQ ID NO: 1685073 - DNA, 25 bp, Homo sapien
tgtggtgctgaggtgaccaagcaca

SEQ ID NO: 1685074 - DNA, 25 bp, Homo sapien
tgaggtgaccaagcacacgagatac

SEQ ID NO: 1685075 - DNA, 25 bp, Homo sapien
tggtgctgaggtgaccaagcacacg

SEQ ID NO: 1685076 - DNA, 25 bp, Homo sapien
ctccactgctactacggaaacaaaa

SEQ ID NO: 1685077 - DNA, 25 bp, Homo sapien
tgctactacggaaacaaaatgttca

SEQ ID NO: 1685078 - DNA, 25 bp, Homo sapien
gacacaacaatccaaggaaccgtag

SEQ ID NO: 1685079 - DNA, 25 bp, Homo sapien
tgtactagactcattgacacaacaa

SEQ ID NO: 1685080 - DNA, 25 bp, Homo sapien
ttaacaccaaagagcctggcagcac

SEQ ID NO: 1685081 - DNA, 25 bp, Homo sapien
tatactgcatcatcacggcgctggt

SEQ ID NO: 1685082 - DNA, 25 bp, Homo sapien
tcacggcgctggtcactgtgtcaca

SEQ ID NO: 1685083 - DNA, 25 bp, Homo sapien
atcatcacggcgctggtcactgtgt

SEQ ID NO: 1685084 - DNA, 25 bp, Homo sapien
ggcccttcaagtcacggctatactg

SEQ ID NO: 1685085 - DNA, 25 bp, Homo sapien
ggcttccttcagcttgcgtagcttc

SEQ ID NO: 1685086 - DNA, 25 bp, Homo sapien
gacagaaggtggagttgatctcctc

SEQ ID NO: 1685087 - DNA, 25 bp, Homo sapien
acgaggtccacaacgccagcattgt

SEQ ID NO: 1685088 - DNA, 25 bp, Homo sapien
ggcatggtcatacacctcctttgat

SEQ ID NO: 1685089 - DNA, 25 bp, Homo sapien
tgtgcattagcgagccagtacctgg

SEQ ID NO: 1685090 - DNA, 25 bp, Homo sapien
cagagtcaacaacccatccatggat

SEQ ID NO: 1685091 - DNA, 25 bp, Homo sapien
gatatgttacccaggaatctcagcc

SEQ ID NO: 1685092 - DNA, 25 bp, Homo sapien
tgaagatgggcattccccgtctgtg

SEQ ID NO: 1685093 - DNA, 25 bp, Homo sapien
aagacaagcctatgactgcttctgg

SEQ ID NO: 1685094 - DNA, 25 bp, Homo sapien
gctctgaaattagcagcttctgaag

SEQ ID NO: 1685095 - DNA, 25 bp, Homo sapien
gacatttggcaaacacatctgagaa

SEQ ID NO: 1685096 - DNA, 25 bp, Homo sapien
gagtcagaataggtgggcagaaaaa

SEQ ID NO: 1685097 - DNA, 25 bp, Homo sapien
gagtagactataacacttcaggcag

SEQ ID NO: 1685098 - DNA, 25 bp, Homo sapien
tctgttagcatgcaagcctcggtgg

SEQ ID NO: 1685099 - DNA, 25 bp, Homo sapien
gaaattgtgtgtccttagctcagct

SEQ ID NO: 1685100 - DNA, 25 bp, Homo sapien
ttctagccgtaggtggcagctccac

SEQ ID NO: 1685101 - DNA, 25 bp, Homo sapien
actggtgtgcgttggcagatagacg

SEQ ID NO: 1685102 - DNA, 25 bp, Homo sapien
cagatagacgtgctggacatgctcc

SEQ ID NO: 1685103 - DNA, 25 bp, Homo sapien
cgttggcagatagacgtgctggaca

SEQ ID NO: 1685104 - DNA, 25 bp, Homo sapien
tagacgtgctggacatgctccacac

SEQ ID NO: 1685105 - DNA, 25 bp, Homo sapien
tcatggaaacatgccaagtccaaca

SEQ ID NO: 1685106 - DNA, 25 bp, Homo sapien
gaaacatgccaagtccaacaaaagc

SEQ ID NO: 1685107 - DNA, 25 bp, Homo sapien
ggaaacatgccaagtccaacaaaag

SEQ ID NO: 1685108 - DNA, 25 bp, Homo sapien
atggaaacatgccaagtccaacaaa

SEQ ID NO: 1685109 - DNA, 25 bp, Homo sapien
taaaatattccaccagctcagaagg

SEQ ID NO: 1685110 - DNA, 25 bp, Homo sapien
gcgtaaaggaatagggagccaccca

SEQ ID NO: 1685111 - DNA, 25 bp, Homo sapien
tctgctgccagtaggaaacttacct

SEQ ID NO: 1685112 - DNA, 25 bp, Homo sapien
gctagtattgcacccgataaggtca

SEQ ID NO: 1685113 - DNA, 25 bp, Homo sapien
cagagtcctctaggatataacagag

SEQ ID NO: 1685114 - DNA, 25 bp, Homo sapien
taaaagacagagtcctctaggatat

SEQ ID NO: 1685115 - DNA, 25 bp, Homo sapien
tcctctaggatataacagagttctt

SEQ ID NO: 1685116 - DNA, 25 bp, Homo sapien
tattatcccgaatataaaagacaga

SEQ ID NO: 1685117 - DNA, 25 bp, Homo sapien
gacatgcagcgggtgggccagcccc

SEQ ID NO: 1685118 - DNA, 25 bp, Homo sapien
cagttcactgacatgcagcgggtgg

SEQ ID NO: 1685119 - DNA, 25 bp, Homo sapien
gcagactgtgctccagccctggcat

SEQ ID NO: 1685120 - DNA, 25 bp, Homo sapien
tgggccagccccagcagactgtgct

SEQ ID NO: 1685121 - DNA, 25 bp, Homo sapien
ttaagccctgacacttcctcatact

SEQ ID NO: 1685122 - DNA, 25 bp, Homo sapien
gaaaatgcacccactctttcttaag

SEQ ID NO: 1685123 - DNA, 25 bp, Homo sapien
cactctttcttaagccctgacactt

SEQ ID NO: 1685124 - DNA, 25 bp, Homo sapien
aaatgcacccactctttcttaagcc

SEQ ID NO: 1685125 - DNA, 25 bp, Homo sapien
ccagaacttcccagcgttgcattcg

SEQ ID NO: 1685126 - DNA, 25 bp, Homo sapien
tcctgtggggcgtctgatccttggt

SEQ ID NO: 1685127 - DNA, 25 bp, Homo sapien
tggcagagttaaggggacacttccc

SEQ ID NO: 1685128 - DNA, 25 bp, Homo sapien
ttcccagcgttgcattcgagctcat

SEQ ID NO: 1685129 - DNA, 25 bp, Homo sapien
tgtctcttcatgaactggctctact

SEQ ID NO: 1685130 - DNA, 25 bp, Homo sapien
ttctgtcctctcttgtaccctttgc

SEQ ID NO: 1685131 - DNA, 25 bp, Homo sapien
tccatcaatccaaatcctgtactta

SEQ ID NO: 1685132 - DNA, 25 bp, Homo sapien
taccctttgctcctcgtctgtgggc

SEQ ID NO: 1685133 - DNA, 25 bp, Homo sapien
cctctccaatgcaaccttcctccag

SEQ ID NO: 1685134 - DNA, 25 bp, Homo sapien
ccaatgcaaccttcctccagaaaac

SEQ ID NO: 1685135 - DNA, 25 bp, Homo sapien
ctcctctccaatgcaaccttcctcc

SEQ ID NO: 1685136 - DNA, 25 bp, Homo sapien
tcctctccaatgcaaccttcctcca

SEQ ID NO: 1685137 - DNA, 25 bp, Homo sapien
cagagcccaggctaggaagtaagat

SEQ ID NO: 1685138 - DNA, 25 bp, Homo sapien
aggacacatgcttggcagagcccag

SEQ ID NO: 1685139 - DNA, 25 bp, Homo sapien
cagaggacacatgcttggcagagcc

SEQ ID NO: 1685140 - DNA, 25 bp, Homo sapien
tactaaaaactcagaggacacatgc

SEQ ID NO: 1685141 - DNA, 25 bp, Homo sapien
ctagtggccaaagaccatgttgttc

SEQ ID NO: 1685142 - DNA, 25 bp, Homo sapien
tagtggccaaagaccatgttgttct

SEQ ID NO: 1685143 - DNA, 25 bp, Homo sapien
agtggccaaagaccatgttgttctt

SEQ ID NO: 1685144 - DNA, 25 bp, Homo sapien
gtggccaaagaccatgttgttcttt

SEQ ID NO: 1685145 - DNA, 25 bp, Homo sapien
gattcaaacctgacagcctgagctt

SEQ ID NO: 1685146 - DNA, 25 bp, Homo sapien
cagtagaggtgaattgcacggtgcc

SEQ ID NO: 1685147 - DNA, 25 bp, Homo sapien
tttgctcaattaagaggatcagccc

SEQ ID NO: 1685148 - DNA, 25 bp, Homo sapien
ccttcacattgcaagcctgttggca

SEQ ID NO: 1685149 - DNA, 25 bp, Homo sapien
ccagaaggatgattcggaacacagc

SEQ ID NO: 1685150 - DNA, 25 bp, Homo sapien
tccagtaatagatgtgacagcaggc

SEQ ID NO: 1685151 - DNA, 25 bp, Homo sapien
caagcgcttgggatccatagagggc

SEQ ID NO: 1685152 - DNA, 25 bp, Homo sapien
tcactcctacgaagacaagcgcttg

SEQ ID NO: 1685153 - DNA, 25 bp, Homo sapien
gtagctctatgggtagcaaaagccc

SEQ ID NO: 1685154 - DNA, 25 bp, Homo sapien
gagggagactacacacatgaggaag

SEQ ID NO: 1685155 - DNA, 25 bp, Homo sapien
ggaaggccccagtgagagctgactc

SEQ ID NO: 1685156 - DNA, 25 bp, Homo sapien
taattgagtgtttcgcatccagcag

SEQ ID NO: 1685157 - DNA, 25 bp, Homo sapien
acttgagttcatgagcgaggctgca

SEQ ID NO: 1685158 - DNA, 25 bp, Homo sapien
agatattaccatctccctggcgtcc

SEQ ID NO: 1685159 - DNA, 25 bp, Homo sapien
ttagaatcaaaggtgcttagccggg

SEQ ID NO: 1685160 - DNA, 25 bp, Homo sapien
gaggcctaagaagatcccagatatt

SEQ ID NO: 1685161 - DNA, 25 bp, Homo sapien
cctcagtggtgcctaaggcatcacc

SEQ ID NO: 1685162 - DNA, 25 bp, Homo sapien
tcagtggtgcctaaggcatcaccct

SEQ ID NO: 1685163 - DNA, 25 bp, Homo sapien
gcctaaggcatcaccctccacccat

SEQ ID NO: 1685164 - DNA, 25 bp, Homo sapien
agtggtgcctaaggcatcaccctcc

SEQ ID NO: 1685165 - DNA, 25 bp, Homo sapien
gagggtcgctggaaggaaggtaaca

SEQ ID NO: 1685166 - DNA, 25 bp, Homo sapien
acagaggtcaccaagaaattttgca

SEQ ID NO: 1685167 - DNA, 25 bp, Homo sapien
ttgcacctggagattttgtatcagc

SEQ ID NO: 1685168 - DNA, 25 bp, Homo sapien
tcccagtccactacacactttccca

SEQ ID NO: 1685169 - DNA, 25 bp, Homo sapien
cacaggagagtggtagcaggctcac

SEQ ID NO: 1685170 - DNA, 25 bp, Homo sapien
tattgtgcccaggatgtggttgaag

SEQ ID NO: 1685171 - DNA, 25 bp, Homo sapien
tattcatagggaatgtccacaggag

SEQ ID NO: 1685172 - DNA, 25 bp, Homo sapien
ctatcatgggtctttgctcaaggtg

SEQ ID NO: 1685173 - DNA, 25 bp, Homo sapien
gtagtgaaatctgctcaaagtccat

SEQ ID NO: 1685174 - DNA, 25 bp, Homo sapien
gagtagtgaaatctgctcaaagtcc

SEQ ID NO: 1685175 - DNA, 25 bp, Homo sapien
tgagtagtgaaatctgctcaaagtc

SEQ ID NO: 1685176 - DNA, 25 bp, Homo sapien
agtagtgaaatctgctcaaagtcca

SEQ ID NO: 1685177 - DNA, 25 bp, Homo sapien
tttaataagccatttgaagcagtag

SEQ ID NO: 1685178 - DNA, 25 bp, Homo sapien
cctggtatggcatgggcatagttgc

SEQ ID NO: 1685179 - DNA, 25 bp, Homo sapien
gcagtagatgtaaaccccaagggac

SEQ ID NO: 1685180 - DNA, 25 bp, Homo sapien
gcaaagaagggagcaaatatgttcc

SEQ ID NO: 1685181 - DNA, 25 bp, Homo sapien
ctcagaggccatggtagtcttctcc

SEQ ID NO: 1685182 - DNA, 25 bp, Homo sapien
cattcttgctcagaggccatggtag

SEQ ID NO: 1685183 - DNA, 25 bp, Homo sapien
aggccatggtagtcttctccgtatc

SEQ ID NO: 1685184 - DNA, 25 bp, Homo sapien
agaggccatggtagtcttctccgta

SEQ ID NO: 1685185 - DNA, 25 bp, Homo sapien
ataagcttatttactcgctttccct

SEQ ID NO: 1685186 - DNA, 25 bp, Homo sapien
gtctctggggcatatcctcctggtg

SEQ ID NO: 1685187 - DNA, 25 bp, Homo sapien
tgtcctggcccacaaggtcccttca

SEQ ID NO: 1685188 - DNA, 25 bp, Homo sapien
tgtgtctggagtcctttccgttgtc

SEQ ID NO: 1685189 - DNA, 25 bp, Homo sapien
gagggaatcttgactgggactggga

SEQ ID NO: 1685190 - DNA, 25 bp, Homo sapien
cgtgggccgggtgcgcacgccgcgg

SEQ ID NO: 1685191 - DNA, 25 bp, Homo sapien
cgggtgcgcacgccgcggtcttaaa

SEQ ID NO: 1685192 - DNA, 25 bp, Homo sapien
tgcgcacgccgcggtcttaaacacg

SEQ ID NO: 1685193 - DNA, 25 bp, Homo sapien
gcacgccgcggtcttaaacacgccc

SEQ ID NO: 1685194 - DNA, 25 bp, Homo sapien
ttgaagtcgagcttgaggtccgcat

SEQ ID NO: 1685195 - DNA, 25 bp, Homo sapien
gacatccttgaagtcgagcttgagg

SEQ ID NO: 1685196 - DNA, 25 bp, Homo sapien
ttaggtcggagcaggacatccttga

SEQ ID NO: 1685197 - DNA, 25 bp, Homo sapien
cttgaggctgctccgcttaggtcgg

SEQ ID NO: 1685198 - DNA, 25 bp, Homo sapien
actggatctcgctcatctgtggtcg

SEQ ID NO: 1685199 - DNA, 25 bp, Homo sapien
gtttcactgtgaacttcccctaggc

SEQ ID NO: 1685200 - DNA, 25 bp, Homo sapien
tctaaaccaactggccactggatct

SEQ ID NO: 1685201 - DNA, 25 bp, Homo sapien
gaccgacgtgtagagaatttcatgg

SEQ ID NO: 1685202 - DNA, 25 bp, Homo sapien
cgcgggctgtccagtaccgctgagt

SEQ ID NO: 1685203 - DNA, 25 bp, Homo sapien
tgtccagtaccgctgagtccccaag

SEQ ID NO: 1685204 - DNA, 25 bp, Homo sapien
ttgtgccctgggttctggtttttca

SEQ ID NO: 1685205 - DNA, 25 bp, Homo sapien
cagacgcgttcacgaagttccaccg

SEQ ID NO: 1685206 - DNA, 25 bp, Homo sapien
ccaagtgttgcatgacattgtcgca

SEQ ID NO: 1685207 - DNA, 25 bp, Homo sapien
ctagaggtgtgcacaactgccctgg

SEQ ID NO: 1685208 - DNA, 25 bp, Homo sapien
tgcccaaattatgaagccaagtgtt

SEQ ID NO: 1685209 - DNA, 25 bp, Homo sapien
tgtgatagtattccccgagaaggag

SEQ ID NO: 1685210 - DNA, 25 bp, Homo sapien
tggcttcatgaattacaccagcaag

SEQ ID NO: 1685211 - DNA, 25 bp, Homo sapien
ctggcttcatgaattacaccagcaa

SEQ ID NO: 1685212 - DNA, 25 bp, Homo sapien
acaagggtgggcttgacagaagcca

SEQ ID NO: 1685213 - DNA, 25 bp, Homo sapien
tgctatcggcaatccagaacaacac

SEQ ID NO: 1685214 - DNA, 25 bp, Homo sapien
gggtgggcttgacagaagccacgtg

SEQ ID NO: 1685215 - DNA, 25 bp, Homo sapien
cttgctatcggcaatccagaacaac

SEQ ID NO: 1685216 - DNA, 25 bp, Homo sapien
gacatcacggctgccatctcaaacg

SEQ ID NO: 1685217 - DNA, 25 bp, Homo sapien
gaatccctgagtaggtctgctttga

SEQ ID NO: 1685218 - DNA, 25 bp, Homo sapien
tggccacgatgatgggaatccctga

SEQ ID NO: 1685219 - DNA, 25 bp, Homo sapien
ttgaatttcgaaacgtgaaggtgcg

SEQ ID NO: 1685220 - DNA, 25 bp, Homo sapien
cattctgggtgatttgtggcaaaga

SEQ ID NO: 1685221 - DNA, 25 bp, Homo sapien
aaagagcttccagtcatccagggag

SEQ ID NO: 1685222 - DNA, 25 bp, Homo sapien
tatgaattgctgtaaacatggagtg

SEQ ID NO: 1685223 - DNA, 25 bp, Homo sapien
ccagggagtaatgcttatgaattgc

SEQ ID NO: 1685224 - DNA, 25 bp, Homo sapien
gcactggtaattgataaccaggctg

SEQ ID NO: 1685225 - DNA, 25 bp, Homo sapien
ggtaattgataaccaggctgtagtc

SEQ ID NO: 1685226 - DNA, 25 bp, Homo sapien
tggtaattgataaccaggctgtagt

SEQ ID NO: 1685227 - DNA, 25 bp, Homo sapien
aattgataaccaggctgtagtcgta

SEQ ID NO: 1685228 - DNA, 25 bp, Homo sapien
tccagatcattctgcccactgcctg

SEQ ID NO: 1685229 - DNA, 25 bp, Homo sapien
ccagatcattctgcccactgcctga

SEQ ID NO: 1685230 - DNA, 25 bp, Homo sapien
ttccagatcattctgcccactgcct

SEQ ID NO: 1685231 - DNA, 25 bp, Homo sapien
ccaggcaaataaacttaacctgtgg

SEQ ID NO: 1685232 - DNA, 25 bp, Homo sapien
caagtttcacgaattccacaaaatg

SEQ ID NO: 1685233 - DNA, 25 bp, Homo sapien
caaataaacttaacctgtggcacag

SEQ ID NO: 1685234 - DNA, 25 bp, Homo sapien
caggaaatttggcacggacaagttt

SEQ ID NO: 1685235 - DNA, 25 bp, Homo sapien
tagataaaacacaccactgaccgat

SEQ ID NO: 1685236 - DNA, 25 bp, Homo sapien
tatctagtggtcaatcagtatgtgc

SEQ ID NO: 1685237 - DNA, 25 bp, Homo sapien
caatacaggtttttgcaaaagccca

SEQ ID NO: 1685238 - DNA, 25 bp, Homo sapien
cccaagttgtactctagagctgcta

SEQ ID NO: 1685239 - DNA, 25 bp, Homo sapien
tctccagccacgaggatcctcaacc

SEQ ID NO: 1685240 - DNA, 25 bp, Homo sapien
ggtggcactgttacaaaacagcatc

SEQ ID NO: 1685241 - DNA, 25 bp, Homo sapien
catcccatctgagcccgagtcattc

SEQ ID NO: 1685242 - DNA, 25 bp, Homo sapien
catctgagcccgagtcattctccag

SEQ ID NO: 1685243 - DNA, 25 bp, Homo sapien
aggcagctcacagttctcagcaggc

SEQ ID NO: 1685244 - DNA, 25 bp, Homo sapien
aatgtaatggacagcttgggagcac

SEQ ID NO: 1685245 - DNA, 25 bp, Homo sapien
gaggtgacatgcaggctctctaggc

SEQ ID NO: 1685246 - DNA, 25 bp, Homo sapien
tgctatcacttgtcattttaaagag

SEQ ID NO: 1685247 - DNA, 25 bp, Homo sapien
gcaaggcccatcttaggtgaaaggt

SEQ ID NO: 1685248 - DNA, 25 bp, Homo sapien
tactgagaatgtacccgagaacaca

SEQ ID NO: 1685249 - DNA, 25 bp, Homo sapien
ttgagatcaccctggtcaacactgc

SEQ ID NO: 1685250 - DNA, 25 bp, Homo sapien
taacaaagaagtgcctagtctgtgc

SEQ ID NO: 1685251 - DNA, 25 bp, Homo sapien
tgtggtcaggctttagtgaagtccc

SEQ ID NO: 1685252 - DNA, 25 bp, Homo sapien
ttggcaggaacaaaaagctgtcaat

SEQ ID NO: 1685253 - DNA, 25 bp, Homo sapien
aagtccccggtgtgccctcgagcag

SEQ ID NO: 1685254 - DNA, 25 bp, Homo sapien
tatgaaatgcctcaaccatgaggga

SEQ ID NO: 1685255 - DNA, 25 bp, Homo sapien
tctgtccatggtccaaatgtggtca

SEQ ID NO: 1685256 - DNA, 25 bp, Homo sapien
ccatggtccaaatgtggtcactgct

SEQ ID NO: 1685257 - DNA, 25 bp, Homo sapien
tccatggtccaaatgtggtcactgc

SEQ ID NO: 1685258 - DNA, 25 bp, Homo sapien
tgtccatggtccaaatgtggtcact

SEQ ID NO: 1685259 - DNA, 25 bp, Homo sapien
aactcccactttgatgatatctgct

SEQ ID NO: 1685260 - DNA, 25 bp, Homo sapien
gctccggaaagaataagctcttcta

SEQ ID NO: 1685261 - DNA, 25 bp, Homo sapien
atatctgctccggaaagaataagct

SEQ ID NO: 1685262 - DNA, 25 bp, Homo sapien
tggtccaactcccactttgatgata

SEQ ID NO: 1685263 - DNA, 25 bp, Homo sapien
tacattcttccacattggttctgaa

SEQ ID NO: 1685264 - DNA, 25 bp, Homo sapien
cttccacattggttctgaaaccaag

SEQ ID NO: 1685265 - DNA, 25 bp, Homo sapien
ctgcaaggtgtatggggtcattagt

SEQ ID NO: 1685266 - DNA, 25 bp, Homo sapien
gggtcattagtgaaatctacattct

SEQ ID NO: 1685267 - DNA, 25 bp, Homo sapien
catgggcagagtcggcacactcaat

SEQ ID NO: 1685268 - DNA, 25 bp, Homo sapien
cacactcaatgacggcactcagctg

SEQ ID NO: 1685269 - DNA, 25 bp, Homo sapien
ccactcccgtcttggtgcgggtggt

SEQ ID NO: 1685270 - DNA, 25 bp, Homo sapien
ggcccttcaggccatgggcagagtc

SEQ ID NO: 1685271 - DNA, 25 bp, Homo sapien
caggtacctccatgtttcctattcc

SEQ ID NO: 1685272 - DNA, 25 bp, Homo sapien
tcctattcctcatgtatggtacaaa

SEQ ID NO: 1685273 - DNA, 25 bp, Homo sapien
tagcagggccagtctgttatcttgg

SEQ ID NO: 1685274 - DNA, 25 bp, Homo sapien
gcagaccacacttgggctggtttaa

SEQ ID NO: 1685275 - DNA, 25 bp, Homo sapien
gtctgatcgagtgtactcccctcaa

SEQ ID NO: 1685276 - DNA, 25 bp, Homo sapien
caagttcccctaccacggctgttgt

SEQ ID NO: 1685277 - DNA, 25 bp, Homo sapien
ctaccacggctgttgttgtctgatc

SEQ ID NO: 1685278 - DNA, 25 bp, Homo sapien
ccagcaagcccacgggcccaagttc

SEQ ID NO: 1685279 - DNA, 25 bp, Homo sapien
gaggaaaaagcaaggacaggacatc

SEQ ID NO: 1685280 - DNA, 25 bp, Homo sapien
ccagatgacctagtgactgggggtt

SEQ ID NO: 1685281 - DNA, 25 bp, Homo sapien
aggaaaaagcaaggacaggacatca

SEQ ID NO: 1685282 - DNA, 25 bp, Homo sapien
cctccccccagatgacctagtgact

SEQ ID NO: 1685283 - DNA, 25 bp, Homo sapien
aaaggctttggcgacatcccctgga

SEQ ID NO: 1685284 - DNA, 25 bp, Homo sapien
ctttggcgacatcccctggacacgt

SEQ ID NO: 1685285 - DNA, 25 bp, Homo sapien
aggctttggcgacatcccctggaca

SEQ ID NO: 1685286 - DNA, 25 bp, Homo sapien
ggcgacatcccctggacacgtacag

SEQ ID NO: 1685287 - DNA, 25 bp, Homo sapien
actgagtctcggcacaggtacggcc

SEQ ID NO: 1685288 - DNA, 25 bp, Homo sapien
gagcagatgtcaacagcaggaacgc

SEQ ID NO: 1685289 - DNA, 25 bp, Homo sapien
gcagagcacagacccactaaagaat

SEQ ID NO: 1685290 - DNA, 25 bp, Homo sapien
tcatttcgggacacccttgcatcct

SEQ ID NO: 1685291 - DNA, 25 bp, Homo sapien
aagacagtagcagggcgcagatgta

SEQ ID NO: 1685292 - DNA, 25 bp, Homo sapien
ttagaacagaacaagacagtagcag

SEQ ID NO: 1685293 - DNA, 25 bp, Homo sapien
tagaacagaacaagacagtagcagg

SEQ ID NO: 1685294 - DNA, 25 bp, Homo sapien
agcagggcgcagatgtattaagtaa

SEQ ID NO: 1685295 - DNA, 25 bp, Homo sapien
atgacagcacatttccaggacaggc

SEQ ID NO: 1685296 - DNA, 25 bp, Homo sapien
gacagcacatttccaggacaggcac

SEQ ID NO: 1685297 - DNA, 25 bp, Homo sapien
gaatgacagcacatttccaggacag

SEQ ID NO: 1685298 - DNA, 25 bp, Homo sapien
cgaatgacagcacatttccaggaca

SEQ ID NO: 1685299 - DNA, 25 bp, Homo sapien
ccgcccagctatagtcaagagaaag

SEQ ID NO: 1685300 - DNA, 25 bp, Homo sapien
gagaaggcttccatgcagggagaaa

SEQ ID NO: 1685301 - DNA, 25 bp, Homo sapien
gcctactgaaggctagtgtcccata

SEQ ID NO: 1685302 - DNA, 25 bp, Homo sapien
ggccatgggacactgcgagaaacaa

SEQ ID NO: 1685303 - DNA, 25 bp, Homo sapien
agagcttgagcttccgtccgttcct

SEQ ID NO: 1685304 - DNA, 25 bp, Homo sapien
gcacactccgtatgacccgaaaaca

SEQ ID NO: 1685305 - DNA, 25 bp, Homo sapien
gaaaacattcctcccagcatgacaa

SEQ ID NO: 1685306 - DNA, 25 bp, Homo sapien
gtcagagctcatcccgtagaagagc

SEQ ID NO: 1685307 - DNA, 25 bp, Homo sapien
tgctgctgggtcacccggatgaatg

SEQ ID NO: 1685308 - DNA, 25 bp, Homo sapien
cgtaggtgcacgtggacctcagtcc

SEQ ID NO: 1685309 - DNA, 25 bp, Homo sapien
tgagctccttgagtttggcggcccc

SEQ ID NO: 1685310 - DNA, 25 bp, Homo sapien
ccaggatagtgttttccacatctcc

SEQ ID NO: 1685311 - DNA, 25 bp, Homo sapien
caggtttggacgcttccactcgagc

SEQ ID NO: 1685312 - DNA, 25 bp, Homo sapien
gtgccttgcgtctgggccccgagaa

SEQ ID NO: 1685313 - DNA, 25 bp, Homo sapien
gatgttggcccaatcggtgccttgc

SEQ ID NO: 1685314 - DNA, 25 bp, Homo sapien
aatgaggttatgagttctgggcagc

SEQ ID NO: 1685315 - DNA, 25 bp, Homo sapien
acttttcttatctgaaaggactcaa

SEQ ID NO: 1685316 - DNA, 25 bp, Homo sapien
ctcaagtcttccactgcagatacat

SEQ ID NO: 1685317 - DNA, 25 bp, Homo sapien
ttatctgaaaggactcaagtcttcc

SEQ ID NO: 1685318 - DNA, 25 bp, Homo sapien
cactgcagatacattggaggcttca

SEQ ID NO: 1685319 - DNA, 25 bp, Homo sapien
attcctgtccaaaaatcaagccgga

SEQ ID NO: 1685320 - DNA, 25 bp, Homo sapien
ggaacaccggcttcagtttttcatg

SEQ ID NO: 1685321 - DNA, 25 bp, Homo sapien
cgttgaaggcaactgttctggtagc

SEQ ID NO: 1685322 - DNA, 25 bp, Homo sapien
tcaagccggacagtggaaactggac

SEQ ID NO: 1685323 - DNA, 25 bp, Homo sapien
aatgtacacctgatttgagaagctg

SEQ ID NO: 1685324 - DNA, 25 bp, Homo sapien
ttgttacatatagccctcgtctgag

SEQ ID NO: 1685325 - DNA, 25 bp, Homo sapien
tttgtaacaagggatccaggctacc

SEQ ID NO: 1685326 - DNA, 25 bp, Homo sapien
tagggaaactccaaacaacttgcac

SEQ ID NO: 1685327 - DNA, 25 bp, Homo sapien
aaggccgggcttcttgagctgtgtt

SEQ ID NO: 1685328 - DNA, 25 bp, Homo sapien
tttgcaccaggtgaaaacagggcca

SEQ ID NO: 1685329 - DNA, 25 bp, Homo sapien
ctactgtttcatgaaccacaagcag

SEQ ID NO: 1685330 - DNA, 25 bp, Homo sapien
tgaaaccctttgcacttcaatttgc

SEQ ID NO: 1685331 - DNA, 25 bp, Homo sapien
catctgtgactactaaggaaaccta

SEQ ID NO: 1685332 - DNA, 25 bp, Homo sapien
aaaatctccaatgcttttgaagaca

SEQ ID NO: 1685333 - DNA, 25 bp, Homo sapien
tttgaagacactaataccgtgctat

SEQ ID NO: 1685334 - DNA, 25 bp, Homo sapien
gacaataccctttaacatctgtgac

SEQ ID NO: 1685335 - DNA, 25 bp, Homo sapien
tgtacaatttcaaggaatgtttgga

SEQ ID NO: 1685336 - DNA, 25 bp, Homo sapien
ctctggagtagggttgtacaatttc

SEQ ID NO: 1685337 - DNA, 25 bp, Homo sapien
agcactttgactgctctggagtagg

SEQ ID NO: 1685338 - DNA, 25 bp, Homo sapien
aagcagcactttgactgctctggag

SEQ ID NO: 1685339 - DNA, 25 bp, Homo sapien
tctttctcagggacggggcaggtgt

SEQ ID NO: 1685340 - DNA, 25 bp, Homo sapien
ctttctcagggacggggcaggtgtg

SEQ ID NO: 1685341 - DNA, 25 bp, Homo sapien
tttctcagggacggggcaggtgtgt

SEQ ID NO: 1685342 - DNA, 25 bp, Homo sapien
ttctcagggacggggcaggtgtgtg

SEQ ID NO: 1685343 - DNA, 25 bp, Homo sapien
gtagcaaacattaacgatgacaggg

SEQ ID NO: 1685344 - DNA, 25 bp, Homo sapien
cttcggtgccgttcagcttacaagg

SEQ ID NO: 1685345 - DNA, 25 bp, Homo sapien
ggtagaaattcttcggtgccgttca

SEQ ID NO: 1685346 - DNA, 25 bp, Homo sapien
cttctgtgtagcaaacattaacgat

SEQ ID NO: 1685347 - DNA, 25 bp, Homo sapien
tcaaataggaagaacgcacagaggg

SEQ ID NO: 1685348 - DNA, 25 bp, Homo sapien
taggaagaacgcacagagggcagga

SEQ ID NO: 1685349 - DNA, 25 bp, Homo sapien
aaataggaagaacgcacagagggca

SEQ ID NO: 1685350 - DNA, 25 bp, Homo sapien
cttcaaataggaagaacgcacagag

SEQ ID NO: 1685351 - DNA, 25 bp, Homo sapien
ttctaagacgcactctggagccatg

SEQ ID NO: 1685352 - DNA, 25 bp, Homo sapien
tggagtcaacccattttccacggtc

SEQ ID NO: 1685353 - DNA, 25 bp, Homo sapien
tctgccgccacgttgcagaaagagc

SEQ ID NO: 1685354 - DNA, 25 bp, Homo sapien
tggagccatgtagcctggagtcaac

SEQ ID NO: 1685355 - DNA, 25 bp, Homo sapien
ggtaagaggaatacgggctgccaca

SEQ ID NO: 1685356 - DNA, 25 bp, Homo sapien
tttctgtgccaatagagtctgacca

SEQ ID NO: 1685357 - DNA, 25 bp, Homo sapien
cgagtattgaattgactggatccac

SEQ ID NO: 1685358 - DNA, 25 bp, Homo sapien
cacatggtttggagcaataggaaca

SEQ ID NO: 1685359 - DNA, 25 bp, Homo sapien
tcattcccagagatccgaaatatca

SEQ ID NO: 1685360 - DNA, 25 bp, Homo sapien
ttacatttagggttcaccaggacta

SEQ ID NO: 1685361 - DNA, 25 bp, Homo sapien
ttggatggctgcaactaaactgaac

SEQ ID NO: 1685362 - DNA, 25 bp, Homo sapien
aatctggtatcaacccacattttgg

SEQ ID NO: 1685363 - DNA, 25 bp, Homo sapien
cacactttattaccaagcatcttgg

SEQ ID NO: 1685364 - DNA, 25 bp, Homo sapien
aactagtatgtgacaataaatgacc

SEQ ID NO: 1685365 - DNA, 25 bp, Homo sapien
cattcaacaagtactgtatctcact

SEQ ID NO: 1685366 - DNA, 25 bp, Homo sapien
tctgcagaattgctgaagagcaaga

SEQ ID NO: 1685367 - DNA, 25 bp, Homo sapien
acgtctcaccagctgcagttcttga

SEQ ID NO: 1685368 - DNA, 25 bp, Homo sapien
agtctcttccttactgaacgtctca

SEQ ID NO: 1685369 - DNA, 25 bp, Homo sapien
ttggtcactgatcagtctcttcctt

SEQ ID NO: 1685370 - DNA, 25 bp, Homo sapien
ttactgaacgtctcaccagctgcag

SEQ ID NO: 1685371 - DNA, 25 bp, Homo sapien
tgggctgaggatattaagacaccgg

SEQ ID NO: 1685372 - DNA, 25 bp, Homo sapien
ctaaggctgcaagggttctggtctc

SEQ ID NO: 1685373 - DNA, 25 bp, Homo sapien
cagtgaaaccagtagtgtcccaggt

SEQ ID NO: 1685374 - DNA, 25 bp, Homo sapien
ttggccctggtgacattacactgag

SEQ ID NO: 1685375 - DNA, 25 bp, Homo sapien
cttgctagtgactggaaacaactcg

SEQ ID NO: 1685376 - DNA, 25 bp, Homo sapien
tgctagtgactggaaacaactcggg

SEQ ID NO: 1685377 - DNA, 25 bp, Homo sapien
atcttgggctccactacactgcagc

SEQ ID NO: 1685378 - DNA, 25 bp, Homo sapien
aacaactcggggccatcttgggctc

SEQ ID NO: 1685379 - DNA, 25 bp, Homo sapien
gattaagttaatgacgctgagctgg

SEQ ID NO: 1685380 - DNA, 25 bp, Homo sapien
ggtagcgagtcatcccattgtccat

SEQ ID NO: 1685381 - DNA, 25 bp, Homo sapien
gaggagcagtttggcagcccaatgc

SEQ ID NO: 1685382 - DNA, 25 bp, Homo sapien
ggagaggctgctgtaattactcagc

SEQ ID NO: 1685383 - DNA, 25 bp, Homo sapien
cctacatccagggagtgtcaatttt

SEQ ID NO: 1685384 - DNA, 25 bp, Homo sapien
gcctcattcagagggtgttgcctac

SEQ ID NO: 1685385 - DNA, 25 bp, Homo sapien
tgccggatgcagtcaatttgacagt

SEQ ID NO: 1685386 - DNA, 25 bp, Homo sapien
ttcctgccggatgcagtcaatttga

SEQ ID NO: 1685387 - DNA, 25 bp, Homo sapien
tcctttggttcaacccagcttccat

SEQ ID NO: 1685388 - DNA, 25 bp, Homo sapien
agcttccatcaatcattcctcgagc

SEQ ID NO: 1685389 - DNA, 25 bp, Homo sapien
tcctcgagccttgccaattttttgt

SEQ ID NO: 1685390 - DNA, 25 bp, Homo sapien
caatcattcctcgagccttgccaat

SEQ ID NO: 1685391 - DNA, 25 bp, Homo sapien
ccttcagtggagtatcagacaccag

SEQ ID NO: 1685392 - DNA, 25 bp, Homo sapien
ttagtggaaccttgaatcaatgatc

SEQ ID NO: 1685393 - DNA, 25 bp, Homo sapien
gtggaaccttgaatcaatgatcaat

SEQ ID NO: 1685394 - DNA, 25 bp, Homo sapien
ccaggacaacctggtcagcaaatat

SEQ ID NO: 1685395 - DNA, 25 bp, Homo sapien
ctgactcagcaattttaggttggga

SEQ ID NO: 1685396 - DNA, 25 bp, Homo sapien
tggtaaataaaagccagcacctgct

SEQ ID NO: 1685397 - DNA, 25 bp, Homo sapien
catttctagagccagcggaacatgg

SEQ ID NO: 1685398 - DNA, 25 bp, Homo sapien
gcgactccagctcttgaacttaatg

SEQ ID NO: 1685399 - DNA, 25 bp, Homo sapien
tcctctgcagagctggagaaaactc

SEQ ID NO: 1685400 - DNA, 25 bp, Homo sapien
tacacagcagccatcctctgcagag

SEQ ID NO: 1685401 - DNA, 25 bp, Homo sapien
tatacacagcagccatcctctgcag

SEQ ID NO: 1685402 - DNA, 25 bp, Homo sapien
ctctgcagagctggagaaaactcat

SEQ ID NO: 1685403 - DNA, 25 bp, Homo sapien
gtgatttcttggcttccgttagcat

SEQ ID NO: 1685404 - DNA, 25 bp, Homo sapien
gttagaaggtaaatatcgatattgc

SEQ ID NO: 1685405 - DNA, 25 bp, Homo sapien
ggtaaatatcgatattgcttttcat

SEQ ID NO: 1685406 - DNA, 25 bp, Homo sapien
cctccagcatgaagagttagaaggt

SEQ ID NO: 1685407 - DNA, 25 bp, Homo sapien
tccagcatgaagagttagaaggtaa

SEQ ID NO: 1685408 - DNA, 25 bp, Homo sapien
ttctttcttattggtctggccctgg

SEQ ID NO: 1685409 - DNA, 25 bp, Homo sapien
cttgtttctgtccatatctctggct

SEQ ID NO: 1685410 - DNA, 25 bp, Homo sapien
gtttctgtccatatctctggcttct

SEQ ID NO: 1685411 - DNA, 25 bp, Homo sapien
ttcttttctgttccctctcaacttc

SEQ ID NO: 1685412 - DNA, 25 bp, Homo sapien
tcatgccagagcttttgtgactcct

SEQ ID NO: 1685413 - DNA, 25 bp, Homo sapien
aaatccaggtgccttcctgatcatg

SEQ ID NO: 1685414 - DNA, 25 bp, Homo sapien
tgatgcggcgatagggtctgaacac

SEQ ID NO: 1685415 - DNA, 25 bp, Homo sapien
ggcagaatgcctcggctttcttcag

SEQ ID NO: 1685416 - DNA, 25 bp, Homo sapien
tgagaaccgcatgaagaatatcttc

SEQ ID NO: 1685417 - DNA, 25 bp, Homo sapien
ttagtgtaccatgtgccatcccgca

SEQ ID NO: 1685418 - DNA, 25 bp, Homo sapien
tgtaggcttatgtaaccatgcagaa

SEQ ID NO: 1685419 - DNA, 25 bp, Homo sapien
aaaattgatcgtatcttgccaggag

SEQ ID NO: 1685420 - DNA, 25 bp, Homo sapien
cacaggttgtggtgggccaggagga

SEQ ID NO: 1685421 - DNA, 25 bp, Homo sapien
ccaggaggatatgaacgagccccat

SEQ ID NO: 1685422 - DNA, 25 bp, Homo sapien
tggtgggccaggaggatatgaacga

SEQ ID NO: 1685423 - DNA, 25 bp, Homo sapien
tgggccaggaggatatgaacgagcc

SEQ ID NO: 1685424 - DNA, 25 bp, Homo sapien
cagttaatgttctgagttgctgggt

SEQ ID NO: 1685425 - DNA, 25 bp, Homo sapien
ttgctgggtaggagttagcaagtaa

SEQ ID NO: 1685426 - DNA, 25 bp, Homo sapien
ggagttagcaagtaaggcacgtgca

SEQ ID NO: 1685427 - DNA, 25 bp, Homo sapien
taaggcacgtgcaagaattagaact

SEQ ID NO: 1685428 - DNA, 25 bp, Homo sapien
catgtcaaagtaatgtcctcgttcc

SEQ ID NO: 1685429 - DNA, 25 bp, Homo sapien
agtgccccatgtcaaagtaatgtcc

SEQ ID NO: 1685430 - DNA, 25 bp, Homo sapien
caaagtaatgtcctcgttcctccat

SEQ ID NO: 1685431 - DNA, 25 bp, Homo sapien
gtaatgtcctcgttcctccattcca

SEQ ID NO: 1685432 - DNA, 25 bp, Homo sapien
tcagagatatgtggtgcctccacag

SEQ ID NO: 1685433 - DNA, 25 bp, Homo sapien
agagatatgtggtgcctccacaggg

SEQ ID NO: 1685434 - DNA, 25 bp, Homo sapien
attcagagatatgtggtgcctccac

SEQ ID NO: 1685435 - DNA, 25 bp, Homo sapien
aggggccatatccaggctttctgat

SEQ ID NO: 1685436 - DNA, 25 bp, Homo sapien
gcttcttgtctggtgtactctctgc

SEQ ID NO: 1685437 - DNA, 25 bp, Homo sapien
tgtctggtgtactctctgctgttcc

SEQ ID NO: 1685438 - DNA, 25 bp, Homo sapien
ttcttgtctggtgtactctctgctg

SEQ ID NO: 1685439 - DNA, 25 bp, Homo sapien
tcttgtctggtgtactctctgctgt

SEQ ID NO: 1685440 - DNA, 25 bp, Homo sapien
tgtcacatatgcaatccgcggctga

SEQ ID NO: 1685441 - DNA, 25 bp, Homo sapien
tcattcatgatgcacgtgaccggga

SEQ ID NO: 1685442 - DNA, 25 bp, Homo sapien
gagggttgcctaaagtctgatcagc

SEQ ID NO: 1685443 - DNA, 25 bp, Homo sapien
gaaagccagcgtggaaaatgcagtc

SEQ ID NO: 1685444 - DNA, 25 bp, Homo sapien
tctgaggcccatcttcagccaagca

SEQ ID NO: 1685445 - DNA, 25 bp, Homo sapien
cacagcgggagttggttctgacacc

SEQ ID NO: 1685446 - DNA, 25 bp, Homo sapien
tctgtggagttaagataacgtttga

SEQ ID NO: 1685447 - DNA, 25 bp, Homo sapien
tttgatgtaggagagcaaagctgct

SEQ ID NO: 1685448 - DNA, 25 bp, Homo sapien
gaaccagacgccctctcattgctgg

SEQ ID NO: 1685449 - DNA, 25 bp, Homo sapien
gacagatgtgaaccagacgccctct

SEQ ID NO: 1685450 - DNA, 25 bp, Homo sapien
tctcttgagtcccatcaggacagaa

SEQ ID NO: 1685451 - DNA, 25 bp, Homo sapien
agaacttgtgcttagtcaggttctg

SEQ ID NO: 1685452 - DNA, 25 bp, Homo sapien
ggacattagcagtacttcgcacatg

SEQ ID NO: 1685453 - DNA, 25 bp, Homo sapien
atttaatgtcttcagctgagcactg

SEQ ID NO: 1685454 - DNA, 25 bp, Homo sapien
caaatattaggcaagtccaaggaca

SEQ ID NO: 1685455 - DNA, 25 bp, Homo sapien
cactgatttcatgagcgtaaaggac

SEQ ID NO: 1685456 - DNA, 25 bp, Homo sapien
aaagccgcaaaccaagacatgtgag

SEQ ID NO: 1685457 - DNA, 25 bp, Homo sapien
gtggaacttctctagaactcgctgt

SEQ ID NO: 1685458 - DNA, 25 bp, Homo sapien
ttgttttcgctcaacccgcaaccag

SEQ ID NO: 1685459 - DNA, 25 bp, Homo sapien
tctagaactcgctgtttaaaagccg

SEQ ID NO: 1685460 - DNA, 25 bp, Homo sapien
tctgccaagcctatcacgacggtcg

SEQ ID NO: 1685461 - DNA, 25 bp, Homo sapien
acgacggtcgttcagctcatgctct

SEQ ID NO: 1685462 - DNA, 25 bp, Homo sapien
tccatgcacgtctggtgatttgatg

SEQ ID NO: 1685463 - DNA, 25 bp, Homo sapien
tgctctccatgcacgtctggtgatt

SEQ ID NO: 1685464 - DNA, 25 bp, Homo sapien
gaacacaattggtaggtatcctagc

SEQ ID NO: 1685465 - DNA, 25 bp, Homo sapien
tgaagaggctctactgggtttagcg

SEQ ID NO: 1685466 - DNA, 25 bp, Homo sapien
tgtctgcttaaggaggcattactgc

SEQ ID NO: 1685467 - DNA, 25 bp, Homo sapien
tactgcattcggatagataaactca

SEQ ID NO: 1685468 - DNA, 25 bp, Homo sapien
agtagacatcaggaaagactttctt

SEQ ID NO: 1685469 - DNA, 25 bp, Homo sapien
gaaacttgtaactccctctctctac

SEQ ID NO: 1685470 - DNA, 25 bp, Homo sapien
ataagaaacttgtaactccctctct

SEQ ID NO: 1685471 - DNA, 25 bp, Homo sapien
tacttgatgaagtagacatcaggaa

SEQ ID NO: 1685472 - DNA, 25 bp, Homo sapien
tagccttctttggtacctggtcatg

SEQ ID NO: 1685473 - DNA, 25 bp, Homo sapien
tacaccagagcgttgggaccatgct

SEQ ID NO: 1685474 - DNA, 25 bp, Homo sapien
catcagttgtctgggagtgagatac

SEQ ID NO: 1685475 - DNA, 25 bp, Homo sapien
caaatcttcgaggatgaactagggt

SEQ ID NO: 1685476 - DNA, 25 bp, Homo sapien
gaaagtgcgcttactgtgcacagct

SEQ ID NO: 1685477 - DNA, 25 bp, Homo sapien
gatttgcttgacaactcttaggaag

SEQ ID NO: 1685478 - DNA, 25 bp, Homo sapien
agagaatgggaactactgtggcacc

SEQ ID NO: 1685479 - DNA, 25 bp, Homo sapien
cctcaactagctagggagatttcac

SEQ ID NO: 1685480 - DNA, 25 bp, Homo sapien
caatgatgttgtagcaaccatgaca

SEQ ID NO: 1685481 - DNA, 25 bp, Homo sapien
tcgtcccttgaacccgtagctcttg

SEQ ID NO: 1685482 - DNA, 25 bp, Homo sapien
gattctgcctgtaggagcaatgatg

SEQ ID NO: 1685483 - DNA, 25 bp, Homo sapien
tctaccttagacagatcacttaggc

SEQ ID NO: 1685484 - DNA, 25 bp, Homo sapien
ttaaatagccgaaggtttgccagtg

SEQ ID NO: 1685485 - DNA, 25 bp, Homo sapien
taaatagccgaaggtttgccagtgc

SEQ ID NO: 1685486 - DNA, 25 bp, Homo sapien
atagccgaaggtttgccagtgcagc

SEQ ID NO: 1685487 - DNA, 25 bp, Homo sapien
aaatagccgaaggtttgccagtgca

SEQ ID NO: 1685488 - DNA, 25 bp, Homo sapien
attctcatttgcctggctggcttca

SEQ ID NO: 1685489 - DNA, 25 bp, Homo sapien
agccctctcctccttttgtgttaat

SEQ ID NO: 1685490 - DNA, 25 bp, Homo sapien
ttctcattctcatttgcctggctgg

SEQ ID NO: 1685491 - DNA, 25 bp, Homo sapien
tctcctccttttgtgttaataagcc

SEQ ID NO: 1685492 - DNA, 25 bp, Homo sapien
atagactttattggtgagggggcgg

SEQ ID NO: 1685493 - DNA, 25 bp, Homo sapien
gaatagactttattggtgagggggc

SEQ ID NO: 1685494 - DNA, 25 bp, Homo sapien
aatagactttattggtgagggggcg

SEQ ID NO: 1685495 - DNA, 25 bp, Homo sapien
caattcgaatgcttgggaagggatg

SEQ ID NO: 1685496 - DNA, 25 bp, Homo sapien
ctgtactggagagaagcatggcccc

SEQ ID NO: 1685497 - DNA, 25 bp, Homo sapien
gagttccatgtctggatctagaccg

SEQ ID NO: 1685498 - DNA, 25 bp, Homo sapien
tctggatctagaccgtgtccatcca

SEQ ID NO: 1685499 - DNA, 25 bp, Homo sapien
cccaaccaaaccttacttcacattg

SEQ ID NO: 1685500 - DNA, 25 bp, Homo sapien
aatgttctgtgcgtgttcatcgcca

SEQ ID NO: 1685501 - DNA, 25 bp, Homo sapien
cactgctccactggcagcctatgtc

SEQ ID NO: 1685502 - DNA, 25 bp, Homo sapien
actggcagcctatgtcccaaccaaa

SEQ ID NO: 1685503 - DNA, 25 bp, Homo sapien
tcttaggaaatgatgcaccagggcc

SEQ ID NO: 1685504 - DNA, 25 bp, Homo sapien
catatattttgcagtgccagtgaga

SEQ ID NO: 1685505 - DNA, 25 bp, Homo sapien
aaacttggggtctctacagtcagta

SEQ ID NO: 1685506 - DNA, 25 bp, Homo sapien
gaactaagggatctctgtctatggg

SEQ ID NO: 1685507 - DNA, 25 bp, Homo sapien
tgaggaaggtcatagaaacatgaga

SEQ ID NO: 1685508 - DNA, 25 bp, Homo sapien
tgtgcattccggactgtgctgagga

SEQ ID NO: 1685509 - DNA, 25 bp, Homo sapien
atgtgcattccggactgtgctgagg

SEQ ID NO: 1685510 - DNA, 25 bp, Homo sapien
gctgaggaaggtcatagaaacatga

SEQ ID NO: 1685511 - DNA, 25 bp, Homo sapien
aaagcaggctaaggaatctgctttt

SEQ ID NO: 1685512 - DNA, 25 bp, Homo sapien
aaactcctgcgcagagactggtcct

SEQ ID NO: 1685513 - DNA, 25 bp, Homo sapien
caggctaaggaatctgcttttgccc

SEQ ID NO: 1685514 - DNA, 25 bp, Homo sapien
atgtttaccaccaaaactcctgcgc

SEQ ID NO: 1685515 - DNA, 25 bp, Homo sapien
gaaccactgagcaaaatgcagcaat

SEQ ID NO: 1685516 - DNA, 25 bp, Homo sapien
gccctgcagggtcaatttaacgagt

SEQ ID NO: 1685517 - DNA, 25 bp, Homo sapien
gtgattttccatgcggtttctcaga

SEQ ID NO: 1685518 - DNA, 25 bp, Homo sapien
catgtactggtggtagagccctgca

SEQ ID NO: 1685519 - DNA, 25 bp, Homo sapien
aaacagaatggatcgtatttgacag

SEQ ID NO: 1685520 - DNA, 25 bp, Homo sapien
cagtaaggagctgtacagctgaatt

SEQ ID NO: 1685521 - DNA, 25 bp, Homo sapien
tgacaaaggggtgcttaaccaggag

SEQ ID NO: 1685522 - DNA, 25 bp, Homo sapien
gctgaattccatcaagacaatgtgc

SEQ ID NO: 1685523 - DNA, 25 bp, Homo sapien
tctgatttgggcacattgaattatg

SEQ ID NO: 1685524 - DNA, 25 bp, Homo sapien
aaattctctgaggttagaggacgcg

SEQ ID NO: 1685525 - DNA, 25 bp, Homo sapien
tagtttggcatccatgtttgctgag

SEQ ID NO: 1685526 - DNA, 25 bp, Homo sapien
cgtcgtgaccctcgtttggcaggtg

SEQ ID NO: 1685527 - DNA, 25 bp, Homo sapien
gggtggtgctgatacgcactcccac

SEQ ID NO: 1685528 - DNA, 25 bp, Homo sapien
ttgccagtggatggaacttatccgc

SEQ ID NO: 1685529 - DNA, 25 bp, Homo sapien
tccgcatcaagtagccttccacggg

SEQ ID NO: 1685530 - DNA, 25 bp, Homo sapien
catgtagacatgtgtagcttttggg

SEQ ID NO: 1685531 - DNA, 25 bp, Homo sapien
tttcatctgttttgggggcatgtct

SEQ ID NO: 1685532 - DNA, 25 bp, Homo sapien
tttcttttagctcttttgaaatatc

SEQ ID NO: 1685533 - DNA, 25 bp, Homo sapien
tttgaaatatcaaagttttcatctg

SEQ ID NO: 1685534 - DNA, 25 bp, Homo sapien
gttttcatctgttttgggggcatgt

SEQ ID NO: 1685535 - DNA, 25 bp, Homo sapien
ttgatgtggtccatgggtttttggc

SEQ ID NO: 1685536 - DNA, 25 bp, Homo sapien
tgatgtggtccatgggtttttggct

SEQ ID NO: 1685537 - DNA, 25 bp, Homo sapien
accccatgaattggattctgcagga

SEQ ID NO: 1685538 - DNA, 25 bp, Homo sapien
cactataaatggttcggccacaccc

SEQ ID NO: 1685539 - DNA, 25 bp, Homo sapien
tgcaggaccccttgccaatgatgct

SEQ ID NO: 1685540 - DNA, 25 bp, Homo sapien
ccgttgtgccaaaaccttcagatgc

SEQ ID NO: 1685541 - DNA, 25 bp, Homo sapien
tcttctcaaggtgatttggtcgtgg

SEQ ID NO: 1685542 - DNA, 25 bp, Homo sapien
catgtctctgtggtaagaatgctac

SEQ ID NO: 1685543 - DNA, 25 bp, Homo sapien
tgtctaggccatagaactccgtctt

SEQ ID NO: 1685544 - DNA, 25 bp, Homo sapien
tgttggtctcaagagtgccctggct

SEQ ID NO: 1685545 - DNA, 25 bp, Homo sapien
tgctcagttgaccaaacatcgtgtt

SEQ ID NO: 1685546 - DNA, 25 bp, Homo sapien
tctaccgagttgcaggtcttctctc

SEQ ID NO: 1685547 - DNA, 25 bp, Homo sapien
gatgtcattgaatgtcgtttgcaga

SEQ ID NO: 1685548 - DNA, 25 bp, Homo sapien
acatcgtgtttcttttctaccgagt

SEQ ID NO: 1685549 - DNA, 25 bp, Homo sapien
aaacatgatgctctgctgactactc

SEQ ID NO: 1685550 - DNA, 25 bp, Homo sapien
tcattgcatcctcctagttcttggc

SEQ ID NO: 1685551 - DNA, 25 bp, Homo sapien
cttctgctaaagaactggaggcttg

SEQ ID NO: 1685552 - DNA, 25 bp, Homo sapien
gcccttcaaaccttgcctgggagtc

SEQ ID NO: 1685553 - DNA, 25 bp, Homo sapien
tactgtcactgggatgcgtgttctt

SEQ ID NO: 1685554 - DNA, 25 bp, Homo sapien
tgattggaccgtgcgtccctctggt

SEQ ID NO: 1685555 - DNA, 25 bp, Homo sapien
ccctctggtttgtggatgaggagca

SEQ ID NO: 1685556 - DNA, 25 bp, Homo sapien
aaaacctgacactggtgattggacc

SEQ ID NO: 1685557 - DNA, 25 bp, Homo sapien
catggcaagccctagttttccggtt

SEQ ID NO: 1685558 - DNA, 25 bp, Homo sapien
aagagaactgggcacaaagattatt

SEQ ID NO: 1685559 - DNA, 25 bp, Homo sapien
tgggcacaaagattattctcttctt

SEQ ID NO: 1685560 - DNA, 25 bp, Homo sapien
cttcaaccatggcaagccctagttt

SEQ ID NO: 1685561 - DNA, 25 bp, Homo sapien
gttgctacccgttataagcattgta

SEQ ID NO: 1685562 - DNA, 25 bp, Homo sapien
gctacccgttataagcattgtaaaa

SEQ ID NO: 1685563 - DNA, 25 bp, Homo sapien
ctacgagttgctacccgttataagc

SEQ ID NO: 1685564 - DNA, 25 bp, Homo sapien
gagttgctacccgttataagcattg

SEQ ID NO: 1685565 - DNA, 25 bp, Homo sapien
gttggttacgtgtttcaatctgcac

SEQ ID NO: 1685566 - DNA, 25 bp, Homo sapien
gtcagaattcgctgctggacccctg

SEQ ID NO: 1685567 - DNA, 25 bp, Homo sapien
tcctcaccagccttcctttgtgcat

SEQ ID NO: 1685568 - DNA, 25 bp, Homo sapien
cccaggctgttggttacgtgtttca

SEQ ID NO: 1685569 - DNA, 25 bp, Homo sapien
ttcttcctcaagtactcagctcctc

SEQ ID NO: 1685570 - DNA, 25 bp, Homo sapien
gctacctcctgaggcaactgacaaa

SEQ ID NO: 1685571 - DNA, 25 bp, Homo sapien
ctaagaagtggtgtcagagctacct

SEQ ID NO: 1685572 - DNA, 25 bp, Homo sapien
aactgacaaagcgtagcccatccca

SEQ ID NO: 1685573 - DNA, 25 bp, Homo sapien
cttgcttgtaatgctcctgcagatt

SEQ ID NO: 1685574 - DNA, 25 bp, Homo sapien
ttgcttgtaatgctcctgcagattg

SEQ ID NO: 1685575 - DNA, 25 bp, Homo sapien
tgcttgtaatgctcctgcagattga

SEQ ID NO: 1685576 - DNA, 25 bp, Homo sapien
gcttgtaatgctcctgcagattgac

SEQ ID NO: 1685577 - DNA, 25 bp, Homo sapien
tgtgtgctttgcaagaatgatcttc

SEQ ID NO: 1685578 - DNA, 25 bp, Homo sapien
aacaggcttatgaccaccaacaacg

SEQ ID NO: 1685579 - DNA, 25 bp, Homo sapien
tatgacagtggcagaaggtgctagt

SEQ ID NO: 1685580 - DNA, 25 bp, Homo sapien
tttcttctcgggaactgtgtgtgct

SEQ ID NO: 1685581 - DNA, 25 bp, Homo sapien
atgttgtaggatgaagaaagcaaac

SEQ ID NO: 1685582 - DNA, 25 bp, Homo sapien
ccagatgtgggatgatagggaagaa

SEQ ID NO: 1685583 - DNA, 25 bp, Homo sapien
catgaatgagcctgttggatgatgc

SEQ ID NO: 1685584 - DNA, 25 bp, Homo sapien
ccttagtggaagaattaagttgagc

SEQ ID NO: 1685585 - DNA, 25 bp, Homo sapien
ccctccacacgatggatctgtgctc

SEQ ID NO: 1685586 - DNA, 25 bp, Homo sapien
tatggtatcaaatcttcagcgccac

SEQ ID NO: 1685587 - DNA, 25 bp, Homo sapien
aatatggtatcaaatcttcagcgcc

SEQ ID NO: 1685588 - DNA, 25 bp, Homo sapien
atggtatcaaatcttcagcgccaca

SEQ ID NO: 1685589 - DNA, 25 bp, Homo sapien
tgtagcgagctcagacaggcctgtg

SEQ ID NO: 1685590 - DNA, 25 bp, Homo sapien
gtagcgagctcagacaggcctgtgg

SEQ ID NO: 1685591 - DNA, 25 bp, Homo sapien
tgcatcttgccagcgtcctttactc

SEQ ID NO: 1685592 - DNA, 25 bp, Homo sapien
tactcataaaatagtagttgatatt

SEQ ID NO: 1685593 - DNA, 25 bp, Homo sapien
acggctgcatcttgccagcgtcctt

SEQ ID NO: 1685594 - DNA, 25 bp, Homo sapien
gccagcgtcctttactcataaaata

SEQ ID NO: 1685595 - DNA, 25 bp, Homo sapien
gagttgtaagtgtgagaatcccctg

SEQ ID NO: 1685596 - DNA, 25 bp, Homo sapien
ccgagaatatgtgtcctagagccaa

SEQ ID NO: 1685597 - DNA, 25 bp, Homo sapien
aatcccctgagccatgatactagga

SEQ ID NO: 1685598 - DNA, 25 bp, Homo sapien
tgctcatggtgtaaagaaattcctt

SEQ ID NO: 1685599 - DNA, 25 bp, Homo sapien
gaagacgtgatgctgttactagcag

SEQ ID NO: 1685600 - DNA, 25 bp, Homo sapien
tgattgcctcgaaggtggatctcca

SEQ ID NO: 1685601 - DNA, 25 bp, Homo sapien
aacagatggaggaacttgcacggcg

SEQ ID NO: 1685602 - DNA, 25 bp, Homo sapien
taatggatagtctgctctgattgcc

SEQ ID NO: 1685603 - DNA, 25 bp, Homo sapien
caataccctaaatgtaggaactgaa

SEQ ID NO: 1685604 - DNA, 25 bp, Homo sapien
ctaaaaatggatcaataccctaaat

SEQ ID NO: 1685605 - DNA, 25 bp, Homo sapien
ggatcaataccctaaatgtaggaac

SEQ ID NO: 1685606 - DNA, 25 bp, Homo sapien
aaatggatcaataccctaaatgtag

SEQ ID NO: 1685607 - DNA, 25 bp, Homo sapien
ggatctctgtgggtggaacccagac

SEQ ID NO: 1685608 - DNA, 25 bp, Homo sapien
aaattctattgcctgagccataccc

SEQ ID NO: 1685609 - DNA, 25 bp, Homo sapien
tcaggacagtgactctccaccttgg

SEQ ID NO: 1685610 - DNA, 25 bp, Homo sapien
aaatgtacatccctaattgcttgca

SEQ ID NO: 1685611 - DNA, 25 bp, Homo sapien
gcctgcaatgccaggcccagtagga

SEQ ID NO: 1685612 - DNA, 25 bp, Homo sapien
ctgcacagagaaatgcaatacccat

SEQ ID NO: 1685613 - DNA, 25 bp, Homo sapien
taggactgcacagagaaatgcaata

SEQ ID NO: 1685614 - DNA, 25 bp, Homo sapien
agtggagcctgcaatgccaggccca

SEQ ID NO: 1685615 - DNA, 25 bp, Homo sapien
tctactcttgctattaacacttgcc

SEQ ID NO: 1685616 - DNA, 25 bp, Homo sapien
gactgtgacagccagtgtatcctgg

SEQ ID NO: 1685617 - DNA, 25 bp, Homo sapien
tgatatgcggagaatgtggttttcg

SEQ ID NO: 1685618 - DNA, 25 bp, Homo sapien
ctgccagaaaacatataatgactgt

SEQ ID NO: 1685619 - DNA, 25 bp, Homo sapien
caggtggcaatgacatgcattggtt

SEQ ID NO: 1685620 - DNA, 25 bp, Homo sapien
catcaatggtatctctttaagggaa

SEQ ID NO: 1685621 - DNA, 25 bp, Homo sapien
ttgccagcgctgtgattttatttgc

SEQ ID NO: 1685622 - DNA, 25 bp, Homo sapien
ggaaatccagggaaatgctcttgcc

SEQ ID NO: 1685623 - DNA, 25 bp, Homo sapien
cctttggagaggatggtttcccttg

SEQ ID NO: 1685624 - DNA, 25 bp, Homo sapien
cttttttgccgttcacatgctttgc

SEQ ID NO: 1685625 - DNA, 25 bp, Homo sapien
cccttgtagatttttctgcgatttc

SEQ ID NO: 1685626 - DNA, 25 bp, Homo sapien
tcgtgcgaggtcatcattgttgcta

SEQ ID NO: 1685627 - DNA, 25 bp, Homo sapien
cactggaaaactgcacctggaattc

SEQ ID NO: 1685628 - DNA, 25 bp, Homo sapien
gaatataggaaaaaacgatatcatt

SEQ ID NO: 1685629 - DNA, 25 bp, Homo sapien
tataggaaaaaacgatatcattttc

SEQ ID NO: 1685630 - DNA, 25 bp, Homo sapien
ataggaaaaaacgatatcattttct

SEQ ID NO: 1685631 - DNA, 25 bp, Homo sapien
aatataggaaaaaacgatatcattt

SEQ ID NO: 1685632 - DNA, 25 bp, Homo sapien
atccctgctgttgctgaactggtcc

SEQ ID NO: 1685633 - DNA, 25 bp, Homo sapien
gcatccctgctgttgctgaactggt

SEQ ID NO: 1685634 - DNA, 25 bp, Homo sapien
agcatccctgctgttgctgaactgg

SEQ ID NO: 1685635 - DNA, 25 bp, Homo sapien
ccagcatccctgctgttgctgaact

SEQ ID NO: 1685636 - DNA, 25 bp, Homo sapien
ggtgtcctgtattgatcggtgatag

SEQ ID NO: 1685637 - DNA, 25 bp, Homo sapien
ggatctttctgccttcggtgtgtca

SEQ ID NO: 1685638 - DNA, 25 bp, Homo sapien
tgtattgatcggtgatagaactgtt

SEQ ID NO: 1685639 - DNA, 25 bp, Homo sapien
tgcagggtgcccccttgagaaggct

SEQ ID NO: 1685640 - DNA, 25 bp, Homo sapien
gccctggctggtgatgaaaaaccag

SEQ ID NO: 1685641 - DNA, 25 bp, Homo sapien
tgtttccagtgatcagccctcggga

SEQ ID NO: 1685642 - DNA, 25 bp, Homo sapien
gcccttgagcacactttgacttctt

SEQ ID NO: 1685643 - DNA, 25 bp, Homo sapien
ccagttctagggagcagcgtgcaaa

SEQ ID NO: 1685644 - DNA, 25 bp, Homo sapien
cctcactttggtagaggaccattta

SEQ ID NO: 1685645 - DNA, 25 bp, Homo sapien
tcaccctcactttggtagaggacca

SEQ ID NO: 1685646 - DNA, 25 bp, Homo sapien
caccctcactttggtagaggaccat

SEQ ID NO: 1685647 - DNA, 25 bp, Homo sapien
ccctcactttggtagaggaccattt

SEQ ID NO: 1685648 - DNA, 25 bp, Homo sapien
tatgggatctattccaaacttttcc

SEQ ID NO: 1685649 - DNA, 25 bp, Homo sapien
tgcttttctagtgggctcatagtca

SEQ ID NO: 1685650 - DNA, 25 bp, Homo sapien
catttcttatgggatctattccaaa

SEQ ID NO: 1685651 - DNA, 25 bp, Homo sapien
tgttaatctgaggagagtcatcatt

SEQ ID NO: 1685652 - DNA, 25 bp, Homo sapien
tagcattgcacgatataatatgaat

SEQ ID NO: 1685653 - DNA, 25 bp, Homo sapien
gcattgcacgatataatatgaatgc

SEQ ID NO: 1685654 - DNA, 25 bp, Homo sapien
attgcacgatataatatgaatgcat

SEQ ID NO: 1685655 - DNA, 25 bp, Homo sapien
atagcattgcacgatataatatgaa

SEQ ID NO: 1685656 - DNA, 25 bp, Homo sapien
gcatgcctacatcgaggaataatgt

SEQ ID NO: 1685657 - DNA, 25 bp, Homo sapien
gggtcatatttactggacaggtact

SEQ ID NO: 1685658 - DNA, 25 bp, Homo sapien
cagcagatatttgcatgcctacatc

SEQ ID NO: 1685659 - DNA, 25 bp, Homo sapien
ggtactattggtgtccataactgaa

SEQ ID NO: 1685660 - DNA, 25 bp, Homo sapien
ccataattcatagccagtttgggta

SEQ ID NO: 1685661 - DNA, 25 bp, Homo sapien
tcatagccagtttgggtaaaggcat

SEQ ID NO: 1685662 - DNA, 25 bp, Homo sapien
ccttcaatctgtagatagcctccat

SEQ ID NO: 1685663 - DNA, 25 bp, Homo sapien
tgtagatagcctccataattcatag

SEQ ID NO: 1685664 - DNA, 25 bp, Homo sapien
tctctattgtatccctccctggtca

SEQ ID NO: 1685665 - DNA, 25 bp, Homo sapien
tcggatttactgtctttgacgaacc

SEQ ID NO: 1685666 - DNA, 25 bp, Homo sapien
tggtcagctgctctcttcgggccct

SEQ ID NO: 1685667 - DNA, 25 bp, Homo sapien
taacatgtccagttgagttgcccat

SEQ ID NO: 1685668 - DNA, 25 bp, Homo sapien
aggtaaggagagaagcgtactgtct

SEQ ID NO: 1685669 - DNA, 25 bp, Homo sapien
gaaagaaccagagaatagtcaggga

SEQ ID NO: 1685670 - DNA, 25 bp, Homo sapien
ctaacacccctcgaatgcacagttg

SEQ ID NO: 1685671 - DNA, 25 bp, Homo sapien
accagagaatagtcagggactgaca

SEQ ID NO: 1685672 - DNA, 25 bp, Homo sapien
ctgtggtcagcagtttttggttgtt

SEQ ID NO: 1685673 - DNA, 25 bp, Homo sapien
gttgagtcttactccggatttccat

SEQ ID NO: 1685674 - DNA, 25 bp, Homo sapien
ggttgagtcttactccggatttcca

SEQ ID NO: 1685675 - DNA, 25 bp, Homo sapien
gaggttgagtcttactccggatttc

SEQ ID NO: 1685676 - DNA, 25 bp, Homo sapien
ttcatcatcactgaagtgctggcca

SEQ ID NO: 1685677 - DNA, 25 bp, Homo sapien
aggtggatatgtgagaaataagccc

SEQ ID NO: 1685678 - DNA, 25 bp, Homo sapien
tctgctgctttgagtactgaaattc

SEQ ID NO: 1685679 - DNA, 25 bp, Homo sapien
gaaattctctgctgctcggattcat

SEQ ID NO: 1685680 - DNA, 25 bp, Homo sapien
aggaccagcagtattctcaaccatg

SEQ ID NO: 1685681 - DNA, 25 bp, Homo sapien
tgttgaggaccagcagtattctcaa

SEQ ID NO: 1685682 - DNA, 25 bp, Homo sapien
tcttcgaacatgtgaagcagcattt

SEQ ID NO: 1685683 - DNA, 25 bp, Homo sapien
tcaaccatgtgaggcattcttcgaa

SEQ ID NO: 1685684 - DNA, 25 bp, Homo sapien
gatagtatcactcgatgctgacctg

SEQ ID NO: 1685685 - DNA, 25 bp, Homo sapien
cccctttacgaagccttatccatga

SEQ ID NO: 1685686 - DNA, 25 bp, Homo sapien
cccatgtgcagacttggttaaaaga

SEQ ID NO: 1685687 - DNA, 25 bp, Homo sapien
aggagacccttggtttgtggattca

SEQ ID NO: 1685688 - DNA, 25 bp, Homo sapien
gaaggatgcaataacccactgagct

SEQ ID NO: 1685689 - DNA, 25 bp, Homo sapien
cgacaaggtgtcaagaaggaaggat

SEQ ID NO: 1685690 - DNA, 25 bp, Homo sapien
cagctaacgcccttgccgtgtttag

SEQ ID NO: 1685691 - DNA, 25 bp, Homo sapien
tgagctgcgttatctcctaaatgca

SEQ ID NO: 1685692 - DNA, 25 bp, Homo sapien
agtttgttaccgcacatgctttccc

SEQ ID NO: 1685693 - DNA, 25 bp, Homo sapien
gtttgttaccgcacatgctttccct

SEQ ID NO: 1685694 - DNA, 25 bp, Homo sapien
gagtttgttaccgcacatgctttcc

SEQ ID NO: 1685695 - DNA, 25 bp, Homo sapien
tttgttaccgcacatgctttccctg

SEQ ID NO: 1685696 - DNA, 25 bp, Homo sapien
tttccatctgatgggagcgagggct

SEQ ID NO: 1685697 - DNA, 25 bp, Homo sapien
ttcctctgcgtagttctttccatct

SEQ ID NO: 1685698 - DNA, 25 bp, Homo sapien
ttttcctctgcgtagttctttccat

SEQ ID NO: 1685699 - DNA, 25 bp, Homo sapien
tctttccatctgatgggagcgaggg

SEQ ID NO: 1685700 - DNA, 25 bp, Homo sapien
tatttctttcagctgttaggcctcg

SEQ ID NO: 1685701 - DNA, 25 bp, Homo sapien
agcggtcccgctgctgaaaaggatc

SEQ ID NO: 1685702 - DNA, 25 bp, Homo sapien
gtttattctgagtggtatttctttc

SEQ ID NO: 1685703 - DNA, 25 bp, Homo sapien
tgttaggcctcgcaggttgtcagtt

SEQ ID NO: 1685704 - DNA, 25 bp, Homo sapien
agatctgaggataggaaccggactg

SEQ ID NO: 1685705 - DNA, 25 bp, Homo sapien
gaaccggactgtgctaaactagaag

SEQ ID NO: 1685706 - DNA, 25 bp, Homo sapien
ggataggaaccggactgtgctaaac

SEQ ID NO: 1685707 - DNA, 25 bp, Homo sapien
tctgaggataggaaccggactgtgc

SEQ ID NO: 1685708 - DNA, 25 bp, Homo sapien
tatgctgtatgccatggccactttg

SEQ ID NO: 1685709 - DNA, 25 bp, Homo sapien
caaacacagtgttatctggaagtgc

SEQ ID NO: 1685710 - DNA, 25 bp, Homo sapien
tgttactggttaccggccagcctgt

SEQ ID NO: 1685711 - DNA, 25 bp, Homo sapien
tgaagtgcaggaaaccacatgaatg

SEQ ID NO: 1685712 - DNA, 25 bp, Homo sapien
ggggtcatggggtggtcagcttcag

SEQ ID NO: 1685713 - DNA, 25 bp, Homo sapien
tggggtggtcagcttcagtggtgtg

SEQ ID NO: 1685714 - DNA, 25 bp, Homo sapien
ggttgggggtcatggggtggtcagc

SEQ ID NO: 1685715 - DNA, 25 bp, Homo sapien
tcatggggtggtcagcttcagtggt

SEQ ID NO: 1685716 - DNA, 25 bp, Homo sapien
gaaggattcaagtagcataaccagg

SEQ ID NO: 1685717 - DNA, 25 bp, Homo sapien
gagagtatactgcagtcaccatggt

SEQ ID NO: 1685718 - DNA, 25 bp, Homo sapien
cacagaggaagatcgcagagagtaa

SEQ ID NO: 1685719 - DNA, 25 bp, Homo sapien
tggagaaccatgagagcaggcagac

SEQ ID NO: 1685720 - DNA, 25 bp, Homo sapien
aaatatgcctttggcttactaatgt

SEQ ID NO: 1685721 - DNA, 25 bp, Homo sapien
gcctttggcttactaatgttcagta

SEQ ID NO: 1685722 - DNA, 25 bp, Homo sapien
ctgtgtgattaactcttgtgttgat

SEQ ID NO: 1685723 - DNA, 25 bp, Homo sapien
tgattaactcttgtgttgatataaa

SEQ ID NO: 1685724 - DNA, 25 bp, Homo sapien
acataaaaggtccttggctcacact

SEQ ID NO: 1685725 - DNA, 25 bp, Homo sapien
tgctgtagaaactcaaatacctatt

SEQ ID NO: 1685726 - DNA, 25 bp, Homo sapien
cattgcataatactgatgttagagg

SEQ ID NO: 1685727 - DNA, 25 bp, Homo sapien
tgtcatttcagttacatgtcaggga

SEQ ID NO: 1685728 - DNA, 25 bp, Homo sapien
acaatttttggtcttgtagcttggc

SEQ ID NO: 1685729 - DNA, 25 bp, Homo sapien
atttttggtcttgtagcttggccac

SEQ ID NO: 1685730 - DNA, 25 bp, Homo sapien
ttggtcttgtagcttggccactcat

SEQ ID NO: 1685731 - DNA, 25 bp, Homo sapien
ttttggtcttgtagcttggccactc

SEQ ID NO: 1685732 - DNA, 25 bp, Homo sapien
tgcctggtttacttcaggggcattg

SEQ ID NO: 1685733 - DNA, 25 bp, Homo sapien
gaagatcctggggtctactggagca

SEQ ID NO: 1685734 - DNA, 25 bp, Homo sapien
gcattgttgattgacacagattctt

SEQ ID NO: 1685735 - DNA, 25 bp, Homo sapien
cctggggtctactggagcactgtcc

SEQ ID NO: 1685736 - DNA, 25 bp, Homo sapien
tctgatttgtttcccgtgaagtctc

SEQ ID NO: 1685737 - DNA, 25 bp, Homo sapien
tgaaggcgaattaatgaagaatcct

SEQ ID NO: 1685738 - DNA, 25 bp, Homo sapien
gaacatgaaggcgaattaatgaaga

SEQ ID NO: 1685739 - DNA, 25 bp, Homo sapien
ctcttatcactcttagaacatgaag

SEQ ID NO: 1685740 - DNA, 25 bp, Homo sapien
tcttccattgcttgtttcttgtgat

SEQ ID NO: 1685741 - DNA, 25 bp, Homo sapien
tccattgcttgtttcttgtgatgtt

SEQ ID NO: 1685742 - DNA, 25 bp, Homo sapien
cttgtcttccattgcttgtttcttg

SEQ ID NO: 1685743 - DNA, 25 bp, Homo sapien
ttgtcttccattgcttgtttcttgt

SEQ ID NO: 1685744 - DNA, 25 bp, Homo sapien
gaacaggactagttttgtgctgctc

SEQ ID NO: 1685745 - DNA, 25 bp, Homo sapien
catgttgtcaggcagcgagtaggaa

SEQ ID NO: 1685746 - DNA, 25 bp, Homo sapien
tggcaaccgcggcaggaaaaggaac

SEQ ID NO: 1685747 - DNA, 25 bp, Homo sapien
aatggccaggattcagcagctatct

SEQ ID NO: 1685748 - DNA, 25 bp, Homo sapien
ggaatgctctttcattttgccccat

SEQ ID NO: 1685749 - DNA, 25 bp, Homo sapien
tttctggaatgctctttcattttgc

SEQ ID NO: 1685750 - DNA, 25 bp, Homo sapien
ttctttctggaatgctctttcattt

SEQ ID NO: 1685751 - DNA, 25 bp, Homo sapien
ctggaatgctctttcattttgcccc

SEQ ID NO: 1685752 - DNA, 25 bp, Homo sapien
gttcctgcccatatgcacttgttcc

SEQ ID NO: 1685753 - DNA, 25 bp, Homo sapien
gtcgttcctgcccatatgcacttgt

SEQ ID NO: 1685754 - DNA, 25 bp, Homo sapien
cagtcgttcctgcccatatgcactt

SEQ ID NO: 1685755 - DNA, 25 bp, Homo sapien
cctgcccatatgcacttgttccttg

SEQ ID NO: 1685756 - DNA, 25 bp, Homo sapien
gctgtgtttggattgctgaggtccc

SEQ ID NO: 1685757 - DNA, 25 bp, Homo sapien
gtcagctcgactaggcttttggaag

SEQ ID NO: 1685758 - DNA, 25 bp, Homo sapien
gaaccttccctttgagtcagctcga

SEQ ID NO: 1685759 - DNA, 25 bp, Homo sapien
tgctgaggtccctaaagaaccttcc

SEQ ID NO: 1685760 - DNA, 25 bp, Homo sapien
gcctgtatgattcagtagactctga

SEQ ID NO: 1685761 - DNA, 25 bp, Homo sapien
gatcaagagaaagcttctcgaggaa

SEQ ID NO: 1685762 - DNA, 25 bp, Homo sapien
ttttggctcttcgtggcctgtatga

SEQ ID NO: 1685763 - DNA, 25 bp, Homo sapien
tggtcctggattcgctgcaaatgta

SEQ ID NO: 1685764 - DNA, 25 bp, Homo sapien
ccctgagttgcttccaattgttgaa

SEQ ID NO: 1685765 - DNA, 25 bp, Homo sapien
gctccctgagttgcttccaattgtt

SEQ ID NO: 1685766 - DNA, 25 bp, Homo sapien
gatggctccctgagttgcttccaat

SEQ ID NO: 1685767 - DNA, 25 bp, Homo sapien
ctgagttgcttccaattgttgaaat

SEQ ID NO: 1685768 - DNA, 25 bp, Homo sapien
tatggacaaagacacgggtcaaacc

SEQ ID NO: 1685769 - DNA, 25 bp, Homo sapien
caaaccccatcacagtggctagtgt

SEQ ID NO: 1685770 - DNA, 25 bp, Homo sapien
ctcgttgggagttcagcccatggaa

SEQ ID NO: 1685771 - DNA, 25 bp, Homo sapien
gcctgcagtaataatactaggttgg

SEQ ID NO: 1685772 - DNA, 25 bp, Homo sapien
tccgaccgcttttgagctggcgcag

SEQ ID NO: 1685773 - DNA, 25 bp, Homo sapien
gagaatcaatgttttagctgtccca

SEQ ID NO: 1685774 - DNA, 25 bp, Homo sapien
acgtctgtttccgaccgcttttgag

SEQ ID NO: 1685775 - DNA, 25 bp, Homo sapien
gctgtcccatagtctgacgtctgtt

SEQ ID NO: 1685776 - DNA, 25 bp, Homo sapien
tcttctccggggatagctcttccag

SEQ ID NO: 1685777 - DNA, 25 bp, Homo sapien
ggcacgatgctaccctgattccttt

SEQ ID NO: 1685778 - DNA, 25 bp, Homo sapien
ccggggatagctcttccagtggaag

SEQ ID NO: 1685779 - DNA, 25 bp, Homo sapien
accagagaggcacgatgctaccctg

SEQ ID NO: 1685780 - DNA, 25 bp, Homo sapien
tccttggctacttggctgactctgc

SEQ ID NO: 1685781 - DNA, 25 bp, Homo sapien
gattcggttcgagcccgtggctgct

SEQ ID NO: 1685782 - DNA, 25 bp, Homo sapien
tagggtggtgatcgagactctgcca

SEQ ID NO: 1685783 - DNA, 25 bp, Homo sapien
caggctgccttcttaaactccgtgg

SEQ ID NO: 1685784 - DNA, 25 bp, Homo sapien
cccgctggggtgttgcatcggctcc

SEQ ID NO: 1685785 - DNA, 25 bp, Homo sapien
gtgttgcatcggctcccagctgaag

SEQ ID NO: 1685786 - DNA, 25 bp, Homo sapien
tcgggattagaatgggccgacctcc

SEQ ID NO: 1685787 - DNA, 25 bp, Homo sapien
tgggaccaaggacacgtcgggatta

SEQ ID NO: 1685788 - DNA, 25 bp, Homo sapien
gaaactttccggagttgcacgcaga

SEQ ID NO: 1685789 - DNA, 25 bp, Homo sapien
gtcgccagcgttcgccggcaggaaa

SEQ ID NO: 1685790 - DNA, 25 bp, Homo sapien
aacgccgaagcgacgccggtttgtg

SEQ ID NO: 1685791 - DNA, 25 bp, Homo sapien
tttgtggcttaacgtgcagctgatg

SEQ ID NO: 1685792 - DNA, 25 bp, Homo sapien
gctagagcggagtagttccatatca

SEQ ID NO: 1685793 - DNA, 25 bp, Homo sapien
tgggagtcggagaccgcactgaaac

SEQ ID NO: 1685794 - DNA, 25 bp, Homo sapien
taatgatccgaaattagctgcgaga

SEQ ID NO: 1685795 - DNA, 25 bp, Homo sapien
gagaactgccatttgatgctccggt

SEQ ID NO: 1685796 - DNA, 25 bp, Homo sapien
cactgagcgcccttagtctggaggc

SEQ ID NO: 1685797 - DNA, 25 bp, Homo sapien
agattccttcgcgtggaggtcacac

SEQ ID NO: 1685798 - DNA, 25 bp, Homo sapien
ggaggcgcctcctagtcctccaggt

SEQ ID NO: 1685799 - DNA, 25 bp, Homo sapien
tgcacccatccgaagaagattcctt

SEQ ID NO: 1685800 - DNA, 25 bp, Homo sapien
cactagaggctgtaatgagaccaac

SEQ ID NO: 1685801 - DNA, 25 bp, Homo sapien
gaagcacgtaggctcttgcaggcca

SEQ ID NO: 1685802 - DNA, 25 bp, Homo sapien
aatgtcactttagaccaacccgagg

SEQ ID NO: 1685803 - DNA, 25 bp, Homo sapien
tgaagtcgtctttgccaagcagggt

SEQ ID NO: 1685804 - DNA, 25 bp, Homo sapien
tggcaggtgctggatcgcatcaact

SEQ ID NO: 1685805 - DNA, 25 bp, Homo sapien
taagagtcttggtgacacgcacaga

SEQ ID NO: 1685806 - DNA, 25 bp, Homo sapien
taaacacagcaaaaggcgcatggac

SEQ ID NO: 1685807 - DNA, 25 bp, Homo sapien
tactatgaaatcacagactgttggc

SEQ ID NO: 1685808 - DNA, 25 bp, Homo sapien
cttgtagagcaacctcataccaaaa

SEQ ID NO: 1685809 - DNA, 25 bp, Homo sapien
ggttcttgtagagcaacctcatacc

SEQ ID NO: 1685810 - DNA, 25 bp, Homo sapien
ggaagactaggtgaagagatctggg

SEQ ID NO: 1685811 - DNA, 25 bp, Homo sapien
ataccaaaagtatgaggaagactag

SEQ ID NO: 1685812 - DNA, 25 bp, Homo sapien
tcactagttgcaggctgtagtgagt

SEQ ID NO: 1685813 - DNA, 25 bp, Homo sapien
caggaggatcactagttgcaggctg

SEQ ID NO: 1685814 - DNA, 25 bp, Homo sapien
ctatagttttagctatagctgaggc

SEQ ID NO: 1685815 - DNA, 25 bp, Homo sapien
agcttgagcaagagagctagatcct

SEQ ID NO: 1685816 - DNA, 25 bp, Homo sapien
ctttctctctggatatactccaaca

SEQ ID NO: 1685817 - DNA, 25 bp, Homo sapien
tctggatatactccaacagggaaga

SEQ ID NO: 1685818 - DNA, 25 bp, Homo sapien
tctctggatatactccaacagggaa

SEQ ID NO: 1685819 - DNA, 25 bp, Homo sapien
tctctctggatatactccaacaggg

SEQ ID NO: 1685820 - DNA, 25 bp, Homo sapien
aagacccagcgggacagaagctagc

SEQ ID NO: 1685821 - DNA, 25 bp, Homo sapien
cagagtcagtcttatctgccagcag

SEQ ID NO: 1685822 - DNA, 25 bp, Homo sapien
ccaggctgtgcggatatcagagtca

SEQ ID NO: 1685823 - DNA, 25 bp, Homo sapien
agggtgtgactagctcagaggccca

SEQ ID NO: 1685824 - DNA, 25 bp, Homo sapien
tttttccgacggagggatgaataca

SEQ ID NO: 1685825 - DNA, 25 bp, Homo sapien
ggtggtccatgtctgatccaaggga

SEQ ID NO: 1685826 - DNA, 25 bp, Homo sapien
tccaggaatctggtaccacctctag

SEQ ID NO: 1685827 - DNA, 25 bp, Homo sapien
gatgaatacatgtgaacgtggctga

SEQ ID NO: 1685828 - DNA, 25 bp, Homo sapien
catttggctcctactgtgaagatgc

SEQ ID NO: 1685829 - DNA, 25 bp, Homo sapien
atgctcacatggaggaagccagcgg

SEQ ID NO: 1685830 - DNA, 25 bp, Homo sapien
tagtaggcagtgtccttgcagggat

SEQ ID NO: 1685831 - DNA, 25 bp, Homo sapien
ccatctgagctggagtagtaggcag

SEQ ID NO: 1685832 - DNA, 25 bp, Homo sapien
gagcaattttcttgggactcctgaa

SEQ ID NO: 1685833 - DNA, 25 bp, Homo sapien
ctgaaacccattcccagtactctga

SEQ ID NO: 1685834 - DNA, 25 bp, Homo sapien
ggactcctgaaacccattcccagta

SEQ ID NO: 1685835 - DNA, 25 bp, Homo sapien
ctagagagagcaattttcttgggac

SEQ ID NO: 1685836 - DNA, 25 bp, Homo sapien
gaaaaatgctgccatctgccctgcc

SEQ ID NO: 1685837 - DNA, 25 bp, Homo sapien
agaaaaatgctgccatctgccctgc

SEQ ID NO: 1685838 - DNA, 25 bp, Homo sapien
tccaaactcaaaccaacaggaattc

SEQ ID NO: 1685839 - DNA, 25 bp, Homo sapien
caacaggaattctggagaaaaatgc

SEQ ID NO: 1685840 - DNA, 25 bp, Homo sapien
ttaagtgggttccagatggatctcc

SEQ ID NO: 1685841 - DNA, 25 bp, Homo sapien
aactctatgccatattctgagttgg

SEQ ID NO: 1685842 - DNA, 25 bp, Homo sapien
gatatggacaggagaacacccagaa

SEQ ID NO: 1685843 - DNA, 25 bp, Homo sapien
tttgatccaatcgatatggacagga

SEQ ID NO: 1685844 - DNA, 25 bp, Homo sapien
agccagtaggccatgagggagcaca

SEQ ID NO: 1685845 - DNA, 25 bp, Homo sapien
cctgagttgacagccagtaggccat

SEQ ID NO: 1685846 - DNA, 25 bp, Homo sapien
gagcacacatagcttgtagggttga

SEQ ID NO: 1685847 - DNA, 25 bp, Homo sapien
tagatgaggtctggacctttcgttc

SEQ ID NO: 1685848 - DNA, 25 bp, Homo sapien
ttgcgtaactaagggctgcagggat

SEQ ID NO: 1685849 - DNA, 25 bp, Homo sapien
aatttttgcgtaactaagggctgca

SEQ ID NO: 1685850 - DNA, 25 bp, Homo sapien
tttttgcgtaactaagggctgcagg

SEQ ID NO: 1685851 - DNA, 25 bp, Homo sapien
tcaatttttgcgtaactaagggctg

SEQ ID NO: 1685852 - DNA, 25 bp, Homo sapien
ccatggccatgaaccccctcttggg

SEQ ID NO: 1685853 - DNA, 25 bp, Homo sapien
gggctgcaagcctatttccatctga

SEQ ID NO: 1685854 - DNA, 25 bp, Homo sapien
gggggctgcaagcctatttccatct

SEQ ID NO: 1685855 - DNA, 25 bp, Homo sapien
ggctgcaagcctatttccatctgat

SEQ ID NO: 1685856 - DNA, 25 bp, Homo sapien
aactgtggaaagtccttcatgttgg

SEQ ID NO: 1685857 - DNA, 25 bp, Homo sapien
ctgcatagcaccctggtgagaacta

SEQ ID NO: 1685858 - DNA, 25 bp, Homo sapien
tatcactcataggagacacaaactg

SEQ ID NO: 1685859 - DNA, 25 bp, Homo sapien
ggaaagtccttcatgttggtcactg

SEQ ID NO: 1685860 - DNA, 25 bp, Homo sapien
tcttcttgccccatagttcactgtg

SEQ ID NO: 1685861 - DNA, 25 bp, Homo sapien
gccccatagttcactgtgattgtcc

SEQ ID NO: 1685862 - DNA, 25 bp, Homo sapien
caaataactgaatagataaatgcac

SEQ ID NO: 1685863 - DNA, 25 bp, Homo sapien
ctagattcagatatgtgtgttcttc

SEQ ID NO: 1685864 - DNA, 25 bp, Homo sapien
cctgcgatcaagatagaatgtcatt

SEQ ID NO: 1685865 - DNA, 25 bp, Homo sapien
ctgtctggatcctgcgatcaagata

SEQ ID NO: 1685866 - DNA, 25 bp, Homo sapien
tagaatgtcattatcctggtttttg

SEQ ID NO: 1685867 - DNA, 25 bp, Homo sapien
cattatcctggtttttgtctgtgac

SEQ ID NO: 1685868 - DNA, 25 bp, Homo sapien
gagaccatcgctttgcttccatcac

SEQ ID NO: 1685869 - DNA, 25 bp, Homo sapien
agagaccatcgctttgcttccatca

SEQ ID NO: 1685870 - DNA, 25 bp, Homo sapien
agaccatcgctttgcttccatcaca

SEQ ID NO: 1685871 - DNA, 25 bp, Homo sapien
ttcagatgtgtaataaaattggtct

SEQ ID NO: 1685872 - DNA, 25 bp, Homo sapien
ctgtaattgctctgatctcacagtg

SEQ ID NO: 1685873 - DNA, 25 bp, Homo sapien
gcatgatatatctcattacattcag

SEQ ID NO: 1685874 - DNA, 25 bp, Homo sapien
aattgctctgatctcacagtgctga

SEQ ID NO: 1685875 - DNA, 25 bp, Homo sapien
cacagaacagttaagctttctttag

SEQ ID NO: 1685876 - DNA, 25 bp, Homo sapien
catatcccgcagaggagcatctttc

SEQ ID NO: 1685877 - DNA, 25 bp, Homo sapien
cagttaagctttctttagcaatgtc

SEQ ID NO: 1685878 - DNA, 25 bp, Homo sapien
aatgtcaaatgccagcatatcccgc

SEQ ID NO: 1685879 - DNA, 25 bp, Homo sapien
gaccagcttcaggtcagcaacgata

SEQ ID NO: 1685880 - DNA, 25 bp, Homo sapien
cttctcagatggactgataggaccc

SEQ ID NO: 1685881 - DNA, 25 bp, Homo sapien
caacgatagagtcgtttaaggccat

SEQ ID NO: 1685882 - DNA, 25 bp, Homo sapien
gccctgataacatagacttgaccag

SEQ ID NO: 1685883 - DNA, 25 bp, Homo sapien
ctggtttttcctagtgggtttgctg

SEQ ID NO: 1685884 - DNA, 25 bp, Homo sapien
caggagggcaagaggtgtcctgtgg

SEQ ID NO: 1685885 - DNA, 25 bp, Homo sapien
gaggtgtcctgtgggaagagcccca

SEQ ID NO: 1685886 - DNA, 25 bp, Homo sapien
tgtcctgtgggaagagccccaagtc

SEQ ID NO: 1685887 - DNA, 25 bp, Homo sapien
atttctaaatacatggtgttgcgtt

SEQ ID NO: 1685888 - DNA, 25 bp, Homo sapien
aaatacatggtgttgcgtttcaaac

SEQ ID NO: 1685889 - DNA, 25 bp, Homo sapien
acatggtgttgcgtttcaaacacag

SEQ ID NO: 1685890 - DNA, 25 bp, Homo sapien
taagaagattgttctgaatttcctg

SEQ ID NO: 1685891 - DNA, 25 bp, Homo sapien
gcatcccacattgaccaagtctcca

SEQ ID NO: 1685892 - DNA, 25 bp, Homo sapien
tagactgtcactttatgcagatgga

SEQ ID NO: 1685893 - DNA, 25 bp, Homo sapien
tttatatatgctggcatctgcgtga

SEQ ID NO: 1685894 - DNA, 25 bp, Homo sapien
tatgctggcatctgcgtgaaagaca

SEQ ID NO: 1685895 - DNA, 25 bp, Homo sapien
ctctgcgttcagctagctcttcctg

SEQ ID NO: 1685896 - DNA, 25 bp, Homo sapien
ctgtgtgtcgatggctgaatacaac

SEQ ID NO: 1685897 - DNA, 25 bp, Homo sapien
tcctgtgtgtcgatggctgaataca

SEQ ID NO: 1685898 - DNA, 25 bp, Homo sapien
ctcttcctgtgtgtcgatggctgaa

SEQ ID NO: 1685899 - DNA, 25 bp, Homo sapien
gaaatccgatctgaagtgacttggc

SEQ ID NO: 1685900 - DNA, 25 bp, Homo sapien
gagtcagaagaaatccgatctgaag

SEQ ID NO: 1685901 - DNA, 25 bp, Homo sapien
gatctgaagtgacttggcattttgg

SEQ ID NO: 1685902 - DNA, 25 bp, Homo sapien
ttttggtgcacccagaactgaagtg

SEQ ID NO: 1685903 - DNA, 25 bp, Homo sapien
ctctttcttcccacgtcccactgcc

SEQ ID NO: 1685904 - DNA, 25 bp, Homo sapien
ttctctttcttcccacgtcccactg

SEQ ID NO: 1685905 - DNA, 25 bp, Homo sapien
tcagaggactttctctctgtgaata

SEQ ID NO: 1685906 - DNA, 25 bp, Homo sapien
gaggactttctctctgtgaatattc

SEQ ID NO: 1685907 - DNA, 25 bp, Homo sapien
tgttgagggtccaaaccagaggcag

SEQ ID NO: 1685908 - DNA, 25 bp, Homo sapien
tgatgttgagggtccaaaccagagg

SEQ ID NO: 1685909 - DNA, 25 bp, Homo sapien
gagcttgcaccttctcatgactgga

SEQ ID NO: 1685910 - DNA, 25 bp, Homo sapien
gaagaatgagggtcatgaagggatg

SEQ ID NO: 1685911 - DNA, 25 bp, Homo sapien
ctgaagtggtacatgagagatgcat

SEQ ID NO: 1685912 - DNA, 25 bp, Homo sapien
gcaggcaaccatcagtatgcacctt

SEQ ID NO: 1685913 - DNA, 25 bp, Homo sapien
gatgtcccatgcgttgatatcaaca

SEQ ID NO: 1685914 - DNA, 25 bp, Homo sapien
cacctttattgagtctgctagagcc

SEQ ID NO: 1685915 - DNA, 25 bp, Homo sapien
tgctagagcccgtgtagtgctatct

SEQ ID NO: 1685916 - DNA, 25 bp, Homo sapien
gaaccatccttctacggtggggaga

SEQ ID NO: 1685917 - DNA, 25 bp, Homo sapien
tcagaaccatccttctacggtgggg

SEQ ID NO: 1685918 - DNA, 25 bp, Homo sapien
aaagggagaacttaaccctgtgatg

SEQ ID NO: 1685919 - DNA, 25 bp, Homo sapien
accctgtgatgtaataagtttctga

SEQ ID NO: 1685920 - DNA, 25 bp, Homo sapien
tgttgtaacttagccagccgcctta

SEQ ID NO: 1685921 - DNA, 25 bp, Homo sapien
gccagccgccttagaaaatcaaaag

SEQ ID NO: 1685922 - DNA, 25 bp, Homo sapien
tcaaaagcccccagatacacgaagt

SEQ ID NO: 1685923 - DNA, 25 bp, Homo sapien
gtaacttagccagccgccttagaaa

SEQ ID NO: 1685924 - DNA, 25 bp, Homo sapien
ccttcaatggctgccaaataactcc

SEQ ID NO: 1685925 - DNA, 25 bp, Homo sapien
caattctaatacagaatcactattt

SEQ ID NO: 1685926 - DNA, 25 bp, Homo sapien
agtcctattctagtaattaagctct

SEQ ID NO: 1685927 - DNA, 25 bp, Homo sapien
cctattctagtaattaagctcttgc

SEQ ID NO: 1685928 - DNA, 25 bp, Homo sapien
gctttgtttcttgtactccaattct

SEQ ID NO: 1685929 - DNA, 25 bp, Homo sapien
ctgccactcacacctatgcaccctc

SEQ ID NO: 1685930 - DNA, 25 bp, Homo sapien
aaaagcaaattgtactggcagcttc

SEQ ID NO: 1685931 - DNA, 25 bp, Homo sapien
cataggcaaaagcaaattgtactgg

SEQ ID NO: 1685932 - DNA, 25 bp, Homo sapien
ctcctacataggcaaaagcaaattg

SEQ ID NO: 1685933 - DNA, 25 bp, Homo sapien
cagccagtgcttgctgtaaagaccc

SEQ ID NO: 1685934 - DNA, 25 bp, Homo sapien
agccagtgcttgctgtaaagaccca

SEQ ID NO: 1685935 - DNA, 25 bp, Homo sapien
tcagccagtgcttgctgtaaagacc

SEQ ID NO: 1685936 - DNA, 25 bp, Homo sapien
gccagtgcttgctgtaaagacccac

SEQ ID NO: 1685937 - DNA, 25 bp, Homo sapien
tctgctgctgtcaataccactgcta

SEQ ID NO: 1685938 - DNA, 25 bp, Homo sapien
actgctattgatacccctgtggcct

SEQ ID NO: 1685939 - DNA, 25 bp, Homo sapien
tgtctaccctgtcaccaacttggaa

SEQ ID NO: 1685940 - DNA, 25 bp, Homo sapien
caacgcctgggaggacgtttatcct

SEQ ID NO: 1685941 - DNA, 25 bp, Homo sapien
ttggcgatgccaagcagttgcacag

SEQ ID NO: 1685942 - DNA, 25 bp, Homo sapien
cagttgcacagtatcccagtggtgc

SEQ ID NO: 1685943 - DNA, 25 bp, Homo sapien
tgtctcttcctttgattggcgatgc

SEQ ID NO: 1685944 - DNA, 25 bp, Homo sapien
tcttcctttgattggcgatgccaag

SEQ ID NO: 1685945 - DNA, 25 bp, Homo sapien
aaattgtcgtctgtggacacctcct

SEQ ID NO: 1685946 - DNA, 25 bp, Homo sapien
gaaattgtcgtctgtggacacctcc

SEQ ID NO: 1685947 - DNA, 25 bp, Homo sapien
gcttcatgactctagctgtttgcca

SEQ ID NO: 1685948 - DNA, 25 bp, Homo sapien
tgtttgccagactgaatgatgccta

SEQ ID NO: 1685949 - DNA, 25 bp, Homo sapien
actgttgttcttggagaccacatgg

SEQ ID NO: 1685950 - DNA, 25 bp, Homo sapien
tcaggttgaactacaggtgttctca

SEQ ID NO: 1685951 - DNA, 25 bp, Homo sapien
gactgatgcactgcgaatatgaaaa

SEQ ID NO: 1685952 - DNA, 25 bp, Homo sapien
ggagccccggtgagactgatgcact

SEQ ID NO: 1685953 - DNA, 25 bp, Homo sapien
taagccagtagaggagccccggtga

SEQ ID NO: 1685954 - DNA, 25 bp, Homo sapien
agactgatgcactgcgaatatgaaa

SEQ ID NO: 1685955 - DNA, 25 bp, Homo sapien
gcagatggaatccttgtaatgacaa

SEQ ID NO: 1685956 - DNA, 25 bp, Homo sapien
gatggaatccttgtaatgacaacca

SEQ ID NO: 1685957 - DNA, 25 bp, Homo sapien
tttcagctgtgagtcggcagatgga

SEQ ID NO: 1685958 - DNA, 25 bp, Homo sapien
gctgtgagtcggcagatggaatcct

SEQ ID NO: 1685959 - DNA, 25 bp, Homo sapien
gaacatattgtttgacgctccaggg

SEQ ID NO: 1685960 - DNA, 25 bp, Homo sapien
ccaattttggcagtacatgggcaaa

SEQ ID NO: 1685961 - DNA, 25 bp, Homo sapien
aattagtggtgtgatttttccgtgc

SEQ ID NO: 1685962 - DNA, 25 bp, Homo sapien
aaagcactgagacttttcgaattag

SEQ ID NO: 1685963 - DNA, 25 bp, Homo sapien
tgaatgaatggtgttgccccaaaat

SEQ ID NO: 1685964 - DNA, 25 bp, Homo sapien
cacttgcagtaacaccagtaatgaa

SEQ ID NO: 1685965 - DNA, 25 bp, Homo sapien
taactcagagaacggcagtgtaaca

SEQ ID NO: 1685966 - DNA, 25 bp, Homo sapien
ccaatctcagggtaataactcagag

SEQ ID NO: 1685967 - DNA, 25 bp, Homo sapien
gcatctgagatgtactgcagggagc

SEQ ID NO: 1685968 - DNA, 25 bp, Homo sapien
tatagggtgggaacgacacttcact

SEQ ID NO: 1685969 - DNA, 25 bp, Homo sapien
tctgttcaacaggagggctataggg

SEQ ID NO: 1685970 - DNA, 25 bp, Homo sapien
gataagccctcccatgcttcgctga

SEQ ID NO: 1685971 - DNA, 25 bp, Homo sapien
cttggctgctgtgcgcccccgcgag

SEQ ID NO: 1685972 - DNA, 25 bp, Homo sapien
cctgctactgcgctcgggcgccacc

SEQ ID NO: 1685973 - DNA, 25 bp, Homo sapien
cgccggtggtcccgcgctcctgcgc

SEQ ID NO: 1685974 - DNA, 25 bp, Homo sapien
cgccctacgcccctgctactgcgct

SEQ ID NO: 1685975 - DNA, 25 bp, Homo sapien
ggcgcgcgtacacgtctccggtctt

SEQ ID NO: 1685976 - DNA, 25 bp, Homo sapien
gcgtacacgtctccggtcttcagca

SEQ ID NO: 1685977 - DNA, 25 bp, Homo sapien
caggttgggaaggtccacagcccat

SEQ ID NO: 1685978 - DNA, 25 bp, Homo sapien
tcttgggcgcgcgtacacgtctccg

SEQ ID NO: 1685979 - DNA, 25 bp, Homo sapien
gtcttcccaggattcttttaatgtc

SEQ ID NO: 1685980 - DNA, 25 bp, Homo sapien
cccaggattcttttaatgtctattt

SEQ ID NO: 1685981 - DNA, 25 bp, Homo sapien
cggtaatgtcttcccaggattcttt

SEQ ID NO: 1685982 - DNA, 25 bp, Homo sapien
atcttccactcggtaatgtcttccc

SEQ ID NO: 1685983 - DNA, 25 bp, Homo sapien
tcattgcaagtttcccacttctcat

SEQ ID NO: 1685984 - DNA, 25 bp, Homo sapien
attgcaagtttcccacttctcattt

SEQ ID NO: 1685985 - DNA, 25 bp, Homo sapien
ttcattgcaagtttcccacttctca

SEQ ID NO: 1685986 - DNA, 25 bp, Homo sapien
ctcatttcaatggatgctatcaagg

SEQ ID NO: 1685987 - DNA, 25 bp, Homo sapien
cactgacgacaaaatgctggtccgt

SEQ ID NO: 1685988 - DNA, 25 bp, Homo sapien
ggtgatttagtaaaccactgacgac

SEQ ID NO: 1685989 - DNA, 25 bp, Homo sapien
tatgctgggtctaaggatatgcaca

SEQ ID NO: 1685990 - DNA, 25 bp, Homo sapien
gaaggccctcgataaatactgcact

SEQ ID NO: 1685991 - DNA, 25 bp, Homo sapien
tcttggtcagagcagcttccatccg

SEQ ID NO: 1685992 - DNA, 25 bp, Homo sapien
ttggtcagagcagcttccatccggg

SEQ ID NO: 1685993 - DNA, 25 bp, Homo sapien
ggggctgcaattttccccagtatga

SEQ ID NO: 1685994 - DNA, 25 bp, Homo sapien
cgggggctgcaattttccccagtat

SEQ ID NO: 1685995 - DNA, 25 bp, Homo sapien
ctgatatttagcattcatgttgctg

SEQ ID NO: 1685996 - DNA, 25 bp, Homo sapien
acactgatatttagcattcatgttg

SEQ ID NO: 1685997 - DNA, 25 bp, Homo sapien
gtctgcctgacgctctgcagtctgt

SEQ ID NO: 1685998 - DNA, 25 bp, Homo sapien
tgcctgacgctctgcagtctgtgac

SEQ ID NO: 1685999 - DNA, 25 bp, Homo sapien
attgtacacacagctggcagcactg

SEQ ID NO: 1686000 - DNA, 25 bp, Homo sapien
acattgtacacacagctggcagcac

SEQ ID NO: 1686001 - DNA, 25 bp, Homo sapien
tgtacacacagctggcagcactgac

SEQ ID NO: 1686002 - DNA, 25 bp, Homo sapien
ttaacattgtacacacagctggcag

SEQ ID NO: 1686003 - DNA, 25 bp, Homo sapien
tgccgtgacatcatatgattctcca

SEQ ID NO: 1686004 - DNA, 25 bp, Homo sapien
tttgctgtggctttgtataattcct

SEQ ID NO: 1686005 - DNA, 25 bp, Homo sapien
ctgatgacttctgtcgctctcgact

SEQ ID NO: 1686006 - DNA, 25 bp, Homo sapien
ttgattaatccattggtcactaggt

SEQ ID NO: 1686007 - DNA, 25 bp, Homo sapien
cccgattcggaagagggaccttcat

SEQ ID NO: 1686008 - DNA, 25 bp, Homo sapien
attcggaagagggaccttcatgagg

SEQ ID NO: 1686009 - DNA, 25 bp, Homo sapien
ctctagggagatactggcttatggg

SEQ ID NO: 1686010 - DNA, 25 bp, Homo sapien
gatactggcttatgggggatgcccc

SEQ ID NO: 1686011 - DNA, 25 bp, Homo sapien
tctaactttccaggcgcagattaaa

SEQ ID NO: 1686012 - DNA, 25 bp, Homo sapien
caaaaaggccctatgaatgcaggtg

SEQ ID NO: 1686013 - DNA, 25 bp, Homo sapien
tatcctctatttaaccacatggccc

SEQ ID NO: 1686014 - DNA, 25 bp, Homo sapien
ccagtccttagcatgaacctttgta

SEQ ID NO: 1686015 - DNA, 25 bp, Homo sapien
ctcaatggcttctcagtcgtagtca

SEQ ID NO: 1686016 - DNA, 25 bp, Homo sapien
ttctcaatggcttctcagtcgtagt

SEQ ID NO: 1686017 - DNA, 25 bp, Homo sapien
agttttttcagtctggaaggtggct

SEQ ID NO: 1686018 - DNA, 25 bp, Homo sapien
tcaatggcttctcagtcgtagtcaa

SEQ ID NO: 1686019 - DNA, 25 bp, Homo sapien
aacctcggccccatctaattcagct

SEQ ID NO: 1686020 - DNA, 25 bp, Homo sapien
gctgaaggcaaaagtcggtcactcc

SEQ ID NO: 1686021 - DNA, 25 bp, Homo sapien
tttggcaaatgcaacctcggcccca

SEQ ID NO: 1686022 - DNA, 25 bp, Homo sapien
caaaagtcggtcactccgtagcctt

SEQ ID NO: 1686023 - DNA, 25 bp, Homo sapien
tccacgaccccaaaactttcatcac

SEQ ID NO: 1686024 - DNA, 25 bp, Homo sapien
taggacatgtctgactccacgaccc

SEQ ID NO: 1686025 - DNA, 25 bp, Homo sapien
tgcatcacatttactcttcttcctc

SEQ ID NO: 1686026 - DNA, 25 bp, Homo sapien
ttctatcaatcaaggttgcatcaca

SEQ ID NO: 1686027 - DNA, 25 bp, Homo sapien
tgtgcagcccacacaatcatcctta

SEQ ID NO: 1686028 - DNA, 25 bp, Homo sapien
taagcccaaggcagaaatcccagtg

SEQ ID NO: 1686029 - DNA, 25 bp, Homo sapien
gcaggagtaaacaggaaggatttca

SEQ ID NO: 1686030 - DNA, 25 bp, Homo sapien
cacacaaaggagagtgccaaatatc

SEQ ID NO: 1686031 - DNA, 25 bp, Homo sapien
gaggagaaagcaggcagaagccaca

SEQ ID NO: 1686032 - DNA, 25 bp, Homo sapien
agaaagcaggcagaagccacaccat

SEQ ID NO: 1686033 - DNA, 25 bp, Homo sapien
ggagaaagcaggcagaagccacacc

SEQ ID NO: 1686034 - DNA, 25 bp, Homo sapien
ggggaggagaaagcaggcagaagcc

SEQ ID NO: 1686035 - DNA, 25 bp, Homo sapien
tatgattctagctgaggactcaacc

SEQ ID NO: 1686036 - DNA, 25 bp, Homo sapien
gatagctgaaggaatggccgtgacc

SEQ ID NO: 1686037 - DNA, 25 bp, Homo sapien
ggcagcaattttaccctgggacacg

SEQ ID NO: 1686038 - DNA, 25 bp, Homo sapien
tgggacacgcttctgagctcaactg

SEQ ID NO: 1686039 - DNA, 25 bp, Homo sapien
tgtataaatgacaggaataaccctc

SEQ ID NO: 1686040 - DNA, 25 bp, Homo sapien
gaataaccctcaatttttggatgcc

SEQ ID NO: 1686041 - DNA, 25 bp, Homo sapien
gatgccagaaacaggacgattcaca

SEQ ID NO: 1686042 - DNA, 25 bp, Homo sapien
aagcaacagcatatctgaccatata

SEQ ID NO: 1686043 - DNA, 25 bp, Homo sapien
ctccttcacatagacggtgacaact

SEQ ID NO: 1686044 - DNA, 25 bp, Homo sapien
acggtgacaactggctcctccgcag

SEQ ID NO: 1686045 - DNA, 25 bp, Homo sapien
tcacatagacggtgacaactggctc

SEQ ID NO: 1686046 - DNA, 25 bp, Homo sapien
atagacggtgacaactggctcctcc

SEQ ID NO: 1686047 - DNA, 25 bp, Homo sapien
taatcagaggcccagatatgaagtt

SEQ ID NO: 1686048 - DNA, 25 bp, Homo sapien
cagaggcccagatatgaagttatgc

SEQ ID NO: 1686049 - DNA, 25 bp, Homo sapien
acccctcgtaatcagaggcccagat

SEQ ID NO: 1686050 - DNA, 25 bp, Homo sapien
cccagatatgaagttatgcttagga

SEQ ID NO: 1686051 - DNA, 25 bp, Homo sapien
agtgcagctttctagtatcacttct

SEQ ID NO: 1686052 - DNA, 25 bp, Homo sapien
gtgcagctttctagtatcacttctg

SEQ ID NO: 1686053 - DNA, 25 bp, Homo sapien
cttcccagtggatccatctaaattc

SEQ ID NO: 1686054 - DNA, 25 bp, Homo sapien
gtggatccatctaaattctcttcca

SEQ ID NO: 1686055 - DNA, 25 bp, Homo sapien
gctctcagtgtgaagccctaattta

SEQ ID NO: 1686056 - DNA, 25 bp, Homo sapien
gtctgcagtgatgggagctctcagt

SEQ ID NO: 1686057 - DNA, 25 bp, Homo sapien
cagctggagaagatatttcgaggtg

SEQ ID NO: 1686058 - DNA, 25 bp, Homo sapien
gaggtgtcactttgtgctgtctgca

SEQ ID NO: 1686059 - DNA, 25 bp, Homo sapien
cttgtccactcaggaagtgtccttg

SEQ ID NO: 1686060 - DNA, 25 bp, Homo sapien
tggacttctgtaatgccacagaccg

SEQ ID NO: 1686061 - DNA, 25 bp, Homo sapien
cgtttctacttgctcacacctggaa

SEQ ID NO: 1686062 - DNA, 25 bp, Homo sapien
taatgccacagaccgtttctacttg

SEQ ID NO: 1686063 - DNA, 25 bp, Homo sapien
actcacttgaattttgcaagcctgc

SEQ ID NO: 1686064 - DNA, 25 bp, Homo sapien
cacttgaattttgcaagcctgcaat

SEQ ID NO: 1686065 - DNA, 25 bp, Homo sapien
gcaagcctgcaatttgtggacattc

SEQ ID NO: 1686066 - DNA, 25 bp, Homo sapien
aattttgcaagcctgcaatttgtgg

SEQ ID NO: 1686067 - DNA, 25 bp, Homo sapien
tagagtttgagagacaagtggatga

SEQ ID NO: 1686068 - DNA, 25 bp, Homo sapien
gagggataggaagctgtggtatctt

SEQ ID NO: 1686069 - DNA, 25 bp, Homo sapien
gtgtgtaagcagttgagggatagga

SEQ ID NO: 1686070 - DNA, 25 bp, Homo sapien
ttgatgtgtctcctagagtttgaga

SEQ ID NO: 1686071 - DNA, 25 bp, Homo sapien
ctgtggtttgaagggtcatagagaa

SEQ ID NO: 1686072 - DNA, 25 bp, Homo sapien
aatgtgtcactcatccaaatgccaa

SEQ ID NO: 1686073 - DNA, 25 bp, Homo sapien
tagagaagtgtaccaccccaaaatg

SEQ ID NO: 1686074 - DNA, 25 bp, Homo sapien
tttgaagggtcatagagaagtgtac

SEQ ID NO: 1686075 - DNA, 25 bp, Homo sapien
tggagaaggagtaattgtccacaag

SEQ ID NO: 1686076 - DNA, 25 bp, Homo sapien
tttgctggctgacataaaatggaga

SEQ ID NO: 1686077 - DNA, 25 bp, Homo sapien
aaaatggagaaggagtaattgtcca

SEQ ID NO: 1686078 - DNA, 25 bp, Homo sapien
tggcaaacatttttgctggctgaca

SEQ ID NO: 1686079 - DNA, 25 bp, Homo sapien
aataactctccaattggctaaaaga

SEQ ID NO: 1686080 - DNA, 25 bp, Homo sapien
tggaataaacaattggccacatcat

SEQ ID NO: 1686081 - DNA, 25 bp, Homo sapien
tgtgagtcatacatatgttggccac

SEQ ID NO: 1686082 - DNA, 25 bp, Homo sapien
aaagaagtagaagcacaagccagaa

SEQ ID NO: 1686083 - DNA, 25 bp, Homo sapien
ctcctctttcctctcagaaagctca

SEQ ID NO: 1686084 - DNA, 25 bp, Homo sapien
tctcctctttcctctcagaaagctc

SEQ ID NO: 1686085 - DNA, 25 bp, Homo sapien
tcctctttcctctcagaaagctcat

SEQ ID NO: 1686086 - DNA, 25 bp, Homo sapien
ctctcctctttcctctcagaaagct

SEQ ID NO: 1686087 - DNA, 25 bp, Homo sapien
tccttcaccttttctctctccagag

SEQ ID NO: 1686088 - DNA, 25 bp, Homo sapien
ctctctccagagtctctgcagccat

SEQ ID NO: 1686089 - DNA, 25 bp, Homo sapien
ctggccaccctgaattccttcacct

SEQ ID NO: 1686090 - DNA, 25 bp, Homo sapien
aattccttcaccttttctctctcca

SEQ ID NO: 1686091 - DNA, 25 bp, Homo sapien
gaagtgtcggcagcctgatttcttg

SEQ ID NO: 1686092 - DNA, 25 bp, Homo sapien
actaacagtgaagaagtgtcggcag

SEQ ID NO: 1686093 - DNA, 25 bp, Homo sapien
tctcttttcttggaggcattttaaa

SEQ ID NO: 1686094 - DNA, 25 bp, Homo sapien
cattttaaatctaactaacagtgaa

SEQ ID NO: 1686095 - DNA, 25 bp, Homo sapien
ccattggtgctatcactaatatgca

SEQ ID NO: 1686096 - DNA, 25 bp, Homo sapien
tctttgatagtcgagccattggtgc

SEQ ID NO: 1686097 - DNA, 25 bp, Homo sapien
tcgttcattcttgctaaggcctcac

SEQ ID NO: 1686098 - DNA, 25 bp, Homo sapien
gggattcacaaacagagtattcaac

SEQ ID NO: 1686099 - DNA, 25 bp, Homo sapien
tgccggtcaccgtacaaattctccg

SEQ ID NO: 1686100 - DNA, 25 bp, Homo sapien
tctcaagcgaagaagcgggtgcttt

SEQ ID NO: 1686101 - DNA, 25 bp, Homo sapien
aattctccggatcgtctggattaga

SEQ ID NO: 1686102 - DNA, 25 bp, Homo sapien
tatagaatgtgcaagcggtttccac

SEQ ID NO: 1686103 - DNA, 25 bp, Homo sapien
ggtgtacgtcgtgtccttctgggtc

SEQ ID NO: 1686104 - DNA, 25 bp, Homo sapien
gggtcgtgtgcatcttcgcacccgc

SEQ ID NO: 1686105 - DNA, 25 bp, Homo sapien
cctcgaagtacttgcgcaggctggc

SEQ ID NO: 1686106 - DNA, 25 bp, Homo sapien
ccccgacgaagatcttggtgtacgt

SEQ ID NO: 1686107 - DNA, 25 bp, Homo sapien
aattaacccatgaaggaaatcaaga

SEQ ID NO: 1686108 - DNA, 25 bp, Homo sapien
attaacccatgaaggaaatcaagaa

SEQ ID NO: 1686109 - DNA, 25 bp, Homo sapien
cttagcaacagacacacacagacat

SEQ ID NO: 1686110 - DNA, 25 bp, Homo sapien
cagacacacacagacatacatacat

SEQ ID NO: 1686111 - DNA, 25 bp, Homo sapien
gcaacagacacacacagacatacat

SEQ ID NO: 1686112 - DNA, 25 bp, Homo sapien
aacagacacacacagacatacatac

SEQ ID NO: 1686113 - DNA, 25 bp, Homo sapien
caatgatgggattgggatccttgca

SEQ ID NO: 1686114 - DNA, 25 bp, Homo sapien
tgctcctaagtatgccaggttcacg

SEQ ID NO: 1686115 - DNA, 25 bp, Homo sapien
tttcggcagcagcccggtcagccat

SEQ ID NO: 1686116 - DNA, 25 bp, Homo sapien
ggcctttctgccatcaatgatggga

SEQ ID NO: 1686117 - DNA, 25 bp, Homo sapien
ctgctctgagcacagtgcaactggt

SEQ ID NO: 1686118 - DNA, 25 bp, Homo sapien
tgctctgagcacagtgcaactggtg

SEQ ID NO: 1686119 - DNA, 25 bp, Homo sapien
ccgaaaggtctttgtataagggctg

SEQ ID NO: 1686120 - DNA, 25 bp, Homo sapien
gatgaagttgttgaacaccaaaggc

SEQ ID NO: 1686121 - DNA, 25 bp, Homo sapien
gaaaggtctttgtataagggctgga

SEQ ID NO: 1686122 - DNA, 25 bp, Homo sapien
taagggctggatgaagttgttgaac

SEQ ID NO: 1686123 - DNA, 25 bp, Homo sapien
tggaggctgccgtgtctacaacgtg

SEQ ID NO: 1686124 - DNA, 25 bp, Homo sapien
taaaacatctatcagctgcaaaggc

SEQ ID NO: 1686125 - DNA, 25 bp, Homo sapien
cattaaggtgatctgggaatctccc

SEQ ID NO: 1686126 - DNA, 25 bp, Homo sapien
tggactaataatctcacaaccctgg

SEQ ID NO: 1686127 - DNA, 25 bp, Homo sapien
gatgttcttaactgcttgtcagaaa

SEQ ID NO: 1686128 - DNA, 25 bp, Homo sapien
ttgtcagaaaccaggcgcgtggtca

SEQ ID NO: 1686129 - DNA, 25 bp, Homo sapien
agtgccaggagaaacgacgtcatca

SEQ ID NO: 1686130 - DNA, 25 bp, Homo sapien
ggcgcgtggtcatgcacacactcag

SEQ ID NO: 1686131 - DNA, 25 bp, Homo sapien
gcactcattaacgaacatccatgga

SEQ ID NO: 1686132 - DNA, 25 bp, Homo sapien
aatactacgtggttgctggcaaagc

SEQ ID NO: 1686133 - DNA, 25 bp, Homo sapien
cagagggtagtggactttggcccca

SEQ ID NO: 1686134 - DNA, 25 bp, Homo sapien
ttagtgttatgttcgaaatctgccc

SEQ ID NO: 1686135 - DNA, 25 bp, Homo sapien
aggcacctgagggtcagccagcttg

SEQ ID NO: 1686136 - DNA, 25 bp, Homo sapien
ctgtttgactatcaggcacctgagg

SEQ ID NO: 1686137 - DNA, 25 bp, Homo sapien
ttgactatcaggcacctgagggtca

SEQ ID NO: 1686138 - DNA, 25 bp, Homo sapien
tatcaggcacctgagggtcagccag

SEQ ID NO: 1686139 - DNA, 25 bp, Homo sapien
aatatgatgacaccctccctgctag

SEQ ID NO: 1686140 - DNA, 25 bp, Homo sapien
agtagccaaagtcatagagtgcccc

SEQ ID NO: 1686141 - DNA, 25 bp, Homo sapien
tgattcccaaagagatgtgcagcac

SEQ ID NO: 1686142 - DNA, 25 bp, Homo sapien
gaaaacaaagtcaggcggtagtcac

SEQ ID NO: 1686143 - DNA, 25 bp, Homo sapien
ggcggcagctgctgtcggctggacg

SEQ ID NO: 1686144 - DNA, 25 bp, Homo sapien
aaagcctgcggatagacatagtggg

SEQ ID NO: 1686145 - DNA, 25 bp, Homo sapien
tcccggctgcacaaaagcctgcgga

SEQ ID NO: 1686146 - DNA, 25 bp, Homo sapien
gtgtggaatgaccactcccggctgc

SEQ ID NO: 1686147 - DNA, 25 bp, Homo sapien
gcgtatgcagctccagtgtaatcaa

SEQ ID NO: 1686148 - DNA, 25 bp, Homo sapien
gagtattgtgcgtatgcagctccag

SEQ ID NO: 1686149 - DNA, 25 bp, Homo sapien
tgtgcgtatgcagctccagtgtaat

SEQ ID NO: 1686150 - DNA, 25 bp, Homo sapien
gcagctgctgagtattgtgcgtatg

SEQ ID NO: 1686151 - DNA, 25 bp, Homo sapien
tgctggactgcgtagccatagcccc

SEQ ID NO: 1686152 - DNA, 25 bp, Homo sapien
ctgctggactgcgtagccatagccc

SEQ ID NO: 1686153 - DNA, 25 bp, Homo sapien
cccagcagtaacatatcctgcagca

SEQ ID NO: 1686154 - DNA, 25 bp, Homo sapien
ccatagcccccagcagtaacatatc

SEQ ID NO: 1686155 - DNA, 25 bp, Homo sapien
tcccaggtgccgctgcggtgattgg

SEQ ID NO: 1686156 - DNA, 25 bp, Homo sapien
ttgcattcggtctgtctgcagctgc

SEQ ID NO: 1686157 - DNA, 25 bp, Homo sapien
agctgtcccaggtgccgctgcggtg

SEQ ID NO: 1686158 - DNA, 25 bp, Homo sapien
ctattgcattcggtctgtctgcagc

SEQ ID NO: 1686159 - DNA, 25 bp, Homo sapien
atattgctcgctctgtattccctgg

SEQ ID NO: 1686160 - DNA, 25 bp, Homo sapien
tggttcaactagattcaaacagcat

SEQ ID NO: 1686161 - DNA, 25 bp, Homo sapien
taactctgcttcacaatagcatggc

SEQ ID NO: 1686162 - DNA, 25 bp, Homo sapien
tgaagttccgttgttactcctggcg

SEQ ID NO: 1686163 - DNA, 25 bp, Homo sapien
tcctagattgattgttcgatgccca

SEQ ID NO: 1686164 - DNA, 25 bp, Homo sapien
gaaaatagctttggtgcctgtccac

SEQ ID NO: 1686165 - DNA, 25 bp, Homo sapien
gagatagtaagaacaggaccttccg

SEQ ID NO: 1686166 - DNA, 25 bp, Homo sapien
gttctataggccttaagtgactgct

SEQ ID NO: 1686167 - DNA, 25 bp, Homo sapien
tgcctgcctttattcataagccacg

SEQ ID NO: 1686168 - DNA, 25 bp, Homo sapien
gaaggctgttgtagtaaaagcctga

SEQ ID NO: 1686169 - DNA, 25 bp, Homo sapien
gccacgagtcgacacaataaataga

SEQ ID NO: 1686170 - DNA, 25 bp, Homo sapien
caccagcagatacaagtttcccaaa

SEQ ID NO: 1686171 - DNA, 25 bp, Homo sapien
cctttctttagagtgcagcatagta

SEQ ID NO: 1686172 - DNA, 25 bp, Homo sapien
tacagtgtcacatctaaagttcctt

SEQ ID NO: 1686173 - DNA, 25 bp, Homo sapien
gaattgtaatctcagtaaccttgtt

SEQ ID NO: 1686174 - DNA, 25 bp, Homo sapien
aaccttgttgtctcatgtactgtag

SEQ ID NO: 1686175 - DNA, 25 bp, Homo sapien
ataatttgcacaggagagtcatgtc

SEQ ID NO: 1686176 - DNA, 25 bp, Homo sapien
aatccagtgataatggagaaagtcc

SEQ ID NO: 1686177 - DNA, 25 bp, Homo sapien
agagtactctcttatacagtgcaca

SEQ ID NO: 1686178 - DNA, 25 bp, Homo sapien
taacactgtctagtatgggaatact

SEQ ID NO: 1686179 - DNA, 25 bp, Homo sapien
gaaatcattgacctttactacagaa

SEQ ID NO: 1686180 - DNA, 25 bp, Homo sapien
aagagaaatcattgacctttactac

SEQ ID NO: 1686181 - DNA, 25 bp, Homo sapien
tcattgacctttactacagaattag

SEQ ID NO: 1686182 - DNA, 25 bp, Homo sapien
gagaaatcattgacctttactacag

SEQ ID NO: 1686183 - DNA, 25 bp, Homo sapien
tccatatcagtgttaactaacatct

SEQ ID NO: 1686184 - DNA, 25 bp, Homo sapien
cttgcatccatatcagtgttaacta

SEQ ID NO: 1686185 - DNA, 25 bp, Homo sapien
gcatccatatcagtgttaactaaca

SEQ ID NO: 1686186 - DNA, 25 bp, Homo sapien
tcctgtagcctttctacagttttta

SEQ ID NO: 1686187 - DNA, 25 bp, Homo sapien
gcctttagcgaatatcttgcctcac

SEQ ID NO: 1686188 - DNA, 25 bp, Homo sapien
ttgccgcctttagcgaatatcttgc

SEQ ID NO: 1686189 - DNA, 25 bp, Homo sapien
gccgcctttagcgaatatcttgcct

SEQ ID NO: 1686190 - DNA, 25 bp, Homo sapien
ttattttgccgcctttagcgaatat

SEQ ID NO: 1686191 - DNA, 25 bp, Homo sapien
ctcttcaagctctttctcatgtctt

SEQ ID NO: 1686192 - DNA, 25 bp, Homo sapien
tctcttcaagctctttctcatgtct

SEQ ID NO: 1686193 - DNA, 25 bp, Homo sapien
gtgaatagcagaggtatcaggtgag

SEQ ID NO: 1686194 - DNA, 25 bp, Homo sapien
agtgaatagcagaggtatcaggtga

SEQ ID NO: 1686195 - DNA, 25 bp, Homo sapien
ctgagtgaatagcagaggtatcagg

SEQ ID NO: 1686196 - DNA, 25 bp, Homo sapien
tgagtgaatagcagaggtatcaggt

SEQ ID NO: 1686197 - DNA, 25 bp, Homo sapien
ggtggctgtcgttcaagctgctgct

SEQ ID NO: 1686198 - DNA, 25 bp, Homo sapien
tgcgtgctcgcccaaggcaatgtga

SEQ ID NO: 1686199 - DNA, 25 bp, Homo sapien
gttcaagctgctgctcaaaggcaga

SEQ ID NO: 1686200 - DNA, 25 bp, Homo sapien
atgtctccgtatagcagcccacgtg

SEQ ID NO: 1686201 - DNA, 25 bp, Homo sapien
gaacgagggcctcattggctctgtc

SEQ ID NO: 1686202 - DNA, 25 bp, Homo sapien
tattctgtttccctggaacgagggc

SEQ ID NO: 1686203 - DNA, 25 bp, Homo sapien
tcagctattgggtgatgtaaccgga

SEQ ID NO: 1686204 - DNA, 25 bp, Homo sapien
aagttcagggagtgctgcgtcatgc

SEQ ID NO: 1686205 - DNA, 25 bp, Homo sapien
gccatagatttgcactttccaggat

SEQ ID NO: 1686206 - DNA, 25 bp, Homo sapien
cggagtggcccaaaatagacaattt

SEQ ID NO: 1686207 - DNA, 25 bp, Homo sapien
aatctagccctagtgcctgaagtcc

SEQ ID NO: 1686208 - DNA, 25 bp, Homo sapien
caacatgagtaagagctccatggcc

SEQ ID NO: 1686209 - DNA, 25 bp, Homo sapien
tataagcctcttgaaatctaaaaac

SEQ ID NO: 1686210 - DNA, 25 bp, Homo sapien
catgaagtctgatgtggtcgttaat

SEQ ID NO: 1686211 - DNA, 25 bp, Homo sapien
tgattacgtctaaccagaacctgaa

SEQ ID NO: 1686212 - DNA, 25 bp, Homo sapien
taaggaagtagctatcttgctgaaa

SEQ ID NO: 1686213 - DNA, 25 bp, Homo sapien
aagaaaagaaagcaagcaggctggg

SEQ ID NO: 1686214 - DNA, 25 bp, Homo sapien
agaaagcaagcaggctgggcgaggt

SEQ ID NO: 1686215 - DNA, 25 bp, Homo sapien
agaaaagaaagcaagcaggctgggc

SEQ ID NO: 1686216 - DNA, 25 bp, Homo sapien
aaaagaaagcaagcaggctgggcga

SEQ ID NO: 1686217 - DNA, 25 bp, Homo sapien
tatgctctataggttgaggctacag

SEQ ID NO: 1686218 - DNA, 25 bp, Homo sapien
gatcacttatgctctataggttgag

SEQ ID NO: 1686219 - DNA, 25 bp, Homo sapien
cacttatgctctataggttgaggct

SEQ ID NO: 1686220 - DNA, 25 bp, Homo sapien
tgggaggatcacttatgctctatag

SEQ ID NO: 1686221 - DNA, 25 bp, Homo sapien
gcagaatgcactatgcggccagtga

SEQ ID NO: 1686222 - DNA, 25 bp, Homo sapien
tggacacttggcaaactggaggcgc

SEQ ID NO: 1686223 - DNA, 25 bp, Homo sapien
gaggcgcagtgactgagacaaaaga

SEQ ID NO: 1686224 - DNA, 25 bp, Homo sapien
cccacggtgccaggatggcgagcat

SEQ ID NO: 1686225 - DNA, 25 bp, Homo sapien
tctcagctgccgacatgagaacttg

SEQ ID NO: 1686226 - DNA, 25 bp, Homo sapien
tctatcatcatgtgactaaaggaga

SEQ ID NO: 1686227 - DNA, 25 bp, Homo sapien
gctgccgacatgagaacttgatcac

SEQ ID NO: 1686228 - DNA, 25 bp, Homo sapien
aaaatagctccccagctgtcagtgg

SEQ ID NO: 1686229 - DNA, 25 bp, Homo sapien
tatggtctcttctccagatcttctc

SEQ ID NO: 1686230 - DNA, 25 bp, Homo sapien
ccagatcttctcctgagggcctgtt

SEQ ID NO: 1686231 - DNA, 25 bp, Homo sapien
tcttctccagatcttctcctgaggg

SEQ ID NO: 1686232 - DNA, 25 bp, Homo sapien
tctccagatcttctcctgagggcct

SEQ ID NO: 1686233 - DNA, 25 bp, Homo sapien
gggtcccgtcctcggcaatgcaaat

SEQ ID NO: 1686234 - DNA, 25 bp, Homo sapien
aataggagccggtgtcagtcacgct

SEQ ID NO: 1686235 - DNA, 25 bp, Homo sapien
ttccggagctccaaatacagacgag

SEQ ID NO: 1686236 - DNA, 25 bp, Homo sapien
caatgcaaatccgtggtcggccact

SEQ ID NO: 1686237 - DNA, 25 bp, Homo sapien
tgatctatcacttgcacagtttggg

SEQ ID NO: 1686238 - DNA, 25 bp, Homo sapien
tgtggatctgcattgtaccctgaaa

SEQ ID NO: 1686239 - DNA, 25 bp, Homo sapien
tgactgccgagagatagactatctg

SEQ ID NO: 1686240 - DNA, 25 bp, Homo sapien
cttacttggcgaaaggagcaaaggg

SEQ ID NO: 1686241 - DNA, 25 bp, Homo sapien
ggctgacagctcgttccagtctttc

SEQ ID NO: 1686242 - DNA, 25 bp, Homo sapien
caggcggctgacagctcgttccagt

SEQ ID NO: 1686243 - DNA, 25 bp, Homo sapien
ggcggctgacagctcgttccagtct

SEQ ID NO: 1686244 - DNA, 25 bp, Homo sapien
tccaggcggctgacagctcgttcca

SEQ ID NO: 1686245 - DNA, 25 bp, Homo sapien
ttttgtcccatggtatgtaatacag

SEQ ID NO: 1686246 - DNA, 25 bp, Homo sapien
tagaagcaccaatgtaggtctttcc

SEQ ID NO: 1686247 - DNA, 25 bp, Homo sapien
agtaatttttgtcccatggtatgta

SEQ ID NO: 1686248 - DNA, 25 bp, Homo sapien
gcacgggtccaaattcgcctgaaat

SEQ ID NO: 1686249 - DNA, 25 bp, Homo sapien
caccatactgtccatcagcttgtca

SEQ ID NO: 1686250 - DNA, 25 bp, Homo sapien
catactgtccatcagcttgtcaaag

SEQ ID NO: 1686251 - DNA, 25 bp, Homo sapien
tactgtccatcagcttgtcaaaggc

SEQ ID NO: 1686252 - DNA, 25 bp, Homo sapien
tcggccaccatactgtccatcagct

SEQ ID NO: 1686253 - DNA, 25 bp, Homo sapien
gggagacacagctgccatgacaact

SEQ ID NO: 1686254 - DNA, 25 bp, Homo sapien
ggtgggagacacagctgccatgaca

SEQ ID NO: 1686255 - DNA, 25 bp, Homo sapien
gacacagctgccatgacaacttgta

SEQ ID NO: 1686256 - DNA, 25 bp, Homo sapien
ggagacacagctgccatgacaactt

SEQ ID NO: 1686257 - DNA, 25 bp, Homo sapien
ttgtacaggcaataacgagttatgc

SEQ ID NO: 1686258 - DNA, 25 bp, Homo sapien
cagctttgcctgacttactcgacca

SEQ ID NO: 1686259 - DNA, 25 bp, Homo sapien
gattcagcaactccagtgaggattc

SEQ ID NO: 1686260 - DNA, 25 bp, Homo sapien
ctaatgtcattgtggaggttcttcc

SEQ ID NO: 1686261 - DNA, 25 bp, Homo sapien
aagaaagttgctggttactctcaag

SEQ ID NO: 1686262 - DNA, 25 bp, Homo sapien
taatgaaagggtatttttgaggaga

SEQ ID NO: 1686263 - DNA, 25 bp, Homo sapien
catgctcagctaatgaaagggtatt

SEQ ID NO: 1686264 - DNA, 25 bp, Homo sapien
caataccgtgatagtggcccactgc

SEQ ID NO: 1686265 - DNA, 25 bp, Homo sapien
taactactggtctaggtttggcttg

SEQ ID NO: 1686266 - DNA, 25 bp, Homo sapien
gggtctacaggtcctagcatgccac

SEQ ID NO: 1686267 - DNA, 25 bp, Homo sapien
gcttgattcaagctgtccgccacag

SEQ ID NO: 1686268 - DNA, 25 bp, Homo sapien
tactagctattatgggcacagtgct

SEQ ID NO: 1686269 - DNA, 25 bp, Homo sapien
gctgagattgtgccactgcactcca

SEQ ID NO: 1686270 - DNA, 25 bp, Homo sapien
ggagttcaagaccagcctggccaac

SEQ ID NO: 1686271 - DNA, 25 bp, Homo sapien
gagatgggtggatcacctgaggtca

SEQ ID NO: 1686272 - DNA, 25 bp, Homo sapien
tacaatccaagcactttcggaggcc

SEQ ID NO: 1686273 - DNA, 25 bp, Homo sapien
caaagtcatttcttgcccgatcgct

SEQ ID NO: 1686274 - DNA, 25 bp, Homo sapien
aagtcatttcttgcccgatcgctat

SEQ ID NO: 1686275 - DNA, 25 bp, Homo sapien
tcatttcttgcccgatcgctatcat

SEQ ID NO: 1686276 - DNA, 25 bp, Homo sapien
cctttcagactccaaagtcatttct

SEQ ID NO: 1686277 - DNA, 25 bp, Homo sapien
cagggtagagctagcaaggagccca

SEQ ID NO: 1686278 - DNA, 25 bp, Homo sapien
taaaaatgatgacgtaggccgggcg

SEQ ID NO: 1686279 - DNA, 25 bp, Homo sapien
tgtgtcaccttagtccaagccctaa

SEQ ID NO: 1686280 - DNA, 25 bp, Homo sapien
gaatcaattacggtgtaacacgtga

SEQ ID NO: 1686281 - DNA, 25 bp, Homo sapien
tttcagctgcattactggtttcagt

SEQ ID NO: 1686282 - DNA, 25 bp, Homo sapien
cattaataggactgttgccctggca

SEQ ID NO: 1686283 - DNA, 25 bp, Homo sapien
caataagaaacagctccaatgtgtc

SEQ ID NO: 1686284 - DNA, 25 bp, Homo sapien
gttaaggtgacctcaatgccccacc

SEQ ID NO: 1686285 - DNA, 25 bp, Homo sapien
taaaatccagaacgtaccctgcttg

SEQ ID NO: 1686286 - DNA, 25 bp, Homo sapien
aaggctacaactcagccacagctgc

SEQ ID NO: 1686287 - DNA, 25 bp, Homo sapien
taacacaattctcgggctcctcaag

SEQ ID NO: 1686288 - DNA, 25 bp, Homo sapien
catgtgtgcacaataaaacggagtc

SEQ ID NO: 1686289 - DNA, 25 bp, Homo sapien
ccgtttgataaggattccgttcact

SEQ ID NO: 1686290 - DNA, 25 bp, Homo sapien
tttgataaggattccgttcactgtg

SEQ ID NO: 1686291 - DNA, 25 bp, Homo sapien
gataaggattccgttcactgtggtc

SEQ ID NO: 1686292 - DNA, 25 bp, Homo sapien
tgtattaaccgtttgataaggattc

SEQ ID NO: 1686293 - DNA, 25 bp, Homo sapien
ggttctcagataggctggtggaaca

SEQ ID NO: 1686294 - DNA, 25 bp, Homo sapien
ggtggaacatctattgccgtgtggt

SEQ ID NO: 1686295 - DNA, 25 bp, Homo sapien
gcaaccggggttctcagataggctg

SEQ ID NO: 1686296 - DNA, 25 bp, Homo sapien
taggctggtggaacatctattgccg

SEQ ID NO: 1686297 - DNA, 25 bp, Homo sapien
tgtgggtgaacatgtgcatctatct

SEQ ID NO: 1686298 - DNA, 25 bp, Homo sapien
ttcagtaacgacaaataatcgaggg

SEQ ID NO: 1686299 - DNA, 25 bp, Homo sapien
cagggctcagaaagcctgggcaacc

SEQ ID NO: 1686300 - DNA, 25 bp, Homo sapien
gacaaagtcaagtctgtgcattctg

SEQ ID NO: 1686301 - DNA, 25 bp, Homo sapien
attccaacttccgatcctcttgctt

SEQ ID NO: 1686302 - DNA, 25 bp, Homo sapien
ttcattccaacttccgatcctcttg

SEQ ID NO: 1686303 - DNA, 25 bp, Homo sapien
gaaagttccatgagtcccttcaacc

SEQ ID NO: 1686304 - DNA, 25 bp, Homo sapien
tccatgagtcccttcaaccagacag

SEQ ID NO: 1686305 - DNA, 25 bp, Homo sapien
caatcttggatgtgactgacttctc

SEQ ID NO: 1686306 - DNA, 25 bp, Homo sapien
tcgtattaacgttttggcatctgac

SEQ ID NO: 1686307 - DNA, 25 bp, Homo sapien
cctgattgctgggatatactgctca

SEQ ID NO: 1686308 - DNA, 25 bp, Homo sapien
ggttaatttcatccccgtgtcaata

SEQ ID NO: 1686309 - DNA, 25 bp, Homo sapien
tgtgcccacattctattctacacct

SEQ ID NO: 1686310 - DNA, 25 bp, Homo sapien
ctctttcacactgtgcccacattct

SEQ ID NO: 1686311 - DNA, 25 bp, Homo sapien
cacactgtgcccacattctattcta

SEQ ID NO: 1686312 - DNA, 25 bp, Homo sapien
cctctttcacactgtgcccacattc

SEQ ID NO: 1686313 - DNA, 25 bp, Homo sapien
ggttgttggtactgagaggccatca

SEQ ID NO: 1686314 - DNA, 25 bp, Homo sapien
gcccgctgggcctggaaagcactgt

SEQ ID NO: 1686315 - DNA, 25 bp, Homo sapien
ttggtactgagaggccatcagaagg

SEQ ID NO: 1686316 - DNA, 25 bp, Homo sapien
tgggcctggaaagcactgtgcacca

SEQ ID NO: 1686317 - DNA, 25 bp, Homo sapien
tcaggtggaagtagtaggacggtgt

SEQ ID NO: 1686318 - DNA, 25 bp, Homo sapien
caggtggaagtagtaggacggtgtt

SEQ ID NO: 1686319 - DNA, 25 bp, Homo sapien
tgtcaatgaatcctttatccggctt

SEQ ID NO: 1686320 - DNA, 25 bp, Homo sapien
gctgtcaatgaatcctttatccggc

SEQ ID NO: 1686321 - DNA, 25 bp, Homo sapien
cagggctgtcaatgaatcctttatc

SEQ ID NO: 1686322 - DNA, 25 bp, Homo sapien
caatcagggctgtcaatgaatcctt

SEQ ID NO: 1686323 - DNA, 25 bp, Homo sapien
tagtctggaaaatccctatgagttt

SEQ ID NO: 1686324 - DNA, 25 bp, Homo sapien
cattttagccaaaccaagtgactca

SEQ ID NO: 1686325 - DNA, 25 bp, Homo sapien
tgcagctaggaatgaccagaagact

SEQ ID NO: 1686326 - DNA, 25 bp, Homo sapien
aagtgactcactctggtggactggc

SEQ ID NO: 1686327 - DNA, 25 bp, Homo sapien
gccgtggagcaagagccttcagctg

SEQ ID NO: 1686328 - DNA, 25 bp, Homo sapien
cccagggccgtggagcaagagcctt

SEQ ID NO: 1686329 - DNA, 25 bp, Homo sapien
agatgagtgacggaccccaccatgg

SEQ ID NO: 1686330 - DNA, 25 bp, Homo sapien
agctggagacgtacagtgggcacca

SEQ ID NO: 1686331 - DNA, 25 bp, Homo sapien
ggaaatgaatggagcccatcatctt

SEQ ID NO: 1686332 - DNA, 25 bp, Homo sapien
tgcccacaacatcttcgctatcagg

SEQ ID NO: 1686333 - DNA, 25 bp, Homo sapien
tctttgatttcggtctgccaaaaaa

SEQ ID NO: 1686334 - DNA, 25 bp, Homo sapien
agagtccatccgtctttgattttgg

SEQ ID NO: 1686335 - DNA, 25 bp, Homo sapien
gcagtggcctagttggaagtttaga

SEQ ID NO: 1686336 - DNA, 25 bp, Homo sapien
tagttggaagtttagaataactgac

SEQ ID NO: 1686337 - DNA, 25 bp, Homo sapien
gagctctgagaggatttaatgcaga

SEQ ID NO: 1686338 - DNA, 25 bp, Homo sapien
gctctgagaggatttaatgcagagc

SEQ ID NO: 1686339 - DNA, 25 bp, Homo sapien
ttaggaaaacacattcggaagttgc

SEQ ID NO: 1686340 - DNA, 25 bp, Homo sapien
gaaagctcatatcaagcagtatgta

SEQ ID NO: 1686341 - DNA, 25 bp, Homo sapien
cggaagttgccagaataaattatac

SEQ ID NO: 1686342 - DNA, 25 bp, Homo sapien
aaatcccatcagtacgttcctggcg

SEQ ID NO: 1686343 - DNA, 25 bp, Homo sapien
tctggaagatactttatattggtta

SEQ ID NO: 1686344 - DNA, 25 bp, Homo sapien
tccctagaacaaactctaaagtctg

SEQ ID NO: 1686345 - DNA, 25 bp, Homo sapien
ccctagaacaaactctaaagtctga

SEQ ID NO: 1686346 - DNA, 25 bp, Homo sapien
acagagtcttctggaagatacttta

SEQ ID NO: 1686347 - DNA, 25 bp, Homo sapien
ttttccgatatgggtttcagaagtg

SEQ ID NO: 1686348 - DNA, 25 bp, Homo sapien
gggtttcagaagtgcggccacgtca

SEQ ID NO: 1686349 - DNA, 25 bp, Homo sapien
gtttcagaagtgcggccacgtcatt

SEQ ID NO: 1686350 - DNA, 25 bp, Homo sapien
cttttccgatatgggtttcagaagt

SEQ ID NO: 1686351 - DNA, 25 bp, Homo sapien
tgctttcgctgacggccgaaagatg

SEQ ID NO: 1686352 - DNA, 25 bp, Homo sapien
ggcagggatgctttcgctgacggcc

SEQ ID NO: 1686353 - DNA, 25 bp, Homo sapien
gggatgctttcgctgacggccgaaa

SEQ ID NO: 1686354 - DNA, 25 bp, Homo sapien
cagggatgctttcgctgacggccga

SEQ ID NO: 1686355 - DNA, 25 bp, Homo sapien
taagctactagttctcctaaatact

SEQ ID NO: 1686356 - DNA, 25 bp, Homo sapien
cctaaatactccaaacgtgtgatga

SEQ ID NO: 1686357 - DNA, 25 bp, Homo sapien
tgatgaggtgaagaggcaacattgc

SEQ ID NO: 1686358 - DNA, 25 bp, Homo sapien
gaggcaacattgcacctggactcac

SEQ ID NO: 1686359 - DNA, 25 bp, Homo sapien
ggaagaagcttccttcagtgcaagg

SEQ ID NO: 1686360 - DNA, 25 bp, Homo sapien
taaacagggtaggagaaagtggatg

SEQ ID NO: 1686361 - DNA, 25 bp, Homo sapien
cagaaagcttgaactttaaacaggg

SEQ ID NO: 1686362 - DNA, 25 bp, Homo sapien
agaaagtggatgcattcagcccagg

SEQ ID NO: 1686363 - DNA, 25 bp, Homo sapien
taaaaggtggcagcgtcattcatct

SEQ ID NO: 1686364 - DNA, 25 bp, Homo sapien
tcaaggaagtctgcctttctactcc

SEQ ID NO: 1686365 - DNA, 25 bp, Homo sapien
tcactgctcacagtcctgtttaaac

SEQ ID NO: 1686366 - DNA, 25 bp, Homo sapien
tactcctctacctacggtcctactg

SEQ ID NO: 1686367 - DNA, 25 bp, Homo sapien
gtgggcagcagtgacgcacaaatga

SEQ ID NO: 1686368 - DNA, 25 bp, Homo sapien
gatgtatgcttgaagttcactccaa

SEQ ID NO: 1686369 - DNA, 25 bp, Homo sapien
tgtggtgttccttgatgtatgcttg

SEQ ID NO: 1686370 - DNA, 25 bp, Homo sapien
ttcacccaatccacatgacgcaaat

SEQ ID NO: 1686371 - DNA, 25 bp, Homo sapien
aatatgacttcacccaatccacatg

SEQ ID NO: 1686372 - DNA, 25 bp, Homo sapien
ttagttgtatcttgcactgtgcatt

SEQ ID NO: 1686373 - DNA, 25 bp, Homo sapien
gtatcttgcactgtgcatttcagtg

SEQ ID NO: 1686374 - DNA, 25 bp, Homo sapien
ttgtatcttgcactgtgcatttcag

SEQ ID NO: 1686375 - DNA, 25 bp, Homo sapien
agttgtatcttgcactgtgcatttc

SEQ ID NO: 1686376 - DNA, 25 bp, Homo sapien
catttcaccctgacaactgaacagg

SEQ ID NO: 1686377 - DNA, 25 bp, Homo sapien
aaatcgctggtctcaaagtttggca

SEQ ID NO: 1686378 - DNA, 25 bp, Homo sapien
cacacacacgtagactctcttcaaa

SEQ ID NO: 1686379 - DNA, 25 bp, Homo sapien
caaagtttggcatttcaccctgaca

SEQ ID NO: 1686380 - DNA, 25 bp, Homo sapien
agtcccgtggtgcaatgcaggctga

SEQ ID NO: 1686381 - DNA, 25 bp, Homo sapien
agagtcccgtggtgcaatgcaggct

SEQ ID NO: 1686382 - DNA, 25 bp, Homo sapien
tagagtcccgtggtgcaatgcaggc

SEQ ID NO: 1686383 - DNA, 25 bp, Homo sapien
gagtcccgtggtgcaatgcaggctg

SEQ ID NO: 1686384 - DNA, 25 bp, Homo sapien
acctcaaacacaatgcagtgaaacc

SEQ ID NO: 1686385 - DNA, 25 bp, Homo sapien
gatgactcccaacacgtacatcggg

SEQ ID NO: 1686386 - DNA, 25 bp, Homo sapien
ttggatgtctctcctatacctcccg

SEQ ID NO: 1686387 - DNA, 25 bp, Homo sapien
tatttgccggtcttttctaggtaga

SEQ ID NO: 1686388 - DNA, 25 bp, Homo sapien
gtatattaacttgctagcccttatt

SEQ ID NO: 1686389 - DNA, 25 bp, Homo sapien
tcacaggttcaaccgcctcgcaggt

SEQ ID NO: 1686390 - DNA, 25 bp, Homo sapien
tagcccttattttagagagctttga

SEQ ID NO: 1686391 - DNA, 25 bp, Homo sapien
gcctcgcaggttcaataaatgtata

SEQ ID NO: 1686392 - DNA, 25 bp, Homo sapien
aaacatgaacatgataagcctctca

SEQ ID NO: 1686393 - DNA, 25 bp, Homo sapien
aaagaatcccaaatggccttgtgta

SEQ ID NO: 1686394 - DNA, 25 bp, Homo sapien
ctcccaaagtgacaactgaatattt

SEQ ID NO: 1686395 - DNA, 25 bp, Homo sapien
catatagcataataggagggagtga

SEQ ID NO: 1686396 - DNA, 25 bp, Homo sapien
cagaatgaacacaagctatatggtt

SEQ ID NO: 1686397 - DNA, 25 bp, Homo sapien
aagctatatggttggatctgcacat

SEQ ID NO: 1686398 - DNA, 25 bp, Homo sapien
tgcagaatgaacacaagctatatgg

SEQ ID NO: 1686399 - DNA, 25 bp, Homo sapien
aatgaacacaagctatatggttgga

SEQ ID NO: 1686400 - DNA, 25 bp, Homo sapien
tttaccagtgacagtcttgagaaac

SEQ ID NO: 1686401 - DNA, 25 bp, Homo sapien
atttaccagtgacagtcttgagaaa

SEQ ID NO: 1686402 - DNA, 25 bp, Homo sapien
catttaccagtgacagtcttgagaa

SEQ ID NO: 1686403 - DNA, 25 bp, Homo sapien
aggaacctgactgagatgggtaaga

SEQ ID NO: 1686404 - DNA, 25 bp, Homo sapien
ggaacctgactgagatgggtaagac

SEQ ID NO: 1686405 - DNA, 25 bp, Homo sapien
caggaacctgactgagatgggtaag

SEQ ID NO: 1686406 - DNA, 25 bp, Homo sapien
gaacctgactgagatgggtaagaca

SEQ ID NO: 1686407 - DNA, 25 bp, Homo sapien
tatccaaaatattgtatatctgtga

SEQ ID NO: 1686408 - DNA, 25 bp, Homo sapien
acttttgaaccctcaagtagaactg

SEQ ID NO: 1686409 - DNA, 25 bp, Homo sapien
taaaactggtaggatagaaacacac

SEQ ID NO: 1686410 - DNA, 25 bp, Homo sapien
tagaactgtatacctataataggga

SEQ ID NO: 1686411 - DNA, 25 bp, Homo sapien
gcccttgctgggattttgcccgaga

SEQ ID NO: 1686412 - DNA, 25 bp, Homo sapien
gcacacctgtgcatcatgggtctgt

SEQ ID NO: 1686413 - DNA, 25 bp, Homo sapien
gagagtcgaaacctgctgccaatga

SEQ ID NO: 1686414 - DNA, 25 bp, Homo sapien
ttgaagcctgagcaaaggctcccag

SEQ ID NO: 1686415 - DNA, 25 bp, Homo sapien
ctgatactgtggatgctacaggacc

SEQ ID NO: 1686416 - DNA, 25 bp, Homo sapien
aaaacgctgatactgtggatgctac

SEQ ID NO: 1686417 - DNA, 25 bp, Homo sapien
gagaggacagaaaacgctgatactg

SEQ ID NO: 1686418 - DNA, 25 bp, Homo sapien
ggacagaaaacgctgatactgtgga

SEQ ID NO: 1686419 - DNA, 25 bp, Homo sapien
gccttcattctcgaaaagtggaggt

SEQ ID NO: 1686420 - DNA, 25 bp, Homo sapien
cttcattctcgaaaagtggaggtgg

SEQ ID NO: 1686421 - DNA, 25 bp, Homo sapien
ttgccttcattctcgaaaagtggag

SEQ ID NO: 1686422 - DNA, 25 bp, Homo sapien
ttttgccttcattctcgaaaagtgg

SEQ ID NO: 1686423 - DNA, 25 bp, Homo sapien
aattgcttctccctggttaagttgg

SEQ ID NO: 1686424 - DNA, 25 bp, Homo sapien
tctccctggttaagttgggcaaata

SEQ ID NO: 1686425 - DNA, 25 bp, Homo sapien
cttttgtaattgcttctccctggtt

SEQ ID NO: 1686426 - DNA, 25 bp, Homo sapien
ttgcttctccctggttaagttgggc

SEQ ID NO: 1686427 - DNA, 25 bp, Homo sapien
gcacagtggtccatttagaacccag

SEQ ID NO: 1686428 - DNA, 25 bp, Homo sapien
tgagcccgtctgcatggacataagg

SEQ ID NO: 1686429 - DNA, 25 bp, Homo sapien
gacaagcctgtacactgcttcagga

SEQ ID NO: 1686430 - DNA, 25 bp, Homo sapien
tagctccaagcccagtatagtggga

SEQ ID NO: 1686431 - DNA, 25 bp, Homo sapien
ttgtatgtcttctggtcatctgtga

SEQ ID NO: 1686432 - DNA, 25 bp, Homo sapien
atgtgggacttggagtgtgactttt

SEQ ID NO: 1686433 - DNA, 25 bp, Homo sapien
gagattgagtttgccctccttgagc

SEQ ID NO: 1686434 - DNA, 25 bp, Homo sapien
ccttgagcccgcaggctgggatttt

SEQ ID NO: 1686435 - DNA, 25 bp, Homo sapien
aatagttgatttttcgcatttgaaa

SEQ ID NO: 1686436 - DNA, 25 bp, Homo sapien
gttgatttttcgcatttgaaaatgt

SEQ ID NO: 1686437 - DNA, 25 bp, Homo sapien
tagttgatttttcgcatttgaaaat

SEQ ID NO: 1686438 - DNA, 25 bp, Homo sapien
ttgatttttcgcatttgaaaatgta

SEQ ID NO: 1686439 - DNA, 25 bp, Homo sapien
tgtcctgggagttgatcacttccac

SEQ ID NO: 1686440 - DNA, 25 bp, Homo sapien
tttgaatgtcctgggagttgatcac

SEQ ID NO: 1686441 - DNA, 25 bp, Homo sapien
tggatttgaatgtcctgggagttga

SEQ ID NO: 1686442 - DNA, 25 bp, Homo sapien
caccaggccgagttttttacagttg

SEQ ID NO: 1686443 - DNA, 25 bp, Homo sapien
caatctcataccagttagcatggcg

SEQ ID NO: 1686444 - DNA, 25 bp, Homo sapien
tctcataccagttagcatggcggtc

SEQ ID NO: 1686445 - DNA, 25 bp, Homo sapien
cataccagttagcatggcggtcatt

SEQ ID NO: 1686446 - DNA, 25 bp, Homo sapien
taccagttagcatggcggtcattaa

SEQ ID NO: 1686447 - DNA, 25 bp, Homo sapien
tcttctgacttacctaggattatca

SEQ ID NO: 1686448 - DNA, 25 bp, Homo sapien
tggttacagtggcttatagttctcc

SEQ ID NO: 1686449 - DNA, 25 bp, Homo sapien
gctctacataatggtataagactgt

SEQ ID NO: 1686450 - DNA, 25 bp, Homo sapien
ggagttccacagacactcaattcag

SEQ ID NO: 1686451 - DNA, 25 bp, Homo sapien
tcagtggctgaatttgaggcttaca

SEQ ID NO: 1686452 - DNA, 25 bp, Homo sapien
cacacaagtggattctcaaacctca

SEQ ID NO: 1686453 - DNA, 25 bp, Homo sapien
cacaaccctgttagtagattcaaaa

SEQ ID NO: 1686454 - DNA, 25 bp, Homo sapien
gaataggataggtgtcactcaggga

SEQ ID NO: 1686455 - DNA, 25 bp, Homo sapien
catcctgagggataagtatgttcat

SEQ ID NO: 1686456 - DNA, 25 bp, Homo sapien
tcatttcagatgacttggcgctcac

SEQ ID NO: 1686457 - DNA, 25 bp, Homo sapien
tcactgaggtatatgtggcaacctt

SEQ ID NO: 1686458 - DNA, 25 bp, Homo sapien
tggcgctcacgatctcacagtctaa

SEQ ID NO: 1686459 - DNA, 25 bp, Homo sapien
gcaattgaccccttaggctgaggga

SEQ ID NO: 1686460 - DNA, 25 bp, Homo sapien
tctgctcaaggagatcaacctgtgt

SEQ ID NO: 1686461 - DNA, 25 bp, Homo sapien
taatgtatgacacgtggctgagcag

SEQ ID NO: 1686462 - DNA, 25 bp, Homo sapien
tgttgattgctgtgtaggccctggc

SEQ ID NO: 1686463 - DNA, 25 bp, Homo sapien
acagcacgcggccaagaccttggtt

SEQ ID NO: 1686464 - DNA, 25 bp, Homo sapien
gctttaacagttacaggtgcctggg

SEQ ID NO: 1686465 - DNA, 25 bp, Homo sapien
tacactcatcctttaggccggtgga

SEQ ID NO: 1686466 - DNA, 25 bp, Homo sapien
tagcagatccagtcccatgcagctg

SEQ ID NO: 1686467 - DNA, 25 bp, Homo sapien
tgaagagggccacaaggtaattgac

SEQ ID NO: 1686468 - DNA, 25 bp, Homo sapien
tccaaccgagaacatgtgaagaggg

SEQ ID NO: 1686469 - DNA, 25 bp, Homo sapien
tgtgaagagggccacaaggtaattg

SEQ ID NO: 1686470 - DNA, 25 bp, Homo sapien
cagctccaaccgagaacatgtgaag

SEQ ID NO: 1686471 - DNA, 25 bp, Homo sapien
catggcaggtcctctgtgttgttcc

SEQ ID NO: 1686472 - DNA, 25 bp, Homo sapien
tccattcccacaccataatgcccat

SEQ ID NO: 1686473 - DNA, 25 bp, Homo sapien
attcccacaccataatgcccatggc

SEQ ID NO: 1686474 - DNA, 25 bp, Homo sapien
tccatccattcccacaccataatgc

SEQ ID NO: 1686475 - DNA, 25 bp, Homo sapien
catgataggcaaagaaattcgatcg

SEQ ID NO: 1686476 - DNA, 25 bp, Homo sapien
ttcagtgattaacttggatccatcc

SEQ ID NO: 1686477 - DNA, 25 bp, Homo sapien
gcaaagttgcgaggtattacatagc

SEQ ID NO: 1686478 - DNA, 25 bp, Homo sapien
cgttggaggccaaagctaaagcagt

SEQ ID NO: 1686479 - DNA, 25 bp, Homo sapien
aaatgcccacgaggcgtgccagaaa

SEQ ID NO: 1686480 - DNA, 25 bp, Homo sapien
tatatatgcttgtactgggcctgca

SEQ ID NO: 1686481 - DNA, 25 bp, Homo sapien
tatattgtgcacatttttccaagtt

SEQ ID NO: 1686482 - DNA, 25 bp, Homo sapien
ataatatattgtgcacatttttcca

SEQ ID NO: 1686483 - DNA, 25 bp, Homo sapien
taataatatattgtgcacatttttc

SEQ ID NO: 1686484 - DNA, 25 bp, Homo sapien
aatatattgtgcacatttttccaag

SEQ ID NO: 1686485 - DNA, 25 bp, Homo sapien
aagtggtgcatacctcttaaagtgc

SEQ ID NO: 1686486 - DNA, 25 bp, Homo sapien
tatctatttcattgatgggttgccc

SEQ ID NO: 1686487 - DNA, 25 bp, Homo sapien
tatgatcattgttctcaggctcgac

SEQ ID NO: 1686488 - DNA, 25 bp, Homo sapien
cctccaactgtgtaggtgttatcta

SEQ ID NO: 1686489 - DNA, 25 bp, Homo sapien
ccgtcaccaccgcagcaaccgcagg

SEQ ID NO: 1686490 - DNA, 25 bp, Homo sapien
ggatacctgtcactgctccgtttcc

SEQ ID NO: 1686491 - DNA, 25 bp, Homo sapien
cctcaggagcaacgcccgccgccag

SEQ ID NO: 1686492 - DNA, 25 bp, Homo sapien
gcagcaaccgcaggcgtcaacaatc

SEQ ID NO: 1686493 - DNA, 25 bp, Homo sapien
tcccctccgccatcgtcctgcccgg

SEQ ID NO: 1686494 - DNA, 25 bp, Homo sapien
gtcccctccgccatcgtcctgcccg

SEQ ID NO: 1686495 - DNA, 25 bp, Homo sapien
cccctccgccatcgtcctgcccggg

SEQ ID NO: 1686496 - DNA, 25 bp, Homo sapien
ccctccgccatcgtcctgcccggga

SEQ ID NO: 1686497 - DNA, 25 bp, Homo sapien
gggcatgggacggcggtggtaggag

SEQ ID NO: 1686498 - DNA, 25 bp, Homo sapien
gacggcggtggtaggagggcctctc

SEQ ID NO: 1686499 - DNA, 25 bp, Homo sapien
acggcggtggtaggagggcctctca

SEQ ID NO: 1686500 - DNA, 25 bp, Homo sapien
catgggacggcggtggtaggagggc

SEQ ID NO: 1686501 - DNA, 25 bp, Homo sapien
gctcagccgagctggtctctctcgt

SEQ ID NO: 1686502 - DNA, 25 bp, Homo sapien
ttgccgggagtactcgcgggcgctc

SEQ ID NO: 1686503 - DNA, 25 bp, Homo sapien
ggtctctctcgtggcgccgcggctt

SEQ ID NO: 1686504 - DNA, 25 bp, Homo sapien
tcgggcgcctcgcagcccgcctgct

SEQ ID NO: 1686505 - DNA, 25 bp, Homo sapien
tgaggtagccgcagtaggactgcca

SEQ ID NO: 1686506 - DNA, 25 bp, Homo sapien
gaggtagccgcagtaggactgccac

SEQ ID NO: 1686507 - DNA, 25 bp, Homo sapien
ggtagccgcagtaggactgccacag

SEQ ID NO: 1686508 - DNA, 25 bp, Homo sapien
tagccgcagtaggactgccacagcc

SEQ ID NO: 1686509 - DNA, 25 bp, Homo sapien
agcgccgcccgaagggaagctctgc

SEQ ID NO: 1686510 - DNA, 25 bp, Homo sapien
ctgggggactgcagcgccgcccgaa

SEQ ID NO: 1686511 - DNA, 25 bp, Homo sapien
gcagtaggctgggaaggcggccagg

SEQ ID NO: 1686512 - DNA, 25 bp, Homo sapien
gctgcagtaggctgggaaggcggcc

SEQ ID NO: 1686513 - DNA, 25 bp, Homo sapien
tgctgatgccggcagctgtccgcgg

SEQ ID NO: 1686514 - DNA, 25 bp, Homo sapien
gacgcctgcacgtgaggagcccggg

SEQ ID NO: 1686515 - DNA, 25 bp, Homo sapien
cgacgcctgcacgtgaggagcccgg

SEQ ID NO: 1686516 - DNA, 25 bp, Homo sapien
tgccggcagctgtccgcgggtcagg

SEQ ID NO: 1686517 - DNA, 25 bp, Homo sapien
gcctgtcgcccggtctcgctcgggc

SEQ ID NO: 1686518 - DNA, 25 bp, Homo sapien
tgcctgtcgcccggtctcgctcggg

SEQ ID NO: 1686519 - DNA, 25 bp, Homo sapien
tcgctcgggcttcgcgaaggggctg

SEQ ID NO: 1686520 - DNA, 25 bp, Homo sapien
ggtctcgctcgggcttcgcgaaggg

SEQ ID NO: 1686521 - DNA, 25 bp, Homo sapien
ctgtgggccaaggatggaataacat

SEQ ID NO: 1686522 - DNA, 25 bp, Homo sapien
aaggatggaataacatattctctgc

SEQ ID NO: 1686523 - DNA, 25 bp, Homo sapien
caaggatggaataacatattctctg

SEQ ID NO: 1686524 - DNA, 25 bp, Homo sapien
tgggccaaggatggaataacatatt

SEQ ID NO: 1686525 - DNA, 25 bp, Homo sapien
aagaaatccaccatctctgccataa

SEQ ID NO: 1686526 - DNA, 25 bp, Homo sapien
tgcttaagacaatggttgcttttat

SEQ ID NO: 1686527 - DNA, 25 bp, Homo sapien
gaagagaataaagaaatccaccatc

SEQ ID NO: 1686528 - DNA, 25 bp, Homo sapien
tcccactgaggtgcataatgcttaa

SEQ ID NO: 1686529 - DNA, 25 bp, Homo sapien
caaggaccctgaaatttgactgcac

SEQ ID NO: 1686530 - DNA, 25 bp, Homo sapien
gagactccacaagatagcaagaggg

SEQ ID NO: 1686531 - DNA, 25 bp, Homo sapien
gggacttgccccacagtatgtgcaa

SEQ ID NO: 1686532 - DNA, 25 bp, Homo sapien
aaagtactcaggaagtggtaactgc

SEQ ID NO: 1686533 - DNA, 25 bp, Homo sapien
attagttaccagaacagtagcactg

SEQ ID NO: 1686534 - DNA, 25 bp, Homo sapien
gggaacctaggatactatggaaaca

SEQ ID NO: 1686535 - DNA, 25 bp, Homo sapien
tcgtggagggtctaacctagcaaag

SEQ ID NO: 1686536 - DNA, 25 bp, Homo sapien
tgaatgaatttacacggtccctgct

SEQ ID NO: 1686537 - DNA, 25 bp, Homo sapien
attatataatgcatagcaaacttag

SEQ ID NO: 1686538 - DNA, 25 bp, Homo sapien
ttatataatgcatagcaaacttaga

SEQ ID NO: 1686539 - DNA, 25 bp, Homo sapien
gttaaatattaattcttgctgaagt

SEQ ID NO: 1686540 - DNA, 25 bp, Homo sapien
attcttgctgaagtcagtagcttac

SEQ ID NO: 1686541 - DNA, 25 bp, Homo sapien
ttaattcttgctgaagtcagtagct

SEQ ID NO: 1686542 - DNA, 25 bp, Homo sapien
aaatattaattcttgctgaagtcag

SEQ ID NO: 1686543 - DNA, 25 bp, Homo sapien
agcactgatgtatcacatgtcacaa

SEQ ID NO: 1686544 - DNA, 25 bp, Homo sapien
cccgacttggtgcaataagcactga

SEQ ID NO: 1686545 - DNA, 25 bp, Homo sapien
aataagcactgatgtatcacatgtc

SEQ ID NO: 1686546 - DNA, 25 bp, Homo sapien
gaatcactaaaacccgacttggtgc

SEQ ID NO: 1686547 - DNA, 25 bp, Homo sapien
caatggttcctgctacaatgtcata

SEQ ID NO: 1686548 - DNA, 25 bp, Homo sapien
taccacaatggttcctgctacaatg

SEQ ID NO: 1686549 - DNA, 25 bp, Homo sapien
cacaatggttcctgctacaatgtca

SEQ ID NO: 1686550 - DNA, 25 bp, Homo sapien
ccacaatggttcctgctacaatgtc

SEQ ID NO: 1686551 - DNA, 25 bp, Homo sapien
ccagggatactgatggccttgatac

SEQ ID NO: 1686552 - DNA, 25 bp, Homo sapien
tactttcagagtagtcacctgcatc

SEQ ID NO: 1686553 - DNA, 25 bp, Homo sapien
tctggacaagttctttggcattcaa

SEQ ID NO: 1686554 - DNA, 25 bp, Homo sapien
aatcatcaattagtgtaacccaggg

SEQ ID NO: 1686555 - DNA, 25 bp, Homo sapien
taactgggacatctaggaaaagcac

SEQ ID NO: 1686556 - DNA, 25 bp, Homo sapien
ggtaagggaactgctaggcctgcct

SEQ ID NO: 1686557 - DNA, 25 bp, Homo sapien
tacatcattacgagagggaactgca

SEQ ID NO: 1686558 - DNA, 25 bp, Homo sapien
ggtatatctcagcacagctaactgg

SEQ ID NO: 1686559 - DNA, 25 bp, Homo sapien
tcaagtcactgaagggaacaaatcc

SEQ ID NO: 1686560 - DNA, 25 bp, Homo sapien
ccccagcggcaaaagtggtgtataa

SEQ ID NO: 1686561 - DNA, 25 bp, Homo sapien
ggaactttatccaggcaaacatggg

SEQ ID NO: 1686562 - DNA, 25 bp, Homo sapien
taaaccagtgggagcaaagttcagt

SEQ ID NO: 1686563 - DNA, 25 bp, Homo sapien
ataatacaaattggtggcatacaaa

SEQ ID NO: 1686564 - DNA, 25 bp, Homo sapien
gatgactaagtatttattgagacaa

SEQ ID NO: 1686565 - DNA, 25 bp, Homo sapien
gtatttattgagacaaataatacaa

SEQ ID NO: 1686566 - DNA, 25 bp, Homo sapien
acaaataatacaaattggtggcata

SEQ ID NO: 1686567 - DNA, 25 bp, Homo sapien
tatagattagagagtgttgaaacgg

SEQ ID NO: 1686568 - DNA, 25 bp, Homo sapien
gatgatttctatgctgagtttgtgc

SEQ ID NO: 1686569 - DNA, 25 bp, Homo sapien
attaaagaatggtccgtgctaagga

SEQ ID NO: 1686570 - DNA, 25 bp, Homo sapien
gagttgggtgtattgtgcgctaaac

SEQ ID NO: 1686571 - DNA, 25 bp, Homo sapien
gctaatcttctttgttcaagttttg

SEQ ID NO: 1686572 - DNA, 25 bp, Homo sapien
ttgttcaagttttgggtatgtgctg

SEQ ID NO: 1686573 - DNA, 25 bp, Homo sapien
ttcaagttttgggtatgtgctgctg

SEQ ID NO: 1686574 - DNA, 25 bp, Homo sapien
cttctttgttcaagttttgggtatg

SEQ ID NO: 1686575 - DNA, 25 bp, Homo sapien
ggaaatgctgattattgctgagcca

SEQ ID NO: 1686576 - DNA, 25 bp, Homo sapien
ccttgccgcacaaactggagtacag

SEQ ID NO: 1686577 - DNA, 25 bp, Homo sapien
ggttctcagttctataacaaggtag

SEQ ID NO: 1686578 - DNA, 25 bp, Homo sapien
cagcattttagggttgaggttctca

SEQ ID NO: 1686579 - DNA, 25 bp, Homo sapien
gaggattctcttttggcaacgtgga

SEQ ID NO: 1686580 - DNA, 25 bp, Homo sapien
tgctaacaccatagtgacctctgag

SEQ ID NO: 1686581 - DNA, 25 bp, Homo sapien
tgcctgccaccaaaggaggattctc

SEQ ID NO: 1686582 - DNA, 25 bp, Homo sapien
gaagagccaaagtgtcaaccagtgt

SEQ ID NO: 1686583 - DNA, 25 bp, Homo sapien
acaatctcggcccattgaaagctct

SEQ ID NO: 1686584 - DNA, 25 bp, Homo sapien
acgcctggcccatagctagttttaa

SEQ ID NO: 1686585 - DNA, 25 bp, Homo sapien
gttttgggagactgactcttgctct

SEQ ID NO: 1686586 - DNA, 25 bp, Homo sapien
tcagggaaaatgtgacaaaagtaca

SEQ ID NO: 1686587 - DNA, 25 bp, Homo sapien
tctaaagcttaagctagcgtgtagt

SEQ ID NO: 1686588 - DNA, 25 bp, Homo sapien
gcttaagctagcgtgtagtactttt

SEQ ID NO: 1686589 - DNA, 25 bp, Homo sapien
taaagcttaagctagcgtgtagtac

SEQ ID NO: 1686590 - DNA, 25 bp, Homo sapien
aagcttaagctagcgtgtagtactt

SEQ ID NO: 1686591 - DNA, 25 bp, Homo sapien
tgttaacaaggccttctcttcatcg

SEQ ID NO: 1686592 - DNA, 25 bp, Homo sapien
ggccttctcttcatcggagccatct

SEQ ID NO: 1686593 - DNA, 25 bp, Homo sapien
caaggccttctcttcatcggagcca

SEQ ID NO: 1686594 - DNA, 25 bp, Homo sapien
taacaaggccttctcttcatcggag

SEQ ID NO: 1686595 - DNA, 25 bp, Homo sapien
tatatgccgatgaggagagctctaa

SEQ ID NO: 1686596 - DNA, 25 bp, Homo sapien
gaggttccacgctggccagaaaata

SEQ ID NO: 1686597 - DNA, 25 bp, Homo sapien
tgttcaacagacacaagcgaggttc

SEQ ID NO: 1686598 - DNA, 25 bp, Homo sapien
gccagggtggctacaaagatacttc

SEQ ID NO: 1686599 - DNA, 25 bp, Homo sapien
tacgtcttttctctgctgcgcgact

SEQ ID NO: 1686600 - DNA, 25 bp, Homo sapien
tggccattctccacagttgaccggg

SEQ ID NO: 1686601 - DNA, 25 bp, Homo sapien
tgtggccctcctcgtcttgagagca

SEQ ID NO: 1686602 - DNA, 25 bp, Homo sapien
ggcgctgttacatggaaagtggaat

SEQ ID NO: 1686603 - DNA, 25 bp, Homo sapien
gagtgacgacattctggctcgcgac

SEQ ID NO: 1686604 - DNA, 25 bp, Homo sapien
cgagaagccgcgttccgttgttgaa

SEQ ID NO: 1686605 - DNA, 25 bp, Homo sapien
tgatgatgcaaatgcgtcgggcgcc

SEQ ID NO: 1686606 - DNA, 25 bp, Homo sapien
cagtcggcggtcgagttaggcctca

SEQ ID NO: 1686607 - DNA, 25 bp, Homo sapien
gattaatgcattatagttccctcaa

SEQ ID NO: 1686608 - DNA, 25 bp, Homo sapien
ggttgaatgcagatttcctcctgtc

SEQ ID NO: 1686609 - DNA, 25 bp, Homo sapien
tcaagcctggcacggcttccaatga

SEQ ID NO: 1686610 - DNA, 25 bp, Homo sapien
tatttggctgaaaaaactaggtcca

SEQ ID NO: 1686611 - DNA, 25 bp, Homo sapien
taccgctgcttaatcaactttaaag

SEQ ID NO: 1686612 - DNA, 25 bp, Homo sapien
tcagcttggaagagataccgctgct

SEQ ID NO: 1686613 - DNA, 25 bp, Homo sapien
tatttacagcatctagcagagtcct

SEQ ID NO: 1686614 - DNA, 25 bp, Homo sapien
caaaggacattctgtgcaggaaaac

SEQ ID NO: 1686615 - DNA, 25 bp, Homo sapien
cactgatgtcaataatggtctgtcc

SEQ ID NO: 1686616 - DNA, 25 bp, Homo sapien
aattgcctggcaaactctgcttata

SEQ ID NO: 1686617 - DNA, 25 bp, Homo sapien
tagtttctgctgaccctggttgagg

SEQ ID NO: 1686618 - DNA, 25 bp, Homo sapien
tatagcttttcccacttgccttgca

SEQ ID NO: 1686619 - DNA, 25 bp, Homo sapien
cactaacaggctgcgtcattttgga

SEQ ID NO: 1686620 - DNA, 25 bp, Homo sapien
gtatctgaccgaaaacctaagcaag

SEQ ID NO: 1686621 - DNA, 25 bp, Homo sapien
tcattttggatttccgaggtccgtg

SEQ ID NO: 1686622 - DNA, 25 bp, Homo sapien
taatctgtatcctcccactaacagg

SEQ ID NO: 1686623 - DNA, 25 bp, Homo sapien
caaacacagtatgcttgttgtagaa

SEQ ID NO: 1686624 - DNA, 25 bp, Homo sapien
taatatattgtaacagtctttgcag

SEQ ID NO: 1686625 - DNA, 25 bp, Homo sapien
taactcaaattcaaacacagtatgc

SEQ ID NO: 1686626 - DNA, 25 bp, Homo sapien
atttatcaggtttgctgatgattcc

SEQ ID NO: 1686627 - DNA, 25 bp, Homo sapien
gagtagggcgccatagaatttgcct

SEQ ID NO: 1686628 - DNA, 25 bp, Homo sapien
ctgtgcagtttgtcgttaacaactt

SEQ ID NO: 1686629 - DNA, 25 bp, Homo sapien
cagttcaaatagagatcctaattca

SEQ ID NO: 1686630 - DNA, 25 bp, Homo sapien
tagtgtttcagttcaaatagagatc

SEQ ID NO: 1686631 - DNA, 25 bp, Homo sapien
ctggaaaatgctgaggagatggact

SEQ ID NO: 1686632 - DNA, 25 bp, Homo sapien
gatgatcgaatacagatgaccctgc

SEQ ID NO: 1686633 - DNA, 25 bp, Homo sapien
tctgtagatgcctgtataatcggtc

SEQ ID NO: 1686634 - DNA, 25 bp, Homo sapien
tggaaaccttaatgaaaagctgctg

SEQ ID NO: 1686635 - DNA, 25 bp, Homo sapien
tgtgggtcccttcaggaagagcccc

SEQ ID NO: 1686636 - DNA, 25 bp, Homo sapien
tgatgggtgtggactgggctgagag

SEQ ID NO: 1686637 - DNA, 25 bp, Homo sapien
cataataaaaccaatcctgtgggtc

SEQ ID NO: 1686638 - DNA, 25 bp, Homo sapien
tacaatgtggattccagcactggat

SEQ ID NO: 1686639 - DNA, 25 bp, Homo sapien
ggcccttcaccgcaacaacttggta

SEQ ID NO: 1686640 - DNA, 25 bp, Homo sapien
tgggaactagaacgcaattgtgaaa

SEQ ID NO: 1686641 - DNA, 25 bp, Homo sapien
aaacaggcggcaagactgtctccga

SEQ ID NO: 1686642 - DNA, 25 bp, Homo sapien
tgtctctgtcggagagcaagtctgt

SEQ ID NO: 1686643 - DNA, 25 bp, Homo sapien
tattcactccgggtataccttggat

SEQ ID NO: 1686644 - DNA, 25 bp, Homo sapien
cattgctcaaagtagctacctctgg

SEQ ID NO: 1686645 - DNA, 25 bp, Homo sapien
aacagaagaaactccaacctgggct

SEQ ID NO: 1686646 - DNA, 25 bp, Homo sapien
tctacccaggcagaattactaatgg

SEQ ID NO: 1686647 - DNA, 25 bp, Homo sapien
catgcacgagcattagcacagttgc

SEQ ID NO: 1686648 - DNA, 25 bp, Homo sapien
cacatagggtgattgagaactgcat

SEQ ID NO: 1686649 - DNA, 25 bp, Homo sapien
tgagtctttaggcttggcaagggcc

SEQ ID NO: 1686650 - DNA, 25 bp, Homo sapien
taaatttaggatcccacctcctgga

SEQ ID NO: 1686651 - DNA, 25 bp, Homo sapien
cttggtttgggctctgttcatgctg

SEQ ID NO: 1686652 - DNA, 25 bp, Homo sapien
gaactatggagctatgaaaatgcct

SEQ ID NO: 1686653 - DNA, 25 bp, Homo sapien
tgttatcagaccactgaactatgga

SEQ ID NO: 1686654 - DNA, 25 bp, Homo sapien
catgcagtgttactgaggcctctct

SEQ ID NO: 1686655 - DNA, 25 bp, Homo sapien
cactgactggcctgatatcatggag

SEQ ID NO: 1686656 - DNA, 25 bp, Homo sapien
gctaaagtgcattctgctccttaca

SEQ ID NO: 1686657 - DNA, 25 bp, Homo sapien
ttgggtcacacttagttctccataa

SEQ ID NO: 1686658 - DNA, 25 bp, Homo sapien
gagattgtacctagtcagcactgac

SEQ ID NO: 1686659 - DNA, 25 bp, Homo sapien
tagacttaataatcctctgaggtcc

SEQ ID NO: 1686660 - DNA, 25 bp, Homo sapien
tctgaggtccctgtccacaataaaa

SEQ ID NO: 1686661 - DNA, 25 bp, Homo sapien
taaaaacatcggctgtgtgctccaa

SEQ ID NO: 1686662 - DNA, 25 bp, Homo sapien
cctgggttcttaagtctagttgagc

SEQ ID NO: 1686663 - DNA, 25 bp, Homo sapien
caagtcacggtgaaacctgtgcagc

SEQ ID NO: 1686664 - DNA, 25 bp, Homo sapien
taacagtatccctggacgatgacgc

SEQ ID NO: 1686665 - DNA, 25 bp, Homo sapien
ggtcattcccgtagagtacaagtca

SEQ ID NO: 1686666 - DNA, 25 bp, Homo sapien
tatccatcggctgtgtaactgccag

SEQ ID NO: 1686667 - DNA, 25 bp, Homo sapien
ctgagaatgaaccaagtgtaagacg

SEQ ID NO: 1686668 - DNA, 25 bp, Homo sapien
gcttaagagcaagagcataaagtca

SEQ ID NO: 1686669 - DNA, 25 bp, Homo sapien
cattgagttagtctatgccagctga

SEQ ID NO: 1686670 - DNA, 25 bp, Homo sapien
tattattctcctaagccatggcaag

SEQ ID NO: 1686671 - DNA, 25 bp, Homo sapien
cattgcatagttacctactaagtaa

SEQ ID NO: 1686672 - DNA, 25 bp, Homo sapien
gagctcattgcatagttacctacta

SEQ ID NO: 1686673 - DNA, 25 bp, Homo sapien
tttgagatcttggctttgggcacct

SEQ ID NO: 1686674 - DNA, 25 bp, Homo sapien
gggtcggtttgagctcattgcatag

SEQ ID NO: 1686675 - DNA, 25 bp, Homo sapien
tatgaaagatcatgcaccagagtgg

SEQ ID NO: 1686676 - DNA, 25 bp, Homo sapien
ggattgctccaatcagctgcttgtg

SEQ ID NO: 1686677 - DNA, 25 bp, Homo sapien
cttcaaatggcacttaggtctggct

SEQ ID NO: 1686678 - DNA, 25 bp, Homo sapien
ttctctgatataggccttggctcca

SEQ ID NO: 1686679 - DNA, 25 bp, Homo sapien
ggatttatcactgtaacccatgtag

SEQ ID NO: 1686680 - DNA, 25 bp, Homo sapien
gagtgtcactctacattgacagagc

SEQ ID NO: 1686681 - DNA, 25 bp, Homo sapien
ccatcattaaggaaacctcccaagg

SEQ ID NO: 1686682 - DNA, 25 bp, Homo sapien
caaacgatcttttcctgtgccccaa

SEQ ID NO: 1686683 - DNA, 25 bp, Homo sapien
tctgcctaggatttgctcccaacac

SEQ ID NO: 1686684 - DNA, 25 bp, Homo sapien
tgaacatatcctgtgcactctagct

SEQ ID NO: 1686685 - DNA, 25 bp, Homo sapien
gtatggctctcaattacattctgtc

SEQ ID NO: 1686686 - DNA, 25 bp, Homo sapien
gagaaaaggctgagtcatcatggca

SEQ ID NO: 1686687 - DNA, 25 bp, Homo sapien
gccatgtcattcccattgcgcaaac

SEQ ID NO: 1686688 - DNA, 25 bp, Homo sapien
taaaacagatctggccatgtcattc

SEQ ID NO: 1686689 - DNA, 25 bp, Homo sapien
tggccatgtcattcccattgcgcaa

SEQ ID NO: 1686690 - DNA, 25 bp, Homo sapien
ggccatgtcattcccattgcgcaaa

SEQ ID NO: 1686691 - DNA, 25 bp, Homo sapien
ctgcttcaaggtctgtgactgaagt

SEQ ID NO: 1686692 - DNA, 25 bp, Homo sapien
aataagtatcaattgaaaggaagcc

SEQ ID NO: 1686693 - DNA, 25 bp, Homo sapien
attcattccatcaggtctgcttcaa

SEQ ID NO: 1686694 - DNA, 25 bp, Homo sapien
cactgtggggcagtcgttcaatctt

SEQ ID NO: 1686695 - DNA, 25 bp, Homo sapien
ggggtccatgacaccaagcagggca

SEQ ID NO: 1686696 - DNA, 25 bp, Homo sapien
caccaagcagggcagacctaggcat

SEQ ID NO: 1686697 - DNA, 25 bp, Homo sapien
tgtggggtccatgacaccaagcagg

SEQ ID NO: 1686698 - DNA, 25 bp, Homo sapien
gcctggtgtggggtccatgacacca

SEQ ID NO: 1686699 - DNA, 25 bp, Homo sapien
tcctgcccacggactgttgtttgtg

SEQ ID NO: 1686700 - DNA, 25 bp, Homo sapien
tgtttactccacacaagacagtgaa

SEQ ID NO: 1686701 - DNA, 25 bp, Homo sapien
tactgttgattatcagctcctgccc

SEQ ID NO: 1686702 - DNA, 25 bp, Homo sapien
gtctgctagatttgtgccttcaaag

SEQ ID NO: 1686703 - DNA, 25 bp, Homo sapien
agacaggtttggagtactttgaaca

SEQ ID NO: 1686704 - DNA, 25 bp, Homo sapien
gagacaggtttggagtactttgaac

SEQ ID NO: 1686705 - DNA, 25 bp, Homo sapien
tgagacaggtttggagtactttgaa

SEQ ID NO: 1686706 - DNA, 25 bp, Homo sapien
ctgagacaggtttggagtactttga

SEQ ID NO: 1686707 - DNA, 25 bp, Homo sapien
gacagcatgatacagagcagcaaag

SEQ ID NO: 1686708 - DNA, 25 bp, Homo sapien
tggtaaactatcttggacagcatga

SEQ ID NO: 1686709 - DNA, 25 bp, Homo sapien
catgaagtagaacccattgtggctc

SEQ ID NO: 1686710 - DNA, 25 bp, Homo sapien
ggttctgtagctgtctggatccact

SEQ ID NO: 1686711 - DNA, 25 bp, Homo sapien
cagttagttgcattactgactttta

SEQ ID NO: 1686712 - DNA, 25 bp, Homo sapien
cttgtgaatacagttagttgcatta

SEQ ID NO: 1686713 - DNA, 25 bp, Homo sapien
gtctgaacctcatctatgacctagg

SEQ ID NO: 1686714 - DNA, 25 bp, Homo sapien
tatgacctagggcaataatagccac

SEQ ID NO: 1686715 - DNA, 25 bp, Homo sapien
tcttcctggttaagagaggagaaat

SEQ ID NO: 1686716 - DNA, 25 bp, Homo sapien
aatatgggtgtgtgttcaggtaccc

SEQ ID NO: 1686717 - DNA, 25 bp, Homo sapien
tcaggtacccgtgtatatgtatgta

SEQ ID NO: 1686718 - DNA, 25 bp, Homo sapien
aatagatgggtgtctacctcgttct

SEQ ID NO: 1686719 - DNA, 25 bp, Homo sapien
gtgctaggccatcctcatgtaaagc

SEQ ID NO: 1686720 - DNA, 25 bp, Homo sapien
gtattaacatccatgacaccagcag

SEQ ID NO: 1686721 - DNA, 25 bp, Homo sapien
agtattaacatccatgacaccagca

SEQ ID NO: 1686722 - DNA, 25 bp, Homo sapien
gccatcctcatgtaaagcagtatta

SEQ ID NO: 1686723 - DNA, 25 bp, Homo sapien
tggtattcagcgcaaagggcctgca

SEQ ID NO: 1686724 - DNA, 25 bp, Homo sapien
tagtctcctgtcgtcatcagcctta

SEQ ID NO: 1686725 - DNA, 25 bp, Homo sapien
tatacacaggctcatcgtagttggg

SEQ ID NO: 1686726 - DNA, 25 bp, Homo sapien
gggcctgcaccaacttgatatacac

SEQ ID NO: 1686727 - DNA, 25 bp, Homo sapien
agtgacatccttgacctgagattct

SEQ ID NO: 1686728 - DNA, 25 bp, Homo sapien
ttcagtgacatccttgacctgagat

SEQ ID NO: 1686729 - DNA, 25 bp, Homo sapien
aagtactcttcagtgacatccttga

SEQ ID NO: 1686730 - DNA, 25 bp, Homo sapien
gtactcttcagtgacatccttgacc

SEQ ID NO: 1686731 - DNA, 25 bp, Homo sapien
ctgccccaccctctttcaagtggag

SEQ ID NO: 1686732 - DNA, 25 bp, Homo sapien
ccaccctctttcaagtggagcctct

SEQ ID NO: 1686733 - DNA, 25 bp, Homo sapien
tgccccaccctctttcaagtggagc

SEQ ID NO: 1686734 - DNA, 25 bp, Homo sapien
cctctttcaagtggagcctctctgg

SEQ ID NO: 1686735 - DNA, 25 bp, Homo sapien
tgatcacagcttgtaaaaagtagaa

SEQ ID NO: 1686736 - DNA, 25 bp, Homo sapien
cagcttgtaaaaagtagaaacttgg

SEQ ID NO: 1686737 - DNA, 25 bp, Homo sapien
ttgttttataagaattagggcgatg

SEQ ID NO: 1686738 - DNA, 25 bp, Homo sapien
tagggcgatggctacgatatgagct

SEQ ID NO: 1686739 - DNA, 25 bp, Homo sapien
tctttctaggattacagcctagtct

SEQ ID NO: 1686740 - DNA, 25 bp, Homo sapien
ctggtctactgtaatcctagggaca

SEQ ID NO: 1686741 - DNA, 25 bp, Homo sapien
gacttacaaagagttacagtacaaa

SEQ ID NO: 1686742 - DNA, 25 bp, Homo sapien
gtacaaataggtaacattagcatgg

SEQ ID NO: 1686743 - DNA, 25 bp, Homo sapien
caggaaaaccagaaagcgcaaaacg

SEQ ID NO: 1686744 - DNA, 25 bp, Homo sapien
tctgtcccggattttggaagggcca

SEQ ID NO: 1686745 - DNA, 25 bp, Homo sapien
caaaacgacgaactgcataggcatc

SEQ ID NO: 1686746 - DNA, 25 bp, Homo sapien
aattgatgcctttggcgcccaccta

SEQ ID NO: 1686747 - DNA, 25 bp, Homo sapien
tgatgctggtagcttgggaccaagc

SEQ ID NO: 1686748 - DNA, 25 bp, Homo sapien
agaaacctgccaccccgcctgctag

SEQ ID NO: 1686749 - DNA, 25 bp, Homo sapien
gctgatgctggtagcttgggaccaa

SEQ ID NO: 1686750 - DNA, 25 bp, Homo sapien
atggctgatgctggtagcttgggac

SEQ ID NO: 1686751 - DNA, 25 bp, Homo sapien
gcgggcgggctggaggcgcggatgc

SEQ ID NO: 1686752 - DNA, 25 bp, Homo sapien
gcgggctggaggcgcggatgctgga

SEQ ID NO: 1686753 - DNA, 25 bp, Homo sapien
gggcgggctggaggcgcggatgctg

SEQ ID NO: 1686754 - DNA, 25 bp, Homo sapien
ggagccccgctcggcgcggctggcg

SEQ ID NO: 1686755 - DNA, 25 bp, Homo sapien
caactattcgtggtgttatgggcca

SEQ ID NO: 1686756 - DNA, 25 bp, Homo sapien
gtaagttctgcgtctgttccttctg

SEQ ID NO: 1686757 - DNA, 25 bp, Homo sapien
aattgttccacttttctcgcagtaa

SEQ ID NO: 1686758 - DNA, 25 bp, Homo sapien
tcacatcccattggttgctaaattg

SEQ ID NO: 1686759 - DNA, 25 bp, Homo sapien
tcctcgctgactccagaatgggata

SEQ ID NO: 1686760 - DNA, 25 bp, Homo sapien
cctcgctgactccagaatgggatac

SEQ ID NO: 1686761 - DNA, 25 bp, Homo sapien
ctgtatgcagtgggcccacactctg

SEQ ID NO: 1686762 - DNA, 25 bp, Homo sapien
ggtctttccatacctcagccccagt

SEQ ID NO: 1686763 - DNA, 25 bp, Homo sapien
agccccagtccagggcctctagcca

SEQ ID NO: 1686764 - DNA, 25 bp, Homo sapien
cggtctttccatacctcagccccag

SEQ ID NO: 1686765 - DNA, 25 bp, Homo sapien
tccagggcctctagccaggctgggc

SEQ ID NO: 1686766 - DNA, 25 bp, Homo sapien
tctcttgagaagcatcacgtgcttg

SEQ ID NO: 1686767 - DNA, 25 bp, Homo sapien
ctaataacattatccagaaactctg

SEQ ID NO: 1686768 - DNA, 25 bp, Homo sapien
taataactgagctttgacactcaga

SEQ ID NO: 1686769 - DNA, 25 bp, Homo sapien
tatacatcgtacacgccacgacgtg

SEQ ID NO: 1686770 - DNA, 25 bp, Homo sapien
ccaactgattgctgaccggctttcg

SEQ ID NO: 1686771 - DNA, 25 bp, Homo sapien
tgaccggctttcgtgaagccctcac

SEQ ID NO: 1686772 - DNA, 25 bp, Homo sapien
tcctgtgttcccaactgattgctga

SEQ ID NO: 1686773 - DNA, 25 bp, Homo sapien
ttgctgaccggctttcgtgaagccc

SEQ ID NO: 1686774 - DNA, 25 bp, Homo sapien
ccttgagcggtcataaaagcagcta

SEQ ID NO: 1686775 - DNA, 25 bp, Homo sapien
ggcctccagcgttcctaataggtaa

SEQ ID NO: 1686776 - DNA, 25 bp, Homo sapien
tgcctttcctcaaccgatacctatg

SEQ ID NO: 1686777 - DNA, 25 bp, Homo sapien
tataatttgcatgacttccacacca

SEQ ID NO: 1686778 - DNA, 25 bp, Homo sapien
ctcaacagcctatctgtcatgccaa

SEQ ID NO: 1686779 - DNA, 25 bp, Homo sapien
gcctatctgtcatgccaaatttcca

SEQ ID NO: 1686780 - DNA, 25 bp, Homo sapien
caacagcctatctgtcatgccaaat

SEQ ID NO: 1686781 - DNA, 25 bp, Homo sapien
tatctgtcatgccaaatttccactc

SEQ ID NO: 1686782 - DNA, 25 bp, Homo sapien
taaaccaggagtcacaaacaaatgc

SEQ ID NO: 1686783 - DNA, 25 bp, Homo sapien
tgttctccacggagagtggtgagga

SEQ ID NO: 1686784 - DNA, 25 bp, Homo sapien
gacaatggtataaaccaggagtcac

SEQ ID NO: 1686785 - DNA, 25 bp, Homo sapien
tgccccaggaaccacgtgggcttgg

SEQ ID NO: 1686786 - DNA, 25 bp, Homo sapien
gacatccacttgtcaaagtggtggg

SEQ ID NO: 1686787 - DNA, 25 bp, Homo sapien
ctgacatccacttgtcaaagtggtg

SEQ ID NO: 1686788 - DNA, 25 bp, Homo sapien
cactgacatccacttgtcaaagtgg

SEQ ID NO: 1686789 - DNA, 25 bp, Homo sapien
cccactgacatccacttgtcaaagt

SEQ ID NO: 1686790 - DNA, 25 bp, Homo sapien
taaagcagctaaagccttgactgct

SEQ ID NO: 1686791 - DNA, 25 bp, Homo sapien
ggtaaagcagctaaagccttgactg

SEQ ID NO: 1686792 - DNA, 25 bp, Homo sapien
actggtaaagcagctaaagccttga

SEQ ID NO: 1686793 - DNA, 25 bp, Homo sapien
tggtaaagcagctaaagccttgact

SEQ ID NO: 1686794 - DNA, 25 bp, Homo sapien
tcagcattcagcaattgtcccagtg

SEQ ID NO: 1686795 - DNA, 25 bp, Homo sapien
gcattcagcaattgtcccagtgccc

SEQ ID NO: 1686796 - DNA, 25 bp, Homo sapien
agcattcagcaattgtcccagtgcc

SEQ ID NO: 1686797 - DNA, 25 bp, Homo sapien
cagcattcagcaattgtcccagtgc

SEQ ID NO: 1686798 - DNA, 25 bp, Homo sapien
actatttctagaatcttctgatccg

SEQ ID NO: 1686799 - DNA, 25 bp, Homo sapien
gtagtcagacgcgttatccattgcg

SEQ ID NO: 1686800 - DNA, 25 bp, Homo sapien
ttctgatccgtagtcagacgcgtta

SEQ ID NO: 1686801 - DNA, 25 bp, Homo sapien
ccgtagtcagacgcgttatccattg

SEQ ID NO: 1686802 - DNA, 25 bp, Homo sapien
gagaaacttggattatctgaggccc

SEQ ID NO: 1686803 - DNA, 25 bp, Homo sapien
tgtttttggcctctaacgatccaga

SEQ ID NO: 1686804 - DNA, 25 bp, Homo sapien
taacacataggcgtccaagctggag

SEQ ID NO: 1686805 - DNA, 25 bp, Homo sapien
taaggaattctaagcaaggcagtgc

SEQ ID NO: 1686806 - DNA, 25 bp, Homo sapien
gtggacggacgcagaggagtggatg

SEQ ID NO: 1686807 - DNA, 25 bp, Homo sapien
tggacggacgcagaggagtggatga

SEQ ID NO: 1686808 - DNA, 25 bp, Homo sapien
tcccaggacatgtggacggacgcag

SEQ ID NO: 1686809 - DNA, 25 bp, Homo sapien
ccttgtgtctgccacacttgaagta

SEQ ID NO: 1686810 - DNA, 25 bp, Homo sapien
cacttgaagtaccactgacttgagg

SEQ ID NO: 1686811 - DNA, 25 bp, Homo sapien
tgcattggccaccttggctgtagag

SEQ ID NO: 1686812 - DNA, 25 bp, Homo sapien
tcctgtgctggtgatgggatccagt

SEQ ID NO: 1686813 - DNA, 25 bp, Homo sapien
gagccagcagtgtagaaactccctg

SEQ ID NO: 1686814 - DNA, 25 bp, Homo sapien
gctcctagaggctgtttgcaggtcc

SEQ ID NO: 1686815 - DNA, 25 bp, Homo sapien
catgcttgagttgagctgagctgca

SEQ ID NO: 1686816 - DNA, 25 bp, Homo sapien
ggtccaaagtccaagtacaacatgc

SEQ ID NO: 1686817 - DNA, 25 bp, Homo sapien
gatgattctgctctattctgggctg

SEQ ID NO: 1686818 - DNA, 25 bp, Homo sapien
ccatggctcgtcttgtctgtgatga

SEQ ID NO: 1686819 - DNA, 25 bp, Homo sapien
ctgggctgaaagactggcgtaacat

SEQ ID NO: 1686820 - DNA, 25 bp, Homo sapien
tattctggaccatgtaaaggacagc

SEQ ID NO: 1686821 - DNA, 25 bp, Homo sapien
ctgggcggcactgtccctcgaggca

SEQ ID NO: 1686822 - DNA, 25 bp, Homo sapien
cggcactgtccctcgaggcaggtgt

SEQ ID NO: 1686823 - DNA, 25 bp, Homo sapien
tgcctgggcggcactgtccctcgag

SEQ ID NO: 1686824 - DNA, 25 bp, Homo sapien
actgtccctcgaggcaggtgtcttg

SEQ ID NO: 1686825 - DNA, 25 bp, Homo sapien
cttggagaaattttcaatgtatagt

SEQ ID NO: 1686826 - DNA, 25 bp, Homo sapien
tttcagatgacacttgggctctgac

SEQ ID NO: 1686827 - DNA, 25 bp, Homo sapien
tactttctgagctctttgtgcagcc

SEQ ID NO: 1686828 - DNA, 25 bp, Homo sapien
cagatgacacttgggctctgaccag

SEQ ID NO: 1686829 - DNA, 25 bp, Homo sapien
gttctactttctgagctctttgtgc

SEQ ID NO: 1686830 - DNA, 25 bp, Homo sapien
ctgaaggccagtgaaaaatgccaac

SEQ ID NO: 1686831 - DNA, 25 bp, Homo sapien
catttctccctgtacttcacttccc

SEQ ID NO: 1686832 - DNA, 25 bp, Homo sapien
ctccatttctccctgtacttcactt

SEQ ID NO: 1686833 - DNA, 25 bp, Homo sapien
atttctccctgtacttcacttccca

SEQ ID NO: 1686834 - DNA, 25 bp, Homo sapien
acttcacttcccagggggtatggtg

SEQ ID NO: 1686835 - DNA, 25 bp, Homo sapien
cccatcagtcccccattctgcagcc

SEQ ID NO: 1686836 - DNA, 25 bp, Homo sapien
tgcagccccacttccaatataggcc

SEQ ID NO: 1686837 - DNA, 25 bp, Homo sapien
ttccagccccatcagtcccccattc

SEQ ID NO: 1686838 - DNA, 25 bp, Homo sapien
tataagctggaagctttccagcccc

SEQ ID NO: 1686839 - DNA, 25 bp, Homo sapien
ttcccttgtcatgttgcatccaagc

SEQ ID NO: 1686840 - DNA, 25 bp, Homo sapien
gtggtttggactcagaatgttctcg

SEQ ID NO: 1686841 - DNA, 25 bp, Homo sapien
tgttgcatccaagccctgtaactga

SEQ ID NO: 1686842 - DNA, 25 bp, Homo sapien
gaatgttctcgttgaacacacttct

SEQ ID NO: 1686843 - DNA, 25 bp, Homo sapien
gaagcgttctgatgagacaatgtct

SEQ ID NO: 1686844 - DNA, 25 bp, Homo sapien
caattttcatactccctcctgtttc

SEQ ID NO: 1686845 - DNA, 25 bp, Homo sapien
gtttctgtatttggttgcttctctg

SEQ ID NO: 1686846 - DNA, 25 bp, Homo sapien
tgtgtggcctttacttgcagggtga

SEQ ID NO: 1686847 - DNA, 25 bp, Homo sapien
gtataagaggcctcttatacaggtt

SEQ ID NO: 1686848 - DNA, 25 bp, Homo sapien
agaggcctcttatacaggttttcct

SEQ ID NO: 1686849 - DNA, 25 bp, Homo sapien
taagaggcctcttatacaggttttc

SEQ ID NO: 1686850 - DNA, 25 bp, Homo sapien
aggcctcttatacaggttttcctgc

SEQ ID NO: 1686851 - DNA, 25 bp, Homo sapien
cctcatggggagaatggctaccacc

SEQ ID NO: 1686852 - DNA, 25 bp, Homo sapien
tcacttgtgtcccatactctctctt

SEQ ID NO: 1686853 - DNA, 25 bp, Homo sapien
tccagccaagttaacgcattaccat

SEQ ID NO: 1686854 - DNA, 25 bp, Homo sapien
agttaacgcattaccatcttcctca

SEQ ID NO: 1686855 - DNA, 25 bp, Homo sapien
caatcaccatcaataaaaggcttcc

SEQ ID NO: 1686856 - DNA, 25 bp, Homo sapien
tgcaatcaccatcaataaaaggctt

SEQ ID NO: 1686857 - DNA, 25 bp, Homo sapien
tcatgcaatcaccatcaataaaagg

SEQ ID NO: 1686858 - DNA, 25 bp, Homo sapien
ccatcaataaaaggcttcccgtcag

SEQ ID NO: 1686859 - DNA, 25 bp, Homo sapien
ggatcagtactagacactttggcgc

SEQ ID NO: 1686860 - DNA, 25 bp, Homo sapien
tttccctagttcagagatgtttaac

SEQ ID NO: 1686861 - DNA, 25 bp, Homo sapien
ctcttggcatcttgtgatgcttggc

SEQ ID NO: 1686862 - DNA, 25 bp, Homo sapien
gcacctgccaacaagcactgaggga

SEQ ID NO: 1686863 - DNA, 25 bp, Homo sapien
tgcaagctctccaatatcaggtgat

SEQ ID NO: 1686864 - DNA, 25 bp, Homo sapien
gaaaacactgatctgcaagctctcc

SEQ ID NO: 1686865 - DNA, 25 bp, Homo sapien
tctccaatatcaggtgatatcagtg

SEQ ID NO: 1686866 - DNA, 25 bp, Homo sapien
aatgatgaagagtggagaaaacact

SEQ ID NO: 1686867 - DNA, 25 bp, Homo sapien
aataaccatggtgtcttctgtgccc

SEQ ID NO: 1686868 - DNA, 25 bp, Homo sapien
tgtcccatcataagccagccgtcag

SEQ ID NO: 1686869 - DNA, 25 bp, Homo sapien
aaaaactgtcccatcataagccagc

SEQ ID NO: 1686870 - DNA, 25 bp, Homo sapien
tttctattacatgatcccctcggac

SEQ ID NO: 1686871 - DNA, 25 bp, Homo sapien
tccatctgttccaattttgcccaat

SEQ ID NO: 1686872 - DNA, 25 bp, Homo sapien
tgccttctggacttgccgcctggac

SEQ ID NO: 1686873 - DNA, 25 bp, Homo sapien
ccttctggacttgccgcctggactt

SEQ ID NO: 1686874 - DNA, 25 bp, Homo sapien
aattcccgatccttggactgtctcc

SEQ ID NO: 1686875 - DNA, 25 bp, Homo sapien
agaaacaccctgtgtccatgggata

SEQ ID NO: 1686876 - DNA, 25 bp, Homo sapien
aacagaacgctgatctgcagaaaga

SEQ ID NO: 1686877 - DNA, 25 bp, Homo sapien
gaaaggcaagttgactgctgaaagg

SEQ ID NO: 1686878 - DNA, 25 bp, Homo sapien
cacatggatctgagaaacagaacgc

SEQ ID NO: 1686879 - DNA, 25 bp, Homo sapien
ttaattaaacaatctgtaacagaat

SEQ ID NO: 1686880 - DNA, 25 bp, Homo sapien
tttaattaaacaatctatatggaac

SEQ ID NO: 1686881 - DNA, 25 bp, Homo sapien
tctccatgtatataacagaatcaag

SEQ ID NO: 1686882 - DNA, 25 bp, Homo sapien
caatctatatggaacaaacattccc

SEQ ID NO: 1686883 - DNA, 25 bp, Homo sapien
ctgacattctttatgaaatttagaa

SEQ ID NO: 1686884 - DNA, 25 bp, Homo sapien
tgacattctttatgaaatttagaat

SEQ ID NO: 1686885 - DNA, 25 bp, Homo sapien
cctgacattctttatgaaatttaga

SEQ ID NO: 1686886 - DNA, 25 bp, Homo sapien
gaacaagtacacctacgtcattgga

SEQ ID NO: 1686887 - DNA, 25 bp, Homo sapien
caatgagcctaagtcccttgaccgg

SEQ ID NO: 1686888 - DNA, 25 bp, Homo sapien
tatgctagaagatggttgaaacccc

SEQ ID NO: 1686889 - DNA, 25 bp, Homo sapien
gaccggtttagctgtctcatctaag

SEQ ID NO: 1686890 - DNA, 25 bp, Homo sapien
caatgttcatagtccacagttcagc

SEQ ID NO: 1686891 - DNA, 25 bp, Homo sapien
tacagatacaatcatacctgccaag

SEQ ID NO: 1686892 - DNA, 25 bp, Homo sapien
catttcctggatccttgtatgtggt

SEQ ID NO: 1686893 - DNA, 25 bp, Homo sapien
tatgagttaccctaaagtcacctcg

SEQ ID NO: 1686894 - DNA, 25 bp, Homo sapien
gccgacaggactagggatgggtagg

SEQ ID NO: 1686895 - DNA, 25 bp, Homo sapien
ggtccccgccttcgctttagccgca

SEQ ID NO: 1686896 - DNA, 25 bp, Homo sapien
gggaggagccgacaggactagggat

SEQ ID NO: 1686897 - DNA, 25 bp, Homo sapien
gctttagccgcagcgctcgctccgc

SEQ ID NO: 1686898 - DNA, 25 bp, Homo sapien
tgcgcgccgccctggactgcgggcg

SEQ ID NO: 1686899 - DNA, 25 bp, Homo sapien
gcggtgcgcgccgccctggactgcg

SEQ ID NO: 1686900 - DNA, 25 bp, Homo sapien
ggtgcgcgccgccctggactgcggg

SEQ ID NO: 1686901 - DNA, 25 bp, Homo sapien
gcgcgccgccctggactgcgggcgc

SEQ ID NO: 1686902 - DNA, 25 bp, Homo sapien
ttgcgctgaagaggtgccgggagtc

SEQ ID NO: 1686903 - DNA, 25 bp, Homo sapien
tgcgctgaagaggtgccgggagtct

SEQ ID NO: 1686904 - DNA, 25 bp, Homo sapien
ctttgcgctgaagaggtgccgggag

SEQ ID NO: 1686905 - DNA, 25 bp, Homo sapien
cgctgaagaggtgccgggagtctcg

SEQ ID NO: 1686906 - DNA, 25 bp, Homo sapien
gaaatgcactatagttctttaagca

SEQ ID NO: 1686907 - DNA, 25 bp, Homo sapien
tctatcatactgttggagaaaatgc

SEQ ID NO: 1686908 - DNA, 25 bp, Homo sapien
gttcaaagtactatccaccggccag

SEQ ID NO: 1686909 - DNA, 25 bp, Homo sapien
gctgtgaacacataatccctacata

SEQ ID NO: 1686910 - DNA, 25 bp, Homo sapien
ggctatccggagaatgatcaaaaga

SEQ ID NO: 1686911 - DNA, 25 bp, Homo sapien
tccggagaatgatcaaaagatgctt

SEQ ID NO: 1686912 - DNA, 25 bp, Homo sapien
gaaggctatccggagaatgatcaaa

SEQ ID NO: 1686913 - DNA, 25 bp, Homo sapien
tcaaaggaaggctatccggagaatg

SEQ ID NO: 1686914 - DNA, 25 bp, Homo sapien
aagccctatacataaccctccaata

SEQ ID NO: 1686915 - DNA, 25 bp, Homo sapien
attcaaccaattccaagctgaagtc

SEQ ID NO: 1686916 - DNA, 25 bp, Homo sapien
ttcaaccaattccaagctgaagtcc

SEQ ID NO: 1686917 - DNA, 25 bp, Homo sapien
taaccctccaatagcattcaaccaa

SEQ ID NO: 1686918 - DNA, 25 bp, Homo sapien
ggacatgttgccgtacagcctgcct

SEQ ID NO: 1686919 - DNA, 25 bp, Homo sapien
cacaggacatgttgccgtacagcct

SEQ ID NO: 1686920 - DNA, 25 bp, Homo sapien
acacaggacatgttgccgtacagcc

SEQ ID NO: 1686921 - DNA, 25 bp, Homo sapien
catgttgccgtacagcctgcctttt

SEQ ID NO: 1686922 - DNA, 25 bp, Homo sapien
agatgataccatcgggaggtgtagc

SEQ ID NO: 1686923 - DNA, 25 bp, Homo sapien
tcgggaggtgtagccatttttggca

SEQ ID NO: 1686924 - DNA, 25 bp, Homo sapien
ggaggtgtagccatttttggcacat

SEQ ID NO: 1686925 - DNA, 25 bp, Homo sapien
taccatcgggaggtgtagccatttt

SEQ ID NO: 1686926 - DNA, 25 bp, Homo sapien
taactgaaagatcaggtaggagtaa

SEQ ID NO: 1686927 - DNA, 25 bp, Homo sapien
tttcttagtaactgaaagatcaggt

SEQ ID NO: 1686928 - DNA, 25 bp, Homo sapien
aaatgttaagagacaattataattg

SEQ ID NO: 1686929 - DNA, 25 bp, Homo sapien
ttataattgcagactttaagacact

SEQ ID NO: 1686930 - DNA, 25 bp, Homo sapien
ttgccattgctagtccatatttttt

SEQ ID NO: 1686931 - DNA, 25 bp, Homo sapien
tccatgtagtatatttgtcatatcc

SEQ ID NO: 1686932 - DNA, 25 bp, Homo sapien
ggagttgctggtctgccatgaaagc

SEQ ID NO: 1686933 - DNA, 25 bp, Homo sapien
ggactaggttcggttttgccattgc

SEQ ID NO: 1686934 - DNA, 25 bp, Homo sapien
caacctgttagcaatcctaagtatt

SEQ ID NO: 1686935 - DNA, 25 bp, Homo sapien
atcttctccaacctgttagcaatcc

SEQ ID NO: 1686936 - DNA, 25 bp, Homo sapien
tccaacctgttagcaatcctaagta

SEQ ID NO: 1686937 - DNA, 25 bp, Homo sapien
ttctccaacctgttagcaatcctaa

SEQ ID NO: 1686938 - DNA, 25 bp, Homo sapien
tccattttctacactcaggttttgt

SEQ ID NO: 1686939 - DNA, 25 bp, Homo sapien
cataccgcatcgataagtcttggct

SEQ ID NO: 1686940 - DNA, 25 bp, Homo sapien
ttggctatctgtggagtaagctgga

SEQ ID NO: 1686941 - DNA, 25 bp, Homo sapien
gagtaagctggatttccttggtaag

SEQ ID NO: 1686942 - DNA, 25 bp, Homo sapien
agtgttgcaacatcctcagtcgtaa

SEQ ID NO: 1686943 - DNA, 25 bp, Homo sapien
gcatgatcctgttctcgccaatgag

SEQ ID NO: 1686944 - DNA, 25 bp, Homo sapien
cattataacaacgatggccgattcc

SEQ ID NO: 1686945 - DNA, 25 bp, Homo sapien
gattttcagactagggtgctcaacc

SEQ ID NO: 1686946 - DNA, 25 bp, Homo sapien
tcagagaggccttcaactcttaaag

SEQ ID NO: 1686947 - DNA, 25 bp, Homo sapien
tcaatcaagggcctcaccctgggca

SEQ ID NO: 1686948 - DNA, 25 bp, Homo sapien
atcaagggcctcaccctgggcaaga

SEQ ID NO: 1686949 - DNA, 25 bp, Homo sapien
ctcttaaagttgagttccagaatca

SEQ ID NO: 1686950 - DNA, 25 bp, Homo sapien
ctctgggagggaacaatgatctgag

SEQ ID NO: 1686951 - DNA, 25 bp, Homo sapien
gatcctctgggagggaacaatgatc

SEQ ID NO: 1686952 - DNA, 25 bp, Homo sapien
tcctctgggagggaacaatgatctg

SEQ ID NO: 1686953 - DNA, 25 bp, Homo sapien
tagatcctctgggagggaacaatga

SEQ ID NO: 1686954 - DNA, 25 bp, Homo sapien
aatcagagccttctcatgatgacta

SEQ ID NO: 1686955 - DNA, 25 bp, Homo sapien
ccagagttgacttaacatggagtca

SEQ ID NO: 1686956 - DNA, 25 bp, Homo sapien
tcagtcttcaaatacgtgatactgt

SEQ ID NO: 1686957 - DNA, 25 bp, Homo sapien
catggagtcatcaaatcagagcctt

SEQ ID NO: 1686958 - DNA, 25 bp, Homo sapien
agagtaccaccaatggttggaaact

SEQ ID NO: 1686959 - DNA, 25 bp, Homo sapien
acagcaggggcgctgccacactgtc

SEQ ID NO: 1686960 - DNA, 25 bp, Homo sapien
cagcaggggcgctgccacactgtct

SEQ ID NO: 1686961 - DNA, 25 bp, Homo sapien
agcaggggcgctgccacactgtctt

SEQ ID NO: 1686962 - DNA, 25 bp, Homo sapien
gcaggggcgctgccacactgtcttt

SEQ ID NO: 1686963 - DNA, 25 bp, Homo sapien
ggcagcggcgcggtttgtgctggtg

SEQ ID NO: 1686964 - DNA, 25 bp, Homo sapien
gcagcggcgcggtttgtgctggtgc

SEQ ID NO: 1686965 - DNA, 25 bp, Homo sapien
cagcggcgcggtttgtgctggtgca

SEQ ID NO: 1686966 - DNA, 25 bp, Homo sapien
gtggcagcggcgcggtttgtgctgg

SEQ ID NO: 1686967 - DNA, 25 bp, Homo sapien
tgaggtttctcaaagccaggtacat

SEQ ID NO: 1686968 - DNA, 25 bp, Homo sapien
tcgggaatactctggaaactcatag

SEQ ID NO: 1686969 - DNA, 25 bp, Homo sapien
aaaggctggaagtatcggttcatgc

SEQ ID NO: 1686970 - DNA, 25 bp, Homo sapien
taccacagtgcgaggatgaggtttc

SEQ ID NO: 1686971 - DNA, 25 bp, Homo sapien
tggtcggctcccacgctgagaactc

SEQ ID NO: 1686972 - DNA, 25 bp, Homo sapien
tgaacgcatcgaatacgcacgagac

SEQ ID NO: 1686973 - DNA, 25 bp, Homo sapien
cacgagaccccggacgatgatgtga

SEQ ID NO: 1686974 - DNA, 25 bp, Homo sapien
ccttagggagaagatactggtcggc

SEQ ID NO: 1686975 - DNA, 25 bp, Homo sapien
ttaattccaaagttatgcagttgcc

SEQ ID NO: 1686976 - DNA, 25 bp, Homo sapien
gctggaccagccccgataatgatga

SEQ ID NO: 1686977 - DNA, 25 bp, Homo sapien
caaagttatgcagttgcctagcagc

SEQ ID NO: 1686978 - DNA, 25 bp, Homo sapien
gcagttgcctagcagctgctaatcc

SEQ ID NO: 1686979 - DNA, 25 bp, Homo sapien
gagtcctattcatcgcagggccagt

SEQ ID NO: 1686980 - DNA, 25 bp, Homo sapien
tgtgagtcctattcatcgcagggcc

SEQ ID NO: 1686981 - DNA, 25 bp, Homo sapien
tgagtcctattcatcgcagggccag

SEQ ID NO: 1686982 - DNA, 25 bp, Homo sapien
aatgtgagtcctattcatcgcaggg

SEQ ID NO: 1686983 - DNA, 25 bp, Homo sapien
gatttatcatcccagactcggcctc

SEQ ID NO: 1686984 - DNA, 25 bp, Homo sapien
ttgttcacacattaatgctactggg

SEQ ID NO: 1686985 - DNA, 25 bp, Homo sapien
gttaatacacccattgacaatctga

SEQ ID NO: 1686986 - DNA, 25 bp, Homo sapien
ttcccactgtgacgcctttaaaaga

SEQ ID NO: 1686987 - DNA, 25 bp, Homo sapien
aaaatccatgcgcttgtcaatagtg

SEQ ID NO: 1686988 - DNA, 25 bp, Homo sapien
cctaaagggacatcttggagctgag

SEQ ID NO: 1686989 - DNA, 25 bp, Homo sapien
cagagacaacatccaagagagcatt

SEQ ID NO: 1686990 - DNA, 25 bp, Homo sapien
tctccaaatttatgcatgctgatgc

SEQ ID NO: 1686991 - DNA, 25 bp, Homo sapien
gacatgtaatgaaaactccagccag

SEQ ID NO: 1686992 - DNA, 25 bp, Homo sapien
taaatgatccctgttgacgagagta

SEQ ID NO: 1686993 - DNA, 25 bp, Homo sapien
gagaatatcctgcacgtcagcctaa

SEQ ID NO: 1686994 - DNA, 25 bp, Homo sapien
gacagctaagataccaacaggcagg

SEQ ID NO: 1686995 - DNA, 25 bp, Homo sapien
gatggaactgaagcacctgtccctc

SEQ ID NO: 1686996 - DNA, 25 bp, Homo sapien
tgccacaggcgtactccaggttact

SEQ ID NO: 1686997 - DNA, 25 bp, Homo sapien
gataccagattccttaataaatgcc

SEQ ID NO: 1686998 - DNA, 25 bp, Homo sapien
ccagctcactgaattggataccaga

SEQ ID NO: 1686999 - DNA, 25 bp, Homo sapien
aacagaccagacttgcaaggatact

SEQ ID NO: 1687000 - DNA, 25 bp, Homo sapien
tctattttggcttctcgagagcagt

SEQ ID NO: 1687001 - DNA, 25 bp, Homo sapien
gactccacggttccacagaaatgac

SEQ ID NO: 1687002 - DNA, 25 bp, Homo sapien
tctcgagagcagtgtttccgactcc

SEQ ID NO: 1687003 - DNA, 25 bp, Homo sapien
tcaattatcaccgagtacccgggag

SEQ ID NO: 1687004 - DNA, 25 bp, Homo sapien
ccgagtacccgggagttagcagagt

SEQ ID NO: 1687005 - DNA, 25 bp, Homo sapien
gttgaatgtcaagcccttctgccag

SEQ ID NO: 1687006 - DNA, 25 bp, Homo sapien
cattgtggtcccacgagcgagcaga

SEQ ID NO: 1687007 - DNA, 25 bp, Homo sapien
cttttgtgcagaataccctgtgcca

SEQ ID NO: 1687008 - DNA, 25 bp, Homo sapien
gcacttcatctccagaataatcaat

SEQ ID NO: 1687009 - DNA, 25 bp, Homo sapien
accctgtgccatctgtagtggtaac

SEQ ID NO: 1687010 - DNA, 25 bp, Homo sapien
tagtggtaacctgcacttcatctcc

SEQ ID NO: 1687011 - DNA, 25 bp, Homo sapien
cacccttgtactgccctagctctta

SEQ ID NO: 1687012 - DNA, 25 bp, Homo sapien
gcagattcccaaaggcaaactcctt

SEQ ID NO: 1687013 - DNA, 25 bp, Homo sapien
ccctggcagcaaaggtttctaccca

SEQ ID NO: 1687014 - DNA, 25 bp, Homo sapien
ccttgataggaaagatttgtccttc

SEQ ID NO: 1687015 - DNA, 25 bp, Homo sapien
aatacattctactgtgtggccaagc

SEQ ID NO: 1687016 - DNA, 25 bp, Homo sapien
gaaagagccctaactatggagtcag

SEQ ID NO: 1687017 - DNA, 25 bp, Homo sapien
taaaatgaaggtagtatctgcccca

SEQ ID NO: 1687018 - DNA, 25 bp, Homo sapien
tatcgttgctacaatcaggacgcca

SEQ ID NO: 1687019 - DNA, 25 bp, Homo sapien
gaacctcacactaccactacactgg

SEQ ID NO: 1687020 - DNA, 25 bp, Homo sapien
gcaacagaacctcacactaccacta

SEQ ID NO: 1687021 - DNA, 25 bp, Homo sapien
cactaccactacactggtatcaaca

SEQ ID NO: 1687022 - DNA, 25 bp, Homo sapien
tcacactaccactacactggtatca

SEQ ID NO: 1687023 - DNA, 25 bp, Homo sapien
gattaaactgaatggcacctttctg

SEQ ID NO: 1687024 - DNA, 25 bp, Homo sapien
tctctgacaacggtggattaaactg

SEQ ID NO: 1687025 - DNA, 25 bp, Homo sapien
ttcaatgatgcctgcgcctaagctg

SEQ ID NO: 1687026 - DNA, 25 bp, Homo sapien
ctttctgtagtaaagccagtggtac

SEQ ID NO: 1687027 - DNA, 25 bp, Homo sapien
agtcagccccttgtactttactgtc

SEQ ID NO: 1687028 - DNA, 25 bp, Homo sapien
ctcgcttgctggcactgggaggaac

SEQ ID NO: 1687029 - DNA, 25 bp, Homo sapien
tgtcatagaacacggcaaaaagccc

SEQ ID NO: 1687030 - DNA, 25 bp, Homo sapien
aatctatacggaaattgcaaggcaa

SEQ ID NO: 1687031 - DNA, 25 bp, Homo sapien
catccagggtcctcacggatgcgac

SEQ ID NO: 1687032 - DNA, 25 bp, Homo sapien
tgcagcacctgtttgtcatccaggg

SEQ ID NO: 1687033 - DNA, 25 bp, Homo sapien
caatcacagacatcagcacgctgtg

SEQ ID NO: 1687034 - DNA, 25 bp, Homo sapien
agggtcctcacggatgcgacagcct

SEQ ID NO: 1687035 - DNA, 25 bp, Homo sapien
tctggatagcaagcacggcttgccc

SEQ ID NO: 1687036 - DNA, 25 bp, Homo sapien
ctgctctggatagcaagcacggctt

SEQ ID NO: 1687037 - DNA, 25 bp, Homo sapien
ggatagcaagcacggcttgcccctt

SEQ ID NO: 1687038 - DNA, 25 bp, Homo sapien
caagcacggcttgcccctttcaagg

SEQ ID NO: 1687039 - DNA, 25 bp, Homo sapien
caaaatactttgtgggatctgggac

SEQ ID NO: 1687040 - DNA, 25 bp, Homo sapien
cagcgaaaaagacggttccttgaat

SEQ ID NO: 1687041 - DNA, 25 bp, Homo sapien
gggtctgtgctccaccgagtgacaa

SEQ ID NO: 1687042 - DNA, 25 bp, Homo sapien
agcaatgatatcgtaggcctcccca

SEQ ID NO: 1687043 - DNA, 25 bp, Homo sapien
aaaaaatgccttgctcgaatctaag

SEQ ID NO: 1687044 - DNA, 25 bp, Homo sapien
gggatttggacatgtagcaggcaaa

SEQ ID NO: 1687045 - DNA, 25 bp, Homo sapien
tctaagtcaacggtgatggatcggg

SEQ ID NO: 1687046 - DNA, 25 bp, Homo sapien
acatgtagcaggcaaagactgcagc

SEQ ID NO: 1687047 - DNA, 25 bp, Homo sapien
aaatatgcccctgtaacagtttgtg

SEQ ID NO: 1687048 - DNA, 25 bp, Homo sapien
ttctcgaacgccactcaaatatgcc

SEQ ID NO: 1687049 - DNA, 25 bp, Homo sapien
tcttgcttgcttctcgaacgccact

SEQ ID NO: 1687050 - DNA, 25 bp, Homo sapien
aaatgctgcaatcttgcttgcttct

SEQ ID NO: 1687051 - DNA, 25 bp, Homo sapien
gtacagaagaaagctgggtccaccg

SEQ ID NO: 1687052 - DNA, 25 bp, Homo sapien
ctggggtacagaagaaagctgggtc

SEQ ID NO: 1687053 - DNA, 25 bp, Homo sapien
cagaagaaagctgggtccaccgaat

SEQ ID NO: 1687054 - DNA, 25 bp, Homo sapien
gaagaaagctgggtccaccgaattc

SEQ ID NO: 1687055 - DNA, 25 bp, Homo sapien
tcagttttactatgtagagacggtt

SEQ ID NO: 1687056 - DNA, 25 bp, Homo sapien
tcatatcgccttagaaacatttcag

SEQ ID NO: 1687057 - DNA, 25 bp, Homo sapien
tataaggttttttgaggtcagtgct

SEQ ID NO: 1687058 - DNA, 25 bp, Homo sapien
gactttcagcagtagttgaacctat

SEQ ID NO: 1687059 - DNA, 25 bp, Homo sapien
gccagtcagtaccaatgagtctcaa

SEQ ID NO: 1687060 - DNA, 25 bp, Homo sapien
gcaaaataggcatcctgaagaccct

SEQ ID NO: 1687061 - DNA, 25 bp, Homo sapien
tgtgaagcccacactatctgtgctg

SEQ ID NO: 1687062 - DNA, 25 bp, Homo sapien
ttcttttgaacacccagtaggagga

SEQ ID NO: 1687063 - DNA, 25 bp, Homo sapien
aatggatgtatcaccactacagtac

SEQ ID NO: 1687064 - DNA, 25 bp, Homo sapien
gatgtatcaccactacagtacagag

SEQ ID NO: 1687065 - DNA, 25 bp, Homo sapien
ttaaatggatgtatcaccactacag

SEQ ID NO: 1687066 - DNA, 25 bp, Homo sapien
cttattaaatggatgtatcaccact

SEQ ID NO: 1687067 - DNA, 25 bp, Homo sapien
ggtaatggaccattttcttggagtg

SEQ ID NO: 1687068 - DNA, 25 bp, Homo sapien
tatgaccatttgctataaagaaggt

SEQ ID NO: 1687069 - DNA, 25 bp, Homo sapien
taagtagtcatgcatagagtatttg

SEQ ID NO: 1687070 - DNA, 25 bp, Homo sapien
tttcttggagtgacttcacaaaact

SEQ ID NO: 1687071 - DNA, 25 bp, Homo sapien
ggcaatcgtggatgtctctgacaaa

SEQ ID NO: 1687072 - DNA, 25 bp, Homo sapien
ccagaatataatgtgcaggcaatcg

SEQ ID NO: 1687073 - DNA, 25 bp, Homo sapien
cagacactagggaaaggtaaataca

SEQ ID NO: 1687074 - DNA, 25 bp, Homo sapien
ggaccactcctgaatgagacttaat

SEQ ID NO: 1687075 - DNA, 25 bp, Homo sapien
tatattatataaggacagaccaaaa

SEQ ID NO: 1687076 - DNA, 25 bp, Homo sapien
ccaaaaatcaacctatcaaagcttc

SEQ ID NO: 1687077 - DNA, 25 bp, Homo sapien
ctgtaggtacgttttatattatata

SEQ ID NO: 1687078 - DNA, 25 bp, Homo sapien
aaaaatcaacctatcaaagcttcaa

SEQ ID NO: 1687079 - DNA, 25 bp, Homo sapien
gatggaacagtgaaagtcaattcag

SEQ ID NO: 1687080 - DNA, 25 bp, Homo sapien
cctgctttgcctcgaaagtgtcatc

SEQ ID NO: 1687081 - DNA, 25 bp, Homo sapien
tgatggcaacactgaaggaacagtt

SEQ ID NO: 1687082 - DNA, 25 bp, Homo sapien
gaacagttaccctgctttgcctcga

SEQ ID NO: 1687083 - DNA, 25 bp, Homo sapien
caagctacagttgtccagatcactg

SEQ ID NO: 1687084 - DNA, 25 bp, Homo sapien
tacatacagagattgtagtatttag

SEQ ID NO: 1687085 - DNA, 25 bp, Homo sapien
aaattcagcggcagtgtgtccatca

SEQ ID NO: 1687086 - DNA, 25 bp, Homo sapien
tattttgaatacacatctctgtcag

SEQ ID NO: 1687087 - DNA, 25 bp, Homo sapien
ggcatctcaacgttgctctcacaaa

SEQ ID NO: 1687088 - DNA, 25 bp, Homo sapien
tcatggtgtacctgggtagctgggc

SEQ ID NO: 1687089 - DNA, 25 bp, Homo sapien
gggtagctgggcatctcaacgttgc

SEQ ID NO: 1687090 - DNA, 25 bp, Homo sapien
tctcacaaatacttgaggaagttcc

SEQ ID NO: 1687091 - DNA, 25 bp, Homo sapien
tgtttactatttgccaggtactacc

SEQ ID NO: 1687092 - DNA, 25 bp, Homo sapien
gaagtaagtgcgatatatcatggct

SEQ ID NO: 1687093 - DNA, 25 bp, Homo sapien
gcgggccatgtcgtatctactataa

SEQ ID NO: 1687094 - DNA, 25 bp, Homo sapien
agtctgtgtatctgccctgctttta

SEQ ID NO: 1687095 - DNA, 25 bp, Homo sapien
tgtttttatacagccctcaagctca

SEQ ID NO: 1687096 - DNA, 25 bp, Homo sapien
cagtgtagcctgtatgccaagtcca

SEQ ID NO: 1687097 - DNA, 25 bp, Homo sapien
taaatccacttgtgcttatcagaac

SEQ ID NO: 1687098 - DNA, 25 bp, Homo sapien
tcaaaatctaggaatcagcaggcag

SEQ ID NO: 1687099 - DNA, 25 bp, Homo sapien
gatgtattggagtgcagccgacttc

SEQ ID NO: 1687100 - DNA, 25 bp, Homo sapien
gactgaagttataaggctagacccg

SEQ ID NO: 1687101 - DNA, 25 bp, Homo sapien
gctagacccggaagtatttgaatac

SEQ ID NO: 1687102 - DNA, 25 bp, Homo sapien
gattttcagcgagaatgtgtgcaca

SEQ ID NO: 1687103 - DNA, 25 bp, Homo sapien
tgattaattctcctccgcctcagag

SEQ ID NO: 1687104 - DNA, 25 bp, Homo sapien
tggaaacaataaacacgcaggcccc

SEQ ID NO: 1687105 - DNA, 25 bp, Homo sapien
tttctggagcattgatgagaccgct

SEQ ID NO: 1687106 - DNA, 25 bp, Homo sapien
aagcgatgcggtcctcagaaataca

SEQ ID NO: 1687107 - DNA, 25 bp, Homo sapien
cagtatggcgatataaaagctcagc

SEQ ID NO: 1687108 - DNA, 25 bp, Homo sapien
tcaaggaaggatctgctgcccagct

SEQ ID NO: 1687109 - DNA, 25 bp, Homo sapien
gaactcccctcgtagctgtctgaag

SEQ ID NO: 1687110 - DNA, 25 bp, Homo sapien
gaatcacttcagtcgaggtaacacc

SEQ ID NO: 1687111 - DNA, 25 bp, Homo sapien
agagtcaagggtatagattccagcc

SEQ ID NO: 1687112 - DNA, 25 bp, Homo sapien
gggcttctccaattcacacagcaga

SEQ ID NO: 1687113 - DNA, 25 bp, Homo sapien
cagatatctgggcatccaatggccc

SEQ ID NO: 1687114 - DNA, 25 bp, Homo sapien
tctaattctatggatggtggccaca

SEQ ID NO: 1687115 - DNA, 25 bp, Homo sapien
gctcggggtccgctatcagcttctt

SEQ ID NO: 1687116 - DNA, 25 bp, Homo sapien
tcttcaggctgcgggttcaggtatg

SEQ ID NO: 1687117 - DNA, 25 bp, Homo sapien
gaagacattcaggtcgcctagctac

SEQ ID NO: 1687118 - DNA, 25 bp, Homo sapien
gcgcccgaggtccaagtaaggagca

SEQ ID NO: 1687119 - DNA, 25 bp, Homo sapien
ggagaaggagttatcacctttcagc

SEQ ID NO: 1687120 - DNA, 25 bp, Homo sapien
ggagatctttgcgtccgtgtttgcg

SEQ ID NO: 1687121 - DNA, 25 bp, Homo sapien
gtgcatttactttgatcaagaatca

SEQ ID NO: 1687122 - DNA, 25 bp, Homo sapien
aaagggtggattactcctgccagcc

SEQ ID NO: 1687123 - DNA, 25 bp, Homo sapien
atatttttaaacgcatagctgggca

SEQ ID NO: 1687124 - DNA, 25 bp, Homo sapien
cttgggggtttgtgcattcttcaaa

SEQ ID NO: 1687125 - DNA, 25 bp, Homo sapien
gggggtttgtgcattcttcaaagtc

SEQ ID NO: 1687126 - DNA, 25 bp, Homo sapien
gccttgggggtttgtgcattcttca

SEQ ID NO: 1687127 - DNA, 25 bp, Homo sapien
ggccttgggggtttgtgcattcttc

SEQ ID NO: 1687128 - DNA, 25 bp, Homo sapien
gagaatacagctactctgtgccgaa

SEQ ID NO: 1687129 - DNA, 25 bp, Homo sapien
taaacagcaagggtctagacaagct

SEQ ID NO: 1687130 - DNA, 25 bp, Homo sapien
ggtgtcagacccttgctttaacagc

SEQ ID NO: 1687131 - DNA, 25 bp, Homo sapien
gccatcgggttttggctgctttaca

SEQ ID NO: 1687132 - DNA, 25 bp, Homo sapien
tcaccatttgcaaagactctcacaa

SEQ ID NO: 1687133 - DNA, 25 bp, Homo sapien
cagatgtaccgaataggatttcaac

SEQ ID NO: 1687134 - DNA, 25 bp, Homo sapien
cagcttgaggaagcatgttcatgca

SEQ ID NO: 1687135 - DNA, 25 bp, Homo sapien
tatctgaggcaatttgtagtgggtc

SEQ ID NO: 1687136 - DNA, 25 bp, Homo sapien
gaaaaatgctgaacgatgttgtgcc

SEQ ID NO: 1687137 - DNA, 25 bp, Homo sapien
gcacaaaagtatcagaccacttctg

SEQ ID NO: 1687138 - DNA, 25 bp, Homo sapien
gaagatgatagtgaggtgcccagcc

SEQ ID NO: 1687139 - DNA, 25 bp, Homo sapien
gactgacaggagcttttgaggatac

SEQ ID NO: 1687140 - DNA, 25 bp, Homo sapien
agacgccgctgacgctgatctcctc

SEQ ID NO: 1687141 - DNA, 25 bp, Homo sapien
acgccgctgacgctgatctcctccc

SEQ ID NO: 1687142 - DNA, 25 bp, Homo sapien
tgaagacgccgctgacgctgatctc

SEQ ID NO: 1687143 - DNA, 25 bp, Homo sapien
aagacgccgctgacgctgatctcct

SEQ ID NO: 1687144 - DNA, 25 bp, Homo sapien
caattgacccaccaagtcagcctgg

SEQ ID NO: 1687145 - DNA, 25 bp, Homo sapien
caagtagctcacagaggtagcagca

SEQ ID NO: 1687146 - DNA, 25 bp, Homo sapien
gccaccagggtaggaacatatttca

SEQ ID NO: 1687147 - DNA, 25 bp, Homo sapien
gggaccatggtacaactgactggta

SEQ ID NO: 1687148 - DNA, 25 bp, Homo sapien
gaccgcctcctagccttgactggca

SEQ ID NO: 1687149 - DNA, 25 bp, Homo sapien
ttgcgctcccagacctacgggtcgg

SEQ ID NO: 1687150 - DNA, 25 bp, Homo sapien
tttgcaagactgcaacaggacttgc

SEQ ID NO: 1687151 - DNA, 25 bp, Homo sapien
gctctgcggctgacagctttacact

SEQ ID NO: 1687152 - DNA, 25 bp, Homo sapien
tgcgttcctccgtcgccgggcttct

SEQ ID NO: 1687153 - DNA, 25 bp, Homo sapien
tggcagcagacctgcgttcctccgt

SEQ ID NO: 1687154 - DNA, 25 bp, Homo sapien
gggcttctcagtagcctccctcgcg

SEQ ID NO: 1687155 - DNA, 25 bp, Homo sapien
gctggcacaccggacaggagctctt

SEQ ID NO: 1687156 - DNA, 25 bp, Homo sapien
tgtaacttggagactattaaccttc

SEQ ID NO: 1687157 - DNA, 25 bp, Homo sapien
caacagtttctaggatggcaatgag

SEQ ID NO: 1687158 - DNA, 25 bp, Homo sapien
gacttctgttttctcgccactgttt

SEQ ID NO: 1687159 - DNA, 25 bp, Homo sapien
gaactgatatgcaaatatagcccta

SEQ ID NO: 1687160 - DNA, 25 bp, Homo sapien
ttcagcattcttcagtctcctcaat

SEQ ID NO: 1687161 - DNA, 25 bp, Homo sapien
gtcttcagcattcttcagtctcctc

SEQ ID NO: 1687162 - DNA, 25 bp, Homo sapien
cagcctgtcttcagcattcttcagt

SEQ ID NO: 1687163 - DNA, 25 bp, Homo sapien
gcctgtcttcagcattcttcagtct

SEQ ID NO: 1687164 - DNA, 25 bp, Homo sapien
agatagtggagcctaccagctgagc

SEQ ID NO: 1687165 - DNA, 25 bp, Homo sapien
cgagatagtggagcctaccagctga

SEQ ID NO: 1687166 - DNA, 25 bp, Homo sapien
ggcgagatagtggagcctaccagct

SEQ ID NO: 1687167 - DNA, 25 bp, Homo sapien
atagtggagcctaccagctgagccc

SEQ ID NO: 1687168 - DNA, 25 bp, Homo sapien
tgtccagagactgctcacacaggca

SEQ ID NO: 1687169 - DNA, 25 bp, Homo sapien
cttgtccagagactgctcacacagg

SEQ ID NO: 1687170 - DNA, 25 bp, Homo sapien
agtttgcaagtgatgaggggggccg

SEQ ID NO: 1687171 - DNA, 25 bp, Homo sapien
caggcagagtttgcaagtgatgagg

SEQ ID NO: 1687172 - DNA, 25 bp, Homo sapien
tttcaaacataaattatactcagct

SEQ ID NO: 1687173 - DNA, 25 bp, Homo sapien
tgttccatagtttgaaccttaacag

SEQ ID NO: 1687174 - DNA, 25 bp, Homo sapien
ctggccagcatgttaaaatttttct

SEQ ID NO: 1687175 - DNA, 25 bp, Homo sapien
tgaaccttaacagaaagactattta

SEQ ID NO: 1687176 - DNA, 25 bp, Homo sapien
tactgaaacaataacaggacagtgt

SEQ ID NO: 1687177 - DNA, 25 bp, Homo sapien
ttttaaacagcagtaaccctcagtg

SEQ ID NO: 1687178 - DNA, 25 bp, Homo sapien
gacgcacacgcttaaattctgcact

SEQ ID NO: 1687179 - DNA, 25 bp, Homo sapien
gattttcaccacatgttgcttctga

SEQ ID NO: 1687180 - DNA, 25 bp, Homo sapien
tatataccggcataacatcaaatct

SEQ ID NO: 1687181 - DNA, 25 bp, Homo sapien
tcattacatgtggatactccctggg

SEQ ID NO: 1687182 - DNA, 25 bp, Homo sapien
caaatctagcaggaagatcattaca

SEQ ID NO: 1687183 - DNA, 25 bp, Homo sapien
gcacaagcaattgggagatgtcatc

SEQ ID NO: 1687184 - DNA, 25 bp, Homo sapien
tagatcctcttgtagttcataagca

SEQ ID NO: 1687185 - DNA, 25 bp, Homo sapien
ttctcccagtcacatgagatatgcc

SEQ ID NO: 1687186 - DNA, 25 bp, Homo sapien
taaatccaagaaaatataccagtat

SEQ ID NO: 1687187 - DNA, 25 bp, Homo sapien
agtcacatgagatatgcctccctca

SEQ ID NO: 1687188 - DNA, 25 bp, Homo sapien
tgtaaatatactaataaagcaggaa

SEQ ID NO: 1687189 - DNA, 25 bp, Homo sapien
gtaaatatactaataaagcaggaat

SEQ ID NO: 1687190 - DNA, 25 bp, Homo sapien
aaatatactaataaagcaggaatat

SEQ ID NO: 1687191 - DNA, 25 bp, Homo sapien
ataacacacttaaggaatatatcac

SEQ ID NO: 1687192 - DNA, 25 bp, Homo sapien
ttaacacattacctagggaaagcag

SEQ ID NO: 1687193 - DNA, 25 bp, Homo sapien
gatattcaatgactccacagcaaaa

SEQ ID NO: 1687194 - DNA, 25 bp, Homo sapien
gttatcaataccataaaccgtaaga

SEQ ID NO: 1687195 - DNA, 25 bp, Homo sapien
taagttacattgcatcaagaccacg

SEQ ID NO: 1687196 - DNA, 25 bp, Homo sapien
taagttcccaggtctcgttggtgcc

SEQ ID NO: 1687197 - DNA, 25 bp, Homo sapien
tctctaagagaaggatccaggtgtc

SEQ ID NO: 1687198 - DNA, 25 bp, Homo sapien
tccaagttatttgaggatcccatca

SEQ ID NO: 1687199 - DNA, 25 bp, Homo sapien
ggtttccagaagtccaatgcccagg

SEQ ID NO: 1687200 - DNA, 25 bp, Homo sapien
tcttgacacataggagccaactctg

SEQ ID NO: 1687201 - DNA, 25 bp, Homo sapien
tcagaaacccgaaacactactggtc

SEQ ID NO: 1687202 - DNA, 25 bp, Homo sapien
tcaggaaatttacctattcattacc

SEQ ID NO: 1687203 - DNA, 25 bp, Homo sapien
tctgataactgaaacatatgaaccc

SEQ ID NO: 1687204 - DNA, 25 bp, Homo sapien
ataaacagtgtgaaagcctgtccat

SEQ ID NO: 1687205 - DNA, 25 bp, Homo sapien
taaacagtgtgaaagcctgtccatc

SEQ ID NO: 1687206 - DNA, 25 bp, Homo sapien
aaacagtgtgaaagcctgtccatcc

SEQ ID NO: 1687207 - DNA, 25 bp, Homo sapien
taggcacaccatgtcagggcaagtg

SEQ ID NO: 1687208 - DNA, 25 bp, Homo sapien
ttctcggattgccagctgcatgtac

SEQ ID NO: 1687209 - DNA, 25 bp, Homo sapien
cagggcaagtgatgggagacccaca

SEQ ID NO: 1687210 - DNA, 25 bp, Homo sapien
tgcagggtcccgtggtttaggcaca

SEQ ID NO: 1687211 - DNA, 25 bp, Homo sapien
atgacactgaaagggaagctgccgt

SEQ ID NO: 1687212 - DNA, 25 bp, Homo sapien
taactcccttcttacagaaattctg

SEQ ID NO: 1687213 - DNA, 25 bp, Homo sapien
cctttctctggtgcacactgcggca

SEQ ID NO: 1687214 - DNA, 25 bp, Homo sapien
cccaccctttctctggtgcacactg

SEQ ID NO: 1687215 - DNA, 25 bp, Homo sapien
tgccctgccctaactcccttcttac

SEQ ID NO: 1687216 - DNA, 25 bp, Homo sapien
aattccccagtactcgatccctcct

SEQ ID NO: 1687217 - DNA, 25 bp, Homo sapien
gcaaacatagcttcaaattccccag

SEQ ID NO: 1687218 - DNA, 25 bp, Homo sapien
agtactcgatccctcctccaccata

SEQ ID NO: 1687219 - DNA, 25 bp, Homo sapien
tagcttcaaattccccagtactcga

SEQ ID NO: 1687220 - DNA, 25 bp, Homo sapien
cctctgataaagttgaaactggtcc

SEQ ID NO: 1687221 - DNA, 25 bp, Homo sapien
ggtccacaggtaccaaacaggcaat

SEQ ID NO: 1687222 - DNA, 25 bp, Homo sapien
gataaagttgaaactggtccacagg

SEQ ID NO: 1687223 - DNA, 25 bp, Homo sapien
agttgaaactggtccacaggtacca

SEQ ID NO: 1687224 - DNA, 25 bp, Homo sapien
tatactcaatgagactagaccagtc

SEQ ID NO: 1687225 - DNA, 25 bp, Homo sapien
tattctcctataagaccaagccaga

SEQ ID NO: 1687226 - DNA, 25 bp, Homo sapien
ctccttttagagtacccttgaggct

SEQ ID NO: 1687227 - DNA, 25 bp, Homo sapien
taatccacccatgagataaatctgg

SEQ ID NO: 1687228 - DNA, 25 bp, Homo sapien
tagagttggagaactgacagccatc

SEQ ID NO: 1687229 - DNA, 25 bp, Homo sapien
taccaatgtgcaacttagggacaat

SEQ ID NO: 1687230 - DNA, 25 bp, Homo sapien
taatagctagtcataacacattggc

SEQ ID NO: 1687231 - DNA, 25 bp, Homo sapien
ggatattctgctccctaccaatgtg

SEQ ID NO: 1687232 - DNA, 25 bp, Homo sapien
aaatgtgatggtctgcccgattcat

SEQ ID NO: 1687233 - DNA, 25 bp, Homo sapien
caagcatccttgcaacacgagcaga

SEQ ID NO: 1687234 - DNA, 25 bp, Homo sapien
tgtcctgggtcactcgaggcaacag

SEQ ID NO: 1687235 - DNA, 25 bp, Homo sapien
caacaggacaccatgttcggtaggg

SEQ ID NO: 1687236 - DNA, 25 bp, Homo sapien
aataggctgactgtctctacaggag

SEQ ID NO: 1687237 - DNA, 25 bp, Homo sapien
caaaatgtatgcttgcagtttttgc

SEQ ID NO: 1687238 - DNA, 25 bp, Homo sapien
tggaggcagtaccagcaaaatgtat

SEQ ID NO: 1687239 - DNA, 25 bp, Homo sapien
tataaacccggcaaactgggcactg

SEQ ID NO: 1687240 - DNA, 25 bp, Homo sapien
tgagcgcagccttcattgcgttcga

SEQ ID NO: 1687241 - DNA, 25 bp, Homo sapien
gaagataagtttggacacgttgaac

SEQ ID NO: 1687242 - DNA, 25 bp, Homo sapien
gagatggttgagacatccaagcagg

SEQ ID NO: 1687243 - DNA, 25 bp, Homo sapien
gaaggcagtcgctttattgagagaa

SEQ ID NO: 1687244 - DNA, 25 bp, Homo sapien
tccaagcagggctgttcaaaaggca

SEQ ID NO: 1687245 - DNA, 25 bp, Homo sapien
atggccctttgtcataatgtctgag

SEQ ID NO: 1687246 - DNA, 25 bp, Homo sapien
ccaagtttattcctgcatggccctt

SEQ ID NO: 1687247 - DNA, 25 bp, Homo sapien
tggccctttgtcataatgtctgagg

SEQ ID NO: 1687248 - DNA, 25 bp, Homo sapien
ggccctttgtcataatgtctgagga

SEQ ID NO: 1687249 - DNA, 25 bp, Homo sapien
ggacttgcagacacaacagattata

SEQ ID NO: 1687250 - DNA, 25 bp, Homo sapien
gttgtggatgggtcgtgctttttct

SEQ ID NO: 1687251 - DNA, 25 bp, Homo sapien
tgatgcccaagcctacgagaatccc

SEQ ID NO: 1687252 - DNA, 25 bp, Homo sapien
tcttcttgccccgacaggacttgca

SEQ ID NO: 1687253 - DNA, 25 bp, Homo sapien
atctcatgtaactcacatatctggg

SEQ ID NO: 1687254 - DNA, 25 bp, Homo sapien
gtgccatctcatgtaactcacatat

SEQ ID NO: 1687255 - DNA, 25 bp, Homo sapien
ctggggcgtatgaacacagagatct

SEQ ID NO: 1687256 - DNA, 25 bp, Homo sapien
aaggtcactaaatggggctttatca

SEQ ID NO: 1687257 - DNA, 25 bp, Homo sapien
acaggaacactcacacccaggactt

SEQ ID NO: 1687258 - DNA, 25 bp, Homo sapien
ccgttgagcccagttcttgttacac

SEQ ID NO: 1687259 - DNA, 25 bp, Homo sapien
aggaacactcacacccaggacttgg

SEQ ID NO: 1687260 - DNA, 25 bp, Homo sapien
agaaacagctggaccgttgagccca

SEQ ID NO: 1687261 - DNA, 25 bp, Homo sapien
tgaacacagatcctgagaaaggtcc

SEQ ID NO: 1687262 - DNA, 25 bp, Homo sapien
tatatcaaatgttcccgcaagctcc

SEQ ID NO: 1687263 - DNA, 25 bp, Homo sapien
tgccaaatcacagcgggaacatggg

SEQ ID NO: 1687264 - DNA, 25 bp, Homo sapien
gaaaggtcccagatatctatgacga

SEQ ID NO: 1687265 - DNA, 25 bp, Homo sapien
aacaataggtccgagatagcagcaa

SEQ ID NO: 1687266 - DNA, 25 bp, Homo sapien
caattagcgtttttacagagatggc

SEQ ID NO: 1687267 - DNA, 25 bp, Homo sapien
gaagcaccaggctacattgccaata

SEQ ID NO: 1687268 - DNA, 25 bp, Homo sapien
ggcagtgggctacgtgtaaaacaaa

SEQ ID NO: 1687269 - DNA, 25 bp, Homo sapien
tgagttctcgtaatcccctgagcag

SEQ ID NO: 1687270 - DNA, 25 bp, Homo sapien
tttcagttgagttctcgtaatcccc

SEQ ID NO: 1687271 - DNA, 25 bp, Homo sapien
ccctgagcagttataaatgcctttt

SEQ ID NO: 1687272 - DNA, 25 bp, Homo sapien
taatcccctgagcagttataaatgc

SEQ ID NO: 1687273 - DNA, 25 bp, Homo sapien
tgccccttgatgtaccagagatatg

SEQ ID NO: 1687274 - DNA, 25 bp, Homo sapien
tcaactcgccaaggaaatagcacat

SEQ ID NO: 1687275 - DNA, 25 bp, Homo sapien
tactgacagaggactttgccactat

SEQ ID NO: 1687276 - DNA, 25 bp, Homo sapien
tttagactggtttgtatcatgcccc

SEQ ID NO: 1687277 - DNA, 25 bp, Homo sapien
caggaggataaggtgagaggaacac

SEQ ID NO: 1687278 - DNA, 25 bp, Homo sapien
ctgctcaggaggataaggtgagagg

SEQ ID NO: 1687279 - DNA, 25 bp, Homo sapien
gctcaggaggataaggtgagaggaa

SEQ ID NO: 1687280 - DNA, 25 bp, Homo sapien
agctgctcaggaggataaggtgaga

SEQ ID NO: 1687281 - DNA, 25 bp, Homo sapien
caaagctggcagaccaagaaaggag

SEQ ID NO: 1687282 - DNA, 25 bp, Homo sapien
gaggcaagggtaaactctgtcactg

SEQ ID NO: 1687283 - DNA, 25 bp, Homo sapien
tcctagatgggacaatggcaagata

SEQ ID NO: 1687284 - DNA, 25 bp, Homo sapien
tccaagtccaaagcaaatacccatg

SEQ ID NO: 1687285 - DNA, 25 bp, Homo sapien
gactctatatcacataaaggcatcc

SEQ ID NO: 1687286 - DNA, 25 bp, Homo sapien
tctgaaattgcccttaaagctacac

SEQ ID NO: 1687287 - DNA, 25 bp, Homo sapien
ttacatttattgtggctagagagcc

SEQ ID NO: 1687288 - DNA, 25 bp, Homo sapien
aaaacttcctggatcatgaatcaac

SEQ ID NO: 1687289 - DNA, 25 bp, Homo sapien
cctactctcagaacccattggaata

SEQ ID NO: 1687290 - DNA, 25 bp, Homo sapien
actctcagaacccattggaatatcc

SEQ ID NO: 1687291 - DNA, 25 bp, Homo sapien
ttcctactctcagaacccattggaa

SEQ ID NO: 1687292 - DNA, 25 bp, Homo sapien
ttactaccttcatctaatatcttcc

SEQ ID NO: 1687293 - DNA, 25 bp, Homo sapien
cccgggaaagactcttgataaatat

SEQ ID NO: 1687294 - DNA, 25 bp, Homo sapien
tgtgatcagggggtttccacagcac

SEQ ID NO: 1687295 - DNA, 25 bp, Homo sapien
ttccttgtgatcagggggtttccac

SEQ ID NO: 1687296 - DNA, 25 bp, Homo sapien
cacagcacccgggaaagactcttga

SEQ ID NO: 1687297 - DNA, 25 bp, Homo sapien
ttctcaggaacgtgaagatgtagca

SEQ ID NO: 1687298 - DNA, 25 bp, Homo sapien
tgtaaccctacacacaagtagagtg

SEQ ID NO: 1687299 - DNA, 25 bp, Homo sapien
tcttggagatcatagaaccaaacag

SEQ ID NO: 1687300 - DNA, 25 bp, Homo sapien
tgcgaatgtcgtccacagattaggg

SEQ ID NO: 1687301 - DNA, 25 bp, Homo sapien
actgagaatttcaatgccgtagagg

SEQ ID NO: 1687302 - DNA, 25 bp, Homo sapien
tgagaatttcaatgccgtagaggta

SEQ ID NO: 1687303 - DNA, 25 bp, Homo sapien
agcccaaggccaaaagagagattcc

SEQ ID NO: 1687304 - DNA, 25 bp, Homo sapien
acagcccaaggccaaaagagagatt

SEQ ID NO: 1687305 - DNA, 25 bp, Homo sapien
ggtggtatcagaataaaaaatagca

SEQ ID NO: 1687306 - DNA, 25 bp, Homo sapien
gtggtatcagaataaaaaatagcaa

SEQ ID NO: 1687307 - DNA, 25 bp, Homo sapien
tggtggtatcagaataaaaaatagc

SEQ ID NO: 1687308 - DNA, 25 bp, Homo sapien
ctggtggtatcagaataaaaaatag

SEQ ID NO: 1687309 - DNA, 25 bp, Homo sapien
gcttggttgccacgggattttattg

SEQ ID NO: 1687310 - DNA, 25 bp, Homo sapien
cacagagatagaaaggcggctgagt

SEQ ID NO: 1687311 - DNA, 25 bp, Homo sapien
tctgcctgttcgacacacacagaga

SEQ ID NO: 1687312 - DNA, 25 bp, Homo sapien
tacttgtcgcgaagagcttggttgc

SEQ ID NO: 1687313 - DNA, 25 bp, Homo sapien
gtagattcatactcaaccatcagca

SEQ ID NO: 1687314 - DNA, 25 bp, Homo sapien
tttggcggcatcgtaactagccatt

SEQ ID NO: 1687315 - DNA, 25 bp, Homo sapien
taactagccattgtgttgtacatgg

SEQ ID NO: 1687316 - DNA, 25 bp, Homo sapien
ttgtacatggcccagtagattcata

SEQ ID NO: 1687317 - DNA, 25 bp, Homo sapien
gagcaagtcacattctacgtggatg

SEQ ID NO: 1687318 - DNA, 25 bp, Homo sapien
caagtcacattctacgtggatggcg

SEQ ID NO: 1687319 - DNA, 25 bp, Homo sapien
aggagcaagtcacattctacgtgga

SEQ ID NO: 1687320 - DNA, 25 bp, Homo sapien
gtcacattctacgtggatggcggca

SEQ ID NO: 1687321 - DNA, 25 bp, Homo sapien
agcagcaccgaggaacatgccagaa

SEQ ID NO: 1687322 - DNA, 25 bp, Homo sapien
gagaacaggacaaccagacacagag

SEQ ID NO: 1687323 - DNA, 25 bp, Homo sapien
gatattatggaagcacaactgaaca

SEQ ID NO: 1687324 - DNA, 25 bp, Homo sapien
catgccagaaatgcgcatccttggg

SEQ ID NO: 1687325 - DNA, 25 bp, Homo sapien
agatgctggctcttcccatgccgtg

SEQ ID NO: 1687326 - DNA, 25 bp, Homo sapien
agcctccagtgtccccgggatgggt

SEQ ID NO: 1687327 - DNA, 25 bp, Homo sapien
tgcagcagtgagactgtattcctgg

SEQ ID NO: 1687328 - DNA, 25 bp, Homo sapien
tgcagcgaggaaggagtgagcctcc

SEQ ID NO: 1687329 - DNA, 25 bp, Homo sapien
tgaggaacacatcttactcaggaag

SEQ ID NO: 1687330 - DNA, 25 bp, Homo sapien
ggaagggtcctgggcatatcacctt

SEQ ID NO: 1687331 - DNA, 25 bp, Homo sapien
agggtcctgggcatatcaccttctc

SEQ ID NO: 1687332 - DNA, 25 bp, Homo sapien
ggaacacatcttactcaggaagggt

SEQ ID NO: 1687333 - DNA, 25 bp, Homo sapien
tcagccacgagaagagggtttccac

SEQ ID NO: 1687334 - DNA, 25 bp, Homo sapien
acattgtgcaagttgagaggcagcc

SEQ ID NO: 1687335 - DNA, 25 bp, Homo sapien
gcggtaaccctcgtgctctgaaata

SEQ ID NO: 1687336 - DNA, 25 bp, Homo sapien
cctgtggtaaataggcatctgccag

SEQ ID NO: 1687337 - DNA, 25 bp, Homo sapien
gaattgtgctttcccgtgtctgtca

SEQ ID NO: 1687338 - DNA, 25 bp, Homo sapien
gacatcttctgagcttcatgcctta

SEQ ID NO: 1687339 - DNA, 25 bp, Homo sapien
tcatgccttagctcaggtcggacac

SEQ ID NO: 1687340 - DNA, 25 bp, Homo sapien
tggacatatcagacatcttctgagc

SEQ ID NO: 1687341 - DNA, 25 bp, Homo sapien
gtctttggacatatcagacatcttc

SEQ ID NO: 1687342 - DNA, 25 bp, Homo sapien
gcctcttttgctacctggaacttca

SEQ ID NO: 1687343 - DNA, 25 bp, Homo sapien
agcctcttttgctacctggaacttc

SEQ ID NO: 1687344 - DNA, 25 bp, Homo sapien
tctctcaaaaggttttttctgataa

SEQ ID NO: 1687345 - DNA, 25 bp, Homo sapien
tattttataagcagtccttctaacc

SEQ ID NO: 1687346 - DNA, 25 bp, Homo sapien
taacccatataactctctctgatgc

SEQ ID NO: 1687347 - DNA, 25 bp, Homo sapien
tctctgatgctcaaagtagtaagga

SEQ ID NO: 1687348 - DNA, 25 bp, Homo sapien
cacatacaagcttactagcggttcc

SEQ ID NO: 1687349 - DNA, 25 bp, Homo sapien
agagagtgaacacacatacaagctt

SEQ ID NO: 1687350 - DNA, 25 bp, Homo sapien
gaacacacatacaagcttactagcg

SEQ ID NO: 1687351 - DNA, 25 bp, Homo sapien
acaagcttactagcggttccaagaa

SEQ ID NO: 1687352 - DNA, 25 bp, Homo sapien
caaacgacgatctgcagaacaagag

SEQ ID NO: 1687353 - DNA, 25 bp, Homo sapien
aacagcattgtccaaacgacgatct

SEQ ID NO: 1687354 - DNA, 25 bp, Homo sapien
cattgtccaaacgacgatctgcaga

SEQ ID NO: 1687355 - DNA, 25 bp, Homo sapien
ttttgtatacaatactgcacaacag

SEQ ID NO: 1687356 - DNA, 25 bp, Homo sapien
tggccttgctctccagacagtccat

SEQ ID NO: 1687357 - DNA, 25 bp, Homo sapien
ggtggccttgctctccagacagtcc

SEQ ID NO: 1687358 - DNA, 25 bp, Homo sapien
gtggccttgctctccagacagtcca

SEQ ID NO: 1687359 - DNA, 25 bp, Homo sapien
catactgggggacccacggcttcca

SEQ ID NO: 1687360 - DNA, 25 bp, Homo sapien
tgccatgctgccatactgggggacc

SEQ ID NO: 1687361 - DNA, 25 bp, Homo sapien
gacactggcagaatgccatgctgcc

SEQ ID NO: 1687362 - DNA, 25 bp, Homo sapien
cagagacactggcagaatgccatgc

SEQ ID NO: 1687363 - DNA, 25 bp, Homo sapien
ggaaggagatctgagctgtcacctc

SEQ ID NO: 1687364 - DNA, 25 bp, Homo sapien
tgctgtctgcagcatgttctcctgg

SEQ ID NO: 1687365 - DNA, 25 bp, Homo sapien
atgttctcctggaaggagatctgag

SEQ ID NO: 1687366 - DNA, 25 bp, Homo sapien
ctcctggaaggagatctgagctgtc

SEQ ID NO: 1687367 - DNA, 25 bp, Homo sapien
tctaaaggtgagatagtagaggccc

SEQ ID NO: 1687368 - DNA, 25 bp, Homo sapien
ccatctaaaggtgagatagtagagg

SEQ ID NO: 1687369 - DNA, 25 bp, Homo sapien
atctaaaggtgagatagtagaggcc

SEQ ID NO: 1687370 - DNA, 25 bp, Homo sapien
catctaaaggtgagatagtagaggc

SEQ ID NO: 1687371 - DNA, 25 bp, Homo sapien
gtttcctctctcgacaggagcccat

SEQ ID NO: 1687372 - DNA, 25 bp, Homo sapien
ggtggcccactctgttccagttcat

SEQ ID NO: 1687373 - DNA, 25 bp, Homo sapien
tgtactttttatactctgccacccg

SEQ ID NO: 1687374 - DNA, 25 bp, Homo sapien
ccacccgtgcggtcccaggcctttg

SEQ ID NO: 1687375 - DNA, 25 bp, Homo sapien
tccacgggagtatcctcactttttg

SEQ ID NO: 1687376 - DNA, 25 bp, Homo sapien
caacctcagcttagaggatcaggca

SEQ ID NO: 1687377 - DNA, 25 bp, Homo sapien
gattcactccgtgtgatgactcaag

SEQ ID NO: 1687378 - DNA, 25 bp, Homo sapien
gaattcatacggacaacttcaggaa

SEQ ID NO: 1687379 - DNA, 25 bp, Homo sapien
caggcagtgccatttgccctgcaag

SEQ ID NO: 1687380 - DNA, 25 bp, Homo sapien
gctgccaagtcttggcagcgggtga

SEQ ID NO: 1687381 - DNA, 25 bp, Homo sapien
tcctccttggcctgagaatccaagc

SEQ ID NO: 1687382 - DNA, 25 bp, Homo sapien
ctcctccttggcctgagaatccaag

SEQ ID NO: 1687383 - DNA, 25 bp, Homo sapien
ctttggtgacgaaggaagccacgct

SEQ ID NO: 1687384 - DNA, 25 bp, Homo sapien
ttggtgacgaaggaagccacgctct

SEQ ID NO: 1687385 - DNA, 25 bp, Homo sapien
ggtgacgaaggaagccacgctctgc

SEQ ID NO: 1687386 - DNA, 25 bp, Homo sapien
tttggtgacgaaggaagccacgctc

SEQ ID NO: 1687387 - DNA, 25 bp, Homo sapien
tcggcaggctgtagcaaaatcacag

SEQ ID NO: 1687388 - DNA, 25 bp, Homo sapien
cactgtgtccctctcggtttcggca

SEQ ID NO: 1687389 - DNA, 25 bp, Homo sapien
ctgcttcgcggaggtgtacggcttt

SEQ ID NO: 1687390 - DNA, 25 bp, Homo sapien
gaggtgtacggctttcactgtgtcc

SEQ ID NO: 1687391 - DNA, 25 bp, Homo sapien
gcccattgttcattagtgaaatgtg

SEQ ID NO: 1687392 - DNA, 25 bp, Homo sapien
caaagtgcccattgttcattagtga

SEQ ID NO: 1687393 - DNA, 25 bp, Homo sapien
aagtgcccattgttcattagtgaaa

SEQ ID NO: 1687394 - DNA, 25 bp, Homo sapien
gtgcccattgttcattagtgaaatg

SEQ ID NO: 1687395 - DNA, 25 bp, Homo sapien
tgttcagcagataaataatgacacc

SEQ ID NO: 1687396 - DNA, 25 bp, Homo sapien
gcagataaataatgacacccattca

SEQ ID NO: 1687397 - DNA, 25 bp, Homo sapien
cccaggctctctgctatggtcgacg

SEQ ID NO: 1687398 - DNA, 25 bp, Homo sapien
tgctatggtcgacgctgagagacag

SEQ ID NO: 1687399 - DNA, 25 bp, Homo sapien
gagcaataggattttcaaagctccc

SEQ ID NO: 1687400 - DNA, 25 bp, Homo sapien
tttcatcctggatagatacagcaaa

SEQ ID NO: 1687401 - DNA, 25 bp, Homo sapien
cacagggacatcagtgaggtctgtg

SEQ ID NO: 1687402 - DNA, 25 bp, Homo sapien
agtgaagggtggagcaataggattt

SEQ ID NO: 1687403 - DNA, 25 bp, Homo sapien
agcagttgtgctgtaattaggatcc

SEQ ID NO: 1687404 - DNA, 25 bp, Homo sapien
catactgttgaattctccctctagc

SEQ ID NO: 1687405 - DNA, 25 bp, Homo sapien
tttcaaccttagcaggcagctggca

SEQ ID NO: 1687406 - DNA, 25 bp, Homo sapien
tactcaaaggcctatctggaagcct

SEQ ID NO: 1687407 - DNA, 25 bp, Homo sapien
taacctgggttcatttcccagccag

SEQ ID NO: 1687408 - DNA, 25 bp, Homo sapien
ttaacctgggttcatttcccagcca

SEQ ID NO: 1687409 - DNA, 25 bp, Homo sapien
tcatttcccagccagctcttcggaa

SEQ ID NO: 1687410 - DNA, 25 bp, Homo sapien
gggttcatttcccagccagctcttc

SEQ ID NO: 1687411 - DNA, 25 bp, Homo sapien
tatggaagagccacctaaaaagcag

SEQ ID NO: 1687412 - DNA, 25 bp, Homo sapien
atatggaagagccacctaaaaagca

SEQ ID NO: 1687413 - DNA, 25 bp, Homo sapien
tagctcagaaattataagaacagga

SEQ ID NO: 1687414 - DNA, 25 bp, Homo sapien
cagcagttgctatttaccagtctca

SEQ ID NO: 1687415 - DNA, 25 bp, Homo sapien
gcagaaactgttagctcagaaatta

SEQ ID NO: 1687416 - DNA, 25 bp, Homo sapien
caggaatgcgtgcaccagagttttc

SEQ ID NO: 1687417 - DNA, 25 bp, Homo sapien
ccttcctaaggagcatcacagtttc

SEQ ID NO: 1687418 - DNA, 25 bp, Homo sapien
gataaccggatatcatttgagcctg

SEQ ID NO: 1687419 - DNA, 25 bp, Homo sapien
tttcaggcatcacctcatgcagagg

SEQ ID NO: 1687420 - DNA, 25 bp, Homo sapien
ttgcctaagatacagtgcccagttg

SEQ ID NO: 1687421 - DNA, 25 bp, Homo sapien
tagcttcaccaccacttgcctgagg

SEQ ID NO: 1687422 - DNA, 25 bp, Homo sapien
ttctgttaaagtaccgccatctagc

SEQ ID NO: 1687423 - DNA, 25 bp, Homo sapien
ccttgccacagtttccctggtatct

SEQ ID NO: 1687424 - DNA, 25 bp, Homo sapien
aagtaccgccatctagccctttctt

SEQ ID NO: 1687425 - DNA, 25 bp, Homo sapien
tgaccctcaactttaccaatggcag

SEQ ID NO: 1687426 - DNA, 25 bp, Homo sapien
tattccagaacatgaccctcaactt

SEQ ID NO: 1687427 - DNA, 25 bp, Homo sapien
cagaacatgaccctcaactttacca

SEQ ID NO: 1687428 - DNA, 25 bp, Homo sapien
gccatattccagaacatgaccctca

SEQ ID NO: 1687429 - DNA, 25 bp, Homo sapien
cccctgaagggctaactcaagttca

SEQ ID NO: 1687430 - DNA, 25 bp, Homo sapien
actcaagttcacagtcagcaaaatc

SEQ ID NO: 1687431 - DNA, 25 bp, Homo sapien
gctaactcaagttcacagtcagcaa

SEQ ID NO: 1687432 - DNA, 25 bp, Homo sapien
gaagggctaactcaagttcacagtc

SEQ ID NO: 1687433 - DNA, 25 bp, Homo sapien
acttaaagcttcaaatgaaagctgg

SEQ ID NO: 1687434 - DNA, 25 bp, Homo sapien
cttaaagcttcaaatgaaagctggc

SEQ ID NO: 1687435 - DNA, 25 bp, Homo sapien
catggtcaggctatgcaacctctaa

SEQ ID NO: 1687436 - DNA, 25 bp, Homo sapien
tagatgtaaacatggtcaggctatg

SEQ ID NO: 1687437 - DNA, 25 bp, Homo sapien
gctatgcaacctctaatcttcaatg

SEQ ID NO: 1687438 - DNA, 25 bp, Homo sapien
tctaatcttcaatgtcctccttcct

SEQ ID NO: 1687439 - DNA, 25 bp, Homo sapien
tgccctcctctgaacaaccgaggaa

SEQ ID NO: 1687440 - DNA, 25 bp, Homo sapien
catggcgagctccaatgtgacatgg

SEQ ID NO: 1687441 - DNA, 25 bp, Homo sapien
gctgagcaccgatgttcttgttctt

SEQ ID NO: 1687442 - DNA, 25 bp, Homo sapien
tgacatggggcagattcatgctgag

SEQ ID NO: 1687443 - DNA, 25 bp, Homo sapien
agcgaagcaatctcttcatctgcag

SEQ ID NO: 1687444 - DNA, 25 bp, Homo sapien
agtcaggaggtttgaagcgaagcaa

SEQ ID NO: 1687445 - DNA, 25 bp, Homo sapien
ggtttgaagcgaagcaatctcttca

SEQ ID NO: 1687446 - DNA, 25 bp, Homo sapien
tcaggaggtttgaagcgaagcaatc

SEQ ID NO: 1687447 - DNA, 25 bp, Homo sapien
cctacatggagggagatttcaactg

SEQ ID NO: 1687448 - DNA, 25 bp, Homo sapien
tggttaggcaacacctgtagaggac

SEQ ID NO: 1687449 - DNA, 25 bp, Homo sapien
aaaagccatgctgcccgattgaata

SEQ ID NO: 1687450 - DNA, 25 bp, Homo sapien
tgatgtcactagtgcaaaagccatg

SEQ ID NO: 1687451 - DNA, 25 bp, Homo sapien
actgaacacaaaagggtcctgcagg

SEQ ID NO: 1687452 - DNA, 25 bp, Homo sapien
cactcctagaggtcattagaagctc

SEQ ID NO: 1687453 - DNA, 25 bp, Homo sapien
gctgctgcagtctacttcctttaga

SEQ ID NO: 1687454 - DNA, 25 bp, Homo sapien
ttgctgctgcagtctacttccttta

SEQ ID NO: 1687455 - DNA, 25 bp, Homo sapien
tgctgctgcagtctacttcctttag

SEQ ID NO: 1687456 - DNA, 25 bp, Homo sapien
attgctgctgcagtctacttccttt

SEQ ID NO: 1687457 - DNA, 25 bp, Homo sapien
gacacacaaagcacatcgcatttgc

SEQ ID NO: 1687458 - DNA, 25 bp, Homo sapien
tgctacagcttaggtctagcctcag

SEQ ID NO: 1687459 - DNA, 25 bp, Homo sapien
tgttcaccacactatagccgtggag

SEQ ID NO: 1687460 - DNA, 25 bp, Homo sapien
ggtcctaagcccatgttctatccta

SEQ ID NO: 1687461 - DNA, 25 bp, Homo sapien
gatatctactctaaaagtgttctgt

SEQ ID NO: 1687462 - DNA, 25 bp, Homo sapien
attgcattttcctagcatccttcta

SEQ ID NO: 1687463 - DNA, 25 bp, Homo sapien
caagttaattgtatcttagatctac

SEQ ID NO: 1687464 - DNA, 25 bp, Homo sapien
ttcttcccttgactaagttagctgg

SEQ ID NO: 1687465 - DNA, 25 bp, Homo sapien
ctgaatatagagcaagaaagccagc

SEQ ID NO: 1687466 - DNA, 25 bp, Homo sapien
tatagagcaagaaagccagcagcat

SEQ ID NO: 1687467 - DNA, 25 bp, Homo sapien
gaatatagagcaagaaagccagcag

SEQ ID NO: 1687468 - DNA, 25 bp, Homo sapien
aatatagagcaagaaagccagcagc

SEQ ID NO: 1687469 - DNA, 25 bp, Homo sapien
agagaggtcaactgagtccctttgt

SEQ ID NO: 1687470 - DNA, 25 bp, Homo sapien
cctcacctcttcttagagaggtcaa

SEQ ID NO: 1687471 - DNA, 25 bp, Homo sapien
ctcacctcttcttagagaggtcaac

SEQ ID NO: 1687472 - DNA, 25 bp, Homo sapien
gagaggtcaactgagtccctttgtc

SEQ ID NO: 1687473 - DNA, 25 bp, Homo sapien
tccaccgagatttgaactcggatcg

SEQ ID NO: 1687474 - DNA, 25 bp, Homo sapien
tttgaactcggatcgctggattcag

SEQ ID NO: 1687475 - DNA, 25 bp, Homo sapien
aggttccaccgagatttgaactcgg

SEQ ID NO: 1687476 - DNA, 25 bp, Homo sapien
tgaactcggatcgctggattcagag

SEQ ID NO: 1687477 - DNA, 25 bp, Homo sapien
taggttcacttttggacatcggccc

SEQ ID NO: 1687478 - DNA, 25 bp, Homo sapien
gtagataagactctgctgtttccct

SEQ ID NO: 1687479 - DNA, 25 bp, Homo sapien
tagctggcaccgagggcagatggca

SEQ ID NO: 1687480 - DNA, 25 bp, Homo sapien
gatggcagcagtaaccaagtagata

SEQ ID NO: 1687481 - DNA, 25 bp, Homo sapien
tagtggatcctctggaaacccataa

SEQ ID NO: 1687482 - DNA, 25 bp, Homo sapien
atctcagtagtggatcctctggaaa

SEQ ID NO: 1687483 - DNA, 25 bp, Homo sapien
tggatcctctggaaacccataaaat

SEQ ID NO: 1687484 - DNA, 25 bp, Homo sapien
cagtagtggatcctctggaaaccca

SEQ ID NO: 1687485 - DNA, 25 bp, Homo sapien
ttctcttcatctttttcagtgacca

SEQ ID NO: 1687486 - DNA, 25 bp, Homo sapien
ctaagatttctcttcatctttttca

SEQ ID NO: 1687487 - DNA, 25 bp, Homo sapien
agatttctcttcatctttttcagtg

SEQ ID NO: 1687488 - DNA, 25 bp, Homo sapien
gatttctcttcatctttttcagtga

SEQ ID NO: 1687489 - DNA, 25 bp, Homo sapien
ttttatgtgccccagtcctctttct

SEQ ID NO: 1687490 - DNA, 25 bp, Homo sapien
tattttatgtgccccagtcctcttt

SEQ ID NO: 1687491 - DNA, 25 bp, Homo sapien
tgtcttccaccatggcttctctttg

SEQ ID NO: 1687492 - DNA, 25 bp, Homo sapien
gtgtcttccaccatggcttctcttt

SEQ ID NO: 1687493 - DNA, 25 bp, Homo sapien
atgcaggcacttagggctacgaact

SEQ ID NO: 1687494 - DNA, 25 bp, Homo sapien
cttgttctgggttttcctagttgct

SEQ ID NO: 1687495 - DNA, 25 bp, Homo sapien
gcaggcacttagggctacgaacttt

SEQ ID NO: 1687496 - DNA, 25 bp, Homo sapien
tgcaggcacttagggctacgaactt

SEQ ID NO: 1687497 - DNA, 25 bp, Homo sapien
ttagtccagccgttatagaaaaggc

SEQ ID NO: 1687498 - DNA, 25 bp, Homo sapien
tccagccgttatagaaaaggcccat

SEQ ID NO: 1687499 - DNA, 25 bp, Homo sapien
ttcatttttagtccagccgttatag

SEQ ID NO: 1687500 - DNA, 25 bp, Homo sapien
cagtgctgctgaatactttcatttt

SEQ ID NO: 1687501 - DNA, 25 bp, Homo sapien
ttgagaaagtgcatgggtgaatgaa

SEQ ID NO: 1687502 - DNA, 25 bp, Homo sapien
aagtgcatgggtgaatgaaagggag

SEQ ID NO: 1687503 - DNA, 25 bp, Homo sapien
aaagggagataagcatgtgtgagtg

SEQ ID NO: 1687504 - DNA, 25 bp, Homo sapien
aagggagataagcatgtgtgagtgg

SEQ ID NO: 1687505 - DNA, 25 bp, Homo sapien
gcatcgcatcggctccatctttact

SEQ ID NO: 1687506 - DNA, 25 bp, Homo sapien
tcaggacggcggtagcagcatcgca

SEQ ID NO: 1687507 - DNA, 25 bp, Homo sapien
gtagcagcatcgcatcggctccatc

SEQ ID NO: 1687508 - DNA, 25 bp, Homo sapien
ggcggtagcagcatcgcatcggctc

SEQ ID NO: 1687509 - DNA, 25 bp, Homo sapien
gctgctccacgtcagttacaagggc

SEQ ID NO: 1687510 - DNA, 25 bp, Homo sapien
gtggcatctgttgtaggctccagca

SEQ ID NO: 1687511 - DNA, 25 bp, Homo sapien
gaaggcagccatatgcagagtggca

SEQ ID NO: 1687512 - DNA, 25 bp, Homo sapien
tacaagggcagtttctctgaaatga

SEQ ID NO: 1687513 - DNA, 25 bp, Homo sapien
ttaagtgttgtatggcaaactgctg

SEQ ID NO: 1687514 - DNA, 25 bp, Homo sapien
taagtgttgtatggcaaactgctgc

SEQ ID NO: 1687515 - DNA, 25 bp, Homo sapien
cttaagtgttgtatggcaaactgct

SEQ ID NO: 1687516 - DNA, 25 bp, Homo sapien
tcttaagtgttgtatggcaaactgc

SEQ ID NO: 1687517 - DNA, 25 bp, Homo sapien
ttgttcccgtggaacttctcattct

SEQ ID NO: 1687518 - DNA, 25 bp, Homo sapien
ggacaggatacacctcagcagaggc

SEQ ID NO: 1687519 - DNA, 25 bp, Homo sapien
tgcataagagaaagaacctgatagc

SEQ ID NO: 1687520 - DNA, 25 bp, Homo sapien
attctccatccccacgttgtcgtgg

SEQ ID NO: 1687521 - DNA, 25 bp, Homo sapien
atatggcctccaggttagacttggg

SEQ ID NO: 1687522 - DNA, 25 bp, Homo sapien
gtcctatcctgtggcggattcacta

SEQ ID NO: 1687523 - DNA, 25 bp, Homo sapien
gtggcggattcactatgtacccaag

SEQ ID NO: 1687524 - DNA, 25 bp, Homo sapien
atggtctcttagtgatatggcctcc

SEQ ID NO: 1687525 - DNA, 25 bp, Homo sapien
cagctgctgcttgtgttattgccat

SEQ ID NO: 1687526 - DNA, 25 bp, Homo sapien
acacttggacaccataaggagtggc

SEQ ID NO: 1687527 - DNA, 25 bp, Homo sapien
cttgctcttgggacactctttccaa

SEQ ID NO: 1687528 - DNA, 25 bp, Homo sapien
cctgaaggtaatttggagccttcca

SEQ ID NO: 1687529 - DNA, 25 bp, Homo sapien
ggctgcttccaacatataacccaag

SEQ ID NO: 1687530 - DNA, 25 bp, Homo sapien
caattgtccattagcaaccgccgat

SEQ ID NO: 1687531 - DNA, 25 bp, Homo sapien
agagtactgtgtatagacatccgcc

SEQ ID NO: 1687532 - DNA, 25 bp, Homo sapien
gacatccgccctgtatttagcttaa

SEQ ID NO: 1687533 - DNA, 25 bp, Homo sapien
gagagtactatttgccacgatctaa

SEQ ID NO: 1687534 - DNA, 25 bp, Homo sapien
catattgcttcctcaagagaacgtt

SEQ ID NO: 1687535 - DNA, 25 bp, Homo sapien
tagttgtgcatattgcttcctcaag

SEQ ID NO: 1687536 - DNA, 25 bp, Homo sapien
tgtgcatattgcttcctcaagagaa

SEQ ID NO: 1687537 - DNA, 25 bp, Homo sapien
ctttctagttgtgcatattgcttcc

SEQ ID NO: 1687538 - DNA, 25 bp, Homo sapien
tcattgggtgagttgtcatatgcaa

SEQ ID NO: 1687539 - DNA, 25 bp, Homo sapien
tcatatgcaaaggttaggcactttc

SEQ ID NO: 1687540 - DNA, 25 bp, Homo sapien
ggcactttcctactctagcccttag

SEQ ID NO: 1687541 - DNA, 25 bp, Homo sapien
gccttccctttgacttgatttaagc

SEQ ID NO: 1687542 - DNA, 25 bp, Homo sapien
agattattaaagtaaagagattctt

SEQ ID NO: 1687543 - DNA, 25 bp, Homo sapien
cctggtgctgaactttgccatgaac

SEQ ID NO: 1687544 - DNA, 25 bp, Homo sapien
gattattaaagtaaagagattcttc

SEQ ID NO: 1687545 - DNA, 25 bp, Homo sapien
ttcctggtgctgaactttgccatga

SEQ ID NO: 1687546 - DNA, 25 bp, Homo sapien
ccgagttccctccatttccctgcag

SEQ ID NO: 1687547 - DNA, 25 bp, Homo sapien
accgagttccctccatttccctgca

SEQ ID NO: 1687548 - DNA, 25 bp, Homo sapien
cgagttccctccatttccctgcagt

SEQ ID NO: 1687549 - DNA, 25 bp, Homo sapien
caaccgagttccctccatttccctg

SEQ ID NO: 1687550 - DNA, 25 bp, Homo sapien
ctgccaagatctgcacgaaatgttt

SEQ ID NO: 1687551 - DNA, 25 bp, Homo sapien
ccaagatctgcacgaaatgtttcaa

SEQ ID NO: 1687552 - DNA, 25 bp, Homo sapien
aaatggattcaccaatctgccaaga

SEQ ID NO: 1687553 - DNA, 25 bp, Homo sapien
gatttccaaatttcgagatttgcaa

SEQ ID NO: 1687554 - DNA, 25 bp, Homo sapien
gctgccagagattatcgtcttgata

SEQ ID NO: 1687555 - DNA, 25 bp, Homo sapien
agctgccagagattatcgtcttgat

SEQ ID NO: 1687556 - DNA, 25 bp, Homo sapien
tgccagagattatcgtcttgatagt

SEQ ID NO: 1687557 - DNA, 25 bp, Homo sapien
ccagagattatcgtcttgatagtag

SEQ ID NO: 1687558 - DNA, 25 bp, Homo sapien
aaactatggatccacagacttttcc

SEQ ID NO: 1687559 - DNA, 25 bp, Homo sapien
ctgacgtggaagtgcaatataaaca

SEQ ID NO: 1687560 - DNA, 25 bp, Homo sapien
cgtggaagtgcaatataaacataaa

SEQ ID NO: 1687561 - DNA, 25 bp, Homo sapien
tgtttgttatagcagaaactatgga

SEQ ID NO: 1687562 - DNA, 25 bp, Homo sapien
ttcctggattcttccacaggttctt

SEQ ID NO: 1687563 - DNA, 25 bp, Homo sapien
tttcctggattcttccacaggttct

SEQ ID NO: 1687564 - DNA, 25 bp, Homo sapien
tgctgccatccatgtactttcctca

SEQ ID NO: 1687565 - DNA, 25 bp, Homo sapien
tgccatccatgtactttcctcacat

SEQ ID NO: 1687566 - DNA, 25 bp, Homo sapien
tctgctgccatccatgtactttcct

SEQ ID NO: 1687567 - DNA, 25 bp, Homo sapien
gctgccatccatgtactttcctcac

SEQ ID NO: 1687568 - DNA, 25 bp, Homo sapien
tgttgatgctgcatcgatatgagtt

SEQ ID NO: 1687569 - DNA, 25 bp, Homo sapien
ttgatgctgcatcgatatgagtttg

SEQ ID NO: 1687570 - DNA, 25 bp, Homo sapien
gaaatcttacgatgtttgtgcaaaa

SEQ ID NO: 1687571 - DNA, 25 bp, Homo sapien
gtggttagttagaaatcttacgatg

SEQ ID NO: 1687572 - DNA, 25 bp, Homo sapien
tcgtcaggctcgtttgattccgtga

SEQ ID NO: 1687573 - DNA, 25 bp, Homo sapien
tcactccatgcagttgtcgtcaggc

SEQ ID NO: 1687574 - DNA, 25 bp, Homo sapien
tttgttcacactaataagccactgg

SEQ ID NO: 1687575 - DNA, 25 bp, Homo sapien
ccactggacacaagtcacacatatc

SEQ ID NO: 1687576 - DNA, 25 bp, Homo sapien
aaactctgccatctgagaagaacac

SEQ ID NO: 1687577 - DNA, 25 bp, Homo sapien
tgcaaactctgccatctgagaagaa

SEQ ID NO: 1687578 - DNA, 25 bp, Homo sapien
ggaaggttcacctgagagactggct

SEQ ID NO: 1687579 - DNA, 25 bp, Homo sapien
agggaaggttcacctgagagactgg

SEQ ID NO: 1687580 - DNA, 25 bp, Homo sapien
tctgttccgagtgcgtcacctccca

SEQ ID NO: 1687581 - DNA, 25 bp, Homo sapien
cttctgttccgagtgcgtcacctcc

SEQ ID NO: 1687582 - DNA, 25 bp, Homo sapien
ctgttccgagtgcgtcacctcccat

SEQ ID NO: 1687583 - DNA, 25 bp, Homo sapien
ttctgttccgagtgcgtcacctccc

SEQ ID NO: 1687584 - DNA, 25 bp, Homo sapien
tattgattggcgacctcagtgcctc

SEQ ID NO: 1687585 - DNA, 25 bp, Homo sapien
tgagtgtactcctgacatggcagct

SEQ ID NO: 1687586 - DNA, 25 bp, Homo sapien
tcccattaggccagctgagtgtact

SEQ ID NO: 1687587 - DNA, 25 bp, Homo sapien
cacagtaattgatccaagagagagt

SEQ ID NO: 1687588 - DNA, 25 bp, Homo sapien
tatccaatgtaagcaatggacagga

SEQ ID NO: 1687589 - DNA, 25 bp, Homo sapien
caatgtaagcaatggacaggagttc

SEQ ID NO: 1687590 - DNA, 25 bp, Homo sapien
ctatctatccaatgtaagcaatgga

SEQ ID NO: 1687591 - DNA, 25 bp, Homo sapien
tctatccaatgtaagcaatggacag

SEQ ID NO: 1687592 - DNA, 25 bp, Homo sapien
tagcattgagctgttggctcgccat

SEQ ID NO: 1687593 - DNA, 25 bp, Homo sapien
tcttaaccagattctagcattgagc

SEQ ID NO: 1687594 - DNA, 25 bp, Homo sapien
caagctgtgcaagtacccattggag

SEQ ID NO: 1687595 - DNA, 25 bp, Homo sapien
tttgaataaacaatcacagctctgt

SEQ ID NO: 1687596 - DNA, 25 bp, Homo sapien
gatgtttgtcacagtcagtagtgtg

SEQ ID NO: 1687597 - DNA, 25 bp, Homo sapien
tgtgatacgagagagtgagaacttt

SEQ ID NO: 1687598 - DNA, 25 bp, Homo sapien
gatgtatgtgggagatctgtcgaca

SEQ ID NO: 1687599 - DNA, 25 bp, Homo sapien
gagatctgtcgacacctctgtcagt

SEQ ID NO: 1687600 - DNA, 25 bp, Homo sapien
cggcatgaaacaatgcatctttcaa

SEQ ID NO: 1687601 - DNA, 25 bp, Homo sapien
ttactgtacaaaaacggcatgaaac

SEQ ID NO: 1687602 - DNA, 25 bp, Homo sapien
tacatgatagcatagcagtgcattg

SEQ ID NO: 1687603 - DNA, 25 bp, Homo sapien
aaatgctgattatgatggtgtcaca

SEQ ID NO: 1687604 - DNA, 25 bp, Homo sapien
ttatatcctcagttatcctcagtgc

SEQ ID NO: 1687605 - DNA, 25 bp, Homo sapien
tgttgacctggccatgacaccagaa

SEQ ID NO: 1687606 - DNA, 25 bp, Homo sapien
taagagttgggaattctgttgacct

SEQ ID NO: 1687607 - DNA, 25 bp, Homo sapien
acttctggaggtggaataagagttg

SEQ ID NO: 1687608 - DNA, 25 bp, Homo sapien
cactcagtgagaaatggcttttgca

SEQ ID NO: 1687609 - DNA, 25 bp, Homo sapien
tagaagacaaatacatcgcatcatc

SEQ ID NO: 1687610 - DNA, 25 bp, Homo sapien
gatggatctaaggtgtgcacctctg

SEQ ID NO: 1687611 - DNA, 25 bp, Homo sapien
tgatgctcagtaatatctgcgaaga

SEQ ID NO: 1687612 - DNA, 25 bp, Homo sapien
ccctagttgggacactggcttatgg

SEQ ID NO: 1687613 - DNA, 25 bp, Homo sapien
tgggtcttcaggtatttcctcatac

SEQ ID NO: 1687614 - DNA, 25 bp, Homo sapien
cagtgtcttttctaccagggtttgg

SEQ ID NO: 1687615 - DNA, 25 bp, Homo sapien
acttaagccttcttgactaggaaag

SEQ ID NO: 1687616 - DNA, 25 bp, Homo sapien
ggtctggagaacatatatcgcgtgc

SEQ ID NO: 1687617 - DNA, 25 bp, Homo sapien
tctggagaacatatatcgcgtgcct

SEQ ID NO: 1687618 - DNA, 25 bp, Homo sapien
aaaaggtctggagaacatatatcgc

SEQ ID NO: 1687619 - DNA, 25 bp, Homo sapien
aaggtctggagaacatatatcgcgt

SEQ ID NO: 1687620 - DNA, 25 bp, Homo sapien
cctttttcaacagtatgcattccct

SEQ ID NO: 1687621 - DNA, 25 bp, Homo sapien
tgcgggcattcctttttcaacagta

SEQ ID NO: 1687622 - DNA, 25 bp, Homo sapien
acacttgcgggcattcctttttcaa

SEQ ID NO: 1687623 - DNA, 25 bp, Homo sapien
caacagtatgcattcccttgatgcc

SEQ ID NO: 1687624 - DNA, 25 bp, Homo sapien
aatacgcacgttaatcctcttggcg

SEQ ID NO: 1687625 - DNA, 25 bp, Homo sapien
cgcacgttaatcctcttggcgagaa

SEQ ID NO: 1687626 - DNA, 25 bp, Homo sapien
tacgcacgttaatcctcttggcgag

SEQ ID NO: 1687627 - DNA, 25 bp, Homo sapien
gcacgttaatcctcttggcgagaat

SEQ ID NO: 1687628 - DNA, 25 bp, Homo sapien
ctcttcggcgtctttctttatctta

SEQ ID NO: 1687629 - DNA, 25 bp, Homo sapien
tctcttcggcgtctttctttatctt

SEQ ID NO: 1687630 - DNA, 25 bp, Homo sapien
tcttcggcgtctttctttatcttat

SEQ ID NO: 1687631 - DNA, 25 bp, Homo sapien
cttcggcgtctttctttatcttatc

SEQ ID NO: 1687632 - DNA, 25 bp, Homo sapien
agctcaggctccttcccattggttc

SEQ ID NO: 1687633 - DNA, 25 bp, Homo sapien
tcaggctccttcccattggttctca

SEQ ID NO: 1687634 - DNA, 25 bp, Homo sapien
gaggccatgaattcatagggaagag

SEQ ID NO: 1687635 - DNA, 25 bp, Homo sapien
tagggaagaggttccagcagctcag

SEQ ID NO: 1687636 - DNA, 25 bp, Homo sapien
ctcagaatccagaaagctagataga

SEQ ID NO: 1687637 - DNA, 25 bp, Homo sapien
tgaaaggtgacaattctcagaatcc

SEQ ID NO: 1687638 - DNA, 25 bp, Homo sapien
tgcctagtatggtccctggcacaca

SEQ ID NO: 1687639 - DNA, 25 bp, Homo sapien
caattggaaactggcctgaaaggtg

SEQ ID NO: 1687640 - DNA, 25 bp, Homo sapien
caaatcgcagagtaaatatgcaagc

SEQ ID NO: 1687641 - DNA, 25 bp, Homo sapien
gaaatgtgttcctcgggctctttgg

SEQ ID NO: 1687642 - DNA, 25 bp, Homo sapien
tccagattcaaaaggagaacccact

SEQ ID NO: 1687643 - DNA, 25 bp, Homo sapien
gttacaacagtatttttcagggcca

SEQ ID NO: 1687644 - DNA, 25 bp, Homo sapien
tcctttgccacttgaccttgacctt

SEQ ID NO: 1687645 - DNA, 25 bp, Homo sapien
gaatagtaattgtgcttctcctttg

SEQ ID NO: 1687646 - DNA, 25 bp, Homo sapien
atttcagaatagtaattgtgcttct

SEQ ID NO: 1687647 - DNA, 25 bp, Homo sapien
gcttctcctttgccacttgaccttg

SEQ ID NO: 1687648 - DNA, 25 bp, Homo sapien
tattggagctttcaggcccaaagga

SEQ ID NO: 1687649 - DNA, 25 bp, Homo sapien
ccccttctactattggagctttcag

SEQ ID NO: 1687650 - DNA, 25 bp, Homo sapien
ggtgttcatcgtaccaaggaaaatg

SEQ ID NO: 1687651 - DNA, 25 bp, Homo sapien
gcctttatttcctatgtcctgcatc

SEQ ID NO: 1687652 - DNA, 25 bp, Homo sapien
ttcactttgccaaagcttgttccct

SEQ ID NO: 1687653 - DNA, 25 bp, Homo sapien
agccttttcacacctcctgcgcttc

SEQ ID NO: 1687654 - DNA, 25 bp, Homo sapien
cttttcacacctcctgcgcttctct

SEQ ID NO: 1687655 - DNA, 25 bp, Homo sapien
gccttttcacacctcctgcgcttct

SEQ ID NO: 1687656 - DNA, 25 bp, Homo sapien
tggagtctagacagcgtggctctct

SEQ ID NO: 1687657 - DNA, 25 bp, Homo sapien
agcgtggctctctcatctgggctca

SEQ ID NO: 1687658 - DNA, 25 bp, Homo sapien
tctagacagcgtggctctctcatct

SEQ ID NO: 1687659 - DNA, 25 bp, Homo sapien
atctggagtctagacagcgtggctc

SEQ ID NO: 1687660 - DNA, 25 bp, Homo sapien
gctatgcctcacttcttcaaggtca

SEQ ID NO: 1687661 - DNA, 25 bp, Homo sapien
ggtgttgtaacctcagagcagcctg

SEQ ID NO: 1687662 - DNA, 25 bp, Homo sapien
agcctgcagcatgaccagtcacaca

SEQ ID NO: 1687663 - DNA, 25 bp, Homo sapien
gattgtaaggcagtcttgttatctg

SEQ ID NO: 1687664 - DNA, 25 bp, Homo sapien
aaagcgtctaggaaacagccgccag

SEQ ID NO: 1687665 - DNA, 25 bp, Homo sapien
ttacaaaacgaggacttcacgtgga

SEQ ID NO: 1687666 - DNA, 25 bp, Homo sapien
cgaggacttcacgtggaaagcgtct

SEQ ID NO: 1687667 - DNA, 25 bp, Homo sapien
cgtggaaagcgtctaggaaacagcc

SEQ ID NO: 1687668 - DNA, 25 bp, Homo sapien
ctccaggatagggagtctctggaga

SEQ ID NO: 1687669 - DNA, 25 bp, Homo sapien
tggtgaggaacctccaggataggga

SEQ ID NO: 1687670 - DNA, 25 bp, Homo sapien
gggtcaaaggtagccaaatggtgac

SEQ ID NO: 1687671 - DNA, 25 bp, Homo sapien
ggggtcaaaggtagccaaatggtga

SEQ ID NO: 1687672 - DNA, 25 bp, Homo sapien
caccccattgaaatgcccctctgca

SEQ ID NO: 1687673 - DNA, 25 bp, Homo sapien
aaggcagagaagttgtccatctgtc

SEQ ID NO: 1687674 - DNA, 25 bp, Homo sapien
ccctctgcatccatctgattatgtt

SEQ ID NO: 1687675 - DNA, 25 bp, Homo sapien
tgtccatctgtcagaagcacagagt

SEQ ID NO: 1687676 - DNA, 25 bp, Homo sapien
aactggcaagggatatttgggctgc

SEQ ID NO: 1687677 - DNA, 25 bp, Homo sapien
gctgcaatggtcagagcatactgga

SEQ ID NO: 1687678 - DNA, 25 bp, Homo sapien
ggaaaggactcatttggcaaactgg

SEQ ID NO: 1687679 - DNA, 25 bp, Homo sapien
tcctgatcccaaccgaaaacacttg

SEQ ID NO: 1687680 - DNA, 25 bp, Homo sapien
tatcagggcttgagtttttagaaga

SEQ ID NO: 1687681 - DNA, 25 bp, Homo sapien
catcaaatagattcaagtctgctaa

SEQ ID NO: 1687682 - DNA, 25 bp, Homo sapien
cagtctgagaattcattatacactc

SEQ ID NO: 1687683 - DNA, 25 bp, Homo sapien
aaacctttgctacatagttctcagt

SEQ ID NO: 1687684 - DNA, 25 bp, Homo sapien
aggtccaaagtaagccctagtctct

SEQ ID NO: 1687685 - DNA, 25 bp, Homo sapien
ggaggtgacacaacatgagatctct

SEQ ID NO: 1687686 - DNA, 25 bp, Homo sapien
tgacacaacatgagatctctgagct

SEQ ID NO: 1687687 - DNA, 25 bp, Homo sapien
ggtgacacaacatgagatctctgag

SEQ ID NO: 1687688 - DNA, 25 bp, Homo sapien
ttccaaacagaaaagagccatgaag

SEQ ID NO: 1687689 - DNA, 25 bp, Homo sapien
catgaaggcaggtgcttctcttcac

SEQ ID NO: 1687690 - DNA, 25 bp, Homo sapien
ccatgaaggcaggtgcttctcttca

SEQ ID NO: 1687691 - DNA, 25 bp, Homo sapien
aaagaactgcatcttccaaacagaa

SEQ ID NO: 1687692 - DNA, 25 bp, Homo sapien
gcagatatatgtacaagcttgttac

SEQ ID NO: 1687693 - DNA, 25 bp, Homo sapien
tatgtacaagcttgttacataagta

SEQ ID NO: 1687694 - DNA, 25 bp, Homo sapien
attatgcagatatatgtacaagctt

SEQ ID NO: 1687695 - DNA, 25 bp, Homo sapien
gtctccaccattccctacccgtgta

SEQ ID NO: 1687696 - DNA, 25 bp, Homo sapien
gccaacactaccaccagcatgaatg

SEQ ID NO: 1687697 - DNA, 25 bp, Homo sapien
gtgccaacactaccaccagcatgaa

SEQ ID NO: 1687698 - DNA, 25 bp, Homo sapien
tgtgccaacactaccaccagcatga

SEQ ID NO: 1687699 - DNA, 25 bp, Homo sapien
ctgtgccaacactaccaccagcatg

SEQ ID NO: 1687700 - DNA, 25 bp, Homo sapien
cagtcacattcgaagtagccacaga

SEQ ID NO: 1687701 - DNA, 25 bp, Homo sapien
aagtagccacagatgggtggtactc

SEQ ID NO: 1687702 - DNA, 25 bp, Homo sapien
ttccccccagtcacattcgaagtag

SEQ ID NO: 1687703 - DNA, 25 bp, Homo sapien
gtagccacagatgggtggtactctt

SEQ ID NO: 1687704 - DNA, 25 bp, Homo sapien
tgctactaggtccatgtgaacttca

SEQ ID NO: 1687705 - DNA, 25 bp, Homo sapien
tggtgctactaggtccatgtgaact

SEQ ID NO: 1687706 - DNA, 25 bp, Homo sapien
ggtgctactaggtccatgtgaactt

SEQ ID NO: 1687707 - DNA, 25 bp, Homo sapien
tttggtgctactaggtccatgtgaa

SEQ ID NO: 1687708 - DNA, 25 bp, Homo sapien
ctgttcaaatgagggaatgtagttg

SEQ ID NO: 1687709 - DNA, 25 bp, Homo sapien
tcaaatgagggaatgtagttgtcat

SEQ ID NO: 1687710 - DNA, 25 bp, Homo sapien
agggaatgtagttgtcattgagcat

SEQ ID NO: 1687711 - DNA, 25 bp, Homo sapien
aaatgagggaatgtagttgtcattg

SEQ ID NO: 1687712 - DNA, 25 bp, Homo sapien
ctgatttcaccagattgtcccacct

SEQ ID NO: 1687713 - DNA, 25 bp, Homo sapien
gatttcaccagattgtcccaccttt

SEQ ID NO: 1687714 - DNA, 25 bp, Homo sapien
ttcaccagattgtcccaccttttct

SEQ ID NO: 1687715 - DNA, 25 bp, Homo sapien
ttctctcatcattttgcagggtgac

SEQ ID NO: 1687716 - DNA, 25 bp, Homo sapien
gccactgggcagtacatcaacacat

SEQ ID NO: 1687717 - DNA, 25 bp, Homo sapien
cacatgttgtgcagcaggcttttca

SEQ ID NO: 1687718 - DNA, 25 bp, Homo sapien
ccttctgggtgatactactgctggt

SEQ ID NO: 1687719 - DNA, 25 bp, Homo sapien
tgctggtgccacacatgttgtgcag

SEQ ID NO: 1687720 - DNA, 25 bp, Homo sapien
gagaggcctagagtccatcgcaagt

SEQ ID NO: 1687721 - DNA, 25 bp, Homo sapien
taggcctttttgtgaccataggaga

SEQ ID NO: 1687722 - DNA, 25 bp, Homo sapien
tcataacgtggcaatttctgaagaa

SEQ ID NO: 1687723 - DNA, 25 bp, Homo sapien
cataggagatgggacaacacttgtc

SEQ ID NO: 1687724 - DNA, 25 bp, Homo sapien
tttattaggaatacctctgccactg

SEQ ID NO: 1687725 - DNA, 25 bp, Homo sapien
cgttggctctgtgcgtgaagtacat

SEQ ID NO: 1687726 - DNA, 25 bp, Homo sapien
tttttattaggaatacctctgccac

SEQ ID NO: 1687727 - DNA, 25 bp, Homo sapien
tgccactggcgttggctctgtgcgt

SEQ ID NO: 1687728 - DNA, 25 bp, Homo sapien
gtcacatgtactcagcggctttaag

SEQ ID NO: 1687729 - DNA, 25 bp, Homo sapien
gaagcaacatcaaacagtgcggctg

SEQ ID NO: 1687730 - DNA, 25 bp, Homo sapien
tcagtctgtggaacaccgaggtcac

SEQ ID NO: 1687731 - DNA, 25 bp, Homo sapien
tgcggctgaagaaaacccaggtggc

SEQ ID NO: 1687732 - DNA, 25 bp, Homo sapien
tggttcagcagcatcagtgaaaaaa

SEQ ID NO: 1687733 - DNA, 25 bp, Homo sapien
cttaggacactcaaattgcatccca

SEQ ID NO: 1687734 - DNA, 25 bp, Homo sapien
ctcaaattgcatcccaaagaagtag

SEQ ID NO: 1687735 - DNA, 25 bp, Homo sapien
aaattgcatcccaaagaagtagagc

SEQ ID NO: 1687736 - DNA, 25 bp, Homo sapien
gacactcaaattgcatcccaaagaa

SEQ ID NO: 1687737 - DNA, 25 bp, Homo sapien
ggagatgtcgaaactgcccttttcc

SEQ ID NO: 1687738 - DNA, 25 bp, Homo sapien
cgaacctggatgataacctcacgtt

SEQ ID NO: 1687739 - DNA, 25 bp, Homo sapien
ttggagatgtcgaaactgccctttt

SEQ ID NO: 1687740 - DNA, 25 bp, Homo sapien
ctttccacgaacctggatgataacc

SEQ ID NO: 1687741 - DNA, 25 bp, Homo sapien
tggtctatggttataatgaaatgta

SEQ ID NO: 1687742 - DNA, 25 bp, Homo sapien
tatggttataatgaaatgtactctt

SEQ ID NO: 1687743 - DNA, 25 bp, Homo sapien
ggtctatggttataatgaaatgtac

SEQ ID NO: 1687744 - DNA, 25 bp, Homo sapien
tctatggttataatgaaatgtactc

SEQ ID NO: 1687745 - DNA, 25 bp, Homo sapien
cagttcatatgcataagctgcatac

SEQ ID NO: 1687746 - DNA, 25 bp, Homo sapien
aactatcaccctgtatttaggcatg

SEQ ID NO: 1687747 - DNA, 25 bp, Homo sapien
gaggccagtacagtatgctatagca

SEQ ID NO: 1687748 - DNA, 25 bp, Homo sapien
tatcatattccctcctatatgggca

SEQ ID NO: 1687749 - DNA, 25 bp, Homo sapien
caaatagcacgtaaaggcacctggc

SEQ ID NO: 1687750 - DNA, 25 bp, Homo sapien
tagcacgtaaaggcacctggctgag

SEQ ID NO: 1687751 - DNA, 25 bp, Homo sapien
tccaaatagcacgtaaaggcacctg

SEQ ID NO: 1687752 - DNA, 25 bp, Homo sapien
tgcatccaaatagcacgtaaaggca

SEQ ID NO: 1687753 - DNA, 25 bp, Homo sapien
tattgtgaggaatcaacaaacctcc

SEQ ID NO: 1687754 - DNA, 25 bp, Homo sapien
tagcctgcagcatttggatccataa

SEQ ID NO: 1687755 - DNA, 25 bp, Homo sapien
aatgggcttttgatgtacttctgca

SEQ ID NO: 1687756 - DNA, 25 bp, Homo sapien
aaaagcttatcggtagttctggcaa

SEQ ID NO: 1687757 - DNA, 25 bp, Homo sapien
tctcggacttcttctcatagactgg

SEQ ID NO: 1687758 - DNA, 25 bp, Homo sapien
ttatatagcagcgtgagctttcttg

SEQ ID NO: 1687759 - DNA, 25 bp, Homo sapien
cattttcagatggttccacttcttt

SEQ ID NO: 1687760 - DNA, 25 bp, Homo sapien
tatatagcagcgtgagctttcttgt

SEQ ID NO: 1687761 - DNA, 25 bp, Homo sapien
ctagatcaacaatttccaggattga

SEQ ID NO: 1687762 - DNA, 25 bp, Homo sapien
ttcggtagtgttttccacaccagag

SEQ ID NO: 1687763 - DNA, 25 bp, Homo sapien
gagagaggaacagatttgccgcttt

SEQ ID NO: 1687764 - DNA, 25 bp, Homo sapien
ttgctccgatggctgctagcagcag

SEQ ID NO: 1687765 - DNA, 25 bp, Homo sapien
tctaatgctttctcccataccaagt

SEQ ID NO: 1687766 - DNA, 25 bp, Homo sapien
atgctttctcccataccaagtacta

SEQ ID NO: 1687767 - DNA, 25 bp, Homo sapien
cagagaagatcgggggcattcaggg

SEQ ID NO: 1687768 - DNA, 25 bp, Homo sapien
agatcagagaagatcgggggcattc

SEQ ID NO: 1687769 - DNA, 25 bp, Homo sapien
ttcagagagcaaatactgaaaatct

SEQ ID NO: 1687770 - DNA, 25 bp, Homo sapien
tggaaatatttcagagagcaaatac

SEQ ID NO: 1687771 - DNA, 25 bp, Homo sapien
aatatttcagagagcaaatactgaa

SEQ ID NO: 1687772 - DNA, 25 bp, Homo sapien
atactgaaaatctgaggaaatcatc

SEQ ID NO: 1687773 - DNA, 25 bp, Homo sapien
tattccatcagatccattaatgatc

SEQ ID NO: 1687774 - DNA, 25 bp, Homo sapien
tttccactgtcttattccatcagat

SEQ ID NO: 1687775 - DNA, 25 bp, Homo sapien
tgtcttattccatcagatccattaa

SEQ ID NO: 1687776 - DNA, 25 bp, Homo sapien
catcagatccattaatgatcatgaa

SEQ ID NO: 1687777 - DNA, 25 bp, Homo sapien
tggaggagtgatactactagcttcc

SEQ ID NO: 1687778 - DNA, 25 bp, Homo sapien
ggcttggaggagtgatactactagc

SEQ ID NO: 1687779 - DNA, 25 bp, Homo sapien
tgatactactagcttcctcacagga

SEQ ID NO: 1687780 - DNA, 25 bp, Homo sapien
gtctccaccaaaccagagtcatctc

SEQ ID NO: 1687781 - DNA, 25 bp, Homo sapien
tcattcatgaaatgagtcaatgcga

SEQ ID NO: 1687782 - DNA, 25 bp, Homo sapien
tctttggccttctcacagtctggtt

SEQ ID NO: 1687783 - DNA, 25 bp, Homo sapien
gcgactaggctgaaagattgttttc

SEQ ID NO: 1687784 - DNA, 25 bp, Homo sapien
ctgagtggtaaagagttctttggcc

SEQ ID NO: 1687785 - DNA, 25 bp, Homo sapien
gcagttacacactggcaagacccag

SEQ ID NO: 1687786 - DNA, 25 bp, Homo sapien
gggcagtcctgtttggcaccacaat

SEQ ID NO: 1687787 - DNA, 25 bp, Homo sapien
gctgacttggaaacaaagcccacac

SEQ ID NO: 1687788 - DNA, 25 bp, Homo sapien
gccaacggcaaatagagacaataca

SEQ ID NO: 1687789 - DNA, 25 bp, Homo sapien
tgtgctggatactgtttgcgttgga

SEQ ID NO: 1687790 - DNA, 25 bp, Homo sapien
gtcctataaccttgctcacaactgt

SEQ ID NO: 1687791 - DNA, 25 bp, Homo sapien
gggaccatgatgagtcctataacct

SEQ ID NO: 1687792 - DNA, 25 bp, Homo sapien
ttatgcggacacaggtggtgccctc

SEQ ID NO: 1687793 - DNA, 25 bp, Homo sapien
caagctgatgtttacacggctgtat

SEQ ID NO: 1687794 - DNA, 25 bp, Homo sapien
ggctgtattcctcttgctccgatga

SEQ ID NO: 1687795 - DNA, 25 bp, Homo sapien
gcttctgtgcagttagagtcccgtg

SEQ ID NO: 1687796 - DNA, 25 bp, Homo sapien
gattgactcggctcccaagctgatg

SEQ ID NO: 1687797 - DNA, 25 bp, Homo sapien
cccagggcattagtgccacttgttg

SEQ ID NO: 1687798 - DNA, 25 bp, Homo sapien
cacccagggcattagtgccacttgt

SEQ ID NO: 1687799 - DNA, 25 bp, Homo sapien
ccagggcattagtgccacttgttgg

SEQ ID NO: 1687800 - DNA, 25 bp, Homo sapien
acccagggcattagtgccacttgtt

SEQ ID NO: 1687801 - DNA, 25 bp, Homo sapien
tcacctccttttcctgtagtttgaa

SEQ ID NO: 1687802 - DNA, 25 bp, Homo sapien
accatttctcagcttgttgagacat

SEQ ID NO: 1687803 - DNA, 25 bp, Homo sapien
cacctccttttcctgtagtttgaat

SEQ ID NO: 1687804 - DNA, 25 bp, Homo sapien
gtagtttgaatttaaccatttctca

SEQ ID NO: 1687805 - DNA, 25 bp, Homo sapien
cgtaggtggatctttcttacggagc

SEQ ID NO: 1687806 - DNA, 25 bp, Homo sapien
aggtcgtaggtggatctttcttacg

SEQ ID NO: 1687807 - DNA, 25 bp, Homo sapien
tggatctttcttacggagcaaagag

SEQ ID NO: 1687808 - DNA, 25 bp, Homo sapien
gatctttcttacggagcaaagagca

SEQ ID NO: 1687809 - DNA, 25 bp, Homo sapien
gtctgtggggcttccgaggcaatca

SEQ ID NO: 1687810 - DNA, 25 bp, Homo sapien
gcttccgaggcaatcaggtagcatc

SEQ ID NO: 1687811 - DNA, 25 bp, Homo sapien
ttccgaggcaatcaggtagcatcag

SEQ ID NO: 1687812 - DNA, 25 bp, Homo sapien
ccgaggcaatcaggtagcatcagtc

SEQ ID NO: 1687813 - DNA, 25 bp, Homo sapien
aagataatgccatcctttaaggcag

SEQ ID NO: 1687814 - DNA, 25 bp, Homo sapien
ttcacaagataatgccatcctttaa

SEQ ID NO: 1687815 - DNA, 25 bp, Homo sapien
acaagataatgccatcctttaaggc

SEQ ID NO: 1687816 - DNA, 25 bp, Homo sapien
agataatgccatcctttaaggcagg

SEQ ID NO: 1687817 - DNA, 25 bp, Homo sapien
cccttctattgtcaagattggctga

SEQ ID NO: 1687818 - DNA, 25 bp, Homo sapien
tgttcagattctactggaagatccc

SEQ ID NO: 1687819 - DNA, 25 bp, Homo sapien
gaagatcccttatgttgatggtaaa

SEQ ID NO: 1687820 - DNA, 25 bp, Homo sapien
tgaaaagctgttacaatgacacgtg

SEQ ID NO: 1687821 - DNA, 25 bp, Homo sapien
acgattgagctcctgcagtgtccag

SEQ ID NO: 1687822 - DNA, 25 bp, Homo sapien
aacgattgagctcctgcagtgtcca

SEQ ID NO: 1687823 - DNA, 25 bp, Homo sapien
ctgtgtgggtataacgattgagctc

SEQ ID NO: 1687824 - DNA, 25 bp, Homo sapien
gattgagctcctgcagtgtccaggt

SEQ ID NO: 1687825 - DNA, 25 bp, Homo sapien
gtggttcattgctgaactgcctcag

SEQ ID NO: 1687826 - DNA, 25 bp, Homo sapien
ctgttcaggtggttcattgctgaac

SEQ ID NO: 1687827 - DNA, 25 bp, Homo sapien
aggtggttcattgctgaactgcctc

SEQ ID NO: 1687828 - DNA, 25 bp, Homo sapien
tcaggtggttcattgctgaactgcc

SEQ ID NO: 1687829 - DNA, 25 bp, Homo sapien
ggagctaaggcggttccagtcttga

SEQ ID NO: 1687830 - DNA, 25 bp, Homo sapien
cctccaagtatgcacaagaagcttt

SEQ ID NO: 1687831 - DNA, 25 bp, Homo sapien
tccaagtatgcacaagaagctttgt

SEQ ID NO: 1687832 - DNA, 25 bp, Homo sapien
ccagtcttgacatataatacctgaa

SEQ ID NO: 1687833 - DNA, 25 bp, Homo sapien
aattggcagagcctgtagctgggcc

SEQ ID NO: 1687834 - DNA, 25 bp, Homo sapien
gcgctgctaattggcagagcctgta

SEQ ID NO: 1687835 - DNA, 25 bp, Homo sapien
ggaacttatgccgtcccggaggctg

SEQ ID NO: 1687836 - DNA, 25 bp, Homo sapien
tgcatagaggctagccgcgctgcta

SEQ ID NO: 1687837 - DNA, 25 bp, Homo sapien
tttgctttcgagcttccggttctca

SEQ ID NO: 1687838 - DNA, 25 bp, Homo sapien
gctttcgagcttccggttctcagtc

SEQ ID NO: 1687839 - DNA, 25 bp, Homo sapien
tgctttcgagcttccggttctcagt

SEQ ID NO: 1687840 - DNA, 25 bp, Homo sapien
ttcgagcttccggttctcagtctcc

SEQ ID NO: 1687841 - DNA, 25 bp, Homo sapien
gatctgcagaaagatgcggacattg

SEQ ID NO: 1687842 - DNA, 25 bp, Homo sapien
tcgatctgcagaaagatgcggacat

SEQ ID NO: 1687843 - DNA, 25 bp, Homo sapien
ttgtcgatctgcagaaagatgcgga

SEQ ID NO: 1687844 - DNA, 25 bp, Homo sapien
tgtcgatctgcagaaagatgcggac

SEQ ID NO: 1687845 - DNA, 25 bp, Homo sapien
cttgtggagcccatagatgtcgctc

SEQ ID NO: 1687846 - DNA, 25 bp, Homo sapien
gtggagcccatagatgtcgctctcc

SEQ ID NO: 1687847 - DNA, 25 bp, Homo sapien
atgtcgctctccacagactggcgca

SEQ ID NO: 1687848 - DNA, 25 bp, Homo sapien
tgtcgctctccacagactggcgcat

SEQ ID NO: 1687849 - DNA, 25 bp, Homo sapien
ctgcagccattgatgacattggtgt

SEQ ID NO: 1687850 - DNA, 25 bp, Homo sapien
ttgatgacattggtgtcatcaatga

SEQ ID NO: 1687851 - DNA, 25 bp, Homo sapien
tgatgacattggtgtcatcaatgac

SEQ ID NO: 1687852 - DNA, 25 bp, Homo sapien
cagccattgatgacattggtgtcat

SEQ ID NO: 1687853 - DNA, 25 bp, Homo sapien
aacagctcctccttgagagcttcga

SEQ ID NO: 1687854 - DNA, 25 bp, Homo sapien
aggcattttacttcctctccgtggt

SEQ ID NO: 1687855 - DNA, 25 bp, Homo sapien
gaacagctcctccttgagagcttcg

SEQ ID NO: 1687856 - DNA, 25 bp, Homo sapien
tgtaggcattttacttcctctccgt

SEQ ID NO: 1687857 - DNA, 25 bp, Homo sapien
tcgggtcgagatgtctgctgtgatc

SEQ ID NO: 1687858 - DNA, 25 bp, Homo sapien
gtcatatcgggtcgagatgtctgct

SEQ ID NO: 1687859 - DNA, 25 bp, Homo sapien
tatcgggtcgagatgtctgctgtga

SEQ ID NO: 1687860 - DNA, 25 bp, Homo sapien
catatcgggtcgagatgtctgctgt

SEQ ID NO: 1687861 - DNA, 25 bp, Homo sapien
aggatccaggatccaggttgagctg

SEQ ID NO: 1687862 - DNA, 25 bp, Homo sapien
ggatccaggatccaggttgagctgc

SEQ ID NO: 1687863 - DNA, 25 bp, Homo sapien
gatccaggatccaggttgagctgct

SEQ ID NO: 1687864 - DNA, 25 bp, Homo sapien
ctgggcttggagagctgtccctctg

SEQ ID NO: 1687865 - DNA, 25 bp, Homo sapien
agctgtccctctgcccgggtctgtg

SEQ ID NO: 1687866 - DNA, 25 bp, Homo sapien
ggcttggagagctgtccctctgccc

SEQ ID NO: 1687867 - DNA, 25 bp, Homo sapien
gagctgtccctctgcccgggtctgt

SEQ ID NO: 1687868 - DNA, 25 bp, Homo sapien
tgatgttcagcagggccttgtactt

SEQ ID NO: 1687869 - DNA, 25 bp, Homo sapien
cttgatgttcagcagggccttgtac

SEQ ID NO: 1687870 - DNA, 25 bp, Homo sapien
ttgatgttcagcagggccttgtact

SEQ ID NO: 1687871 - DNA, 25 bp, Homo sapien
tgccatccactatccggctggtggt

SEQ ID NO: 1687872 - DNA, 25 bp, Homo sapien
atgtctccaaactttggtgtcgttg

SEQ ID NO: 1687873 - DNA, 25 bp, Homo sapien
gcaggaggcagtaggtggcgatctc

SEQ ID NO: 1687874 - DNA, 25 bp, Homo sapien
ctccaaactttggtgtcgttggtct

SEQ ID NO: 1687875 - DNA, 25 bp, Homo sapien
ggctgaacatggtctgtcctagaaa

SEQ ID NO: 1687876 - DNA, 25 bp, Homo sapien
tgtgtgatcattttaccagtgggtt

SEQ ID NO: 1687877 - DNA, 25 bp, Homo sapien
gctttcgggtataggactaccatga

SEQ ID NO: 1687878 - DNA, 25 bp, Homo sapien
cctactagttttgtgaagtacctca

SEQ ID NO: 1687879 - DNA, 25 bp, Homo sapien
tttggttcactttgtctgttgtctt

SEQ ID NO: 1687880 - DNA, 25 bp, Homo sapien
ctttggttcactttgtctgttgtct

SEQ ID NO: 1687881 - DNA, 25 bp, Homo sapien
gccacctcttatctgtgtgatgaca

SEQ ID NO: 1687882 - DNA, 25 bp, Homo sapien
gccttcgccacctcttatctgtgtg

SEQ ID NO: 1687883 - DNA, 25 bp, Homo sapien
cctcttatctgtgtgatgacagcag

SEQ ID NO: 1687884 - DNA, 25 bp, Homo sapien
ttcgccacctcttatctgtgtgatg

SEQ ID NO: 1687885 - DNA, 25 bp, Homo sapien
tttgattctcacttgacctcttcca

SEQ ID NO: 1687886 - DNA, 25 bp, Homo sapien
gttccattctcttagcaggtaaata

SEQ ID NO: 1687887 - DNA, 25 bp, Homo sapien
tagcaggtaaatagccttaaaacca

SEQ ID NO: 1687888 - DNA, 25 bp, Homo sapien
aaaatacctttgattctcacttgac

SEQ ID NO: 1687889 - DNA, 25 bp, Homo sapien
agatttcagcatctgacagaaaatt

SEQ ID NO: 1687890 - DNA, 25 bp, Homo sapien
gatttcagcatctgacagaaaattt

SEQ ID NO: 1687891 - DNA, 25 bp, Homo sapien
tctgcaggggagcaatgtggtaaac

SEQ ID NO: 1687892 - DNA, 25 bp, Homo sapien
aaaggaggaattttggcagtgagag

SEQ ID NO: 1687893 - DNA, 25 bp, Homo sapien
ctccctctgccagaaattccagaac

SEQ ID NO: 1687894 - DNA, 25 bp, Homo sapien
gtgccagtgactggagggagtatat

SEQ ID NO: 1687895 - DNA, 25 bp, Homo sapien
ccctgggatattttgtatagacatt

SEQ ID NO: 1687896 - DNA, 25 bp, Homo sapien
aagccctgggatattttgtatagac

SEQ ID NO: 1687897 - DNA, 25 bp, Homo sapien
ttgtatagacatttttcaccaattc

SEQ ID NO: 1687898 - DNA, 25 bp, Homo sapien
ggaagccctgggatattttgtatag

SEQ ID NO: 1687899 - DNA, 25 bp, Homo sapien
gctcttgttcaggtattgaaaaatt

SEQ ID NO: 1687900 - DNA, 25 bp, Homo sapien
tgctcttgttcaggtattgaaaaat

SEQ ID NO: 1687901 - DNA, 25 bp, Homo sapien
ctaagggctctggttttactgggca

SEQ ID NO: 1687902 - DNA, 25 bp, Homo sapien
gctttagtgccaataaaatgctaag

SEQ ID NO: 1687903 - DNA, 25 bp, Homo sapien
tactgggcaaagcactgagtgtcaa

SEQ ID NO: 1687904 - DNA, 25 bp, Homo sapien
tagtgccaataaaatgctaagggct

SEQ ID NO: 1687905 - DNA, 25 bp, Homo sapien
ccaacaagatgacggcccttcgcgg

SEQ ID NO: 1687906 - DNA, 25 bp, Homo sapien
taggggggcatttctgcattctttt

SEQ ID NO: 1687907 - DNA, 25 bp, Homo sapien
tttccaacaagatgacggcccttcg

SEQ ID NO: 1687908 - DNA, 25 bp, Homo sapien
ttaggggggcatttctgcattcttt

SEQ ID NO: 1687909 - DNA, 25 bp, Homo sapien
ggacgcgctgtcaccagggacgcct

SEQ ID NO: 1687910 - DNA, 25 bp, Homo sapien
aaagggagagccctcgggacgcgct

SEQ ID NO: 1687911 - DNA, 25 bp, Homo sapien
caccagggacgcctcgctcctggcg

SEQ ID NO: 1687912 - DNA, 25 bp, Homo sapien
tcgggacgcgctgtcaccagggacg

SEQ ID NO: 1687913 - DNA, 25 bp, Homo sapien
gctcgtggagcctgcaaaggagtct

SEQ ID NO: 1687914 - DNA, 25 bp, Homo sapien
tttccaccgcgaatggggctcgtgg

SEQ ID NO: 1687915 - DNA, 25 bp, Homo sapien
cctttccaccgcgaatggggctcgt

SEQ ID NO: 1687916 - DNA, 25 bp, Homo sapien
tgcagtctggaacgcccctttccac

SEQ ID NO: 1687917 - DNA, 25 bp, Homo sapien
cttgcgtgagtttccgtgtgacttc

SEQ ID NO: 1687918 - DNA, 25 bp, Homo sapien
tcaggatatttaagcgtaatgtaac

SEQ ID NO: 1687919 - DNA, 25 bp, Homo sapien
tattgtgtggcctccccgacatggg

SEQ ID NO: 1687920 - DNA, 25 bp, Homo sapien
tctctgctccacatttattgtgtgg

SEQ ID NO: 1687921 - DNA, 25 bp, Homo sapien
aggtccatccacagtcctggtgcag

SEQ ID NO: 1687922 - DNA, 25 bp, Homo sapien
tcctggtgcagtccgtgttcttcct

SEQ ID NO: 1687923 - DNA, 25 bp, Homo sapien
ggtccatccacagtcctggtgcagt

SEQ ID NO: 1687924 - DNA, 25 bp, Homo sapien
ggtgcagtccgtgttcttcctgcta

SEQ ID NO: 1687925 - DNA, 25 bp, Homo sapien
taagctatgcctgcataagaatcac

SEQ ID NO: 1687926 - DNA, 25 bp, Homo sapien
taagaatcacttgaccatttcccaa

SEQ ID NO: 1687927 - DNA, 25 bp, Homo sapien
tctgagtcacagagtaagctatgcc

SEQ ID NO: 1687928 - DNA, 25 bp, Homo sapien
cagagtaagctatgcctgcataaga

SEQ ID NO: 1687929 - DNA, 25 bp, Homo sapien
tgaaagtgagtcaaaaggagatgcc

SEQ ID NO: 1687930 - DNA, 25 bp, Homo sapien
gtgaaagtgagtcaaaaggagatgc

SEQ ID NO: 1687931 - DNA, 25 bp, Homo sapien
tctttctgtgcgagaccttgatgcg

SEQ ID NO: 1687932 - DNA, 25 bp, Homo sapien
tattcagggatcaataggcaatgcc

SEQ ID NO: 1687933 - DNA, 25 bp, Homo sapien
tgatctgactccagtccgattggaa

SEQ ID NO: 1687934 - DNA, 25 bp, Homo sapien
cttgatgcggtccagcacagctctg

SEQ ID NO: 1687935 - DNA, 25 bp, Homo sapien
ctaatgtctgtttcacgaatagagt

SEQ ID NO: 1687936 - DNA, 25 bp, Homo sapien
cggattggattgtctctaatgtctg

SEQ ID NO: 1687937 - DNA, 25 bp, Homo sapien
tgaatgtaacagagatcggattgga

SEQ ID NO: 1687938 - DNA, 25 bp, Homo sapien
tctgtttcacgaatagagttctgta

SEQ ID NO: 1687939 - DNA, 25 bp, Homo sapien
gacattcctatatggtgtatgttgt

SEQ ID NO: 1687940 - DNA, 25 bp, Homo sapien
ataagtggggtaggaccaatggatt

SEQ ID NO: 1687941 - DNA, 25 bp, Homo sapien
aggaccaatggattccagagtatgt

SEQ ID NO: 1687942 - DNA, 25 bp, Homo sapien
cttcactgttgacattcctatatgg

SEQ ID NO: 1687943 - DNA, 25 bp, Homo sapien
ggtacgctggcgtggctacatcgac

SEQ ID NO: 1687944 - DNA, 25 bp, Homo sapien
agtgataccaacagcgggcgtagac

SEQ ID NO: 1687945 - DNA, 25 bp, Homo sapien
tcccgagccatgagaagagcgttgt

SEQ ID NO: 1687946 - DNA, 25 bp, Homo sapien
gagcgttgtcaatgagacaggccaa

SEQ ID NO: 1687947 - DNA, 25 bp, Homo sapien
tttcatcagtagtagtatgaagggc

SEQ ID NO: 1687948 - DNA, 25 bp, Homo sapien
gcagtaggagatgcggactccagta

SEQ ID NO: 1687949 - DNA, 25 bp, Homo sapien
cagtagtagtatgaagggctatttg

SEQ ID NO: 1687950 - DNA, 25 bp, Homo sapien
agatgcggactccagtactgatcga

SEQ ID NO: 1687951 - DNA, 25 bp, Homo sapien
gggatgaatcctgtttcaggtcctg

SEQ ID NO: 1687952 - DNA, 25 bp, Homo sapien
ctgggccattattcatggccgtctt

SEQ ID NO: 1687953 - DNA, 25 bp, Homo sapien
cgtctttgtatccagcatgatttca

SEQ ID NO: 1687954 - DNA, 25 bp, Homo sapien
tccagttggcttcctcgttttgtag

SEQ ID NO: 1687955 - DNA, 25 bp, Homo sapien
attctactaataattcctcctactg

SEQ ID NO: 1687956 - DNA, 25 bp, Homo sapien
ctcctactgtaagttgtaaagaggt

SEQ ID NO: 1687957 - DNA, 25 bp, Homo sapien
tactaataattcctcctactgtaag

SEQ ID NO: 1687958 - DNA, 25 bp, Homo sapien
gacccaagtttctattctactaata

SEQ ID NO: 1687959 - DNA, 25 bp, Homo sapien
tagtctcgtggtgcgccgtttctta

SEQ ID NO: 1687960 - DNA, 25 bp, Homo sapien
tctgagccaggtgtgggatatagtc

SEQ ID NO: 1687961 - DNA, 25 bp, Homo sapien
tgagccaggtgtgggatatagtctc

SEQ ID NO: 1687962 - DNA, 25 bp, Homo sapien
atatagtctcgtggtgcgccgtttc

SEQ ID NO: 1687963 - DNA, 25 bp, Homo sapien
agcatcccatgctaggctcggcaga

SEQ ID NO: 1687964 - DNA, 25 bp, Homo sapien
cagtcctttctgaagcgcgcttgca

SEQ ID NO: 1687965 - DNA, 25 bp, Homo sapien
tacagcgctaacacctgcagagtcg

SEQ ID NO: 1687966 - DNA, 25 bp, Homo sapien
cattctggcggttgggttcggccct

SEQ ID NO: 1687967 - DNA, 25 bp, Homo sapien
tacatgacatggattggtgtcttca

SEQ ID NO: 1687968 - DNA, 25 bp, Homo sapien
cttcattcgtgtacatgacatggat

SEQ ID NO: 1687969 - DNA, 25 bp, Homo sapien
cacgcttggagatgaattaacccaa

SEQ ID NO: 1687970 - DNA, 25 bp, Homo sapien
ctttagacacgcttggagatgaatt

SEQ ID NO: 1687971 - DNA, 25 bp, Homo sapien
catttgccgaaaccataatgatgga

SEQ ID NO: 1687972 - DNA, 25 bp, Homo sapien
gccttaagaaagacgcgctgttcaa

SEQ ID NO: 1687973 - DNA, 25 bp, Homo sapien
tgttcaagaaggcacgttcattctg

SEQ ID NO: 1687974 - DNA, 25 bp, Homo sapien
tcactccatccgtgggattccagtg

SEQ ID NO: 1687975 - DNA, 25 bp, Homo sapien
gtctggagtggccagccaatcaggc

SEQ ID NO: 1687976 - DNA, 25 bp, Homo sapien
gggaatgacgctcgggccaatggga

SEQ ID NO: 1687977 - DNA, 25 bp, Homo sapien
tgccacctcggggaatgacgctcgg

SEQ ID NO: 1687978 - DNA, 25 bp, Homo sapien
aatcaggcgggcagtgccacctcgg

SEQ ID NO: 1687979 - DNA, 25 bp, Homo sapien
cgctctgggttttacgagggaatct

SEQ ID NO: 1687980 - DNA, 25 bp, Homo sapien
ggtgtcctagtcactcccttcggag

SEQ ID NO: 1687981 - DNA, 25 bp, Homo sapien
cccaacaattgacgggagggtcgct

SEQ ID NO: 1687982 - DNA, 25 bp, Homo sapien
gaatctttgctcagtgggcgacact

SEQ ID NO: 1687983 - DNA, 25 bp, Homo sapien
agcccgacggcgccttgcggcccga

SEQ ID NO: 1687984 - DNA, 25 bp, Homo sapien
cccgacggcgccttgcggcccgagg

SEQ ID NO: 1687985 - DNA, 25 bp, Homo sapien
gcccgacggcgccttgcggcccgag

SEQ ID NO: 1687986 - DNA, 25 bp, Homo sapien
cacagcgccggctcgtcggccgccg

SEQ ID NO: 1687987 - DNA, 25 bp, Homo sapien
gcggcgcggctggacaggtcccggc

SEQ ID NO: 1687988 - DNA, 25 bp, Homo sapien
cgcaggcggctatagcagtcgttca

SEQ ID NO: 1687989 - DNA, 25 bp, Homo sapien
gcagggccgggtgcgtctccagcgc

SEQ ID NO: 1687990 - DNA, 25 bp, Homo sapien
tgttgggcgggatggtgggcaccag

SEQ ID NO: 1687991 - DNA, 25 bp, Homo sapien
caccaagggaaaggttagcaggcgc

SEQ ID NO: 1687992 - DNA, 25 bp, Homo sapien
tgtcctcggaaatcaggctggcgcg

SEQ ID NO: 1687993 - DNA, 25 bp, Homo sapien
ctggaacagcaaccgaacaccaagg

SEQ ID NO: 1687994 - DNA, 25 bp, Homo sapien
aacgcgctcgacacggtcctggatt

SEQ ID NO: 1687995 - DNA, 25 bp, Homo sapien
cagcggcacagaatgctgtcgccct

SEQ ID NO: 1687996 - DNA, 25 bp, Homo sapien
tcagcggcacagaatgctgtcgccc

SEQ ID NO: 1687997 - DNA, 25 bp, Homo sapien
ccctttgtgggtgacagactgcacg

SEQ ID NO: 1687998 - DNA, 25 bp, Homo sapien
ctcgagttctaaggctaagtacggg

SEQ ID NO: 1687999 - DNA, 25 bp, Homo sapien
ggtgtgtgaaccttctcgctgcaga

SEQ ID NO: 1688000 - DNA, 25 bp, Homo sapien
cgctgaccaccagaaaaaacacggg

SEQ ID NO: 1688001 - DNA, 25 bp, Homo sapien
ctctctagtgctcctggctcgggct

SEQ ID NO: 1688002 - DNA, 25 bp, Homo sapien
tgagctccttggtcacaaagtaggc

SEQ ID NO: 1688003 - DNA, 25 bp, Homo sapien
caaagtaggcttctaaagtcggatc

SEQ ID NO: 1688004 - DNA, 25 bp, Homo sapien
tctcttggaatgacgaatgaaaacg

SEQ ID NO: 1688005 - DNA, 25 bp, Homo sapien
gacattcaagatatcaagagctctg

SEQ ID NO: 1688006 - DNA, 25 bp, Homo sapien
tccctgcttgaaggatttgccatta

SEQ ID NO: 1688007 - DNA, 25 bp, Homo sapien
gcagatttcgtaaactccttaagga

SEQ ID NO: 1688008 - DNA, 25 bp, Homo sapien
tccgagtctatactgggcaaaacaa

SEQ ID NO: 1688009 - DNA, 25 bp, Homo sapien
ttaggtagggttcagcagtcaggca

SEQ ID NO: 1688010 - DNA, 25 bp, Homo sapien
taaccaacagtgcacatgtgacatg

SEQ ID NO: 1688011 - DNA, 25 bp, Homo sapien
tcaactgactactagggaccatggt

SEQ ID NO: 1688012 - DNA, 25 bp, Homo sapien
ttagaaacaacatccactgtgtggg

SEQ ID NO: 1688013 - DNA, 25 bp, Homo sapien
tccaggtcacgaggaggccttgcat

SEQ ID NO: 1688014 - DNA, 25 bp, Homo sapien
tcttgaaggatccataggtccaggt

SEQ ID NO: 1688015 - DNA, 25 bp, Homo sapien
gatctgtaggtccaggagggaatgg

SEQ ID NO: 1688016 - DNA, 25 bp, Homo sapien
gcaagatcttagcataacatgtgtg

SEQ ID NO: 1688017 - DNA, 25 bp, Homo sapien
cttttctctttactcgataagagct

SEQ ID NO: 1688018 - DNA, 25 bp, Homo sapien
ttttctctttactcgataagagctc

SEQ ID NO: 1688019 - DNA, 25 bp, Homo sapien
tgtttcactactgcagtcctttctt

SEQ ID NO: 1688020 - DNA, 25 bp, Homo sapien
ttctgctgtttcactactgcagtcc

SEQ ID NO: 1688021 - DNA, 25 bp, Homo sapien
cagactctcgtccttcctcaaatcc

SEQ ID NO: 1688022 - DNA, 25 bp, Homo sapien
ttcctcagactctcgtccttcctca

SEQ ID NO: 1688023 - DNA, 25 bp, Homo sapien
tcgtattctggcatacttcttcatt

SEQ ID NO: 1688024 - DNA, 25 bp, Homo sapien
cagtatctttatcaacagaactaca

SEQ ID NO: 1688025 - DNA, 25 bp, Homo sapien
gctggacaggcttgcaaatcgtatt

SEQ ID NO: 1688026 - DNA, 25 bp, Homo sapien
tttatcaacagaactacatgcagac

SEQ ID NO: 1688027 - DNA, 25 bp, Homo sapien
taagggatcacatgtatctgcttcc

SEQ ID NO: 1688028 - DNA, 25 bp, Homo sapien
tgaaaatcagggtcttctatttcag

SEQ ID NO: 1688029 - DNA, 25 bp, Homo sapien
cttcccagtgaaaatcagggtcttc

SEQ ID NO: 1688030 - DNA, 25 bp, Homo sapien
tatttcaggggcacttaggatgccc

SEQ ID NO: 1688031 - DNA, 25 bp, Homo sapien
tgttgtcattgcaaaccgactgctc

SEQ ID NO: 1688032 - DNA, 25 bp, Homo sapien
ttatactggaggaatcgggaacctg

SEQ ID NO: 1688033 - DNA, 25 bp, Homo sapien
tatctcgatcattgaaaccgccagg

SEQ ID NO: 1688034 - DNA, 25 bp, Homo sapien
ggaacctgataagcttgcccaacag

SEQ ID NO: 1688035 - DNA, 25 bp, Homo sapien
gatgactagacaccagtgtcattaa

SEQ ID NO: 1688036 - DNA, 25 bp, Homo sapien
ctaggtacattttaaagagcaactc

SEQ ID NO: 1688037 - DNA, 25 bp, Homo sapien
cagtaaatattctgactaggtacat

SEQ ID NO: 1688038 - DNA, 25 bp, Homo sapien
taaagagcaactcttgggctttttg

SEQ ID NO: 1688039 - DNA, 25 bp, Homo sapien
cttcatcattgaatagcttgcgact

SEQ ID NO: 1688040 - DNA, 25 bp, Homo sapien
tcttcatcattgaatagcttgcgac

SEQ ID NO: 1688041 - DNA, 25 bp, Homo sapien
ctttcttcatcattgaatagcttgc

SEQ ID NO: 1688042 - DNA, 25 bp, Homo sapien
catcattgaatagcttgcgactatt

SEQ ID NO: 1688043 - DNA, 25 bp, Homo sapien
aggagaggctatctggtttttcttc

SEQ ID NO: 1688044 - DNA, 25 bp, Homo sapien
tgcttgcgataggagaggctatctg

SEQ ID NO: 1688045 - DNA, 25 bp, Homo sapien
gagctgcggaagttctcatgcttgc

SEQ ID NO: 1688046 - DNA, 25 bp, Homo sapien
gaagttctcatgcttgcgataggag

SEQ ID NO: 1688047 - DNA, 25 bp, Homo sapien
tgatgaactgtgcattaatttctct

SEQ ID NO: 1688048 - DNA, 25 bp, Homo sapien
gatgaactgtgcattaatttctctc

SEQ ID NO: 1688049 - DNA, 25 bp, Homo sapien
tgaactgtgcattaatttctctctt

SEQ ID NO: 1688050 - DNA, 25 bp, Homo sapien
ttgatgaactgtgcattaatttctc

SEQ ID NO: 1688051 - DNA, 25 bp, Homo sapien
gaaatccggttcttccggccgcatg

SEQ ID NO: 1688052 - DNA, 25 bp, Homo sapien
catccatcacaaggcggctgctgtg

SEQ ID NO: 1688053 - DNA, 25 bp, Homo sapien
tttcgaggcggctggatccgcctgc

SEQ ID NO: 1688054 - DNA, 25 bp, Homo sapien
ctgtggtgactcagccgggctgaaa

SEQ ID NO: 1688055 - DNA, 25 bp, Homo sapien
gaggctcccttgaaaagatctttgc

SEQ ID NO: 1688056 - DNA, 25 bp, Homo sapien
gttattctgcgggaactgggtcatc

SEQ ID NO: 1688057 - DNA, 25 bp, Homo sapien
ggtcatcttttcaagagtggaaatg

SEQ ID NO: 1688058 - DNA, 25 bp, Homo sapien
ggcctccaggggaatctgttttctc

SEQ ID NO: 1688059 - DNA, 25 bp, Homo sapien
tctgtgcctctccatccgcttctca

SEQ ID NO: 1688060 - DNA, 25 bp, Homo sapien
cactgatgtttggtgatagtgccag

SEQ ID NO: 1688061 - DNA, 25 bp, Homo sapien
accggaatgacctgaagaagtttca

SEQ ID NO: 1688062 - DNA, 25 bp, Homo sapien
tctaatcctccaccggaatgacctg

SEQ ID NO: 1688063 - DNA, 25 bp, Homo sapien
tgcttcagagtgttattctttttca

SEQ ID NO: 1688064 - DNA, 25 bp, Homo sapien
agttgcagtaccttcgaggtttgca

SEQ ID NO: 1688065 - DNA, 25 bp, Homo sapien
taccttcgaggtttgcagtaatgca

SEQ ID NO: 1688066 - DNA, 25 bp, Homo sapien
gcaaagatttatatgcagcatttac

SEQ ID NO: 1688067 - DNA, 25 bp, Homo sapien
gatgctaagccaacgcgaaaactaa

SEQ ID NO: 1688068 - DNA, 25 bp, Homo sapien
tttccattcagatgctaagccaacg

SEQ ID NO: 1688069 - DNA, 25 bp, Homo sapien
cattcagatgctaagccaacgcgaa

SEQ ID NO: 1688070 - DNA, 25 bp, Homo sapien
agttctttccattcagatgctaagc

SEQ ID NO: 1688071 - DNA, 25 bp, Homo sapien
gtcagatatgctttcccctgagtca

SEQ ID NO: 1688072 - DNA, 25 bp, Homo sapien
ggaatggttcctactacgaggcttg

SEQ ID NO: 1688073 - DNA, 25 bp, Homo sapien
ctaccctttgacactccggggaatg

SEQ ID NO: 1688074 - DNA, 25 bp, Homo sapien
tactacgaggcttgtcagatatgct

SEQ ID NO: 1688075 - DNA, 25 bp, Homo sapien
gagggacatgtcattcttacaataa

SEQ ID NO: 1688076 - DNA, 25 bp, Homo sapien
tatgaaagtagacgagggacatgtc

SEQ ID NO: 1688077 - DNA, 25 bp, Homo sapien
taacttggggcctgtttatcattcc

SEQ ID NO: 1688078 - DNA, 25 bp, Homo sapien
aacagacctatgaaagtagacgagg

SEQ ID NO: 1688079 - DNA, 25 bp, Homo sapien
ctgatggcagcttgtgctttggcat

SEQ ID NO: 1688080 - DNA, 25 bp, Homo sapien
ggatctgatggcagcttgtgctttg

SEQ ID NO: 1688081 - DNA, 25 bp, Homo sapien
cttgagcttaggatctgatggcagc

SEQ ID NO: 1688082 - DNA, 25 bp, Homo sapien
ttgagcttaggatctgatggcagct

SEQ ID NO: 1688083 - DNA, 25 bp, Homo sapien
acgccatgctccaaacccatggaat

SEQ ID NO: 1688084 - DNA, 25 bp, Homo sapien
aatagtgcttcattaatgtgaagac

SEQ ID NO: 1688085 - DNA, 25 bp, Homo sapien
tcactgactggctaatgaataatca

SEQ ID NO: 1688086 - DNA, 25 bp, Homo sapien
ctgggctggtaatttggttgcacgc

SEQ ID NO: 1688087 - DNA, 25 bp, Homo sapien
gtgtatgagttcgtttcttccagca

SEQ ID NO: 1688088 - DNA, 25 bp, Homo sapien
tcctggtgcctataggtgtatgagt

SEQ ID NO: 1688089 - DNA, 25 bp, Homo sapien
tatgtctcctggtgcctataggtgt

SEQ ID NO: 1688090 - DNA, 25 bp, Homo sapien
ccctcgaattccagtatgtctcctg

SEQ ID NO: 1688091 - DNA, 25 bp, Homo sapien
tcaattgcagttgtgacattcgtgt

SEQ ID NO: 1688092 - DNA, 25 bp, Homo sapien
atttttctcaattgcagttgtgaca

SEQ ID NO: 1688093 - DNA, 25 bp, Homo sapien
cagttgtgacattcgtgtttcctgt

SEQ ID NO: 1688094 - DNA, 25 bp, Homo sapien
tttaaattcctggatataaagatac

SEQ ID NO: 1688095 - DNA, 25 bp, Homo sapien
attccataagggagcctgtctctct

SEQ ID NO: 1688096 - DNA, 25 bp, Homo sapien
aattccataagggagcctgtctctc

SEQ ID NO: 1688097 - DNA, 25 bp, Homo sapien
tccataagggagcctgtctctcttt

SEQ ID NO: 1688098 - DNA, 25 bp, Homo sapien
aaattccataagggagcctgtctct

SEQ ID NO: 1688099 - DNA, 25 bp, Homo sapien
tgggctgtccagctctcacacgacc

SEQ ID NO: 1688100 - DNA, 25 bp, Homo sapien
gctctcacacgaccttctcttctga

SEQ ID NO: 1688101 - DNA, 25 bp, Homo sapien
tgtggtgcagctcacgctggcagtt

SEQ ID NO: 1688102 - DNA, 25 bp, Homo sapien
tctaatgctacccacagtgtggtgc

SEQ ID NO: 1688103 - DNA, 25 bp, Homo sapien
tagacacctgttctagctgcgacat

SEQ ID NO: 1688104 - DNA, 25 bp, Homo sapien
gatagacacctgttctagctgcgac

SEQ ID NO: 1688105 - DNA, 25 bp, Homo sapien
ccagcgatagacacctgttctagct

SEQ ID NO: 1688106 - DNA, 25 bp, Homo sapien
agcgatagacacctgttctagctgc

SEQ ID NO: 1688107 - DNA, 25 bp, Homo sapien
caaacacccagccttgccgtttaag

SEQ ID NO: 1688108 - DNA, 25 bp, Homo sapien
gccacagtcgatttttgagaactgc

SEQ ID NO: 1688109 - DNA, 25 bp, Homo sapien
gcccattcatcgcagaccctgatgt

SEQ ID NO: 1688110 - DNA, 25 bp, Homo sapien
tgctctgccacttaatgtgacaaac

SEQ ID NO: 1688111 - DNA, 25 bp, Homo sapien
aaaattggcccaaggctttgatgcc

SEQ ID NO: 1688112 - DNA, 25 bp, Homo sapien
gcattttagaataaagacattgttc

SEQ ID NO: 1688113 - DNA, 25 bp, Homo sapien
tagaataaagacattgttctgacag

SEQ ID NO: 1688114 - DNA, 25 bp, Homo sapien
ccacatggagagctgagacatagca

SEQ ID NO: 1688115 - DNA, 25 bp, Homo sapien
agagtgcagactgagaggatttctg

SEQ ID NO: 1688116 - DNA, 25 bp, Homo sapien
gcctgtccaaggtgcgagtttgttt

SEQ ID NO: 1688117 - DNA, 25 bp, Homo sapien
atcctgtcactgtgttcccattcat

SEQ ID NO: 1688118 - DNA, 25 bp, Homo sapien
gagaggatttctggggcctgtccaa

SEQ ID NO: 1688119 - DNA, 25 bp, Homo sapien
caaaaagtgaatttggagctggcaa

SEQ ID NO: 1688120 - DNA, 25 bp, Homo sapien
caggatgcaacagcgctggccttgt

SEQ ID NO: 1688121 - DNA, 25 bp, Homo sapien
ctgtggtattcagtcccaggccgga

SEQ ID NO: 1688122 - DNA, 25 bp, Homo sapien
ttcctggacaccctctcaataggtg

SEQ ID NO: 1688123 - DNA, 25 bp, Homo sapien
ggccagacctggaaccttaagagct

SEQ ID NO: 1688124 - DNA, 25 bp, Homo sapien
ctggggtgagcggaacatcttggcc

SEQ ID NO: 1688125 - DNA, 25 bp, Homo sapien
tggaattggccagacctggaacctt

SEQ ID NO: 1688126 - DNA, 25 bp, Homo sapien
ctggtgggcgtcaggagatgcaggg

SEQ ID NO: 1688127 - DNA, 25 bp, Homo sapien
tgctgccacgttgtaccatacctca

SEQ ID NO: 1688128 - DNA, 25 bp, Homo sapien
ggattaatctctgacggctgcctta

SEQ ID NO: 1688129 - DNA, 25 bp, Homo sapien
cattttatcatcaggcaagagcgga

SEQ ID NO: 1688130 - DNA, 25 bp, Homo sapien
tatcgcttgctattgcaggctttgg

SEQ ID NO: 1688131 - DNA, 25 bp, Homo sapien
ccagcatagtacactgggacttgaa

SEQ ID NO: 1688132 - DNA, 25 bp, Homo sapien
cactgggacttgaaagtcatttttc

SEQ ID NO: 1688133 - DNA, 25 bp, Homo sapien
ctggagtcagccgtggtctgttcca

SEQ ID NO: 1688134 - DNA, 25 bp, Homo sapien
atctctggagtcagccgtggtctgt

SEQ ID NO: 1688135 - DNA, 25 bp, Homo sapien
tgatgaatttcatcagtagtggggg

SEQ ID NO: 1688136 - DNA, 25 bp, Homo sapien
atgaatttcatcagtagtggggggc

SEQ ID NO: 1688137 - DNA, 25 bp, Homo sapien
tgaatttcatcagtagtggggggca

SEQ ID NO: 1688138 - DNA, 25 bp, Homo sapien
gaatttcatcagtagtggggggcat

SEQ ID NO: 1688139 - DNA, 25 bp, Homo sapien
cactgggtcacattgacagtatcag

SEQ ID NO: 1688140 - DNA, 25 bp, Homo sapien
gtatcagaggcccattgaatccaga

SEQ ID NO: 1688141 - DNA, 25 bp, Homo sapien
cactcttctagcaaaagtgcactgg

SEQ ID NO: 1688142 - DNA, 25 bp, Homo sapien
ttctagcaaaagtgcactgggtcac

SEQ ID NO: 1688143 - DNA, 25 bp, Homo sapien
ggagaaccttgatattggaccttgc

SEQ ID NO: 1688144 - DNA, 25 bp, Homo sapien
ccttgatattggaccttgctttctt

SEQ ID NO: 1688145 - DNA, 25 bp, Homo sapien
ccgggagaaccttgatattggacct

SEQ ID NO: 1688146 - DNA, 25 bp, Homo sapien
agagtggaccgggagaaccttgata

SEQ ID NO: 1688147 - DNA, 25 bp, Homo sapien
caccagcgggttctcgtataccttg

SEQ ID NO: 1688148 - DNA, 25 bp, Homo sapien
ccaggaaggtgccaccagcgggttc

SEQ ID NO: 1688149 - DNA, 25 bp, Homo sapien
cggggaaggcttgccactacaccct

SEQ ID NO: 1688150 - DNA, 25 bp, Homo sapien
aaggtgccaccagcgggttctcgta

SEQ ID NO: 1688151 - DNA, 25 bp, Homo sapien
gcgatagcgctttgctacactggat

SEQ ID NO: 1688152 - DNA, 25 bp, Homo sapien
gatgactatttgcagcgatagcgct

SEQ ID NO: 1688153 - DNA, 25 bp, Homo sapien
ggattgctctctcgtttcttaatgt

SEQ ID NO: 1688154 - DNA, 25 bp, Homo sapien
tgttcatgcaaacattaagatccag

SEQ ID NO: 1688155 - DNA, 25 bp, Homo sapien
gagagtaaatttacattgttcagat

SEQ ID NO: 1688156 - DNA, 25 bp, Homo sapien
taaatttacattgttcagattttca

SEQ ID NO: 1688157 - DNA, 25 bp, Homo sapien
ctggagagtaaatttacattgttca

SEQ ID NO: 1688158 - DNA, 25 bp, Homo sapien
aatttacattgttcagattttcaag

SEQ ID NO: 1688159 - DNA, 25 bp, Homo sapien
ttattctcaacagattccagggaga

SEQ ID NO: 1688160 - DNA, 25 bp, Homo sapien
tgcagagatgccatgtagcccgctg

SEQ ID NO: 1688161 - DNA, 25 bp, Homo sapien
tcccacctgcgaaaacatggatgag

SEQ ID NO: 1688162 - DNA, 25 bp, Homo sapien
ccttagatcgtgcagtagggctcct

SEQ ID NO: 1688163 - DNA, 25 bp, Homo sapien
cagtgttagggacatgccgcaagtt

SEQ ID NO: 1688164 - DNA, 25 bp, Homo sapien
ctgtgtagcacacgcacactggaac

SEQ ID NO: 1688165 - DNA, 25 bp, Homo sapien
tagcacacgcacactggaactgcag

SEQ ID NO: 1688166 - DNA, 25 bp, Homo sapien
ctgtttctccccgaaagcttttgtg

SEQ ID NO: 1688167 - DNA, 25 bp, Homo sapien
tttctccccgaaagcttttgtgcat

SEQ ID NO: 1688168 - DNA, 25 bp, Homo sapien
ggtctgatggatcctcagcttttta

SEQ ID NO: 1688169 - DNA, 25 bp, Homo sapien
gtctgatggatcctcagctttttaa

SEQ ID NO: 1688170 - DNA, 25 bp, Homo sapien
ttcactctacaacatgcattatttt

SEQ ID NO: 1688171 - DNA, 25 bp, Homo sapien
gggtctgatggatcctcagcttttt

SEQ ID NO: 1688172 - DNA, 25 bp, Homo sapien
tggggcctatcccatttccctagga

SEQ ID NO: 1688173 - DNA, 25 bp, Homo sapien
ctggggcctatcccatttccctagg

SEQ ID NO: 1688174 - DNA, 25 bp, Homo sapien
actggggcctatcccatttccctag

SEQ ID NO: 1688175 - DNA, 25 bp, Homo sapien
tttaaggcctctaaaaagagctgta

SEQ ID NO: 1688176 - DNA, 25 bp, Homo sapien
cctctaaaaagagctgtattcccac

SEQ ID NO: 1688177 - DNA, 25 bp, Homo sapien
ggcctctaaaaagagctgtattccc

SEQ ID NO: 1688178 - DNA, 25 bp, Homo sapien
aaggcctctaaaaagagctgtattc

SEQ ID NO: 1688179 - DNA, 25 bp, Homo sapien
gccagcattgcaatcaagttttgtt

SEQ ID NO: 1688180 - DNA, 25 bp, Homo sapien
agccagcattgcaatcaagttttgt

SEQ ID NO: 1688181 - DNA, 25 bp, Homo sapien
ctgaagtacgaccagcagccctatc

SEQ ID NO: 1688182 - DNA, 25 bp, Homo sapien
gctgccatgggcgagctgtttatcg

SEQ ID NO: 1688183 - DNA, 25 bp, Homo sapien
cctatctaaaccgtccagagcgcag

SEQ ID NO: 1688184 - DNA, 25 bp, Homo sapien
gcgagctgtttatcgagagccacat

SEQ ID NO: 1688185 - DNA, 25 bp, Homo sapien
taaagctgggcggatggcatgcttc

SEQ ID NO: 1688186 - DNA, 25 bp, Homo sapien
tccaggggccaacagacaggaagag

SEQ ID NO: 1688187 - DNA, 25 bp, Homo sapien
gcagacttccatatgctctccaggg

SEQ ID NO: 1688188 - DNA, 25 bp, Homo sapien
tctccactgggtgcttgccattgca

SEQ ID NO: 1688189 - DNA, 25 bp, Homo sapien
tctgaggcttgagaagcccatgcaa

SEQ ID NO: 1688190 - DNA, 25 bp, Homo sapien
caaacctgaatcaatcaggaaggag

SEQ ID NO: 1688191 - DNA, 25 bp, Homo sapien
gagaaagagaccaatggccacagaa

SEQ ID NO: 1688192 - DNA, 25 bp, Homo sapien
cccactctgggcaagctgagaaaga

SEQ ID NO: 1688193 - DNA, 25 bp, Homo sapien
ggtgaagcccaatgacttggctaca

SEQ ID NO: 1688194 - DNA, 25 bp, Homo sapien
aggtgaagcccaatgacttggctac

SEQ ID NO: 1688195 - DNA, 25 bp, Homo sapien
acttggctacaaagctgggtgagca

SEQ ID NO: 1688196 - DNA, 25 bp, Homo sapien
cttggctacaaagctgggtgagcac

SEQ ID NO: 1688197 - DNA, 25 bp, Homo sapien
cacttgtaagcaaaaggagggtagg

SEQ ID NO: 1688198 - DNA, 25 bp, Homo sapien
gacttgccacttgtaagcaaaagga

SEQ ID NO: 1688199 - DNA, 25 bp, Homo sapien
cacaagacttgccacttgtaagcaa

SEQ ID NO: 1688200 - DNA, 25 bp, Homo sapien
ttgccacttgtaagcaaaaggaggg

SEQ ID NO: 1688201 - DNA, 25 bp, Homo sapien
aacagaggagttagcaggtgacccc

SEQ ID NO: 1688202 - DNA, 25 bp, Homo sapien
tgactggctaagagagaaaaaggcg

SEQ ID NO: 1688203 - DNA, 25 bp, Homo sapien
cacattggaaccacacaggaagctt

SEQ ID NO: 1688204 - DNA, 25 bp, Homo sapien
aagaaagtgattgatgcctggctcc

SEQ ID NO: 1688205 - DNA, 25 bp, Homo sapien
gactgaaagtcaggcatgccctcaa

SEQ ID NO: 1688206 - DNA, 25 bp, Homo sapien
tgagaagacacccaaatgttcatgc

SEQ ID NO: 1688207 - DNA, 25 bp, Homo sapien
cagagggatcatggtttcagggcac

SEQ ID NO: 1688208 - DNA, 25 bp, Homo sapien
tgaaaactctacgagccaagaggac

SEQ ID NO: 1688209 - DNA, 25 bp, Homo sapien
tccagctactgtgacctggatgctg

SEQ ID NO: 1688210 - DNA, 25 bp, Homo sapien
gtacagattaatcggccatgtccag

SEQ ID NO: 1688211 - DNA, 25 bp, Homo sapien
cccaggcatcggctccaaaaattag

SEQ ID NO: 1688212 - DNA, 25 bp, Homo sapien
tgtgtagagaatgtgccagagctgc

SEQ ID NO: 1688213 - DNA, 25 bp, Homo sapien
agctctgatgtccggcatgcggttg

SEQ ID NO: 1688214 - DNA, 25 bp, Homo sapien
gctctgatgtccggcatgcggttgc

SEQ ID NO: 1688215 - DNA, 25 bp, Homo sapien
tctgatgtccggcatgcggttgcca

SEQ ID NO: 1688216 - DNA, 25 bp, Homo sapien
tgatgtccggcatgcggttgccacc

SEQ ID NO: 1688217 - DNA, 25 bp, Homo sapien
tcttataccacacgagggtatagtt

SEQ ID NO: 1688218 - DNA, 25 bp, Homo sapien
catcttataccacacgagggtatag

SEQ ID NO: 1688219 - DNA, 25 bp, Homo sapien
ataccacacgagggtatagttttct

SEQ ID NO: 1688220 - DNA, 25 bp, Homo sapien
tataccacacgagggtatagttttc

SEQ ID NO: 1688221 - DNA, 25 bp, Homo sapien
gtcttgcgagtgacactcaatgcca

SEQ ID NO: 1688222 - DNA, 25 bp, Homo sapien
ctgtgggacacgagtcttgcgagtg

SEQ ID NO: 1688223 - DNA, 25 bp, Homo sapien
cacgagtcttgcgagtgacactcaa

SEQ ID NO: 1688224 - DNA, 25 bp, Homo sapien
tgggacacgagtcttgcgagtgaca

SEQ ID NO: 1688225 - DNA, 25 bp, Homo sapien
ggtgtgcttgtcacagagctcgttg

SEQ ID NO: 1688226 - DNA, 25 bp, Homo sapien
cacagagctcgttggtggctggtcc

SEQ ID NO: 1688227 - DNA, 25 bp, Homo sapien
gattgcatcccatggtgtgcttgtc

SEQ ID NO: 1688228 - DNA, 25 bp, Homo sapien
cagacaatgattgcatcccatggtg

SEQ ID NO: 1688229 - DNA, 25 bp, Homo sapien
gatgaatcgtctcatgttcagttca

SEQ ID NO: 1688230 - DNA, 25 bp, Homo sapien
ctagatgaatcgtctcatgttcagt

SEQ ID NO: 1688231 - DNA, 25 bp, Homo sapien
agatgaatcgtctcatgttcagttc

SEQ ID NO: 1688232 - DNA, 25 bp, Homo sapien
gaatcgtctcatgttcagttcatac

SEQ ID NO: 1688233 - DNA, 25 bp, Homo sapien
ggccagggtgtggcgtttcctcctc

SEQ ID NO: 1688234 - DNA, 25 bp, Homo sapien
ttaccaaccttggtactagctttgc

SEQ ID NO: 1688235 - DNA, 25 bp, Homo sapien
ccaaccttggtactagctttgccag

SEQ ID NO: 1688236 - DNA, 25 bp, Homo sapien
aaccttggtactagctttgccagcc

SEQ ID NO: 1688237 - DNA, 25 bp, Homo sapien
tgcatggggactaggggttttacca

SEQ ID NO: 1688238 - DNA, 25 bp, Homo sapien
ttgggagcaggagggtaaggatgag

SEQ ID NO: 1688239 - DNA, 25 bp, Homo sapien
ggttgggagcaggagggtaaggatg

SEQ ID NO: 1688240 - DNA, 25 bp, Homo sapien
tcaggggttgggagcaggagggtaa

SEQ ID NO: 1688241 - DNA, 25 bp, Homo sapien
gagggtaaggatgagggaagctttc

SEQ ID NO: 1688242 - DNA, 25 bp, Homo sapien
tgaatccagggtctaccacttagtg

SEQ ID NO: 1688243 - DNA, 25 bp, Homo sapien
tgaaaattgagatagctgaatcttt

SEQ ID NO: 1688244 - DNA, 25 bp, Homo sapien
atccagggtctaccacttagtgatg

SEQ ID NO: 1688245 - DNA, 25 bp, Homo sapien
tgagatagctgaatcttttctggtt

SEQ ID NO: 1688246 - DNA, 25 bp, Homo sapien
gctggagttgatgagtcccctgtcc

SEQ ID NO: 1688247 - DNA, 25 bp, Homo sapien
tcaattctgatcactgctggagttg

SEQ ID NO: 1688248 - DNA, 25 bp, Homo sapien
tgccctcatacactggtgcattggg

SEQ ID NO: 1688249 - DNA, 25 bp, Homo sapien
caaaccacagcagatatgatagcaa

SEQ ID NO: 1688250 - DNA, 25 bp, Homo sapien
ttctggataagtccagaagatgggc

SEQ ID NO: 1688251 - DNA, 25 bp, Homo sapien
gcctaccagagactgctgactggtg

SEQ ID NO: 1688252 - DNA, 25 bp, Homo sapien
tggcctaccagagactgctgactgg

SEQ ID NO: 1688253 - DNA, 25 bp, Homo sapien
cagaagatgggctggcctaccagag

SEQ ID NO: 1688254 - DNA, 25 bp, Homo sapien
gcagcacgtggatgcaagttgagaa

SEQ ID NO: 1688255 - DNA, 25 bp, Homo sapien
cctgtgtgaagatgggcggtctcca

SEQ ID NO: 1688256 - DNA, 25 bp, Homo sapien
gcagtctgagggcattgaatgtaga

SEQ ID NO: 1688257 - DNA, 25 bp, Homo sapien
ttcatgtggtggaaagttcctctgt

SEQ ID NO: 1688258 - DNA, 25 bp, Homo sapien
gtagctgtgattactggagcgcgcc

SEQ ID NO: 1688259 - DNA, 25 bp, Homo sapien
gattactggagcgcgccaccatacc

SEQ ID NO: 1688260 - DNA, 25 bp, Homo sapien
gtgattactggagcgcgccaccata

SEQ ID NO: 1688261 - DNA, 25 bp, Homo sapien
ctgtgattactggagcgcgccacca

SEQ ID NO: 1688262 - DNA, 25 bp, Homo sapien
gggcatcccgctggaccaggtaact

SEQ ID NO: 1688263 - DNA, 25 bp, Homo sapien
tcccgctggaccaggtaactgcagg

SEQ ID NO: 1688264 - DNA, 25 bp, Homo sapien
catcccgctggaccaggtaactgca

SEQ ID NO: 1688265 - DNA, 25 bp, Homo sapien
ctgggcatcccgctggaccaggtaa

SEQ ID NO: 1688266 - DNA, 25 bp, Homo sapien
caagcctaattgcaataaccttcaa

SEQ ID NO: 1688267 - DNA, 25 bp, Homo sapien
tggtagccaggtacccgtgagctct

SEQ ID NO: 1688268 - DNA, 25 bp, Homo sapien
gtctctcatcaagcctaattgcaat

SEQ ID NO: 1688269 - DNA, 25 bp, Homo sapien
tcagcctcttctagtttttacagga

SEQ ID NO: 1688270 - DNA, 25 bp, Homo sapien
ttctggtgtgcctcacttggcaagt

SEQ ID NO: 1688271 - DNA, 25 bp, Homo sapien
tctctcaacaacagcactttgtcct

SEQ ID NO: 1688272 - DNA, 25 bp, Homo sapien
tctttggcagcactcagatacttca

SEQ ID NO: 1688273 - DNA, 25 bp, Homo sapien
ctcccaagtcctacacagccaccac

SEQ ID NO: 1688274 - DNA, 25 bp, Homo sapien
tggtgcattttgattcagtttccaa

SEQ ID NO: 1688275 - DNA, 25 bp, Homo sapien
tctctctggtgcattttgattcagt

SEQ ID NO: 1688276 - DNA, 25 bp, Homo sapien
tttgtgtgtagaattgcctctctct

SEQ ID NO: 1688277 - DNA, 25 bp, Homo sapien
tctcagcaagctcaaccctagtctt

SEQ ID NO: 1688278 - DNA, 25 bp, Homo sapien
tagtaacaaaccatagaaatgatcc

SEQ ID NO: 1688279 - DNA, 25 bp, Homo sapien
aatgatccctgaaaacatagtctta

SEQ ID NO: 1688280 - DNA, 25 bp, Homo sapien
cttctctagtaacaaaccatagaaa

SEQ ID NO: 1688281 - DNA, 25 bp, Homo sapien
ttggtgctccacacattcagataaa

SEQ ID NO: 1688282 - DNA, 25 bp, Homo sapien
atccctggctggcagattaagcaca

SEQ ID NO: 1688283 - DNA, 25 bp, Homo sapien
tggcagattaagcacatattcaggg

SEQ ID NO: 1688284 - DNA, 25 bp, Homo sapien
cagggagatggtgcttctggatccc

SEQ ID NO: 1688285 - DNA, 25 bp, Homo sapien
tgatcagaatgcagacagggagatg

SEQ ID NO: 1688286 - DNA, 25 bp, Homo sapien
tgtgtctgacagaactgataccagc

SEQ ID NO: 1688287 - DNA, 25 bp, Homo sapien
tctgccttgtgcatctcgcgtcctg

SEQ ID NO: 1688288 - DNA, 25 bp, Homo sapien
tgggcgtgttccctcttacgtggga

SEQ ID NO: 1688289 - DNA, 25 bp, Homo sapien
agtaccgctgtccacctgggcgtgt

SEQ ID NO: 1688290 - DNA, 25 bp, Homo sapien
aagagtgtacaaatatccctttgag

SEQ ID NO: 1688291 - DNA, 25 bp, Homo sapien
caagagtgtacaaatatccctttga

SEQ ID NO: 1688292 - DNA, 25 bp, Homo sapien
cacccactaactcgggaagggatgt

SEQ ID NO: 1688293 - DNA, 25 bp, Homo sapien
gcaaactaggcgaatatcagaggaa

SEQ ID NO: 1688294 - DNA, 25 bp, Homo sapien
gactctagagtggacccttgctttg

SEQ ID NO: 1688295 - DNA, 25 bp, Homo sapien
gcctttacggaacttacatggcaga

SEQ ID NO: 1688296 - DNA, 25 bp, Homo sapien
catggtttctgtcaatcacccagat

SEQ ID NO: 1688297 - DNA, 25 bp, Homo sapien
cccgggctggtctagtagctccgtg

SEQ ID NO: 1688298 - DNA, 25 bp, Homo sapien
ttttctcacgttccaagaagcatgg

SEQ ID NO: 1688299 - DNA, 25 bp, Homo sapien
gcctttcttagcacatgactttctt

SEQ ID NO: 1688300 - DNA, 25 bp, Homo sapien
tctccgcaggcagatgcgtcgcaag

SEQ ID NO: 1688301 - DNA, 25 bp, Homo sapien
tttgcaccatacctcagtgccaggg

SEQ ID NO: 1688302 - DNA, 25 bp, Homo sapien
cattgtgcaaaccagaagaagtcct

SEQ ID NO: 1688303 - DNA, 25 bp, Homo sapien
gttagtcgtgcttgtcctgtgtccc

SEQ ID NO: 1688304 - DNA, 25 bp, Homo sapien
tgaagcacctcctgacgtattttcc

SEQ ID NO: 1688305 - DNA, 25 bp, Homo sapien
aaacacatcatcaaatacacgggta

SEQ ID NO: 1688306 - DNA, 25 bp, Homo sapien
gactgaaacttctatagcctgtgag

SEQ ID NO: 1688307 - DNA, 25 bp, Homo sapien
taactgagatgacattcctgaagca

SEQ ID NO: 1688308 - DNA, 25 bp, Homo sapien
ctctaagcattgatctccttgtttg

SEQ ID NO: 1688309 - DNA, 25 bp, Homo sapien
acagtactttgctcccagggtttct

SEQ ID NO: 1688310 - DNA, 25 bp, Homo sapien
cttacagcacccaatcaagataatt

SEQ ID NO: 1688311 - DNA, 25 bp, Homo sapien
tgaataagatcaagtgcccagcaca

SEQ ID NO: 1688312 - DNA, 25 bp, Homo sapien
ttggatttgctctcgaagactcgac

SEQ ID NO: 1688313 - DNA, 25 bp, Homo sapien
tatgaaactgctctgggatgtatcc

SEQ ID NO: 1688314 - DNA, 25 bp, Homo sapien
gaccctagtttgtggtttggacagc

SEQ ID NO: 1688315 - DNA, 25 bp, Homo sapien
tttgaacactggcaccagcgcatgt

SEQ ID NO: 1688316 - DNA, 25 bp, Homo sapien
tttgagctggcaccgtggcatgcac

SEQ ID NO: 1688317 - DNA, 25 bp, Homo sapien
tacatctatggcacgtctcaatttg

SEQ ID NO: 1688318 - DNA, 25 bp, Homo sapien
gctattgtattggaccacacaggtt

SEQ ID NO: 1688319 - DNA, 25 bp, Homo sapien
tcaatttgaaccagctacacacagc

SEQ ID NO: 1688320 - DNA, 25 bp, Homo sapien
gtataatggataggcctctggaccc

SEQ ID NO: 1688321 - DNA, 25 bp, Homo sapien
aggaagtataatggataggcctctg

SEQ ID NO: 1688322 - DNA, 25 bp, Homo sapien
tggtaaagccatggggtcctccacc

SEQ ID NO: 1688323 - DNA, 25 bp, Homo sapien
cacctctggagcaagattagacctc

SEQ ID NO: 1688324 - DNA, 25 bp, Homo sapien
gtgggaatccatgaccattcctaga

SEQ ID NO: 1688325 - DNA, 25 bp, Homo sapien
cctagacctgaaattgggagccggg

SEQ ID NO: 1688326 - DNA, 25 bp, Homo sapien
ggctggtaatagtgggaatccatga

SEQ ID NO: 1688327 - DNA, 25 bp, Homo sapien
tccatgaccattcctagacctgaaa

SEQ ID NO: 1688328 - DNA, 25 bp, Homo sapien
gagatactgtctcttaagaaacgac

SEQ ID NO: 1688329 - DNA, 25 bp, Homo sapien
taggcatagcggcatgtacctctag

SEQ ID NO: 1688330 - DNA, 25 bp, Homo sapien
agatgctgtgaaccaagcttgtcca

SEQ ID NO: 1688331 - DNA, 25 bp, Homo sapien
ggcatgtggcccaagacggcttgaa

SEQ ID NO: 1688332 - DNA, 25 bp, Homo sapien
ctcattgatggcttcgttttcttct

SEQ ID NO: 1688333 - DNA, 25 bp, Homo sapien
cattgatggcttcgttttcttctat

SEQ ID NO: 1688334 - DNA, 25 bp, Homo sapien
ttgatggcttcgttttcttctatta

SEQ ID NO: 1688335 - DNA, 25 bp, Homo sapien
tgatggcttcgttttcttctattat

SEQ ID NO: 1688336 - DNA, 25 bp, Homo sapien
agttttagaggctgtccctgtgtca

SEQ ID NO: 1688337 - DNA, 25 bp, Homo sapien
catcccagtgaagctctattggctg

SEQ ID NO: 1688338 - DNA, 25 bp, Homo sapien
tgatgccacacagctcttatggcac

SEQ ID NO: 1688339 - DNA, 25 bp, Homo sapien
gttctcctattctcgggtcccacca

SEQ ID NO: 1688340 - DNA, 25 bp, Homo sapien
caaagggcatgagctagaagtgtaa

SEQ ID NO: 1688341 - DNA, 25 bp, Homo sapien
ttaagtggtactcaaagggcatgag

SEQ ID NO: 1688342 - DNA, 25 bp, Homo sapien
catgagctagaagtgtaatatacca

SEQ ID NO: 1688343 - DNA, 25 bp, Homo sapien
aagtgtaatataccagcagcttccc

SEQ ID NO: 1688344 - DNA, 25 bp, Homo sapien
ggccgcacggatatcgggccccaag

SEQ ID NO: 1688345 - DNA, 25 bp, Homo sapien
caaggtcctcccgcgaaactcggat

SEQ ID NO: 1688346 - DNA, 25 bp, Homo sapien
tgaagggatacggtttacgcgccaa

SEQ ID NO: 1688347 - DNA, 25 bp, Homo sapien
gggcggccgatgcaacggattgcga

SEQ ID NO: 1688348 - DNA, 25 bp, Homo sapien
tttagtgttatggtatattaatgta

SEQ ID NO: 1688349 - DNA, 25 bp, Homo sapien
tttttagtgttatggtatattaatg

SEQ ID NO: 1688350 - DNA, 25 bp, Homo sapien
ctttttagtgttatggtatattaat

SEQ ID NO: 1688351 - DNA, 25 bp, Homo sapien
ttagtgttatggtatattaatgtat

SEQ ID NO: 1688352 - DNA, 25 bp, Homo sapien
gtgaggatctggatgtacgcgcccg

SEQ ID NO: 1688353 - DNA, 25 bp, Homo sapien
tagcagtgcccttttgtccatggag

SEQ ID NO: 1688354 - DNA, 25 bp, Homo sapien
ccggcggtcaccaggtactgctcca

SEQ ID NO: 1688355 - DNA, 25 bp, Homo sapien
tactgctccagagcgggctggattc

SEQ ID NO: 1688356 - DNA, 25 bp, Homo sapien
tgctgtaagggcatttccgaaacca

SEQ ID NO: 1688357 - DNA, 25 bp, Homo sapien
gctgctgtaagggcatttccgaaac

SEQ ID NO: 1688358 - DNA, 25 bp, Homo sapien
ctgctgtaagggcatttccgaaacc

SEQ ID NO: 1688359 - DNA, 25 bp, Homo sapien
cccaacagaatccggtgcccccgcg

SEQ ID NO: 1688360 - DNA, 25 bp, Homo sapien
ccaacagaatccggtgcccccgcgg

SEQ ID NO: 1688361 - DNA, 25 bp, Homo sapien
taatttggtaagtccgggaagcagc

SEQ ID NO: 1688362 - DNA, 25 bp, Homo sapien
gccactgaaggtggcaagtctgctt

SEQ ID NO: 1688363 - DNA, 25 bp, Homo sapien
agaccgaaaaggcaagatttcacca

SEQ ID NO: 1688364 - DNA, 25 bp, Homo sapien
cagagggaaatctgcggtgcctgca

SEQ ID NO: 1688365 - DNA, 25 bp, Homo sapien
ggtttgcctgggctacaacctggga

SEQ ID NO: 1688366 - DNA, 25 bp, Homo sapien
tccaaacgaggaagagctgagataa

SEQ ID NO: 1688367 - DNA, 25 bp, Homo sapien
ctgcaagttttggaaccacgagagc

SEQ ID NO: 1688368 - DNA, 25 bp, Homo sapien
gagctcggattctcaaccgcttgag

SEQ ID NO: 1688369 - DNA, 25 bp, Homo sapien
gcagaagttggttcacgacctttaa

SEQ ID NO: 1688370 - DNA, 25 bp, Homo sapien
gaagccaatgatcgtttaccatttc

SEQ ID NO: 1688371 - DNA, 25 bp, Homo sapien
atatctggcttcaaagcatcaaaag

SEQ ID NO: 1688372 - DNA, 25 bp, Homo sapien
cacttagtacttgcatagctagaga

SEQ ID NO: 1688373 - DNA, 25 bp, Homo sapien
tagtcatctgccaaacaatgatgct

SEQ ID NO: 1688374 - DNA, 25 bp, Homo sapien
gtattcagcccagtaacatacagta

SEQ ID NO: 1688375 - DNA, 25 bp, Homo sapien
agaggctagaccatagaaccttggg

SEQ ID NO: 1688376 - DNA, 25 bp, Homo sapien
aatgatgctttcagtcgacagcaga

SEQ ID NO: 1688377 - DNA, 25 bp, Homo sapien
tttgtattccaaaccacagacccaa

SEQ ID NO: 1688378 - DNA, 25 bp, Homo sapien
tgtattccaaaccacagacccaact

SEQ ID NO: 1688379 - DNA, 25 bp, Homo sapien
ttgtattccaaaccacagacccaac

SEQ ID NO: 1688380 - DNA, 25 bp, Homo sapien
ctttgtattccaaaccacagaccca

SEQ ID NO: 1688381 - DNA, 25 bp, Homo sapien
gagtccctgcgagagcttcaaggca

SEQ ID NO: 1688382 - DNA, 25 bp, Homo sapien
tctgaacttctaagaggaaagggcc

SEQ ID NO: 1688383 - DNA, 25 bp, Homo sapien
tcagttcgatatgcccagggaaggc

SEQ ID NO: 1688384 - DNA, 25 bp, Homo sapien
aatggtagtccaaatgtatgccggc

SEQ ID NO: 1688385 - DNA, 25 bp, Homo sapien
gaataccgtgtctccggcatgctca

SEQ ID NO: 1688386 - DNA, 25 bp, Homo sapien
tcctcccaccgggtagattcaggtg

SEQ ID NO: 1688387 - DNA, 25 bp, Homo sapien
tgacgagaagtgttgaggaataccg

SEQ ID NO: 1688388 - DNA, 25 bp, Homo sapien
caggtgtcagctgatgacgagaagt

SEQ ID NO: 1688389 - DNA, 25 bp, Homo sapien
gatagtggcatccagagacagttgc

SEQ ID NO: 1688390 - DNA, 25 bp, Homo sapien
tagcaagattctgcaatggacccat

SEQ ID NO: 1688391 - DNA, 25 bp, Homo sapien
tgtatgaagtcagcagatcaccgtt

SEQ ID NO: 1688392 - DNA, 25 bp, Homo sapien
gagcagacggagtactgtatgaagt

SEQ ID NO: 1688393 - DNA, 25 bp, Homo sapien
tatgttcagtctgctcctagagaga

SEQ ID NO: 1688394 - DNA, 25 bp, Homo sapien
cttccattcccactggtagagggtg

SEQ ID NO: 1688395 - DNA, 25 bp, Homo sapien
gactcacaggttgcaatatgttcag

SEQ ID NO: 1688396 - DNA, 25 bp, Homo sapien
ttctaggaagtagggccatttatcc

SEQ ID NO: 1688397 - DNA, 25 bp, Homo sapien
caggaagcagcttggtgcagccctt

SEQ ID NO: 1688398 - DNA, 25 bp, Homo sapien
catatgaagatgtgaggcaaggcca

SEQ ID NO: 1688399 - DNA, 25 bp, Homo sapien
tccttcaggtaagcagcagccttgc

SEQ ID NO: 1688400 - DNA, 25 bp, Homo sapien
gaaacgtcgaacagggtcttccaca

SEQ ID NO: 1688401 - DNA, 25 bp, Homo sapien
cagcaatacgtcattctcccatata

SEQ ID NO: 1688402 - DNA, 25 bp, Homo sapien
gttggcttgctaaccagctataact

SEQ ID NO: 1688403 - DNA, 25 bp, Homo sapien
ttaaaaagttggcttgctaaccagc

SEQ ID NO: 1688404 - DNA, 25 bp, Homo sapien
tgttctggtctcactagcaaatcaa

SEQ ID NO: 1688405 - DNA, 25 bp, Homo sapien
gcgccgctggagagcacagacttta

SEQ ID NO: 1688406 - DNA, 25 bp, Homo sapien
aaatctgtggtattcgccatcacaa

SEQ ID NO: 1688407 - DNA, 25 bp, Homo sapien
tagtcttagagttacacgtgtcatt

SEQ ID NO: 1688408 - DNA, 25 bp, Homo sapien
aaatcttattaccaagcgccgctgg

SEQ ID NO: 1688409 - DNA, 25 bp, Homo sapien
taagtggagtgcaagaaagtatgac

SEQ ID NO: 1688410 - DNA, 25 bp, Homo sapien
accctggctgggttgtggcgccatt

SEQ ID NO: 1688411 - DNA, 25 bp, Homo sapien
gccagatagcacgtaatgtttgata

SEQ ID NO: 1688412 - DNA, 25 bp, Homo sapien
gtttcactgcaagagatgaggaagt

SEQ ID NO: 1688413 - DNA, 25 bp, Homo sapien
gaatacagttgcacagcccctgact

SEQ ID NO: 1688414 - DNA, 25 bp, Homo sapien
tccaaccaggtcagtagcaaaacaa

SEQ ID NO: 1688415 - DNA, 25 bp, Homo sapien
gaaagcacctcataaacaggctggc

SEQ ID NO: 1688416 - DNA, 25 bp, Homo sapien
taaacaggctggcatgcatgtccaa

SEQ ID NO: 1688417 - DNA, 25 bp, Homo sapien
agcatctattatatgacagggacag

SEQ ID NO: 1688418 - DNA, 25 bp, Homo sapien
ttatatgacagggacagtgcaaggc

SEQ ID NO: 1688419 - DNA, 25 bp, Homo sapien
cactcagggtgttattggtccaaat

SEQ ID NO: 1688420 - DNA, 25 bp, Homo sapien
aaatgcttaaaccatggccaggcca

SEQ ID NO: 1688421 - DNA, 25 bp, Homo sapien
tacacaccagcaagcaaggcaacat

SEQ ID NO: 1688422 - DNA, 25 bp, Homo sapien
gaatttataggaagatacacaccag

SEQ ID NO: 1688423 - DNA, 25 bp, Homo sapien
acatgctagtctgcaagagcactcc

SEQ ID NO: 1688424 - DNA, 25 bp, Homo sapien
gagaggtttctaagctttgcattga

SEQ ID NO: 1688425 - DNA, 25 bp, Homo sapien
aggaatacactagaaagatctctac

SEQ ID NO: 1688426 - DNA, 25 bp, Homo sapien
catataccaacagttaagccaagag

SEQ ID NO: 1688427 - DNA, 25 bp, Homo sapien
atataccaacagttaagccaagagc

SEQ ID NO: 1688428 - DNA, 25 bp, Homo sapien
gaatacactagaaagatctctacaa

SEQ ID NO: 1688429 - DNA, 25 bp, Homo sapien
cctccttataccgaaacctggcaga

SEQ ID NO: 1688430 - DNA, 25 bp, Homo sapien
gcatcctccttataccgaaacctgg

SEQ ID NO: 1688431 - DNA, 25 bp, Homo sapien
gctagcatcctccttataccgaaac

SEQ ID NO: 1688432 - DNA, 25 bp, Homo sapien
tagcatcctccttataccgaaacct

SEQ ID NO: 1688433 - DNA, 25 bp, Homo sapien
ttctaccagacgtacaaagagctgg

SEQ ID NO: 1688434 - DNA, 25 bp, Homo sapien
gctggtaccattcccactgtaacta

SEQ ID NO: 1688435 - DNA, 25 bp, Homo sapien
tagtccactgaaagggcaagcgaca

SEQ ID NO: 1688436 - DNA, 25 bp, Homo sapien
caagcgacaggaactataaaatcca

SEQ ID NO: 1688437 - DNA, 25 bp, Homo sapien
aactcctgttcttagggctcataaa

SEQ ID NO: 1688438 - DNA, 25 bp, Homo sapien
acaagcaggtgggttgttaacctca

SEQ ID NO: 1688439 - DNA, 25 bp, Homo sapien
ggcatggtccttgagtaacaagaaa

SEQ ID NO: 1688440 - DNA, 25 bp, Homo sapien
ggagacagggtcttaagataaatct

SEQ ID NO: 1688441 - DNA, 25 bp, Homo sapien
tagagaggactagaaaattcactgg

SEQ ID NO: 1688442 - DNA, 25 bp, Homo sapien
ggcctgtgagcgtatctgaagtttc

SEQ ID NO: 1688443 - DNA, 25 bp, Homo sapien
attcactggcatactactttctagg

SEQ ID NO: 1688444 - DNA, 25 bp, Homo sapien
catctctgggtaagacccaccggaa

SEQ ID NO: 1688445 - DNA, 25 bp, Homo sapien
tgctggttcgaagcctggaaacctc

SEQ ID NO: 1688446 - DNA, 25 bp, Homo sapien
ctgctggttcgaagcctggaaacct

SEQ ID NO: 1688447 - DNA, 25 bp, Homo sapien
cctgctggttcgaagcctggaaacc

SEQ ID NO: 1688448 - DNA, 25 bp, Homo sapien
tcctgctggttcgaagcctggaaac

SEQ ID NO: 1688449 - DNA, 25 bp, Homo sapien
tctcttcagataacccgtgggactt

SEQ ID NO: 1688450 - DNA, 25 bp, Homo sapien
gaagagtctggctgtaactcacaga

SEQ ID NO: 1688451 - DNA, 25 bp, Homo sapien
tcatagctggcatcactgttctgaa

SEQ ID NO: 1688452 - DNA, 25 bp, Homo sapien
ctaaagtgctgggacgaagagtctg

SEQ ID NO: 1688453 - DNA, 25 bp, Homo sapien
atcccaccacttagaggttaaagtg

SEQ ID NO: 1688454 - DNA, 25 bp, Homo sapien
cacttagaggttaaagtgggaggat

SEQ ID NO: 1688455 - DNA, 25 bp, Homo sapien
cactaaagagtgaatgggggctgag

SEQ ID NO: 1688456 - DNA, 25 bp, Homo sapien
tgcactaaagagtgaatgggggctg

SEQ ID NO: 1688457 - DNA, 25 bp, Homo sapien
tggccttattgagattccttcctct

SEQ ID NO: 1688458 - DNA, 25 bp, Homo sapien
atctcaacaattttagtagtgatca

SEQ ID NO: 1688459 - DNA, 25 bp, Homo sapien
caacaattttagtagtgatcacatg

SEQ ID NO: 1688460 - DNA, 25 bp, Homo sapien
caattttagtagtgatcacatgtta

SEQ ID NO: 1688461 - DNA, 25 bp, Homo sapien
agtagtgatcacatgttaaatgaaa

SEQ ID NO: 1688462 - DNA, 25 bp, Homo sapien
gacaaacacagcgatccttcagcat

SEQ ID NO: 1688463 - DNA, 25 bp, Homo sapien
gatggacaaacacagcgatccttca

SEQ ID NO: 1688464 - DNA, 25 bp, Homo sapien
tggacaaacacagcgatccttcagc

SEQ ID NO: 1688465 - DNA, 25 bp, Homo sapien
atggacaaacacagcgatccttcag

SEQ ID NO: 1688466 - DNA, 25 bp, Homo sapien
agccaggattctagcgttgtaggct

SEQ ID NO: 1688467 - DNA, 25 bp, Homo sapien
tctagcgttgtaggctgggttgtca

SEQ ID NO: 1688468 - DNA, 25 bp, Homo sapien
acactctcttcacctgccgtgatca

SEQ ID NO: 1688469 - DNA, 25 bp, Homo sapien
cagcatcttgtcattccctagagcc

SEQ ID NO: 1688470 - DNA, 25 bp, Homo sapien
gagaggtactgatgaccgctttctc

SEQ ID NO: 1688471 - DNA, 25 bp, Homo sapien
actgatgaccgctttctcctagctc

SEQ ID NO: 1688472 - DNA, 25 bp, Homo sapien
tactgatgaccgctttctcctagct

SEQ ID NO: 1688473 - DNA, 25 bp, Homo sapien
aggtactgatgaccgctttctccta

SEQ ID NO: 1688474 - DNA, 25 bp, Homo sapien
gaccaagagacgtatcataccgcgt

SEQ ID NO: 1688475 - DNA, 25 bp, Homo sapien
gcagaccaagagacgtatcataccg

SEQ ID NO: 1688476 - DNA, 25 bp, Homo sapien
caagagacgtatcataccgcgtttt

SEQ ID NO: 1688477 - DNA, 25 bp, Homo sapien
tgagcagaccaagagacgtatcata

SEQ ID NO: 1688478 - DNA, 25 bp, Homo sapien
tcctgactgagctcggtcacttctt

SEQ ID NO: 1688479 - DNA, 25 bp, Homo sapien
ttcctgactgagctcggtcacttct

SEQ ID NO: 1688480 - DNA, 25 bp, Homo sapien
gccttacgctacgagtatacccatg

SEQ ID NO: 1688481 - DNA, 25 bp, Homo sapien
ggcaaagctaactgggtttacacac

SEQ ID NO: 1688482 - DNA, 25 bp, Homo sapien
taataataggatcgagttggtgact

SEQ ID NO: 1688483 - DNA, 25 bp, Homo sapien
taccttgtgcataagtcagattgtc

SEQ ID NO: 1688484 - DNA, 25 bp, Homo sapien
tcaaccaatttcaattgctacgata

SEQ ID NO: 1688485 - DNA, 25 bp, Homo sapien
caaccaatttcaattgctacgatat

SEQ ID NO: 1688486 - DNA, 25 bp, Homo sapien
gggctcccaaccaaacaatgaatga

SEQ ID NO: 1688487 - DNA, 25 bp, Homo sapien
gatgagacactagaagaatctgggc

SEQ ID NO: 1688488 - DNA, 25 bp, Homo sapien
tctcactaattatcggctgacaagg

SEQ ID NO: 1688489 - DNA, 25 bp, Homo sapien
caaggttaattctttggtcaacagg

SEQ ID NO: 1688490 - DNA, 25 bp, Homo sapien
tgaatgcagctatggaactactact

SEQ ID NO: 1688491 - DNA, 25 bp, Homo sapien
caacggatgcctttatagagggcca

SEQ ID NO: 1688492 - DNA, 25 bp, Homo sapien
cacgaaatctgcatacacatgtagg

SEQ ID NO: 1688493 - DNA, 25 bp, Homo sapien
ggattctgggttttaggtcactaca

SEQ ID NO: 1688494 - DNA, 25 bp, Homo sapien
taaagagtgtcaaggaatcttccat

SEQ ID NO: 1688495 - DNA, 25 bp, Homo sapien
gtaaagagtgtcaaggaatcttcca

SEQ ID NO: 1688496 - DNA, 25 bp, Homo sapien
caactataacagtttggtctttaag

SEQ ID NO: 1688497 - DNA, 25 bp, Homo sapien
ggctttcacaactataacagtttgg

SEQ ID NO: 1688498 - DNA, 25 bp, Homo sapien
tttctggaggggctttcacaactat

SEQ ID NO: 1688499 - DNA, 25 bp, Homo sapien
ggaggggctttcacaactataacag

SEQ ID NO: 1688500 - DNA, 25 bp, Homo sapien
ttctggacataagtaaacctcaatg

SEQ ID NO: 1688501 - DNA, 25 bp, Homo sapien
agaaactgagcaatcgctatgtcct

SEQ ID NO: 1688502 - DNA, 25 bp, Homo sapien
gccagaggagaaaggtttcccatag

SEQ ID NO: 1688503 - DNA, 25 bp, Homo sapien
tatgtcctgagttggttgaagccaa

SEQ ID NO: 1688504 - DNA, 25 bp, Homo sapien
tgagcaatcgctatgtcctgagttg

SEQ ID NO: 1688505 - DNA, 25 bp, Homo sapien
aaatcgtaagcatcgaagagatcgc

SEQ ID NO: 1688506 - DNA, 25 bp, Homo sapien
tcacaaacggtccttctaggttgga

SEQ ID NO: 1688507 - DNA, 25 bp, Homo sapien
atcgtaagcatcgaagagatcgctg

SEQ ID NO: 1688508 - DNA, 25 bp, Homo sapien
tttccaaatcgtaagcatcgaagag

SEQ ID NO: 1688509 - DNA, 25 bp, Homo sapien
taaggagagttcacacgaagcataa

SEQ ID NO: 1688510 - DNA, 25 bp, Homo sapien
aaggtaggaagggacaacactgcat

SEQ ID NO: 1688511 - DNA, 25 bp, Homo sapien
aagggacaacactgcatgacagatg

SEQ ID NO: 1688512 - DNA, 25 bp, Homo sapien
tatcggtttttaaggagagttcaca

SEQ ID NO: 1688513 - DNA, 25 bp, Homo sapien
taaagcgggagacaccctggcattg

SEQ ID NO: 1688514 - DNA, 25 bp, Homo sapien
cctgagtgcggtgtaagagagccct

SEQ ID NO: 1688515 - DNA, 25 bp, Homo sapien
cacaacagcttagagtggcagaact

SEQ ID NO: 1688516 - DNA, 25 bp, Homo sapien
gaagcacgatgggacaaagctcctt

SEQ ID NO: 1688517 - DNA, 25 bp, Homo sapien
taggatttgcagctgacacaaagcc

SEQ ID NO: 1688518 - DNA, 25 bp, Homo sapien
cattcttggacataactggtaggat

SEQ ID NO: 1688519 - DNA, 25 bp, Homo sapien
ggaatggaccggagatactacgcca

SEQ ID NO: 1688520 - DNA, 25 bp, Homo sapien
attcccgcagtccttagcatccaag

SEQ ID NO: 1688521 - DNA, 25 bp, Homo sapien
catttcaatttaactgttcgtttcg

SEQ ID NO: 1688522 - DNA, 25 bp, Homo sapien
caattaaacatatgagttgagtgcc

SEQ ID NO: 1688523 - DNA, 25 bp, Homo sapien
cattgggtcaggcacatagcatttc

SEQ ID NO: 1688524 - DNA, 25 bp, Homo sapien
aatctacctggagtaaactggctgg

SEQ ID NO: 1688525 - DNA, 25 bp, Homo sapien
gaccacaccgacattttgtaccaag

SEQ ID NO: 1688526 - DNA, 25 bp, Homo sapien
gaggcagctaaccagatgagataaa

SEQ ID NO: 1688527 - DNA, 25 bp, Homo sapien
ggcataaatggtttcccatacagga

SEQ ID NO: 1688528 - DNA, 25 bp, Homo sapien
gagaattacacaaagctggaagcag

SEQ ID NO: 1688529 - DNA, 25 bp, Homo sapien
tacacacgagttgtcatgcacacac

SEQ ID NO: 1688530 - DNA, 25 bp, Homo sapien
tactaacccactttgtgtgccggat

SEQ ID NO: 1688531 - DNA, 25 bp, Homo sapien
cacaacaatctagccaggtgagctc

SEQ ID NO: 1688532 - DNA, 25 bp, Homo sapien
taaggctcacgcagtcataatttgc

SEQ ID NO: 1688533 - DNA, 25 bp, Homo sapien
aatccattggtttattttgagtcat

SEQ ID NO: 1688534 - DNA, 25 bp, Homo sapien
ctttcatatcatggttatagattag

SEQ ID NO: 1688535 - DNA, 25 bp, Homo sapien
tggttatagattagatctagattgg

SEQ ID NO: 1688536 - DNA, 25 bp, Homo sapien
ttagatctagattggggctccccag

SEQ ID NO: 1688537 - DNA, 25 bp, Homo sapien
ccagttagttggaaatatcactgca

SEQ ID NO: 1688538 - DNA, 25 bp, Homo sapien
cagttagttggaaatatcactgcac

SEQ ID NO: 1688539 - DNA, 25 bp, Homo sapien
gttgtgaccagttagttggaaatat

SEQ ID NO: 1688540 - DNA, 25 bp, Homo sapien
tgaccagttagttggaaatatcact

SEQ ID NO: 1688541 - DNA, 25 bp, Homo sapien
gctggccataaaaattcccgtgaaa

SEQ ID NO: 1688542 - DNA, 25 bp, Homo sapien
tgagctgctccttcttacctatggc

SEQ ID NO: 1688543 - DNA, 25 bp, Homo sapien
cctaaagacagacatgcagattatc

SEQ ID NO: 1688544 - DNA, 25 bp, Homo sapien
tccttcttacctatggctggccata

SEQ ID NO: 1688545 - DNA, 25 bp, Homo sapien
agtgagaaaatcaacccgccactct

SEQ ID NO: 1688546 - DNA, 25 bp, Homo sapien
cactctccggaagctgcacagactt

SEQ ID NO: 1688547 - DNA, 25 bp, Homo sapien
cacagactttagatggagagcgcca

SEQ ID NO: 1688548 - DNA, 25 bp, Homo sapien
agagcgccatgacacatacgtcccg

SEQ ID NO: 1688549 - DNA, 25 bp, Homo sapien
gcaacacgtctgcatagtgcgagta

SEQ ID NO: 1688550 - DNA, 25 bp, Homo sapien
gtgctgacatctgccgtgacggtga

SEQ ID NO: 1688551 - DNA, 25 bp, Homo sapien
aataaatgttgtattcagcaccgca

SEQ ID NO: 1688552 - DNA, 25 bp, Homo sapien
ccgtgacggtgatccagtgtctggc

SEQ ID NO: 1688553 - DNA, 25 bp, Homo sapien
gtctaaagtcctcttgaaagatgag

SEQ ID NO: 1688554 - DNA, 25 bp, Homo sapien
gcaattagtctaaagtcctcttgaa

SEQ ID NO: 1688555 - DNA, 25 bp, Homo sapien
attatctgcaattagtctaaagtcc

SEQ ID NO: 1688556 - DNA, 25 bp, Homo sapien
tagtctaaagtcctcttgaaagatg

SEQ ID NO: 1688557 - DNA, 25 bp, Homo sapien
ttcctgagacacgatatcttcgatg

SEQ ID NO: 1688558 - DNA, 25 bp, Homo sapien
tcgccttcgtaccttcgggacaaca

SEQ ID NO: 1688559 - DNA, 25 bp, Homo sapien
gccttcgtaccttcgggacaacatc

SEQ ID NO: 1688560 - DNA, 25 bp, Homo sapien
tgtcatccagtagtgtatcacagga

SEQ ID NO: 1688561 - DNA, 25 bp, Homo sapien
tagctgtccagccatatattctcca

SEQ ID NO: 1688562 - DNA, 25 bp, Homo sapien
tattatgagaacaaccccatgttcg

SEQ ID NO: 1688563 - DNA, 25 bp, Homo sapien
cccatgttcgtatccaaattttctg

SEQ ID NO: 1688564 - DNA, 25 bp, Homo sapien
ttttatagccataagcagctagctg

SEQ ID NO: 1688565 - DNA, 25 bp, Homo sapien
tgaccccgatatgacgcactgagaa

SEQ ID NO: 1688566 - DNA, 25 bp, Homo sapien
cctagcagacatgggttagtgtacc

SEQ ID NO: 1688567 - DNA, 25 bp, Homo sapien
tgactgtattggaaagaaacctagc

SEQ ID NO: 1688568 - DNA, 25 bp, Homo sapien
ctaaatgtaaggtgggacccaacat

SEQ ID NO: 1688569 - DNA, 25 bp, Homo sapien
gaatggggcacaaagagaccccatc

SEQ ID NO: 1688570 - DNA, 25 bp, Homo sapien
ctgcactccagaatggggcacaaag

SEQ ID NO: 1688571 - DNA, 25 bp, Homo sapien
tggggcacaaagagaccccatctca

SEQ ID NO: 1688572 - DNA, 25 bp, Homo sapien
aatgtaaagaggaggctgggcgcag

SEQ ID NO: 1688573 - DNA, 25 bp, Homo sapien
aatcacctgagatcaagaggtctag

SEQ ID NO: 1688574 - DNA, 25 bp, Homo sapien
gtaaatcacctgagatcaagaggtc

SEQ ID NO: 1688575 - DNA, 25 bp, Homo sapien
cctgagatcaagaggtctagaccag

SEQ ID NO: 1688576 - DNA, 25 bp, Homo sapien
gcaggtaaatcacctgagatcaaga

SEQ ID NO: 1688577 - DNA, 25 bp, Homo sapien
gacaaaggacttcactgcatatgtg

SEQ ID NO: 1688578 - DNA, 25 bp, Homo sapien
tacagaacaatggtcaggagcagtg

SEQ ID NO: 1688579 - DNA, 25 bp, Homo sapien
tatagctaggacttgccaattacac

SEQ ID NO: 1688580 - DNA, 25 bp, Homo sapien
ataagacgcaacctctcaggccgag

SEQ ID NO: 1688581 - DNA, 25 bp, Homo sapien
tgcaaaccagacatttagtgacctg

SEQ ID NO: 1688582 - DNA, 25 bp, Homo sapien
taaaacatattaagggccagccacg

SEQ ID NO: 1688583 - DNA, 25 bp, Homo sapien
gaaactaagtacttctgtgctccat

SEQ ID NO: 1688584 - DNA, 25 bp, Homo sapien
tcacaacagtgaacgaggtttttcc

SEQ ID NO: 1688585 - DNA, 25 bp, Homo sapien
ggatgctgtctaccctcaagagtaa

SEQ ID NO: 1688586 - DNA, 25 bp, Homo sapien
tgaaaaactcaagggattcccatac

SEQ ID NO: 1688587 - DNA, 25 bp, Homo sapien
ggacttgacagccacccaaatagaa

SEQ ID NO: 1688588 - DNA, 25 bp, Homo sapien
catgtcaagactatgcagactggac

SEQ ID NO: 1688589 - DNA, 25 bp, Homo sapien
tcttttaatgtaggtcatgattgtc

SEQ ID NO: 1688590 - DNA, 25 bp, Homo sapien
tttaatgtaggtcatgattgtcaga

SEQ ID NO: 1688591 - DNA, 25 bp, Homo sapien
cttttaatgtaggtcatgattgtca

SEQ ID NO: 1688592 - DNA, 25 bp, Homo sapien
ggctcttttaatgtaggtcatgatt

SEQ ID NO: 1688593 - DNA, 25 bp, Homo sapien
caaatactccaatcttaacagccat

SEQ ID NO: 1688594 - DNA, 25 bp, Homo sapien
gtctttgagttacctaaatgtccta

SEQ ID NO: 1688595 - DNA, 25 bp, Homo sapien
gatggtccccgcagacataattcta

SEQ ID NO: 1688596 - DNA, 25 bp, Homo sapien
gaatcttagctgcaaagtctatcct

SEQ ID NO: 1688597 - DNA, 25 bp, Homo sapien
tcctcttagcatttgagagtttaaa

SEQ ID NO: 1688598 - DNA, 25 bp, Homo sapien
tgttccttacgaagcatcatgacct

SEQ ID NO: 1688599 - DNA, 25 bp, Homo sapien
catgacctccttgcaaatgaaacag

SEQ ID NO: 1688600 - DNA, 25 bp, Homo sapien
taaggggcacgacagatttgtgatg

SEQ ID NO: 1688601 - DNA, 25 bp, Homo sapien
ggtcaccaaggttaggtcgccaaca

SEQ ID NO: 1688602 - DNA, 25 bp, Homo sapien
tcgccaacaacgaagggaaatgtgg

SEQ ID NO: 1688603 - DNA, 25 bp, Homo sapien
cagaagtcctcttgtaataggagtg

SEQ ID NO: 1688604 - DNA, 25 bp, Homo sapien
caaccgatcgcttgcggtcaccaag

SEQ ID NO: 1688605 - DNA, 25 bp, Homo sapien
ttatatcacaagacagtttcttttg

SEQ ID NO: 1688606 - DNA, 25 bp, Homo sapien
gacagtttcttttgtcaaacaccaa

SEQ ID NO: 1688607 - DNA, 25 bp, Homo sapien
gatgtcaatgctttcaccgaacatg

SEQ ID NO: 1688608 - DNA, 25 bp, Homo sapien
ttgtcaaacaccaagtcaacttctt

SEQ ID NO: 1688609 - DNA, 25 bp, Homo sapien
tcagattcttggtttgtagataatt

SEQ ID NO: 1688610 - DNA, 25 bp, Homo sapien
ttttattatctgttagcttcgaact

SEQ ID NO: 1688611 - DNA, 25 bp, Homo sapien
tattatctgttagcttcgaactctc

SEQ ID NO: 1688612 - DNA, 25 bp, Homo sapien
tctgttagcttcgaactctcatccc

SEQ ID NO: 1688613 - DNA, 25 bp, Homo sapien
taaagcacccagtgtttgcatgaat

SEQ ID NO: 1688614 - DNA, 25 bp, Homo sapien
gaagcaaacgtacactcaacctgaa

SEQ ID NO: 1688615 - DNA, 25 bp, Homo sapien
gatttgaatacctaacacaggctta

SEQ ID NO: 1688616 - DNA, 25 bp, Homo sapien
gagtaagtttgcatagcatgggtca

SEQ ID NO: 1688617 - DNA, 25 bp, Homo sapien
tcacatagggaggatttgatacagc

SEQ ID NO: 1688618 - DNA, 25 bp, Homo sapien
taaaggctacaataaagcaagagcc

SEQ ID NO: 1688619 - DNA, 25 bp, Homo sapien
gacattctgacatgatactacagct

SEQ ID NO: 1688620 - DNA, 25 bp, Homo sapien
catacagtcacacatgctacccaag

SEQ ID NO: 1688621 - DNA, 25 bp, Homo sapien
tctgatctttctcagaggtattgag

SEQ ID NO: 1688622 - DNA, 25 bp, Homo sapien
gagacttttataatcatgtacaagg

SEQ ID NO: 1688623 - DNA, 25 bp, Homo sapien
caaggcattcgtcaataacactgat

SEQ ID NO: 1688624 - DNA, 25 bp, Homo sapien
gatctttctcagaggtattgagact

SEQ ID NO: 1688625 - DNA, 25 bp, Homo sapien
tcatcaactaccagcacgctaacag

SEQ ID NO: 1688626 - DNA, 25 bp, Homo sapien
gcacgctaacagaggagaggctctg

SEQ ID NO: 1688627 - DNA, 25 bp, Homo sapien
tcaactaccagcacgctaacagagg

SEQ ID NO: 1688628 - DNA, 25 bp, Homo sapien
taccagcacgctaacagaggagagg

SEQ ID NO: 1688629 - DNA, 25 bp, Homo sapien
tgtttgactacaccagttgtaaagg

SEQ ID NO: 1688630 - DNA, 25 bp, Homo sapien
caaggtagcactacctccaattgtt

SEQ ID NO: 1688631 - DNA, 25 bp, Homo sapien
gtaaaggatttgactgcgggcaact

SEQ ID NO: 1688632 - DNA, 25 bp, Homo sapien
tttgactgcgggcaacttcagacat

SEQ ID NO: 1688633 - DNA, 25 bp, Homo sapien
ccataaatctgcatcggatgcattt

SEQ ID NO: 1688634 - DNA, 25 bp, Homo sapien
tgcaactgttcaggagccataaatc

SEQ ID NO: 1688635 - DNA, 25 bp, Homo sapien
cagctgggttttttacagtgcaact

SEQ ID NO: 1688636 - DNA, 25 bp, Homo sapien
gtttctaaagtggtcttcagctggg

SEQ ID NO: 1688637 - DNA, 25 bp, Homo sapien
cagagtctcagctgcatatgtgctc

SEQ ID NO: 1688638 - DNA, 25 bp, Homo sapien
atatgtgctcccctctaacaccagg

SEQ ID NO: 1688639 - DNA, 25 bp, Homo sapien
ccccaggtctatgggagagctaaga

SEQ ID NO: 1688640 - DNA, 25 bp, Homo sapien
caggtacaaaggctcccacggttgt

SEQ ID NO: 1688641 - DNA, 25 bp, Homo sapien
ttaaatggatgacggcaggaaaaaa

SEQ ID NO: 1688642 - DNA, 25 bp, Homo sapien
catcttaaatggatgacggcaggaa

SEQ ID NO: 1688643 - DNA, 25 bp, Homo sapien
atggcggacggtaaggaggagtaag

SEQ ID NO: 1688644 - DNA, 25 bp, Homo sapien
aatggatgacggcaggaaaaaagag

SEQ ID NO: 1688645 - DNA, 25 bp, Homo sapien
tatttaaaaccaagatgatatgggt

SEQ ID NO: 1688646 - DNA, 25 bp, Homo sapien
tcagtaatgcattgtgtgacaacat

SEQ ID NO: 1688647 - DNA, 25 bp, Homo sapien
caattgctatgatataaccaggtga

SEQ ID NO: 1688648 - DNA, 25 bp, Homo sapien
cagcaacaccggaaacacttcagta

SEQ ID NO: 1688649 - DNA, 25 bp, Homo sapien
catcttgctccactagaagactttc

SEQ ID NO: 1688650 - DNA, 25 bp, Homo sapien
tcttgctccactagaagactttcag

SEQ ID NO: 1688651 - DNA, 25 bp, Homo sapien
tccacatcttgctccactagaagac

SEQ ID NO: 1688652 - DNA, 25 bp, Homo sapien
ttgctccactagaagactttcaggg

SEQ ID NO: 1688653 - DNA, 25 bp, Homo sapien
cataatataaaatcagtgcgagccc

SEQ ID NO: 1688654 - DNA, 25 bp, Homo sapien
taatataaaatcagtgcgagccctg

SEQ ID NO: 1688655 - DNA, 25 bp, Homo sapien
tataaaatcagtgcgagccctgagc

SEQ ID NO: 1688656 - DNA, 25 bp, Homo sapien
aatataaaatcagtgcgagccctga

SEQ ID NO: 1688657 - DNA, 25 bp, Homo sapien
caggaactagtccaaagatttggga

SEQ ID NO: 1688658 - DNA, 25 bp, Homo sapien
tttctgcaggaactagtccaaagat

SEQ ID NO: 1688659 - DNA, 25 bp, Homo sapien
tctgcaggaactagtccaaagattt

SEQ ID NO: 1688660 - DNA, 25 bp, Homo sapien
tgcaggaactagtccaaagatttgg

SEQ ID NO: 1688661 - DNA, 25 bp, Homo sapien
tcagggtctgccggcccagagatgc

SEQ ID NO: 1688662 - DNA, 25 bp, Homo sapien
gggtctgccggcccagagatgccca

SEQ ID NO: 1688663 - DNA, 25 bp, Homo sapien
agggtctgccggcccagagatgccc

SEQ ID NO: 1688664 - DNA, 25 bp, Homo sapien
gctcagggtctgccggcccagagat

SEQ ID NO: 1688665 - DNA, 25 bp, Homo sapien
gatttgcgtataaaacaaggtgcct

SEQ ID NO: 1688666 - DNA, 25 bp, Homo sapien
gatgcacgtaactcaaacttcagat

SEQ ID NO: 1688667 - DNA, 25 bp, Homo sapien
tgtagaaaagtagctcactcgtctg

SEQ ID NO: 1688668 - DNA, 25 bp, Homo sapien
caaggtgcctcactgatataaagca

SEQ ID NO: 1688669 - DNA, 25 bp, Homo sapien
ctgcctcaccagtggacctactcat

SEQ ID NO: 1688670 - DNA, 25 bp, Homo sapien
aataactgcctcaccagtggaccta

SEQ ID NO: 1688671 - DNA, 25 bp, Homo sapien
tcaataactgcctcaccagtggacc

SEQ ID NO: 1688672 - DNA, 25 bp, Homo sapien
taactgcctcaccagtggacctact

SEQ ID NO: 1688673 - DNA, 25 bp, Homo sapien
gaagtgtggaccaaatgcgtggtca

SEQ ID NO: 1688674 - DNA, 25 bp, Homo sapien
agcacccatggagacggtctgctgc

SEQ ID NO: 1688675 - DNA, 25 bp, Homo sapien
ggtcaaggacggccctcatcatcac

SEQ ID NO: 1688676 - DNA, 25 bp, Homo sapien
tctgtggctgaaaatcataagcaca

SEQ ID NO: 1688677 - DNA, 25 bp, Homo sapien
catacaggccaaaggtatccaaact

SEQ ID NO: 1688678 - DNA, 25 bp, Homo sapien
ttttttctaaactagctgagccagg

SEQ ID NO: 1688679 - DNA, 25 bp, Homo sapien
tatcattccgccatgctaccaaggt

SEQ ID NO: 1688680 - DNA, 25 bp, Homo sapien
gaagtctgacactattcgaaatgcc

SEQ ID NO: 1688681 - DNA, 25 bp, Homo sapien
tctttcctgaccattgcaactttgg

SEQ ID NO: 1688682 - DNA, 25 bp, Homo sapien
tacagaagaagggtatgctgctcat

SEQ ID NO: 1688683 - DNA, 25 bp, Homo sapien
cacactgattaggtattgaagccaa

SEQ ID NO: 1688684 - DNA, 25 bp, Homo sapien
tgccccgagcacagactgttgtatt

SEQ ID NO: 1688685 - DNA, 25 bp, Homo sapien
tatttcagaacgtattatggtccca

SEQ ID NO: 1688686 - DNA, 25 bp, Homo sapien
agagaatgctgcctattaagagaag

SEQ ID NO: 1688687 - DNA, 25 bp, Homo sapien
aaattatccgtgttgttttcacagc

SEQ ID NO: 1688688 - DNA, 25 bp, Homo sapien
tcagtgctttgagcccagttgcaaa

SEQ ID NO: 1688689 - DNA, 25 bp, Homo sapien
cagcaagttgtaattctgcataatc

SEQ ID NO: 1688690 - DNA, 25 bp, Homo sapien
tcagcaagttgtaattctgcataat

SEQ ID NO: 1688691 - DNA, 25 bp, Homo sapien
caagttgtaattctgcataatcaaa

SEQ ID NO: 1688692 - DNA, 25 bp, Homo sapien
ctcaactgggcttcagcaagttgta

SEQ ID NO: 1688693 - DNA, 25 bp, Homo sapien
gctccatctacctgaatgctatgag

SEQ ID NO: 1688694 - DNA, 25 bp, Homo sapien
aaatgcatacttgggcttatttcta

SEQ ID NO: 1688695 - DNA, 25 bp, Homo sapien
aaggaaaatgcatacttgggcttat

SEQ ID NO: 1688696 - DNA, 25 bp, Homo sapien
gctgtagtactatgagatcccaatc

SEQ ID NO: 1688697 - DNA, 25 bp, Homo sapien
tcaaaactcaccttgcacagcatgc

SEQ ID NO: 1688698 - DNA, 25 bp, Homo sapien
agaagttagtatctttcaacaaggg

SEQ ID NO: 1688699 - DNA, 25 bp, Homo sapien
cttgttaagcaaggtaaagtgctcc

SEQ ID NO: 1688700 - DNA, 25 bp, Homo sapien
caaaagtaacctcaagtatatggca

SEQ ID NO: 1688701 - DNA, 25 bp, Homo sapien
gcatccagccagtacgattttcttg

SEQ ID NO: 1688702 - DNA, 25 bp, Homo sapien
tactcagtcccttaaggtagtcctg

SEQ ID NO: 1688703 - DNA, 25 bp, Homo sapien
gcttgaggaacgcatccagccagta

SEQ ID NO: 1688704 - DNA, 25 bp, Homo sapien
ccttaaggtagtcctggcgaggctg

SEQ ID NO: 1688705 - DNA, 25 bp, Homo sapien
ttctaccacacgatctatctgctga

SEQ ID NO: 1688706 - DNA, 25 bp, Homo sapien
aacttctaccacacgatctatctgc

SEQ ID NO: 1688707 - DNA, 25 bp, Homo sapien
ctaccacacgatctatctgctgaac

SEQ ID NO: 1688708 - DNA, 25 bp, Homo sapien
acaacttctaccacacgatctatct

SEQ ID NO: 1688709 - DNA, 25 bp, Homo sapien
ctgtttatctcactttcaacgatta

SEQ ID NO: 1688710 - DNA, 25 bp, Homo sapien
tgtttatctcactttcaacgattac

SEQ ID NO: 1688711 - DNA, 25 bp, Homo sapien
ctgagtggtgtttctactatgtagt

SEQ ID NO: 1688712 - DNA, 25 bp, Homo sapien
ggtgtttctactatgtagttcagaa

SEQ ID NO: 1688713 - DNA, 25 bp, Homo sapien
caagtccacgctcatcagtaaggag

SEQ ID NO: 1688714 - DNA, 25 bp, Homo sapien
tccacgctcatcagtaaggagctat

SEQ ID NO: 1688715 - DNA, 25 bp, Homo sapien
cgctcatcagtaaggagctatccat

SEQ ID NO: 1688716 - DNA, 25 bp, Homo sapien
cactcaagtccacgctcatcagtaa

SEQ ID NO: 1688717 - DNA, 25 bp, Homo sapien
gaatgtgaatccactagacgctgta

SEQ ID NO: 1688718 - DNA, 25 bp, Homo sapien
catatgagccaagactaaggtgcgt

SEQ ID NO: 1688719 - DNA, 25 bp, Homo sapien
aaagtttttaatgaccatatgagcc

SEQ ID NO: 1688720 - DNA, 25 bp, Homo sapien
taacatgatgaagatccatttcaga

SEQ ID NO: 1688721 - DNA, 25 bp, Homo sapien
ctaaattaccgccacttgaggcatt

SEQ ID NO: 1688722 - DNA, 25 bp, Homo sapien
taaattaccgccacttgaggcattt

SEQ ID NO: 1688723 - DNA, 25 bp, Homo sapien
aaattaccgccacttgaggcatttg

SEQ ID NO: 1688724 - DNA, 25 bp, Homo sapien
cataatcagtaatgccaggcttcct

SEQ ID NO: 1688725 - DNA, 25 bp, Homo sapien
ctctggagggctaggaagtacgtca

SEQ ID NO: 1688726 - DNA, 25 bp, Homo sapien
aaattatagtacactgctgcttggc

SEQ ID NO: 1688727 - DNA, 25 bp, Homo sapien
tggtaagccacaaagagctagacag

SEQ ID NO: 1688728 - DNA, 25 bp, Homo sapien
cctaatcttcggcaaatccaatcgt

SEQ ID NO: 1688729 - DNA, 25 bp, Homo sapien
tcttcggcaaatccaatcgtgctcc

SEQ ID NO: 1688730 - DNA, 25 bp, Homo sapien
ccccaagccgccttccattatcctt

SEQ ID NO: 1688731 - DNA, 25 bp, Homo sapien
atcagtggattcttcctaatcttcg

SEQ ID NO: 1688732 - DNA, 25 bp, Homo sapien
gcaacataacaaagtgagatcttat

SEQ ID NO: 1688733 - DNA, 25 bp, Homo sapien
acaaattgatgtcccggctaggtgt

SEQ ID NO: 1688734 - DNA, 25 bp, Homo sapien
ttgtttaacaaattgatgtcccggc

SEQ ID NO: 1688735 - DNA, 25 bp, Homo sapien
gcttttctatgggattctcaagggc

SEQ ID NO: 1688736 - DNA, 25 bp, Homo sapien
tccaagtgcaactcactttcatgca

SEQ ID NO: 1688737 - DNA, 25 bp, Homo sapien
tgcaccttagctccagtagaagtgg

SEQ ID NO: 1688738 - DNA, 25 bp, Homo sapien
ggatacatccaatgatctgctccta

SEQ ID NO: 1688739 - DNA, 25 bp, Homo sapien
tgctcctactgtgcccttccaagtg

SEQ ID NO: 1688740 - DNA, 25 bp, Homo sapien
catttctcagcatcaacacccattt

SEQ ID NO: 1688741 - DNA, 25 bp, Homo sapien
atttctcagcatcaacacccatttt

SEQ ID NO: 1688742 - DNA, 25 bp, Homo sapien
ataaagtaaatttgagaaatcttct

SEQ ID NO: 1688743 - DNA, 25 bp, Homo sapien
agataaatagatagtccctgcctta

SEQ ID NO: 1688744 - DNA, 25 bp, Homo sapien
gacataaagtaaatttgagaaatct

SEQ ID NO: 1688745 - DNA, 25 bp, Homo sapien
cataaagtaaatttgagaaatcttc

SEQ ID NO: 1688746 - DNA, 25 bp, Homo sapien
cacaagaactgagcgccaaacatct

SEQ ID NO: 1688747 - DNA, 25 bp, Homo sapien
gggtttccctatcttgatcttacag

SEQ ID NO: 1688748 - DNA, 25 bp, Homo sapien
aaggccatgtaacagctgagattca

SEQ ID NO: 1688749 - DNA, 25 bp, Homo sapien
gataagtagcctgctcaaggccatg

SEQ ID NO: 1688750 - DNA, 25 bp, Homo sapien
ggccaaatttcctctggcgtgttta

SEQ ID NO: 1688751 - DNA, 25 bp, Homo sapien
ttcatcaattggataactggccaaa

SEQ ID NO: 1688752 - DNA, 25 bp, Homo sapien
gattgtttggctctatctactagtt

SEQ ID NO: 1688753 - DNA, 25 bp, Homo sapien
gcagtaggtacaagcattgagacac

SEQ ID NO: 1688754 - DNA, 25 bp, Homo sapien
tattaattaagttcgtatatttgta

SEQ ID NO: 1688755 - DNA, 25 bp, Homo sapien
cagaaaactaaagaagttggtctct

SEQ ID NO: 1688756 - DNA, 25 bp, Homo sapien
agatgcaggcaagaatcttcattaa

SEQ ID NO: 1688757 - DNA, 25 bp, Homo sapien
taaaagttcctggtgatatgccagt

SEQ ID NO: 1688758 - DNA, 25 bp, Homo sapien
ggctgtaaactgtaagccacttggc

SEQ ID NO: 1688759 - DNA, 25 bp, Homo sapien
gaatcgctgctcttattactccgtg

SEQ ID NO: 1688760 - DNA, 25 bp, Homo sapien
gatataacggcttacatgctaggct

SEQ ID NO: 1688761 - DNA, 25 bp, Homo sapien
tacagcttgtgaactggcattagct

SEQ ID NO: 1688762 - DNA, 25 bp, Homo sapien
tatctgttggccagactagagaaac

SEQ ID NO: 1688763 - DNA, 25 bp, Homo sapien
tgggttcaatctgtcaaggttcaaa

SEQ ID NO: 1688764 - DNA, 25 bp, Homo sapien
caactgagagctaatcaagggcgtc

SEQ ID NO: 1688765 - DNA, 25 bp, Homo sapien
tctgcattgggaaccaatccctcgc

SEQ ID NO: 1688766 - DNA, 25 bp, Homo sapien
gggaaccaatccctcgctgcttcag

SEQ ID NO: 1688767 - DNA, 25 bp, Homo sapien
cattgggaaccaatccctcgctgct

SEQ ID NO: 1688768 - DNA, 25 bp, Homo sapien
ctgtaatctgcattgggaaccaatc

SEQ ID NO: 1688769 - DNA, 25 bp, Homo sapien
acggccgcttctgcagatgcctgca

SEQ ID NO: 1688770 - DNA, 25 bp, Homo sapien
tggcttccataaggcactgcagctg

SEQ ID NO: 1688771 - DNA, 25 bp, Homo sapien
tgaaataagtgcttattcagcacaa

SEQ ID NO: 1688772 - DNA, 25 bp, Homo sapien
cattaattgtatcaaggacatactg

SEQ ID NO: 1688773 - DNA, 25 bp, Homo sapien
caccatgccctgccgaagggggata

SEQ ID NO: 1688774 - DNA, 25 bp, Homo sapien
ccaccatgccctgccgaagggggat

SEQ ID NO: 1688775 - DNA, 25 bp, Homo sapien
gatgcatgaggaaattacttatata

SEQ ID NO: 1688776 - DNA, 25 bp, Homo sapien
cactctaagcattccgaagcctgta

SEQ ID NO: 1688777 - DNA, 25 bp, Homo sapien
aaaagtaataccagctatgtagagc

SEQ ID NO: 1688778 - DNA, 25 bp, Homo sapien
gattatctcgcattcccactctaag

SEQ ID NO: 1688779 - DNA, 25 bp, Homo sapien
gggtttacttctggattcagtccca

SEQ ID NO: 1688780 - DNA, 25 bp, Homo sapien
gtatgcagaaatctagcaccatttg

SEQ ID NO: 1688781 - DNA, 25 bp, Homo sapien
gactgctttggttactcagggccct

SEQ ID NO: 1688782 - DNA, 25 bp, Homo sapien
tattcctatgcaagtaccatggtgg

SEQ ID NO: 1688783 - DNA, 25 bp, Homo sapien
tctgcttgttgagtcgtagttcttt

SEQ ID NO: 1688784 - DNA, 25 bp, Homo sapien
tgcttgttgagtcgtagttcttttt

SEQ ID NO: 1688785 - DNA, 25 bp, Homo sapien
gtctgcttgttgagtcgtagttctt

SEQ ID NO: 1688786 - DNA, 25 bp, Homo sapien
ctgcttgttgagtcgtagttctttt

SEQ ID NO: 1688787 - DNA, 25 bp, Homo sapien
tgctggattacaggataagtgcatg

SEQ ID NO: 1688788 - DNA, 25 bp, Homo sapien
gttgacttcaataagaaactgccag

SEQ ID NO: 1688789 - DNA, 25 bp, Homo sapien
ttggtggttacgactaaaatagcta

SEQ ID NO: 1688790 - DNA, 25 bp, Homo sapien
tcttctacagataaacacatgggct

SEQ ID NO: 1688791 - DNA, 25 bp, Homo sapien
aagatacacaacagattcacggcag

SEQ ID NO: 1688792 - DNA, 25 bp, Homo sapien
agatacacaacagattcacggcagc

SEQ ID NO: 1688793 - DNA, 25 bp, Homo sapien
gatgggttctgtcccaatgcactct

SEQ ID NO: 1688794 - DNA, 25 bp, Homo sapien
tacttatgggaaaagctctaggatc

SEQ ID NO: 1688795 - DNA, 25 bp, Homo sapien
tgctctcctggatgggttctgtccc

SEQ ID NO: 1688796 - DNA, 25 bp, Homo sapien
caactaagcatacggctgctctcct

SEQ ID NO: 1688797 - DNA, 25 bp, Homo sapien
aaagatgctgatctgggatatattc

SEQ ID NO: 1688798 - DNA, 25 bp, Homo sapien
tatattctttggacggtctgaccca

SEQ ID NO: 1688799 - DNA, 25 bp, Homo sapien
ggatatattctttggacggtctgac

SEQ ID NO: 1688800 - DNA, 25 bp, Homo sapien
tggattaattcgaaaagatgctgat

SEQ ID NO: 1688801 - DNA, 25 bp, Homo sapien
ttcaatcttatacccaccagagtaa

SEQ ID NO: 1688802 - DNA, 25 bp, Homo sapien
attttaaagtctgctagtaattcag

SEQ ID NO: 1688803 - DNA, 25 bp, Homo sapien
tcagtaaatatgatgtaacaacatc

SEQ ID NO: 1688804 - DNA, 25 bp, Homo sapien
taacatataaaccaattcacaataa

SEQ ID NO: 1688805 - DNA, 25 bp, Homo sapien
gaggcccacaaactgagggaagctt

SEQ ID NO: 1688806 - DNA, 25 bp, Homo sapien
tcaaccctacagttcacaaggagct

SEQ ID NO: 1688807 - DNA, 25 bp, Homo sapien
gctgaatcctaccaacaaccacata

SEQ ID NO: 1688808 - DNA, 25 bp, Homo sapien
cattgactaacttgtgagagaccct

SEQ ID NO: 1688809 - DNA, 25 bp, Homo sapien
cgtgagtttagaggtgagcaatacc

SEQ ID NO: 1688810 - DNA, 25 bp, Homo sapien
caaattttgtcaaagtgacaccaga

SEQ ID NO: 1688811 - DNA, 25 bp, Homo sapien
gagcaataccttagtgatacaactg

SEQ ID NO: 1688812 - DNA, 25 bp, Homo sapien
tattcaatcttatacccaccatagt

SEQ ID NO: 1688813 - DNA, 25 bp, Homo sapien
gaacactttgttttgactgaagaag

SEQ ID NO: 1688814 - DNA, 25 bp, Homo sapien
gctgtagaccccatcctgacttgag

SEQ ID NO: 1688815 - DNA, 25 bp, Homo sapien
tgtttccctgcagtaacccacatga

SEQ ID NO: 1688816 - DNA, 25 bp, Homo sapien
ggaaatgcccatgaacactaaatgc

SEQ ID NO: 1688817 - DNA, 25 bp, Homo sapien
cttctgcagcgaatttccatagatt

SEQ ID NO: 1688818 - DNA, 25 bp, Homo sapien
agattttttaccaacccttctgcag

SEQ ID NO: 1688819 - DNA, 25 bp, Homo sapien
tttttaccaacccttctgcagcgaa

SEQ ID NO: 1688820 - DNA, 25 bp, Homo sapien
ctgcagcgaatttccatagattctt

SEQ ID NO: 1688821 - DNA, 25 bp, Homo sapien
gaatccaggactcgacttcgtaagt

SEQ ID NO: 1688822 - DNA, 25 bp, Homo sapien
ggctggctttatagatatcatcctc

SEQ ID NO: 1688823 - DNA, 25 bp, Homo sapien
aaaagaatactggagaactggacac

SEQ ID NO: 1688824 - DNA, 25 bp, Homo sapien
gatggaactcaaaacaatatgctga

SEQ ID NO: 1688825 - DNA, 25 bp, Homo sapien
gctttaagtgccaaggtacacatct

SEQ ID NO: 1688826 - DNA, 25 bp, Homo sapien
aaggtacacatctgatttcaactac

SEQ ID NO: 1688827 - DNA, 25 bp, Homo sapien
tgccaaggtacacatctgatttcaa

SEQ ID NO: 1688828 - DNA, 25 bp, Homo sapien
gatttcaactacttagtatgaaaaa

SEQ ID NO: 1688829 - DNA, 25 bp, Homo sapien
tggtgccagtgggttattaagttca

SEQ ID NO: 1688830 - DNA, 25 bp, Homo sapien
tcaacactattattcaggcagtctg

SEQ ID NO: 1688831 - DNA, 25 bp, Homo sapien
aggcagtctgggtattcaattgcag

SEQ ID NO: 1688832 - DNA, 25 bp, Homo sapien
aaagcagcttatcccatggtgccag

SEQ ID NO: 1688833 - DNA, 25 bp, Homo sapien
tgctctaaaatatagggcggatttg

SEQ ID NO: 1688834 - DNA, 25 bp, Homo sapien
gatttgtcatgccaagcctcagcat

SEQ ID NO: 1688835 - DNA, 25 bp, Homo sapien
ggtgccaatatctctgccataagcc

SEQ ID NO: 1688836 - DNA, 25 bp, Homo sapien
tcacttcaaccagtttccacaggag

SEQ ID NO: 1688837 - DNA, 25 bp, Homo sapien
taggttgttgatattaaggaagcca

SEQ ID NO: 1688838 - DNA, 25 bp, Homo sapien
gtatagtcttaaaatcaaatcagcg

SEQ ID NO: 1688839 - DNA, 25 bp, Homo sapien
cccacactgtctaaagcactaaact

SEQ ID NO: 1688840 - DNA, 25 bp, Homo sapien
agtgttaagtaaaagttgacatgcc

SEQ ID NO: 1688841 - DNA, 25 bp, Homo sapien
ggtgtagacctttgattcttgcata

SEQ ID NO: 1688842 - DNA, 25 bp, Homo sapien
tctccctgggtgtggtatcacagcc

SEQ ID NO: 1688843 - DNA, 25 bp, Homo sapien
gcctggattacctcctgcacataaa

SEQ ID NO: 1688844 - DNA, 25 bp, Homo sapien
tatcacagcctggattacctcctgc

SEQ ID NO: 1688845 - DNA, 25 bp, Homo sapien
tactgcccgttttgacactgggaag

SEQ ID NO: 1688846 - DNA, 25 bp, Homo sapien
tagagtggtctaagcctagtgagag

SEQ ID NO: 1688847 - DNA, 25 bp, Homo sapien
tgttcagtacccttgagataagtca

SEQ ID NO: 1688848 - DNA, 25 bp, Homo sapien
gcatcagggtagttatttcaagagt

SEQ ID NO: 1688849 - DNA, 25 bp, Homo sapien
gcgcccagccgatattttctttttc

SEQ ID NO: 1688850 - DNA, 25 bp, Homo sapien
tctttttctgaacctctcccacctc

SEQ ID NO: 1688851 - DNA, 25 bp, Homo sapien
ctgcgcccagccgatattttctttt

SEQ ID NO: 1688852 - DNA, 25 bp, Homo sapien
cactgcgcccagccgatattttctt

SEQ ID NO: 1688853 - DNA, 25 bp, Homo sapien
tcataatgaattaaggtggacccta

SEQ ID NO: 1688854 - DNA, 25 bp, Homo sapien
tgggaagggaactacataggagcaa

SEQ ID NO: 1688855 - DNA, 25 bp, Homo sapien
caggctgaaatgaaaggactctcca

SEQ ID NO: 1688856 - DNA, 25 bp, Homo sapien
taagtctgtgctactgagcatacac

SEQ ID NO: 1688857 - DNA, 25 bp, Homo sapien
tttggcttaccctatcaatcatgag

SEQ ID NO: 1688858 - DNA, 25 bp, Homo sapien
tcattgttctaccaatgttactcta

SEQ ID NO: 1688859 - DNA, 25 bp, Homo sapien
gaatatgtgacccaaaagatacctt

SEQ ID NO: 1688860 - DNA, 25 bp, Homo sapien
ttatagctgataactcttgagcacc

SEQ ID NO: 1688861 - DNA, 25 bp, Homo sapien
tttggaaagtctcacatttccccat

SEQ ID NO: 1688862 - DNA, 25 bp, Homo sapien
acagtgactggcactgagagccacc

SEQ ID NO: 1688863 - DNA, 25 bp, Homo sapien
gactggcactgagagccacctttcc

SEQ ID NO: 1688864 - DNA, 25 bp, Homo sapien
gtgactggcactgagagccaccttt

SEQ ID NO: 1688865 - DNA, 25 bp, Homo sapien
atgttgcttatgatcctatgttgga

SEQ ID NO: 1688866 - DNA, 25 bp, Homo sapien
tgcttatgatcctatgttggatcac

SEQ ID NO: 1688867 - DNA, 25 bp, Homo sapien
gatgacccatgttgcttatgatcct

SEQ ID NO: 1688868 - DNA, 25 bp, Homo sapien
aaagatgacccatgttgcttatgat

SEQ ID NO: 1688869 - DNA, 25 bp, Homo sapien
tcaactcgataacagcctttcaagg

SEQ ID NO: 1688870 - DNA, 25 bp, Homo sapien
caaatattaaagtgagcctgagaat

SEQ ID NO: 1688871 - DNA, 25 bp, Homo sapien
taagatgcaactgatggtaaaccac

SEQ ID NO: 1688872 - DNA, 25 bp, Homo sapien
gggtactacaggagcatacaaccat

SEQ ID NO: 1688873 - DNA, 25 bp, Homo sapien
taaactgaatctgagtaattgcagc

SEQ ID NO: 1688874 - DNA, 25 bp, Homo sapien
ttaggcaatttggaacataaactga

SEQ ID NO: 1688875 - DNA, 25 bp, Homo sapien
taattgcagcattgatatctacaag

SEQ ID NO: 1688876 - DNA, 25 bp, Homo sapien
tctacaaggcaaggatatctatcac

SEQ ID NO: 1688877 - DNA, 25 bp, Homo sapien
cataacgtaagtctgagtcttcaaa

SEQ ID NO: 1688878 - DNA, 25 bp, Homo sapien
aagaccagaaacatatttcatccat

SEQ ID NO: 1688879 - DNA, 25 bp, Homo sapien
gaataagaccagaaacatatttcat

SEQ ID NO: 1688880 - DNA, 25 bp, Homo sapien
taagaccagaaacatatttcatcca

SEQ ID NO: 1688881 - DNA, 25 bp, Homo sapien
catataagatagaataagaccagaa

SEQ ID NO: 1688882 - DNA, 25 bp, Homo sapien
gattagctggtacatataagatctt

SEQ ID NO: 1688883 - DNA, 25 bp, Homo sapien
gtattacagatatcagcaaccatgc

SEQ ID NO: 1688884 - DNA, 25 bp, Homo sapien
tctaatggcatagccttgctagaga

SEQ ID NO: 1688885 - DNA, 25 bp, Homo sapien
ctctaacacaaacattctaatggca

SEQ ID NO: 1688886 - DNA, 25 bp, Homo sapien
tgagtatctattacgcaaaaggcac

SEQ ID NO: 1688887 - DNA, 25 bp, Homo sapien
taagaagaacgtatcttgccaagcg

SEQ ID NO: 1688888 - DNA, 25 bp, Homo sapien
caaaaggcacatgacccgacagtga

SEQ ID NO: 1688889 - DNA, 25 bp, Homo sapien
taagatgactaatgtggcccttctc

SEQ ID NO: 1688890 - DNA, 25 bp, Homo sapien
ttcatttccatgagtacgctgtcgg

SEQ ID NO: 1688891 - DNA, 25 bp, Homo sapien
gcagactggactggtatgtgcagaa

SEQ ID NO: 1688892 - DNA, 25 bp, Homo sapien
tacgctgtcggaggcagactggact

SEQ ID NO: 1688893 - DNA, 25 bp, Homo sapien
tggactggtatgtgcagaaaagcgt

SEQ ID NO: 1688894 - DNA, 25 bp, Homo sapien
catgtacagatggaaggtggatata

SEQ ID NO: 1688895 - DNA, 25 bp, Homo sapien
atgtacagatggaaggtggatataa

SEQ ID NO: 1688896 - DNA, 25 bp, Homo sapien
tgtacagatggaaggtggatataaa

SEQ ID NO: 1688897 - DNA, 25 bp, Homo sapien
tcatgtacagatggaaggtggatat

SEQ ID NO: 1688898 - DNA, 25 bp, Homo sapien
atgaggagcagggttttgaagaaca

SEQ ID NO: 1688899 - DNA, 25 bp, Homo sapien
ttttgaagaacataattaagggctg

SEQ ID NO: 1688900 - DNA, 25 bp, Homo sapien
tggtgatgatgaggagcagggtttt

SEQ ID NO: 1688901 - DNA, 25 bp, Homo sapien
cataattaagggctgaaagtatttt

SEQ ID NO: 1688902 - DNA, 25 bp, Homo sapien
gacgcatggcacttgaaactgaaac

SEQ ID NO: 1688903 - DNA, 25 bp, Homo sapien
tattggctgcctactacagttttgc

SEQ ID NO: 1688904 - DNA, 25 bp, Homo sapien
tcagaatccaacgaaaggacccaga

SEQ ID NO: 1688905 - DNA, 25 bp, Homo sapien
gatccctgggaaacatagttggttc

SEQ ID NO: 1688906 - DNA, 25 bp, Homo sapien
tgggccgccatttagaaaggattta

SEQ ID NO: 1688907 - DNA, 25 bp, Homo sapien
aacagatcaggaaatgccttgtcca

SEQ ID NO: 1688908 - DNA, 25 bp, Homo sapien
gagcgttaggcacaaatcagggcaa

SEQ ID NO: 1688909 - DNA, 25 bp, Homo sapien
aaatatttgagaagcctcacactgc

SEQ ID NO: 1688910 - DNA, 25 bp, Homo sapien
ttagacgctcttctttgcaaaggtt

SEQ ID NO: 1688911 - DNA, 25 bp, Homo sapien
tatgcctcaacatgtgccaacactg

SEQ ID NO: 1688912 - DNA, 25 bp, Homo sapien
gccaacactgctaggttatcttgta

SEQ ID NO: 1688913 - DNA, 25 bp, Homo sapien
ggttgcatgatttaataaattccca

SEQ ID NO: 1688914 - DNA, 25 bp, Homo sapien
gataacatcatagttaagactgcag

SEQ ID NO: 1688915 - DNA, 25 bp, Homo sapien
catagttaagactgcagttgtgtct

SEQ ID NO: 1688916 - DNA, 25 bp, Homo sapien
ctgataacatcatagttaagactgc

SEQ ID NO: 1688917 - DNA, 25 bp, Homo sapien
catcatagttaagactgcagttgtg

SEQ ID NO: 1688918 - DNA, 25 bp, Homo sapien
tttttgaacattcctcctcatatgc

SEQ ID NO: 1688919 - DNA, 25 bp, Homo sapien
cattcctcctcatatgcatgcattc

SEQ ID NO: 1688920 - DNA, 25 bp, Homo sapien
taaactttttgaacattcctcctca

SEQ ID NO: 1688921 - DNA, 25 bp, Homo sapien
tttgaacattcctcctcatatgcat

SEQ ID NO: 1688922 - DNA, 25 bp, Homo sapien
tactgttgagctgttaaaggtaatg

SEQ ID NO: 1688923 - DNA, 25 bp, Homo sapien
ggttctcactatcaataaagcttac

SEQ ID NO: 1688924 - DNA, 25 bp, Homo sapien
tctccatattccacaaggtgataat

SEQ ID NO: 1688925 - DNA, 25 bp, Homo sapien
atggtaatgatggctcgcccattct

SEQ ID NO: 1688926 - DNA, 25 bp, Homo sapien
aaaaaagggatttggagacgcatca

SEQ ID NO: 1688927 - DNA, 25 bp, Homo sapien
tcaaaagtgaacagcatctcaatgg

SEQ ID NO: 1688928 - DNA, 25 bp, Homo sapien
tcaaggctcacattacgaaaggtca

SEQ ID NO: 1688929 - DNA, 25 bp, Homo sapien
catcgtattatgagaatcggcacca

SEQ ID NO: 1688930 - DNA, 25 bp, Homo sapien
ggtagctgaccctatgccaagaaac

SEQ ID NO: 1688931 - DNA, 25 bp, Homo sapien
ttcttacatacccaggcagcagtgc

SEQ ID NO: 1688932 - DNA, 25 bp, Homo sapien
tatgacactgcctcttggatacaca

SEQ ID NO: 1688933 - DNA, 25 bp, Homo sapien
tctgcctcaaaaggagcagctccgt

SEQ ID NO: 1688934 - DNA, 25 bp, Homo sapien
tgaccttgtcagaagcagtgctatg

SEQ ID NO: 1688935 - DNA, 25 bp, Homo sapien
tatcagggacatgtaaggaacaggc

SEQ ID NO: 1688936 - DNA, 25 bp, Homo sapien
gaaaggttcgaattatgcatctgac

SEQ ID NO: 1688937 - DNA, 25 bp, Homo sapien
gatgctaattctgggtaaaagctat

SEQ ID NO: 1688938 - DNA, 25 bp, Homo sapien
tgcttactttggccttaagggtcat

SEQ ID NO: 1688939 - DNA, 25 bp, Homo sapien
atatctgtagcaatagttattccag

SEQ ID NO: 1688940 - DNA, 25 bp, Homo sapien
tgtagcaatagttattccaggaact

SEQ ID NO: 1688941 - DNA, 25 bp, Homo sapien
tatctgtagcaatagttattccagg

SEQ ID NO: 1688942 - DNA, 25 bp, Homo sapien
tctgtagcaatagttattccaggaa

SEQ ID NO: 1688943 - DNA, 25 bp, Homo sapien
gcttgggaatttgtactcttcaaca

SEQ ID NO: 1688944 - DNA, 25 bp, Homo sapien
aggcttgggaatttgtactcttcaa

SEQ ID NO: 1688945 - DNA, 25 bp, Homo sapien
ttgggaatttgtactcttcaacaag

SEQ ID NO: 1688946 - DNA, 25 bp, Homo sapien
tgggaatttgtactcttcaacaagt

SEQ ID NO: 1688947 - DNA, 25 bp, Homo sapien
tgtgtgtatcgcttcccagtgccat

SEQ ID NO: 1688948 - DNA, 25 bp, Homo sapien
gcccgtggaggacagctcaatattt

SEQ ID NO: 1688949 - DNA, 25 bp, Homo sapien
tagaagaactacactaggtggtacg

SEQ ID NO: 1688950 - DNA, 25 bp, Homo sapien
gaagtaaatacgcagagcctgatgc

SEQ ID NO: 1688951 - DNA, 25 bp, Homo sapien
atgcacactgtttacactgctggag

SEQ ID NO: 1688952 - DNA, 25 bp, Homo sapien
catgcacactgtttacactgctgga

SEQ ID NO: 1688953 - DNA, 25 bp, Homo sapien
ggaggagaggtactgcatcagccca

SEQ ID NO: 1688954 - DNA, 25 bp, Homo sapien
tgcatcagcccacacccatgcacac

SEQ ID NO: 1688955 - DNA, 25 bp, Homo sapien
ctctcggctgtggtatctccctggt

SEQ ID NO: 1688956 - DNA, 25 bp, Homo sapien
tgacactctcggctgtggtatctcc

SEQ ID NO: 1688957 - DNA, 25 bp, Homo sapien
tggtgacactctcggctgtggtatc

SEQ ID NO: 1688958 - DNA, 25 bp, Homo sapien
tactggtgacactctcggctgtggt

SEQ ID NO: 1688959 - DNA, 25 bp, Homo sapien
ctaaacaaaaagttgggccagtgct

SEQ ID NO: 1688960 - DNA, 25 bp, Homo sapien
caccaggtcattcatcttagattac

SEQ ID NO: 1688961 - DNA, 25 bp, Homo sapien
aaagaatgaagtctcagtctcaagc

SEQ ID NO: 1688962 - DNA, 25 bp, Homo sapien
cttagattacaagatcccagatgga

SEQ ID NO: 1688963 - DNA, 25 bp, Homo sapien
tactgtttataagagcaaggaccaa

SEQ ID NO: 1688964 - DNA, 25 bp, Homo sapien
tataaaattaatgctaggctatgtg

SEQ ID NO: 1688965 - DNA, 25 bp, Homo sapien
aaatgaatttcacgttcagacttag

SEQ ID NO: 1688966 - DNA, 25 bp, Homo sapien
atttcacgttcagacttagttcgca

SEQ ID NO: 1688967 - DNA, 25 bp, Homo sapien
tttgcgaccactccgggcaacatga

SEQ ID NO: 1688968 - DNA, 25 bp, Homo sapien
gagtatggggcacaaagcttgctca

SEQ ID NO: 1688969 - DNA, 25 bp, Homo sapien
aaagcttgctcacaatttcaggcag

SEQ ID NO: 1688970 - DNA, 25 bp, Homo sapien
ctcacaatttcaggcagtttatgca

SEQ ID NO: 1688971 - DNA, 25 bp, Homo sapien
cagtttatgcattgttgtcttaggc

SEQ ID NO: 1688972 - DNA, 25 bp, Homo sapien
ccaatgacatctggcatcccttgct

SEQ ID NO: 1688973 - DNA, 25 bp, Homo sapien
tgacatctggcatcccttgctcggt

SEQ ID NO: 1688974 - DNA, 25 bp, Homo sapien
ttccaatgacatctggcatcccttg

SEQ ID NO: 1688975 - DNA, 25 bp, Homo sapien
tctatttccaatgacatctggcatc

SEQ ID NO: 1688976 - DNA, 25 bp, Homo sapien
gcgcagtggctcacgcctgtaatcc

SEQ ID NO: 1688977 - DNA, 25 bp, Homo sapien
caggactttgggaggccgaggcggg

SEQ ID NO: 1688978 - DNA, 25 bp, Homo sapien
cggatcacgaggtcaggagatcgag

SEQ ID NO: 1688979 - DNA, 25 bp, Homo sapien
gattgaaagttctgagcctggccag

SEQ ID NO: 1688980 - DNA, 25 bp, Homo sapien
tgtttgctttggtcctgtcctttgt

SEQ ID NO: 1688981 - DNA, 25 bp, Homo sapien
cttgcttgctacttatgtttaagag

SEQ ID NO: 1688982 - DNA, 25 bp, Homo sapien
tatgtttaagagtaagaggcttaaa

SEQ ID NO: 1688983 - DNA, 25 bp, Homo sapien
gaatttggtaatccttgcttgctac

SEQ ID NO: 1688984 - DNA, 25 bp, Homo sapien
tttacctccatattgccaagtaaca

SEQ ID NO: 1688985 - DNA, 25 bp, Homo sapien
gatggacaagtgcagtgacttatgc

SEQ ID NO: 1688986 - DNA, 25 bp, Homo sapien
agaaccaaccagctccacatagctt

SEQ ID NO: 1688987 - DNA, 25 bp, Homo sapien
ctagatactatctcctgacttccct

SEQ ID NO: 1688988 - DNA, 25 bp, Homo sapien
tattgcgtatactgtatgctttctg

SEQ ID NO: 1688989 - DNA, 25 bp, Homo sapien
ggtcctaaccatccacttattgcgt

SEQ ID NO: 1688990 - DNA, 25 bp, Homo sapien
agagacatactgaagaagcaagagg

SEQ ID NO: 1688991 - DNA, 25 bp, Homo sapien
ggctaaagtcctactattcttcatt

SEQ ID NO: 1688992 - DNA, 25 bp, Homo sapien
caagggatactacacagagatagcc

SEQ ID NO: 1688993 - DNA, 25 bp, Homo sapien
ggagtctttatttgataaccagaaa

SEQ ID NO: 1688994 - DNA, 25 bp, Homo sapien
tatgtcacttcagaaatcagttgat

SEQ ID NO: 1688995 - DNA, 25 bp, Homo sapien
gcaacactgtcaagccttcggcagg

SEQ ID NO: 1688996 - DNA, 25 bp, Homo sapien
cagtcttacgacataggtcaaatcc

SEQ ID NO: 1688997 - DNA, 25 bp, Homo sapien
ttagcctttactagcagttaggcca

SEQ ID NO: 1688998 - DNA, 25 bp, Homo sapien
gcagttaggccagaaacagtcttac

SEQ ID NO: 1688999 - DNA, 25 bp, Homo sapien
ccagaaacagtcttacgacataggt

SEQ ID NO: 1689000 - DNA, 25 bp, Homo sapien
aagtaattacatgctgcgtcctgca

SEQ ID NO: 1689001 - DNA, 25 bp, Homo sapien
gtcctgcattttttgcgggctgccg

SEQ ID NO: 1689002 - DNA, 25 bp, Homo sapien
tggtaaaacttctagattcccgaga

SEQ ID NO: 1689003 - DNA, 25 bp, Homo sapien
ttaatcccaaagtacaggccacaga

SEQ ID NO: 1689004 - DNA, 25 bp, Homo sapien
tgtgatcatatggactgtaagaatg

SEQ ID NO: 1689005 - DNA, 25 bp, Homo sapien
gtaagaatgaaacacccgagaaaga

SEQ ID NO: 1689006 - DNA, 25 bp, Homo sapien
cttgtgatcatatggactgtaagaa

SEQ ID NO: 1689007 - DNA, 25 bp, Homo sapien
tgaaacacccgagaaagatcttttg

SEQ ID NO: 1689008 - DNA, 25 bp, Homo sapien
aaatgccatcagctgaacaggatgg

SEQ ID NO: 1689009 - DNA, 25 bp, Homo sapien
aggatggcatcctatctcttctctc

SEQ ID NO: 1689010 - DNA, 25 bp, Homo sapien
tacccagggcaactggtgacagaac

SEQ ID NO: 1689011 - DNA, 25 bp, Homo sapien
tacatcttaactgggtgcaaagact

SEQ ID NO: 1689012 - DNA, 25 bp, Homo sapien
gtgacagaacaggaggtgaccagcc

SEQ ID NO: 1689013 - DNA, 25 bp, Homo sapien
gcaaagactgataaccagggacata

SEQ ID NO: 1689014 - DNA, 25 bp, Homo sapien
ccacatattgcatggcacattctaa

SEQ ID NO: 1689015 - DNA, 25 bp, Homo sapien
gatggtgtgctagccaagtttgtcc

SEQ ID NO: 1689016 - DNA, 25 bp, Homo sapien
caggacttatataccaagtagatgg

SEQ ID NO: 1689017 - DNA, 25 bp, Homo sapien
tgctaactctggcatgtaacaggac

SEQ ID NO: 1689018 - DNA, 25 bp, Homo sapien
accctgaatctgtgttggaggttgg

SEQ ID NO: 1689019 - DNA, 25 bp, Homo sapien
ctgtgttggaggttggtaatcatct

SEQ ID NO: 1689020 - DNA, 25 bp, Homo sapien
ggttggtaatcatctgagagtggcc

SEQ ID NO: 1689021 - DNA, 25 bp, Homo sapien
caaccctgaatctgtgttggaggtt

SEQ ID NO: 1689022 - DNA, 25 bp, Homo sapien
gcttagagtctatggaacgcagtat

SEQ ID NO: 1689023 - DNA, 25 bp, Homo sapien
taatccctatgacaaacttctaagg

SEQ ID NO: 1689024 - DNA, 25 bp, Homo sapien
gaaaacttaagtatcttgccgacat

SEQ ID NO: 1689025 - DNA, 25 bp, Homo sapien
gccgacatcatctagcttgcaagtg

SEQ ID NO: 1689026 - DNA, 25 bp, Homo sapien
cactagctggcaggtccttttagtc

SEQ ID NO: 1689027 - DNA, 25 bp, Homo sapien
tagctggcaggtccttttagtcctg

SEQ ID NO: 1689028 - DNA, 25 bp, Homo sapien
aggtccttttagtcctggcattggc

SEQ ID NO: 1689029 - DNA, 25 bp, Homo sapien
caggtccttttagtcctggcattgg

SEQ ID NO: 1689030 - DNA, 25 bp, Homo sapien
tatgtagttccaaaatagggctgac

SEQ ID NO: 1689031 - DNA, 25 bp, Homo sapien
tcttccagaagagtaatacagcaaa

SEQ ID NO: 1689032 - DNA, 25 bp, Homo sapien
gggctgacttcctaacttatataaa

SEQ ID NO: 1689033 - DNA, 25 bp, Homo sapien
gcaaggagaaattaccaggaaatac

SEQ ID NO: 1689034 - DNA, 25 bp, Homo sapien
ctggtaataggcagaaaacgccaag

SEQ ID NO: 1689035 - DNA, 25 bp, Homo sapien
aatgaaaagaccactgcgtgctatc

SEQ ID NO: 1689036 - DNA, 25 bp, Homo sapien
tctgttcacagaccctaactggtaa

SEQ ID NO: 1689037 - DNA, 25 bp, Homo sapien
caatgaggttctcacaaatggagat

SEQ ID NO: 1689038 - DNA, 25 bp, Homo sapien
cttgctctttaagtctttcctggga

SEQ ID NO: 1689039 - DNA, 25 bp, Homo sapien
tgctctttaagtctttcctgggaca

SEQ ID NO: 1689040 - DNA, 25 bp, Homo sapien
gctctttaagtctttcctgggacat

SEQ ID NO: 1689041 - DNA, 25 bp, Homo sapien
tttcttgctctttaagtctttcctg

SEQ ID NO: 1689042 - DNA, 25 bp, Homo sapien
tggaatcagccataaaccagccatg

SEQ ID NO: 1689043 - DNA, 25 bp, Homo sapien
gaaagcacgtgttggagctcagaca

SEQ ID NO: 1689044 - DNA, 25 bp, Homo sapien
tagaagggtacaatctccaagccag

SEQ ID NO: 1689045 - DNA, 25 bp, Homo sapien
gcagtccagacccattaaggagagg

SEQ ID NO: 1689046 - DNA, 25 bp, Homo sapien
tggaccgtaggttctaggtattcac

SEQ ID NO: 1689047 - DNA, 25 bp, Homo sapien
catggacacgtgcaggcttccaaaa

SEQ ID NO: 1689048 - DNA, 25 bp, Homo sapien
gaagaagcctttggtcgtggcgtcc

SEQ ID NO: 1689049 - DNA, 25 bp, Homo sapien
cataaacattattgctgatggacca

SEQ ID NO: 1689050 - DNA, 25 bp, Homo sapien
tatgtattaaaaactcgaaatggtc

SEQ ID NO: 1689051 - DNA, 25 bp, Homo sapien
ccttgcctggacttggtgatgcttg

SEQ ID NO: 1689052 - DNA, 25 bp, Homo sapien
tccttgcctggacttggtgatgctt

SEQ ID NO: 1689053 - DNA, 25 bp, Homo sapien
ttgcctggacttggtgatgcttgca

SEQ ID NO: 1689054 - DNA, 25 bp, Homo sapien
tgccttcccatcccgctccgaaaca

SEQ ID NO: 1689055 - DNA, 25 bp, Homo sapien
ctgccttcccatcccgctccgaaac

SEQ ID NO: 1689056 - DNA, 25 bp, Homo sapien
tgtgacatttcatgagcagtttgac

SEQ ID NO: 1689057 - DNA, 25 bp, Homo sapien
tgtgtgctctcatagtaatgtgaca

SEQ ID NO: 1689058 - DNA, 25 bp, Homo sapien
catttgagtagtgatctagtgactg

SEQ ID NO: 1689059 - DNA, 25 bp, Homo sapien
tttgactgttttcattactctgatt

SEQ ID NO: 1689060 - DNA, 25 bp, Homo sapien
gatccatgtctcactatcttcctta

SEQ ID NO: 1689061 - DNA, 25 bp, Homo sapien
tgcacaccagtcttgctcctaggga

SEQ ID NO: 1689062 - DNA, 25 bp, Homo sapien
gctgcttgaattctagtaatcccac

SEQ ID NO: 1689063 - DNA, 25 bp, Homo sapien
tcttagaaggattccatgccaaagc

SEQ ID NO: 1689064 - DNA, 25 bp, Homo sapien
ggaagtttattcctttgaagagaca

SEQ ID NO: 1689065 - DNA, 25 bp, Homo sapien
tttgccacaaggctttggccaggaa

SEQ ID NO: 1689066 - DNA, 25 bp, Homo sapien
caaggctttggccaggaaggaagtt

SEQ ID NO: 1689067 - DNA, 25 bp, Homo sapien
gaagtttattcctttgaagagacac

SEQ ID NO: 1689068 - DNA, 25 bp, Homo sapien
gaagtggatgtgaagaggtcatctt

SEQ ID NO: 1689069 - DNA, 25 bp, Homo sapien
tggatgtgaagaggtcatctttgtt

SEQ ID NO: 1689070 - DNA, 25 bp, Homo sapien
gtggatgtgaagaggtcatctttgt

SEQ ID NO: 1689071 - DNA, 25 bp, Homo sapien
atccagcaccatattttaggagagt

SEQ ID NO: 1689072 - DNA, 25 bp, Homo sapien
agagttgggccgtaaagaagaagct

SEQ ID NO: 1689073 - DNA, 25 bp, Homo sapien
tccagcaccatattttaggagagtt

SEQ ID NO: 1689074 - DNA, 25 bp, Homo sapien
ttgggccgtaaagaagaagctgatg

SEQ ID NO: 1689075 - DNA, 25 bp, Homo sapien
aattcacaaaggacgtagatatatg

SEQ ID NO: 1689076 - DNA, 25 bp, Homo sapien
ttaaaacacatatcagcccgggcgc

SEQ ID NO: 1689077 - DNA, 25 bp, Homo sapien
tggacctgtgtaagatagacatttg

SEQ ID NO: 1689078 - DNA, 25 bp, Homo sapien
attctgagatgctgagttacaaaaa

SEQ ID NO: 1689079 - DNA, 25 bp, Homo sapien
caaaaggtttctcttaaactcatat

SEQ ID NO: 1689080 - DNA, 25 bp, Homo sapien
aaggtttctcttaaactcatatatg

SEQ ID NO: 1689081 - DNA, 25 bp, Homo sapien
taaactcatatatggctttaaacat

SEQ ID NO: 1689082 - DNA, 25 bp, Homo sapien
gctttaaacataaactgtatgtaaa

SEQ ID NO: 1689083 - DNA, 25 bp, Homo sapien
ctgctcatagaattgattgtgtgca

SEQ ID NO: 1689084 - DNA, 25 bp, Homo sapien
catagaattgattgtgtgcaacata

SEQ ID NO: 1689085 - DNA, 25 bp, Homo sapien
tgtgtgcaacataaaacttggaatc

SEQ ID NO: 1689086 - DNA, 25 bp, Homo sapien
atcaaaagattcttctgttactaac

SEQ ID NO: 1689087 - DNA, 25 bp, Homo sapien
tgatccatagcaaacattttcacct

SEQ ID NO: 1689088 - DNA, 25 bp, Homo sapien
ttctcaagctctaattccagccatg

SEQ ID NO: 1689089 - DNA, 25 bp, Homo sapien
tcatccgacttgtccaccttggcct

SEQ ID NO: 1689090 - DNA, 25 bp, Homo sapien
tgcccagtctgagatgattccctgg

SEQ ID NO: 1689091 - DNA, 25 bp, Homo sapien
ctgggctttgaaaagctcccctgtt

SEQ ID NO: 1689092 - DNA, 25 bp, Homo sapien
gtctgggctttgaaaagctcccctg

SEQ ID NO: 1689093 - DNA, 25 bp, Homo sapien
ctttgaaaagctcccctgtttcctg

SEQ ID NO: 1689094 - DNA, 25 bp, Homo sapien
gtttagtctgggctttgaaaagctc

SEQ ID NO: 1689095 - DNA, 25 bp, Homo sapien
tattttagcactgcagcgacttgcc

SEQ ID NO: 1689096 - DNA, 25 bp, Homo sapien
tctagaccaaactaaccctgggaga

SEQ ID NO: 1689097 - DNA, 25 bp, Homo sapien
aataattggaaaaagcccgactgct

SEQ ID NO: 1689098 - DNA, 25 bp, Homo sapien
gaagcagctaacgaggcatgccact

SEQ ID NO: 1689099 - DNA, 25 bp, Homo sapien
cacaggaaactgtcaggtggtctct

SEQ ID NO: 1689100 - DNA, 25 bp, Homo sapien
tgaagggtactttggcttgttcaca

SEQ ID NO: 1689101 - DNA, 25 bp, Homo sapien
taacagctgccgttcatttcccttg

SEQ ID NO: 1689102 - DNA, 25 bp, Homo sapien
gaaccttccaataacactgtacact

SEQ ID NO: 1689103 - DNA, 25 bp, Homo sapien
aatactttccaagtgagctgtcaga

SEQ ID NO: 1689104 - DNA, 25 bp, Homo sapien
caggcctgcgtgtttgtgtccgtgc

SEQ ID NO: 1689105 - DNA, 25 bp, Homo sapien
tcctcattgtccctcaatgtcattt

SEQ ID NO: 1689106 - DNA, 25 bp, Homo sapien
ttcctcattgtccctcaatgtcatt

SEQ ID NO: 1689107 - DNA, 25 bp, Homo sapien
tttcctcattgtccctcaatgtcat

SEQ ID NO: 1689108 - DNA, 25 bp, Homo sapien
gtttcctcattgtccctcaatgtca

SEQ ID NO: 1689109 - DNA, 25 bp, Homo sapien
gggcgtgtacactttggcatcagat

SEQ ID NO: 1689110 - DNA, 25 bp, Homo sapien
cctttgctagcggtttgctgatgga

SEQ ID NO: 1689111 - DNA, 25 bp, Homo sapien
catcttccccatgaacgcagggttc

SEQ ID NO: 1689112 - DNA, 25 bp, Homo sapien
gtttgcctgattcatagatgtccac

SEQ ID NO: 1689113 - DNA, 25 bp, Homo sapien
ggattaaagcctcatgcatacataa

SEQ ID NO: 1689114 - DNA, 25 bp, Homo sapien
gctgttttactagcagggtagagag

SEQ ID NO: 1689115 - DNA, 25 bp, Homo sapien
gaaacatggcctggaatcactgtgc

SEQ ID NO: 1689116 - DNA, 25 bp, Homo sapien
gaagcaaagctatcggcatcagcaa

SEQ ID NO: 1689117 - DNA, 25 bp, Homo sapien
tagaggctctaacagaccagcaacc

SEQ ID NO: 1689118 - DNA, 25 bp, Homo sapien
gctacaacactatttctagaggctc

SEQ ID NO: 1689119 - DNA, 25 bp, Homo sapien
catcttatccgggacttttgggcca

SEQ ID NO: 1689120 - DNA, 25 bp, Homo sapien
cagagaatttaaacggaactgccct

SEQ ID NO: 1689121 - DNA, 25 bp, Homo sapien
aaacttctcgaagaccaagcccata

SEQ ID NO: 1689122 - DNA, 25 bp, Homo sapien
agccaagaccaaaaacttctcgaag

SEQ ID NO: 1689123 - DNA, 25 bp, Homo sapien
tttccatctctaagatttcattccg

SEQ ID NO: 1689124 - DNA, 25 bp, Homo sapien
gaagaccaagcccatattcattatt

SEQ ID NO: 1689125 - DNA, 25 bp, Homo sapien
aagtccatatccatgaaactctctg

SEQ ID NO: 1689126 - DNA, 25 bp, Homo sapien
catatccatgaaactctctgtagta

SEQ ID NO: 1689127 - DNA, 25 bp, Homo sapien
tgaaaaccctctccacattgacagt

SEQ ID NO: 1689128 - DNA, 25 bp, Homo sapien
cttcaaagtccatatccatgaaact

SEQ ID NO: 1689129 - DNA, 25 bp, Homo sapien
cctgtaagagagttgccacctgtct

SEQ ID NO: 1689130 - DNA, 25 bp, Homo sapien
aaataaaagatatccctgtaagaga

SEQ ID NO: 1689131 - DNA, 25 bp, Homo sapien
tgtcttcccatcttgcggtgcagct

SEQ ID NO: 1689132 - DNA, 25 bp, Homo sapien
gtcttcccatcttgcggtgcagctt

SEQ ID NO: 1689133 - DNA, 25 bp, Homo sapien
tttgtaattgtgacctgtagatggc

SEQ ID NO: 1689134 - DNA, 25 bp, Homo sapien
gcagttctgagccacgttgcgaatt

SEQ ID NO: 1689135 - DNA, 25 bp, Homo sapien
tagatggcacatcgctgagtatgct

SEQ ID NO: 1689136 - DNA, 25 bp, Homo sapien
gagccacgttgcgaatttgtaattg

SEQ ID NO: 1689137 - DNA, 25 bp, Homo sapien
ttctgctgagctaacagacttgctg

SEQ ID NO: 1689138 - DNA, 25 bp, Homo sapien
ggccgagcctctgctaaggcctttt

SEQ ID NO: 1689139 - DNA, 25 bp, Homo sapien
ccttctgctgagctaacagacttgc

SEQ ID NO: 1689140 - DNA, 25 bp, Homo sapien
ggacagcaaacctccacggccgagc

SEQ ID NO: 1689141 - DNA, 25 bp, Homo sapien
ccgtgtgggcctgctcgtcttgtca

SEQ ID NO: 1689142 - DNA, 25 bp, Homo sapien
tggctcctgcatcaccctaagcgtg

SEQ ID NO: 1689143 - DNA, 25 bp, Homo sapien
ccctaagcgtgctccttctgagcag

SEQ ID NO: 1689144 - DNA, 25 bp, Homo sapien
tcatggcgcgtgtcaacagtggtga

SEQ ID NO: 1689145 - DNA, 25 bp, Homo sapien
tgaggaagaagctacgtccattgtg

SEQ ID NO: 1689146 - DNA, 25 bp, Homo sapien
acctcctcactaacccatgaggaag

SEQ ID NO: 1689147 - DNA, 25 bp, Homo sapien
cattgtgaagtcagcacctcttact

SEQ ID NO: 1689148 - DNA, 25 bp, Homo sapien
tgacagcgtcctgccttgcacctcc

SEQ ID NO: 1689149 - DNA, 25 bp, Homo sapien
agcagaagcatgcatatgcagccac

SEQ ID NO: 1689150 - DNA, 25 bp, Homo sapien
tatgcagccacaagatttgccactc

SEQ ID NO: 1689151 - DNA, 25 bp, Homo sapien
gcatatgcagccacaagatttgcca

SEQ ID NO: 1689152 - DNA, 25 bp, Homo sapien
agagaagcagaagcatgcatatgca

SEQ ID NO: 1689153 - DNA, 25 bp, Homo sapien
acatatttgaacataactgattcat

SEQ ID NO: 1689154 - DNA, 25 bp, Homo sapien
ttctggaactcgctgagtcacactg

SEQ ID NO: 1689155 - DNA, 25 bp, Homo sapien
ggcatgggcagcaccattctggaac

SEQ ID NO: 1689156 - DNA, 25 bp, Homo sapien
gcatgggcagcaccattctggaact

SEQ ID NO: 1689157 - DNA, 25 bp, Homo sapien
ctggaactcgctgagtcacactgag

SEQ ID NO: 1689158 - DNA, 25 bp, Homo sapien
aagcccacggacatcctcagcgcac

SEQ ID NO: 1689159 - DNA, 25 bp, Homo sapien
gagccaagcccacggacatcctcag

SEQ ID NO: 1689160 - DNA, 25 bp, Homo sapien
caagcccacggacatcctcagcgca

SEQ ID NO: 1689161 - DNA, 25 bp, Homo sapien
ttatagaccttgacaaaaaaagcaa

SEQ ID NO: 1689162 - DNA, 25 bp, Homo sapien
tatagaccttgacaaaaaaagcaaa

SEQ ID NO: 1689163 - DNA, 25 bp, Homo sapien
attatagaccttgacaaaaaaagca

SEQ ID NO: 1689164 - DNA, 25 bp, Homo sapien
gatagaaaattcttccacatgagga

SEQ ID NO: 1689165 - DNA, 25 bp, Homo sapien
caaattattgcccttggagaatgga

SEQ ID NO: 1689166 - DNA, 25 bp, Homo sapien
gaaggaggcagcatgaccagtacaa

SEQ ID NO: 1689167 - DNA, 25 bp, Homo sapien
ttaggtcaaataaccaatgggccca

SEQ ID NO: 1689168 - DNA, 25 bp, Homo sapien
agactctccccgtgcattccaaaag

SEQ ID NO: 1689169 - DNA, 25 bp, Homo sapien
cattcaggttcccagaacaggtttc

SEQ ID NO: 1689170 - DNA, 25 bp, Homo sapien
gaatgttgccaggagtcctttagct

SEQ ID NO: 1689171 - DNA, 25 bp, Homo sapien
gcacaattagttttcgacaaatcca

SEQ ID NO: 1689172 - DNA, 25 bp, Homo sapien
aaaacatttaatctgggctgggtgg

SEQ ID NO: 1689173 - DNA, 25 bp, Homo sapien
cctgtagcccctggctattagggag

SEQ ID NO: 1689174 - DNA, 25 bp, Homo sapien
gaagtcacttcacttagtaaagacc

SEQ ID NO: 1689175 - DNA, 25 bp, Homo sapien
gaaagaagtcacttcacttagtaaa

SEQ ID NO: 1689176 - DNA, 25 bp, Homo sapien
cagggggggaatttggatgactggg

SEQ ID NO: 1689177 - DNA, 25 bp, Homo sapien
cagcagggggggaatttggatgact

SEQ ID NO: 1689178 - DNA, 25 bp, Homo sapien
agcagggggggaatttggatgactg

SEQ ID NO: 1689179 - DNA, 25 bp, Homo sapien
gcagggggggaatttggatgactgg

SEQ ID NO: 1689180 - DNA, 25 bp, Homo sapien
tcctgtacagctgaaacgatccttg

SEQ ID NO: 1689181 - DNA, 25 bp, Homo sapien
caattggtcgccagtatggagactg

SEQ ID NO: 1689182 - DNA, 25 bp, Homo sapien
ccctttctgggtcaaacggcagagt

SEQ ID NO: 1689183 - DNA, 25 bp, Homo sapien
tgatttcatgaaggtccagcgtctg

SEQ ID NO: 1689184 - DNA, 25 bp, Homo sapien
aatcctgggtaatggccacagtcaa

SEQ ID NO: 1689185 - DNA, 25 bp, Homo sapien
gggaatcctgggtaatggccacagt

SEQ ID NO: 1689186 - DNA, 25 bp, Homo sapien
ggccacagtcaagctcaatgtcaga

SEQ ID NO: 1689187 - DNA, 25 bp, Homo sapien
tcaagctcaatgtcagagctgccag

SEQ ID NO: 1689188 - DNA, 25 bp, Homo sapien
actgacccatcagttgggagcagaa

SEQ ID NO: 1689189 - DNA, 25 bp, Homo sapien
tttcgggtcctcggttggtacatga

SEQ ID NO: 1689190 - DNA, 25 bp, Homo sapien
tatcattagggggacaaacaactga

SEQ ID NO: 1689191 - DNA, 25 bp, Homo sapien
tgcatagttgtaagtaaaatatcat

SEQ ID NO: 1689192 - DNA, 25 bp, Homo sapien
tctcctaggcagagctttgagccac

SEQ ID NO: 1689193 - DNA, 25 bp, Homo sapien
ttctcaggtggctccaacgtgcagc

SEQ ID NO: 1689194 - DNA, 25 bp, Homo sapien
cgtgcagccaaatttgagaaccggt

SEQ ID NO: 1689195 - DNA, 25 bp, Homo sapien
cattgttttctgtggcacccaggta

SEQ ID NO: 1689196 - DNA, 25 bp, Homo sapien
tattcccagaaagaagcgatctcgc

SEQ ID NO: 1689197 - DNA, 25 bp, Homo sapien
gaggagacagcttttccaccatcgc

SEQ ID NO: 1689198 - DNA, 25 bp, Homo sapien
caactcagacaaatgccaacgtggc

SEQ ID NO: 1689199 - DNA, 25 bp, Homo sapien
caacgtggcagacatgcttgacgct

SEQ ID NO: 1689200 - DNA, 25 bp, Homo sapien
aattgacagcatagttcacagagcc

SEQ ID NO: 1689201 - DNA, 25 bp, Homo sapien
attgacagcatagttcacagagcca

SEQ ID NO: 1689202 - DNA, 25 bp, Homo sapien
ttgacagcatagttcacagagccag

SEQ ID NO: 1689203 - DNA, 25 bp, Homo sapien
tgccaatgcgctcttccattgcata

SEQ ID NO: 1689204 - DNA, 25 bp, Homo sapien
gccaatgcgctcttccattgcatag

SEQ ID NO: 1689205 - DNA, 25 bp, Homo sapien
gaagtgtaaagccaagagttgagtg

SEQ ID NO: 1689206 - DNA, 25 bp, Homo sapien
agccaagagttgagtgacagagccc

SEQ ID NO: 1689207 - DNA, 25 bp, Homo sapien
ctggaagtgtaaagccaagagttga

SEQ ID NO: 1689208 - DNA, 25 bp, Homo sapien
tgtaaagccaagagttgagtgacag

SEQ ID NO: 1689209 - DNA, 25 bp, Homo sapien
ccgctctccaaggagcagtaaactg

SEQ ID NO: 1689210 - DNA, 25 bp, Homo sapien
cgctctccaaggagcagtaaactgc

SEQ ID NO: 1689211 - DNA, 25 bp, Homo sapien
ttttttcttatagcaaaggactcac

SEQ ID NO: 1689212 - DNA, 25 bp, Homo sapien
cttttttcttatagcaaaggactca

SEQ ID NO: 1689213 - DNA, 25 bp, Homo sapien
tcttttttcttatagcaaaggactc

SEQ ID NO: 1689214 - DNA, 25 bp, Homo sapien
ctgagcacggaaagcagggcgggaa

SEQ ID NO: 1689215 - DNA, 25 bp, Homo sapien
agcacggaaagcagggcgggaagga

SEQ ID NO: 1689216 - DNA, 25 bp, Homo sapien
aaagcagggcgggaaggagcattag

SEQ ID NO: 1689217 - DNA, 25 bp, Homo sapien
agggcgggaaggagcattagcctcc

SEQ ID NO: 1689218 - DNA, 25 bp, Homo sapien
ggaacataactcacatctttcccga

SEQ ID NO: 1689219 - DNA, 25 bp, Homo sapien
tccgtaggcccaactgtgctgcaga

SEQ ID NO: 1689220 - DNA, 25 bp, Homo sapien
agtcacactgtcacgatgaggaatc

SEQ ID NO: 1689221 - DNA, 25 bp, Homo sapien
taactcacatctttcccgactgaag

SEQ ID NO: 1689222 - DNA, 25 bp, Homo sapien
gcttttggtccaaagcccaagctgg

SEQ ID NO: 1689223 - DNA, 25 bp, Homo sapien
ggtgaaaggaccctgctctttgtga

SEQ ID NO: 1689224 - DNA, 25 bp, Homo sapien
aagatcgctttcgaaatttgtcggg

SEQ ID NO: 1689225 - DNA, 25 bp, Homo sapien
cccagatgcaccctctgcacattca

SEQ ID NO: 1689226 - DNA, 25 bp, Homo sapien
tgaatgactgcaatttagtagaggt

SEQ ID NO: 1689227 - DNA, 25 bp, Homo sapien
tagaggtcccaaaccaactgggcca

SEQ ID NO: 1689228 - DNA, 25 bp, Homo sapien
acaacttcacaactgatacttggaa

SEQ ID NO: 1689229 - DNA, 25 bp, Homo sapien
ttcacaactgatacttggaaaatga

SEQ ID NO: 1689230 - DNA, 25 bp, Homo sapien
agtattggatcacaaggcctttgga

SEQ ID NO: 1689231 - DNA, 25 bp, Homo sapien
taacatggtctatgctacttttggc

SEQ ID NO: 1689232 - DNA, 25 bp, Homo sapien
ggccccagaggctatagcattagtc

SEQ ID NO: 1689233 - DNA, 25 bp, Homo sapien
aaaccgcagctgaagtaggcgtgca

SEQ ID NO: 1689234 - DNA, 25 bp, Homo sapien
agaatcaggactggcacacttgaca

SEQ ID NO: 1689235 - DNA, 25 bp, Homo sapien
gaatcaggactggcacacttgacat

SEQ ID NO: 1689236 - DNA, 25 bp, Homo sapien
aagaatcaggactggcacacttgac

SEQ ID NO: 1689237 - DNA, 25 bp, Homo sapien
gaagcactcctttttatgatgcaag

SEQ ID NO: 1689238 - DNA, 25 bp, Homo sapien
gctgatctgattggtcacagtccaa

SEQ ID NO: 1689239 - DNA, 25 bp, Homo sapien
catcgagccaatcaaagaaatgagt

SEQ ID NO: 1689240 - DNA, 25 bp, Homo sapien
ggcttggtttagcattcatagtttc

SEQ ID NO: 1689241 - DNA, 25 bp, Homo sapien
ccagaacataattgcctttgctttt

SEQ ID NO: 1689242 - DNA, 25 bp, Homo sapien
tccagaacataattgcctttgcttt

SEQ ID NO: 1689243 - DNA, 25 bp, Homo sapien
agaacataattgcctttgctttttt

SEQ ID NO: 1689244 - DNA, 25 bp, Homo sapien
ttccagaacataattgcctttgctt

SEQ ID NO: 1689245 - DNA, 25 bp, Homo sapien
cagagtgatatcagaatgagatagg

SEQ ID NO: 1689246 - DNA, 25 bp, Homo sapien
gaatgagatagggaccgtcacaccc

SEQ ID NO: 1689247 - DNA, 25 bp, Homo sapien
cacagatttcgatcacatcttgacc

SEQ ID NO: 1689248 - DNA, 25 bp, Homo sapien
cacatcttgacccaacagagtgata

SEQ ID NO: 1689249 - DNA, 25 bp, Homo sapien
gagttttcaaacgtgtgggatgcca

SEQ ID NO: 1689250 - DNA, 25 bp, Homo sapien
ccaaatttagtctgtgggccatagt

SEQ ID NO: 1689251 - DNA, 25 bp, Homo sapien
tgaggctccctaataacttatctgg

SEQ ID NO: 1689252 - DNA, 25 bp, Homo sapien
caaccatggtatgcaggtagggcca

SEQ ID NO: 1689253 - DNA, 25 bp, Homo sapien
cagggaggatcacatggcacatggc

SEQ ID NO: 1689254 - DNA, 25 bp, Homo sapien
cacccgtatgtaccacattgaaaat

SEQ ID NO: 1689255 - DNA, 25 bp, Homo sapien
ttatccccacccgtatgtaccacat

SEQ ID NO: 1689256 - DNA, 25 bp, Homo sapien
ttgcagggaggatcacatggcacat

SEQ ID NO: 1689257 - DNA, 25 bp, Homo sapien
gcacccaaaagtactagagtcttgc

SEQ ID NO: 1689258 - DNA, 25 bp, Homo sapien
aagtcagtcgccaagagaaaacagg

SEQ ID NO: 1689259 - DNA, 25 bp, Homo sapien
ccaagttcaaagtcccgagcagatc

SEQ ID NO: 1689260 - DNA, 25 bp, Homo sapien
tagtgtgtggagaagtcagtcgcca

SEQ ID NO: 1689261 - DNA, 25 bp, Homo sapien
tggtatcgtaaaccaggcacctggc

SEQ ID NO: 1689262 - DNA, 25 bp, Homo sapien
gggatgatcatcctctcattacgga

SEQ ID NO: 1689263 - DNA, 25 bp, Homo sapien
gcccatagatggtgcacagcaaacc

SEQ ID NO: 1689264 - DNA, 25 bp, Homo sapien
acagcaaacctctttgcggactggg

SEQ ID NO: 1689265 - DNA, 25 bp, Homo sapien
gagcttgtccacaccttccagagga

SEQ ID NO: 1689266 - DNA, 25 bp, Homo sapien
actagtgtggcttgggaaggtctcc

SEQ ID NO: 1689267 - DNA, 25 bp, Homo sapien
tccagctgtgaggtctctcctgagg

SEQ ID NO: 1689268 - DNA, 25 bp, Homo sapien
tataaggccggtatcgcctagtctt

SEQ ID NO: 1689269 - DNA, 25 bp, Homo sapien
aatctactgatgaaaggaggctcac

SEQ ID NO: 1689270 - DNA, 25 bp, Homo sapien
tcacctacaatttggaagtggcaag

SEQ ID NO: 1689271 - DNA, 25 bp, Homo sapien
ccagctgtgggtgtgaaacagagga

SEQ ID NO: 1689272 - DNA, 25 bp, Homo sapien
gactatcttggccacgatccttgaa

SEQ ID NO: 1689273 - DNA, 25 bp, Homo sapien
ttagggaggatctatcagatctgtc

SEQ ID NO: 1689274 - DNA, 25 bp, Homo sapien
gggaggatctatcagatctgtcctg

SEQ ID NO: 1689275 - DNA, 25 bp, Homo sapien
ggaggatctatcagatctgtcctgc

SEQ ID NO: 1689276 - DNA, 25 bp, Homo sapien
tagggaggatctatcagatctgtcc

SEQ ID NO: 1689277 - DNA, 25 bp, Homo sapien
gaggtccctacatccgtcacattta

SEQ ID NO: 1689278 - DNA, 25 bp, Homo sapien
tttacagactagtagagggacagcc

SEQ ID NO: 1689279 - DNA, 25 bp, Homo sapien
caggagaggcgttcacgctgaagcc

SEQ ID NO: 1689280 - DNA, 25 bp, Homo sapien
tgaccagggctatgaaggacgtgct

SEQ ID NO: 1689281 - DNA, 25 bp, Homo sapien
tctcagtcctggtccggtgttatca

SEQ ID NO: 1689282 - DNA, 25 bp, Homo sapien
agtcctggtccggtgttatcaccac

SEQ ID NO: 1689283 - DNA, 25 bp, Homo sapien
ccactctcagtcctggtccggtgtt

SEQ ID NO: 1689284 - DNA, 25 bp, Homo sapien
tccggtgttatcaccaccgtctgct

SEQ ID NO: 1689285 - DNA, 25 bp, Homo sapien
ttcttcacacccttacagcctaaag

SEQ ID NO: 1689286 - DNA, 25 bp, Homo sapien
aagcaataccagccgtggccgcaca

SEQ ID NO: 1689287 - DNA, 25 bp, Homo sapien
cttacagcctaaagcaataccagcc

SEQ ID NO: 1689288 - DNA, 25 bp, Homo sapien
ctgcgcctccgggtagggatgcccc

SEQ ID NO: 1689289 - DNA, 25 bp, Homo sapien
gatgcaccgtgatctaaggcacttg

SEQ ID NO: 1689290 - DNA, 25 bp, Homo sapien
tcaggattgttctctcagggaagga

SEQ ID NO: 1689291 - DNA, 25 bp, Homo sapien
tgtttttcgagcttcagccgggtgg

SEQ ID NO: 1689292 - DNA, 25 bp, Homo sapien
tatttcccagaaaagacgcaggtat

SEQ ID NO: 1689293 - DNA, 25 bp, Homo sapien
tcatccagacatacagtatccttat

SEQ ID NO: 1689294 - DNA, 25 bp, Homo sapien
tcctctgggctttttcagtatgccg

SEQ ID NO: 1689295 - DNA, 25 bp, Homo sapien
tattcgtatacatcagaggaagtgg

SEQ ID NO: 1689296 - DNA, 25 bp, Homo sapien
gccgtatcgctacttcatccagaca

SEQ ID NO: 1689297 - DNA, 25 bp, Homo sapien
taggattttaggtcaactttcgtca

SEQ ID NO: 1689298 - DNA, 25 bp, Homo sapien
aggattttaggtcaactttcgtcat

SEQ ID NO: 1689299 - DNA, 25 bp, Homo sapien
gtcctcggtggtaccccagaggctg

SEQ ID NO: 1689300 - DNA, 25 bp, Homo sapien
accagtcctcggtggtaccccagag

SEQ ID NO: 1689301 - DNA, 25 bp, Homo sapien
actcctctttatgctcctttccgta

SEQ ID NO: 1689302 - DNA, 25 bp, Homo sapien
tctttatgctcctttccgtaaggca

SEQ ID NO: 1689303 - DNA, 25 bp, Homo sapien
cctctttatgctcctttccgtaagg

SEQ ID NO: 1689304 - DNA, 25 bp, Homo sapien
tcctctttatgctcctttccgtaag

SEQ ID NO: 1689305 - DNA, 25 bp, Homo sapien
tctgctcatcaagcttcctcgagag

SEQ ID NO: 1689306 - DNA, 25 bp, Homo sapien
ttggcatctgctcatcaagcttcct

SEQ ID NO: 1689307 - DNA, 25 bp, Homo sapien
tcaagcttcctcgagagcaggagca

SEQ ID NO: 1689308 - DNA, 25 bp, Homo sapien
ttcctcgagagcaggagcagccttt

SEQ ID NO: 1689309 - DNA, 25 bp, Homo sapien
agacaccaggcacgtgaaggccacg

SEQ ID NO: 1689310 - DNA, 25 bp, Homo sapien
caccaggcacgtgaaggccacgctg

SEQ ID NO: 1689311 - DNA, 25 bp, Homo sapien
acaccaggcacgtgaaggccacgct

SEQ ID NO: 1689312 - DNA, 25 bp, Homo sapien
cagacaccaggcacgtgaaggccac

SEQ ID NO: 1689313 - DNA, 25 bp, Homo sapien
gcaggtactgctcggagacttgtaa

SEQ ID NO: 1689314 - DNA, 25 bp, Homo sapien
gacttgtaaccaaaccgcctctgat

SEQ ID NO: 1689315 - DNA, 25 bp, Homo sapien
cgcctctgatggagcacggctggtc

SEQ ID NO: 1689316 - DNA, 25 bp, Homo sapien
gcagagatgcatcctgaatgtacac

SEQ ID NO: 1689317 - DNA, 25 bp, Homo sapien
tgaatgataacaccccgcaagtcag

SEQ ID NO: 1689318 - DNA, 25 bp, Homo sapien
gaaactggtctgattctgcagagga

SEQ ID NO: 1689319 - DNA, 25 bp, Homo sapien
cagtttcccagtcgcaatgcagcaa

SEQ ID NO: 1689320 - DNA, 25 bp, Homo sapien
tgcattatcgcaactgccagctcca

SEQ ID NO: 1689321 - DNA, 25 bp, Homo sapien
attttggatacagcgacccttaata

SEQ ID NO: 1689322 - DNA, 25 bp, Homo sapien
ctgtaagggtaagaggcttgattgt

SEQ ID NO: 1689323 - DNA, 25 bp, Homo sapien
tacagcgacccttaatacagtacat

SEQ ID NO: 1689324 - DNA, 25 bp, Homo sapien
aagggtaagaggcttgattgtacat

SEQ ID NO: 1689325 - DNA, 25 bp, Homo sapien
ggcagagaatctgtgggacccattc

SEQ ID NO: 1689326 - DNA, 25 bp, Homo sapien
cattccatgggcaagccaaggccaa

SEQ ID NO: 1689327 - DNA, 25 bp, Homo sapien
tctcattaacagaggagcgcttagc

SEQ ID NO: 1689328 - DNA, 25 bp, Homo sapien
tgacagggccgatatgacattccaa

SEQ ID NO: 1689329 - DNA, 25 bp, Homo sapien
ggaagttagagggcttctgcaccac

SEQ ID NO: 1689330 - DNA, 25 bp, Homo sapien
gtggaagttagagggcttctgcacc

SEQ ID NO: 1689331 - DNA, 25 bp, Homo sapien
gctgggccgggatgggtggaagtta

SEQ ID NO: 1689332 - DNA, 25 bp, Homo sapien
tgggccgggatgggtggaagttaga

SEQ ID NO: 1689333 - DNA, 25 bp, Homo sapien
ctgaaaatgaacaagcccaaagtgg

SEQ ID NO: 1689334 - DNA, 25 bp, Homo sapien
tatacagaattcatatttgggctca

SEQ ID NO: 1689335 - DNA, 25 bp, Homo sapien
tttgtcacacctgatgccatttttg

SEQ ID NO: 1689336 - DNA, 25 bp, Homo sapien
ttcatatttgggctcaaacacattt

SEQ ID NO: 1689337 - DNA, 25 bp, Homo sapien
cacacctgatgccatttttggaagt

SEQ ID NO: 1689338 - DNA, 25 bp, Homo sapien
ctgcaactttgtgcccaaaacagga

SEQ ID NO: 1689339 - DNA, 25 bp, Homo sapien
ggtgttacactatgtgaagactgca

SEQ ID NO: 1689340 - DNA, 25 bp, Homo sapien
gagtgagagtgaagcattcattttt

SEQ ID NO: 1689341 - DNA, 25 bp, Homo sapien
gaaggtctgcataggtgcgtagcca

SEQ ID NO: 1689342 - DNA, 25 bp, Homo sapien
ccatgatggtcaatgtcaactttca

SEQ ID NO: 1689343 - DNA, 25 bp, Homo sapien
gactgtgaacagtcccctgttggca

SEQ ID NO: 1689344 - DNA, 25 bp, Homo sapien
actttcatcaatgtataggtttctg

SEQ ID NO: 1689345 - DNA, 25 bp, Homo sapien
caatgtataggtttctgactgtgaa

SEQ ID NO: 1689346 - DNA, 25 bp, Homo sapien
caccccagtggccccagcaggcggt

SEQ ID NO: 1689347 - DNA, 25 bp, Homo sapien
aaaaccaccccagtggccccagcag

SEQ ID NO: 1689348 - DNA, 25 bp, Homo sapien
tggcaggggttgagggggcggcaaa

SEQ ID NO: 1689349 - DNA, 25 bp, Homo sapien
gcaaaaccaccccagtggccccagc

SEQ ID NO: 1689350 - DNA, 25 bp, Homo sapien
cctgggcgcagttacgaggaagcca

SEQ ID NO: 1689351 - DNA, 25 bp, Homo sapien
tcgatccctcgctcgtgcaggaaag

SEQ ID NO: 1689352 - DNA, 25 bp, Homo sapien
tctgcggaaggtctcggctcgcttt

SEQ ID NO: 1689353 - DNA, 25 bp, Homo sapien
catatggcaggtagttaacagggag

SEQ ID NO: 1689354 - DNA, 25 bp, Homo sapien
gccccattgagagcgcagctgcagc

SEQ ID NO: 1689355 - DNA, 25 bp, Homo sapien
gctgaggccccattgagagcgcagc

SEQ ID NO: 1689356 - DNA, 25 bp, Homo sapien
tgaggccccattgagagcgcagctg

SEQ ID NO: 1689357 - DNA, 25 bp, Homo sapien
aggctgaggccccattgagagcgca

SEQ ID NO: 1689358 - DNA, 25 bp, Homo sapien
acacgaccttcgtacaccggctggg

SEQ ID NO: 1689359 - DNA, 25 bp, Homo sapien
gcatcctttgctctggacgactaaa

SEQ ID NO: 1689360 - DNA, 25 bp, Homo sapien
gcgctgtgcgtgtgggacccactct

SEQ ID NO: 1689361 - DNA, 25 bp, Homo sapien
ttgcttggttggtacggcgcgcgct

SEQ ID NO: 1689362 - DNA, 25 bp, Homo sapien
aacaagcagaagacgaatgtttgca

SEQ ID NO: 1689363 - DNA, 25 bp, Homo sapien
ttgcaagcatgaatacaggcttctg

SEQ ID NO: 1689364 - DNA, 25 bp, Homo sapien
tgcagggccacttggattgcaagca

SEQ ID NO: 1689365 - DNA, 25 bp, Homo sapien
gaagacgaatgtttgcagggccact

SEQ ID NO: 1689366 - DNA, 25 bp, Homo sapien
tctctgtgggcggaatcggcactaa

SEQ ID NO: 1689367 - DNA, 25 bp, Homo sapien
gattccagttcacgagcgctctcgg

SEQ ID NO: 1689368 - DNA, 25 bp, Homo sapien
tccgcgtgcaatgagaagctccaaa

SEQ ID NO: 1689369 - DNA, 25 bp, Homo sapien
tctcggtagctcaggaaagcgacat

SEQ ID NO: 1689370 - DNA, 25 bp, Homo sapien
cgctcacaccctcgcggcggccgcc

SEQ ID NO: 1689371 - DNA, 25 bp, Homo sapien
cgcgctcacaccctcgcggcggccg

SEQ ID NO: 1689372 - DNA, 25 bp, Homo sapien
gcgcgctcacaccctcgcggcggcc

SEQ ID NO: 1689373 - DNA, 25 bp, Homo sapien
ctcacaccctcgcggcggccgccgc

SEQ ID NO: 1689374 - DNA, 25 bp, Homo sapien
ttcatgggtcgcttgatgtgcccac

SEQ ID NO: 1689375 - DNA, 25 bp, Homo sapien
gcagcgcttccgtgttctcggcatt

SEQ ID NO: 1689376 - DNA, 25 bp, Homo sapien
gtcttgcaccagctcgggtcgtcgg

SEQ ID NO: 1689377 - DNA, 25 bp, Homo sapien
gctccgcctctcgaatgaaagggat

SEQ ID NO: 1689378 - DNA, 25 bp, Homo sapien
ccgaggagctggagttggcgttgcc

SEQ ID NO: 1689379 - DNA, 25 bp, Homo sapien
ggagctggagttggcgttgccggac

SEQ ID NO: 1689380 - DNA, 25 bp, Homo sapien
tggagttggcgttgccggacttcac

SEQ ID NO: 1689381 - DNA, 25 bp, Homo sapien
cggccgaggagctggagttggcgtt

SEQ ID NO: 1689382 - DNA, 25 bp, Homo sapien
ccgccactcgcaccgccgcctcctc

SEQ ID NO: 1689383 - DNA, 25 bp, Homo sapien
gcgccggtttggagttggcgccgcc

SEQ ID NO: 1689384 - DNA, 25 bp, Homo sapien
ttttctgcgccggtttggagttggc

SEQ ID NO: 1689385 - DNA, 25 bp, Homo sapien
ctctttttctgcgccggtttggagt

SEQ ID NO: 1689386 - DNA, 25 bp, Homo sapien
ttggcgtgcggtttgctaaccccac

SEQ ID NO: 1689387 - DNA, 25 bp, Homo sapien
atgagcttggcgtgcggtttgctaa

SEQ ID NO: 1689388 - DNA, 25 bp, Homo sapien
ccgcctgccaggatgagcttggcgt

SEQ ID NO: 1689389 - DNA, 25 bp, Homo sapien
tgtacagcgagtggtggtcggcggc

SEQ ID NO: 1689390 - DNA, 25 bp, Homo sapien
cgcgagcgctgcggaggccgaggct

SEQ ID NO: 1689391 - DNA, 25 bp, Homo sapien
cgaggctgccgaggaggcggaggcc

SEQ ID NO: 1689392 - DNA, 25 bp, Homo sapien
aggccgaggcgctgggagtccgcgc

SEQ ID NO: 1689393 - DNA, 25 bp, Homo sapien
ttgcccggggccgcgagcgctgcgg

SEQ ID NO: 1689394 - DNA, 25 bp, Homo sapien
ccgaacaggtagacgcgcttcacct

SEQ ID NO: 1689395 - DNA, 25 bp, Homo sapien
gggcgacgacgacgtgcccaggccg

SEQ ID NO: 1689396 - DNA, 25 bp, Homo sapien
caggccgccgaacaggtagacgcgc

SEQ ID NO: 1689397 - DNA, 25 bp, Homo sapien
ccgcccacgggcgacgacgacgtgc

SEQ ID NO: 1689398 - DNA, 25 bp, Homo sapien
tgctgcggccgctcaggctgggcgc

SEQ ID NO: 1689399 - DNA, 25 bp, Homo sapien
ctgctgcggccgctcaggctgggcg

SEQ ID NO: 1689400 - DNA, 25 bp, Homo sapien
ctcaggctgggcgcgtcgggcgagc

SEQ ID NO: 1689401 - DNA, 25 bp, Homo sapien
gcgtcgggcgagcagcccgcgccct

SEQ ID NO: 1689402 - DNA, 25 bp, Homo sapien
tagccgcggtggtcggcgggcgagc

SEQ ID NO: 1689403 - DNA, 25 bp, Homo sapien
ggccgaggaggacgcgtgcgagggc

SEQ ID NO: 1689404 - DNA, 25 bp, Homo sapien
cgcaggctggcgtagccgcggtggt

SEQ ID NO: 1689405 - DNA, 25 bp, Homo sapien
ggacgcgtgcgagggcgcgctggac

SEQ ID NO: 1689406 - DNA, 25 bp, Homo sapien
ggttcaggtcgagcaggtcgtcttc

SEQ ID NO: 1689407 - DNA, 25 bp, Homo sapien
ggggttcaggtcgagcaggtcgtct

SEQ ID NO: 1689408 - DNA, 25 bp, Homo sapien
tcaggtcgagcaggtcgtcttcgaa

SEQ ID NO: 1689409 - DNA, 25 bp, Homo sapien
gttcaggtcgagcaggtcgtcttcg

SEQ ID NO: 1689410 - DNA, 25 bp, Homo sapien
gcccagggacatgctctcaaagttt

SEQ ID NO: 1689411 - DNA, 25 bp, Homo sapien
ctgcccagggacatgctctcaaagt

SEQ ID NO: 1689412 - DNA, 25 bp, Homo sapien
cagggacatgctctcaaagtttgag

SEQ ID NO: 1689413 - DNA, 25 bp, Homo sapien
cccagggacatgctctcaaagtttg

SEQ ID NO: 1689414 - DNA, 25 bp, Homo sapien
agccgggctcgaagttaaaatccag

SEQ ID NO: 1689415 - DNA, 25 bp, Homo sapien
aatccaggtcccggtcgagcgccga

SEQ ID NO: 1689416 - DNA, 25 bp, Homo sapien
gagccgggctcgaagttaaaatcca

SEQ ID NO: 1689417 - DNA, 25 bp, Homo sapien
gtcgagcgccgacgacgaactgaag

SEQ ID NO: 1689418 - DNA, 25 bp, Homo sapien
tgctggactcgagccagtctcccga

SEQ ID NO: 1689419 - DNA, 25 bp, Homo sapien
agtctcccgagatcatctcgctcac

SEQ ID NO: 1689420 - DNA, 25 bp, Homo sapien
gatgctggactcgagccagtctccc

SEQ ID NO: 1689421 - DNA, 25 bp, Homo sapien
gagatgctggactcgagccagtctc

SEQ ID NO: 1689422 - DNA, 25 bp, Homo sapien
ctctttaaactcttcgtctgtcctt

SEQ ID NO: 1689423 - DNA, 25 bp, Homo sapien
atccgacgacgagaacgcgggcgaa

SEQ ID NO: 1689424 - DNA, 25 bp, Homo sapien
ccttgatccgacgacgagaacgcgg

SEQ ID NO: 1689425 - DNA, 25 bp, Homo sapien
atgggagcgcgggtccaaaacgccg

SEQ ID NO: 1689426 - DNA, 25 bp, Homo sapien
gcgctccttgatccgacgacgagaa

SEQ ID NO: 1689427 - DNA, 25 bp, Homo sapien
agcaaaggggagcaaactcgaagtc

SEQ ID NO: 1689428 - DNA, 25 bp, Homo sapien
acaagtccggaagctcgttggaagg

SEQ ID NO: 1689429 - DNA, 25 bp, Homo sapien
caaaggggagcaaactcgaagtcgc

SEQ ID NO: 1689430 - DNA, 25 bp, Homo sapien
gtgcagacaagtccggaagctcgtt

SEQ ID NO: 1689431 - DNA, 25 bp, Homo sapien
ccttcaagtctctagaaaactaact

SEQ ID NO: 1689432 - DNA, 25 bp, Homo sapien
ctgtcttcatcacgcgtttaaaaaa

SEQ ID NO: 1689433 - DNA, 25 bp, Homo sapien
actccttcaagtctctagaaaacta

SEQ ID NO: 1689434 - DNA, 25 bp, Homo sapien
cttctgtcttcatcacgcgtttaaa

SEQ ID NO: 1689435 - DNA, 25 bp, Homo sapien
tgtaggaatcaaacatagcgccatc

SEQ ID NO: 1689436 - DNA, 25 bp, Homo sapien
tgtgtgagatattaaccagccgccc

SEQ ID NO: 1689437 - DNA, 25 bp, Homo sapien
caaacgggaattcgcctgcgtggag

SEQ ID NO: 1689438 - DNA, 25 bp, Homo sapien
tattctacacggcatattgcacagg

SEQ ID NO: 1689439 - DNA, 25 bp, Homo sapien
cgcaggtttaggatgccttgtacca

SEQ ID NO: 1689440 - DNA, 25 bp, Homo sapien
cacatttgtgatggaacacagggcc

SEQ ID NO: 1689441 - DNA, 25 bp, Homo sapien
tgataccttggatctgaaaaaagct

SEQ ID NO: 1689442 - DNA, 25 bp, Homo sapien
cccttacgaatgaaaacagactcag

SEQ ID NO: 1689443 - DNA, 25 bp, Homo sapien
tctccctgaggtattcggccctgag

SEQ ID NO: 1689444 - DNA, 25 bp, Homo sapien
ctccctgaggtattcggccctgagt

SEQ ID NO: 1689445 - DNA, 25 bp, Homo sapien
aggcgcaatggttgagggtcgtgtt

SEQ ID NO: 1689446 - DNA, 25 bp, Homo sapien
caggcggtgtctctgaagcagcggc

SEQ ID NO: 1689447 - DNA, 25 bp, Homo sapien
cgaacttggccgacaccgccagaag

SEQ ID NO: 1689448 - DNA, 25 bp, Homo sapien
cggtgtctctgaagcagcggcttcc

SEQ ID NO: 1689449 - DNA, 25 bp, Homo sapien
gcggcttcccctcgaacttggccga

SEQ ID NO: 1689450 - DNA, 25 bp, Homo sapien
gcatggatacgcaggagcgcttctg

SEQ ID NO: 1689451 - DNA, 25 bp, Homo sapien
aaaggcatggatacgcaggagcgct

SEQ ID NO: 1689452 - DNA, 25 bp, Homo sapien
tcaaaggcatggatacgcaggagcg

SEQ ID NO: 1689453 - DNA, 25 bp, Homo sapien
ggcatggatacgcaggagcgcttct

SEQ ID NO: 1689454 - DNA, 25 bp, Homo sapien
tgtgcttatttggactggaggagcc

SEQ ID NO: 1689455 - DNA, 25 bp, Homo sapien
tgggttcccctcgaggatgtttcag

SEQ ID NO: 1689456 - DNA, 25 bp, Homo sapien
gaatactgactatggtaggatcctt

SEQ ID NO: 1689457 - DNA, 25 bp, Homo sapien
ggcatcacctggcttccctttagaa

SEQ ID NO: 1689458 - DNA, 25 bp, Homo sapien
atccttgctgtgtcgaatggtagaa

SEQ ID NO: 1689459 - DNA, 25 bp, Homo sapien
tgtgtcgaatggtagaaagcagata

SEQ ID NO: 1689460 - DNA, 25 bp, Homo sapien
gcagatagtcaacaatcctctccag

SEQ ID NO: 1689461 - DNA, 25 bp, Homo sapien
gtagaaagcagatagtcaacaatcc

SEQ ID NO: 1689462 - DNA, 25 bp, Homo sapien
gctaacacctactggccattgatgg

SEQ ID NO: 1689463 - DNA, 25 bp, Homo sapien
ggttttcccaagagcgcataggtgg

SEQ ID NO: 1689464 - DNA, 25 bp, Homo sapien
cagtcaccgttagaggcctgtggct

SEQ ID NO: 1689465 - DNA, 25 bp, Homo sapien
taaaagtgggcatccaaatgctggt

SEQ ID NO: 1689466 - DNA, 25 bp, Homo sapien
ttgattctgcattatatttgtgctc

SEQ ID NO: 1689467 - DNA, 25 bp, Homo sapien
gagataaagaagcggccgccggcca

SEQ ID NO: 1689468 - DNA, 25 bp, Homo sapien
cgcaggaagagcacgggtgtgagcc

SEQ ID NO: 1689469 - DNA, 25 bp, Homo sapien
tcggatcccagcgagcagccgcgag

SEQ ID NO: 1689470 - DNA, 25 bp, Homo sapien
ctctggccgcaaagtgaggccgaga

SEQ ID NO: 1689471 - DNA, 25 bp, Homo sapien
aggagaaaccgggacaatcgcatcc

SEQ ID NO: 1689472 - DNA, 25 bp, Homo sapien
gccgctctcggaaactttacaacca

SEQ ID NO: 1689473 - DNA, 25 bp, Homo sapien
agagatgccctcttccgcgtcccct

SEQ ID NO: 1689474 - DNA, 25 bp, Homo sapien
caacttcccctagagttcgtgcgcg

SEQ ID NO: 1689475 - DNA, 25 bp, Homo sapien
aagagagttcatcagagttccccct

SEQ ID NO: 1689476 - DNA, 25 bp, Homo sapien
aagtcggggcggcaaagttgcgaga

SEQ ID NO: 1689477 - DNA, 25 bp, Homo sapien
aaagttgcgagagggagataccccg

SEQ ID NO: 1689478 - DNA, 25 bp, Homo sapien
tgacagcagagaaagtcggggcggc

SEQ ID NO: 1689479 - DNA, 25 bp, Homo sapien
tcttccccacttcgtcgcactttta

SEQ ID NO: 1689480 - DNA, 25 bp, Homo sapien
tgcagtccacgaggcgttcggacac

SEQ ID NO: 1689481 - DNA, 25 bp, Homo sapien
tcgtcgcacttttaagggacatttc

SEQ ID NO: 1689482 - DNA, 25 bp, Homo sapien
agtccacgaggcgttcggacacttt

SEQ ID NO: 1689483 - DNA, 25 bp, Homo sapien
tggagaattcccagcgatcaaattg

SEQ ID NO: 1689484 - DNA, 25 bp, Homo sapien
ttaagcaactccagatgaatccagg

SEQ ID NO: 1689485 - DNA, 25 bp, Homo sapien
ggaagtactccagcaaattcatgat

SEQ ID NO: 1689486 - DNA, 25 bp, Homo sapien
gaacaacgcagaatgaaggaggtca

SEQ ID NO: 1689487 - DNA, 25 bp, Homo sapien
tgcctttgctgggttcgtatccaat

SEQ ID NO: 1689488 - DNA, 25 bp, Homo sapien
tttgctgggttcgtatccaatagcc

SEQ ID NO: 1689489 - DNA, 25 bp, Homo sapien
tgctgggttcgtatccaatagccat

SEQ ID NO: 1689490 - DNA, 25 bp, Homo sapien
tgaatgcctttgctgggttcgtatc

SEQ ID NO: 1689491 - DNA, 25 bp, Homo sapien
agtagacagagcagaataagagcta

SEQ ID NO: 1689492 - DNA, 25 bp, Homo sapien
gagcagaataagagctagagctatg

SEQ ID NO: 1689493 - DNA, 25 bp, Homo sapien
gagctagagctatgaataaagagca

SEQ ID NO: 1689494 - DNA, 25 bp, Homo sapien
cagaataagagctagagctatgaat

SEQ ID NO: 1689495 - DNA, 25 bp, Homo sapien
actgaggctggccaagatccactga

SEQ ID NO: 1689496 - DNA, 25 bp, Homo sapien
cactgaggctggccaagatccactg

SEQ ID NO: 1689497 - DNA, 25 bp, Homo sapien
ccactgaggctggccaagatccact

SEQ ID NO: 1689498 - DNA, 25 bp, Homo sapien
ctgaggctggccaagatccactgaa

SEQ ID NO: 1689499 - DNA, 25 bp, Homo sapien
cgtttgaggatgatccaagtgcatt

SEQ ID NO: 1689500 - DNA, 25 bp, Homo sapien
gaagaccatttttccacgaacagtg

SEQ ID NO: 1689501 - DNA, 25 bp, Homo sapien
tagataattgagagggtctactccc

SEQ ID NO: 1689502 - DNA, 25 bp, Homo sapien
cactgccgatctgacagaagatgga

SEQ ID NO: 1689503 - DNA, 25 bp, Homo sapien
agtcaagtcagttcaagcactcggg

SEQ ID NO: 1689504 - DNA, 25 bp, Homo sapien
cgcccggcctagatgaagttttctt

SEQ ID NO: 1689505 - DNA, 25 bp, Homo sapien
tgtgattggatatcccaggtcaccc

SEQ ID NO: 1689506 - DNA, 25 bp, Homo sapien
tagggctgctaggacaaattatcac

SEQ ID NO: 1689507 - DNA, 25 bp, Homo sapien
gcttcctcagatacacaacaatctg

SEQ ID NO: 1689508 - DNA, 25 bp, Homo sapien
cataaaagacccatacttggatggg

SEQ ID NO: 1689509 - DNA, 25 bp, Homo sapien
caagagtgttttgcaaaggctgtct

SEQ ID NO: 1689510 - DNA, 25 bp, Homo sapien
tctcaatgcagttgctgtcgaagac

SEQ ID NO: 1689511 - DNA, 25 bp, Homo sapien
ttgccacatgtctgtaatggaaaaa

SEQ ID NO: 1689512 - DNA, 25 bp, Homo sapien
tctgaaggactcatcccgtacccat

SEQ ID NO: 1689513 - DNA, 25 bp, Homo sapien
atcccgtacccatgagatgtaacaa

SEQ ID NO: 1689514 - DNA, 25 bp, Homo sapien
gtgtgtatcactttagccccttccc

SEQ ID NO: 1689515 - DNA, 25 bp, Homo sapien
aatttatccggtccataagagttat

SEQ ID NO: 1689516 - DNA, 25 bp, Homo sapien
ctactaaatttatccggtccataag

SEQ ID NO: 1689517 - DNA, 25 bp, Homo sapien
tagtggttgcaaaaatgcctagaac

SEQ ID NO: 1689518 - DNA, 25 bp, Homo sapien
agttatatagtagtggttgcaaaaa

SEQ ID NO: 1689519 - DNA, 25 bp, Homo sapien
tacaatgtacatcaagctgccctgc

SEQ ID NO: 1689520 - DNA, 25 bp, Homo sapien
gacaagatgacgtctggagcaagat

SEQ ID NO: 1689521 - DNA, 25 bp, Homo sapien
gagatccaagtgtaacaggagacaa

SEQ ID NO: 1689522 - DNA, 25 bp, Homo sapien
caacatcaagccaggatagatgcct

SEQ ID NO: 1689523 - DNA, 25 bp, Homo sapien
attctcctgcctcaggctgcggagc

SEQ ID NO: 1689524 - DNA, 25 bp, Homo sapien
ctcctgcctcaggctgcggagcagc

SEQ ID NO: 1689525 - DNA, 25 bp, Homo sapien
tcctgcctcaggctgcggagcagct

SEQ ID NO: 1689526 - DNA, 25 bp, Homo sapien
gcagtgatgtgatctcggctcactg

SEQ ID NO: 1689527 - DNA, 25 bp, Homo sapien
tatacccatacaattgcttcctgcc

SEQ ID NO: 1689528 - DNA, 25 bp, Homo sapien
cagtttaggtggcagaactcagaca

SEQ ID NO: 1689529 - DNA, 25 bp, Homo sapien
cccatccagtaggtaagatggtgaa

SEQ ID NO: 1689530 - DNA, 25 bp, Homo sapien
tcacttgggtgaatcaatgtttccc

SEQ ID NO: 1689531 - DNA, 25 bp, Homo sapien
cacctcagaagcacatcccaatttt

SEQ ID NO: 1689532 - DNA, 25 bp, Homo sapien
tttcacaactctcgcagtcagactg

SEQ ID NO: 1689533 - DNA, 25 bp, Homo sapien
catgggtttccagatagcaaaagag

SEQ ID NO: 1689534 - DNA, 25 bp, Homo sapien
aaagcaattttgagtggaagtcaga

SEQ ID NO: 1689535 - DNA, 25 bp, Homo sapien
gagtgagactccaagacttcgagat

SEQ ID NO: 1689536 - DNA, 25 bp, Homo sapien
agtgagactccaagacttcgagatt

SEQ ID NO: 1689537 - DNA, 25 bp, Homo sapien
agactccaagacttcgagattctgt

SEQ ID NO: 1689538 - DNA, 25 bp, Homo sapien
tgagactccaagacttcgagattct

SEQ ID NO: 1689539 - DNA, 25 bp, Homo sapien
ccctcacatatggataccaaaatgg

SEQ ID NO: 1689540 - DNA, 25 bp, Homo sapien
caccaaataacgctgaaggacacct

SEQ ID NO: 1689541 - DNA, 25 bp, Homo sapien
tatcactgggtatactagattccat

SEQ ID NO: 1689542 - DNA, 25 bp, Homo sapien
gtgacaagacatatagcagctcatt

SEQ ID NO: 1689543 - DNA, 25 bp, Homo sapien
gaatccgggttccatagtttctgaa

SEQ ID NO: 1689544 - DNA, 25 bp, Homo sapien
tcaccctgagtaccccttttgagaa

SEQ ID NO: 1689545 - DNA, 25 bp, Homo sapien
cataccaggcattcagccaaaacat

SEQ ID NO: 1689546 - DNA, 25 bp, Homo sapien
gagttgtctccccattcgaatccgg

SEQ ID NO: 1689547 - DNA, 25 bp, Homo sapien
tcagcatcacatggaagagcttagg

SEQ ID NO: 1689548 - DNA, 25 bp, Homo sapien
ggtcttagagtcataaacatcctga

SEQ ID NO: 1689549 - DNA, 25 bp, Homo sapien
tctgggccaaataaagaccagaccc

SEQ ID NO: 1689550 - DNA, 25 bp, Homo sapien
gggccctgagttccttagcacagaa

SEQ ID NO: 1689551 - DNA, 25 bp, Homo sapien
ggaacatgctgggtgttaacacatc

SEQ ID NO: 1689552 - DNA, 25 bp, Homo sapien
tctcctaccggaacatgctgggtgt

SEQ ID NO: 1689553 - DNA, 25 bp, Homo sapien
tgggtgttaacacatctgtagtcac

SEQ ID NO: 1689554 - DNA, 25 bp, Homo sapien
ccatccagaaagtctcctaccggaa

SEQ ID NO: 1689555 - DNA, 25 bp, Homo sapien
ccagctcctaaccgcgagtgacccg

SEQ ID NO: 1689556 - DNA, 25 bp, Homo sapien
gctcctaaccgcgagtgacccgcca

SEQ ID NO: 1689557 - DNA, 25 bp, Homo sapien
cagctcctaaccgcgagtgacccgc

SEQ ID NO: 1689558 - DNA, 25 bp, Homo sapien
tcctaaccgcgagtgacccgccagc

SEQ ID NO: 1689559 - DNA, 25 bp, Homo sapien
tgataatgcttcagcaaacccacca

SEQ ID NO: 1689560 - DNA, 25 bp, Homo sapien
cattctgactgtcttgtgataatgc

SEQ ID NO: 1689561 - DNA, 25 bp, Homo sapien
gactgtcttgtgataatgcttcagc

SEQ ID NO: 1689562 - DNA, 25 bp, Homo sapien
cactcatcagtcattctgactgtct

SEQ ID NO: 1689563 - DNA, 25 bp, Homo sapien
catggagcacaaggacagaagccaa

SEQ ID NO: 1689564 - DNA, 25 bp, Homo sapien
gcttcctgggatgttgattcctgcc

SEQ ID NO: 1689565 - DNA, 25 bp, Homo sapien
tcctttctgattcacccatggagca

SEQ ID NO: 1689566 - DNA, 25 bp, Homo sapien
ccaggagatttacgcctcctcccca

SEQ ID NO: 1689567 - DNA, 25 bp, Homo sapien
tcaggccatgcgggcagctcagcag

SEQ ID NO: 1689568 - DNA, 25 bp, Homo sapien
ggcagctcagcagccacaaggtcat

SEQ ID NO: 1689569 - DNA, 25 bp, Homo sapien
cctgtggggtcaggccatgcgggca

SEQ ID NO: 1689570 - DNA, 25 bp, Homo sapien
aagacctgtggggtcaggccatgcg

SEQ ID NO: 1689571 - DNA, 25 bp, Homo sapien
caaccaaaaccatgccaacgctgga

SEQ ID NO: 1689572 - DNA, 25 bp, Homo sapien
acgctggagtccatcattaagtccg

SEQ ID NO: 1689573 - DNA, 25 bp, Homo sapien
atgcagacccaaccaaaaccatgcc

SEQ ID NO: 1689574 - DNA, 25 bp, Homo sapien
gctggagtccatcattaagtccgac

SEQ ID NO: 1689575 - DNA, 25 bp, Homo sapien
tgtgcagcgttagctctccaacacc

SEQ ID NO: 1689576 - DNA, 25 bp, Homo sapien
tcacacaggtgttccaggaaacctc

SEQ ID NO: 1689577 - DNA, 25 bp, Homo sapien
tccagggagatcctcacacaggtgt

SEQ ID NO: 1689578 - DNA, 25 bp, Homo sapien
caccaacaggctgtgcagcgttagc

SEQ ID NO: 1689579 - DNA, 25 bp, Homo sapien
acagctcctatcaacatgcaaccaa

SEQ ID NO: 1689580 - DNA, 25 bp, Homo sapien
gtccacagctcctatcaacatgcaa

SEQ ID NO: 1689581 - DNA, 25 bp, Homo sapien
tagagtgtccacagctcctatcaac

SEQ ID NO: 1689582 - DNA, 25 bp, Homo sapien
agtgtccacagctcctatcaacatg

SEQ ID NO: 1689583 - DNA, 25 bp, Homo sapien
aattctcctggctcagccccacaag

SEQ ID NO: 1689584 - DNA, 25 bp, Homo sapien
cattgtccaggctggtctcaaactc

SEQ ID NO: 1689585 - DNA, 25 bp, Homo sapien
attgtccaggctggtctcaaactcc

SEQ ID NO: 1689586 - DNA, 25 bp, Homo sapien
tctcctggctcagccccacaagtag

SEQ ID NO: 1689587 - DNA, 25 bp, Homo sapien
ccagacaacactgtcttttcccgtt

SEQ ID NO: 1689588 - DNA, 25 bp, Homo sapien
tatgagtaacgatagctgtattcct

SEQ ID NO: 1689589 - DNA, 25 bp, Homo sapien
tttcccgttcttctatgagtaacga

SEQ ID NO: 1689590 - DNA, 25 bp, Homo sapien
tcttctatgagtaacgatagctgta

SEQ ID NO: 1689591 - DNA, 25 bp, Homo sapien
tcatatttatggataagcaccagaa

SEQ ID NO: 1689592 - DNA, 25 bp, Homo sapien
caccagaagggtgtcaaccctaagc

SEQ ID NO: 1689593 - DNA, 25 bp, Homo sapien
gaagggtgtcaaccctaagctgcat

SEQ ID NO: 1689594 - DNA, 25 bp, Homo sapien
ttcatatttatggataagcaccaga

SEQ ID NO: 1689595 - DNA, 25 bp, Homo sapien
cagccttagcacttaatgtgggtaa

SEQ ID NO: 1689596 - DNA, 25 bp, Homo sapien
tacccaggtgttgaatagcgtctgc

SEQ ID NO: 1689597 - DNA, 25 bp, Homo sapien
taggatgtttaaaggccgacaagaa

SEQ ID NO: 1689598 - DNA, 25 bp, Homo sapien
ccagcgttggccctgggcttactag

SEQ ID NO: 1689599 - DNA, 25 bp, Homo sapien
cagcatgcgtaaaataaccttggac

SEQ ID NO: 1689600 - DNA, 25 bp, Homo sapien
ttgaaaaggaatgcactgtctccct

SEQ ID NO: 1689601 - DNA, 25 bp, Homo sapien
cagctgtcacgtgatcaagtggcag

SEQ ID NO: 1689602 - DNA, 25 bp, Homo sapien
tgaccttcaggcctagagtcgttac

SEQ ID NO: 1689603 - DNA, 25 bp, Homo sapien
tcattagttctaggagtccacccca

SEQ ID NO: 1689604 - DNA, 25 bp, Homo sapien
taggataagcctacagcttcctgac

SEQ ID NO: 1689605 - DNA, 25 bp, Homo sapien
acagctagtgatacttggcttcata

SEQ ID NO: 1689606 - DNA, 25 bp, Homo sapien
gaaaccactggactttgcatacttt

SEQ ID NO: 1689607 - DNA, 25 bp, Homo sapien
tcaacctacttaagtagctagaact

SEQ ID NO: 1689608 - DNA, 25 bp, Homo sapien
ctgtgctgcccccatattaagtagc

SEQ ID NO: 1689609 - DNA, 25 bp, Homo sapien
ttaggacgtgtatcaaattttcctg

SEQ ID NO: 1689610 - DNA, 25 bp, Homo sapien
aagtagcactcagtttgttctcctc

SEQ ID NO: 1689611 - DNA, 25 bp, Homo sapien
gccaccacgccggcattttagtaat

SEQ ID NO: 1689612 - DNA, 25 bp, Homo sapien
ccaccacgccggcattttagtaatt

SEQ ID NO: 1689613 - DNA, 25 bp, Homo sapien
taaacccggactggtatcctctgag

SEQ ID NO: 1689614 - DNA, 25 bp, Homo sapien
aagtaataatcagcaaatgcatcct

SEQ ID NO: 1689615 - DNA, 25 bp, Homo sapien
tcagcaaatgcatcctaaacccgga

SEQ ID NO: 1689616 - DNA, 25 bp, Homo sapien
ggcaggaacacgtctgtaaaccacc

SEQ ID NO: 1689617 - DNA, 25 bp, Homo sapien
ccacacaaggagtgttgactgtaaa

SEQ ID NO: 1689618 - DNA, 25 bp, Homo sapien
atttctaggactgaccccacacaag

SEQ ID NO: 1689619 - DNA, 25 bp, Homo sapien
tatcactcgacaacccagaaactgg

SEQ ID NO: 1689620 - DNA, 25 bp, Homo sapien
ctatcttcggagagcagcgtcgcca

SEQ ID NO: 1689621 - DNA, 25 bp, Homo sapien
tggcctgaagtgatctgccctgcct

SEQ ID NO: 1689622 - DNA, 25 bp, Homo sapien
attgcacccggccctcattttattt

SEQ ID NO: 1689623 - DNA, 25 bp, Homo sapien
gccattgcacccggccctcatttta

SEQ ID NO: 1689624 - DNA, 25 bp, Homo sapien
cgtcacccagggtgcagtgcagcag

SEQ ID NO: 1689625 - DNA, 25 bp, Homo sapien
atttccatcatactactattaggcc

SEQ ID NO: 1689626 - DNA, 25 bp, Homo sapien
tattaggcccacaaactataacttg

SEQ ID NO: 1689627 - DNA, 25 bp, Homo sapien
taacttgcccttggatgcaaccaaa

SEQ ID NO: 1689628 - DNA, 25 bp, Homo sapien
gaggtatttaatgagaaccagtctt

SEQ ID NO: 1689629 - DNA, 25 bp, Homo sapien
ttcctacagacagtgaactctctca

SEQ ID NO: 1689630 - DNA, 25 bp, Homo sapien
ccatgcggggtctattgttcctaaa

SEQ ID NO: 1689631 - DNA, 25 bp, Homo sapien
gaactctctcattgcctgtaaagag

SEQ ID NO: 1689632 - DNA, 25 bp, Homo sapien
tgtaaagagagctaagcactcccac

SEQ ID NO: 1689633 - DNA, 25 bp, Homo sapien
tgttatcttcccttgaagactttgc

SEQ ID NO: 1689634 - DNA, 25 bp, Homo sapien
caccattgtttcatcctttgttatc

SEQ ID NO: 1689635 - DNA, 25 bp, Homo sapien
taggaagtcacacaacaccattgtt

SEQ ID NO: 1689636 - DNA, 25 bp, Homo sapien
catcctttgttatcttcccttgaag

SEQ ID NO: 1689637 - DNA, 25 bp, Homo sapien
tggcatgtgatacagttgacccacc

SEQ ID NO: 1689638 - DNA, 25 bp, Homo sapien
ctgtggcatgtgatacagttgaccc

SEQ ID NO: 1689639 - DNA, 25 bp, Homo sapien
gtggcatgtgatacagttgacccac

SEQ ID NO: 1689640 - DNA, 25 bp, Homo sapien
tgtggcatgtgatacagttgaccca

SEQ ID NO: 1689641 - DNA, 25 bp, Homo sapien
atgaggcatagggccgaagacaacc

SEQ ID NO: 1689642 - DNA, 25 bp, Homo sapien
gcatagggccgaagacaaccaggga

SEQ ID NO: 1689643 - DNA, 25 bp, Homo sapien
atagggccgaagacaaccagggaag

SEQ ID NO: 1689644 - DNA, 25 bp, Homo sapien
caaaagttcaaaggagttgggatga

SEQ ID NO: 1689645 - DNA, 25 bp, Homo sapien
cactgttcgtgcatctaaaggaacc

SEQ ID NO: 1689646 - DNA, 25 bp, Homo sapien
tcagcagactgtcactgttcgtgca

SEQ ID NO: 1689647 - DNA, 25 bp, Homo sapien
ttcgtgcatctaaaggaaccagcaa

SEQ ID NO: 1689648 - DNA, 25 bp, Homo sapien
gactgtcactgttcgtgcatctaaa

SEQ ID NO: 1689649 - DNA, 25 bp, Homo sapien
tggtggcagtaatacccaacatcat

SEQ ID NO: 1689650 - DNA, 25 bp, Homo sapien
ctggtggcagtaatacccaacatca

SEQ ID NO: 1689651 - DNA, 25 bp, Homo sapien
ggaagtaaatcttggagtcctgcac

SEQ ID NO: 1689652 - DNA, 25 bp, Homo sapien
tacatgcacgccctcaaaagcagta

SEQ ID NO: 1689653 - DNA, 25 bp, Homo sapien
catccgttaatcatatacatgcacg

SEQ ID NO: 1689654 - DNA, 25 bp, Homo sapien
actgtctttcactgtattgccatga

SEQ ID NO: 1689655 - DNA, 25 bp, Homo sapien
gcttgcaattaagaggtatatccag

SEQ ID NO: 1689656 - DNA, 25 bp, Homo sapien
tgttttgattactggtcccttgaaa

SEQ ID NO: 1689657 - DNA, 25 bp, Homo sapien
ggggcctgtggtattacaaattatc

SEQ ID NO: 1689658 - DNA, 25 bp, Homo sapien
ggaaaactctgaagactctcctgct

SEQ ID NO: 1689659 - DNA, 25 bp, Homo sapien
atttttgcctttttggcaaagacag

SEQ ID NO: 1689660 - DNA, 25 bp, Homo sapien
cagctaatttttgcctttttggcaa

SEQ ID NO: 1689661 - DNA, 25 bp, Homo sapien
tgcccatcggaacccaaaaatcctg

SEQ ID NO: 1689662 - DNA, 25 bp, Homo sapien
gatcatgtgccaggtgctcgggccc

SEQ ID NO: 1689663 - DNA, 25 bp, Homo sapien
gttctggatcatgtgccaggtgctc

SEQ ID NO: 1689664 - DNA, 25 bp, Homo sapien
tcctgttctggatcatgtgccaggt

SEQ ID NO: 1689665 - DNA, 25 bp, Homo sapien
gattgagggaagtcagctgaatccc

SEQ ID NO: 1689666 - DNA, 25 bp, Homo sapien
cccgattgagggaagtcagctgaat

SEQ ID NO: 1689667 - DNA, 25 bp, Homo sapien
tatgagtcccgattgagggaagtca

SEQ ID NO: 1689668 - DNA, 25 bp, Homo sapien
ctcttgatgtatgagtcccgattga

SEQ ID NO: 1689669 - DNA, 25 bp, Homo sapien
tacctcactcatcagaaagagccag

SEQ ID NO: 1689670 - DNA, 25 bp, Homo sapien
taatgatgattgaaaagcatattat

SEQ ID NO: 1689671 - DNA, 25 bp, Homo sapien
tattatgtcaacagatacttctttg

SEQ ID NO: 1689672 - DNA, 25 bp, Homo sapien
ggacaatacctcactcatcagaaag

SEQ ID NO: 1689673 - DNA, 25 bp, Homo sapien
tatcactagcgaaatctctacaaat

SEQ ID NO: 1689674 - DNA, 25 bp, Homo sapien
tctgtgaggtctttgattatcacta

SEQ ID NO: 1689675 - DNA, 25 bp, Homo sapien
tgccctaaaggtttctcagactgct

SEQ ID NO: 1689676 - DNA, 25 bp, Homo sapien
tcctgacttgccctaaaggtttctc

SEQ ID NO: 1689677 - DNA, 25 bp, Homo sapien
aatgactgaaagtgagccagttgga

SEQ ID NO: 1689678 - DNA, 25 bp, Homo sapien
gaatgactgaaagtgagccagttgg

SEQ ID NO: 1689679 - DNA, 25 bp, Homo sapien
tgactgaaagtgagccagttggaaa

SEQ ID NO: 1689680 - DNA, 25 bp, Homo sapien
agtggataacttgagttccagacca

SEQ ID NO: 1689681 - DNA, 25 bp, Homo sapien
gtgaaactgacccatccgtgcaaac

SEQ ID NO: 1689682 - DNA, 25 bp, Homo sapien
aaaatgccaaaggccaaatgcccca

SEQ ID NO: 1689683 - DNA, 25 bp, Homo sapien
gcaaaccaattctgagcccctgaga

SEQ ID NO: 1689684 - DNA, 25 bp, Homo sapien
gacccatccgtgcaaaccaattctg

SEQ ID NO: 1689685 - DNA, 25 bp, Homo sapien
gaggcctgtacgcaggcttcccata

SEQ ID NO: 1689686 - DNA, 25 bp, Homo sapien
gagcttctgtcccaaggtccatcct

SEQ ID NO: 1689687 - DNA, 25 bp, Homo sapien
cagaaaggactgagcttagggatag

SEQ ID NO: 1689688 - DNA, 25 bp, Homo sapien
cccaacatcccttgtctgagcttct

SEQ ID NO: 1689689 - DNA, 25 bp, Homo sapien
tgtctgctggcctttttgctgatcc

SEQ ID NO: 1689690 - DNA, 25 bp, Homo sapien
caaggttttccttacatggtgtcgg

SEQ ID NO: 1689691 - DNA, 25 bp, Homo sapien
gaaggattacgaatagtggcaggct

SEQ ID NO: 1689692 - DNA, 25 bp, Homo sapien
tccaaatgggaatagcagcctccaa

SEQ ID NO: 1689693 - DNA, 25 bp, Homo sapien
ccaaaccagcattgtaattgctaag

SEQ ID NO: 1689694 - DNA, 25 bp, Homo sapien
tatctacagaagcattgaaaggccg

SEQ ID NO: 1689695 - DNA, 25 bp, Homo sapien
gcataaatcccgtgcgctgtcctgg

SEQ ID NO: 1689696 - DNA, 25 bp, Homo sapien
tccgagggaaattcccaaaccagca

SEQ ID NO: 1689697 - DNA, 25 bp, Homo sapien
actatacggcagatacattagggcg

SEQ ID NO: 1689698 - DNA, 25 bp, Homo sapien
cattagggcggagtcatttacaagc

SEQ ID NO: 1689699 - DNA, 25 bp, Homo sapien
aagtcccacagtccatttcagtagg

SEQ ID NO: 1689700 - DNA, 25 bp, Homo sapien
gggacgaccacattcctataaggca

SEQ ID NO: 1689701 - DNA, 25 bp, Homo sapien
tttgtaactttagtagagatggcat

SEQ ID NO: 1689702 - DNA, 25 bp, Homo sapien
ctcgcactgtcacctgggctgaagt

SEQ ID NO: 1689703 - DNA, 25 bp, Homo sapien
tgtaactttagtagagatggcattt

SEQ ID NO: 1689704 - DNA, 25 bp, Homo sapien
aagtgcagtggtgcggtctcggctc

SEQ ID NO: 1689705 - DNA, 25 bp, Homo sapien
gaccctcaagtctgagctgaagatt

SEQ ID NO: 1689706 - DNA, 25 bp, Homo sapien
cagctggtaaagttgaccctcaagt

SEQ ID NO: 1689707 - DNA, 25 bp, Homo sapien
ataagaataatggagtgactccacc

SEQ ID NO: 1689708 - DNA, 25 bp, Homo sapien
aataatggagtgactccaccagtag

SEQ ID NO: 1689709 - DNA, 25 bp, Homo sapien
ggtgcgtttcagcagtttcagagca

SEQ ID NO: 1689710 - DNA, 25 bp, Homo sapien
tcttttctgactggcagtaactggc

SEQ ID NO: 1689711 - DNA, 25 bp, Homo sapien
gaaggaggtggttccaaagccagat

SEQ ID NO: 1689712 - DNA, 25 bp, Homo sapien
aggaggcggcaaatcccagtgcaag

SEQ ID NO: 1689713 - DNA, 25 bp, Homo sapien
gagaaggcagatcccagagtagcaa

SEQ ID NO: 1689714 - DNA, 25 bp, Homo sapien
gaattggaaacctcgtacattgctg

SEQ ID NO: 1689715 - DNA, 25 bp, Homo sapien
gagcaagcagatcccagtgcaggaa

SEQ ID NO: 1689716 - DNA, 25 bp, Homo sapien
gagaaggcagatcccagagtaggaa

SEQ ID NO: 1689717 - DNA, 25 bp, Homo sapien
aaagatatctaaggctgactcctcc

SEQ ID NO: 1689718 - DNA, 25 bp, Homo sapien
gtatgaagcctgagttctgactcat

SEQ ID NO: 1689719 - DNA, 25 bp, Homo sapien
actgtgtaccccgaatggcttaagg

SEQ ID NO: 1689720 - DNA, 25 bp, Homo sapien
gcttggcgcctctgtgtatgaagcc

SEQ ID NO: 1689721 - DNA, 25 bp, Homo sapien
ccttgatagacataacagtgagttg

SEQ ID NO: 1689722 - DNA, 25 bp, Homo sapien
gaatcaggctgttccatgagtattt

SEQ ID NO: 1689723 - DNA, 25 bp, Homo sapien
tcaccacttggatcctgcttcacaa

SEQ ID NO: 1689724 - DNA, 25 bp, Homo sapien
tgcaatgggctctcaacatcaccaa

SEQ ID NO: 1689725 - DNA, 25 bp, Homo sapien
taactcagcctgtaatggacaccaa

SEQ ID NO: 1689726 - DNA, 25 bp, Homo sapien
tactgcctcttgacatggtggtcct

SEQ ID NO: 1689727 - DNA, 25 bp, Homo sapien
cacggactgcaggacttaaacaaca

SEQ ID NO: 1689728 - DNA, 25 bp, Homo sapien
tatgattagatgagggcttacccca

SEQ ID NO: 1689729 - DNA, 25 bp, Homo sapien
cccagggatgacttggtgacggaaa

SEQ ID NO: 1689730 - DNA, 25 bp, Homo sapien
tgtggttgagcagtaaatgcagatc

SEQ ID NO: 1689731 - DNA, 25 bp, Homo sapien
gatgttcagtagtaacccagggatg

SEQ ID NO: 1689732 - DNA, 25 bp, Homo sapien
ggacatctggtgaaacagacaatgg

SEQ ID NO: 1689733 - DNA, 25 bp, Homo sapien
tattgtccgcaaaaaattacttctg

SEQ ID NO: 1689734 - DNA, 25 bp, Homo sapien
tagacataagcacatagaaacacat

SEQ ID NO: 1689735 - DNA, 25 bp, Homo sapien
taaatcctgtgacaatgtatgacag

SEQ ID NO: 1689736 - DNA, 25 bp, Homo sapien
agagccctaattccccagataaaag

SEQ ID NO: 1689737 - DNA, 25 bp, Homo sapien
caggtgtgcggaatggaagtttcca

SEQ ID NO: 1689738 - DNA, 25 bp, Homo sapien
gtttccatggcaacgagactgccag

SEQ ID NO: 1689739 - DNA, 25 bp, Homo sapien
gtgacctctgtctggacttagccaa

SEQ ID NO: 1689740 - DNA, 25 bp, Homo sapien
tagaaacaatgaggccacctgaggg

SEQ ID NO: 1689741 - DNA, 25 bp, Homo sapien
acttagtaacactgagagcaagcat

SEQ ID NO: 1689742 - DNA, 25 bp, Homo sapien
caaacttagtaacactgagagcaag

SEQ ID NO: 1689743 - DNA, 25 bp, Homo sapien
ccaaacttagtaacactgagagcaa

SEQ ID NO: 1689744 - DNA, 25 bp, Homo sapien
aacttagtaacactgagagcaagca

SEQ ID NO: 1689745 - DNA, 25 bp, Homo sapien
cagatacattgttcaatgtaagagt

SEQ ID NO: 1689746 - DNA, 25 bp, Homo sapien
gatctgtttgattaatagattcaga

SEQ ID NO: 1689747 - DNA, 25 bp, Homo sapien
taatacaatctcctgtatgcagaca

SEQ ID NO: 1689748 - DNA, 25 bp, Homo sapien
gggtttctggtcagatagtgatctg

SEQ ID NO: 1689749 - DNA, 25 bp, Homo sapien
tatactcaaggtactgggagcagga

SEQ ID NO: 1689750 - DNA, 25 bp, Homo sapien
atactcaaggtactgggagcaggag

SEQ ID NO: 1689751 - DNA, 25 bp, Homo sapien
tttccatgcgtgtggcgtgcttcgg

SEQ ID NO: 1689752 - DNA, 25 bp, Homo sapien
cgtgcttcgggcagggctacatgct

SEQ ID NO: 1689753 - DNA, 25 bp, Homo sapien
ttgatcctcactcatttcctctggg

SEQ ID NO: 1689754 - DNA, 25 bp, Homo sapien
ggttttccatgcgtgtggcgtgctt

SEQ ID NO: 1689755 - DNA, 25 bp, Homo sapien
tgcttcaaccgtgtgagctcagcct

SEQ ID NO: 1689756 - DNA, 25 bp, Homo sapien
tgatgttggtgtaactgcttcacgc

SEQ ID NO: 1689757 - DNA, 25 bp, Homo sapien
cagagcagtttgtggtgcttcacac

SEQ ID NO: 1689758 - DNA, 25 bp, Homo sapien
gaatagcaagttacagagggaggca

SEQ ID NO: 1689759 - DNA, 25 bp, Homo sapien
gtttccaggttcttagaatacagag

SEQ ID NO: 1689760 - DNA, 25 bp, Homo sapien
acagtgtgaataaagattgtttcca

SEQ ID NO: 1689761 - DNA, 25 bp, Homo sapien
ttgtttccaggttcttagaatacag

SEQ ID NO: 1689762 - DNA, 25 bp, Homo sapien
ataaagattgtttccaggttcttag

SEQ ID NO: 1689763 - DNA, 25 bp, Homo sapien
gagcaagcatctctactgttcacta

SEQ ID NO: 1689764 - DNA, 25 bp, Homo sapien
tggcactcataaagtgagcaagcat

SEQ ID NO: 1689765 - DNA, 25 bp, Homo sapien
tcaaaactcccttaatacatggcac

SEQ ID NO: 1689766 - DNA, 25 bp, Homo sapien
aaatccaactttagacatgccacca

SEQ ID NO: 1689767 - DNA, 25 bp, Homo sapien
agatagttcctcctctatatcaggg

SEQ ID NO: 1689768 - DNA, 25 bp, Homo sapien
gcagcttcaggaaggatacacacga

SEQ ID NO: 1689769 - DNA, 25 bp, Homo sapien
acacacgaagcagtaagggaggtag

SEQ ID NO: 1689770 - DNA, 25 bp, Homo sapien
tcatatactcttcactgaagatagt

SEQ ID NO: 1689771 - DNA, 25 bp, Homo sapien
tgcagtgatatgatcacggctcgct

SEQ ID NO: 1689772 - DNA, 25 bp, Homo sapien
tggtagagatgtgggtttcagtcat

SEQ ID NO: 1689773 - DNA, 25 bp, Homo sapien
gtgatatgatcacggctcgctgcag

SEQ ID NO: 1689774 - DNA, 25 bp, Homo sapien
cctcaatctcatgggctcaagtgat

SEQ ID NO: 1689775 - DNA, 25 bp, Homo sapien
ggacttaaattcaaccatggtctaa

SEQ ID NO: 1689776 - DNA, 25 bp, Homo sapien
gtaggcaaggttttgtgtgttgccc

SEQ ID NO: 1689777 - DNA, 25 bp, Homo sapien
ggtctaaagactcaatgtagaagga

SEQ ID NO: 1689778 - DNA, 25 bp, Homo sapien
acaacataagggtcagtggaggatc

SEQ ID NO: 1689779 - DNA, 25 bp, Homo sapien
acaaggtacacatgtggtttccaga

SEQ ID NO: 1689780 - DNA, 25 bp, Homo sapien
gaggacctgagctgtaagccgttct

SEQ ID NO: 1689781 - DNA, 25 bp, Homo sapien
tgagactcaaggcagtagcatttgt

SEQ ID NO: 1689782 - DNA, 25 bp, Homo sapien
tctgctcctggacaaatcttcaact

SEQ ID NO: 1689783 - DNA, 25 bp, Homo sapien
cataaagaaccagtaagatgcatgt

SEQ ID NO: 1689784 - DNA, 25 bp, Homo sapien
cttcataaagaaccagtaagatgca

SEQ ID NO: 1689785 - DNA, 25 bp, Homo sapien
tcataaagaaccagtaagatgcatg

SEQ ID NO: 1689786 - DNA, 25 bp, Homo sapien
taaagaaccagtaagatgcatgtta

SEQ ID NO: 1689787 - DNA, 25 bp, Homo sapien
cattccagcctatgtgtagatcgag

SEQ ID NO: 1689788 - DNA, 25 bp, Homo sapien
ttccagcctatgtgtagatcgagaa

SEQ ID NO: 1689789 - DNA, 25 bp, Homo sapien
agactgcactgacccttatcacacc

SEQ ID NO: 1689790 - DNA, 25 bp, Homo sapien
gacccttatcacaccaacaccactg

SEQ ID NO: 1689791 - DNA, 25 bp, Homo sapien
cacttgtgcaggaaagggttacgtc

SEQ ID NO: 1689792 - DNA, 25 bp, Homo sapien
ggaagattacttctgagcccttggc

SEQ ID NO: 1689793 - DNA, 25 bp, Homo sapien
ggttacgtcaacaggcctgggctgc

SEQ ID NO: 1689794 - DNA, 25 bp, Homo sapien
tgtaccaatttgatctgaggcctga

SEQ ID NO: 1689795 - DNA, 25 bp, Homo sapien
acgattccgggatcgggtgcaccac

SEQ ID NO: 1689796 - DNA, 25 bp, Homo sapien
tgagaatgcacagcaagcggcagac

SEQ ID NO: 1689797 - DNA, 25 bp, Homo sapien
gggacatccagactacaatttacag

SEQ ID NO: 1689798 - DNA, 25 bp, Homo sapien
caggtccttctttcgcagggcgcag

SEQ ID NO: 1689799 - DNA, 25 bp, Homo sapien
tttaaatccatgctgcgaggctgcg

SEQ ID NO: 1689800 - DNA, 25 bp, Homo sapien
gggcattcggctctccataacagca

SEQ ID NO: 1689801 - DNA, 25 bp, Homo sapien
caatcggtcctagcaaagcacagag

SEQ ID NO: 1689802 - DNA, 25 bp, Homo sapien
gcaaattataggctgatcccggcac

SEQ ID NO: 1689803 - DNA, 25 bp, Homo sapien
aatcaggcgggcattcatgtccagc

SEQ ID NO: 1689804 - DNA, 25 bp, Homo sapien
gactttatgtaccatgcagctgcca

SEQ ID NO: 1689805 - DNA, 25 bp, Homo sapien
ttgcgacatcgtttcagtgacccca

SEQ ID NO: 1689806 - DNA, 25 bp, Homo sapien
tattctgctgcgagcatgactgctg

SEQ ID NO: 1689807 - DNA, 25 bp, Homo sapien
ttacttgtgatatcccagggtgttc

SEQ ID NO: 1689808 - DNA, 25 bp, Homo sapien
catgcagtgcatatgtcagcaacaa

SEQ ID NO: 1689809 - DNA, 25 bp, Homo sapien
ctatacattgtgaagccaacagggt

SEQ ID NO: 1689810 - DNA, 25 bp, Homo sapien
tcaagactcctcctctagaaaagat

SEQ ID NO: 1689811 - DNA, 25 bp, Homo sapien
gatagatttcttggctctgatagca

SEQ ID NO: 1689812 - DNA, 25 bp, Homo sapien
aagccagtgagggtatgatcgatca

SEQ ID NO: 1689813 - DNA, 25 bp, Homo sapien
gctgaaatgtaaacactcctggatt

SEQ ID NO: 1689814 - DNA, 25 bp, Homo sapien
acaaaagattgctagtgtagttgga

SEQ ID NO: 1689815 - DNA, 25 bp, Homo sapien
aaactttgttgatccctgccctatg

SEQ ID NO: 1689816 - DNA, 25 bp, Homo sapien
tccggcagtgtacagtttgggcgct

SEQ ID NO: 1689817 - DNA, 25 bp, Homo sapien
gaatcagataaggtctccggcagtg

SEQ ID NO: 1689818 - DNA, 25 bp, Homo sapien
taaattgttccgtgtcatcagtgag

SEQ ID NO: 1689819 - DNA, 25 bp, Homo sapien
gctttgtgagctcatgggcgcttac

SEQ ID NO: 1689820 - DNA, 25 bp, Homo sapien
tctggagaagatcagccttgagcac

SEQ ID NO: 1689821 - DNA, 25 bp, Homo sapien
gcgcttacataagaggacaacctcg

SEQ ID NO: 1689822 - DNA, 25 bp, Homo sapien
ggtaagccctttggtatctgcagtc

SEQ ID NO: 1689823 - DNA, 25 bp, Homo sapien
gatggcaaaaactggcacattggtt

SEQ ID NO: 1689824 - DNA, 25 bp, Homo sapien
tatatggcatttttgctgggccagg

SEQ ID NO: 1689825 - DNA, 25 bp, Homo sapien
taaggactgagtacatcatacgtca

SEQ ID NO: 1689826 - DNA, 25 bp, Homo sapien
tgggccaggcatcgcatgatgatga

SEQ ID NO: 1689827 - DNA, 25 bp, Homo sapien
atatcttaacactactcccacttac

SEQ ID NO: 1689828 - DNA, 25 bp, Homo sapien
tatttttacattttgaacagaaagc

SEQ ID NO: 1689829 - DNA, 25 bp, Homo sapien
aagctactggtttatatggaaaatt

SEQ ID NO: 1689830 - DNA, 25 bp, Homo sapien
tttcaaatatcttaacactactccc

SEQ ID NO: 1689831 - DNA, 25 bp, Homo sapien
aaccatgagaatcttactcctctca

SEQ ID NO: 1689832 - DNA, 25 bp, Homo sapien
gagaatcttactcctctcaatgact

SEQ ID NO: 1689833 - DNA, 25 bp, Homo sapien
tcctctcaatgacttcatagtcacc

SEQ ID NO: 1689834 - DNA, 25 bp, Homo sapien
tactcctctcaatgacttcatagtc

SEQ ID NO: 1689835 - DNA, 25 bp, Homo sapien
tgactttgacgagaggaaggcttca

SEQ ID NO: 1689836 - DNA, 25 bp, Homo sapien
aaatgactttgacgagaggaaggct

SEQ ID NO: 1689837 - DNA, 25 bp, Homo sapien
atggaaaatgactttgacgagagga

SEQ ID NO: 1689838 - DNA, 25 bp, Homo sapien
gaaaatgactttgacgagaggaagg

SEQ ID NO: 1689839 - DNA, 25 bp, Homo sapien
caagacaaggaaaattccttctgcc

SEQ ID NO: 1689840 - DNA, 25 bp, Homo sapien
gaatgagttctcctgaaatcttgtt

SEQ ID NO: 1689841 - DNA, 25 bp, Homo sapien
gacaccctaggacatatctgtagaa

SEQ ID NO: 1689842 - DNA, 25 bp, Homo sapien
cagcattactttggtgttactagcc

SEQ ID NO: 1689843 - DNA, 25 bp, Homo sapien
gcccaagtaggtggaatagccatac

SEQ ID NO: 1689844 - DNA, 25 bp, Homo sapien
tcacttctccaaagcgtggaccagc

SEQ ID NO: 1689845 - DNA, 25 bp, Homo sapien
tagatagtccactttcagcacaaga

SEQ ID NO: 1689846 - DNA, 25 bp, Homo sapien
gggaccctcgactgcagtgcaaatg

SEQ ID NO: 1689847 - DNA, 25 bp, Homo sapien
gagaaactagcctgaacagcctagg

SEQ ID NO: 1689848 - DNA, 25 bp, Homo sapien
taatacactggcttcaggtaacctg

SEQ ID NO: 1689849 - DNA, 25 bp, Homo sapien
tcccaggttcaccacgtaactagaa

SEQ ID NO: 1689850 - DNA, 25 bp, Homo sapien
ttaagtcctggttgagccttcctga

SEQ ID NO: 1689851 - DNA, 25 bp, Homo sapien
tcagaaggcccttcggaaactgctg

SEQ ID NO: 1689852 - DNA, 25 bp, Homo sapien
ccaggttcaccacgtaactagaatt

SEQ ID NO: 1689853 - DNA, 25 bp, Homo sapien
ttgaatgaagtcatcaagttaaaca

SEQ ID NO: 1689854 - DNA, 25 bp, Homo sapien
tgttgaatgaagtcatcaagttaaa

SEQ ID NO: 1689855 - DNA, 25 bp, Homo sapien
gttgaatgaagtcatcaagttaaac

SEQ ID NO: 1689856 - DNA, 25 bp, Homo sapien
aagcctgcccatacttttgattttg

SEQ ID NO: 1689857 - DNA, 25 bp, Homo sapien
cagttctccgctggagtcttctaaa

SEQ ID NO: 1689858 - DNA, 25 bp, Homo sapien
cgctggagtcttctaaagaaatcaa

SEQ ID NO: 1689859 - DNA, 25 bp, Homo sapien
aagaaatcaagcctgcccatacttt

SEQ ID NO: 1689860 - DNA, 25 bp, Homo sapien
ttttagaattcctaggtctgaagag

SEQ ID NO: 1689861 - DNA, 25 bp, Homo sapien
tatctgggtcgcaagtgtttaactg

SEQ ID NO: 1689862 - DNA, 25 bp, Homo sapien
ccagaattccaggatattgagtaga

SEQ ID NO: 1689863 - DNA, 25 bp, Homo sapien
tctgaagagtttagttatctgggtc

SEQ ID NO: 1689864 - DNA, 25 bp, Homo sapien
tcttggctgaggttgtgttgcactg

SEQ ID NO: 1689865 - DNA, 25 bp, Homo sapien
tggctgaggttgtgttgcactggct

SEQ ID NO: 1689866 - DNA, 25 bp, Homo sapien
cttcttggctgaggttgtgttgcac

SEQ ID NO: 1689867 - DNA, 25 bp, Homo sapien
cttggctgaggttgtgttgcactgg

SEQ ID NO: 1689868 - DNA, 25 bp, Homo sapien
gttaaacaggtctaattcacaatga

SEQ ID NO: 1689869 - DNA, 25 bp, Homo sapien
tcacaatgaatgacaacttgagaca

SEQ ID NO: 1689870 - DNA, 25 bp, Homo sapien
aataatacagttccttatatgaggg

SEQ ID NO: 1689871 - DNA, 25 bp, Homo sapien
tctggaaaattagacagtgaagcat

SEQ ID NO: 1689872 - DNA, 25 bp, Homo sapien
tctgtttctgtcatctctcccccac

SEQ ID NO: 1689873 - DNA, 25 bp, Homo sapien
ctctcccccacataccaacttcttc

SEQ ID NO: 1689874 - DNA, 25 bp, Homo sapien
tcccccacataccaacttcttcacc

SEQ ID NO: 1689875 - DNA, 25 bp, Homo sapien
catctctcccccacataccaacttc

SEQ ID NO: 1689876 - DNA, 25 bp, Homo sapien
caaggcctcccatagctaataaata

SEQ ID NO: 1689877 - DNA, 25 bp, Homo sapien
ctgtgtggacaacaaagtattcttc

SEQ ID NO: 1689878 - DNA, 25 bp, Homo sapien
tacttctccgtaggctcaagcagag

SEQ ID NO: 1689879 - DNA, 25 bp, Homo sapien
taattctagaactccctcaaggcct

SEQ ID NO: 1689880 - DNA, 25 bp, Homo sapien
caaactttctgtacagggtcagtca

SEQ ID NO: 1689881 - DNA, 25 bp, Homo sapien
tcagtctgaggaccagattccgccc

SEQ ID NO: 1689882 - DNA, 25 bp, Homo sapien
ttctcccagtataagcaaagtggct

SEQ ID NO: 1689883 - DNA, 25 bp, Homo sapien
tacatgcagagactgcctgggaaca

SEQ ID NO: 1689884 - DNA, 25 bp, Homo sapien
tatagccctccccaaaaggatggca

SEQ ID NO: 1689885 - DNA, 25 bp, Homo sapien
aacacttacgtctaccttgggtcag

SEQ ID NO: 1689886 - DNA, 25 bp, Homo sapien
aaattagagccaacacccatgcaag

SEQ ID NO: 1689887 - DNA, 25 bp, Homo sapien
tctacctaagaagctgagtggatgc

SEQ ID NO: 1689888 - DNA, 25 bp, Homo sapien
gaaatgaaataaaatgcctagattc

SEQ ID NO: 1689889 - DNA, 25 bp, Homo sapien
ggtgtacttgaaatgaaataaaatg

SEQ ID NO: 1689890 - DNA, 25 bp, Homo sapien
tgaaatgaaataaaatgcctagatt

SEQ ID NO: 1689891 - DNA, 25 bp, Homo sapien
atgaaataaaatgcctagattcaag

SEQ ID NO: 1689892 - DNA, 25 bp, Homo sapien
tgatattgtgacaggccagcctctc

SEQ ID NO: 1689893 - DNA, 25 bp, Homo sapien
tctccacaagcctgcacatcaaggt

SEQ ID NO: 1689894 - DNA, 25 bp, Homo sapien
tcaaggtttgtcaggatcactccca

SEQ ID NO: 1689895 - DNA, 25 bp, Homo sapien
cagtgttattaagagaggctgtcct

SEQ ID NO: 1689896 - DNA, 25 bp, Homo sapien
gagtcacataggcagatagagagca

SEQ ID NO: 1689897 - DNA, 25 bp, Homo sapien
caaccctttaccaggcagaatgaca

SEQ ID NO: 1689898 - DNA, 25 bp, Homo sapien
tgatagaggacccaggtaaagttca

SEQ ID NO: 1689899 - DNA, 25 bp, Homo sapien
gcagatgtggaagcatagagcctgt

SEQ ID NO: 1689900 - DNA, 25 bp, Homo sapien
tgaacactatgcattaggtatcagg

SEQ ID NO: 1689901 - DNA, 25 bp, Homo sapien
cattaggtatcaggagatgagagaa

SEQ ID NO: 1689902 - DNA, 25 bp, Homo sapien
gagatgagagaagtagcaggcacag

SEQ ID NO: 1689903 - DNA, 25 bp, Homo sapien
cactatgcattaggtatcaggagat

SEQ ID NO: 1689904 - DNA, 25 bp, Homo sapien
gagataccagtttgttagacccctg

SEQ ID NO: 1689905 - DNA, 25 bp, Homo sapien
taagactcagatgtaatgctgctgc

SEQ ID NO: 1689906 - DNA, 25 bp, Homo sapien
ccagggccttgaacacgggagtctg

SEQ ID NO: 1689907 - DNA, 25 bp, Homo sapien
ccttcatgtggatggtgacaaacca

SEQ ID NO: 1689908 - DNA, 25 bp, Homo sapien
taagtggtggttcccccacacatcc

SEQ ID NO: 1689909 - DNA, 25 bp, Homo sapien
gagcaatgagtagaattaggtctga

SEQ ID NO: 1689910 - DNA, 25 bp, Homo sapien
caagaagtacagcagtaatggagat

SEQ ID NO: 1689911 - DNA, 25 bp, Homo sapien
tggagattaatataagagcaatgag

SEQ ID NO: 1689912 - DNA, 25 bp, Homo sapien
gcttaagtgcatttattgttctagg

SEQ ID NO: 1689913 - DNA, 25 bp, Homo sapien
tgagcactcgtgatttagcctgagg

SEQ ID NO: 1689914 - DNA, 25 bp, Homo sapien
tatgctggcagatatgacccggttg

SEQ ID NO: 1689915 - DNA, 25 bp, Homo sapien
tattagattttagggctgtggacag

SEQ ID NO: 1689916 - DNA, 25 bp, Homo sapien
catcaggaatgtggactctcaggtc

SEQ ID NO: 1689917 - DNA, 25 bp, Homo sapien
tgtcggaggcttcacaatagctggg

SEQ ID NO: 1689918 - DNA, 25 bp, Homo sapien
tgagcaagagctaccttaccctgag

SEQ ID NO: 1689919 - DNA, 25 bp, Homo sapien
caagatctccaaaagcagggtacgc

SEQ ID NO: 1689920 - DNA, 25 bp, Homo sapien
ccctgtgcgtggacagcacagccat

SEQ ID NO: 1689921 - DNA, 25 bp, Homo sapien
aattttttcccgttgatgatgcact

SEQ ID NO: 1689922 - DNA, 25 bp, Homo sapien
gatgcactttaaccctgtgcgtgga

SEQ ID NO: 1689923 - DNA, 25 bp, Homo sapien
tcccgttgatgatgcactttaaccc

SEQ ID NO: 1689924 - DNA, 25 bp, Homo sapien
gcgagcattgattggtattaaacgt

SEQ ID NO: 1689925 - DNA, 25 bp, Homo sapien
aaatcacagttaattgcgagcattg

SEQ ID NO: 1689926 - DNA, 25 bp, Homo sapien
cgtgagtactgccaaaatgatagga

SEQ ID NO: 1689927 - DNA, 25 bp, Homo sapien
ttaacagctgatgtaaatcacagtt

SEQ ID NO: 1689928 - DNA, 25 bp, Homo sapien
ggcaccacagccccatctgattcag

SEQ ID NO: 1689929 - DNA, 25 bp, Homo sapien
tgagatctaccctgtctggtcggga

SEQ ID NO: 1689930 - DNA, 25 bp, Homo sapien
ccatgcttgggtgtaacaggtctcc

SEQ ID NO: 1689931 - DNA, 25 bp, Homo sapien
tcaagctcctgaagtgccgaatcat

SEQ ID NO: 1689932 - DNA, 25 bp, Homo sapien
gcctacgcagggattcacataaaat

SEQ ID NO: 1689933 - DNA, 25 bp, Homo sapien
gctgtagagattgaggagcaaacca

SEQ ID NO: 1689934 - DNA, 25 bp, Homo sapien
caaaccaaacggcttctagagggca

SEQ ID NO: 1689935 - DNA, 25 bp, Homo sapien
tgtatcatctggtcacggaagtacg

SEQ ID NO: 1689936 - DNA, 25 bp, Homo sapien
gaagtacgtggtatgcaagaagccc

SEQ ID NO: 1689937 - DNA, 25 bp, Homo sapien
caggcggttgtgtagatcaaggaaa

SEQ ID NO: 1689938 - DNA, 25 bp, Homo sapien
tgtctcttcgttctaggatcccaaa

SEQ ID NO: 1689939 - DNA, 25 bp, Homo sapien
aagagaacagactgctctgccagca

SEQ ID NO: 1689940 - DNA, 25 bp, Homo sapien
tcaaggaaagcatgttgatgaattc

SEQ ID NO: 1689941 - DNA, 25 bp, Homo sapien
cttctgggatccaccacaattttaa

SEQ ID NO: 1689942 - DNA, 25 bp, Homo sapien
ttctgggatccaccacaattttaac

SEQ ID NO: 1689943 - DNA, 25 bp, Homo sapien
agaagaaaggaactctggacacatc

SEQ ID NO: 1689944 - DNA, 25 bp, Homo sapien
ccagaagaaaggaactctggacaca

SEQ ID NO: 1689945 - DNA, 25 bp, Homo sapien
caccagaagaaaggaactctggaca

SEQ ID NO: 1689946 - DNA, 25 bp, Homo sapien
cccaccagaagaaaggaactctgga

SEQ ID NO: 1689947 - DNA, 25 bp, Homo sapien
cactttgaagttagggctgcctgaa

SEQ ID NO: 1689948 - DNA, 25 bp, Homo sapien
ggctgaaaccacttctatataaggg

SEQ ID NO: 1689949 - DNA, 25 bp, Homo sapien
tatataagggtttgctgtgctgagg

SEQ ID NO: 1689950 - DNA, 25 bp, Homo sapien
gatttgttccaccagaacgttgtag

SEQ ID NO: 1689951 - DNA, 25 bp, Homo sapien
aattctaccaacacatcttttgtat

SEQ ID NO: 1689952 - DNA, 25 bp, Homo sapien
tctaccaacacatcttttgtatcta

SEQ ID NO: 1689953 - DNA, 25 bp, Homo sapien
catccaaatctggcaattctaccaa

SEQ ID NO: 1689954 - DNA, 25 bp, Homo sapien
ccaaatctggcaattctaccaacac

SEQ ID NO: 1689955 - DNA, 25 bp, Homo sapien
gcctggtaccatagagtaaagcaaa

SEQ ID NO: 1689956 - DNA, 25 bp, Homo sapien
ttctggcaaagcctggtaccataga

SEQ ID NO: 1689957 - DNA, 25 bp, Homo sapien
gtgtcctagcctgagtcctaggact

SEQ ID NO: 1689958 - DNA, 25 bp, Homo sapien
gagtcctaggacttgaaacagtttc

SEQ ID NO: 1689959 - DNA, 25 bp, Homo sapien
caaggttcagtgcaattgagagcgt

SEQ ID NO: 1689960 - DNA, 25 bp, Homo sapien
ggttcagtgcaattgagagcgtcat

SEQ ID NO: 1689961 - DNA, 25 bp, Homo sapien
tgccccaaggttcagtgcaattgag

SEQ ID NO: 1689962 - DNA, 25 bp, Homo sapien
tcttctttgccccaaggttcagtgc

SEQ ID NO: 1689963 - DNA, 25 bp, Homo sapien
gttggcttgaccactatcttgcctc

SEQ ID NO: 1689964 - DNA, 25 bp, Homo sapien
tggcttgaccactatcttgcctcac

SEQ ID NO: 1689965 - DNA, 25 bp, Homo sapien
ttggcttgaccactatcttgcctca

SEQ ID NO: 1689966 - DNA, 25 bp, Homo sapien
tgttggcttgaccactatcttgcct

SEQ ID NO: 1689967 - DNA, 25 bp, Homo sapien
gaaaagcatgtaattatgtctcccc

SEQ ID NO: 1689968 - DNA, 25 bp, Homo sapien
ttgaaggtcaaacgtcacagctagc

SEQ ID NO: 1689969 - DNA, 25 bp, Homo sapien
tccagagactctagacatgtatcca

SEQ ID NO: 1689970 - DNA, 25 bp, Homo sapien
tatgttattcactgcatgcacagac

SEQ ID NO: 1689971 - DNA, 25 bp, Homo sapien
cagaggccactctaaatagagacaa

SEQ ID NO: 1689972 - DNA, 25 bp, Homo sapien
ccaggcttgttgtgcccactcttct

SEQ ID NO: 1689973 - DNA, 25 bp, Homo sapien
cggtgaggtgttcatccccaggctt

SEQ ID NO: 1689974 - DNA, 25 bp, Homo sapien
ctggagcagatggacggtgaggtgt

SEQ ID NO: 1689975 - DNA, 25 bp, Homo sapien
aatcgtgattctgcggtggtatggc

SEQ ID NO: 1689976 - DNA, 25 bp, Homo sapien
gtagtgactcagaacagcaatcgtg

SEQ ID NO: 1689977 - DNA, 25 bp, Homo sapien
tccatattctgaggcctcggctagg

SEQ ID NO: 1689978 - DNA, 25 bp, Homo sapien
gctgctcaacaagtcacctgaaatg

SEQ ID NO: 1689979 - DNA, 25 bp, Homo sapien
tttttgtctggcatcctcgaagtct

SEQ ID NO: 1689980 - DNA, 25 bp, Homo sapien
gatctttttgtctggcatcctcgaa

SEQ ID NO: 1689981 - DNA, 25 bp, Homo sapien
ctggcatcctcgaagtctgtatacc

SEQ ID NO: 1689982 - DNA, 25 bp, Homo sapien
aaatgatctttttgtctggcatcct

SEQ ID NO: 1689983 - DNA, 25 bp, Homo sapien
tccataaagaatccaggatccactc

SEQ ID NO: 1689984 - DNA, 25 bp, Homo sapien
tccatacaacaccttctgtgttggg

SEQ ID NO: 1689985 - DNA, 25 bp, Homo sapien
tttgcacagcatggtcttgatttcc

SEQ ID NO: 1689986 - DNA, 25 bp, Homo sapien
aactgcagttgctggaaaaatgaag

SEQ ID NO: 1689987 - DNA, 25 bp, Homo sapien
cagaaacaatgttggagtccatttt

SEQ ID NO: 1689988 - DNA, 25 bp, Homo sapien
tgggtgagcaactcgctccaagccc

SEQ ID NO: 1689989 - DNA, 25 bp, Homo sapien
tgagcaactcgctccaagccctgag

SEQ ID NO: 1689990 - DNA, 25 bp, Homo sapien
caaggtgggtgagcaactcgctcca

SEQ ID NO: 1689991 - DNA, 25 bp, Homo sapien
ggtgggtgagcaactcgctccaagc

SEQ ID NO: 1689992 - DNA, 25 bp, Homo sapien
catcaaacatgttgttttccgttca

SEQ ID NO: 1689993 - DNA, 25 bp, Homo sapien
ggcttttacatctcaccaggtatta

SEQ ID NO: 1689994 - DNA, 25 bp, Homo sapien
tcaccaggtattaatttatttacag

SEQ ID NO: 1689995 - DNA, 25 bp, Homo sapien
tcaaacatgttgttttccgttcaag

SEQ ID NO: 1689996 - DNA, 25 bp, Homo sapien
ctaatagtgttgtctggagttgttc

SEQ ID NO: 1689997 - DNA, 25 bp, Homo sapien
aacttgtacctgcaattaccttctc

SEQ ID NO: 1689998 - DNA, 25 bp, Homo sapien
cagtgctgtccgcaaatggcaggcc

SEQ ID NO: 1689999 - DNA, 25 bp, Homo sapien
tcaaggttctaatagtgttgtctgg

SEQ ID NO: 1690000 - DNA, 25 bp, Homo sapien
tactcggagagatctcattaattcc

SEQ ID NO: 1690001 - DNA, 25 bp, Homo sapien
gagagatctcattaattccagtgct

SEQ ID NO: 1690002 - DNA, 25 bp, Homo sapien
agagaaagttctactcggagagatc

SEQ ID NO: 1690003 - DNA, 25 bp, Homo sapien
gttctactcggagagatctcattaa

SEQ ID NO: 1690004 - DNA, 25 bp, Homo sapien
tggcttagcaggcaaaatggagagc

SEQ ID NO: 1690005 - DNA, 25 bp, Homo sapien
tggaagctgacataatatgccaggg

SEQ ID NO: 1690006 - DNA, 25 bp, Homo sapien
tgatagccgtcagcagcaagcatgg

SEQ ID NO: 1690007 - DNA, 25 bp, Homo sapien
tgccaactggcacacgtctgatagc

SEQ ID NO: 1690008 - DNA, 25 bp, Homo sapien
gcagtatttgcttcggtttttcctc

SEQ ID NO: 1690009 - DNA, 25 bp, Homo sapien
cattctcatgcagtatttgcttcgg

SEQ ID NO: 1690010 - DNA, 25 bp, Homo sapien
catgcagtatttgcttcggtttttc

SEQ ID NO: 1690011 - DNA, 25 bp, Homo sapien
tctcatgcagtatttgcttcggttt

SEQ ID NO: 1690012 - DNA, 25 bp, Homo sapien
aaagcacagtttgaaagacccaaga

SEQ ID NO: 1690013 - DNA, 25 bp, Homo sapien
aagcacagtttgaaagacccaagat

SEQ ID NO: 1690014 - DNA, 25 bp, Homo sapien
gatttcctccgggactagcactgga

SEQ ID NO: 1690015 - DNA, 25 bp, Homo sapien
tacacctgcgttaggaggagctaaa

SEQ ID NO: 1690016 - DNA, 25 bp, Homo sapien
tggctgtgtcagtggtttcaaccct

SEQ ID NO: 1690017 - DNA, 25 bp, Homo sapien
aggagctaaagagatggctgtgtca

SEQ ID NO: 1690018 - DNA, 25 bp, Homo sapien
ccactgcgaagtgtgcattatctcc

SEQ ID NO: 1690019 - DNA, 25 bp, Homo sapien
tgtgcattatctcccgaacactcga

SEQ ID NO: 1690020 - DNA, 25 bp, Homo sapien
tcccgaacactcgaagcccgttgga

SEQ ID NO: 1690021 - DNA, 25 bp, Homo sapien
gggccccgagaagatccactgcgaa

SEQ ID NO: 1690022 - DNA, 25 bp, Homo sapien
gcctgggccacaccggaagtagacg

SEQ ID NO: 1690023 - DNA, 25 bp, Homo sapien
ctgggcgggagttgttgagcgacct

SEQ ID NO: 1690024 - DNA, 25 bp, Homo sapien
aagtagacgccgaagtctgcgcgcg

SEQ ID NO: 1690025 - DNA, 25 bp, Homo sapien
cgcgcgcagtaagggcggctgctgg

SEQ ID NO: 1690026 - DNA, 25 bp, Homo sapien
aaaacacctggtagcggttgggctg

SEQ ID NO: 1690027 - DNA, 25 bp, Homo sapien
tgcactccttgtacgggaacaggcg

SEQ ID NO: 1690028 - DNA, 25 bp, Homo sapien
tgtacatgggcatgccgtaggccga

SEQ ID NO: 1690029 - DNA, 25 bp, Homo sapien
ccaggtccccgctcttgtacatggg

SEQ ID NO: 1690030 - DNA, 25 bp, Homo sapien
tcgtcgccctctgcggcctcgggct

SEQ ID NO: 1690031 - DNA, 25 bp, Homo sapien
cgtgggtcggcttgtcctcgtcgcc

SEQ ID NO: 1690032 - DNA, 25 bp, Homo sapien
tctctgaggctaatgggcagtcgga

SEQ ID NO: 1690033 - DNA, 25 bp, Homo sapien
tcgggctccggccaaggcccgtctc

SEQ ID NO: 1690034 - DNA, 25 bp, Homo sapien
tccggcttccccaattcgtcgccgc

SEQ ID NO: 1690035 - DNA, 25 bp, Homo sapien
tcgtccggcttccccaattcgtcgc

SEQ ID NO: 1690036 - DNA, 25 bp, Homo sapien
tcagtgggcttgtcgtcgtccggct

SEQ ID NO: 1690037 - DNA, 25 bp, Homo sapien
cttccccaattcgtcgccgccgcca

SEQ ID NO: 1690038 - DNA, 25 bp, Homo sapien
tcctctggctgaggcggctcgcaga

SEQ ID NO: 1690039 - DNA, 25 bp, Homo sapien
gttctccaccgccacgaggaacgga

SEQ ID NO: 1690040 - DNA, 25 bp, Homo sapien
gcctcggcatgccactcctgggagg

SEQ ID NO: 1690041 - DNA, 25 bp, Homo sapien
gaggaacggactctcctcgtcgacg

SEQ ID NO: 1690042 - DNA, 25 bp, Homo sapien
tgagagtcaggtggcctgccatcct

SEQ ID NO: 1690043 - DNA, 25 bp, Homo sapien
tttgcacgccgtggtcagattcccc

SEQ ID NO: 1690044 - DNA, 25 bp, Homo sapien
cagggcaaaggagcgcgggttggag

SEQ ID NO: 1690045 - DNA, 25 bp, Homo sapien
gaaaggcagtcccagtttgcacgcc

SEQ ID NO: 1690046 - DNA, 25 bp, Homo sapien
tgtctagaggtgaaaacagcctgcc

SEQ ID NO: 1690047 - DNA, 25 bp, Homo sapien
tagaggtgaaaacagcctgcctgaa

SEQ ID NO: 1690048 - DNA, 25 bp, Homo sapien
cggaaacggaatcaggcaacgagtg

SEQ ID NO: 1690049 - DNA, 25 bp, Homo sapien
ctgcctgaaccccaagtcggaaacg

SEQ ID NO: 1690050 - DNA, 25 bp, Homo sapien
cagcgtggaggcacacctagaggta

SEQ ID NO: 1690051 - DNA, 25 bp, Homo sapien
aacagcaatgggaaagctagggcca

SEQ ID NO: 1690052 - DNA, 25 bp, Homo sapien
catactagacctgttgatgggacca

SEQ ID NO: 1690053 - DNA, 25 bp, Homo sapien
tgatatatatgacggtagggtggcc

SEQ ID NO: 1690054 - DNA, 25 bp, Homo sapien
tggcaaagcattgtcccaatttgtc

SEQ ID NO: 1690055 - DNA, 25 bp, Homo sapien
acaaagcagttctttggcaaagcat

SEQ ID NO: 1690056 - DNA, 25 bp, Homo sapien
ccaatttgtcagcatccaaacattc

SEQ ID NO: 1690057 - DNA, 25 bp, Homo sapien
gtcccaatttgtcagcatccaaaca

SEQ ID NO: 1690058 - DNA, 25 bp, Homo sapien
agagcagctgaaagctcaatcctgc

SEQ ID NO: 1690059 - DNA, 25 bp, Homo sapien
ctacagagcagctgaaagctcaatc

SEQ ID NO: 1690060 - DNA, 25 bp, Homo sapien
cagagcagctgaaagctcaatcctg

SEQ ID NO: 1690061 - DNA, 25 bp, Homo sapien
tacagagcagctgaaagctcaatcc

SEQ ID NO: 1690062 - DNA, 25 bp, Homo sapien
tcatcaaagtattcattgactaaaa

SEQ ID NO: 1690063 - DNA, 25 bp, Homo sapien
ttgaggcactatcatcaaagtattc

SEQ ID NO: 1690064 - DNA, 25 bp, Homo sapien
ttaaaaggcttattgaggcactatc

SEQ ID NO: 1690065 - DNA, 25 bp, Homo sapien
taaaatcagtgtgatgtcccaacat

SEQ ID NO: 1690066 - DNA, 25 bp, Homo sapien
tgataaatcggtatccatcctggtc

SEQ ID NO: 1690067 - DNA, 25 bp, Homo sapien
catcaaccatctctgacgtagtctt

SEQ ID NO: 1690068 - DNA, 25 bp, Homo sapien
caaccatctctgacgtagtctttct

SEQ ID NO: 1690069 - DNA, 25 bp, Homo sapien
ttcaaaattgataaatcggtatcca

SEQ ID NO: 1690070 - DNA, 25 bp, Homo sapien
taatcatttgtgcaaaagtcccagc

SEQ ID NO: 1690071 - DNA, 25 bp, Homo sapien
gaaggcaacaagtcctcttatggtg

SEQ ID NO: 1690072 - DNA, 25 bp, Homo sapien
gcccaggaggatgactaggacagaa

SEQ ID NO: 1690073 - DNA, 25 bp, Homo sapien
cagaggtattgttgcctatgtggcc

SEQ ID NO: 1690074 - DNA, 25 bp, Homo sapien
tcagttggacatcagaaaaactggc

SEQ ID NO: 1690075 - DNA, 25 bp, Homo sapien
gacagcctgcttatcagttgtgaga

SEQ ID NO: 1690076 - DNA, 25 bp, Homo sapien
gaagctatgataattgccaggagac

SEQ ID NO: 1690077 - DNA, 25 bp, Homo sapien
tacctattttgcaacagaagctatg

SEQ ID NO: 1690078 - DNA, 25 bp, Homo sapien
caagcaatcgagaaccagccacaga

SEQ ID NO: 1690079 - DNA, 25 bp, Homo sapien
ttaaggaatcaagcatcagggccat

SEQ ID NO: 1690080 - DNA, 25 bp, Homo sapien
cagagcctttaaggaatcaagcatc

SEQ ID NO: 1690081 - DNA, 25 bp, Homo sapien
agccacagagcctttaaggaatcaa

SEQ ID NO: 1690082 - DNA, 25 bp, Homo sapien
tcgccctgagctatttctactgcat

SEQ ID NO: 1690083 - DNA, 25 bp, Homo sapien
gccctgagctatttctactgcatcc

SEQ ID NO: 1690084 - DNA, 25 bp, Homo sapien
cctgagctatttctactgcatccat

SEQ ID NO: 1690085 - DNA, 25 bp, Homo sapien
ctcgccctgagctatttctactgca

SEQ ID NO: 1690086 - DNA, 25 bp, Homo sapien
gaaatagcaataataaataaaacta

SEQ ID NO: 1690087 - DNA, 25 bp, Homo sapien
ctacagaagaaatagcaataataaa

SEQ ID NO: 1690088 - DNA, 25 bp, Homo sapien
tacagaagaaatagcaataataaat

SEQ ID NO: 1690089 - DNA, 25 bp, Homo sapien
cagaagaaatagcaataataaataa

SEQ ID NO: 1690090 - DNA, 25 bp, Homo sapien
ttgccatggttgtcagaaattccga

SEQ ID NO: 1690091 - DNA, 25 bp, Homo sapien
gaaagcccatttggcaatcactgca

SEQ ID NO: 1690092 - DNA, 25 bp, Homo sapien
tccgagtgatcatgaattgtctcct

SEQ ID NO: 1690093 - DNA, 25 bp, Homo sapien
caatcactgcatgggagtcacttac

SEQ ID NO: 1690094 - DNA, 25 bp, Homo sapien
taaacggaaatgtacaatatttaga

SEQ ID NO: 1690095 - DNA, 25 bp, Homo sapien
atatccattgtgttgggccgggcgc

SEQ ID NO: 1690096 - DNA, 25 bp, Homo sapien
gactttataaatatccattgtgttg

SEQ ID NO: 1690097 - DNA, 25 bp, Homo sapien
tgtgatgataatctaaataaacgga

SEQ ID NO: 1690098 - DNA, 25 bp, Homo sapien
gagagtcactgacatagtcagccat

SEQ ID NO: 1690099 - DNA, 25 bp, Homo sapien
aaaatccagtataggctaccagtct

SEQ ID NO: 1690100 - DNA, 25 bp, Homo sapien
tcatatttaaagaagacgaagctgg

SEQ ID NO: 1690101 - DNA, 25 bp, Homo sapien
aaattgcagaggctgagtcagacac

SEQ ID NO: 1690102 - DNA, 25 bp, Homo sapien
caccaacaatgtagccagaatatcc

SEQ ID NO: 1690103 - DNA, 25 bp, Homo sapien
ccaggaaatgatggaagaggtatga

SEQ ID NO: 1690104 - DNA, 25 bp, Homo sapien
gatcatcgaatgtcaaatagtattg

SEQ ID NO: 1690105 - DNA, 25 bp, Homo sapien
tgaattataaagttccacatgggaa

SEQ ID NO: 1690106 - DNA, 25 bp, Homo sapien
gaacaaataccccagttgaatatga

SEQ ID NO: 1690107 - DNA, 25 bp, Homo sapien
taaagttaacagaggacagactgga

SEQ ID NO: 1690108 - DNA, 25 bp, Homo sapien
gcttgtgctagactcgacttcctca

SEQ ID NO: 1690109 - DNA, 25 bp, Homo sapien
cagactggagagttctagtccctgg

SEQ ID NO: 1690110 - DNA, 25 bp, Homo sapien
gaactgtgaactggcttgtgctaga

SEQ ID NO: 1690111 - DNA, 25 bp, Homo sapien
ccaaggaggaagagtttctcttagc

SEQ ID NO: 1690112 - DNA, 25 bp, Homo sapien
tgccactctaacaccaaggaggaag

SEQ ID NO: 1690113 - DNA, 25 bp, Homo sapien
ttctcttagcagtctgaaaagctgc

SEQ ID NO: 1690114 - DNA, 25 bp, Homo sapien
ggaggaagagtttctcttagcagtc

SEQ ID NO: 1690115 - DNA, 25 bp, Homo sapien
gacatatgcagaatggatggaccgt

SEQ ID NO: 1690116 - DNA, 25 bp, Homo sapien
tagatgcaccatagagaaacccaaa

SEQ ID NO: 1690117 - DNA, 25 bp, Homo sapien
gttgggccaagtcttatacctgagt

SEQ ID NO: 1690118 - DNA, 25 bp, Homo sapien
gccataaagcctcacaatgtggaca

SEQ ID NO: 1690119 - DNA, 25 bp, Homo sapien
tcagcaaatcaaggttaacaggcat

SEQ ID NO: 1690120 - DNA, 25 bp, Homo sapien
gaggacctagctttgccattcaatg

SEQ ID NO: 1690121 - DNA, 25 bp, Homo sapien
tattgcttggtgtatattacgtgcc

SEQ ID NO: 1690122 - DNA, 25 bp, Homo sapien
acaggcattggtgtagtggtcaacc

SEQ ID NO: 1690123 - DNA, 25 bp, Homo sapien
ctgagtgaagcatgtcccttctctt

SEQ ID NO: 1690124 - DNA, 25 bp, Homo sapien
atatacttggaagcctctatagctg

SEQ ID NO: 1690125 - DNA, 25 bp, Homo sapien
tacttggaagcctctatagctgcac

SEQ ID NO: 1690126 - DNA, 25 bp, Homo sapien
taatatacttggaagcctctatagc

SEQ ID NO: 1690127 - DNA, 25 bp, Homo sapien
cttaatatacttggaagcctctata

SEQ ID NO: 1690128 - DNA, 25 bp, Homo sapien
gacctggcaaaatgagttgggagat

SEQ ID NO: 1690129 - DNA, 25 bp, Homo sapien
tactgagtgagagctatcctgaact

SEQ ID NO: 1690130 - DNA, 25 bp, Homo sapien
tgtacaagccttggtggtggtaacc

SEQ ID NO: 1690131 - DNA, 25 bp, Homo sapien
tcagaacaaaactagatgacctggc

SEQ ID NO: 1690132 - DNA, 25 bp, Homo sapien
acatgactgaatgggtacagtattc

SEQ ID NO: 1690133 - DNA, 25 bp, Homo sapien
aatagcacactaattgcagataacc

SEQ ID NO: 1690134 - DNA, 25 bp, Homo sapien
tgtgtacacagagtaagcttcagtt

SEQ ID NO: 1690135 - DNA, 25 bp, Homo sapien
gaaagacagtatcaaactatggtag

SEQ ID NO: 1690136 - DNA, 25 bp, Homo sapien
gaaacttcacccagcaaaaaatgat

SEQ ID NO: 1690137 - DNA, 25 bp, Homo sapien
tttaactaggacatgcagaatcact

SEQ ID NO: 1690138 - DNA, 25 bp, Homo sapien
tgatgacacacaaaaacggtttctt

SEQ ID NO: 1690139 - DNA, 25 bp, Homo sapien
tactcattataaatgttggcctgtg

SEQ ID NO: 1690140 - DNA, 25 bp, Homo sapien
tgaggtttggttcacagggcacttt

SEQ ID NO: 1690141 - DNA, 25 bp, Homo sapien
cttgatgatctgaagagtcagaaag

SEQ ID NO: 1690142 - DNA, 25 bp, Homo sapien
gatgtgtatgcatcaaagcaatcta

SEQ ID NO: 1690143 - DNA, 25 bp, Homo sapien
caaagcaatctatttgagatgccac

SEQ ID NO: 1690144 - DNA, 25 bp, Homo sapien
cagtatagtgcctcattgacagtgt

SEQ ID NO: 1690145 - DNA, 25 bp, Homo sapien
tcagtatagtgcctcattgacagtg

SEQ ID NO: 1690146 - DNA, 25 bp, Homo sapien
gcttttacattactcagataacttg

SEQ ID NO: 1690147 - DNA, 25 bp, Homo sapien
cagtttatgagcttttacattactc

SEQ ID NO: 1690148 - DNA, 25 bp, Homo sapien
catgcgaatggctttaagctgaccc

SEQ ID NO: 1690149 - DNA, 25 bp, Homo sapien
gtcgaacccatccttgtaccctgaa

SEQ ID NO: 1690150 - DNA, 25 bp, Homo sapien
gcctttgcgggaacttgacagctaa

SEQ ID NO: 1690151 - DNA, 25 bp, Homo sapien
tgagcaaggattcctggctttggcc

SEQ ID NO: 1690152 - DNA, 25 bp, Homo sapien
tctaaaagctttttggcaacattca

SEQ ID NO: 1690153 - DNA, 25 bp, Homo sapien
ggtcataatcatatgtcccttctac

SEQ ID NO: 1690154 - DNA, 25 bp, Homo sapien
tatgaggtcataatcatatgtccct

SEQ ID NO: 1690155 - DNA, 25 bp, Homo sapien
ggcaacattcactcttttagaatat

SEQ ID NO: 1690156 - DNA, 25 bp, Homo sapien
cacaggagcaaggataaaatctgtt

SEQ ID NO: 1690157 - DNA, 25 bp, Homo sapien
ttgtgtgtaaaatcctgggcttccg

SEQ ID NO: 1690158 - DNA, 25 bp, Homo sapien
tgctgacttccctccataccattgg

SEQ ID NO: 1690159 - DNA, 25 bp, Homo sapien
ttctctctagcggagggtgacggcc

SEQ ID NO: 1690160 - DNA, 25 bp, Homo sapien
gcatacgatttagtccaatacagga

SEQ ID NO: 1690161 - DNA, 25 bp, Homo sapien
gacttatggtccttcgagtttggta

SEQ ID NO: 1690162 - DNA, 25 bp, Homo sapien
tacccggtttatatgtttactagca

SEQ ID NO: 1690163 - DNA, 25 bp, Homo sapien
tgtgcgtgctcatacaagtagatgc

SEQ ID NO: 1690164 - DNA, 25 bp, Homo sapien
tggttcaccgaaatcaagtacttat

SEQ ID NO: 1690165 - DNA, 25 bp, Homo sapien
catggttcaccgaaatcaagtactt

SEQ ID NO: 1690166 - DNA, 25 bp, Homo sapien
ccatggttcaccgaaatcaagtact

SEQ ID NO: 1690167 - DNA, 25 bp, Homo sapien
tccatggttcaccgaaatcaagtac

SEQ ID NO: 1690168 - DNA, 25 bp, Homo sapien
agcttctagtggttctacttgttct

SEQ ID NO: 1690169 - DNA, 25 bp, Homo sapien
ctatcgttccaaattgttcttggca

SEQ ID NO: 1690170 - DNA, 25 bp, Homo sapien
ggagagagacttgcccagtaaccac

SEQ ID NO: 1690171 - DNA, 25 bp, Homo sapien
tagatacttgatttaggagagagac

SEQ ID NO: 1690172 - DNA, 25 bp, Homo sapien
tgcccagtaaccactacagtgcttg

SEQ ID NO: 1690173 - DNA, 25 bp, Homo sapien
tggttcaaattcaagagaccatgaa

SEQ ID NO: 1690174 - DNA, 25 bp, Homo sapien
gaataagtcctccagaaattgttaa

SEQ ID NO: 1690175 - DNA, 25 bp, Homo sapien
aattgtcaacagaataagtcctcca

SEQ ID NO: 1690176 - DNA, 25 bp, Homo sapien
aaaattgtcaacagaataagtcctc

SEQ ID NO: 1690177 - DNA, 25 bp, Homo sapien
aaattgtcaacagaataagtcctcc

SEQ ID NO: 1690178 - DNA, 25 bp, Homo sapien
cgctctggaacagaatcatagggat

SEQ ID NO: 1690179 - DNA, 25 bp, Homo sapien
tctctacagtagatgataggacatc

SEQ ID NO: 1690180 - DNA, 25 bp, Homo sapien
tcttccattaagttgatctctacag

SEQ ID NO: 1690181 - DNA, 25 bp, Homo sapien
aattctggaaagacttgtacaggag

SEQ ID NO: 1690182 - DNA, 25 bp, Homo sapien
gggtcctggttgcaaactcattatt

SEQ ID NO: 1690183 - DNA, 25 bp, Homo sapien
ccagggaattcacctgctgacacag

SEQ ID NO: 1690184 - DNA, 25 bp, Homo sapien
cataaattccacagacgtgcactgc

SEQ ID NO: 1690185 - DNA, 25 bp, Homo sapien
acattgcaatgtcagatggtggagg

SEQ ID NO: 1690186 - DNA, 25 bp, Homo sapien
tcttcccttatatcattttgataat

SEQ ID NO: 1690187 - DNA, 25 bp, Homo sapien
attcttcccttatatcattttgata

SEQ ID NO: 1690188 - DNA, 25 bp, Homo sapien
ttcttcccttatatcattttgataa

SEQ ID NO: 1690189 - DNA, 25 bp, Homo sapien
ctggtagcaacaggacaagggatcc

SEQ ID NO: 1690190 - DNA, 25 bp, Homo sapien
ctgactgtgttatgagatgaaatcc

SEQ ID NO: 1690191 - DNA, 25 bp, Homo sapien
ccttcaagataacgggggagcgctc

SEQ ID NO: 1690192 - DNA, 25 bp, Homo sapien
tcattataattctatggctccagct

SEQ ID NO: 1690193 - DNA, 25 bp, Homo sapien
ttgaaaactgcagatgtgcacgtga

SEQ ID NO: 1690194 - DNA, 25 bp, Homo sapien
aaactgcagatgtgcacgtgaagcc

SEQ ID NO: 1690195 - DNA, 25 bp, Homo sapien
agatgtgcacgtgaagcctagaaga

SEQ ID NO: 1690196 - DNA, 25 bp, Homo sapien
tgcagatgtgcacgtgaagcctaga

SEQ ID NO: 1690197 - DNA, 25 bp, Homo sapien
tgttaaaaccaatccgtgaggaatc

SEQ ID NO: 1690198 - DNA, 25 bp, Homo sapien
taaaaccaatccgtgaggaatcatt

SEQ ID NO: 1690199 - DNA, 25 bp, Homo sapien
ccaatccgtgaggaatcattttcac

SEQ ID NO: 1690200 - DNA, 25 bp, Homo sapien
tgttgttaaaaccaatccgtgagga

SEQ ID NO: 1690201 - DNA, 25 bp, Homo sapien
ttcttcataaacaatcaaataaccc

SEQ ID NO: 1690202 - DNA, 25 bp, Homo sapien
cataaacaatcaaataacccataaa

SEQ ID NO: 1690203 - DNA, 25 bp, Homo sapien
tcctgtatgctccattctattatct

SEQ ID NO: 1690204 - DNA, 25 bp, Homo sapien
atttttcctgtatgctccattctat

SEQ ID NO: 1690205 - DNA, 25 bp, Homo sapien
ctgcaaggataatggggcctgtctg

SEQ ID NO: 1690206 - DNA, 25 bp, Homo sapien
gctgcaaggataatggggcctgtct

SEQ ID NO: 1690207 - DNA, 25 bp, Homo sapien
cttgctgcaaggataatggggcctg

SEQ ID NO: 1690208 - DNA, 25 bp, Homo sapien
tgctgcaaggataatggggcctgtc

SEQ ID NO: 1690209 - DNA, 25 bp, Homo sapien
tctggccacctgtgggtgaccagaa

SEQ ID NO: 1690210 - DNA, 25 bp, Homo sapien
ggccacctgtgggtgaccagaaaat

SEQ ID NO: 1690211 - DNA, 25 bp, Homo sapien
ccacctgtgggtgaccagaaaatta

SEQ ID NO: 1690212 - DNA, 25 bp, Homo sapien
cacctgtgggtgaccagaaaattac

SEQ ID NO: 1690213 - DNA, 25 bp, Homo sapien
aaatgcttacagaatcaacccactg

SEQ ID NO: 1690214 - DNA, 25 bp, Homo sapien
cagaatcaacccactgcttgctgac

SEQ ID NO: 1690215 - DNA, 25 bp, Homo sapien
tgcttacagaatcaacccactgctt

SEQ ID NO: 1690216 - DNA, 25 bp, Homo sapien
ttacagaatcaacccactgcttgct

SEQ ID NO: 1690217 - DNA, 25 bp, Homo sapien
ctgcagaaggcggccctgttctcag

SEQ ID NO: 1690218 - DNA, 25 bp, Homo sapien
tgcagaaggcggccctgttctcagc

SEQ ID NO: 1690219 - DNA, 25 bp, Homo sapien
cagatgatcatcaggataccggaga

SEQ ID NO: 1690220 - DNA, 25 bp, Homo sapien
aaattttccacgtacagtttcgctg

SEQ ID NO: 1690221 - DNA, 25 bp, Homo sapien
gatcatcaggataccggagatttgc

SEQ ID NO: 1690222 - DNA, 25 bp, Homo sapien
caagaaccagctgagcttgtgaaat

SEQ ID NO: 1690223 - DNA, 25 bp, Homo sapien
tgggtttcctcatggtccactgctc

SEQ ID NO: 1690224 - DNA, 25 bp, Homo sapien
cctgagctgggtttcctcatggtcc

SEQ ID NO: 1690225 - DNA, 25 bp, Homo sapien
gctgggtttcctcatggtccactgc

SEQ ID NO: 1690226 - DNA, 25 bp, Homo sapien
gagctgggtttcctcatggtccact

SEQ ID NO: 1690227 - DNA, 25 bp, Homo sapien
ctaagcttgttggaacttcaaattc

SEQ ID NO: 1690228 - DNA, 25 bp, Homo sapien
tgttggaacttcaaattccttgtat

SEQ ID NO: 1690229 - DNA, 25 bp, Homo sapien
aactgcatgcagttttacgtagccc

SEQ ID NO: 1690230 - DNA, 25 bp, Homo sapien
gcagttttacgtagcccttgagttc

SEQ ID NO: 1690231 - DNA, 25 bp, Homo sapien
ctggaactggagaactgctatagcc

SEQ ID NO: 1690232 - DNA, 25 bp, Homo sapien
tagcccgaagcaagggatatatcct

SEQ ID NO: 1690233 - DNA, 25 bp, Homo sapien
aatgaaagcagctaagcgttcccaa

SEQ ID NO: 1690234 - DNA, 25 bp, Homo sapien
taagcgttcccaatgcctgataggt

SEQ ID NO: 1690235 - DNA, 25 bp, Homo sapien
caaatgcattgccaacctcatgctc

SEQ ID NO: 1690236 - DNA, 25 bp, Homo sapien
aaatgcattgccaacctcatgctca

SEQ ID NO: 1690237 - DNA, 25 bp, Homo sapien
tgcattgccaacctcatgctcactc

SEQ ID NO: 1690238 - DNA, 25 bp, Homo sapien
aatgcattgccaacctcatgctcac

SEQ ID NO: 1690239 - DNA, 25 bp, Homo sapien
tggtctgttctagattgggatgatc

SEQ ID NO: 1690240 - DNA, 25 bp, Homo sapien
tagattgggatgatctagaatattc

SEQ ID NO: 1690241 - DNA, 25 bp, Homo sapien
tctagattgggatgatctagaatat

SEQ ID NO: 1690242 - DNA, 25 bp, Homo sapien
tctgttctagattgggatgatctag

SEQ ID NO: 1690243 - DNA, 25 bp, Homo sapien
caatgtcctacagattccaaggcat

SEQ ID NO: 1690244 - DNA, 25 bp, Homo sapien
tcaatgtcctacagattccaaggca

SEQ ID NO: 1690245 - DNA, 25 bp, Homo sapien
cactatcaaccctgttattgagaac

SEQ ID NO: 1690246 - DNA, 25 bp, Homo sapien
tatcactatcaaccctgttattgag

SEQ ID NO: 1690247 - DNA, 25 bp, Homo sapien
tttttatcactatcaaccctgttat

SEQ ID NO: 1690248 - DNA, 25 bp, Homo sapien
tttatcactatcaaccctgttattg

SEQ ID NO: 1690249 - DNA, 25 bp, Homo sapien
ttcttgtttagcaggagtattgcac

SEQ ID NO: 1690250 - DNA, 25 bp, Homo sapien
tttcttgtttagcaggagtattgca

SEQ ID NO: 1690251 - DNA, 25 bp, Homo sapien
ttgtttagcaggagtattgcacaat

SEQ ID NO: 1690252 - DNA, 25 bp, Homo sapien
tcttgtttagcaggagtattgcaca

SEQ ID NO: 1690253 - DNA, 25 bp, Homo sapien
tgtgaggctgatcaagggcatcgtg

SEQ ID NO: 1690254 - DNA, 25 bp, Homo sapien
taagtagtgaccaagagtgtcaggg

SEQ ID NO: 1690255 - DNA, 25 bp, Homo sapien
ctttaagtagtgaccaagagtgtca

SEQ ID NO: 1690256 - DNA, 25 bp, Homo sapien
cgtgggtcccgattacagataacct

SEQ ID NO: 1690257 - DNA, 25 bp, Homo sapien
tggtttgggtttattatatttgaca

SEQ ID NO: 1690258 - DNA, 25 bp, Homo sapien
ctaggagagttgctagctcacattt

SEQ ID NO: 1690259 - DNA, 25 bp, Homo sapien
ttcagcagctaagtacttcatcttg

SEQ ID NO: 1690260 - DNA, 25 bp, Homo sapien
ggtaccacattcgtatgaccaccaa

SEQ ID NO: 1690261 - DNA, 25 bp, Homo sapien
tagtatcggtctgctcaaatttttc

SEQ ID NO: 1690262 - DNA, 25 bp, Homo sapien
ctgtagtgtccagtcaggatgagca

SEQ ID NO: 1690263 - DNA, 25 bp, Homo sapien
tgtagtgtccagtcaggatgagcag

SEQ ID NO: 1690264 - DNA, 25 bp, Homo sapien
gattaagaacaataggttcagtcac

SEQ ID NO: 1690265 - DNA, 25 bp, Homo sapien
ctgctttagagcaaccagtctattg

SEQ ID NO: 1690266 - DNA, 25 bp, Homo sapien
acaataggttcagtcacaagtaaca

SEQ ID NO: 1690267 - DNA, 25 bp, Homo sapien
gctttagagcaaccagtctattgcc

SEQ ID NO: 1690268 - DNA, 25 bp, Homo sapien
agtgagatgttgggttatttttgca

SEQ ID NO: 1690269 - DNA, 25 bp, Homo sapien
ggttatttttgcatcattgatatca

SEQ ID NO: 1690270 - DNA, 25 bp, Homo sapien
tctatgtctaagatctcatctttct

SEQ ID NO: 1690271 - DNA, 25 bp, Homo sapien
tttttctatgtctaagatctcatct

SEQ ID NO: 1690272 - DNA, 25 bp, Homo sapien
ggataaacgccattcatcggacaaa

SEQ ID NO: 1690273 - DNA, 25 bp, Homo sapien
taaacgccattcatcggacaaacac

SEQ ID NO: 1690274 - DNA, 25 bp, Homo sapien
aacgccattcatcggacaaacacag

SEQ ID NO: 1690275 - DNA, 25 bp, Homo sapien
gtgaggataaacgccattcatcgga

SEQ ID NO: 1690276 - DNA, 25 bp, Homo sapien
gacaatgtgtcttctagagtcaggg

SEQ ID NO: 1690277 - DNA, 25 bp, Homo sapien
cttctagagtcagggtgcagttcat

SEQ ID NO: 1690278 - DNA, 25 bp, Homo sapien
tgtcttctagagtcagggtgcagtt

SEQ ID NO: 1690279 - DNA, 25 bp, Homo sapien
aatgtgtcttctagagtcagggtgc

SEQ ID NO: 1690280 - DNA, 25 bp, Homo sapien
agtaaaattgtgagcacccattgct

SEQ ID NO: 1690281 - DNA, 25 bp, Homo sapien
gggatggactctatcacggagcaag

SEQ ID NO: 1690282 - DNA, 25 bp, Homo sapien
tggactctatcacggagcaaggatg

SEQ ID NO: 1690283 - DNA, 25 bp, Homo sapien
aaagggatggactctatcacggagc

SEQ ID NO: 1690284 - DNA, 25 bp, Homo sapien
atatcttttaaatccgaatagttct

SEQ ID NO: 1690285 - DNA, 25 bp, Homo sapien
aggactaggctgatacttctgtgca

SEQ ID NO: 1690286 - DNA, 25 bp, Homo sapien
taagttagctaggtcgccctgttct

SEQ ID NO: 1690287 - DNA, 25 bp, Homo sapien
tgcaggtctgttaagttagctaggt

SEQ ID NO: 1690288 - DNA, 25 bp, Homo sapien
aagaggcctagccaggatgtgttca

SEQ ID NO: 1690289 - DNA, 25 bp, Homo sapien
attatctgtgaatttagttgggtta

SEQ ID NO: 1690290 - DNA, 25 bp, Homo sapien
ctttcatggtcattgagattcccaa

SEQ ID NO: 1690291 - DNA, 25 bp, Homo sapien
aatgctgcttaaacccaatgtccca

SEQ ID NO: 1690292 - DNA, 25 bp, Homo sapien
cttaaacccaatgtcccaagacctg

SEQ ID NO: 1690293 - DNA, 25 bp, Homo sapien
aacccaatgtcccaagacctgcttt

SEQ ID NO: 1690294 - DNA, 25 bp, Homo sapien
agatcttggatgtcacttatcacca

SEQ ID NO: 1690295 - DNA, 25 bp, Homo sapien
caaaaatctgtatcctatctgagtg

SEQ ID NO: 1690296 - DNA, 25 bp, Homo sapien
ttgaaatagtcccaaagatcttgga

SEQ ID NO: 1690297 - DNA, 25 bp, Homo sapien
taagcccattagaggcattcttcct

SEQ ID NO: 1690298 - DNA, 25 bp, Homo sapien
ggctctggaccatactgaaaagtac

SEQ ID NO: 1690299 - DNA, 25 bp, Homo sapien
agtacagagattgccctgcaggaag

SEQ ID NO: 1690300 - DNA, 25 bp, Homo sapien
ttcggtgtctgactcattgtaggtg

SEQ ID NO: 1690301 - DNA, 25 bp, Homo sapien
cagggtcgttttcggtgtctgactc

SEQ ID NO: 1690302 - DNA, 25 bp, Homo sapien
ggacggtgacagtcttaatcaaata

SEQ ID NO: 1690303 - DNA, 25 bp, Homo sapien
ttatctgtcttgtctggcgcctgca

SEQ ID NO: 1690304 - DNA, 25 bp, Homo sapien
ttaatggagaggctagccacagctc

SEQ ID NO: 1690305 - DNA, 25 bp, Homo sapien
taattgcaacgactgtggacggtga

SEQ ID NO: 1690306 - DNA, 25 bp, Homo sapien
ggcccagtcggacacccgatctctg

SEQ ID NO: 1690307 - DNA, 25 bp, Homo sapien
cagggctgttatgatcaaggattta

SEQ ID NO: 1690308 - DNA, 25 bp, Homo sapien
acacagtaaagatacatgaaggact

SEQ ID NO: 1690309 - DNA, 25 bp, Homo sapien
gatacatgaaggactgcttcagggc

SEQ ID NO: 1690310 - DNA, 25 bp, Homo sapien
cccaacgtgacggaagaagatgcta

SEQ ID NO: 1690311 - DNA, 25 bp, Homo sapien
cagggcatcccaacgtgacggaaga

SEQ ID NO: 1690312 - DNA, 25 bp, Homo sapien
ctgaaaagctgtaagactctgaaac

SEQ ID NO: 1690313 - DNA, 25 bp, Homo sapien
gaagatgctagttaaatgttggtcg

SEQ ID NO: 1690314 - DNA, 25 bp, Homo sapien
gctacttttgccgttgttatcagta

SEQ ID NO: 1690315 - DNA, 25 bp, Homo sapien
ttttgccgttgttatcagtatccaa

SEQ ID NO: 1690316 - DNA, 25 bp, Homo sapien
tacttttgccgttgttatcagtatc

SEQ ID NO: 1690317 - DNA, 25 bp, Homo sapien
ctgctacttttgccgttgttatcag

SEQ ID NO: 1690318 - DNA, 25 bp, Homo sapien
ccaaatcgccaagaccatcgatgct

SEQ ID NO: 1690319 - DNA, 25 bp, Homo sapien
gaaagttgtcaacaaattcccatac

SEQ ID NO: 1690320 - DNA, 25 bp, Homo sapien
ggaaagttgtcaacaaattcccata

SEQ ID NO: 1690321 - DNA, 25 bp, Homo sapien
gatggggaaagttgtcaacaaattc

SEQ ID NO: 1690322 - DNA, 25 bp, Homo sapien
cttgatggggaaagttgtcaacaaa

SEQ ID NO: 1690323 - DNA, 25 bp, Homo sapien
ttgtgcttgggactccttcggcgct

SEQ ID NO: 1690324 - DNA, 25 bp, Homo sapien
tgtgcttgggactccttcggcgctg

SEQ ID NO: 1690325 - DNA, 25 bp, Homo sapien
gcttgggactccttcggcgctgttt

SEQ ID NO: 1690326 - DNA, 25 bp, Homo sapien
ttgggactccttcggcgctgttttc

SEQ ID NO: 1690327 - DNA, 25 bp, Homo sapien
cactggccctttcgatgctgttgaa

SEQ ID NO: 1690328 - DNA, 25 bp, Homo sapien
aataatactcagatgcactggccct

SEQ ID NO: 1690329 - DNA, 25 bp, Homo sapien
tgtgccttccatgtatgccagcaag

SEQ ID NO: 1690330 - DNA, 25 bp, Homo sapien
cctttatgctgctgatatcgctgac

SEQ ID NO: 1690331 - DNA, 25 bp, Homo sapien
tctttccacggcatgtgtagctgct

SEQ ID NO: 1690332 - DNA, 25 bp, Homo sapien
tgtataacatcgttgctgcaggcca

SEQ ID NO: 1690333 - DNA, 25 bp, Homo sapien
aaattctgtgcgctgctttccatac

SEQ ID NO: 1690334 - DNA, 25 bp, Homo sapien
aaccgggcttggaaatgtgaataca

SEQ ID NO: 1690335 - DNA, 25 bp, Homo sapien
tacaaatccacatcgagttttccca

SEQ ID NO: 1690336 - DNA, 25 bp, Homo sapien
cattcagggaaatatacaaatccac

SEQ ID NO: 1690337 - DNA, 25 bp, Homo sapien
gggaaatatacaaatccacatcgag

SEQ ID NO: 1690338 - DNA, 25 bp, Homo sapien
tgacattcagggaaatatacaaatc

SEQ ID NO: 1690339 - DNA, 25 bp, Homo sapien
aacatatattcctctggtagacagc

SEQ ID NO: 1690340 - DNA, 25 bp, Homo sapien
ggcagcagcttctcttttaacaggc

SEQ ID NO: 1690341 - DNA, 25 bp, Homo sapien
tcaaacatatattcctctggtagac

SEQ ID NO: 1690342 - DNA, 25 bp, Homo sapien
atattcctctggtagacagcaggca

SEQ ID NO: 1690343 - DNA, 25 bp, Homo sapien
gctccaggttactaacataaatctg

SEQ ID NO: 1690344 - DNA, 25 bp, Homo sapien
tggatccaggctccaggttactaac

SEQ ID NO: 1690345 - DNA, 25 bp, Homo sapien
ctcaaaggctatggtgtaaggtttc

SEQ ID NO: 1690346 - DNA, 25 bp, Homo sapien
tctgtcagtctcaaaggctatggtg

SEQ ID NO: 1690347 - DNA, 25 bp, Homo sapien
ttgactgtggcgtgactcctccttt

SEQ ID NO: 1690348 - DNA, 25 bp, Homo sapien
ctttgtatgttcagttccatccagg

SEQ ID NO: 1690349 - DNA, 25 bp, Homo sapien
tcattaccagcagttaagctgggcg

SEQ ID NO: 1690350 - DNA, 25 bp, Homo sapien
cgtagtgtgccagaggcttaactca

SEQ ID NO: 1690351 - DNA, 25 bp, Homo sapien
cagggtcaagcccaaactctttagg

SEQ ID NO: 1690352 - DNA, 25 bp, Homo sapien
caaactctttaggataccagagaaa

SEQ ID NO: 1690353 - DNA, 25 bp, Homo sapien
ccagggtcaagcccaaactctttag

SEQ ID NO: 1690354 - DNA, 25 bp, Homo sapien
tccagggtcaagcccaaactcttta

SEQ ID NO: 1690355 - DNA, 25 bp, Homo sapien
tccattatctgaaaagaggaataat

SEQ ID NO: 1690356 - DNA, 25 bp, Homo sapien
gcaacggctactgctgttctcttct

SEQ ID NO: 1690357 - DNA, 25 bp, Homo sapien
caatatttctggcaacggctactgc

SEQ ID NO: 1690358 - DNA, 25 bp, Homo sapien
tgaaaagaggaataatacaatcacc

SEQ ID NO: 1690359 - DNA, 25 bp, Homo sapien
aacaagtgcagaagattcctgtggg

SEQ ID NO: 1690360 - DNA, 25 bp, Homo sapien
ttaagtctcttaaagttagtggaga

SEQ ID NO: 1690361 - DNA, 25 bp, Homo sapien
cacatctttgagacacgggactggt

SEQ ID NO: 1690362 - DNA, 25 bp, Homo sapien
tcagttagaaggatagatgccaaaa

SEQ ID NO: 1690363 - DNA, 25 bp, Homo sapien
caagcatggttacagcctcccacct

SEQ ID NO: 1690364 - DNA, 25 bp, Homo sapien
atcaagcatggttacagcctcccac

SEQ ID NO: 1690365 - DNA, 25 bp, Homo sapien
aatcaagcatggttacagcctccca

SEQ ID NO: 1690366 - DNA, 25 bp, Homo sapien
aaatcaagcatggttacagcctccc

SEQ ID NO: 1690367 - DNA, 25 bp, Homo sapien
ctgcaaccaggctgaatggtgcata

SEQ ID NO: 1690368 - DNA, 25 bp, Homo sapien
gaatggtgcatattggactggaacc

SEQ ID NO: 1690369 - DNA, 25 bp, Homo sapien
ccaggctgaatggtgcatattggac

SEQ ID NO: 1690370 - DNA, 25 bp, Homo sapien
gctgaatggtgcatattggactgga

SEQ ID NO: 1690371 - DNA, 25 bp, Homo sapien
tctgaaagttgcttcataggatccc

SEQ ID NO: 1690372 - DNA, 25 bp, Homo sapien
cagtttgtttgactgttagagttga

SEQ ID NO: 1690373 - DNA, 25 bp, Homo sapien
cggcattaggcactaattcagtttg

SEQ ID NO: 1690374 - DNA, 25 bp, Homo sapien
tgtttgactgttagagttgatcctc

SEQ ID NO: 1690375 - DNA, 25 bp, Homo sapien
aagtccagagagtgctctggtttcg

SEQ ID NO: 1690376 - DNA, 25 bp, Homo sapien
ttgaggactaagtggctgcccagtc

SEQ ID NO: 1690377 - DNA, 25 bp, Homo sapien
gtgttccccgggtgtggcccactca

SEQ ID NO: 1690378 - DNA, 25 bp, Homo sapien
gacaactgtctatggtttcgatgat

SEQ ID NO: 1690379 - DNA, 25 bp, Homo sapien
tgcccagtctgaaggaccttggaga

SEQ ID NO: 1690380 - DNA, 25 bp, Homo sapien
tgaatgcccatttgaccatcatcgt

SEQ ID NO: 1690381 - DNA, 25 bp, Homo sapien
tcaggcatacacaacccaggagtgg

SEQ ID NO: 1690382 - DNA, 25 bp, Homo sapien
caggagtggaggagtgtgaatgccc

SEQ ID NO: 1690383 - DNA, 25 bp, Homo sapien
caaatgatgggagacagcagataaa

SEQ ID NO: 1690384 - DNA, 25 bp, Homo sapien
ctagtcttgcacaggtatatgtggg

SEQ ID NO: 1690385 - DNA, 25 bp, Homo sapien
tatcgagctgctggaattgctgact

SEQ ID NO: 1690386 - DNA, 25 bp, Homo sapien
gctccacactgaaagggttgagagt

SEQ ID NO: 1690387 - DNA, 25 bp, Homo sapien
cctttaagctgcaatccaaatgtgg

SEQ ID NO: 1690388 - DNA, 25 bp, Homo sapien
gggtgactctatcaacgagaccttt

SEQ ID NO: 1690389 - DNA, 25 bp, Homo sapien
gatggatgcttgttcatactgttgg

SEQ ID NO: 1690390 - DNA, 25 bp, Homo sapien
tggtctcaataatagaactgtggtt

SEQ ID NO: 1690391 - DNA, 25 bp, Homo sapien
cgacttggatagtctgctgaggaaa

SEQ ID NO: 1690392 - DNA, 25 bp, Homo sapien
gaaattcaatcagaaatggtctcaa

SEQ ID NO: 1690393 - DNA, 25 bp, Homo sapien
gatttagtactgtgaaaccaggagg

SEQ ID NO: 1690394 - DNA, 25 bp, Homo sapien
aagcactgcgtgtatcaatttgtcg

SEQ ID NO: 1690395 - DNA, 25 bp, Homo sapien
tcactcattagaaggactccatcca

SEQ ID NO: 1690396 - DNA, 25 bp, Homo sapien
tgtttacctttcagtggcatcatct

SEQ ID NO: 1690397 - DNA, 25 bp, Homo sapien
atttggattggtaaattcctccctg

SEQ ID NO: 1690398 - DNA, 25 bp, Homo sapien
tttggattggtaaattcctccctga

SEQ ID NO: 1690399 - DNA, 25 bp, Homo sapien
ttggattggtaaattcctccctgag

SEQ ID NO: 1690400 - DNA, 25 bp, Homo sapien
gaagatttggattggtaaattcctc

SEQ ID NO: 1690401 - DNA, 25 bp, Homo sapien
gcactggtatattcatccctgatat

SEQ ID NO: 1690402 - DNA, 25 bp, Homo sapien
tcaaacattagcacctagagggctc

SEQ ID NO: 1690403 - DNA, 25 bp, Homo sapien
tataatagacactttggtgcactgg

SEQ ID NO: 1690404 - DNA, 25 bp, Homo sapien
tctgtctacataagagcagttgagt

SEQ ID NO: 1690405 - DNA, 25 bp, Homo sapien
aagtagtaaaacacaggctctctga

SEQ ID NO: 1690406 - DNA, 25 bp, Homo sapien
tgtccagagtacacaagggaagttg

SEQ ID NO: 1690407 - DNA, 25 bp, Homo sapien
ccagaagaacaagcattgttatgaa

SEQ ID NO: 1690408 - DNA, 25 bp, Homo sapien
attaaagtagtaaaacacaggctct

SEQ ID NO: 1690409 - DNA, 25 bp, Homo sapien
accatcactgtcggcaaactaacag

SEQ ID NO: 1690410 - DNA, 25 bp, Homo sapien
tcattctactgtaatgacacacaca

SEQ ID NO: 1690411 - DNA, 25 bp, Homo sapien
atcactgtcggcaaactaacagagg

SEQ ID NO: 1690412 - DNA, 25 bp, Homo sapien
atcattctactgtaatgacacacac

SEQ ID NO: 1690413 - DNA, 25 bp, Homo sapien
tagacacaaacattcccaatacagt

SEQ ID NO: 1690414 - DNA, 25 bp, Homo sapien
ggcacgtgattatactgtttgatgc

SEQ ID NO: 1690415 - DNA, 25 bp, Homo sapien
tatttgacaagctttaatcccattc

SEQ ID NO: 1690416 - DNA, 25 bp, Homo sapien
gagtaatacactaaaactaagtgga

SEQ ID NO: 1690417 - DNA, 25 bp, Homo sapien
ccactagaagagttttagaaaagat

SEQ ID NO: 1690418 - DNA, 25 bp, Homo sapien
tcttcagtaccagtccaactgatat

SEQ ID NO: 1690419 - DNA, 25 bp, Homo sapien
gatatttagagctgccactagaaga

SEQ ID NO: 1690420 - DNA, 25 bp, Homo sapien
cttcagtaccagtccaactgatatt

SEQ ID NO: 1690421 - DNA, 25 bp, Homo sapien
agagctggtgtgcttagttctgctt

SEQ ID NO: 1690422 - DNA, 25 bp, Homo sapien
tgattagaacctttctgagaaagag

SEQ ID NO: 1690423 - DNA, 25 bp, Homo sapien
gaatcaatcgcttgattagaacctt

SEQ ID NO: 1690424 - DNA, 25 bp, Homo sapien
gtgtgcttagttctgcttctcccac

SEQ ID NO: 1690425 - DNA, 25 bp, Homo sapien
caaggtgctactgacttcagtaacc

SEQ ID NO: 1690426 - DNA, 25 bp, Homo sapien
ccaaggtgctactgacttcagtaac

SEQ ID NO: 1690427 - DNA, 25 bp, Homo sapien
cagcattccattcaccctcaaaact

SEQ ID NO: 1690428 - DNA, 25 bp, Homo sapien
attccattcaccctcaaaactctcc

SEQ ID NO: 1690429 - DNA, 25 bp, Homo sapien
ctcagcattccattcaccctcaaaa

SEQ ID NO: 1690430 - DNA, 25 bp, Homo sapien
tccattcaccctcaaaactctccat

SEQ ID NO: 1690431 - DNA, 25 bp, Homo sapien
acttggtatcttcttgtcggcgtac

SEQ ID NO: 1690432 - DNA, 25 bp, Homo sapien
aacaggatagcctgagatacacttg

SEQ ID NO: 1690433 - DNA, 25 bp, Homo sapien
caggatagcctgagatacacttggt

SEQ ID NO: 1690434 - DNA, 25 bp, Homo sapien
ggcgtaccttgttccataggctatg

SEQ ID NO: 1690435 - DNA, 25 bp, Homo sapien
tctttgtcacatgtttatataatct

SEQ ID NO: 1690436 - DNA, 25 bp, Homo sapien
attgaaacaatatataatcttgagg

SEQ ID NO: 1690437 - DNA, 25 bp, Homo sapien
atcttgaggattccttctttgtcac

SEQ ID NO: 1690438 - DNA, 25 bp, Homo sapien
tgtcctgccacttttattgaaacaa

SEQ ID NO: 1690439 - DNA, 25 bp, Homo sapien
tgaaaactgtaactgaaatctcggt

SEQ ID NO: 1690440 - DNA, 25 bp, Homo sapien
aacccgaaacagctaaagccaactg

SEQ ID NO: 1690441 - DNA, 25 bp, Homo sapien
gaaatctcggtacctgaaactgggc

SEQ ID NO: 1690442 - DNA, 25 bp, Homo sapien
cgaaacagctaaagccaactgaaaa

SEQ ID NO: 1690443 - DNA, 25 bp, Homo sapien
tagacagataattgatctcagcgtc

SEQ ID NO: 1690444 - DNA, 25 bp, Homo sapien
ggaatagacagataattgatctcag

SEQ ID NO: 1690445 - DNA, 25 bp, Homo sapien
gtaggaatagacagataattgatct

SEQ ID NO: 1690446 - DNA, 25 bp, Homo sapien
ctggagtaggaatagacagataatt

SEQ ID NO: 1690447 - DNA, 25 bp, Homo sapien
tactggacgaagatacttcagtttg

SEQ ID NO: 1690448 - DNA, 25 bp, Homo sapien
ctaactactggacgaagatacttca

SEQ ID NO: 1690449 - DNA, 25 bp, Homo sapien
aactactggacgaagatacttcagt

SEQ ID NO: 1690450 - DNA, 25 bp, Homo sapien
ctggacgaagatacttcagtttgct

SEQ ID NO: 1690451 - DNA, 25 bp, Homo sapien
tatcagtgaggacattaaaacctag

SEQ ID NO: 1690452 - DNA, 25 bp, Homo sapien
atttaatcgtgacaattggagtggc

SEQ ID NO: 1690453 - DNA, 25 bp, Homo sapien
tattagacatggatttcgccaggaa

SEQ ID NO: 1690454 - DNA, 25 bp, Homo sapien
ctcatagatgacttgacttgctacg

SEQ ID NO: 1690455 - DNA, 25 bp, Homo sapien
gtgacagcagtaattcctcttacaa

SEQ ID NO: 1690456 - DNA, 25 bp, Homo sapien
gctaacgcattagcattcacggtaa

SEQ ID NO: 1690457 - DNA, 25 bp, Homo sapien
ttcacggtaatttctgccattagac

SEQ ID NO: 1690458 - DNA, 25 bp, Homo sapien
actgccgtgcaccatgacggtctct

SEQ ID NO: 1690459 - DNA, 25 bp, Homo sapien
gaagatgtccagcagttcccaagaa

SEQ ID NO: 1690460 - DNA, 25 bp, Homo sapien
tgccagatggatctcttaggtccga

SEQ ID NO: 1690461 - DNA, 25 bp, Homo sapien
ccgatttccttgacatttatgtgca

SEQ ID NO: 1690462 - DNA, 25 bp, Homo sapien
ctgcatttttgctcatagtggaaga

SEQ ID NO: 1690463 - DNA, 25 bp, Homo sapien
aaggtccaagctgaccaccaactcc

SEQ ID NO: 1690464 - DNA, 25 bp, Homo sapien
ggtccaagctgaccaccaactccag

SEQ ID NO: 1690465 - DNA, 25 bp, Homo sapien
tccataagggatgccaaggtccaag

SEQ ID NO: 1690466 - DNA, 25 bp, Homo sapien
ttccataagggatgccaaggtccaa

SEQ ID NO: 1690467 - DNA, 25 bp, Homo sapien
tgtggcctctctccgttgcaattgc

SEQ ID NO: 1690468 - DNA, 25 bp, Homo sapien
gtgagcccaaagatgctgcagattc

SEQ ID NO: 1690469 - DNA, 25 bp, Homo sapien
gctgttcccattctctgtgagccca

SEQ ID NO: 1690470 - DNA, 25 bp, Homo sapien
tgttgctttgcacccttgtgtaggg

SEQ ID NO: 1690471 - DNA, 25 bp, Homo sapien
tcttgccaactaccaccaatagtag

SEQ ID NO: 1690472 - DNA, 25 bp, Homo sapien
gcatgtggctaacctcccttctgat

SEQ ID NO: 1690473 - DNA, 25 bp, Homo sapien
ttctgatcacaggtggcaatgtcct

SEQ ID NO: 1690474 - DNA, 25 bp, Homo sapien
ccttttatgctttgggttagcctga

SEQ ID NO: 1690475 - DNA, 25 bp, Homo sapien
gtaatgtgccaagcaagttcttcca

SEQ ID NO: 1690476 - DNA, 25 bp, Homo sapien
catggccttgtcaaactgtcctttc

SEQ ID NO: 1690477 - DNA, 25 bp, Homo sapien
aacctcaagataggacgtaatgtgc

SEQ ID NO: 1690478 - DNA, 25 bp, Homo sapien
gcaacatttccctgacatggccttg

SEQ ID NO: 1690479 - DNA, 25 bp, Homo sapien
gagtctgtccttgacccatgaggtt

SEQ ID NO: 1690480 - DNA, 25 bp, Homo sapien
agagtctgtccttgacccatgaggt

SEQ ID NO: 1690481 - DNA, 25 bp, Homo sapien
gtctgtccttgacccatgaggttcc

SEQ ID NO: 1690482 - DNA, 25 bp, Homo sapien
ctgtccttgacccatgaggttcctt

SEQ ID NO: 1690483 - DNA, 25 bp, Homo sapien
ggcaatatttccagtcaaatcacac

SEQ ID NO: 1690484 - DNA, 25 bp, Homo sapien
cgtcgtacgttcaagtgttttgctg

SEQ ID NO: 1690485 - DNA, 25 bp, Homo sapien
tcagtacacaaacaccgtaacagca

SEQ ID NO: 1690486 - DNA, 25 bp, Homo sapien
atcactgctgaaacacaacgtcgta

SEQ ID NO: 1690487 - DNA, 25 bp, Homo sapien
ccttctggcaggatctcagtggtgg

SEQ ID NO: 1690488 - DNA, 25 bp, Homo sapien
ttcaggctttgtgtagattgaccct

SEQ ID NO: 1690489 - DNA, 25 bp, Homo sapien
cagttgaagctgttgttcctatcat

SEQ ID NO: 1690490 - DNA, 25 bp, Homo sapien
cctctaattttccatgggacttctt

SEQ ID NO: 1690491 - DNA, 25 bp, Homo sapien
tcttagctctttcaacactgaccct

SEQ ID NO: 1690492 - DNA, 25 bp, Homo sapien
caactgtcagtgtggattgacctac

SEQ ID NO: 1690493 - DNA, 25 bp, Homo sapien
tttgcctcggtaacatacagtaaag

SEQ ID NO: 1690494 - DNA, 25 bp, Homo sapien
tgacctacttctcaatttgcctcgg

SEQ ID NO: 1690495 - DNA, 25 bp, Homo sapien
tcaccaagatagagtctgtgcgggc

SEQ ID NO: 1690496 - DNA, 25 bp, Homo sapien
tctacatatcttagaagagggtgca

SEQ ID NO: 1690497 - DNA, 25 bp, Homo sapien
ggtggtcaccggtcttcttgctgag

SEQ ID NO: 1690498 - DNA, 25 bp, Homo sapien
ggtgcagccaccgtgccaattatgc

SEQ ID NO: 1690499 - DNA, 25 bp, Homo sapien
gaatgcccagagcttcttgttacca

SEQ ID NO: 1690500 - DNA, 25 bp, Homo sapien
gcatattaatagcacaacaacaaga

SEQ ID NO: 1690501 - DNA, 25 bp, Homo sapien
atctcttgagttttgcctcataatg

SEQ ID NO: 1690502 - DNA, 25 bp, Homo sapien
caagactatcaatttgtgccttatc

SEQ ID NO: 1690503 - DNA, 25 bp, Homo sapien
tagacagtgagttaaggtatggcct

SEQ ID NO: 1690504 - DNA, 25 bp, Homo sapien
tgaccattgtgccataagacttcca

SEQ ID NO: 1690505 - DNA, 25 bp, Homo sapien
tatggccttctaagtcagaaagccc

SEQ ID NO: 1690506 - DNA, 25 bp, Homo sapien
agcagggcacctcttatttcatagc

SEQ ID NO: 1690507 - DNA, 25 bp, Homo sapien
tggcactgcacccaacgaaatattg

SEQ ID NO: 1690508 - DNA, 25 bp, Homo sapien
tggaagctgccattctgaagaaaca

SEQ ID NO: 1690509 - DNA, 25 bp, Homo sapien
tcctggagtcttaggtcagtgctca

SEQ ID NO: 1690510 - DNA, 25 bp, Homo sapien
ctggattcgtgttcaatgagcgctg

SEQ ID NO: 1690511 - DNA, 25 bp, Homo sapien
ccagggttctgtaagcctctctcat

SEQ ID NO: 1690512 - DNA, 25 bp, Homo sapien
acttccacagttctgcgagtctgca

SEQ ID NO: 1690513 - DNA, 25 bp, Homo sapien
tctgcaaggctgtaaatgttgctgg

SEQ ID NO: 1690514 - DNA, 25 bp, Homo sapien
ctgccccagaattccaaactttact

SEQ ID NO: 1690515 - DNA, 25 bp, Homo sapien
aaaagatgaaagctcgtccttcttg

SEQ ID NO: 1690516 - DNA, 25 bp, Homo sapien
tcacattgtctcatctattccccag

SEQ ID NO: 1690517 - DNA, 25 bp, Homo sapien
agctcgtccttcttggaccttgtga

SEQ ID NO: 1690518 - DNA, 25 bp, Homo sapien
cacattgtctcatctattccccaga

SEQ ID NO: 1690519 - DNA, 25 bp, Homo sapien
tgtatctcctatgaggccagcagga

SEQ ID NO: 1690520 - DNA, 25 bp, Homo sapien
gtgttggtttccccgatgcactttc

SEQ ID NO: 1690521 - DNA, 25 bp, Homo sapien
gagtttcactattactcaatgactc

SEQ ID NO: 1690522 - DNA, 25 bp, Homo sapien
ttcctgagtttcactattactcaat

SEQ ID NO: 1690523 - DNA, 25 bp, Homo sapien
tgtgttggtttccccgatgcacttt

SEQ ID NO: 1690524 - DNA, 25 bp, Homo sapien
tgtgcagccctttgttagcacaaac

SEQ ID NO: 1690525 - DNA, 25 bp, Homo sapien
ggttactgtattagacagggcaggt

SEQ ID NO: 1690526 - DNA, 25 bp, Homo sapien
gataattcttgggatcaatgccagt

SEQ ID NO: 1690527 - DNA, 25 bp, Homo sapien
tttggacaatgctcttgcctgtgag

SEQ ID NO: 1690528 - DNA, 25 bp, Homo sapien
gaaatccctaaattcatatgcagca

SEQ ID NO: 1690529 - DNA, 25 bp, Homo sapien
gtgtattggcaattccgtggctggc

SEQ ID NO: 1690530 - DNA, 25 bp, Homo sapien
cgtggctggcatcgcttgcggctat

SEQ ID NO: 1690531 - DNA, 25 bp, Homo sapien
ttttctgccattgcttgacttgtca

SEQ ID NO: 1690532 - DNA, 25 bp, Homo sapien
gcagctttccaatgggccaggtcag

SEQ ID NO: 1690533 - DNA, 25 bp, Homo sapien
gaatacctctcgacatctgcagctg

SEQ ID NO: 1690534 - DNA, 25 bp, Homo sapien
taatgccaggtgaacttccaaaagg

SEQ ID NO: 1690535 - DNA, 25 bp, Homo sapien
tccttctggcagagtcgaatacctc

SEQ ID NO: 1690536 - DNA, 25 bp, Homo sapien
tttgcttgaatctgtaaccatggac

SEQ ID NO: 1690537 - DNA, 25 bp, Homo sapien
tctgtaaccatggacttctggagat

SEQ ID NO: 1690538 - DNA, 25 bp, Homo sapien
gtaaccatggacttctggagatttt

SEQ ID NO: 1690539 - DNA, 25 bp, Homo sapien
tgaatctgtaaccatggacttctgg

SEQ ID NO: 1690540 - DNA, 25 bp, Homo sapien
gcaagtcatggttaattattacaca

SEQ ID NO: 1690541 - DNA, 25 bp, Homo sapien
tacacaagccaaaatcatgttccct

SEQ ID NO: 1690542 - DNA, 25 bp, Homo sapien
tgtgaaattcatgcaagtcatggtt

SEQ ID NO: 1690543 - DNA, 25 bp, Homo sapien
gctcttttctacagctggtcttatg

SEQ ID NO: 1690544 - DNA, 25 bp, Homo sapien
cacagtgttatccccgagccgtttt

SEQ ID NO: 1690545 - DNA, 25 bp, Homo sapien
ccacagtgttatccccgagccgttt

SEQ ID NO: 1690546 - DNA, 25 bp, Homo sapien
gccacagtgttatccccgagccgtt

SEQ ID NO: 1690547 - DNA, 25 bp, Homo sapien
ggccacagtgttatccccgagccgt

SEQ ID NO: 1690548 - DNA, 25 bp, Homo sapien
aatctctagtggcccagagaatgca

SEQ ID NO: 1690549 - DNA, 25 bp, Homo sapien
ctacagctgcagcattgctaagaat

SEQ ID NO: 1690550 - DNA, 25 bp, Homo sapien
gcattgctaagaatactgttttccc

SEQ ID NO: 1690551 - DNA, 25 bp, Homo sapien
ccttgaagaatctctagtggcccag

SEQ ID NO: 1690552 - DNA, 25 bp, Homo sapien
catgagcagtagagtatccagcagc

SEQ ID NO: 1690553 - DNA, 25 bp, Homo sapien
cgtgcatgagcagtagagtatccag

SEQ ID NO: 1690554 - DNA, 25 bp, Homo sapien
acttcgtgcatgagcagtagagtat

SEQ ID NO: 1690555 - DNA, 25 bp, Homo sapien
tttggagttttacttcgtgcatgag

SEQ ID NO: 1690556 - DNA, 25 bp, Homo sapien
ccaatactctcttaacatgtgaact

SEQ ID NO: 1690557 - DNA, 25 bp, Homo sapien
gaactaccattcagaagtgctggca

SEQ ID NO: 1690558 - DNA, 25 bp, Homo sapien
taacatgtgaactaccattcagaag

SEQ ID NO: 1690559 - DNA, 25 bp, Homo sapien
tactctcttaacatgtgaactacca

SEQ ID NO: 1690560 - DNA, 25 bp, Homo sapien
tgagcaaatggctctcacatcctcc

SEQ ID NO: 1690561 - DNA, 25 bp, Homo sapien
gacgcattattccataacggtggga

SEQ ID NO: 1690562 - DNA, 25 bp, Homo sapien
ccataacggtgggatatttctacca

SEQ ID NO: 1690563 - DNA, 25 bp, Homo sapien
tctcacatcctcctagacgcattat

SEQ ID NO: 1690564 - DNA, 25 bp, Homo sapien
gaagcctatcagtaatgaatatgag

SEQ ID NO: 1690565 - DNA, 25 bp, Homo sapien
atctgaagcctatcagtaatgaata

SEQ ID NO: 1690566 - DNA, 25 bp, Homo sapien
cctatcagtaatgaatatgagtgac

SEQ ID NO: 1690567 - DNA, 25 bp, Homo sapien
taaatctgaagcctatcagtaatga

SEQ ID NO: 1690568 - DNA, 25 bp, Homo sapien
tgaaggctgccatcatatgtttatc

SEQ ID NO: 1690569 - DNA, 25 bp, Homo sapien
cagcaagtctaagtacaactggttg

SEQ ID NO: 1690570 - DNA, 25 bp, Homo sapien
gacagccattgagtaaacaacatat

SEQ ID NO: 1690571 - DNA, 25 bp, Homo sapien
caactggttgaatgacaacattcag

SEQ ID NO: 1690572 - DNA, 25 bp, Homo sapien
ccttgccatgagattcttgtagaaa

SEQ ID NO: 1690573 - DNA, 25 bp, Homo sapien
cttgccatgagattcttgtagaaaa

SEQ ID NO: 1690574 - DNA, 25 bp, Homo sapien
tccttgccatgagattcttgtagaa

SEQ ID NO: 1690575 - DNA, 25 bp, Homo sapien
agagcgcaggaccagccagatcccg

SEQ ID NO: 1690576 - DNA, 25 bp, Homo sapien
gcagagcgcaggaccagccagatcc

SEQ ID NO: 1690577 - DNA, 25 bp, Homo sapien
tggaagcagagcgcaggaccagcca

SEQ ID NO: 1690578 - DNA, 25 bp, Homo sapien
aagcagagcgcaggaccagccagat

SEQ ID NO: 1690579 - DNA, 25 bp, Homo sapien
agtggccctgtcttggccggccctg

SEQ ID NO: 1690580 - DNA, 25 bp, Homo sapien
ctgtcccctgggttacagggccaga

SEQ ID NO: 1690581 - DNA, 25 bp, Homo sapien
caggtgctggctggcacccagtggc

SEQ ID NO: 1690582 - DNA, 25 bp, Homo sapien
cctgtcccctgggttacagggccag

SEQ ID NO: 1690583 - DNA, 25 bp, Homo sapien
tgagttgcccattttgagcgagttg

SEQ ID NO: 1690584 - DNA, 25 bp, Homo sapien
tgagcgagttgtgcacagacgaaac

SEQ ID NO: 1690585 - DNA, 25 bp, Homo sapien
tgcacagacgaaactaagggtcaga

SEQ ID NO: 1690586 - DNA, 25 bp, Homo sapien
cattttgagcgagttgtgcacagac

SEQ ID NO: 1690587 - DNA, 25 bp, Homo sapien
agatgccccgggcaggcacgggtgc

SEQ ID NO: 1690588 - DNA, 25 bp, Homo sapien
gaatggccccagatgccccgggcag

SEQ ID NO: 1690589 - DNA, 25 bp, Homo sapien
gggaatggccccagatgccccgggc

SEQ ID NO: 1690590 - DNA, 25 bp, Homo sapien
aggagtggggaatggccccagatgc

SEQ ID NO: 1690591 - DNA, 25 bp, Homo sapien
agacacagcctcataagggcgccgt

SEQ ID NO: 1690592 - DNA, 25 bp, Homo sapien
tcataagggcgccgtcccagctgac

SEQ ID NO: 1690593 - DNA, 25 bp, Homo sapien
gcaggactctgtggggtgtccgtgt

SEQ ID NO: 1690594 - DNA, 25 bp, Homo sapien
tccgtgttccaagggataagacaca

SEQ ID NO: 1690595 - DNA, 25 bp, Homo sapien
catcatggagttacgagcagatagc

SEQ ID NO: 1690596 - DNA, 25 bp, Homo sapien
tcatggagttacgagcagatagcac

SEQ ID NO: 1690597 - DNA, 25 bp, Homo sapien
atggagttacgagcagatagcacgg

SEQ ID NO: 1690598 - DNA, 25 bp, Homo sapien
aacatcatggagttacgagcagata

SEQ ID NO: 1690599 - DNA, 25 bp, Homo sapien
ttcttttgcggggcctgtggccggc

SEQ ID NO: 1690600 - DNA, 25 bp, Homo sapien
cttttgcggggcctgtggccggcag

SEQ ID NO: 1690601 - DNA, 25 bp, Homo sapien
tttgcggggcctgtggccggcagct

SEQ ID NO: 1690602 - DNA, 25 bp, Homo sapien
acagttttcttttgcggggcctgtg

SEQ ID NO: 1690603 - DNA, 25 bp, Homo sapien
agatagacatggaagcttagctggt

SEQ ID NO: 1690604 - DNA, 25 bp, Homo sapien
agctggtgggggcccctcgtctcta

SEQ ID NO: 1690605 - DNA, 25 bp, Homo sapien
aagcttagctggtgggggcccctcg

SEQ ID NO: 1690606 - DNA, 25 bp, Homo sapien
ttagctggtgggggcccctcgtctc

SEQ ID NO: 1690607 - DNA, 25 bp, Homo sapien
tggtacaggcgctttacgaggctcc

SEQ ID NO: 1690608 - DNA, 25 bp, Homo sapien
cagcgtatggaaggaagcggctaac

SEQ ID NO: 1690609 - DNA, 25 bp, Homo sapien
taactatggcgactgccacggagca

SEQ ID NO: 1690610 - DNA, 25 bp, Homo sapien
tactttccaaacagggcggcagctg

SEQ ID NO: 1690611 - DNA, 25 bp, Homo sapien
aggagtgcaattgcttggttgtgtg

SEQ ID NO: 1690612 - DNA, 25 bp, Homo sapien
gcttggttgtgtgatatcacttgct

SEQ ID NO: 1690613 - DNA, 25 bp, Homo sapien
tacattcttaccaacaatttatgta

SEQ ID NO: 1690614 - DNA, 25 bp, Homo sapien
cattcttaccaacaatttatgtatt

SEQ ID NO: 1690615 - DNA, 25 bp, Homo sapien
aaagggagatcaggcacggagggag

SEQ ID NO: 1690616 - DNA, 25 bp, Homo sapien
gcaaagggagatcaggcacggaggg

SEQ ID NO: 1690617 - DNA, 25 bp, Homo sapien
gggagatcaggcacggagggaggct

SEQ ID NO: 1690618 - DNA, 25 bp, Homo sapien
ctgcagcaaagggagatcaggcacg

SEQ ID NO: 1690619 - DNA, 25 bp, Homo sapien
ttgctgggggcctagagcagtggac

SEQ ID NO: 1690620 - DNA, 25 bp, Homo sapien
gttgctgggggcctagagcagtgga

SEQ ID NO: 1690621 - DNA, 25 bp, Homo sapien
cttattgagcatgggggctggttgc

SEQ ID NO: 1690622 - DNA, 25 bp, Homo sapien
ggttgctgggggcctagagcagtgg

SEQ ID NO: 1690623 - DNA, 25 bp, Homo sapien
gtcatcatcaaaatcttatcaatca

SEQ ID NO: 1690624 - DNA, 25 bp, Homo sapien
catgtggtttgggtgaaggtagtga

SEQ ID NO: 1690625 - DNA, 25 bp, Homo sapien
gtggcatgtggtttgggtgaaggta

SEQ ID NO: 1690626 - DNA, 25 bp, Homo sapien
tgtggtttgggtgaaggtagtgatc

SEQ ID NO: 1690627 - DNA, 25 bp, Homo sapien
tttgggtgaaggtagtgatcaggga

SEQ ID NO: 1690628 - DNA, 25 bp, Homo sapien
tcattgcaatgttcatgaagtccat

SEQ ID NO: 1690629 - DNA, 25 bp, Homo sapien
attgcaatgttcatgaagtccatca

SEQ ID NO: 1690630 - DNA, 25 bp, Homo sapien
atcattgctaaaagtagcccagggg

SEQ ID NO: 1690631 - DNA, 25 bp, Homo sapien
cattgctaaaagtagcccagggggc

SEQ ID NO: 1690632 - DNA, 25 bp, Homo sapien
tccatagcaaatggcccatgtattt

SEQ ID NO: 1690633 - DNA, 25 bp, Homo sapien
tagcaaatggcccatgtatttggtg

SEQ ID NO: 1690634 - DNA, 25 bp, Homo sapien
gcaaatggcccatgtatttggtgat

SEQ ID NO: 1690635 - DNA, 25 bp, Homo sapien
tcttccatagcaaatggcccatgta

SEQ ID NO: 1690636 - DNA, 25 bp, Homo sapien
aaagcaggtgaagctccaatatcca

SEQ ID NO: 1690637 - DNA, 25 bp, Homo sapien
aagcaggtgaagctccaatatccat

SEQ ID NO: 1690638 - DNA, 25 bp, Homo sapien
cttaaagcaggtgaagctccaatat

SEQ ID NO: 1690639 - DNA, 25 bp, Homo sapien
taaagcaggtgaagctccaatatcc

SEQ ID NO: 1690640 - DNA, 25 bp, Homo sapien
caacaaggatggctgctattggagg

SEQ ID NO: 1690641 - DNA, 25 bp, Homo sapien
agccttaatgtgtaggatgctagag

SEQ ID NO: 1690642 - DNA, 25 bp, Homo sapien
gatgctagagttgaccttggaaccc

SEQ ID NO: 1690643 - DNA, 25 bp, Homo sapien
ttagccgaacgctggtgtcttagcc

SEQ ID NO: 1690644 - DNA, 25 bp, Homo sapien
tttctcagagccttgaagctttgtg

SEQ ID NO: 1690645 - DNA, 25 bp, Homo sapien
aggatgatgtctcaggggtcctgtc

SEQ ID NO: 1690646 - DNA, 25 bp, Homo sapien
ctctgtttctcagagccttgaagct

SEQ ID NO: 1690647 - DNA, 25 bp, Homo sapien
ctagaaggatgatgtctcaggggtc

SEQ ID NO: 1690648 - DNA, 25 bp, Homo sapien
ccctgactgttcatatttagaatcc

SEQ ID NO: 1690649 - DNA, 25 bp, Homo sapien
cttccctgactgttcatatttagaa

SEQ ID NO: 1690650 - DNA, 25 bp, Homo sapien
ctgactgttcatatttagaatccat

SEQ ID NO: 1690651 - DNA, 25 bp, Homo sapien
tccctgactgttcatatttagaatc

SEQ ID NO: 1690652 - DNA, 25 bp, Homo sapien
taaacattttgctggccgttccttg

SEQ ID NO: 1690653 - DNA, 25 bp, Homo sapien
tgtgtagcccagcaatatcctaaac

SEQ ID NO: 1690654 - DNA, 25 bp, Homo sapien
gaattcccaagcttgcgactgcatc

SEQ ID NO: 1690655 - DNA, 25 bp, Homo sapien
tagaagcaggcatccggtgtcttgc

SEQ ID NO: 1690656 - DNA, 25 bp, Homo sapien
agtgtaaactttgatattccttcac

SEQ ID NO: 1690657 - DNA, 25 bp, Homo sapien
gtgtaaactttgatattccttcacc

SEQ ID NO: 1690658 - DNA, 25 bp, Homo sapien
aagtgtaaactttgatattccttca

SEQ ID NO: 1690659 - DNA, 25 bp, Homo sapien
aagaagctcaaacgaatcagcatga

SEQ ID NO: 1690660 - DNA, 25 bp, Homo sapien
gaagctcaaacgaatcagcatgaaa

SEQ ID NO: 1690661 - DNA, 25 bp, Homo sapien
tacaagaagctcaaacgaatcagca

SEQ ID NO: 1690662 - DNA, 25 bp, Homo sapien
caagaagctcaaacgaatcagcatg

SEQ ID NO: 1690663 - DNA, 25 bp, Homo sapien
ataattctgcctttctcactccaaa

SEQ ID NO: 1690664 - DNA, 25 bp, Homo sapien
caaagcactgtgcattgatttggag

SEQ ID NO: 1690665 - DNA, 25 bp, Homo sapien
caaagaatgcacctggatggcaagc

SEQ ID NO: 1690666 - DNA, 25 bp, Homo sapien
gggttattcctgcatcaaaaactag

SEQ ID NO: 1690667 - DNA, 25 bp, Homo sapien
aatccagattgagcagtaaagtaga

SEQ ID NO: 1690668 - DNA, 25 bp, Homo sapien
aaatccagattgagcagtaaagtag

SEQ ID NO: 1690669 - DNA, 25 bp, Homo sapien
tcttagaggatttcttccgggagcc

SEQ ID NO: 1690670 - DNA, 25 bp, Homo sapien
gaagggcactccagatctcccccaa

SEQ ID NO: 1690671 - DNA, 25 bp, Homo sapien
tttggaagggcactccagatctccc

SEQ ID NO: 1690672 - DNA, 25 bp, Homo sapien
attcttcttagaggatttcttccgg

SEQ ID NO: 1690673 - DNA, 25 bp, Homo sapien
agcacatctccgttgtagttgacaa

SEQ ID NO: 1690674 - DNA, 25 bp, Homo sapien
ataaagcacatctccgttgtagttg

SEQ ID NO: 1690675 - DNA, 25 bp, Homo sapien
cacatctccgttgtagttgacaatg

SEQ ID NO: 1690676 - DNA, 25 bp, Homo sapien
acatctccgttgtagttgacaatgc

SEQ ID NO: 1690677 - DNA, 25 bp, Homo sapien
catctggtccagtagtccacagtgt

SEQ ID NO: 1690678 - DNA, 25 bp, Homo sapien
tccatctggtccagtagtccacagt

SEQ ID NO: 1690679 - DNA, 25 bp, Homo sapien
tggtccagtagtccacagtgtggca

SEQ ID NO: 1690680 - DNA, 25 bp, Homo sapien
tctggtccagtagtccacagtgtgg

SEQ ID NO: 1690681 - DNA, 25 bp, Homo sapien
cctgtgagtatcttcaagatctggc

SEQ ID NO: 1690682 - DNA, 25 bp, Homo sapien
gatctggccccgagcaatcttgaag

SEQ ID NO: 1690683 - DNA, 25 bp, Homo sapien
tcttgaagggtgtggcattcaccat

SEQ ID NO: 1690684 - DNA, 25 bp, Homo sapien
aggtcgtcgtggatggcatgcccca

SEQ ID NO: 1690685 - DNA, 25 bp, Homo sapien
gcattctctgggtggtcatgtcggg

SEQ ID NO: 1690686 - DNA, 25 bp, Homo sapien
gaatatccgctcttcctaacctgga

SEQ ID NO: 1690687 - DNA, 25 bp, Homo sapien
tggacttcacccaacttgtacagct

SEQ ID NO: 1690688 - DNA, 25 bp, Homo sapien
tatgggatcattccagttgaggagg

SEQ ID NO: 1690689 - DNA, 25 bp, Homo sapien
gtgctttctcttctggtgtggccat

SEQ ID NO: 1690690 - DNA, 25 bp, Homo sapien
tgtgctttctcttctggtgtggcca

SEQ ID NO: 1690691 - DNA, 25 bp, Homo sapien
ctgtgctttctcttctggtgtggcc

SEQ ID NO: 1690692 - DNA, 25 bp, Homo sapien
cctgtgctttctcttctggtgtggc

SEQ ID NO: 1690693 - DNA, 25 bp, Homo sapien
cattgtgagtgctggctatgggcac

SEQ ID NO: 1690694 - DNA, 25 bp, Homo sapien
tgttcaccttgagagctgatggaat

SEQ ID NO: 1690695 - DNA, 25 bp, Homo sapien
ggcaccagcttagcaccgtcagatg

SEQ ID NO: 1690696 - DNA, 25 bp, Homo sapien
gtcagatgcccctatcttcaggatg

SEQ ID NO: 1690697 - DNA, 25 bp, Homo sapien
ggttgactctcaacggatcttgcat

SEQ ID NO: 1690698 - DNA, 25 bp, Homo sapien
tggttttggatggttgactctcaac

SEQ ID NO: 1690699 - DNA, 25 bp, Homo sapien
ttttggatggttgactctcaacgga

SEQ ID NO: 1690700 - DNA, 25 bp, Homo sapien
gatggttgactctcaacggatcttg

SEQ ID NO: 1690701 - DNA, 25 bp, Homo sapien
tcaaaaagtgtatcatttccgatcg

SEQ ID NO: 1690702 - DNA, 25 bp, Homo sapien
catttccgatcgttcccctgatggc

SEQ ID NO: 1690703 - DNA, 25 bp, Homo sapien
cagggagtacttagactcagttggg

SEQ ID NO: 1690704 - DNA, 25 bp, Homo sapien
tcagttgggacaatccatcattttc

SEQ ID NO: 1690705 - DNA, 25 bp, Homo sapien
cactcagtgccatagggaattttgc

SEQ ID NO: 1690706 - DNA, 25 bp, Homo sapien
caactcggtggcaatcaaatctccc

SEQ ID NO: 1690707 - DNA, 25 bp, Homo sapien
aaatctcccattcgccttctgcaga

SEQ ID NO: 1690708 - DNA, 25 bp, Homo sapien
tctgcagatagcttgctggcatcag

SEQ ID NO: 1690709 - DNA, 25 bp, Homo sapien
gactgtaagatcttcctgacccacc

SEQ ID NO: 1690710 - DNA, 25 bp, Homo sapien
ggtagaagctccctagtccttgcca

SEQ ID NO: 1690711 - DNA, 25 bp, Homo sapien
aagaagcaccttgggaccagttcgc

SEQ ID NO: 1690712 - DNA, 25 bp, Homo sapien
gaatggcagtaacatcagaggcatc

SEQ ID NO: 1690713 - DNA, 25 bp, Homo sapien
tcaatttttccatagtgttcaaaac

SEQ ID NO: 1690714 - DNA, 25 bp, Homo sapien
caatttttccatagtgttcaaaaca

SEQ ID NO: 1690715 - DNA, 25 bp, Homo sapien
ttttccatagtgttcaaaacaatct

SEQ ID NO: 1690716 - DNA, 25 bp, Homo sapien
tccatagtgttcaaaacaatctctt

SEQ ID NO: 1690717 - DNA, 25 bp, Homo sapien
gagtcatggtccccaaaggttacaa

SEQ ID NO: 1690718 - DNA, 25 bp, Homo sapien
ggagtcatggtccccaaaggttaca

SEQ ID NO: 1690719 - DNA, 25 bp, Homo sapien
cacagctgtggccattcacagtgtg

SEQ ID NO: 1690720 - DNA, 25 bp, Homo sapien
cagctgtggccattcacagtgtggt

SEQ ID NO: 1690721 - DNA, 25 bp, Homo sapien
agctgtggccattcacagtgtggta

SEQ ID NO: 1690722 - DNA, 25 bp, Homo sapien
ctgtggccattcacagtgtggtatt

SEQ ID NO: 1690723 - DNA, 25 bp, Homo sapien
ttctaagaccaccagcaaagtttcc

SEQ ID NO: 1690724 - DNA, 25 bp, Homo sapien
cacttctaagaccaccagcaaagtt

SEQ ID NO: 1690725 - DNA, 25 bp, Homo sapien
gaaaccacttctaagaccaccagca

SEQ ID NO: 1690726 - DNA, 25 bp, Homo sapien
ctgaaaccacttctaagaccaccag

SEQ ID NO: 1690727 - DNA, 25 bp, Homo sapien
aaatttaaaggctgattgttgtaat

SEQ ID NO: 1690728 - DNA, 25 bp, Homo sapien
atagccaccttggttatgtggtttg

SEQ ID NO: 1690729 - DNA, 25 bp, Homo sapien
cttggttatgtggtttggcaaagta

SEQ ID NO: 1690730 - DNA, 25 bp, Homo sapien
tcatgggtccaaaatttaaaggctg

SEQ ID NO: 1690731 - DNA, 25 bp, Homo sapien
ctgctgacatggtgcctttcatgtc

SEQ ID NO: 1690732 - DNA, 25 bp, Homo sapien
tggtgcctttcatgtcaaacaattt

SEQ ID NO: 1690733 - DNA, 25 bp, Homo sapien
tcctaagtagcttctattagcattg

SEQ ID NO: 1690734 - DNA, 25 bp, Homo sapien
ctattagcattgtcctgtccgtttc

SEQ ID NO: 1690735 - DNA, 25 bp, Homo sapien
gaatatctccgttgaagtcctgaac

SEQ ID NO: 1690736 - DNA, 25 bp, Homo sapien
ttgaagtcctgaacaagtggagact

SEQ ID NO: 1690737 - DNA, 25 bp, Homo sapien
tctccgttgaagtcctgaacaagtg

SEQ ID NO: 1690738 - DNA, 25 bp, Homo sapien
ggactgagtggaatatctccgttga

SEQ ID NO: 1690739 - DNA, 25 bp, Homo sapien
tggctttgtcccttgtgcatggtgc

SEQ ID NO: 1690740 - DNA, 25 bp, Homo sapien
ccttgtgcatggtgcaactggccca

SEQ ID NO: 1690741 - DNA, 25 bp, Homo sapien
tttccttcggagtgttcttaacaca

SEQ ID NO: 1690742 - DNA, 25 bp, Homo sapien
ccagtgaggagccatggcagagaac

SEQ ID NO: 1690743 - DNA, 25 bp, Homo sapien
tttgggagaaactttccctctgatg

SEQ ID NO: 1690744 - DNA, 25 bp, Homo sapien
gagaaactttccctctgatgaacgt

SEQ ID NO: 1690745 - DNA, 25 bp, Homo sapien
ctttccctctgatgaacgtttccag

SEQ ID NO: 1690746 - DNA, 25 bp, Homo sapien
gatgaacgtttccagtgtcagtgca

SEQ ID NO: 1690747 - DNA, 25 bp, Homo sapien
gtcctagctatcttgggagaggctc

SEQ ID NO: 1690748 - DNA, 25 bp, Homo sapien
gttccctgagtcctagctatcttgg

SEQ ID NO: 1690749 - DNA, 25 bp, Homo sapien
cttgggagaggctcgtgcaaggtgt

SEQ ID NO: 1690750 - DNA, 25 bp, Homo sapien
agcctgcatgttccctgagtcctag

SEQ ID NO: 1690751 - DNA, 25 bp, Homo sapien
gctgtactcatggaacagaaggagc

SEQ ID NO: 1690752 - DNA, 25 bp, Homo sapien
ctccttgtggcgttgtacactcaca

SEQ ID NO: 1690753 - DNA, 25 bp, Homo sapien
cactcacaggggctgtacaatggct

SEQ ID NO: 1690754 - DNA, 25 bp, Homo sapien
tgtacaatggctgtactcatggaac

SEQ ID NO: 1690755 - DNA, 25 bp, Homo sapien
cttatggtttggctgaggactttca

SEQ ID NO: 1690756 - DNA, 25 bp, Homo sapien
tgccgtgtgtttgtatctatatgac

SEQ ID NO: 1690757 - DNA, 25 bp, Homo sapien
tcattctgtgcaagaaaacttcctc

SEQ ID NO: 1690758 - DNA, 25 bp, Homo sapien
tatatgacttttcaagcgtgggtca

SEQ ID NO: 1690759 - DNA, 25 bp, Homo sapien
tgctaaatgattgaatccatggctt

SEQ ID NO: 1690760 - DNA, 25 bp, Homo sapien
tctagatagcagtacctgctaaatg

SEQ ID NO: 1690761 - DNA, 25 bp, Homo sapien
tacctgctaaatgattgaatccatg

SEQ ID NO: 1690762 - DNA, 25 bp, Homo sapien
gcagtacctgctaaatgattgaatc

SEQ ID NO: 1690763 - DNA, 25 bp, Homo sapien
tctttgtcctgattcacaatcccaa

SEQ ID NO: 1690764 - DNA, 25 bp, Homo sapien
tctccattccatattacacttgcat

SEQ ID NO: 1690765 - DNA, 25 bp, Homo sapien
cctttgatgacctgttaggtaactg

SEQ ID NO: 1690766 - DNA, 25 bp, Homo sapien
gcacacctgtgatatagacctttca

SEQ ID NO: 1690767 - DNA, 25 bp, Homo sapien
ctggctgctaaacttaatgaacaaa

SEQ ID NO: 1690768 - DNA, 25 bp, Homo sapien
taggcacacagtacattttagttcc

SEQ ID NO: 1690769 - DNA, 25 bp, Homo sapien
aaactggcacatgataggcacacag

SEQ ID NO: 1690770 - DNA, 25 bp, Homo sapien
ttcaccatttgtaagtcgccattga

SEQ ID NO: 1690771 - DNA, 25 bp, Homo sapien
cagtacattttagttcccttcacca

SEQ ID NO: 1690772 - DNA, 25 bp, Homo sapien
tcccacgtggcaatattaaatccat

SEQ ID NO: 1690773 - DNA, 25 bp, Homo sapien
cccacgtggcaatattaaatccatt

SEQ ID NO: 1690774 - DNA, 25 bp, Homo sapien
ttcccacgtggcaatattaaatcca

SEQ ID NO: 1690775 - DNA, 25 bp, Homo sapien
tgctggcatctgtcgcccctggtta

SEQ ID NO: 1690776 - DNA, 25 bp, Homo sapien
tgtcgcccctggttagtctgcactg

SEQ ID NO: 1690777 - DNA, 25 bp, Homo sapien
cctggttagtctgcactgcagaggc

SEQ ID NO: 1690778 - DNA, 25 bp, Homo sapien
gtactctcccggactgcactgctgg

SEQ ID NO: 1690779 - DNA, 25 bp, Homo sapien
attccttgcttcacactggctgctg

SEQ ID NO: 1690780 - DNA, 25 bp, Homo sapien
tctgccttggtgaattccttgcttc

SEQ ID NO: 1690781 - DNA, 25 bp, Homo sapien
cgtggtatacatggcagcatgcctg

SEQ ID NO: 1690782 - DNA, 25 bp, Homo sapien
agttttcaggtcctctgccttggtg

SEQ ID NO: 1690783 - DNA, 25 bp, Homo sapien
ctgggagtcccgcgtgcccgcgcac

SEQ ID NO: 1690784 - DNA, 25 bp, Homo sapien
cgcgtgcccgcgcacccgaggcccg

SEQ ID NO: 1690785 - DNA, 25 bp, Homo sapien
cgtgcccgcgcacccgaggcccgcg

SEQ ID NO: 1690786 - DNA, 25 bp, Homo sapien
ggagtcccgcgtgcccgcgcacccg

SEQ ID NO: 1690787 - DNA, 25 bp, Homo sapien
gcctagctgcagatctctcgctggg

SEQ ID NO: 1690788 - DNA, 25 bp, Homo sapien
gtgcagccagcctagctgcagatct

SEQ ID NO: 1690789 - DNA, 25 bp, Homo sapien
atcccctgacccgtggagcaagtgc

SEQ ID NO: 1690790 - DNA, 25 bp, Homo sapien
gctccgcctcgtagagctcagcccg

SEQ ID NO: 1690791 - DNA, 25 bp, Homo sapien
tccttttaatggcgcattcttcaat

SEQ ID NO: 1690792 - DNA, 25 bp, Homo sapien
ccttttaatggcgcattcttcaatc

SEQ ID NO: 1690793 - DNA, 25 bp, Homo sapien
ggttcccattatagccacttttcca

SEQ ID NO: 1690794 - DNA, 25 bp, Homo sapien
tgagactgaggttcccattatagcc

SEQ ID NO: 1690795 - DNA, 25 bp, Homo sapien
tctgagataatgagactgaggttcc

SEQ ID NO: 1690796 - DNA, 25 bp, Homo sapien
gagataatgagactgaggttcccat

SEQ ID NO: 1690797 - DNA, 25 bp, Homo sapien
tgagtcagttgtgaggccaggcaca

SEQ ID NO: 1690798 - DNA, 25 bp, Homo sapien
caaaatgggcatcatcaagaggtaa

SEQ ID NO: 1690799 - DNA, 25 bp, Homo sapien
tagggaaacaagctcatgaatgtgc

SEQ ID NO: 1690800 - DNA, 25 bp, Homo sapien
tgggttacaaggagacacactcatg

SEQ ID NO: 1690801 - DNA, 25 bp, Homo sapien
gatgaaggcctgagtagtcctccat

SEQ ID NO: 1690802 - DNA, 25 bp, Homo sapien
tgtttttaaagcactacgtgccagg

SEQ ID NO: 1690803 - DNA, 25 bp, Homo sapien
tatgctgccactccctatcaaattc

SEQ ID NO: 1690804 - DNA, 25 bp, Homo sapien
gatagaccatatacatgatagagtg

SEQ ID NO: 1690805 - DNA, 25 bp, Homo sapien
gctgtacagtcctcataaaactggt

SEQ ID NO: 1690806 - DNA, 25 bp, Homo sapien
taaaactggtgcaggtaggaccgga

SEQ ID NO: 1690807 - DNA, 25 bp, Homo sapien
agaatactgagctccacctgttagg

SEQ ID NO: 1690808 - DNA, 25 bp, Homo sapien
ggaccggactccatagcgctggtaa

SEQ ID NO: 1690809 - DNA, 25 bp, Homo sapien
tagattcttctttcctaaggtaaga

SEQ ID NO: 1690810 - DNA, 25 bp, Homo sapien
tctgctcatcaatagttgtgctgtg

SEQ ID NO: 1690811 - DNA, 25 bp, Homo sapien
tgatgcacacacagcgagtactaaa

SEQ ID NO: 1690812 - DNA, 25 bp, Homo sapien
aatgcatttagtatcaccaagagtg

SEQ ID NO: 1690813 - DNA, 25 bp, Homo sapien
gaagactgctcccattggtttgaca

SEQ ID NO: 1690814 - DNA, 25 bp, Homo sapien
ggtacaggtttctgagagaggtcga

SEQ ID NO: 1690815 - DNA, 25 bp, Homo sapien
gacatattaacctctgacataggct

SEQ ID NO: 1690816 - DNA, 25 bp, Homo sapien
gagaggtcgaggagaaggcaagaag

SEQ ID NO: 1690817 - DNA, 25 bp, Homo sapien
tgcacatcgccattaaatgcctcca

SEQ ID NO: 1690818 - DNA, 25 bp, Homo sapien
gcacctgcacatcgccattaaatgc

SEQ ID NO: 1690819 - DNA, 25 bp, Homo sapien
cttgcacctgcacatcgccattaaa

SEQ ID NO: 1690820 - DNA, 25 bp, Homo sapien
cctgcacatcgccattaaatgcctc

SEQ ID NO: 1690821 - DNA, 25 bp, Homo sapien
aggaaagagagggaccggagtcact

SEQ ID NO: 1690822 - DNA, 25 bp, Homo sapien
agagagggaccggagtcactttcac

SEQ ID NO: 1690823 - DNA, 25 bp, Homo sapien
gagtcactttcacagtttgtaaggc

SEQ ID NO: 1690824 - DNA, 25 bp, Homo sapien
ggaccggagtcactttcacagtttg

SEQ ID NO: 1690825 - DNA, 25 bp, Homo sapien
gaatgactgttggaagcgcgaacct

SEQ ID NO: 1690826 - DNA, 25 bp, Homo sapien
ggcgccatctgggttagaggttatt

SEQ ID NO: 1690827 - DNA, 25 bp, Homo sapien
gtttactccaatagacagagctggc

SEQ ID NO: 1690828 - DNA, 25 bp, Homo sapien
gagctgcatgtgcaaggcgccatct

SEQ ID NO: 1690829 - DNA, 25 bp, Homo sapien
caatggcgacagagaagggcctctc

SEQ ID NO: 1690830 - DNA, 25 bp, Homo sapien
caaagcagcctcgtttagggccaca

SEQ ID NO: 1690831 - DNA, 25 bp, Homo sapien
tggtgacaaactcccgaaacagcag

SEQ ID NO: 1690832 - DNA, 25 bp, Homo sapien
ggtggtaaggccaatcccaatggcg

SEQ ID NO: 1690833 - DNA, 25 bp, Homo sapien
tatctctggacacagttcaaagtcg

SEQ ID NO: 1690834 - DNA, 25 bp, Homo sapien
catcagcttagtcttggtaccatgc

SEQ ID NO: 1690835 - DNA, 25 bp, Homo sapien
tacgaaggagtctcatgagtagcat

SEQ ID NO: 1690836 - DNA, 25 bp, Homo sapien
ttcaaagtcgaattggtcccaggtc

SEQ ID NO: 1690837 - DNA, 25 bp, Homo sapien
tgccagcttgtacatgtccagagca

SEQ ID NO: 1690838 - DNA, 25 bp, Homo sapien
cctggagcttttgtaaccggctggg

SEQ ID NO: 1690839 - DNA, 25 bp, Homo sapien
gccagaacagtcaatccgaggatca

SEQ ID NO: 1690840 - DNA, 25 bp, Homo sapien
gacagcatgtgtgtcgaccaccaca

SEQ ID NO: 1690841 - DNA, 25 bp, Homo sapien
tttgaaccctggacaaagtgactgg

SEQ ID NO: 1690842 - DNA, 25 bp, Homo sapien
ggacaaagtgactggaatctttgtt

SEQ ID NO: 1690843 - DNA, 25 bp, Homo sapien
ggttgccagtagaggctggacattt

SEQ ID NO: 1690844 - DNA, 25 bp, Homo sapien
acattttgaaccctggacaaagtga

SEQ ID NO: 1690845 - DNA, 25 bp, Homo sapien
taaccacgggcataaatcagacaag

SEQ ID NO: 1690846 - DNA, 25 bp, Homo sapien
tgagcaagtgtgagtccacccatta

SEQ ID NO: 1690847 - DNA, 25 bp, Homo sapien
tttatctcgaaaactggcctgctct

SEQ ID NO: 1690848 - DNA, 25 bp, Homo sapien
cttaagcagctggatgcatgtgcac

SEQ ID NO: 1690849 - DNA, 25 bp, Homo sapien
gagcccagacatattgtgatccaga

SEQ ID NO: 1690850 - DNA, 25 bp, Homo sapien
gttcggcactttcaaacaacacgga

SEQ ID NO: 1690851 - DNA, 25 bp, Homo sapien
ggagcgactcgatgacacatggcaa

SEQ ID NO: 1690852 - DNA, 25 bp, Homo sapien
tcagatgtttgggtaatgagagccc

SEQ ID NO: 1690853 - DNA, 25 bp, Homo sapien
tccatttagccggggaaacatcaga

SEQ ID NO: 1690854 - DNA, 25 bp, Homo sapien
atgttggagagaaaataaccacact

SEQ ID NO: 1690855 - DNA, 25 bp, Homo sapien
tgaaggaatgacaatgcaattcagg

SEQ ID NO: 1690856 - DNA, 25 bp, Homo sapien
taaccacactgaaggaatgacaatg

SEQ ID NO: 1690857 - DNA, 25 bp, Homo sapien
gggcacagaacaaggaccctcctct

SEQ ID NO: 1690858 - DNA, 25 bp, Homo sapien
gttggggcacagaacaaggaccctc

SEQ ID NO: 1690859 - DNA, 25 bp, Homo sapien
ggcacagaacaaggaccctcctctg

SEQ ID NO: 1690860 - DNA, 25 bp, Homo sapien
tggggcacagaacaaggaccctcct

SEQ ID NO: 1690861 - DNA, 25 bp, Homo sapien
gtttactaagaacaattattgcagt

SEQ ID NO: 1690862 - DNA, 25 bp, Homo sapien
aagaacaattattgcagtttcttca

SEQ ID NO: 1690863 - DNA, 25 bp, Homo sapien
tatcatatgaattggtgcaggtcac

SEQ ID NO: 1690864 - DNA, 25 bp, Homo sapien
actcaaacacctcaattcagcaaac

SEQ ID NO: 1690865 - DNA, 25 bp, Homo sapien
cactctagggtaggcatattttgca

SEQ ID NO: 1690866 - DNA, 25 bp, Homo sapien
ccttttgaatgtcacccgaggcagg

SEQ ID NO: 1690867 - DNA, 25 bp, Homo sapien
gactcagctccttggacccggattg

SEQ ID NO: 1690868 - DNA, 25 bp, Homo sapien
ccgaggcaggtgagtctaaatcagc

SEQ ID NO: 1690869 - DNA, 25 bp, Homo sapien
gtgtcacgtccttctgcatttgcat

SEQ ID NO: 1690870 - DNA, 25 bp, Homo sapien
gcagtgtcacgtccttctgcatttg

SEQ ID NO: 1690871 - DNA, 25 bp, Homo sapien
gctgcagtgtcacgtccttctgcat

SEQ ID NO: 1690872 - DNA, 25 bp, Homo sapien
ccagctgcagtgtcacgtccttctg

SEQ ID NO: 1690873 - DNA, 25 bp, Homo sapien
aggctccatatcctggctttgctgt

SEQ ID NO: 1690874 - DNA, 25 bp, Homo sapien
aatgcaggctccatatcctggcttt

SEQ ID NO: 1690875 - DNA, 25 bp, Homo sapien
tgcaggctccatatcctggctttgc

SEQ ID NO: 1690876 - DNA, 25 bp, Homo sapien
gcaggctccatatcctggctttgct

SEQ ID NO: 1690877 - DNA, 25 bp, Homo sapien
ttagtgtgaggatctatacattgtc

SEQ ID NO: 1690878 - DNA, 25 bp, Homo sapien
ttattgggccctctgccatgtagag

SEQ ID NO: 1690879 - DNA, 25 bp, Homo sapien
gtgtgaggatctatacattgtcttc

SEQ ID NO: 1690880 - DNA, 25 bp, Homo sapien
tgtagagcatcatgcctccagctgc

SEQ ID NO: 1690881 - DNA, 25 bp, Homo sapien
cactataactatgacaaatccttgc

SEQ ID NO: 1690882 - DNA, 25 bp, Homo sapien
tatgacaaatccttgcactggcagg

SEQ ID NO: 1690883 - DNA, 25 bp, Homo sapien
gcacataggtgaccaagatgccaca

SEQ ID NO: 1690884 - DNA, 25 bp, Homo sapien
gccacaaccacacctagggatgctt

SEQ ID NO: 1690885 - DNA, 25 bp, Homo sapien
ggacatattcatcccttgtgtgtgc

SEQ ID NO: 1690886 - DNA, 25 bp, Homo sapien
caccttaagcgtcattttaatgaag

SEQ ID NO: 1690887 - DNA, 25 bp, Homo sapien
gatacaattgtgacctactttgagg

SEQ ID NO: 1690888 - DNA, 25 bp, Homo sapien
gaataacgacttatcactttaagac

SEQ ID NO: 1690889 - DNA, 25 bp, Homo sapien
tacagagaggacatatagtttcttg

SEQ ID NO: 1690890 - DNA, 25 bp, Homo sapien
gaaagctgtctacattccacgtcag

SEQ ID NO: 1690891 - DNA, 25 bp, Homo sapien
tcttgaccttagatctgcaggaaaa

SEQ ID NO: 1690892 - DNA, 25 bp, Homo sapien
tacattccacgtcagaaaacatgaa

SEQ ID NO: 1690893 - DNA, 25 bp, Homo sapien
tcctgaactccctagaaatccttgc

SEQ ID NO: 1690894 - DNA, 25 bp, Homo sapien
tgtcttggtaaaggaaaactctcga

SEQ ID NO: 1690895 - DNA, 25 bp, Homo sapien
ggaaccatccgccatgttttctctg

SEQ ID NO: 1690896 - DNA, 25 bp, Homo sapien
agaatgtaatctttggctcagtaca

SEQ ID NO: 1690897 - DNA, 25 bp, Homo sapien
ccgacacatgcccttaactgcttct

SEQ ID NO: 1690898 - DNA, 25 bp, Homo sapien
ctgtcactacctgcaaacactgtag

SEQ ID NO: 1690899 - DNA, 25 bp, Homo sapien
ctgcttctcgcctcattccacattg

SEQ ID NO: 1690900 - DNA, 25 bp, Homo sapien
gagttgtagaagtctctatggccaa

SEQ ID NO: 1690901 - DNA, 25 bp, Homo sapien
catacttcagcaagcactggtaata

SEQ ID NO: 1690902 - DNA, 25 bp, Homo sapien
ctggtaatatgttctcagagaggcg

SEQ ID NO: 1690903 - DNA, 25 bp, Homo sapien
cagagaggcgaggaccatatccaga

SEQ ID NO: 1690904 - DNA, 25 bp, Homo sapien
cagcaagcactggtaatatgttctc

SEQ ID NO: 1690905 - DNA, 25 bp, Homo sapien
ggagtagagtcagcttttcaagttt

SEQ ID NO: 1690906 - DNA, 25 bp, Homo sapien
gacttcgacataataattgtgaggg

SEQ ID NO: 1690907 - DNA, 25 bp, Homo sapien
gcttctcttggcttgacatgagtca

SEQ ID NO: 1690908 - DNA, 25 bp, Homo sapien
gctgcttaacagatggataatattc

SEQ ID NO: 1690909 - DNA, 25 bp, Homo sapien
cattctgagatgatgcgccatccca

SEQ ID NO: 1690910 - DNA, 25 bp, Homo sapien
gaggatgagaccgtgactctagaca

SEQ ID NO: 1690911 - DNA, 25 bp, Homo sapien
ggcagtgtgtggcaaaaaggatcac

SEQ ID NO: 1690912 - DNA, 25 bp, Homo sapien
tctagacagctaagcaccaggtgct

SEQ ID NO: 1690913 - DNA, 25 bp, Homo sapien
aactttcgaatttgcttcttctcat

SEQ ID NO: 1690914 - DNA, 25 bp, Homo sapien
ttaactttcgaatttgcttcttctc

SEQ ID NO: 1690915 - DNA, 25 bp, Homo sapien
taactttcgaatttgcttcttctca

SEQ ID NO: 1690916 - DNA, 25 bp, Homo sapien
ttagtgcatgttatacccatatccc

SEQ ID NO: 1690917 - DNA, 25 bp, Homo sapien
tacccatatcccacattaacatttt

SEQ ID NO: 1690918 - DNA, 25 bp, Homo sapien
aacctgtggttattttggcaattat

SEQ ID NO: 1690919 - DNA, 25 bp, Homo sapien
tctgatataatcaggtattaaacct

SEQ ID NO: 1690920 - DNA, 25 bp, Homo sapien
ggatattccttgaaccttcttctat

SEQ ID NO: 1690921 - DNA, 25 bp, Homo sapien
catacggccaaccaacttctttttg

SEQ ID NO: 1690922 - DNA, 25 bp, Homo sapien
cctgcttccttacaagtctggctta

SEQ ID NO: 1690923 - DNA, 25 bp, Homo sapien
gatcatgagctagttaaaggcaggg

SEQ ID NO: 1690924 - DNA, 25 bp, Homo sapien
tggtttcgtagtcacagattacacg

SEQ ID NO: 1690925 - DNA, 25 bp, Homo sapien
tacacgctggtcagtctgctcacca

SEQ ID NO: 1690926 - DNA, 25 bp, Homo sapien
tagtcacagattacacgctggtcag

SEQ ID NO: 1690927 - DNA, 25 bp, Homo sapien
catttgattggtttcgtagtcacag

SEQ ID NO: 1690928 - DNA, 25 bp, Homo sapien
ctagaggatttgtgaggacctggcc

SEQ ID NO: 1690929 - DNA, 25 bp, Homo sapien
tggtaacgatgtgtcctgtggtaac

SEQ ID NO: 1690930 - DNA, 25 bp, Homo sapien
cgatgtgtcctgtggtaacattttc

SEQ ID NO: 1690931 - DNA, 25 bp, Homo sapien
tagaccatgctaggtgcagctccta

SEQ ID NO: 1690932 - DNA, 25 bp, Homo sapien
cccaggatcctgatacatcactgaa

SEQ ID NO: 1690933 - DNA, 25 bp, Homo sapien
gtgccgccctcttgtgactgctctg

SEQ ID NO: 1690934 - DNA, 25 bp, Homo sapien
tgtctctggagaataagtgctgttt

SEQ ID NO: 1690935 - DNA, 25 bp, Homo sapien
cagaaagcccgtttcaaatgcagca

SEQ ID NO: 1690936 - DNA, 25 bp, Homo sapien
tcaggccacagtttacatgatctag

SEQ ID NO: 1690937 - DNA, 25 bp, Homo sapien
gatattattgtaggatccttcagca

SEQ ID NO: 1690938 - DNA, 25 bp, Homo sapien
gactgatagtttacatcaggccaca

SEQ ID NO: 1690939 - DNA, 25 bp, Homo sapien
tccttcagcaaagtaccaggtcttc

SEQ ID NO: 1690940 - DNA, 25 bp, Homo sapien
gactggcagcagtccgtattgacac

SEQ ID NO: 1690941 - DNA, 25 bp, Homo sapien
aagtggctggtgcaagaagactgcc

SEQ ID NO: 1690942 - DNA, 25 bp, Homo sapien
tcctgtttcagagagttcttccatg

SEQ ID NO: 1690943 - DNA, 25 bp, Homo sapien
tgcaaataaacatgcgatgctgtga

SEQ ID NO: 1690944 - DNA, 25 bp, Homo sapien
gacttctcggtgtgattgatgcccc

SEQ ID NO: 1690945 - DNA, 25 bp, Homo sapien
gacactatattgtcaccagaggaga

SEQ ID NO: 1690946 - DNA, 25 bp, Homo sapien
cacttgggtcagcagtaggagtaaa

SEQ ID NO: 1690947 - DNA, 25 bp, Homo sapien
gaatccggaagctagaccagatcca

SEQ ID NO: 1690948 - DNA, 25 bp, Homo sapien
gttcgtttcaggaggcgatcccgcg

SEQ ID NO: 1690949 - DNA, 25 bp, Homo sapien
tgtctcagcccgtcgtgaagagcgt

SEQ ID NO: 1690950 - DNA, 25 bp, Homo sapien
cagcggaggtgcctcccgacgcgaa

SEQ ID NO: 1690951 - DNA, 25 bp, Homo sapien
cacctgtggattcgtcagtttctcg

SEQ ID NO: 1690952 - DNA, 25 bp, Homo sapien
gattggctgtgcacgccacggtgaa

SEQ ID NO: 1690953 - DNA, 25 bp, Homo sapien
tgaaaaacttgagcgtctactccga

SEQ ID NO: 1690954 - DNA, 25 bp, Homo sapien
taggcgtgcctgtttgaaggccccg

SEQ ID NO: 1690955 - DNA, 25 bp, Homo sapien
tctgcccgtagcaggtgaacctggt

SEQ ID NO: 1690956 - DNA, 25 bp, Homo sapien
cacaggaacttatgctaatcttatc

SEQ ID NO: 1690957 - DNA, 25 bp, Homo sapien
acacaggaacttatgctaatcttat

SEQ ID NO: 1690958 - DNA, 25 bp, Homo sapien
tacacaggaacttatgctaatctta

SEQ ID NO: 1690959 - DNA, 25 bp, Homo sapien
cccgaagccactgtgcactctaacg

SEQ ID NO: 1690960 - DNA, 25 bp, Homo sapien
actgtgcactctaacggggcctctg

SEQ ID NO: 1690961 - DNA, 25 bp, Homo sapien
gccactgtgcactctaacggggcct

SEQ ID NO: 1690962 - DNA, 25 bp, Homo sapien
cgaagccactgtgcactctaacggg

SEQ ID NO: 1690963 - DNA, 25 bp, Homo sapien
agcaccccatatgagtgacccggcc

SEQ ID NO: 1690964 - DNA, 25 bp, Homo sapien
ccatatgagtgacccggcctcatag

SEQ ID NO: 1690965 - DNA, 25 bp, Homo sapien
gcaagagatccctctcgggacacag

SEQ ID NO: 1690966 - DNA, 25 bp, Homo sapien
gtgacccggcctcataggctctcag

SEQ ID NO: 1690967 - DNA, 25 bp, Homo sapien
gaactctctcgtaaaatctccttcc

SEQ ID NO: 1690968 - DNA, 25 bp, Homo sapien
catgcaacggaactctctcgtaaaa

SEQ ID NO: 1690969 - DNA, 25 bp, Homo sapien
ccttgatactttgatgtttagacat

SEQ ID NO: 1690970 - DNA, 25 bp, Homo sapien
cagtccactttaagacctgtgggtc

SEQ ID NO: 1690971 - DNA, 25 bp, Homo sapien
caggcatgcgcggggcgtgccgcgc

SEQ ID NO: 1690972 - DNA, 25 bp, Homo sapien
agaccttcatgccggacgctggctg

SEQ ID NO: 1690973 - DNA, 25 bp, Homo sapien
ccgcagctctgacctgtcgctaccg

SEQ ID NO: 1690974 - DNA, 25 bp, Homo sapien
ccagaccttcatgccggacgctggc

SEQ ID NO: 1690975 - DNA, 25 bp, Homo sapien
tgacctgtcgctaccgcccgacctg

SEQ ID NO: 1690976 - DNA, 25 bp, Homo sapien
aggcagcaacgggaggacccacaga

SEQ ID NO: 1690977 - DNA, 25 bp, Homo sapien
agaggtcacgtccaaggccagggca

SEQ ID NO: 1690978 - DNA, 25 bp, Homo sapien
gcagggtaaactgcgcaggcattcc

SEQ ID NO: 1690979 - DNA, 25 bp, Homo sapien
ttccaatcaggttggctcggcggcc

SEQ ID NO: 1690980 - DNA, 25 bp, Homo sapien
ggtcgggcccgcaaagctgcgccgc

SEQ ID NO: 1690981 - DNA, 25 bp, Homo sapien
agccggtcgggcccgcaaagctgcg

SEQ ID NO: 1690982 - DNA, 25 bp, Homo sapien
ctgccacgcggagccggtcgggccc

SEQ ID NO: 1690983 - DNA, 25 bp, Homo sapien
cgcggagccggtcgggcccgcaaag

SEQ ID NO: 1690984 - DNA, 25 bp, Homo sapien
cattctgagcgagtgggacgcagct

SEQ ID NO: 1690985 - DNA, 25 bp, Homo sapien
cacatagcaaggtcgcattctgagc

SEQ ID NO: 1690986 - DNA, 25 bp, Homo sapien
cataatctgcagcaagggcggtgga

SEQ ID NO: 1690987 - DNA, 25 bp, Homo sapien
ctaggttgttcctatggttacataa

SEQ ID NO: 1690988 - DNA, 25 bp, Homo sapien
taaaagactcttcatgcacatttgg

SEQ ID NO: 1690989 - DNA, 25 bp, Homo sapien
cagaggacactgttttgtgcttcca

SEQ ID NO: 1690990 - DNA, 25 bp, Homo sapien
taaaacgtgattagactgagtcgaa

SEQ ID NO: 1690991 - DNA, 25 bp, Homo sapien
tgactatcttaggtttggcagggaa

SEQ ID NO: 1690992 - DNA, 25 bp, Homo sapien
actggctaaagtggcttgagagacg

SEQ ID NO: 1690993 - DNA, 25 bp, Homo sapien
gctaaagtggcttgagagacgtcag

SEQ ID NO: 1690994 - DNA, 25 bp, Homo sapien
agaggttctaaaccggtgcacttca

SEQ ID NO: 1690995 - DNA, 25 bp, Homo sapien
gagagacgtcagaggttctaaaccg

SEQ ID NO: 1690996 - DNA, 25 bp, Homo sapien
ccaaggccacctagtcaataagagg

SEQ ID NO: 1690997 - DNA, 25 bp, Homo sapien
tctggctcagaataggcacaccttt

SEQ ID NO: 1690998 - DNA, 25 bp, Homo sapien
tggtaggttatgctcagttttcaga

SEQ ID NO: 1690999 - DNA, 25 bp, Homo sapien
tatgtgaggcactagtttaagggct

SEQ ID NO: 1691000 - DNA, 25 bp, Homo sapien
tgaaagggacgccaacaagagagac

SEQ ID NO: 1691001 - DNA, 25 bp, Homo sapien
ccttcaatagcctgttagagcaaaa

SEQ ID NO: 1691002 - DNA, 25 bp, Homo sapien
tattgccagctccaattaagactga

SEQ ID NO: 1691003 - DNA, 25 bp, Homo sapien
tagagcaaaaagtggctcctgctag

SEQ ID NO: 1691004 - DNA, 25 bp, Homo sapien
actcttggtataattcagttttctt

SEQ ID NO: 1691005 - DNA, 25 bp, Homo sapien
ctaactcttggtataattcagtttt

SEQ ID NO: 1691006 - DNA, 25 bp, Homo sapien
tcttggtataattcagttttcttcc

SEQ ID NO: 1691007 - DNA, 25 bp, Homo sapien
taactcttggtataattcagttttc

SEQ ID NO: 1691008 - DNA, 25 bp, Homo sapien
tctgactgtgatactcattacatgc

SEQ ID NO: 1691009 - DNA, 25 bp, Homo sapien
gactgtgatactcattacatgctga

SEQ ID NO: 1691010 - DNA, 25 bp, Homo sapien
ctgtgatactcattacatgctgaaa

SEQ ID NO: 1691011 - DNA, 25 bp, Homo sapien
tgactgtgatactcattacatgctg

SEQ ID NO: 1691012 - DNA, 25 bp, Homo sapien
ttacgataatctaatatcagaagac

SEQ ID NO: 1691013 - DNA, 25 bp, Homo sapien
acgataatctaatatcagaagacac

SEQ ID NO: 1691014 - DNA, 25 bp, Homo sapien
cgataatctaatatcagaagacact

SEQ ID NO: 1691015 - DNA, 25 bp, Homo sapien
tacgataatctaatatcagaagaca

SEQ ID NO: 1691016 - DNA, 25 bp, Homo sapien
agggtatgtaacgagttgaccctct

SEQ ID NO: 1691017 - DNA, 25 bp, Homo sapien
tattgcaggagtgcttctatagctc

SEQ ID NO: 1691018 - DNA, 25 bp, Homo sapien
ccaatattgcaggagtgcttctata

SEQ ID NO: 1691019 - DNA, 25 bp, Homo sapien
agtgcttctatagctctaaactcaa

SEQ ID NO: 1691020 - DNA, 25 bp, Homo sapien
ttaagtgatatctccatgtaggatc

SEQ ID NO: 1691021 - DNA, 25 bp, Homo sapien
tctttagttctatttgactgggtca

SEQ ID NO: 1691022 - DNA, 25 bp, Homo sapien
ggatccttagagacgacttgtttcg

SEQ ID NO: 1691023 - DNA, 25 bp, Homo sapien
gggacatgccattgaaacaataccc

SEQ ID NO: 1691024 - DNA, 25 bp, Homo sapien
cactacttatcatctcactggctgg

SEQ ID NO: 1691025 - DNA, 25 bp, Homo sapien
attaccccaagcaggaagtgtagcc

SEQ ID NO: 1691026 - DNA, 25 bp, Homo sapien
tagctggtgctcattaattacccca

SEQ ID NO: 1691027 - DNA, 25 bp, Homo sapien
ccagcctgtggagcccatgacttac

SEQ ID NO: 1691028 - DNA, 25 bp, Homo sapien
gactggacagccaaataggcagacc

SEQ ID NO: 1691029 - DNA, 25 bp, Homo sapien
gatatcaaaccctctgctcagcaag

SEQ ID NO: 1691030 - DNA, 25 bp, Homo sapien
tattcggcaggtatgcactaatcct

SEQ ID NO: 1691031 - DNA, 25 bp, Homo sapien
tttatttcgtctccagaggaactgc

SEQ ID NO: 1691032 - DNA, 25 bp, Homo sapien
tctttaggcacagatttggttgaca

SEQ ID NO: 1691033 - DNA, 25 bp, Homo sapien
gacaaggagctaactctcgtaagag

SEQ ID NO: 1691034 - DNA, 25 bp, Homo sapien
cagatgattcaaaaactagatcctc

SEQ ID NO: 1691035 - DNA, 25 bp, Homo sapien
gaatattcaggatcagtgaatcctc

SEQ ID NO: 1691036 - DNA, 25 bp, Homo sapien
caaagcatccaaggtctcaaggatc

SEQ ID NO: 1691037 - DNA, 25 bp, Homo sapien
gcatccaaggtctcaaggatcagtg

SEQ ID NO: 1691038 - DNA, 25 bp, Homo sapien
accaaagcatccaaggtctcaagga

SEQ ID NO: 1691039 - DNA, 25 bp, Homo sapien
aagcatccaaggtctcaaggatcag

SEQ ID NO: 1691040 - DNA, 25 bp, Homo sapien
ctcttctagcaactcttcctcatcc

SEQ ID NO: 1691041 - DNA, 25 bp, Homo sapien
gacttgtgggtcactccattttgat

SEQ ID NO: 1691042 - DNA, 25 bp, Homo sapien
ctcatccaagatctccaaaattgac

SEQ ID NO: 1691043 - DNA, 25 bp, Homo sapien
tgatacacagagctcttctagcaac

SEQ ID NO: 1691044 - DNA, 25 bp, Homo sapien
catctcttctgcatggtcaatccca

SEQ ID NO: 1691045 - DNA, 25 bp, Homo sapien
tggtcaatcccagcactgctctttt

SEQ ID NO: 1691046 - DNA, 25 bp, Homo sapien
gagagatcgtcagccaatcggtagt

SEQ ID NO: 1691047 - DNA, 25 bp, Homo sapien
gccaatcggtagtagttttccaaca

SEQ ID NO: 1691048 - DNA, 25 bp, Homo sapien
aatactttgtgaatcatcaatcagc

SEQ ID NO: 1691049 - DNA, 25 bp, Homo sapien
caccctaagctcacgagctgcattg

SEQ ID NO: 1691050 - DNA, 25 bp, Homo sapien
taatactttgtgaatcatcaatcag

SEQ ID NO: 1691051 - DNA, 25 bp, Homo sapien
tcaatcagcaccctaagctcacgag

SEQ ID NO: 1691052 - DNA, 25 bp, Homo sapien
cccatggtcagctgtagattcaacc

SEQ ID NO: 1691053 - DNA, 25 bp, Homo sapien
cattagtccaaagagcgaaagagag

SEQ ID NO: 1691054 - DNA, 25 bp, Homo sapien
caacctcatcatcacgtttcggtgg

SEQ ID NO: 1691055 - DNA, 25 bp, Homo sapien
aaagagagaaggttcccatggtcag

SEQ ID NO: 1691056 - DNA, 25 bp, Homo sapien
caaataaagtatgcaaaccgcctgg

SEQ ID NO: 1691057 - DNA, 25 bp, Homo sapien
taacatggtccaacagtactgcctg

SEQ ID NO: 1691058 - DNA, 25 bp, Homo sapien
caccatggtagtttacaggttagac

SEQ ID NO: 1691059 - DNA, 25 bp, Homo sapien
gggatgactgtacaaaaccacagtg

SEQ ID NO: 1691060 - DNA, 25 bp, Homo sapien
tgcagaagggtgtcataatacttac

SEQ ID NO: 1691061 - DNA, 25 bp, Homo sapien
taaaagggcatagtggtcctaatgg

SEQ ID NO: 1691062 - DNA, 25 bp, Homo sapien
gcggcaggacgggatttttatccta

SEQ ID NO: 1691063 - DNA, 25 bp, Homo sapien
taacaagtggctacccacaagatgg

SEQ ID NO: 1691064 - DNA, 25 bp, Homo sapien
tgggcgcagacgacaaagtaacttt

SEQ ID NO: 1691065 - DNA, 25 bp, Homo sapien
gactcactgctaaatgggcctaaag

SEQ ID NO: 1691066 - DNA, 25 bp, Homo sapien
tacaatataacctacgcaagggcag

SEQ ID NO: 1691067 - DNA, 25 bp, Homo sapien
ccaggttgtcggtgcattcagtgaa

SEQ ID NO: 1691068 - DNA, 25 bp, Homo sapien
taagggcatcgtgatccaaggaagt

SEQ ID NO: 1691069 - DNA, 25 bp, Homo sapien
tatgctgggcacgatagcacctcag

SEQ ID NO: 1691070 - DNA, 25 bp, Homo sapien
tcatttccatcgcaaaacgccaggt

SEQ ID NO: 1691071 - DNA, 25 bp, Homo sapien
tcatgatgccagaggacacgcaatt

SEQ ID NO: 1691072 - DNA, 25 bp, Homo sapien
taatcagccaaaaaattctatggtc

SEQ ID NO: 1691073 - DNA, 25 bp, Homo sapien
ccaaggaatgaaagcaggcgcctcc

SEQ ID NO: 1691074 - DNA, 25 bp, Homo sapien
aaggaatgaaagcaggcgcctccag

SEQ ID NO: 1691075 - DNA, 25 bp, Homo sapien
caaggaatgaaagcaggcgcctcca

SEQ ID NO: 1691076 - DNA, 25 bp, Homo sapien
tccaaggaatgaaagcaggcgcctc

SEQ ID NO: 1691077 - DNA, 25 bp, Homo sapien
ccctatgaagcaggtaataccgact

SEQ ID NO: 1691078 - DNA, 25 bp, Homo sapien
tgtgacaacttaatcccaggcgctc

SEQ ID NO: 1691079 - DNA, 25 bp, Homo sapien
tttgagaaagcaactcgcaagggcc

SEQ ID NO: 1691080 - DNA, 25 bp, Homo sapien
gcgctctgactttagggcccatgat

SEQ ID NO: 1691081 - DNA, 25 bp, Homo sapien
gaaaagccactagtaaaatgatgta

SEQ ID NO: 1691082 - DNA, 25 bp, Homo sapien
tactcagtgaagaaaggactataag

SEQ ID NO: 1691083 - DNA, 25 bp, Homo sapien
tcagtgaagaaaggactataagcag

SEQ ID NO: 1691084 - DNA, 25 bp, Homo sapien
gatgtattatgtaactactcagtga

SEQ ID NO: 1691085 - DNA, 25 bp, Homo sapien
agtccatccagtctgaggctatttt

SEQ ID NO: 1691086 - DNA, 25 bp, Homo sapien
tccaagtccatccagtctgaggcta

SEQ ID NO: 1691087 - DNA, 25 bp, Homo sapien
ccaagtccatccagtctgaggctat

SEQ ID NO: 1691088 - DNA, 25 bp, Homo sapien
caagtccatccagtctgaggctatt

SEQ ID NO: 1691089 - DNA, 25 bp, Homo sapien
ctgtgcttgtgttgcctcatatcac

SEQ ID NO: 1691090 - DNA, 25 bp, Homo sapien
cttgtgttgcctcatatcacatcta

SEQ ID NO: 1691091 - DNA, 25 bp, Homo sapien
tgtgcttgtgttgcctcatatcaca

SEQ ID NO: 1691092 - DNA, 25 bp, Homo sapien
tgcttgtgttgcctcatatcacatc

SEQ ID NO: 1691093 - DNA, 25 bp, Homo sapien
tatagctacctatgggcttgtcaag

SEQ ID NO: 1691094 - DNA, 25 bp, Homo sapien
gtcaagttcctacgcttcattcagc

SEQ ID NO: 1691095 - DNA, 25 bp, Homo sapien
catagaatgctagctttttagtcac

SEQ ID NO: 1691096 - DNA, 25 bp, Homo sapien
tagtcacctgagaatcaggaaattc

SEQ ID NO: 1691097 - DNA, 25 bp, Homo sapien
tttcttccaaatcagcgacgggagt

SEQ ID NO: 1691098 - DNA, 25 bp, Homo sapien
tacatttgtagtgcaagagctggac

SEQ ID NO: 1691099 - DNA, 25 bp, Homo sapien
ttacagtgatacgacccaaaatagc

SEQ ID NO: 1691100 - DNA, 25 bp, Homo sapien
gctctgaggtgtgccaaaagtgtgc

SEQ ID NO: 1691101 - DNA, 25 bp, Homo sapien
actttagtataagaagcatcctgca

SEQ ID NO: 1691102 - DNA, 25 bp, Homo sapien
ttatccaagctcataaactaagtca

SEQ ID NO: 1691103 - DNA, 25 bp, Homo sapien
gcaacttccttttatcagacttatg

SEQ ID NO: 1691104 - DNA, 25 bp, Homo sapien
catacttgatttaaccaccttcaga

SEQ ID NO: 1691105 - DNA, 25 bp, Homo sapien
gacaaaactagggtctctgcagtcc

SEQ ID NO: 1691106 - DNA, 25 bp, Homo sapien
catccattagctcacctctgtaggt

SEQ ID NO: 1691107 - DNA, 25 bp, Homo sapien
aaagacagtatcacaccttgacgtg

SEQ ID NO: 1691108 - DNA, 25 bp, Homo sapien
gacacttgatgtgtttgacaggcga

SEQ ID NO: 1691109 - DNA, 25 bp, Homo sapien
tatggcacgtatgtaaaaaacctgg

SEQ ID NO: 1691110 - DNA, 25 bp, Homo sapien
gcaaaagcacaaggaagcgccattt

SEQ ID NO: 1691111 - DNA, 25 bp, Homo sapien
agcaccaggtggaggttaagaccca

SEQ ID NO: 1691112 - DNA, 25 bp, Homo sapien
gagcactctgacatctgacacttga

SEQ ID NO: 1691113 - DNA, 25 bp, Homo sapien
ttggcccatgccaatcaaagtataa

SEQ ID NO: 1691114 - DNA, 25 bp, Homo sapien
gaaaggtccctctgtggttatctgt

SEQ ID NO: 1691115 - DNA, 25 bp, Homo sapien
cagtctctgtacacaattcctccta

SEQ ID NO: 1691116 - DNA, 25 bp, Homo sapien
catgacacacctttatgtatgtaac

SEQ ID NO: 1691117 - DNA, 25 bp, Homo sapien
tattgcctgtagtcagacctgctgt

SEQ ID NO: 1691118 - DNA, 25 bp, Homo sapien
tttcccaacttattgcctgtagtca

SEQ ID NO: 1691119 - DNA, 25 bp, Homo sapien
ccaacttattgcctgtagtcagacc

SEQ ID NO: 1691120 - DNA, 25 bp, Homo sapien
gcctgtagtcagacctgctgtacaa

SEQ ID NO: 1691121 - DNA, 25 bp, Homo sapien
agtttacttcctcgctccctttgca

SEQ ID NO: 1691122 - DNA, 25 bp, Homo sapien
tgtgaaatagcagacattctgctta

SEQ ID NO: 1691123 - DNA, 25 bp, Homo sapien
gtaaatatatgactgcaccagaaat

SEQ ID NO: 1691124 - DNA, 25 bp, Homo sapien
atgtctccttccacagtttacttcc

SEQ ID NO: 1691125 - DNA, 25 bp, Homo sapien
acagttctgcaacatttgtgcccag

SEQ ID NO: 1691126 - DNA, 25 bp, Homo sapien
tgaattcatacctcctagggtcagg

SEQ ID NO: 1691127 - DNA, 25 bp, Homo sapien
gccactgcttggttaggcacccaca

SEQ ID NO: 1691128 - DNA, 25 bp, Homo sapien
caggccatggccattggagtttctc

SEQ ID NO: 1691129 - DNA, 25 bp, Homo sapien
tgaatgcagagcgatgctgccctgc

SEQ ID NO: 1691130 - DNA, 25 bp, Homo sapien
gagagacagagacgtgaccgcattt

SEQ ID NO: 1691131 - DNA, 25 bp, Homo sapien
ccagcgagattaggaaaggcttccc

SEQ ID NO: 1691132 - DNA, 25 bp, Homo sapien
catttcttgtggaatgggcgcctga

SEQ ID NO: 1691133 - DNA, 25 bp, Homo sapien
tctgagcattcccacgtcaccagag

SEQ ID NO: 1691134 - DNA, 25 bp, Homo sapien
tgagcattcccacgtcaccagagaa

SEQ ID NO: 1691135 - DNA, 25 bp, Homo sapien
attcccacgtcaccagagaagccgg

SEQ ID NO: 1691136 - DNA, 25 bp, Homo sapien
agcattcccacgtcaccagagaagc

SEQ ID NO: 1691137 - DNA, 25 bp, Homo sapien
ttagagagaagcggtgggtctgcac

SEQ ID NO: 1691138 - DNA, 25 bp, Homo sapien
ctgcttagagagaagcggtgggtct

SEQ ID NO: 1691139 - DNA, 25 bp, Homo sapien
tgcttagagagaagcggtgggtctg

SEQ ID NO: 1691140 - DNA, 25 bp, Homo sapien
gcttagagagaagcggtgggtctgc

SEQ ID NO: 1691141 - DNA, 25 bp, Homo sapien
tgtttcttggccctaaatctgcccc

SEQ ID NO: 1691142 - DNA, 25 bp, Homo sapien
ctgataatatatcgtgagcttaaca

SEQ ID NO: 1691143 - DNA, 25 bp, Homo sapien
ccacctcccaagtggaattgacatc

SEQ ID NO: 1691144 - DNA, 25 bp, Homo sapien
gataatatatcgtgagcttaacatt

SEQ ID NO: 1691145 - DNA, 25 bp, Homo sapien
tttcccatggatgaagtgtaagtgg

SEQ ID NO: 1691146 - DNA, 25 bp, Homo sapien
ttcccatggatgaagtgtaagtggg

SEQ ID NO: 1691147 - DNA, 25 bp, Homo sapien
ccatggatgaagtgtaagtgggtac

SEQ ID NO: 1691148 - DNA, 25 bp, Homo sapien
tcccatggatgaagtgtaagtgggt

SEQ ID NO: 1691149 - DNA, 25 bp, Homo sapien
ggctcgccagtagatgcacctgcgg

SEQ ID NO: 1691150 - DNA, 25 bp, Homo sapien
catttgtcactaactgctcctgagc

SEQ ID NO: 1691151 - DNA, 25 bp, Homo sapien
cacttttcgggtgctcatttgtcac

SEQ ID NO: 1691152 - DNA, 25 bp, Homo sapien
gcacctgcggactgctgtcaccttt

SEQ ID NO: 1691153 - DNA, 25 bp, Homo sapien
acaggaaacaggcaagcgggcgcgc

SEQ ID NO: 1691154 - DNA, 25 bp, Homo sapien
ggcccgggcaacgacggcgacagga

SEQ ID NO: 1691155 - DNA, 25 bp, Homo sapien
ggcaacgacggcgacaggaaacagg

SEQ ID NO: 1691156 - DNA, 25 bp, Homo sapien
ggaaacaggcaagcgggcgcgcgcg

SEQ ID NO: 1691157 - DNA, 25 bp, Homo sapien
ccacagctccgcagccaaatgcagg

SEQ ID NO: 1691158 - DNA, 25 bp, Homo sapien
gcgcccagcgtagcagcggagctgg

SEQ ID NO: 1691159 - DNA, 25 bp, Homo sapien
cggcagcctggaaacgtcgacccga

SEQ ID NO: 1691160 - DNA, 25 bp, Homo sapien
agaggcccgccaggcgcccagcgta

SEQ ID NO: 1691161 - DNA, 25 bp, Homo sapien
tcgcaccccgcagtcggctaccatg

SEQ ID NO: 1691162 - DNA, 25 bp, Homo sapien
ggagacctccctccagcggcagaaa

SEQ ID NO: 1691163 - DNA, 25 bp, Homo sapien
ctccagcggcagaaagcctcgtagg

SEQ ID NO: 1691164 - DNA, 25 bp, Homo sapien
agaaagcctcgtaggcagcgcgcac

SEQ ID NO: 1691165 - DNA, 25 bp, Homo sapien
acttccgaagtaatgaactcctctc

SEQ ID NO: 1691166 - DNA, 25 bp, Homo sapien
actttcagctgtgattattctggca

SEQ ID NO: 1691167 - DNA, 25 bp, Homo sapien
gtatcattaaattgtaccacttccg

SEQ ID NO: 1691168 - DNA, 25 bp, Homo sapien
tgtaccacttccgaagtaatgaact

SEQ ID NO: 1691169 - DNA, 25 bp, Homo sapien
gaatttctccatgtgcctccttcag

SEQ ID NO: 1691170 - DNA, 25 bp, Homo sapien
agagaatttctccatgtgcctcctt

SEQ ID NO: 1691171 - DNA, 25 bp, Homo sapien
ccatgtgcctccttcagtggctttc

SEQ ID NO: 1691172 - DNA, 25 bp, Homo sapien
ctaggaaaaaggcggaatagagaat

SEQ ID NO: 1691173 - DNA, 25 bp, Homo sapien
tgcagccacgcctatgggctgcttg

SEQ ID NO: 1691174 - DNA, 25 bp, Homo sapien
gggtgtggataatgtctccgtaaac

SEQ ID NO: 1691175 - DNA, 25 bp, Homo sapien
agccacgcctatgggctgcttgagg

SEQ ID NO: 1691176 - DNA, 25 bp, Homo sapien
aacacggcgggcttcctcagagaac

SEQ ID NO: 1691177 - DNA, 25 bp, Homo sapien
gtgtcttcggcaggcttcaccacga

SEQ ID NO: 1691178 - DNA, 25 bp, Homo sapien
ttcggcaggcttcaccacgacagta

SEQ ID NO: 1691179 - DNA, 25 bp, Homo sapien
ttcaccacgacagtacagccggctg

SEQ ID NO: 1691180 - DNA, 25 bp, Homo sapien
aagggcgtgtcttcggcaggcttca

SEQ ID NO: 1691181 - DNA, 25 bp, Homo sapien
tggatccaaatcaagaagaaatccc

SEQ ID NO: 1691182 - DNA, 25 bp, Homo sapien
acaatggatccaaatcaagaagaaa

SEQ ID NO: 1691183 - DNA, 25 bp, Homo sapien
aatggatccaaatcaagaagaaatc

SEQ ID NO: 1691184 - DNA, 25 bp, Homo sapien
caacaatggatccaaatcaagaaga

SEQ ID NO: 1691185 - DNA, 25 bp, Homo sapien
cagcaacgggccgtgtggtataccc

SEQ ID NO: 1691186 - DNA, 25 bp, Homo sapien
tatacccaataacagagaaccccaa

SEQ ID NO: 1691187 - DNA, 25 bp, Homo sapien
ggccgtgtggtatacccaataacag

SEQ ID NO: 1691188 - DNA, 25 bp, Homo sapien
agaaccccaaatagtccacagctgt

SEQ ID NO: 1691189 - DNA, 25 bp, Homo sapien
ttgtatacacctgaaggaatcccag

SEQ ID NO: 1691190 - DNA, 25 bp, Homo sapien
gaggatcagtacaaattgcctcccc

SEQ ID NO: 1691191 - DNA, 25 bp, Homo sapien
ctttcgagaacagggaataacattg

SEQ ID NO: 1691192 - DNA, 25 bp, Homo sapien
tttggacaccagaggatcagtacaa

SEQ ID NO: 1691193 - DNA, 25 bp, Homo sapien
tagagacccttttcacagagtttgc

SEQ ID NO: 1691194 - DNA, 25 bp, Homo sapien
cctggtccacgttggcactgtcaaa

SEQ ID NO: 1691195 - DNA, 25 bp, Homo sapien
aatttagatgccatggcccctgcta

SEQ ID NO: 1691196 - DNA, 25 bp, Homo sapien
ctataaatggagcaaggccgcccag

SEQ ID NO: 1691197 - DNA, 25 bp, Homo sapien
tgaacgtgtggctgctaccgcctct

SEQ ID NO: 1691198 - DNA, 25 bp, Homo sapien
gtcagaagctgcagacctgaccagt

SEQ ID NO: 1691199 - DNA, 25 bp, Homo sapien
gctgcagacctgaccagtgaacgtg

SEQ ID NO: 1691200 - DNA, 25 bp, Homo sapien
cagacctgaccagtgaacgtgtggc

SEQ ID NO: 1691201 - DNA, 25 bp, Homo sapien
ggcctcggcgaatgcttttacaaag

SEQ ID NO: 1691202 - DNA, 25 bp, Homo sapien
taatgggccctgagtagttccttcc

SEQ ID NO: 1691203 - DNA, 25 bp, Homo sapien
ggcatcatggatgcccctttgcacc

SEQ ID NO: 1691204 - DNA, 25 bp, Homo sapien
tcaaatccattacctacgcgcaggt

SEQ ID NO: 1691205 - DNA, 25 bp, Homo sapien
caggtaccgaatcttgtgacagtca

SEQ ID NO: 1691206 - DNA, 25 bp, Homo sapien
catctttctgaatgaaggactgagt

SEQ ID NO: 1691207 - DNA, 25 bp, Homo sapien
gtggttttcccatcatgatccttgg

SEQ ID NO: 1691208 - DNA, 25 bp, Homo sapien
agttgtcgaaactaacctggtcagc

SEQ ID NO: 1691209 - DNA, 25 bp, Homo sapien
tcgttttccacctgtcacaacggtg

SEQ ID NO: 1691210 - DNA, 25 bp, Homo sapien
gacattgcacagcagggtaggctca

SEQ ID NO: 1691211 - DNA, 25 bp, Homo sapien
tgccagaggcccgaaagtctcttca

SEQ ID NO: 1691212 - DNA, 25 bp, Homo sapien
tttagaaacggcatcattcacctgt

SEQ ID NO: 1691213 - DNA, 25 bp, Homo sapien
gggtccctggatcaatgcgacattg

SEQ ID NO: 1691214 - DNA, 25 bp, Homo sapien
ctgggtccctggatcaatgcgacat

SEQ ID NO: 1691215 - DNA, 25 bp, Homo sapien
tgggtccctggatcaatgcgacatt

SEQ ID NO: 1691216 - DNA, 25 bp, Homo sapien
gaaagcagcaccattccccgatata

SEQ ID NO: 1691217 - DNA, 25 bp, Homo sapien
tcagagttttgcaaagagatccaag

SEQ ID NO: 1691218 - DNA, 25 bp, Homo sapien
aactcagcgattaaggctagcatgc

SEQ ID NO: 1691219 - DNA, 25 bp, Homo sapien
tttcccaaataatcacaaggagtaa

SEQ ID NO: 1691220 - DNA, 25 bp, Homo sapien
gcgattgctatagcctcctcctctg

SEQ ID NO: 1691221 - DNA, 25 bp, Homo sapien
tcagctgcgttagcgattgctatag

SEQ ID NO: 1691222 - DNA, 25 bp, Homo sapien
ccaacatcagctgcgttagcgattg

SEQ ID NO: 1691223 - DNA, 25 bp, Homo sapien
tgcgttagcgattgctatagcctcc

SEQ ID NO: 1691224 - DNA, 25 bp, Homo sapien
gggcactccacagaggaaattaatc

SEQ ID NO: 1691225 - DNA, 25 bp, Homo sapien
taatccttcgttgacgccaaccatg

SEQ ID NO: 1691226 - DNA, 25 bp, Homo sapien
ttgagttccagatactcatcaatgc

SEQ ID NO: 1691227 - DNA, 25 bp, Homo sapien
aatgccatacttggacccctctcgc

SEQ ID NO: 1691228 - DNA, 25 bp, Homo sapien
acctatatatgtagataagtctcct

SEQ ID NO: 1691229 - DNA, 25 bp, Homo sapien
tatatgtagataagtctccttttaa

SEQ ID NO: 1691230 - DNA, 25 bp, Homo sapien
cctatatatgtagataagtctcctt

SEQ ID NO: 1691231 - DNA, 25 bp, Homo sapien
tatatatgtagataagtctcctttt

SEQ ID NO: 1691232 - DNA, 25 bp, Homo sapien
agggcctcattctgtaaacccagtg

SEQ ID NO: 1691233 - DNA, 25 bp, Homo sapien
cagtgctggttctctgggagtctgc

SEQ ID NO: 1691234 - DNA, 25 bp, Homo sapien
ggcacgtggcacatattggtcccta

SEQ ID NO: 1691235 - DNA, 25 bp, Homo sapien
tcaagcctttgtgacggcccatggg

SEQ ID NO: 1691236 - DNA, 25 bp, Homo sapien
tgccagtcacagtcaagggtctcct

SEQ ID NO: 1691237 - DNA, 25 bp, Homo sapien
tgcctgccagtcacagtcaagggtc

SEQ ID NO: 1691238 - DNA, 25 bp, Homo sapien
aagggtctccttcaaggtgctctgg

SEQ ID NO: 1691239 - DNA, 25 bp, Homo sapien
ggtctccttcaaggtgctctgggcc

SEQ ID NO: 1691240 - DNA, 25 bp, Homo sapien
agatgccggggaggggtgctgtgcc

SEQ ID NO: 1691241 - DNA, 25 bp, Homo sapien
cagatgcacattcggtgtcttctgt

SEQ ID NO: 1691242 - DNA, 25 bp, Homo sapien
cagatgccggggaggggtgctgtgc

SEQ ID NO: 1691243 - DNA, 25 bp, Homo sapien
ctccagatgcacattcggtgtcttc

SEQ ID NO: 1691244 - DNA, 25 bp, Homo sapien
tgcctcacagaagcacggacaattc

SEQ ID NO: 1691245 - DNA, 25 bp, Homo sapien
taaatttgggacaataaaggcatca

SEQ ID NO: 1691246 - DNA, 25 bp, Homo sapien
aggcaacaaggccactcagggaagg

SEQ ID NO: 1691247 - DNA, 25 bp, Homo sapien
gagaggtgctccttcgtgcctcaca

SEQ ID NO: 1691248 - DNA, 25 bp, Homo sapien
caatggctcttgtatgtccttagaa

SEQ ID NO: 1691249 - DNA, 25 bp, Homo sapien
cagtatcgcaaggagctaagtaagg

SEQ ID NO: 1691250 - DNA, 25 bp, Homo sapien
ctctggctcacagtatcgcaaggag

SEQ ID NO: 1691251 - DNA, 25 bp, Homo sapien
cggtgctgctcgtaacaatggctct

SEQ ID NO: 1691252 - DNA, 25 bp, Homo sapien
gaactcacggtagctatgccagaaa

SEQ ID NO: 1691253 - DNA, 25 bp, Homo sapien
gaatgtggctagtacactccaggcc

SEQ ID NO: 1691254 - DNA, 25 bp, Homo sapien
tgagaatccctgcatagctggagga

SEQ ID NO: 1691255 - DNA, 25 bp, Homo sapien
tttcaaagtgagaggcaacgccggt

SEQ ID NO: 1691256 - DNA, 25 bp, Homo sapien
gttaattccacgtttattaatcaca

SEQ ID NO: 1691257 - DNA, 25 bp, Homo sapien
ctgttaattccacgtttattaatca

SEQ ID NO: 1691258 - DNA, 25 bp, Homo sapien
ttaattccacgtttattaatcacac

SEQ ID NO: 1691259 - DNA, 25 bp, Homo sapien
taattccacgtttattaatcacaca

SEQ ID NO: 1691260 - DNA, 25 bp, Homo sapien
gcagcattggacatagcagggtgat

SEQ ID NO: 1691261 - DNA, 25 bp, Homo sapien
gattgctagttcatgacaccttttc

SEQ ID NO: 1691262 - DNA, 25 bp, Homo sapien
accttttcattactgcagcattgga

SEQ ID NO: 1691263 - DNA, 25 bp, Homo sapien
acatagcagggtgatacaggttcag

SEQ ID NO: 1691264 - DNA, 25 bp, Homo sapien
agtaactagtattcccacagattgg

SEQ ID NO: 1691265 - DNA, 25 bp, Homo sapien
ttcccacagattgggctaggattca

SEQ ID NO: 1691266 - DNA, 25 bp, Homo sapien
tagtattcccacagattgggctagg

SEQ ID NO: 1691267 - DNA, 25 bp, Homo sapien
aatcatcaagtaactagtattccca

SEQ ID NO: 1691268 - DNA, 25 bp, Homo sapien
gacccatactggtgcccaggccacc

SEQ ID NO: 1691269 - DNA, 25 bp, Homo sapien
tagcctccacccagacccatactgg

SEQ ID NO: 1691270 - DNA, 25 bp, Homo sapien
ctggcaccaggccagcttgtgtagg

SEQ ID NO: 1691271 - DNA, 25 bp, Homo sapien
gctgatgctggcaccaggccagctt

SEQ ID NO: 1691272 - DNA, 25 bp, Homo sapien
gtgatggctgtgatgccctccatac

SEQ ID NO: 1691273 - DNA, 25 bp, Homo sapien
tgtgatggctgtgatgccctccata

SEQ ID NO: 1691274 - DNA, 25 bp, Homo sapien
agggggctcagcaggctctagttga

SEQ ID NO: 1691275 - DNA, 25 bp, Homo sapien
taagggggctcagcaggctctagtt

SEQ ID NO: 1691276 - DNA, 25 bp, Homo sapien
cttaagggggctcagcaggctctag

SEQ ID NO: 1691277 - DNA, 25 bp, Homo sapien
gggggctcagcaggctctagttgac

SEQ ID NO: 1691278 - DNA, 25 bp, Homo sapien
ctggtgtgttgccaaactcggcctc

SEQ ID NO: 1691279 - DNA, 25 bp, Homo sapien
ggtgtgttgccaaactcggcctcca

SEQ ID NO: 1691280 - DNA, 25 bp, Homo sapien
tggtgtgttgccaaactcggcctcc

SEQ ID NO: 1691281 - DNA, 25 bp, Homo sapien
tgatgaggacaaattcattctccat

SEQ ID NO: 1691282 - DNA, 25 bp, Homo sapien
tcttgatgaggacaaattcattctc

SEQ ID NO: 1691283 - DNA, 25 bp, Homo sapien
cttgatgaggacaaattcattctcc

SEQ ID NO: 1691284 - DNA, 25 bp, Homo sapien
ctcttgatgaggacaaattcattct

SEQ ID NO: 1691285 - DNA, 25 bp, Homo sapien
acagttggtgatctccttgtactgg

SEQ ID NO: 1691286 - DNA, 25 bp, Homo sapien
gccccggcctggctacagttggtga

SEQ ID NO: 1691287 - DNA, 25 bp, Homo sapien
gactcctccagctttaccttgttca

SEQ ID NO: 1691288 - DNA, 25 bp, Homo sapien
tggtacaggctgtcagccccggcct

SEQ ID NO: 1691289 - DNA, 25 bp, Homo sapien
gatctccatctttgtataacacagg

SEQ ID NO: 1691290 - DNA, 25 bp, Homo sapien
ttgtataacacaggtcatccctgtg

SEQ ID NO: 1691291 - DNA, 25 bp, Homo sapien
tttgtataacacaggtcatccctgt

SEQ ID NO: 1691292 - DNA, 25 bp, Homo sapien
cagagatctccatctttgtataaca

SEQ ID NO: 1691293 - DNA, 25 bp, Homo sapien
tccagggttggcttgatgatcatca

SEQ ID NO: 1691294 - DNA, 25 bp, Homo sapien
ccagggttggcttgatgatcatcag

SEQ ID NO: 1691295 - DNA, 25 bp, Homo sapien
gtccagggttggcttgatgatcatc

SEQ ID NO: 1691296 - DNA, 25 bp, Homo sapien
agggttggcttgatgatcatcagct

SEQ ID NO: 1691297 - DNA, 25 bp, Homo sapien
ctatcacaaatctcgatcttcttca

SEQ ID NO: 1691298 - DNA, 25 bp, Homo sapien
ctataaggttttatccacacatcct

SEQ ID NO: 1691299 - DNA, 25 bp, Homo sapien
tctaaaagtactgcagtgcttctgg

SEQ ID NO: 1691300 - DNA, 25 bp, Homo sapien
tgcttctggaaacaggggtgcggaa

SEQ ID NO: 1691301 - DNA, 25 bp, Homo sapien
ggtgcggaagagtgttgtcctccta

SEQ ID NO: 1691302 - DNA, 25 bp, Homo sapien
agacaccatcttaagagaatgttat

SEQ ID NO: 1691303 - DNA, 25 bp, Homo sapien
atcttaagagaatgttatgtgtttg

SEQ ID NO: 1691304 - DNA, 25 bp, Homo sapien
ttaagagaatgttatgtgtttgatt

SEQ ID NO: 1691305 - DNA, 25 bp, Homo sapien
gacaccatcttaagagaatgttatg

SEQ ID NO: 1691306 - DNA, 25 bp, Homo sapien
gatttgagttggttctcgattaaac

SEQ ID NO: 1691307 - DNA, 25 bp, Homo sapien
ttcaacgggcggcactctcgtgatt

SEQ ID NO: 1691308 - DNA, 25 bp, Homo sapien
gcggcactctcgtgatttgagttgg

SEQ ID NO: 1691309 - DNA, 25 bp, Homo sapien
tggttctcgattaaactcaaaaaca

SEQ ID NO: 1691310 - DNA, 25 bp, Homo sapien
ccagtgatggtgttaggctaggcag

SEQ ID NO: 1691311 - DNA, 25 bp, Homo sapien
gtcgacggcagtcccctatgtgcat

SEQ ID NO: 1691312 - DNA, 25 bp, Homo sapien
tgttaggctaggcagcagctgtgct

SEQ ID NO: 1691313 - DNA, 25 bp, Homo sapien
tgtgctcggtgtggtcgacggcagt

SEQ ID NO: 1691314 - DNA, 25 bp, Homo sapien
tcctgtcccttggtctaactcagcc

SEQ ID NO: 1691315 - DNA, 25 bp, Homo sapien
ccatctctggaccttaaaggccctt

SEQ ID NO: 1691316 - DNA, 25 bp, Homo sapien
tggtctaactcagcccatctctgga

SEQ ID NO: 1691317 - DNA, 25 bp, Homo sapien
catctctggaccttaaaggcccttt

SEQ ID NO: 1691318 - DNA, 25 bp, Homo sapien
ctaggggtcatgcatgatcggaagc

SEQ ID NO: 1691319 - DNA, 25 bp, Homo sapien
gacctgcgtttattggtcacagcta

SEQ ID NO: 1691320 - DNA, 25 bp, Homo sapien
tttagttgacctgcgtttattggtc

SEQ ID NO: 1691321 - DNA, 25 bp, Homo sapien
ctgtgaaacatgctcgcaattcatc

SEQ ID NO: 1691322 - DNA, 25 bp, Homo sapien
acagtcttaggaaacctgccacggg

SEQ ID NO: 1691323 - DNA, 25 bp, Homo sapien
ttcttaagagggactccctctttga

SEQ ID NO: 1691324 - DNA, 25 bp, Homo sapien
ttaagagggactccctctttgatat

SEQ ID NO: 1691325 - DNA, 25 bp, Homo sapien
gagggactccctctttgatatactg

SEQ ID NO: 1691326 - DNA, 25 bp, Homo sapien
cagagaaactcatatttctgataat

SEQ ID NO: 1691327 - DNA, 25 bp, Homo sapien
ctccagtgctgtcaccaaaagtgct

SEQ ID NO: 1691328 - DNA, 25 bp, Homo sapien
ttctccagtgctgtcaccaaaagtg

SEQ ID NO: 1691329 - DNA, 25 bp, Homo sapien
tctccagtgctgtcaccaaaagtgc

SEQ ID NO: 1691330 - DNA, 25 bp, Homo sapien
gctcagggcttggagcttctccagt

SEQ ID NO: 1691331 - DNA, 25 bp, Homo sapien
tggtgatcaccccaacgattgtgcc

SEQ ID NO: 1691332 - DNA, 25 bp, Homo sapien
ggaggtagatctccgtctcttgaga

SEQ ID NO: 1691333 - DNA, 25 bp, Homo sapien
ggccggttctgtctctttgcatcca

SEQ ID NO: 1691334 - DNA, 25 bp, Homo sapien
gctgtgcattcgcagactctgttga

SEQ ID NO: 1691335 - DNA, 25 bp, Homo sapien
ttttcatcattaagatgaagtacat

SEQ ID NO: 1691336 - DNA, 25 bp, Homo sapien
tgttttcatcattaagatgaagtac

SEQ ID NO: 1691337 - DNA, 25 bp, Homo sapien
ttttgttttcatcattaagatgaag

SEQ ID NO: 1691338 - DNA, 25 bp, Homo sapien
tttgttttcatcattaagatgaagt

SEQ ID NO: 1691339 - DNA, 25 bp, Homo sapien
ggcgagcttcagtgtcgccagcagt

SEQ ID NO: 1691340 - DNA, 25 bp, Homo sapien
gcagcaacgcatggggcgagcttca

SEQ ID NO: 1691341 - DNA, 25 bp, Homo sapien
gcagtgaccacaggtacggtatcta

SEQ ID NO: 1691342 - DNA, 25 bp, Homo sapien
ccacaggtacggtatctacttccca

SEQ ID NO: 1691343 - DNA, 25 bp, Homo sapien
gtgagagcgcagcagtagcttcagc

SEQ ID NO: 1691344 - DNA, 25 bp, Homo sapien
gcgcagcagtagcttcagcctgtct

SEQ ID NO: 1691345 - DNA, 25 bp, Homo sapien
ggcttggtccagattcgctcctctg

SEQ ID NO: 1691346 - DNA, 25 bp, Homo sapien
ctgtcttgggcttggtccagattcg

SEQ ID NO: 1691347 - DNA, 25 bp, Homo sapien
ccacatccctgagggcgtgtgtgcg

SEQ ID NO: 1691348 - DNA, 25 bp, Homo sapien
tcgccgtggtaaccgcggcggcgga

SEQ ID NO: 1691349 - DNA, 25 bp, Homo sapien
gaaaggcgctgaatcactggcgcgc

SEQ ID NO: 1691350 - DNA, 25 bp, Homo sapien
ggggtgcaaccttgctccacctgtg

SEQ ID NO: 1691351 - DNA, 25 bp, Homo sapien
gcgtgccactgctactcgggaattt

SEQ ID NO: 1691352 - DNA, 25 bp, Homo sapien
cctctgcttaggaatgaagtcaaca

SEQ ID NO: 1691353 - DNA, 25 bp, Homo sapien
tgtggactctggaccagcagcgtgc

SEQ ID NO: 1691354 - DNA, 25 bp, Homo sapien
agagccagcattgaaagcccgtgtc

SEQ ID NO: 1691355 - DNA, 25 bp, Homo sapien
cagcctttgggctttgcgcaagaac

SEQ ID NO: 1691356 - DNA, 25 bp, Homo sapien
ttctccgcccctaggagcgcaagag

SEQ ID NO: 1691357 - DNA, 25 bp, Homo sapien
ccggtggtccgcgatttgctcactg

SEQ ID NO: 1691358 - DNA, 25 bp, Homo sapien
cgaacttcggaagagctggaaagtc

SEQ ID NO: 1691359 - DNA, 25 bp, Homo sapien
aactctctcaaaattgcgagccttg

SEQ ID NO: 1691360 - DNA, 25 bp, Homo sapien
tcaaaattgcgagccttggtcatgg

SEQ ID NO: 1691361 - DNA, 25 bp, Homo sapien
gcagagactgagtcatgctggtcat

SEQ ID NO: 1691362 - DNA, 25 bp, Homo sapien
atggcctttatcacctcccgcagag

SEQ ID NO: 1691363 - DNA, 25 bp, Homo sapien
tatttctagatcctagcacagtgcg

SEQ ID NO: 1691364 - DNA, 25 bp, Homo sapien
cacagtgcgtgtcagttgatattcc

SEQ ID NO: 1691365 - DNA, 25 bp, Homo sapien
tgttggagtccacatggtatttcta

SEQ ID NO: 1691366 - DNA, 25 bp, Homo sapien
cctgtatgtctttaaggttcagtcc

SEQ ID NO: 1691367 - DNA, 25 bp, Homo sapien
tactaattctcccatggttggacat

SEQ ID NO: 1691368 - DNA, 25 bp, Homo sapien
gactcagtcacatgcagttgctgtg

SEQ ID NO: 1691369 - DNA, 25 bp, Homo sapien
tgacttatagtaacacaggactcag

SEQ ID NO: 1691370 - DNA, 25 bp, Homo sapien
gaacaaagtgcatagtgcctgacac

SEQ ID NO: 1691371 - DNA, 25 bp, Homo sapien
tgcctataaaggtgggtgctctgaa

SEQ ID NO: 1691372 - DNA, 25 bp, Homo sapien
tctgatacacaggttctctactgcc

SEQ ID NO: 1691373 - DNA, 25 bp, Homo sapien
gaaggagcctttcttatcctgtctt

SEQ ID NO: 1691374 - DNA, 25 bp, Homo sapien
ggcctctatcacatggatcttattg

SEQ ID NO: 1691375 - DNA, 25 bp, Homo sapien
cacaaatcactttcccaggagcagc

SEQ ID NO: 1691376 - DNA, 25 bp, Homo sapien
ttcacaaatcactttcccaggagca

SEQ ID NO: 1691377 - DNA, 25 bp, Homo sapien
cccaggagcagcagagacaagagta

SEQ ID NO: 1691378 - DNA, 25 bp, Homo sapien
caggagcagcagagacaagagtaat

SEQ ID NO: 1691379 - DNA, 25 bp, Homo sapien
tgtcaaaccgccgtggagagtgcct

SEQ ID NO: 1691380 - DNA, 25 bp, Homo sapien
gatatgttatctactaacgtggctg

SEQ ID NO: 1691381 - DNA, 25 bp, Homo sapien
tgttcatatcgacactgactccggg

SEQ ID NO: 1691382 - DNA, 25 bp, Homo sapien
gctcccctttccgtgcatagcagag

SEQ ID NO: 1691383 - DNA, 25 bp, Homo sapien
tcctaattttgcaggtgacatgtac

SEQ ID NO: 1691384 - DNA, 25 bp, Homo sapien
ctcctaattttgcaggtgacatgta

SEQ ID NO: 1691385 - DNA, 25 bp, Homo sapien
tctcctaattttgcaggtgacatgt

SEQ ID NO: 1691386 - DNA, 25 bp, Homo sapien
cttctcctaattttgcaggtgacat

SEQ ID NO: 1691387 - DNA, 25 bp, Homo sapien
tgcttcagaacatgtgctgtaatca

SEQ ID NO: 1691388 - DNA, 25 bp, Homo sapien
tttgtgtgtcttccttgtgctatta

SEQ ID NO: 1691389 - DNA, 25 bp, Homo sapien
tgtgtcttccttgtgctattaattt

SEQ ID NO: 1691390 - DNA, 25 bp, Homo sapien
tcagtttcccaggtgttttgtgtgt

SEQ ID NO: 1691391 - DNA, 25 bp, Homo sapien
tcccaggtgttttgtgtgtcttcct

SEQ ID NO: 1691392 - DNA, 25 bp, Homo sapien
gagtcaaatctatacttgatattca

SEQ ID NO: 1691393 - DNA, 25 bp, Homo sapien
tgagtcaaatctatacttgatattc

SEQ ID NO: 1691394 - DNA, 25 bp, Homo sapien
ccctcaagattggagtaagtgccct

SEQ ID NO: 1691395 - DNA, 25 bp, Homo sapien
catttcaaaaacgagaacccagagg

SEQ ID NO: 1691396 - DNA, 25 bp, Homo sapien
ctaagattcgctaaggattggccat

SEQ ID NO: 1691397 - DNA, 25 bp, Homo sapien
gcattttagatctgggaaggaccta

SEQ ID NO: 1691398 - DNA, 25 bp, Homo sapien
ccttggcgattctttccagactaaa

SEQ ID NO: 1691399 - DNA, 25 bp, Homo sapien
tcggcatatgttccaagtacaagaa

SEQ ID NO: 1691400 - DNA, 25 bp, Homo sapien
tgatgttacttttgagcgcctggtc

SEQ ID NO: 1691401 - DNA, 25 bp, Homo sapien
tactactagcaatctctgggaagca

SEQ ID NO: 1691402 - DNA, 25 bp, Homo sapien
ggccttatgccttgcttcatgggaa

SEQ ID NO: 1691403 - DNA, 25 bp, Homo sapien
cactgatgttactggtcaccttaga

SEQ ID NO: 1691404 - DNA, 25 bp, Homo sapien
caggaatcaagaacatactgtcagc

SEQ ID NO: 1691405 - DNA, 25 bp, Homo sapien
aatctgaatgatcctactcctttgg

SEQ ID NO: 1691406 - DNA, 25 bp, Homo sapien
gatacattctaatgaccagaactgg

SEQ ID NO: 1691407 - DNA, 25 bp, Homo sapien
tgaaaaacgcatctcattgtaggca

SEQ ID NO: 1691408 - DNA, 25 bp, Homo sapien
gcatagctgcagaaaccatgatagg

SEQ ID NO: 1691409 - DNA, 25 bp, Homo sapien
caaaaattagatgtcgtgcacggac

SEQ ID NO: 1691410 - DNA, 25 bp, Homo sapien
tgatttaactggtaatactttggct

SEQ ID NO: 1691411 - DNA, 25 bp, Homo sapien
tgtaggctacttcagacatcttcaa

SEQ ID NO: 1691412 - DNA, 25 bp, Homo sapien
ttagaggtgctagatagtgaagaaa

SEQ ID NO: 1691413 - DNA, 25 bp, Homo sapien
ttctagtcccttaccccaggatatg

SEQ ID NO: 1691414 - DNA, 25 bp, Homo sapien
taatggtggccagtagtcatgtgac

SEQ ID NO: 1691415 - DNA, 25 bp, Homo sapien
gctagtgctactgaagaatggaatt

SEQ ID NO: 1691416 - DNA, 25 bp, Homo sapien
actgctgttgtggagtgtactgtcc

SEQ ID NO: 1691417 - DNA, 25 bp, Homo sapien
tactatggtgggagtcttggactga

SEQ ID NO: 1691418 - DNA, 25 bp, Homo sapien
aaaagtgcccatagtttagtgacaa

SEQ ID NO: 1691419 - DNA, 25 bp, Homo sapien
gaccctgtaatatgacagtctgcta

SEQ ID NO: 1691420 - DNA, 25 bp, Homo sapien
gaacagactacgtgctcagcttaga

SEQ ID NO: 1691421 - DNA, 25 bp, Homo sapien
aacgttattgtccaaacatgactgg

SEQ ID NO: 1691422 - DNA, 25 bp, Homo sapien
gtaatgactccgctgttttttctca

SEQ ID NO: 1691423 - DNA, 25 bp, Homo sapien
gttagcagccgcctgagggtgaaaa

SEQ ID NO: 1691424 - DNA, 25 bp, Homo sapien
tctgccgtcatgattctccttggca

SEQ ID NO: 1691425 - DNA, 25 bp, Homo sapien
gggaagttggtaatgactccgctgt

SEQ ID NO: 1691426 - DNA, 25 bp, Homo sapien
gcgagtgagtcgctgccgctgaagg

SEQ ID NO: 1691427 - DNA, 25 bp, Homo sapien
ctgtgtctcccgtggtgcgagtgag

SEQ ID NO: 1691428 - DNA, 25 bp, Homo sapien
ccgggcgggaattgtttccacgatg

SEQ ID NO: 1691429 - DNA, 25 bp, Homo sapien
ggcgggaattgtttccacgatgaaa

SEQ ID NO: 1691430 - DNA, 25 bp, Homo sapien
gtgagtcccgggctccgcggggaca

SEQ ID NO: 1691431 - DNA, 25 bp, Homo sapien
gccctagagtcggtccgtgagtccc

SEQ ID NO: 1691432 - DNA, 25 bp, Homo sapien
cctagagtcggtccgtgagtcccgg

SEQ ID NO: 1691433 - DNA, 25 bp, Homo sapien
cccgccctagagtcggtccgtgagt

SEQ ID NO: 1691434 - DNA, 25 bp, Homo sapien
cctgcccgtgctaccagcagcgccc

SEQ ID NO: 1691435 - DNA, 25 bp, Homo sapien
ggtggttttctcttgacatggctcc

SEQ ID NO: 1691436 - DNA, 25 bp, Homo sapien
ggctcagttggctggtggttttctc

SEQ ID NO: 1691437 - DNA, 25 bp, Homo sapien
tttctcttgacatggctcctgcccg

SEQ ID NO: 1691438 - DNA, 25 bp, Homo sapien
gcagcgcgggcggtccagtcacggt

SEQ ID NO: 1691439 - DNA, 25 bp, Homo sapien
cagcagcgcgggcggtccagtcacg

SEQ ID NO: 1691440 - DNA, 25 bp, Homo sapien
gcgcgggcggtccagtcacggtgcg

SEQ ID NO: 1691441 - DNA, 25 bp, Homo sapien
gcgggcggtccagtcacggtgcgca

SEQ ID NO: 1691442 - DNA, 25 bp, Homo sapien
ctccgccgccagtaccaatccaact

SEQ ID NO: 1691443 - DNA, 25 bp, Homo sapien
tctctccctgttgccgctgtctccg

SEQ ID NO: 1691444 - DNA, 25 bp, Homo sapien
cgccgccagtaccaatccaactccc

SEQ ID NO: 1691445 - DNA, 25 bp, Homo sapien
tttctctccctgttgccgctgtctc

SEQ ID NO: 1691446 - DNA, 25 bp, Homo sapien
aacgaggcagtactgccgcggacgc

SEQ ID NO: 1691447 - DNA, 25 bp, Homo sapien
acctttcctgagagccggaatccga

SEQ ID NO: 1691448 - DNA, 25 bp, Homo sapien
ccctttgattctgcgcaaatggtgg

SEQ ID NO: 1691449 - DNA, 25 bp, Homo sapien
ttcttttctcaaacgcgactctgcc

SEQ ID NO: 1691450 - DNA, 25 bp, Homo sapien
tccctattccgtactcttgatctgt

SEQ ID NO: 1691451 - DNA, 25 bp, Homo sapien
gtccctattccgtactcttgatctg

SEQ ID NO: 1691452 - DNA, 25 bp, Homo sapien
ctgtccctattccgtactcttgatc

SEQ ID NO: 1691453 - DNA, 25 bp, Homo sapien
cctattccgtactcttgatctgttt

SEQ ID NO: 1691454 - DNA, 25 bp, Homo sapien
tttgaggggcgattactgaaatgga

SEQ ID NO: 1691455 - DNA, 25 bp, Homo sapien
agaggagtctcaactctcaaactcc

SEQ ID NO: 1691456 - DNA, 25 bp, Homo sapien
tggagaggttaaattcaaaggctcc

SEQ ID NO: 1691457 - DNA, 25 bp, Homo sapien
aggagagaggagtctcaactctcaa

SEQ ID NO: 1691458 - DNA, 25 bp, Homo sapien
aaatggactcaacgctttttggtgc

SEQ ID NO: 1691459 - DNA, 25 bp, Homo sapien
ttttggtgccaaggacgtgcgactc

SEQ ID NO: 1691460 - DNA, 25 bp, Homo sapien
ttgttcgaagcttgaggaccgccct

SEQ ID NO: 1691461 - DNA, 25 bp, Homo sapien
gactcggcggcaaacgtttcgatga

SEQ ID NO: 1691462 - DNA, 25 bp, Homo sapien
gaatctgggcattctaaatggcccc

SEQ ID NO: 1691463 - DNA, 25 bp, Homo sapien
cagggcatcgttcacttctgactca

SEQ ID NO: 1691464 - DNA, 25 bp, Homo sapien
atctggagcctcacgactgggaaac

SEQ ID NO: 1691465 - DNA, 25 bp, Homo sapien
ttgaaatccgttcctcctgccaggg

SEQ ID NO: 1691466 - DNA, 25 bp, Homo sapien
gaagacacacaacagcaaatcatca

SEQ ID NO: 1691467 - DNA, 25 bp, Homo sapien
cacaacagcaaatcatcagggagac

SEQ ID NO: 1691468 - DNA, 25 bp, Homo sapien
caaatcatcagggagactttccact

SEQ ID NO: 1691469 - DNA, 25 bp, Homo sapien
agacacacaacagcaaatcatcagg

SEQ ID NO: 1691470 - DNA, 25 bp, Homo sapien
ggatagccagtgagatccccaggtg

SEQ ID NO: 1691471 - DNA, 25 bp, Homo sapien
aggagaaggatagccagtgagatcc

SEQ ID NO: 1691472 - DNA, 25 bp, Homo sapien
gaaggatagccagtgagatccccag

SEQ ID NO: 1691473 - DNA, 25 bp, Homo sapien
ttgaggagaaggatagccagtgaga

SEQ ID NO: 1691474 - DNA, 25 bp, Homo sapien
tagtgccaaactcatagggttcttg

SEQ ID NO: 1691475 - DNA, 25 bp, Homo sapien
tgtgagcacgggtaaatgtctgagc

SEQ ID NO: 1691476 - DNA, 25 bp, Homo sapien
gagagtaccttgcttgatgctccta

SEQ ID NO: 1691477 - DNA, 25 bp, Homo sapien
ccttgtagctcagatactggagtca

SEQ ID NO: 1691478 - DNA, 25 bp, Homo sapien
gcatggactgcacaatgctctgcac

SEQ ID NO: 1691479 - DNA, 25 bp, Homo sapien
tattctgttccggacactttacaca

SEQ ID NO: 1691480 - DNA, 25 bp, Homo sapien
aacaatgctaaaaggtatacactga

SEQ ID NO: 1691481 - DNA, 25 bp, Homo sapien
tccccacatgggtatcttggagaca

SEQ ID NO: 1691482 - DNA, 25 bp, Homo sapien
cggcgcgctctgcagtaaagccctg

SEQ ID NO: 1691483 - DNA, 25 bp, Homo sapien
agtaaagccctgctaactccgctcg

SEQ ID NO: 1691484 - DNA, 25 bp, Homo sapien
ctgatccccacggtcgctggagtgc

SEQ ID NO: 1691485 - DNA, 25 bp, Homo sapien
tccgaacaaccacgtgaccaactga

SEQ ID NO: 1691486 - DNA, 25 bp, Homo sapien
tgcagcacctcgcaaaaggccacag

SEQ ID NO: 1691487 - DNA, 25 bp, Homo sapien
tgggtggagacgctcaatcctcgta

SEQ ID NO: 1691488 - DNA, 25 bp, Homo sapien
gaacgcacgtagctatggctgcagc

SEQ ID NO: 1691489 - DNA, 25 bp, Homo sapien
tcaatcctcgtagcgaacgcacgta

SEQ ID NO: 1691490 - DNA, 25 bp, Homo sapien
ttggccggagggaaagcgagtcgtc

SEQ ID NO: 1691491 - DNA, 25 bp, Homo sapien
cgagtcgtctagaggctgtgcgcct

SEQ ID NO: 1691492 - DNA, 25 bp, Homo sapien
gcggccctgcagctgtcaaagtagg

SEQ ID NO: 1691493 - DNA, 25 bp, Homo sapien
tgtcaaagtaggacgcggcttcaga

SEQ ID NO: 1691494 - DNA, 25 bp, Homo sapien
gcagtccctcgactcacctcccaac

SEQ ID NO: 1691495 - DNA, 25 bp, Homo sapien
gccaatggggcagtccctcgactca

SEQ ID NO: 1691496 - DNA, 25 bp, Homo sapien
cagccaatggggcagtccctcgact

SEQ ID NO: 1691497 - DNA, 25 bp, Homo sapien
gggcagtccctcgactcacctccca

SEQ ID NO: 1691498 - DNA, 25 bp, Homo sapien
tgcagtccccaagcccggacccagc

SEQ ID NO: 1691499 - DNA, 25 bp, Homo sapien
caagcccggacccagccaacttgtc

SEQ ID NO: 1691500 - DNA, 25 bp, Homo sapien
cagccaacttgtcccggaggcccag

SEQ ID NO: 1691501 - DNA, 25 bp, Homo sapien
agcgccaggctagggggcgggcagt

SEQ ID NO: 1691502 - DNA, 25 bp, Homo sapien
tatgtaatgcggttgactagaccac

SEQ ID NO: 1691503 - DNA, 25 bp, Homo sapien
cattttaccttgtgtcctggcgcgt

SEQ ID NO: 1691504 - DNA, 25 bp, Homo sapien
tgcgcctgtgcctcgtcgatagatg

SEQ ID NO: 1691505 - DNA, 25 bp, Homo sapien
ccaaagtgctggaaggtcgaggcaa

SEQ ID NO: 1691506 - DNA, 25 bp, Homo sapien
aaagagcagcatcttaactttcctg

SEQ ID NO: 1691507 - DNA, 25 bp, Homo sapien
agatactagggtatgcccaggtcca

SEQ ID NO: 1691508 - DNA, 25 bp, Homo sapien
gactaaggtgactaaagttaatgac

SEQ ID NO: 1691509 - DNA, 25 bp, Homo sapien
tgtcctggattaaatagtcaccaga

SEQ ID NO: 1691510 - DNA, 25 bp, Homo sapien
tatgtagatggtgaagcacagaaga

SEQ ID NO: 1691511 - DNA, 25 bp, Homo sapien
ctctttgatttcttcttgtttctgc

SEQ ID NO: 1691512 - DNA, 25 bp, Homo sapien
tgatttcttcttgtttctgcttcat

SEQ ID NO: 1691513 - DNA, 25 bp, Homo sapien
tctctttgatttcttcttgtttctg

SEQ ID NO: 1691514 - DNA, 25 bp, Homo sapien
ctttgatttcttcttgtttctgctt

SEQ ID NO: 1691515 - DNA, 25 bp, Homo sapien
tacttttagccccatgctttctaca

SEQ ID NO: 1691516 - DNA, 25 bp, Homo sapien
aggcttacagaaattatagccaggc

SEQ ID NO: 1691517 - DNA, 25 bp, Homo sapien
cctctgactaactcaaggcttacag

SEQ ID NO: 1691518 - DNA, 25 bp, Homo sapien
ttgggtcagacttaatattcaaccg

SEQ ID NO: 1691519 - DNA, 25 bp, Homo sapien
tagaaggtggctaaaatgtcagtgc

SEQ ID NO: 1691520 - DNA, 25 bp, Homo sapien
tgctatataattgcgtaaggtcgcc

SEQ ID NO: 1691521 - DNA, 25 bp, Homo sapien
tacctgatagtagaagcagttctgc

SEQ ID NO: 1691522 - DNA, 25 bp, Homo sapien
taaggtcgcctatgaacaagacact

SEQ ID NO: 1691523 - DNA, 25 bp, Homo sapien
cagagttcttcttgggacagaacta

SEQ ID NO: 1691524 - DNA, 25 bp, Homo sapien
cttcagagttcttcttgggacagaa

SEQ ID NO: 1691525 - DNA, 25 bp, Homo sapien
ttcagagttcttcttgggacagaac

SEQ ID NO: 1691526 - DNA, 25 bp, Homo sapien
gagttcttcttgggacagaactatt

SEQ ID NO: 1691527 - DNA, 25 bp, Homo sapien
tttctcttccaacaagagatccaga

SEQ ID NO: 1691528 - DNA, 25 bp, Homo sapien
tctcttccaacaagagatccagatg

SEQ ID NO: 1691529 - DNA, 25 bp, Homo sapien
cttccaacaagagatccagatgcag

SEQ ID NO: 1691530 - DNA, 25 bp, Homo sapien
tcttccaacaagagatccagatgca

SEQ ID NO: 1691531 - DNA, 25 bp, Homo sapien
aagagtacgcatatctaactttttc

SEQ ID NO: 1691532 - DNA, 25 bp, Homo sapien
aaaaagagtacgcatatctaacttt

SEQ ID NO: 1691533 - DNA, 25 bp, Homo sapien
caattattttggattagactggggt

SEQ ID NO: 1691534 - DNA, 25 bp, Homo sapien
gactggggtcaagagcttagctgaa

SEQ ID NO: 1691535 - DNA, 25 bp, Homo sapien
taagatcaaatgactcctgggtgac

SEQ ID NO: 1691536 - DNA, 25 bp, Homo sapien
ggaagttgtagatgttaagtggtca

SEQ ID NO: 1691537 - DNA, 25 bp, Homo sapien
tgactcctccaagatttttattttc

SEQ ID NO: 1691538 - DNA, 25 bp, Homo sapien
tctgggacaataaccccagggctgg

SEQ ID NO: 1691539 - DNA, 25 bp, Homo sapien
ttacagtaattggcagaattcataa

SEQ ID NO: 1691540 - DNA, 25 bp, Homo sapien
cctaatcagatatgagtgtcacaaa

SEQ ID NO: 1691541 - DNA, 25 bp, Homo sapien
tgctttatttctatccagtcaacct

SEQ ID NO: 1691542 - DNA, 25 bp, Homo sapien
aaatcctgctcttcaatctacaata

SEQ ID NO: 1691543 - DNA, 25 bp, Homo sapien
ccaaatgttactgtgaccttcagca

SEQ ID NO: 1691544 - DNA, 25 bp, Homo sapien
tatcgcagagggttacaaggataat

SEQ ID NO: 1691545 - DNA, 25 bp, Homo sapien
catgtatcgcagagggttacaagga

SEQ ID NO: 1691546 - DNA, 25 bp, Homo sapien
cagagggttacaaggataatgtgtt

SEQ ID NO: 1691547 - DNA, 25 bp, Homo sapien
gggttacaaggataatgtgttccac

SEQ ID NO: 1691548 - DNA, 25 bp, Homo sapien
taataccactgtcaacaaatataat

SEQ ID NO: 1691549 - DNA, 25 bp, Homo sapien
ttgggatttcttcgcagttatttta

SEQ ID NO: 1691550 - DNA, 25 bp, Homo sapien
agtttgggatttcttcgcagttatt

SEQ ID NO: 1691551 - DNA, 25 bp, Homo sapien
tataataaagttcaaacaacaaatg

SEQ ID NO: 1691552 - DNA, 25 bp, Homo sapien
ccttaagtgcttcatacagcgcctt

SEQ ID NO: 1691553 - DNA, 25 bp, Homo sapien
tccttaagtgcttcatacagcgcct

SEQ ID NO: 1691554 - DNA, 25 bp, Homo sapien
atacagcgcctttctccgtttttct

SEQ ID NO: 1691555 - DNA, 25 bp, Homo sapien
ttaagtgcttcatacagcgcctttc

SEQ ID NO: 1691556 - DNA, 25 bp, Homo sapien
gcagcatagaattgactctcaacac

SEQ ID NO: 1691557 - DNA, 25 bp, Homo sapien
atggaggacatgcagcatagaattg

SEQ ID NO: 1691558 - DNA, 25 bp, Homo sapien
attgactctcaacacaacgggattc

SEQ ID NO: 1691559 - DNA, 25 bp, Homo sapien
ctccaagtatataacatggaggaca

SEQ ID NO: 1691560 - DNA, 25 bp, Homo sapien
tcctttttcaggcgggcaatttcat

SEQ ID NO: 1691561 - DNA, 25 bp, Homo sapien
ttcaggcgggcaatttcattgtcct

SEQ ID NO: 1691562 - DNA, 25 bp, Homo sapien
caggcgggcaatttcattgtccttt

SEQ ID NO: 1691563 - DNA, 25 bp, Homo sapien
attctcctttttcaggcgggcaatt

SEQ ID NO: 1691564 - DNA, 25 bp, Homo sapien
aaattatccagaggttcaccattca

SEQ ID NO: 1691565 - DNA, 25 bp, Homo sapien
tccactagagaatcctcaacagttt

SEQ ID NO: 1691566 - DNA, 25 bp, Homo sapien
tacatggctttgcatccgtagagga

SEQ ID NO: 1691567 - DNA, 25 bp, Homo sapien
cagcacacgtgccaatttctgagtc

SEQ ID NO: 1691568 - DNA, 25 bp, Homo sapien
gtactctgctacaaagaactagtgg

SEQ ID NO: 1691569 - DNA, 25 bp, Homo sapien
gaactagtggaggtaaacttcggca

SEQ ID NO: 1691570 - DNA, 25 bp, Homo sapien
tactttaatgcaatagggtcccagg

SEQ ID NO: 1691571 - DNA, 25 bp, Homo sapien
ggaaatttgattccagagttggcat

SEQ ID NO: 1691572 - DNA, 25 bp, Homo sapien
taagtcatggctgacaactgagaaa

SEQ ID NO: 1691573 - DNA, 25 bp, Homo sapien
tgacaactgagaaaatcctattcac

SEQ ID NO: 1691574 - DNA, 25 bp, Homo sapien
tttagtaataaacataagtcatggc

SEQ ID NO: 1691575 - DNA, 25 bp, Homo sapien
taataaacataagtcatggctgaca

SEQ ID NO: 1691576 - DNA, 25 bp, Homo sapien
tacacatactccttatatttcatta

SEQ ID NO: 1691577 - DNA, 25 bp, Homo sapien
tttcattattctaagttatacacaa

SEQ ID NO: 1691578 - DNA, 25 bp, Homo sapien
tatttcattattctaagttatacac

SEQ ID NO: 1691579 - DNA, 25 bp, Homo sapien
tttctacacatactccttatatttc

SEQ ID NO: 1691580 - DNA, 25 bp, Homo sapien
cagctgagtacatggaagaagtggc

SEQ ID NO: 1691581 - DNA, 25 bp, Homo sapien
gctcacttgttgcaagatgaggagt

SEQ ID NO: 1691582 - DNA, 25 bp, Homo sapien
gaagaagtggctcacttgttgcaag

SEQ ID NO: 1691583 - DNA, 25 bp, Homo sapien
gctgagtacatggaagaagtggctc

SEQ ID NO: 1691584 - DNA, 25 bp, Homo sapien
gcagttccaagaaattttgcttagt

SEQ ID NO: 1691585 - DNA, 25 bp, Homo sapien
agtaacatgggctgagaagtgaaaa

SEQ ID NO: 1691586 - DNA, 25 bp, Homo sapien
ctagtaacaatgtcagatcagtttc

SEQ ID NO: 1691587 - DNA, 25 bp, Homo sapien
ggcaatagattaatcctgaactaat

SEQ ID NO: 1691588 - DNA, 25 bp, Homo sapien
gtgagctcagattgtgccattgtgc

SEQ ID NO: 1691589 - DNA, 25 bp, Homo sapien
ctaattcaagttcacttctcaaaat

SEQ ID NO: 1691590 - DNA, 25 bp, Homo sapien
gagctcagattgtgccattgtgctc

SEQ ID NO: 1691591 - DNA, 25 bp, Homo sapien
aaataaatttccagggccgggcatg

SEQ ID NO: 1691592 - DNA, 25 bp, Homo sapien
ggaagtaactcgctcaaactgcctt

SEQ ID NO: 1691593 - DNA, 25 bp, Homo sapien
tcagcacctgtacctcgcaagaatg

SEQ ID NO: 1691594 - DNA, 25 bp, Homo sapien
gattgccatacctgtagccaagtga

SEQ ID NO: 1691595 - DNA, 25 bp, Homo sapien
ccagatgaaagagcaagccgattgc

SEQ ID NO: 1691596 - DNA, 25 bp, Homo sapien
tgaagccagttaatttgagcaccag

SEQ ID NO: 1691597 - DNA, 25 bp, Homo sapien
ggtaaatgcaccaggctaaaaggcc

SEQ ID NO: 1691598 - DNA, 25 bp, Homo sapien
caagaaggatgctccccagtttggt

SEQ ID NO: 1691599 - DNA, 25 bp, Homo sapien
gtttctttggatcctgacagcctag

SEQ ID NO: 1691600 - DNA, 25 bp, Homo sapien
ttcaccctgaataccccagtctgaa

SEQ ID NO: 1691601 - DNA, 25 bp, Homo sapien
ctgctgactcaaacaataaactcat

SEQ ID NO: 1691602 - DNA, 25 bp, Homo sapien
tggaacacccgcactgctgactcaa

SEQ ID NO: 1691603 - DNA, 25 bp, Homo sapien
tctgaacagttggagggcatctgct

SEQ ID NO: 1691604 - DNA, 25 bp, Homo sapien
gataaataacgccatatcagtggcg

SEQ ID NO: 1691605 - DNA, 25 bp, Homo sapien
tctccaagtaagcaatgcatgctga

SEQ ID NO: 1691606 - DNA, 25 bp, Homo sapien
tcttgcaaacgattgacgcctcaga

SEQ ID NO: 1691607 - DNA, 25 bp, Homo sapien
tgacgcctcagagatctgaacaacc

SEQ ID NO: 1691608 - DNA, 25 bp, Homo sapien
ccaaggcgttgatgagactcttcag

SEQ ID NO: 1691609 - DNA, 25 bp, Homo sapien
ggctgaggttctcagttgataccaa

SEQ ID NO: 1691610 - DNA, 25 bp, Homo sapien
cagatcttttggcttagcaactcga

SEQ ID NO: 1691611 - DNA, 25 bp, Homo sapien
cttttggcttagcaactcgaaacag

SEQ ID NO: 1691612 - DNA, 25 bp, Homo sapien
tgttcaaaaagcccgagttctccca

SEQ ID NO: 1691613 - DNA, 25 bp, Homo sapien
gtagcatgttcaaaaagcccgagtt

SEQ ID NO: 1691614 - DNA, 25 bp, Homo sapien
catgttcaaaaagcccgagttctcc

SEQ ID NO: 1691615 - DNA, 25 bp, Homo sapien
tagcatgttcaaaaagcccgagttc

SEQ ID NO: 1691616 - DNA, 25 bp, Homo sapien
caaggtccagttgagaatagtcatc

SEQ ID NO: 1691617 - DNA, 25 bp, Homo sapien
tacctaaagtctgctgttcctcaag

SEQ ID NO: 1691618 - DNA, 25 bp, Homo sapien
aggcctccttctttgatacctaaag

SEQ ID NO: 1691619 - DNA, 25 bp, Homo sapien
ctttagtcccagtgatagtgcctta

SEQ ID NO: 1691620 - DNA, 25 bp, Homo sapien
tctgccacaactggcgatcccttac

SEQ ID NO: 1691621 - DNA, 25 bp, Homo sapien
ttctgccacaactggcgatccctta

SEQ ID NO: 1691622 - DNA, 25 bp, Homo sapien
attctgccacaactggcgatccctt

SEQ ID NO: 1691623 - DNA, 25 bp, Homo sapien
cattctgccacaactggcgatccct

SEQ ID NO: 1691624 - DNA, 25 bp, Homo sapien
gagatagacagcttgtgtttgtggc

SEQ ID NO: 1691625 - DNA, 25 bp, Homo sapien
gatagacagcttgtgtttgtggcca

SEQ ID NO: 1691626 - DNA, 25 bp, Homo sapien
ttgtggccattcaaccagaaaagaa

SEQ ID NO: 1691627 - DNA, 25 bp, Homo sapien
ccattcaaccagaaaagaataacag

SEQ ID NO: 1691628 - DNA, 25 bp, Homo sapien
tatttacacaatgggtgcccctcag

SEQ ID NO: 1691629 - DNA, 25 bp, Homo sapien
tacttgggcttcctgcaccggtggt

SEQ ID NO: 1691630 - DNA, 25 bp, Homo sapien
gtagggcctcgtgcttgtgaacagc

SEQ ID NO: 1691631 - DNA, 25 bp, Homo sapien
gtcctgtgagtagggcctcgtgctt

SEQ ID NO: 1691632 - DNA, 25 bp, Homo sapien
cctcttacgtccacacgcttggtag

SEQ ID NO: 1691633 - DNA, 25 bp, Homo sapien
ctaggattgtgactaatcactgccc

SEQ ID NO: 1691634 - DNA, 25 bp, Homo sapien
cacacgcttggtagaaggtctagga

SEQ ID NO: 1691635 - DNA, 25 bp, Homo sapien
gaaggtctaggattgtgactaatca

SEQ ID NO: 1691636 - DNA, 25 bp, Homo sapien
aggcgctgtgagaagtgacagctcc

SEQ ID NO: 1691637 - DNA, 25 bp, Homo sapien
tcgaagggagtaggtgcattttgaa

SEQ ID NO: 1691638 - DNA, 25 bp, Homo sapien
gcagcagatagagacccctcacgtt

SEQ ID NO: 1691639 - DNA, 25 bp, Homo sapien
aagtcatcaggtgctaaggtggcag

SEQ ID NO: 1691640 - DNA, 25 bp, Homo sapien
gtgttgctttgatgccgatctgtgt

SEQ ID NO: 1691641 - DNA, 25 bp, Homo sapien
tgcccctgacatgacaaggagccgt

SEQ ID NO: 1691642 - DNA, 25 bp, Homo sapien
gcttctgattttgcgtacaacgcgg

SEQ ID NO: 1691643 - DNA, 25 bp, Homo sapien
caccctggtgggttcgggcatctga

SEQ ID NO: 1691644 - DNA, 25 bp, Homo sapien
agccgttgaaactggagcgtcctca

SEQ ID NO: 1691645 - DNA, 25 bp, Homo sapien
tattccaccaggcacttgagtcgaa

SEQ ID NO: 1691646 - DNA, 25 bp, Homo sapien
cagagaggcctgtgtacgtttgctc

SEQ ID NO: 1691647 - DNA, 25 bp, Homo sapien
gggcacacggcctacagctgttgaa

SEQ ID NO: 1691648 - DNA, 25 bp, Homo sapien
aatagtatctactgccgacaagagg

SEQ ID NO: 1691649 - DNA, 25 bp, Homo sapien
gacaattagtgggaaagggctgaac

SEQ ID NO: 1691650 - DNA, 25 bp, Homo sapien
tctagttgcaagctaaccactccca

SEQ ID NO: 1691651 - DNA, 25 bp, Homo sapien
caaagagctagatagtaacgaagcc

SEQ ID NO: 1691652 - DNA, 25 bp, Homo sapien
gcagtcatacctttaacccatagtt

SEQ ID NO: 1691653 - DNA, 25 bp, Homo sapien
ggtggccaattgctttgacagtgat

SEQ ID NO: 1691654 - DNA, 25 bp, Homo sapien
caggtaaaatagttgagacagtctc

SEQ ID NO: 1691655 - DNA, 25 bp, Homo sapien
tgtacagaacacgtaaggataggag

SEQ ID NO: 1691656 - DNA, 25 bp, Homo sapien
ggttatcaacatccaggaatcgaag

SEQ ID NO: 1691657 - DNA, 25 bp, Homo sapien
ccgttggtaaggtgagaagtctcta

SEQ ID NO: 1691658 - DNA, 25 bp, Homo sapien
ccctccctcttgaaactatggtgtt

SEQ ID NO: 1691659 - DNA, 25 bp, Homo sapien
ggttcactgccttcagcgctgtttg

SEQ ID NO: 1691660 - DNA, 25 bp, Homo sapien
gcttcaacctcgtgatactttcatg

SEQ ID NO: 1691661 - DNA, 25 bp, Homo sapien
tgttttggcttgctccggtgaccct

SEQ ID NO: 1691662 - DNA, 25 bp, Homo sapien
aaagtgttttggcttgctccggtga

SEQ ID NO: 1691663 - DNA, 25 bp, Homo sapien
tggcttgctccggtgaccctgccat

SEQ ID NO: 1691664 - DNA, 25 bp, Homo sapien
caaaagtgttttggcttgctccggt

SEQ ID NO: 1691665 - DNA, 25 bp, Homo sapien
tgtcttctaggatgtcgcagtctag

SEQ ID NO: 1691666 - DNA, 25 bp, Homo sapien
aagacctagatcctgtggctgcaag

SEQ ID NO: 1691667 - DNA, 25 bp, Homo sapien
tggctgcaagtctaatgcctggact

SEQ ID NO: 1691668 - DNA, 25 bp, Homo sapien
agtctagcagggcatgctgccttca

SEQ ID NO: 1691669 - DNA, 25 bp, Homo sapien
ttggagttctcccttctaaagtcaa

SEQ ID NO: 1691670 - DNA, 25 bp, Homo sapien
ttgggcttcaaagttggagttctcc

SEQ ID NO: 1691671 - DNA, 25 bp, Homo sapien
aaagtcaacattctgccaaggatca

SEQ ID NO: 1691672 - DNA, 25 bp, Homo sapien
tgccagggtgtttgtatctgaagac

SEQ ID NO: 1691673 - DNA, 25 bp, Homo sapien
ggcggcggcgtctgcaaagcctttt

SEQ ID NO: 1691674 - DNA, 25 bp, Homo sapien
gcacacggttttcctcggcggcggc

SEQ ID NO: 1691675 - DNA, 25 bp, Homo sapien
taatagcacacggttttcctcggcg

SEQ ID NO: 1691676 - DNA, 25 bp, Homo sapien
ggctaatagcacacggttttcctcg

SEQ ID NO: 1691677 - DNA, 25 bp, Homo sapien
cgtcgacggcaatgtcgaagaacat

SEQ ID NO: 1691678 - DNA, 25 bp, Homo sapien
ctcaaaggagatgcggcccaagggc

SEQ ID NO: 1691679 - DNA, 25 bp, Homo sapien
aaggagatgcggcccaagggctcac

SEQ ID NO: 1691680 - DNA, 25 bp, Homo sapien
aaaggagatgcggcccaagggctca

SEQ ID NO: 1691681 - DNA, 25 bp, Homo sapien
tcaaaggagatgcggcccaagggct

SEQ ID NO: 1691682 - DNA, 25 bp, Homo sapien
ctttatggattagatgagcagtcac

SEQ ID NO: 1691683 - DNA, 25 bp, Homo sapien
taacatagctttatggattagatga

SEQ ID NO: 1691684 - DNA, 25 bp, Homo sapien
ctgttaacatagctttatggattag

SEQ ID NO: 1691685 - DNA, 25 bp, Homo sapien
catagctttatggattagatgagca

SEQ ID NO: 1691686 - DNA, 25 bp, Homo sapien
aaattttctgctgtctttgggacct

SEQ ID NO: 1691687 - DNA, 25 bp, Homo sapien
gaaaattttctgctgtctttgggac

SEQ ID NO: 1691688 - DNA, 25 bp, Homo sapien
ttttctgctgtctttgggaccttgt

SEQ ID NO: 1691689 - DNA, 25 bp, Homo sapien
ctcagagcacgaaaattttctgctg

SEQ ID NO: 1691690 - DNA, 25 bp, Homo sapien
cttataaccaaatcctttctctcca

SEQ ID NO: 1691691 - DNA, 25 bp, Homo sapien
ataaccaaatcctttctctccagtg

SEQ ID NO: 1691692 - DNA, 25 bp, Homo sapien
tgtgaaagcaggaacccttataacc

SEQ ID NO: 1691693 - DNA, 25 bp, Homo sapien
ctgtgaaagcaggaacccttataac

SEQ ID NO: 1691694 - DNA, 25 bp, Homo sapien
ccctgacacataaaccctggaataa

SEQ ID NO: 1691695 - DNA, 25 bp, Homo sapien
ctgacacataaaccctggaataatt

SEQ ID NO: 1691696 - DNA, 25 bp, Homo sapien
tatggcgtgtgaagtcaccaccctg

SEQ ID NO: 1691697 - DNA, 25 bp, Homo sapien
caccctgacacataaaccctggaat

SEQ ID NO: 1691698 - DNA, 25 bp, Homo sapien
ggatgaagttctcatcttcaaattt

SEQ ID NO: 1691699 - DNA, 25 bp, Homo sapien
taggatgaagttctcatcttcaaat

SEQ ID NO: 1691700 - DNA, 25 bp, Homo sapien
ttaggatgaagttctcatcttcaaa

SEQ ID NO: 1691701 - DNA, 25 bp, Homo sapien
ctttaggatgaagttctcatcttca

SEQ ID NO: 1691702 - DNA, 25 bp, Homo sapien
tgccatggacaagatttcaggacct

SEQ ID NO: 1691703 - DNA, 25 bp, Homo sapien
ccatggacaagatttcaggacctgt

SEQ ID NO: 1691704 - DNA, 25 bp, Homo sapien
tggacaagatttcaggacctgtatg

SEQ ID NO: 1691705 - DNA, 25 bp, Homo sapien
tttgccatggacaagatttcaggac

SEQ ID NO: 1691706 - DNA, 25 bp, Homo sapien
aagatactgggatactgcaagcaaa

SEQ ID NO: 1691707 - DNA, 25 bp, Homo sapien
caaagatactgggatactgcaagca

SEQ ID NO: 1691708 - DNA, 25 bp, Homo sapien
agcacaaagatactgggatactgca

SEQ ID NO: 1691709 - DNA, 25 bp, Homo sapien
tactgggatactgcaagcaaatggg

SEQ ID NO: 1691710 - DNA, 25 bp, Homo sapien
tgtaagtatgggctgtcccttttcc

SEQ ID NO: 1691711 - DNA, 25 bp, Homo sapien
ctgtaagtatgggctgtcccttttc

SEQ ID NO: 1691712 - DNA, 25 bp, Homo sapien
tctgtaagtatgggctgtccctttt

SEQ ID NO: 1691713 - DNA, 25 bp, Homo sapien
ctttcctacggtgttatatttagtg

SEQ ID NO: 1691714 - DNA, 25 bp, Homo sapien
ggaagcctctgatgatttggcggca

SEQ ID NO: 1691715 - DNA, 25 bp, Homo sapien
ggatgtggcaggtgcttctgtgcac

SEQ ID NO: 1691716 - DNA, 25 bp, Homo sapien
tgcctttatacccacttgcacctgg

SEQ ID NO: 1691717 - DNA, 25 bp, Homo sapien
gcccagctgtatcaggccagaggaa

SEQ ID NO: 1691718 - DNA, 25 bp, Homo sapien
tcacgattgtggcttcttgagacca

SEQ ID NO: 1691719 - DNA, 25 bp, Homo sapien
gagcatccaggtatcacatctttgt

SEQ ID NO: 1691720 - DNA, 25 bp, Homo sapien
cagtccacttttttcagaagcccca

SEQ ID NO: 1691721 - DNA, 25 bp, Homo sapien
catgaggccatatgaagctctgagc

SEQ ID NO: 1691722 - DNA, 25 bp, Homo sapien
agcaggcacaccacacagcatttga

SEQ ID NO: 1691723 - DNA, 25 bp, Homo sapien
gcaggcccttggttatggagaactc

SEQ ID NO: 1691724 - DNA, 25 bp, Homo sapien
ccacacagcatttgagttccagctc

SEQ ID NO: 1691725 - DNA, 25 bp, Homo sapien
tttggttgagcaagagaccctccca

SEQ ID NO: 1691726 - DNA, 25 bp, Homo sapien
taccacttggttactcctgaacaaa

SEQ ID NO: 1691727 - DNA, 25 bp, Homo sapien
gagcttttgctctgcctaaatggca

SEQ ID NO: 1691728 - DNA, 25 bp, Homo sapien
tcataggtgtcctgaagactttaca

SEQ ID NO: 1691729 - DNA, 25 bp, Homo sapien
aaagcaggcgatctagatgtaagac

SEQ ID NO: 1691730 - DNA, 25 bp, Homo sapien
tgagctagccaagatactgcgtttg

SEQ ID NO: 1691731 - DNA, 25 bp, Homo sapien
taagcaaggaggtaagagcagtcac

SEQ ID NO: 1691732 - DNA, 25 bp, Homo sapien
tctgggtagtaaccatcaggtggcg

SEQ ID NO: 1691733 - DNA, 25 bp, Homo sapien
aattgcaaggtcagttcaggcactc

SEQ ID NO: 1691734 - DNA, 25 bp, Homo sapien
taggaatatcatcgtctgcagagca

SEQ ID NO: 1691735 - DNA, 25 bp, Homo sapien
ttgtgacttgttcttcccggctggc

SEQ ID NO: 1691736 - DNA, 25 bp, Homo sapien
gacccctgtacaatgaggagctgga

SEQ ID NO: 1691737 - DNA, 25 bp, Homo sapien
tgcaaacgtcgtcattaaagggaag

SEQ ID NO: 1691738 - DNA, 25 bp, Homo sapien
tacacgtgacaaaaggtatacctat

SEQ ID NO: 1691739 - DNA, 25 bp, Homo sapien
taaatcccaatcagtgagacctcaa

SEQ ID NO: 1691740 - DNA, 25 bp, Homo sapien
ctgctcagggtaacaaagtattgcc

SEQ ID NO: 1691741 - DNA, 25 bp, Homo sapien
gaaggttcatcttttcaatccgccc

SEQ ID NO: 1691742 - DNA, 25 bp, Homo sapien
cactgggggcgcccaaggctgttcc

SEQ ID NO: 1691743 - DNA, 25 bp, Homo sapien
gcactgggggcgcccaaggctgttc

SEQ ID NO: 1691744 - DNA, 25 bp, Homo sapien
agcactgggggcgcccaaggctgtt

SEQ ID NO: 1691745 - DNA, 25 bp, Homo sapien
tccctcttgttcagtcggtttacca

SEQ ID NO: 1691746 - DNA, 25 bp, Homo sapien
gattcctgttcggtgatgccctgac

SEQ ID NO: 1691747 - DNA, 25 bp, Homo sapien
tgacccacggaacttgcctcttccc

SEQ ID NO: 1691748 - DNA, 25 bp, Homo sapien
cctgggcgtgtctccggggattcct

SEQ ID NO: 1691749 - DNA, 25 bp, Homo sapien
taggggtcataggcagccagctcac

SEQ ID NO: 1691750 - DNA, 25 bp, Homo sapien
ttaggggtcataggcagccagctca

SEQ ID NO: 1691751 - DNA, 25 bp, Homo sapien
aaggagatatttggaaatctactgg

SEQ ID NO: 1691752 - DNA, 25 bp, Homo sapien
gaaactgcatcttcctgcgctgtgc

SEQ ID NO: 1691753 - DNA, 25 bp, Homo sapien
ctagaggcagaacaagggctggcga

SEQ ID NO: 1691754 - DNA, 25 bp, Homo sapien
tgcgctgtgctagatgtccaggtat

SEQ ID NO: 1691755 - DNA, 25 bp, Homo sapien
ccggccctcgtcatttctttgaggg

SEQ ID NO: 1691756 - DNA, 25 bp, Homo sapien
cccggccctcgtcatttctttgagg

SEQ ID NO: 1691757 - DNA, 25 bp, Homo sapien
ttcccagccctatcctaattagagg

SEQ ID NO: 1691758 - DNA, 25 bp, Homo sapien
gaggcgccagctcaaccgtgagtgt

SEQ ID NO: 1691759 - DNA, 25 bp, Homo sapien
cgtgagtgtcccgtctggtgttacc

SEQ ID NO: 1691760 - DNA, 25 bp, Homo sapien
tacactggatcagaaacaggccatg

SEQ ID NO: 1691761 - DNA, 25 bp, Homo sapien
ctttgccatgagcaggttttaggcc

SEQ ID NO: 1691762 - DNA, 25 bp, Homo sapien
ttttaggccgctctgttgggaccat

SEQ ID NO: 1691763 - DNA, 25 bp, Homo sapien
tatacgtctggacttaacttccagg

SEQ ID NO: 1691764 - DNA, 25 bp, Homo sapien
gcaagacccttttgttcctttgcca

SEQ ID NO: 1691765 - DNA, 25 bp, Homo sapien
cagttgccattctccactgagtaac

SEQ ID NO: 1691766 - DNA, 25 bp, Homo sapien
tctgtttctccccaggatggtttta

SEQ ID NO: 1691767 - DNA, 25 bp, Homo sapien
cactgagtaactgaaggtctgtttc

SEQ ID NO: 1691768 - DNA, 25 bp, Homo sapien
attctccactgagtaactgaaggtc

SEQ ID NO: 1691769 - DNA, 25 bp, Homo sapien
cctcaagtaggctggacactctcat

SEQ ID NO: 1691770 - DNA, 25 bp, Homo sapien
taggctggacactctcatgagtcaa

SEQ ID NO: 1691771 - DNA, 25 bp, Homo sapien
ctctcatgagtcaaggtgccttggc

SEQ ID NO: 1691772 - DNA, 25 bp, Homo sapien
tctcatgagtcaaggtgccttggca

SEQ ID NO: 1691773 - DNA, 25 bp, Homo sapien
tatctaccatacttcctgctcaagc

SEQ ID NO: 1691774 - DNA, 25 bp, Homo sapien
atgagtatctaccatacttcctgct

SEQ ID NO: 1691775 - DNA, 25 bp, Homo sapien
ccctgtggtatgaatgagtatctac

SEQ ID NO: 1691776 - DNA, 25 bp, Homo sapien
gagtatctaccatacttcctgctca

SEQ ID NO: 1691777 - DNA, 25 bp, Homo sapien
ggatatcaccttactttgatccatt

SEQ ID NO: 1691778 - DNA, 25 bp, Homo sapien
tagagtgtgaagtctccattaaggc

SEQ ID NO: 1691779 - DNA, 25 bp, Homo sapien
gaagtctccattaaggctttctccc

SEQ ID NO: 1691780 - DNA, 25 bp, Homo sapien
ggcagctactgttctcttcggatat

SEQ ID NO: 1691781 - DNA, 25 bp, Homo sapien
tgcttagttcgcgaggtagttcctg

SEQ ID NO: 1691782 - DNA, 25 bp, Homo sapien
tagttcctggtgataggtcttgtct

SEQ ID NO: 1691783 - DNA, 25 bp, Homo sapien
tattttctttcggatgtgggtgtac

SEQ ID NO: 1691784 - DNA, 25 bp, Homo sapien
gtcgtaggcacactctggaccacac

SEQ ID NO: 1691785 - DNA, 25 bp, Homo sapien
agatcatttcctgaaggccgagaga

SEQ ID NO: 1691786 - DNA, 25 bp, Homo sapien
tctttgaaagaagatcatttcctga

SEQ ID NO: 1691787 - DNA, 25 bp, Homo sapien
tcatttcctgaaggccgagagatcc

SEQ ID NO: 1691788 - DNA, 25 bp, Homo sapien
ctgaaggccgagagatccaggctct

SEQ ID NO: 1691789 - DNA, 25 bp, Homo sapien
caaaacctgtgctttgcaatgctaa

SEQ ID NO: 1691790 - DNA, 25 bp, Homo sapien
tggtgatttcatctggccccaggac

SEQ ID NO: 1691791 - DNA, 25 bp, Homo sapien
tcgtagcatactcccagtgtgccca

SEQ ID NO: 1691792 - DNA, 25 bp, Homo sapien
ccaggacctttgcaagttcgtagca

SEQ ID NO: 1691793 - DNA, 25 bp, Homo sapien
cgcttcaccgaagcttttgggtatt

SEQ ID NO: 1691794 - DNA, 25 bp, Homo sapien
ctccaccctgtagcgtcctgttcac

SEQ ID NO: 1691795 - DNA, 25 bp, Homo sapien
gctgatgtgcggcacgcttcaccga

SEQ ID NO: 1691796 - DNA, 25 bp, Homo sapien
catctgatgtatctaggaagagagg

SEQ ID NO: 1691797 - DNA, 25 bp, Homo sapien
ttctgattatatatgctaggtctga

SEQ ID NO: 1691798 - DNA, 25 bp, Homo sapien
tctggttaaccgctcacatgcataa

SEQ ID NO: 1691799 - DNA, 25 bp, Homo sapien
aactggaaatggtctgttttcgtga

SEQ ID NO: 1691800 - DNA, 25 bp, Homo sapien
cgtgatattcgtatgattaagatgc

SEQ ID NO: 1691801 - DNA, 25 bp, Homo sapien
tgccaaatcgttcttcgggaagcca

SEQ ID NO: 1691802 - DNA, 25 bp, Homo sapien
gattctatgaatacagcgtctaggc

SEQ ID NO: 1691803 - DNA, 25 bp, Homo sapien
cagaaacactatctctcagggagga

SEQ ID NO: 1691804 - DNA, 25 bp, Homo sapien
tcaaggagctgtctgtattcaacac

SEQ ID NO: 1691805 - DNA, 25 bp, Homo sapien
ttggctctccgtgcctctgccatca

SEQ ID NO: 1691806 - DNA, 25 bp, Homo sapien
tcagcctgtgatatctgctcccaga

SEQ ID NO: 1691807 - DNA, 25 bp, Homo sapien
gggttgcccctgctagtggttccat

SEQ ID NO: 1691808 - DNA, 25 bp, Homo sapien
gagggatccatactctgcttcctgg

SEQ ID NO: 1691809 - DNA, 25 bp, Homo sapien
gaaagccaaggcacagaacggtgac

SEQ ID NO: 1691810 - DNA, 25 bp, Homo sapien
tcaggtggagacttgaacactcggc

SEQ ID NO: 1691811 - DNA, 25 bp, Homo sapien
cagtttgtgctctcagtcagatgct

SEQ ID NO: 1691812 - DNA, 25 bp, Homo sapien
tatagactgttgtgagcttccaggc

SEQ ID NO: 1691813 - DNA, 25 bp, Homo sapien
gttttgaatgtaaaagcttttcaga

SEQ ID NO: 1691814 - DNA, 25 bp, Homo sapien
tactcccaaagttttgtggcaactg

SEQ ID NO: 1691815 - DNA, 25 bp, Homo sapien
caactgtgagggctgaggcttcact

SEQ ID NO: 1691816 - DNA, 25 bp, Homo sapien
cccagccaacaagtagatttttaat

SEQ ID NO: 1691817 - DNA, 25 bp, Homo sapien
ttctgatgaaaatgtaggatctaaa

SEQ ID NO: 1691818 - DNA, 25 bp, Homo sapien
tttataagatctatagatcaagtct

SEQ ID NO: 1691819 - DNA, 25 bp, Homo sapien
catgagaagctactttttgaactat

SEQ ID NO: 1691820 - DNA, 25 bp, Homo sapien
aaattgagatgtactctgtttaaaa

SEQ ID NO: 1691821 - DNA, 25 bp, Homo sapien
ctttgctctctttctttaactctcc

SEQ ID NO: 1691822 - DNA, 25 bp, Homo sapien
actctcctttttcctccagctccat

SEQ ID NO: 1691823 - DNA, 25 bp, Homo sapien
ttgctctctttctttaactctcctt

SEQ ID NO: 1691824 - DNA, 25 bp, Homo sapien
taactctcctttttcctccagctcc

SEQ ID NO: 1691825 - DNA, 25 bp, Homo sapien
tctccaaggttaagggacacagtgg

SEQ ID NO: 1691826 - DNA, 25 bp, Homo sapien
ttagctggaccacctctagagagtc

SEQ ID NO: 1691827 - DNA, 25 bp, Homo sapien
aaagattggccatgtagctgtgaca

SEQ ID NO: 1691828 - DNA, 25 bp, Homo sapien
actgagagtccatgccccttgcagg

SEQ ID NO: 1691829 - DNA, 25 bp, Homo sapien
tattcccttccttagtagcagactg

SEQ ID NO: 1691830 - DNA, 25 bp, Homo sapien
tgacccagaagctgctagtgagact

SEQ ID NO: 1691831 - DNA, 25 bp, Homo sapien
tgcaaatggatacggatggtctgcc

SEQ ID NO: 1691832 - DNA, 25 bp, Homo sapien
tatccctgacaagcaaagtgttgac

SEQ ID NO: 1691833 - DNA, 25 bp, Homo sapien
gcactggcaaagactacgtcttgta

SEQ ID NO: 1691834 - DNA, 25 bp, Homo sapien
tctttcgcaataagagcactggcaa

SEQ ID NO: 1691835 - DNA, 25 bp, Homo sapien
tgtacaagaataagagccgactgag

SEQ ID NO: 1691836 - DNA, 25 bp, Homo sapien
gccgactgagggcatgcaagaatat

SEQ ID NO: 1691837 - DNA, 25 bp, Homo sapien
tccggtgctgcgctgcggaactcag

SEQ ID NO: 1691838 - DNA, 25 bp, Homo sapien
gctgcgctgcggaactcagaggact

SEQ ID NO: 1691839 - DNA, 25 bp, Homo sapien
tgctgcgctgcggaactcagaggac

SEQ ID NO: 1691840 - DNA, 25 bp, Homo sapien
cgcttccggtgctgcgctgcggaac

SEQ ID NO: 1691841 - DNA, 25 bp, Homo sapien
gggacagagcttaatgagcccaaaa

SEQ ID NO: 1691842 - DNA, 25 bp, Homo sapien
tacccgaatcaacatggtgactggc

SEQ ID NO: 1691843 - DNA, 25 bp, Homo sapien
gcaactcgtctgcatcctcgctggt

SEQ ID NO: 1691844 - DNA, 25 bp, Homo sapien
aattaaatgaggcacttgtcgctcc

SEQ ID NO: 1691845 - DNA, 25 bp, Homo sapien
gagtgcggttttttgacacttaaca

SEQ ID NO: 1691846 - DNA, 25 bp, Homo sapien
ctttaggcagttcttaagaagggag

SEQ ID NO: 1691847 - DNA, 25 bp, Homo sapien
taattccgcagccaacttcgcgtgt

SEQ ID NO: 1691848 - DNA, 25 bp, Homo sapien
agggagagtgcggttttttgacact

SEQ ID NO: 1691849 - DNA, 25 bp, Homo sapien
tatctggagagagcgcacagactca

SEQ ID NO: 1691850 - DNA, 25 bp, Homo sapien
cacgcttatctggagagagcgcaca

SEQ ID NO: 1691851 - DNA, 25 bp, Homo sapien
cccgcacgcttatctggagagagcg

SEQ ID NO: 1691852 - DNA, 25 bp, Homo sapien
gaaggccccgcacgcttatctggag

SEQ ID NO: 1691853 - DNA, 25 bp, Homo sapien
accagggggtaagtgtcattgtcca

SEQ ID NO: 1691854 - DNA, 25 bp, Homo sapien
ggcccttgaccctgtgcccaggtca

SEQ ID NO: 1691855 - DNA, 25 bp, Homo sapien
gactgcgactgggtattgaatccta

SEQ ID NO: 1691856 - DNA, 25 bp, Homo sapien
ttgaatcctacctggcgtcctctgg

SEQ ID NO: 1691857 - DNA, 25 bp, Homo sapien
gaatgcagtggtctttgtttcattt

SEQ ID NO: 1691858 - DNA, 25 bp, Homo sapien
tagaatgcagtggtctttgtttcat

SEQ ID NO: 1691859 - DNA, 25 bp, Homo sapien
ctagaatgcagtggtctttgtttca

SEQ ID NO: 1691860 - DNA, 25 bp, Homo sapien
tgcagtggtctttgtttcatttcac

SEQ ID NO: 1691861 - DNA, 25 bp, Homo sapien
ccctctccactttccgccaggtggg

SEQ ID NO: 1691862 - DNA, 25 bp, Homo sapien
cctctccactttccgccaggtggga

SEQ ID NO: 1691863 - DNA, 25 bp, Homo sapien
gcccctctccactttccgccaggtg

SEQ ID NO: 1691864 - DNA, 25 bp, Homo sapien
tctccactttccgccaggtgggact

SEQ ID NO: 1691865 - DNA, 25 bp, Homo sapien
ccagagacgttcagatccgagagct

SEQ ID NO: 1691866 - DNA, 25 bp, Homo sapien
gccccatcgccttcggagagaatta

SEQ ID NO: 1691867 - DNA, 25 bp, Homo sapien
ccatgtggctgacggaaatgtaacc

SEQ ID NO: 1691868 - DNA, 25 bp, Homo sapien
gagaattacccgagacacggccttg

SEQ ID NO: 1691869 - DNA, 25 bp, Homo sapien
gaagaatgaactttaacgtgcgcgg

SEQ ID NO: 1691870 - DNA, 25 bp, Homo sapien
aagaatgaactttaacgtgcgcggg

SEQ ID NO: 1691871 - DNA, 25 bp, Homo sapien
gaatgaactttaacgtgcgcggggc

SEQ ID NO: 1691872 - DNA, 25 bp, Homo sapien
tgaactttaacgtgcgcggggccca

SEQ ID NO: 1691873 - DNA, 25 bp, Homo sapien
cacttcgaattttggtgcctggcag

SEQ ID NO: 1691874 - DNA, 25 bp, Homo sapien
ccatgatacaggtggcgatttggcc

SEQ ID NO: 1691875 - DNA, 25 bp, Homo sapien
ctagtccgtcgagagagaaagacca

SEQ ID NO: 1691876 - DNA, 25 bp, Homo sapien
cgatttggccgctgtcctctttgga

SEQ ID NO: 1691877 - DNA, 25 bp, Homo sapien
tgtgaagggcaagcacaggcacagc

SEQ ID NO: 1691878 - DNA, 25 bp, Homo sapien
tcctgcctactgcatgccctacact

SEQ ID NO: 1691879 - DNA, 25 bp, Homo sapien
tgcctactgcatgccctacactatc

SEQ ID NO: 1691880 - DNA, 25 bp, Homo sapien
acagagtccactgggaccagcatgg

SEQ ID NO: 1691881 - DNA, 25 bp, Homo sapien
ctgaggtggcgaaaagggtggcgtc

SEQ ID NO: 1691882 - DNA, 25 bp, Homo sapien
ccagagagtattcatgtgttttaaa

SEQ ID NO: 1691883 - DNA, 25 bp, Homo sapien
aggtggcgaaaagggtggcgtcaca

SEQ ID NO: 1691884 - DNA, 25 bp, Homo sapien
ctccagagagtattcatgtgtttta

SEQ ID NO: 1691885 - DNA, 25 bp, Homo sapien
cagacatggaacacatcgttttcct

SEQ ID NO: 1691886 - DNA, 25 bp, Homo sapien
gacatggaacacatcgttttccttt

SEQ ID NO: 1691887 - DNA, 25 bp, Homo sapien
catggaacacatcgttttcctttgt

SEQ ID NO: 1691888 - DNA, 25 bp, Homo sapien
agacatggaacacatcgttttcctt

SEQ ID NO: 1691889 - DNA, 25 bp, Homo sapien
tctgaggcccaccagtagcctaaaa

SEQ ID NO: 1691890 - DNA, 25 bp, Homo sapien
cactcctgggtggaacacagacgta

SEQ ID NO: 1691891 - DNA, 25 bp, Homo sapien
agatgctactcagctcagtggccct

SEQ ID NO: 1691892 - DNA, 25 bp, Homo sapien
cagagtacatgacttagaggcttaa

SEQ ID NO: 1691893 - DNA, 25 bp, Homo sapien
tgggctaaagtggactgagccagtc

SEQ ID NO: 1691894 - DNA, 25 bp, Homo sapien
gcagatgtcagcattcttgaaacac

SEQ ID NO: 1691895 - DNA, 25 bp, Homo sapien
acatctaatgggagacaaatctgca

SEQ ID NO: 1691896 - DNA, 25 bp, Homo sapien
atgacctgggctaaagtggactgag

SEQ ID NO: 1691897 - DNA, 25 bp, Homo sapien
acattttatatgtaagggcagtttt

SEQ ID NO: 1691898 - DNA, 25 bp, Homo sapien
ttggatactttatcattatagcagc

SEQ ID NO: 1691899 - DNA, 25 bp, Homo sapien
tatcattatagcagctgtctgagat

SEQ ID NO: 1691900 - DNA, 25 bp, Homo sapien
tctgagataggtattgtcatgaaca

SEQ ID NO: 1691901 - DNA, 25 bp, Homo sapien
tgcttaaaagaggatggctttatca

SEQ ID NO: 1691902 - DNA, 25 bp, Homo sapien
gttgcttaaaagaggatggctttat

SEQ ID NO: 1691903 - DNA, 25 bp, Homo sapien
ttgcttaaaagaggatggctttatc

SEQ ID NO: 1691904 - DNA, 25 bp, Homo sapien
gcttaaaagaggatggctttatcat

SEQ ID NO: 1691905 - DNA, 25 bp, Homo sapien
gccgccgtgtcactctggatggtcc

SEQ ID NO: 1691906 - DNA, 25 bp, Homo sapien
tggccgccgtgtcactctggatggt

SEQ ID NO: 1691907 - DNA, 25 bp, Homo sapien
agtggccgccgtgtcactctggatg

SEQ ID NO: 1691908 - DNA, 25 bp, Homo sapien
tgagtggccgccgtgtcactctgga

SEQ ID NO: 1691909 - DNA, 25 bp, Homo sapien
cagcgggagaaaatgcggcgttggg

SEQ ID NO: 1691910 - DNA, 25 bp, Homo sapien
gagaaaatgcggcgttggggtgagc

SEQ ID NO: 1691911 - DNA, 25 bp, Homo sapien
aaatgcggcgttggggtgagcgggt

SEQ ID NO: 1691912 - DNA, 25 bp, Homo sapien
aaaatgcggcgttggggtgagcggg

SEQ ID NO: 1691913 - DNA, 25 bp, Homo sapien
gagtccatccctgagctattctgct

SEQ ID NO: 1691914 - DNA, 25 bp, Homo sapien
tcttattgcagcttgccagtcgaca

SEQ ID NO: 1691915 - DNA, 25 bp, Homo sapien
tattacaccctgattgggactgtca

SEQ ID NO: 1691916 - DNA, 25 bp, Homo sapien
gaatgtcaagacacgtgctgccatt

SEQ ID NO: 1691917 - DNA, 25 bp, Homo sapien
tatgagaaggcttgctgccactttg

SEQ ID NO: 1691918 - DNA, 25 bp, Homo sapien
aaggcttgctgccactttgagtagc

SEQ ID NO: 1691919 - DNA, 25 bp, Homo sapien
atttgcgctggttaggctatgagaa

SEQ ID NO: 1691920 - DNA, 25 bp, Homo sapien
ctggttaggctatgagaaggcttgc

SEQ ID NO: 1691921 - DNA, 25 bp, Homo sapien
tcaagggtggtttttggaggagaca

SEQ ID NO: 1691922 - DNA, 25 bp, Homo sapien
tggaggagacaatgtcagtcaactt

SEQ ID NO: 1691923 - DNA, 25 bp, Homo sapien
tgtcagtcaacttaacaataaccca

SEQ ID NO: 1691924 - DNA, 25 bp, Homo sapien
ggtttttggaggagacaatgtcagt

SEQ ID NO: 1691925 - DNA, 25 bp, Homo sapien
caggacaggaacaatttccaggaca

SEQ ID NO: 1691926 - DNA, 25 bp, Homo sapien
ttctgggttgtctctgagtgctgct

SEQ ID NO: 1691927 - DNA, 25 bp, Homo sapien
gttgtctctgagtgctgctgagcaa

SEQ ID NO: 1691928 - DNA, 25 bp, Homo sapien
gacaggaacaatttccaggacacag

SEQ ID NO: 1691929 - DNA, 25 bp, Homo sapien
taacaccaagccattcggagcctga

SEQ ID NO: 1691930 - DNA, 25 bp, Homo sapien
aaaggtgtcatgctatccaaacagg

SEQ ID NO: 1691931 - DNA, 25 bp, Homo sapien
tttgctttgactccctcagactggt

SEQ ID NO: 1691932 - DNA, 25 bp, Homo sapien
ggagagtctctgacgcctgaaatat

SEQ ID NO: 1691933 - DNA, 25 bp, Homo sapien
gacttcctaattggcagaggaagca

SEQ ID NO: 1691934 - DNA, 25 bp, Homo sapien
attcagcagacttcctaattggcag

SEQ ID NO: 1691935 - DNA, 25 bp, Homo sapien
taggatactttaaccactcttggga

SEQ ID NO: 1691936 - DNA, 25 bp, Homo sapien
tttcttgtctgtccattaggatact

SEQ ID NO: 1691937 - DNA, 25 bp, Homo sapien
tttaactgaacccaggtccattgct

SEQ ID NO: 1691938 - DNA, 25 bp, Homo sapien
gactcaacaaagtgtattagcagcc

SEQ ID NO: 1691939 - DNA, 25 bp, Homo sapien
cagcatatcccagaacaacttttct

SEQ ID NO: 1691940 - DNA, 25 bp, Homo sapien
cctgtatatgttcaggcctgtttct

SEQ ID NO: 1691941 - DNA, 25 bp, Homo sapien
tgaaacaggataaaacgcccagact

SEQ ID NO: 1691942 - DNA, 25 bp, Homo sapien
tcatagccctcagaagggaagtagg

SEQ ID NO: 1691943 - DNA, 25 bp, Homo sapien
tagtaagagttccatcatgacaggg

SEQ ID NO: 1691944 - DNA, 25 bp, Homo sapien
gggaaagggctgattatctcatcca

SEQ ID NO: 1691945 - DNA, 25 bp, Homo sapien
taaactcagatttgtagggaaagtc

SEQ ID NO: 1691946 - DNA, 25 bp, Homo sapien
caaggcatggcctgattagaactcc

SEQ ID NO: 1691947 - DNA, 25 bp, Homo sapien
tcatggcatggaaattggaaaacac

SEQ ID NO: 1691948 - DNA, 25 bp, Homo sapien
taagtttctgtatatgaggcctagc

SEQ ID NO: 1691949 - DNA, 25 bp, Homo sapien
cacagtgcgaatctcagccttctcg

SEQ ID NO: 1691950 - DNA, 25 bp, Homo sapien
cgccagtttctacacaaacactcat

SEQ ID NO: 1691951 - DNA, 25 bp, Homo sapien
agccttctcgccagtttctacacaa

SEQ ID NO: 1691952 - DNA, 25 bp, Homo sapien
tggcaccacagtgcgaatctcagcc

SEQ ID NO: 1691953 - DNA, 25 bp, Homo sapien
tatagaatgggtgtaacaatgttgt

SEQ ID NO: 1691954 - DNA, 25 bp, Homo sapien
gaacagagtccaagatggaatattt

SEQ ID NO: 1691955 - DNA, 25 bp, Homo sapien
gattcgttttcttgaacagagtcca

SEQ ID NO: 1691956 - DNA, 25 bp, Homo sapien
cttctaccagttcttcggattcgtt

SEQ ID NO: 1691957 - DNA, 25 bp, Homo sapien
tgagccctttgctgaatctaagcac

SEQ ID NO: 1691958 - DNA, 25 bp, Homo sapien
gcactgagggagcatcaggcttagc

SEQ ID NO: 1691959 - DNA, 25 bp, Homo sapien
tgctgaatctaagcactgagggagc

SEQ ID NO: 1691960 - DNA, 25 bp, Homo sapien
tcaggcttagctatgcagtgggact

SEQ ID NO: 1691961 - DNA, 25 bp, Homo sapien
ttgtgaagcttccatagtgaatgaa

SEQ ID NO: 1691962 - DNA, 25 bp, Homo sapien
taagtggcatctagaaagctttaat

SEQ ID NO: 1691963 - DNA, 25 bp, Homo sapien
cagaaggtggtcttgggtagaataa

SEQ ID NO: 1691964 - DNA, 25 bp, Homo sapien
tctccagtggaaggtcaaacaattt

SEQ ID NO: 1691965 - DNA, 25 bp, Homo sapien
tagagaacatatatccagtgccttt

SEQ ID NO: 1691966 - DNA, 25 bp, Homo sapien
tcctttttgcctttgtattcatcat

SEQ ID NO: 1691967 - DNA, 25 bp, Homo sapien
aacatatatccagtgcctttccttt

SEQ ID NO: 1691968 - DNA, 25 bp, Homo sapien
ctccatgtttttgtaaaggcctaga

SEQ ID NO: 1691969 - DNA, 25 bp, Homo sapien
agcagctcaagctctttcccgttgg

SEQ ID NO: 1691970 - DNA, 25 bp, Homo sapien
aatagattccagcagctcaagctct

SEQ ID NO: 1691971 - DNA, 25 bp, Homo sapien
ctcaagctctttcccgttggttctc

SEQ ID NO: 1691972 - DNA, 25 bp, Homo sapien
gattccagcagctcaagctctttcc

SEQ ID NO: 1691973 - DNA, 25 bp, Homo sapien
agtaatttctgaagtgggggcaata

SEQ ID NO: 1691974 - DNA, 25 bp, Homo sapien
aagtaatttctgaagtgggggcaat

SEQ ID NO: 1691975 - DNA, 25 bp, Homo sapien
tctcgtgttaaagaggtggacacac

SEQ ID NO: 1691976 - DNA, 25 bp, Homo sapien
tacagacgatagtttgagaaatggc

SEQ ID NO: 1691977 - DNA, 25 bp, Homo sapien
acacacaaggctgacaggtgtgtac

SEQ ID NO: 1691978 - DNA, 25 bp, Homo sapien
tactcacaggctgtgtgataatgag

SEQ ID NO: 1691979 - DNA, 25 bp, Homo sapien
cgagagccggcctccgcaccggtgc

SEQ ID NO: 1691980 - DNA, 25 bp, Homo sapien
gacgctgtgcggtgctgcggtggcg

SEQ ID NO: 1691981 - DNA, 25 bp, Homo sapien
ctccgcaccggtgcgaggccggcct

SEQ ID NO: 1691982 - DNA, 25 bp, Homo sapien
cctccggtgcccgagcgctgggtcc

SEQ ID NO: 1691983 - DNA, 25 bp, Homo sapien
agttcccggcggctgaataaggagc

SEQ ID NO: 1691984 - DNA, 25 bp, Homo sapien
ataaggagcggaccggattacaagc

SEQ ID NO: 1691985 - DNA, 25 bp, Homo sapien
tacagccctaggtgaaagcggaagg

SEQ ID NO: 1691986 - DNA, 25 bp, Homo sapien
aaaagagttgcaaatgcgaggcgga

SEQ ID NO: 1691987 - DNA, 25 bp, Homo sapien
acgtcagagctctcctcggtcatgg

SEQ ID NO: 1691988 - DNA, 25 bp, Homo sapien
aggtccaactctgatttatggcccc

SEQ ID NO: 1691989 - DNA, 25 bp, Homo sapien
ggttattgcaggtccaactctgatt

SEQ ID NO: 1691990 - DNA, 25 bp, Homo sapien
tcctcggtcatggttgccctgtagg

SEQ ID NO: 1691991 - DNA, 25 bp, Homo sapien
taaggggcgccaagacttctcgaga

SEQ ID NO: 1691992 - DNA, 25 bp, Homo sapien
tcggatgggaacaaacttcccggca

SEQ ID NO: 1691993 - DNA, 25 bp, Homo sapien
acttggctctacaggcggtcggatg

SEQ ID NO: 1691994 - DNA, 25 bp, Homo sapien
caggcggtcggatgggaacaaactt

SEQ ID NO: 1691995 - DNA, 25 bp, Homo sapien
gttaacagtcaccaacggaagggca

SEQ ID NO: 1691996 - DNA, 25 bp, Homo sapien
ctgctgagttaacagtcaccaacgg

SEQ ID NO: 1691997 - DNA, 25 bp, Homo sapien
cagtcaccaacggaagggcatacac

SEQ ID NO: 1691998 - DNA, 25 bp, Homo sapien
tgagttaacagtcaccaacggaagg

SEQ ID NO: 1691999 - DNA, 25 bp, Homo sapien
tcaactttgtctcccttaacttcca

SEQ ID NO: 1692000 - DNA, 25 bp, Homo sapien
cagcactttgttttcaactttgtct

SEQ ID NO: 1692001 - DNA, 25 bp, Homo sapien
tatctttctgccaataacatccttt

SEQ ID NO: 1692002 - DNA, 25 bp, Homo sapien
tttttatctttctgccaataacatc

SEQ ID NO: 1692003 - DNA, 25 bp, Homo sapien
tcaaagaaagccagaccttgagtat

SEQ ID NO: 1692004 - DNA, 25 bp, Homo sapien
ttcttgttctaacttgaagcctgtc

SEQ ID NO: 1692005 - DNA, 25 bp, Homo sapien
gccagaccttgagtatttctattaa

SEQ ID NO: 1692006 - DNA, 25 bp, Homo sapien
cttgttctaacttgaagcctgtcaa

SEQ ID NO: 1692007 - DNA, 25 bp, Homo sapien
ataaacatagaatcactttctaatg

SEQ ID NO: 1692008 - DNA, 25 bp, Homo sapien
tcaaataaacatagaatcactttct

SEQ ID NO: 1692009 - DNA, 25 bp, Homo sapien
tagaatcactttctaatgacatccc

SEQ ID NO: 1692010 - DNA, 25 bp, Homo sapien
catagaatcactttctaatgacatc

SEQ ID NO: 1692011 - DNA, 25 bp, Homo sapien
tctgacccattttacaaagggtgtg

SEQ ID NO: 1692012 - DNA, 25 bp, Homo sapien
tagttcgatttgtatgccacttccc

SEQ ID NO: 1692013 - DNA, 25 bp, Homo sapien
ccctacttgctcagtttaagaagaa

SEQ ID NO: 1692014 - DNA, 25 bp, Homo sapien
gaaaccaaagtggagactaggaatg

SEQ ID NO: 1692015 - DNA, 25 bp, Homo sapien
gaaccttgcaaggttctcagtcact

SEQ ID NO: 1692016 - DNA, 25 bp, Homo sapien
cgcatctgggcgtcttgattttctt

SEQ ID NO: 1692017 - DNA, 25 bp, Homo sapien
acttccccgcatctgggcgtcttga

SEQ ID NO: 1692018 - DNA, 25 bp, Homo sapien
tctttgtctgttctacagggtaact

SEQ ID NO: 1692019 - DNA, 25 bp, Homo sapien
gaaatgcacagcgttgtcctcagag

SEQ ID NO: 1692020 - DNA, 25 bp, Homo sapien
aacatgtaccttgtacagggccagg

SEQ ID NO: 1692021 - DNA, 25 bp, Homo sapien
gcagtgccctgaaaggaccaagaaa

SEQ ID NO: 1692022 - DNA, 25 bp, Homo sapien
tgaatgaacaggcaccaactactga

SEQ ID NO: 1692023 - DNA, 25 bp, Homo sapien
tgttgtaatcgttgcctcccacaag

SEQ ID NO: 1692024 - DNA, 25 bp, Homo sapien
aagtccagcctttggtgaggtcgct

SEQ ID NO: 1692025 - DNA, 25 bp, Homo sapien
tttatgacaaataggaagtccagcc

SEQ ID NO: 1692026 - DNA, 25 bp, Homo sapien
tcccagcagtttgacaggcggctaa

SEQ ID NO: 1692027 - DNA, 25 bp, Homo sapien
agttttgcctttttacaagcttatg

SEQ ID NO: 1692028 - DNA, 25 bp, Homo sapien
tgcctttttacaagcttatgttttg

SEQ ID NO: 1692029 - DNA, 25 bp, Homo sapien
ttccaagtctcatgagggcctgctt

SEQ ID NO: 1692030 - DNA, 25 bp, Homo sapien
tccaagtctcatgagggcctgcttt

SEQ ID NO: 1692031 - DNA, 25 bp, Homo sapien
gggcctgctttagcaaaactgactc

SEQ ID NO: 1692032 - DNA, 25 bp, Homo sapien
ccaacgtcattactaataatggcac

SEQ ID NO: 1692033 - DNA, 25 bp, Homo sapien
attactaataatggcactgaaggct

SEQ ID NO: 1692034 - DNA, 25 bp, Homo sapien
cttatcagcaccaacgtcattacta

SEQ ID NO: 1692035 - DNA, 25 bp, Homo sapien
tcagcaccaacgtcattactaataa

SEQ ID NO: 1692036 - DNA, 25 bp, Homo sapien
agaccaccaaggcagctgccaaacg

SEQ ID NO: 1692037 - DNA, 25 bp, Homo sapien
tccaatttcagcatggatgcggtag

SEQ ID NO: 1692038 - DNA, 25 bp, Homo sapien
gcagctgccaaacggatgccctgct

SEQ ID NO: 1692039 - DNA, 25 bp, Homo sapien
tgcgcacagctgtcaaggcaatcct

SEQ ID NO: 1692040 - DNA, 25 bp, Homo sapien
tcagtccgctttgtccccagtcttt

SEQ ID NO: 1692041 - DNA, 25 bp, Homo sapien
cagtccgctttgtccccagtctttc

SEQ ID NO: 1692042 - DNA, 25 bp, Homo sapien
agccatctgttcctgactcgccttc

SEQ ID NO: 1692043 - DNA, 25 bp, Homo sapien
gccttcctaatgcaactcccaggag

SEQ ID NO: 1692044 - DNA, 25 bp, Homo sapien
cacaaaccagggcaaacaatggctt

SEQ ID NO: 1692045 - DNA, 25 bp, Homo sapien
acctcacaaaccagggcaaacaatg

SEQ ID NO: 1692046 - DNA, 25 bp, Homo sapien
aaacaaggccttgcagctctataag

SEQ ID NO: 1692047 - DNA, 25 bp, Homo sapien
ggctccaaagcctacatgatggaag

SEQ ID NO: 1692048 - DNA, 25 bp, Homo sapien
gaaagagatgacgttcctaagcttg

SEQ ID NO: 1692049 - DNA, 25 bp, Homo sapien
tagaaaactcctagccagtcttgac

SEQ ID NO: 1692050 - DNA, 25 bp, Homo sapien
caatagtcctagtgattcaggaggc

SEQ ID NO: 1692051 - DNA, 25 bp, Homo sapien
gaaaaggctcctaggctggaaagac

SEQ ID NO: 1692052 - DNA, 25 bp, Homo sapien
tatctttagatttgaggctcctggc

SEQ ID NO: 1692053 - DNA, 25 bp, Homo sapien
tacctggatgagcacaatcgaacca

SEQ ID NO: 1692054 - DNA, 25 bp, Homo sapien
gatacagggctgatttgcaataaga

SEQ ID NO: 1692055 - DNA, 25 bp, Homo sapien
taacttacaaggagagctgtatggc

SEQ ID NO: 1692056 - DNA, 25 bp, Homo sapien
tttgaatttggaacagatacagggc

SEQ ID NO: 1692057 - DNA, 25 bp, Homo sapien
tatatgccctgacaaataagtactg

SEQ ID NO: 1692058 - DNA, 25 bp, Homo sapien
gtccagttcctgttatctggggtca

SEQ ID NO: 1692059 - DNA, 25 bp, Homo sapien
tgtccagttcctgttatctggggtc

SEQ ID NO: 1692060 - DNA, 25 bp, Homo sapien
tccagttcctgttatctggggtcat

SEQ ID NO: 1692061 - DNA, 25 bp, Homo sapien
agatgaccaggttgatggtccccat

SEQ ID NO: 1692062 - DNA, 25 bp, Homo sapien
ttttgtgactgctcccatcctccat

SEQ ID NO: 1692063 - DNA, 25 bp, Homo sapien
tgaccaggttgatggtccccatggc

SEQ ID NO: 1692064 - DNA, 25 bp, Homo sapien
gtttttgtgactgctcccatcctcc

SEQ ID NO: 1692065 - DNA, 25 bp, Homo sapien
atcaacaggcagaacgagcctcagt

SEQ ID NO: 1692066 - DNA, 25 bp, Homo sapien
tcatcaacaggcagaacgagcctca

SEQ ID NO: 1692067 - DNA, 25 bp, Homo sapien
catcaacaggcagaacgagcctcag

SEQ ID NO: 1692068 - DNA, 25 bp, Homo sapien
ctcatcaacaggcagaacgagcctc

SEQ ID NO: 1692069 - DNA, 25 bp, Homo sapien
tgagaaaaatgcctctgacttgcct

SEQ ID NO: 1692070 - DNA, 25 bp, Homo sapien
acccacaggaaatgattcccatttc

SEQ ID NO: 1692071 - DNA, 25 bp, Homo sapien
tgccttcccggttccgcccactgtg

SEQ ID NO: 1692072 - DNA, 25 bp, Homo sapien
tcatggattcagaaatgagaaaaat

SEQ ID NO: 1692073 - DNA, 25 bp, Homo sapien
taaagccacctgtaacatcaatggg

SEQ ID NO: 1692074 - DNA, 25 bp, Homo sapien
ggcgagggccttcccgctatgtcat

SEQ ID NO: 1692075 - DNA, 25 bp, Homo sapien
gggtaggaaagcatactcaccaagc

SEQ ID NO: 1692076 - DNA, 25 bp, Homo sapien
taacatagtagagagcatcatacgg

SEQ ID NO: 1692077 - DNA, 25 bp, Homo sapien
tactgtgaaccaaaggcccagcctt

SEQ ID NO: 1692078 - DNA, 25 bp, Homo sapien
cgagagttctggtgaaagaggctac

SEQ ID NO: 1692079 - DNA, 25 bp, Homo sapien
aagcaagctccagaggcaaatgtgg

SEQ ID NO: 1692080 - DNA, 25 bp, Homo sapien
tccagggttggttcctagcctacga

SEQ ID NO: 1692081 - DNA, 25 bp, Homo sapien
taggcagctagacccagataagagt

SEQ ID NO: 1692082 - DNA, 25 bp, Homo sapien
agaaaacgtctgtggctctacccca

SEQ ID NO: 1692083 - DNA, 25 bp, Homo sapien
gatggcaggccttaagtcccagaac

SEQ ID NO: 1692084 - DNA, 25 bp, Homo sapien
catcagaactggtgctggtacccac

SEQ ID NO: 1692085 - DNA, 25 bp, Homo sapien
catccttcgacaggggccatgttaa

SEQ ID NO: 1692086 - DNA, 25 bp, Homo sapien
gccatgttaatgtctttattgttct

SEQ ID NO: 1692087 - DNA, 25 bp, Homo sapien
tagtatatgtactaccaaagcaaga

SEQ ID NO: 1692088 - DNA, 25 bp, Homo sapien
tatatgtactaccaaagcaagaacc

SEQ ID NO: 1692089 - DNA, 25 bp, Homo sapien
tgttggcaatggtgccagtaatgtc

SEQ ID NO: 1692090 - DNA, 25 bp, Homo sapien
aatgtcccaccgtgctattctcctg

SEQ ID NO: 1692091 - DNA, 25 bp, Homo sapien
accgtgctattctcctgtgcctcag

SEQ ID NO: 1692092 - DNA, 25 bp, Homo sapien
tgccagtaatgtcccaccgtgctat

SEQ ID NO: 1692093 - DNA, 25 bp, Homo sapien
tgctggctattggtggccacagagg

SEQ ID NO: 1692094 - DNA, 25 bp, Homo sapien
acagagggatctgagcatcaacgct

SEQ ID NO: 1692095 - DNA, 25 bp, Homo sapien
aaaccaacaaaacgtgctgttgctg

SEQ ID NO: 1692096 - DNA, 25 bp, Homo sapien
agggatctgagcatcaacgctggca

SEQ ID NO: 1692097 - DNA, 25 bp, Homo sapien
gtctcatgatcttcatcttggtatc

SEQ ID NO: 1692098 - DNA, 25 bp, Homo sapien
cttggtatcccccctcaataagtgt

SEQ ID NO: 1692099 - DNA, 25 bp, Homo sapien
ctcatgatcttcatcttggtatccc

SEQ ID NO: 1692100 - DNA, 25 bp, Homo sapien
tgaatgacaacctcctccttgatgc

SEQ ID NO: 1692101 - DNA, 25 bp, Homo sapien
cacactagttcataatagctcttcc

SEQ ID NO: 1692102 - DNA, 25 bp, Homo sapien
gagccagacaatggcaagtccagaa

SEQ ID NO: 1692103 - DNA, 25 bp, Homo sapien
ggcagagccagacaatggcaagtcc

SEQ ID NO: 1692104 - DNA, 25 bp, Homo sapien
agccagacaatggcaagtccagaat

SEQ ID NO: 1692105 - DNA, 25 bp, Homo sapien
tggtccagacagagggaatagcaaa

SEQ ID NO: 1692106 - DNA, 25 bp, Homo sapien
tagcttggtgtgacgtaattatgaa

SEQ ID NO: 1692107 - DNA, 25 bp, Homo sapien
gagaatagagcgtgcttaatgcctg

SEQ ID NO: 1692108 - DNA, 25 bp, Homo sapien
ccttggcttgaagggagtaagcgca

SEQ ID NO: 1692109 - DNA, 25 bp, Homo sapien
aaacccataagatcccttcttgcct

SEQ ID NO: 1692110 - DNA, 25 bp, Homo sapien
cttcatccactgtccctaccccgtt

SEQ ID NO: 1692111 - DNA, 25 bp, Homo sapien
gcccagcctctattatgtttaaagc

SEQ ID NO: 1692112 - DNA, 25 bp, Homo sapien
tatgtttaaagctcatcacctcccc

SEQ ID NO: 1692113 - DNA, 25 bp, Homo sapien
ctgataatgaatacttcttcagtgc

SEQ ID NO: 1692114 - DNA, 25 bp, Homo sapien
gtttcctgataatgaatacttcttc

SEQ ID NO: 1692115 - DNA, 25 bp, Homo sapien
agggtttcctgataatgaatacttc

SEQ ID NO: 1692116 - DNA, 25 bp, Homo sapien
aaagggtttcctgataatgaatact

SEQ ID NO: 1692117 - DNA, 25 bp, Homo sapien
ggtactggtatgatcaatccccaat

SEQ ID NO: 1692118 - DNA, 25 bp, Homo sapien
ccaggggtactggtatgatcaatcc

SEQ ID NO: 1692119 - DNA, 25 bp, Homo sapien
ggtatgatcaatccccaatctttcc

SEQ ID NO: 1692120 - DNA, 25 bp, Homo sapien
tctcccaggggtactggtatgatca

SEQ ID NO: 1692121 - DNA, 25 bp, Homo sapien
ggtggggattcgcgctgttacaagg

SEQ ID NO: 1692122 - DNA, 25 bp, Homo sapien
cttggtggggattcgcgctgttaca

SEQ ID NO: 1692123 - DNA, 25 bp, Homo sapien
ggaaggctcggcatgatgtaaggac

SEQ ID NO: 1692124 - DNA, 25 bp, Homo sapien
tggggattcgcgctgttacaaggaa

SEQ ID NO: 1692125 - DNA, 25 bp, Homo sapien
tgcacacatgtaagaatgcatgagt

SEQ ID NO: 1692126 - DNA, 25 bp, Homo sapien
catgagtgactatgcatgagtgggt

SEQ ID NO: 1692127 - DNA, 25 bp, Homo sapien
gagtgagtgtgagtgcagaaggaag

SEQ ID NO: 1692128 - DNA, 25 bp, Homo sapien
gaaggaaggacttcatcaacactta

SEQ ID NO: 1692129 - DNA, 25 bp, Homo sapien
taaacagccactaatctttcttccc

SEQ ID NO: 1692130 - DNA, 25 bp, Homo sapien
ttttcctgataaacagccactaatc

SEQ ID NO: 1692131 - DNA, 25 bp, Homo sapien
tgtttttcctgataaacagccacta

SEQ ID NO: 1692132 - DNA, 25 bp, Homo sapien
cagccactaatctttcttcccggat

SEQ ID NO: 1692133 - DNA, 25 bp, Homo sapien
tgcaattgaggggaaaggaggaaag

SEQ ID NO: 1692134 - DNA, 25 bp, Homo sapien
gcaattgaggggaaaggaggaaaga

SEQ ID NO: 1692135 - DNA, 25 bp, Homo sapien
ctgcaattgaggggaaaggaggaaa

SEQ ID NO: 1692136 - DNA, 25 bp, Homo sapien
gacgccatgaatctccaagtagctg

SEQ ID NO: 1692137 - DNA, 25 bp, Homo sapien
tgctgcaaacgacgccatgaatctc

SEQ ID NO: 1692138 - DNA, 25 bp, Homo sapien
ccaagtagctgaaggttaactcgag

SEQ ID NO: 1692139 - DNA, 25 bp, Homo sapien
agctgacttgctgcaaacgacgcca

SEQ ID NO: 1692140 - DNA, 25 bp, Homo sapien
gggtagcacatctcacatacgtgcg

SEQ ID NO: 1692141 - DNA, 25 bp, Homo sapien
acatacgtgcgtgaacacccaacca

SEQ ID NO: 1692142 - DNA, 25 bp, Homo sapien
gtagcacatctcacatacgtgcgtg

SEQ ID NO: 1692143 - DNA, 25 bp, Homo sapien
gcgtgaacacccaaccatcaccctc

SEQ ID NO: 1692144 - DNA, 25 bp, Homo sapien
atcttcatggaaatgctgcacttct

SEQ ID NO: 1692145 - DNA, 25 bp, Homo sapien
ctcgggtgacgccatcttcatggaa

SEQ ID NO: 1692146 - DNA, 25 bp, Homo sapien
tgcacttctcagtttccacaatcat

SEQ ID NO: 1692147 - DNA, 25 bp, Homo sapien
gtcctcgggtgacgccatcttcatg

SEQ ID NO: 1692148 - DNA, 25 bp, Homo sapien
ggcaggtgcctatgtgagccagcac

SEQ ID NO: 1692149 - DNA, 25 bp, Homo sapien
gcaggtgcctatgtgagccagcacc

SEQ ID NO: 1692150 - DNA, 25 bp, Homo sapien
tgtgtgattagagaccaggaaagct

SEQ ID NO: 1692151 - DNA, 25 bp, Homo sapien
gatgatgtcgaacccattcctaagg

SEQ ID NO: 1692152 - DNA, 25 bp, Homo sapien
cccagctagttctctggtggcttta

SEQ ID NO: 1692153 - DNA, 25 bp, Homo sapien
ccagaaccgcctgtgtgtgtgatta

SEQ ID NO: 1692154 - DNA, 25 bp, Homo sapien
gcctagattactacaagtgtccaaa

SEQ ID NO: 1692155 - DNA, 25 bp, Homo sapien
cgaggctctacatcaactacatcta

SEQ ID NO: 1692156 - DNA, 25 bp, Homo sapien
actacatctacatcaccagggctgg

SEQ ID NO: 1692157 - DNA, 25 bp, Homo sapien
tctcttaatacctaatgctgctacc

SEQ ID NO: 1692158 - DNA, 25 bp, Homo sapien
taggtaatttaactctctgccaagg

SEQ ID NO: 1692159 - DNA, 25 bp, Homo sapien
ggtacatcacccaacaaggtactgg

SEQ ID NO: 1692160 - DNA, 25 bp, Homo sapien
tatttattagggcagtctccagcaa

SEQ ID NO: 1692161 - DNA, 25 bp, Homo sapien
tatcgagacaagctaactgtgtgtg

SEQ ID NO: 1692162 - DNA, 25 bp, Homo sapien
cagagtagtggttaaaagtacagcc

SEQ ID NO: 1692163 - DNA, 25 bp, Homo sapien
tctgagatgttatcccatagggtta

SEQ ID NO: 1692164 - DNA, 25 bp, Homo sapien
aaagttcatgcccacacatgcagag

SEQ ID NO: 1692165 - DNA, 25 bp, Homo sapien
aaaaaagaagaatccctggtgtgtg

SEQ ID NO: 1692166 - DNA, 25 bp, Homo sapien
tcccacagcgcctggagactagcca

SEQ ID NO: 1692167 - DNA, 25 bp, Homo sapien
ctagccaggcgctcagatggctcca

SEQ ID NO: 1692168 - DNA, 25 bp, Homo sapien
gactagccaggcgctcagatggctc

SEQ ID NO: 1692169 - DNA, 25 bp, Homo sapien
ggagactagccaggcgctcagatgg

SEQ ID NO: 1692170 - DNA, 25 bp, Homo sapien
tgcacctttacagtagcacactagg

SEQ ID NO: 1692171 - DNA, 25 bp, Homo sapien
tacatagcaggatgcaatacagctt

SEQ ID NO: 1692172 - DNA, 25 bp, Homo sapien
taaatatggccgatgttgacaatgc

SEQ ID NO: 1692173 - DNA, 25 bp, Homo sapien
ccaatctaaagtctgtgcgctgcta

SEQ ID NO: 1692174 - DNA, 25 bp, Homo sapien
cacaaacacaggcatacatctgaga

SEQ ID NO: 1692175 - DNA, 25 bp, Homo sapien
gaaaatccaagccagtcacaaacac

SEQ ID NO: 1692176 - DNA, 25 bp, Homo sapien
acttcttccctgtatgaaaatccaa

SEQ ID NO: 1692177 - DNA, 25 bp, Homo sapien
ccattgtacttcttccctgtatgaa

SEQ ID NO: 1692178 - DNA, 25 bp, Homo sapien
tcaattccctggtgtcttgggtaag

SEQ ID NO: 1692179 - DNA, 25 bp, Homo sapien
aattcaattccctggtgtcttgggt

SEQ ID NO: 1692180 - DNA, 25 bp, Homo sapien
attccctggtgtcttgggtaagata

SEQ ID NO: 1692181 - DNA, 25 bp, Homo sapien
gtaaattcaattccctggtgtcttg

SEQ ID NO: 1692182 - DNA, 25 bp, Homo sapien
gccaggtaggtggaaaaataattca

SEQ ID NO: 1692183 - DNA, 25 bp, Homo sapien
ctgccaggtaggtggaaaaataatt

SEQ ID NO: 1692184 - DNA, 25 bp, Homo sapien
tgccaggtaggtggaaaaataattc

SEQ ID NO: 1692185 - DNA, 25 bp, Homo sapien
gggaccacactgcaattctggattt

SEQ ID NO: 1692186 - DNA, 25 bp, Homo sapien
tcagggaccacactgcaattctgga

SEQ ID NO: 1692187 - DNA, 25 bp, Homo sapien
cagggaccacactgcaattctggat

SEQ ID NO: 1692188 - DNA, 25 bp, Homo sapien
ggaccacactgcaattctggatttc

SEQ ID NO: 1692189 - DNA, 25 bp, Homo sapien
ttaggcccatcagccacaactacag

SEQ ID NO: 1692190 - DNA, 25 bp, Homo sapien
tatactttttccctggccgattcag

SEQ ID NO: 1692191 - DNA, 25 bp, Homo sapien
tgtgcaaagaggaggtatatccagc

SEQ ID NO: 1692192 - DNA, 25 bp, Homo sapien
caactacagacacagctgagcctgc

SEQ ID NO: 1692193 - DNA, 25 bp, Homo sapien
tcacttataggaagaaggagaactg

SEQ ID NO: 1692194 - DNA, 25 bp, Homo sapien
acttataggaagaaggagaactgct

SEQ ID NO: 1692195 - DNA, 25 bp, Homo sapien
cacttataggaagaaggagaactgc

SEQ ID NO: 1692196 - DNA, 25 bp, Homo sapien
tatgagctacacaggaaacatcttg

SEQ ID NO: 1692197 - DNA, 25 bp, Homo sapien
aacgctgagaccaaacactggagga

SEQ ID NO: 1692198 - DNA, 25 bp, Homo sapien
cactggaggactgtaaacttctatc

SEQ ID NO: 1692199 - DNA, 25 bp, Homo sapien
tgtaaagggaccaaaaacgctgaga

SEQ ID NO: 1692200 - DNA, 25 bp, Homo sapien
tcttacgggttttagtgcagtagca

SEQ ID NO: 1692201 - DNA, 25 bp, Homo sapien
tgttctccagagactaactggctag

SEQ ID NO: 1692202 - DNA, 25 bp, Homo sapien
caggacaggacgatgcacatgcctc

SEQ ID NO: 1692203 - DNA, 25 bp, Homo sapien
tttacaaataacaactggagtgggc

SEQ ID NO: 1692204 - DNA, 25 bp, Homo sapien
caccaaacacgtgaatgaggaactc

SEQ ID NO: 1692205 - DNA, 25 bp, Homo sapien
gcaccaaacacgtgaatgaggaact

SEQ ID NO: 1692206 - DNA, 25 bp, Homo sapien
tactgcctaccctgacagtaagtgg

SEQ ID NO: 1692207 - DNA, 25 bp, Homo sapien
agtaagtggcactggatggattccc

SEQ ID NO: 1692208 - DNA, 25 bp, Homo sapien
gctctttgaccatgtagtgaagcta

SEQ ID NO: 1692209 - DNA, 25 bp, Homo sapien
gactgcatccataagatagcccagg

SEQ ID NO: 1692210 - DNA, 25 bp, Homo sapien
tgcttgaaaaacctccttgctctga

SEQ ID NO: 1692211 - DNA, 25 bp, Homo sapien
tggccactagacaacaactaagttc

SEQ ID NO: 1692212 - DNA, 25 bp, Homo sapien
gaagtaaattgtctctagggactct

SEQ ID NO: 1692213 - DNA, 25 bp, Homo sapien
caacaaagtacatgaaagtgctcct

SEQ ID NO: 1692214 - DNA, 25 bp, Homo sapien
agcagcaatgataggtattaggtcc

SEQ ID NO: 1692215 - DNA, 25 bp, Homo sapien
accactgattatattccagagcagc

SEQ ID NO: 1692216 - DNA, 25 bp, Homo sapien
tttagatccttagaggacagttttg

SEQ ID NO: 1692217 - DNA, 25 bp, Homo sapien
ttgtgaaccactgattatattccag

SEQ ID NO: 1692218 - DNA, 25 bp, Homo sapien
gactttatactaaaggctacactaa

SEQ ID NO: 1692219 - DNA, 25 bp, Homo sapien
caagcaacatttgctgcatgtttga

SEQ ID NO: 1692220 - DNA, 25 bp, Homo sapien
cagctgaatacatgaggaaatactt

SEQ ID NO: 1692221 - DNA, 25 bp, Homo sapien
aatgttacgcaaatcatttaaagga

SEQ ID NO: 1692222 - DNA, 25 bp, Homo sapien
acagaaaacattctttgactattcc

SEQ ID NO: 1692223 - DNA, 25 bp, Homo sapien
gaaaacattctttgactattccata

SEQ ID NO: 1692224 - DNA, 25 bp, Homo sapien
aacattctttgactattccataact

SEQ ID NO: 1692225 - DNA, 25 bp, Homo sapien
cagaaaacattctttgactattcca

SEQ ID NO: 1692226 - DNA, 25 bp, Homo sapien
cattttccaacaccaattcttccag

SEQ ID NO: 1692227 - DNA, 25 bp, Homo sapien
tcttccagtcgattggacctactca

SEQ ID NO: 1692228 - DNA, 25 bp, Homo sapien
tactcaccaccctcaagatctgttc

SEQ ID NO: 1692229 - DNA, 25 bp, Homo sapien
caagatctgttcacagacatcagtg

SEQ ID NO: 1692230 - DNA, 25 bp, Homo sapien
cctgagttgggattatgtgctagag

SEQ ID NO: 1692231 - DNA, 25 bp, Homo sapien
gagcactggccagtttttgtgcaaa

SEQ ID NO: 1692232 - DNA, 25 bp, Homo sapien
aaggttaattgtgtggagtcctgag

SEQ ID NO: 1692233 - DNA, 25 bp, Homo sapien
tcctccagtgggttgccagcaaggt

SEQ ID NO: 1692234 - DNA, 25 bp, Homo sapien
gctcttcaggcatggctaaattaaa

SEQ ID NO: 1692235 - DNA, 25 bp, Homo sapien
taattacaacttagcttgatacagc

SEQ ID NO: 1692236 - DNA, 25 bp, Homo sapien
attaaaattctctaatcctcttaca

SEQ ID NO: 1692237 - DNA, 25 bp, Homo sapien
cttacaattctggcatcaatgataa

SEQ ID NO: 1692238 - DNA, 25 bp, Homo sapien
caggcgttgaattataactcgaggg

SEQ ID NO: 1692239 - DNA, 25 bp, Homo sapien
ggcaaaccacaaggtaagtctggag

SEQ ID NO: 1692240 - DNA, 25 bp, Homo sapien
tttgggatctaactagagccatgcc

SEQ ID NO: 1692241 - DNA, 25 bp, Homo sapien
gaacaggcaaagctcatccatcatg

SEQ ID NO: 1692242 - DNA, 25 bp, Homo sapien
atccctttgggagtttggcaaattg

SEQ ID NO: 1692243 - DNA, 25 bp, Homo sapien
ggtgataatgaggttttagataaat

SEQ ID NO: 1692244 - DNA, 25 bp, Homo sapien
tgggagtttggcaaattgaatactt

SEQ ID NO: 1692245 - DNA, 25 bp, Homo sapien
ctttaggtgataatgaggttttaga

SEQ ID NO: 1692246 - DNA, 25 bp, Homo sapien
gcacattccgtgagagactgagaag

SEQ ID NO: 1692247 - DNA, 25 bp, Homo sapien
gaaaggagcatctagtcatacaggg

SEQ ID NO: 1692248 - DNA, 25 bp, Homo sapien
tagatggcttcaggcaataggtctg

SEQ ID NO: 1692249 - DNA, 25 bp, Homo sapien
cacagcaatgaacgaggcaaagccc

SEQ ID NO: 1692250 - DNA, 25 bp, Homo sapien
aagcccagctttgcccgtaggacct

SEQ ID NO: 1692251 - DNA, 25 bp, Homo sapien
tcctcatcgtaaggaggtggagaag

SEQ ID NO: 1692252 - DNA, 25 bp, Homo sapien
gtaggacctccccactgttaccaca

SEQ ID NO: 1692253 - DNA, 25 bp, Homo sapien
atttgtaaagggtacaggcaacgtg

SEQ ID NO: 1692254 - DNA, 25 bp, Homo sapien
cacgaaggacgttccctgagaggtc

SEQ ID NO: 1692255 - DNA, 25 bp, Homo sapien
tgagaggtcatctccacgaaggacg

SEQ ID NO: 1692256 - DNA, 25 bp, Homo sapien
tagaggcggtcaatggattggcact

SEQ ID NO: 1692257 - DNA, 25 bp, Homo sapien
tcgaggtggacaagggtagaggcgg

SEQ ID NO: 1692258 - DNA, 25 bp, Homo sapien
taacaagctgagtccaagctccctg

SEQ ID NO: 1692259 - DNA, 25 bp, Homo sapien
cagtttggctatatggtgcttcaga

SEQ ID NO: 1692260 - DNA, 25 bp, Homo sapien
tatactgagtacgtccttgcaaaca

SEQ ID NO: 1692261 - DNA, 25 bp, Homo sapien
cctgtatgtgtagcaactgccagag

SEQ ID NO: 1692262 - DNA, 25 bp, Homo sapien
caacagcaatgttgttctggaatta

SEQ ID NO: 1692263 - DNA, 25 bp, Homo sapien
tcaacagcaatgttgttctggaatt

SEQ ID NO: 1692264 - DNA, 25 bp, Homo sapien
aacagcaatgttgttctggaattac

SEQ ID NO: 1692265 - DNA, 25 bp, Homo sapien
aatggcatttggctgggccaaaaaa

SEQ ID NO: 1692266 - DNA, 25 bp, Homo sapien
aaatccagatgaacaatggcatttg

SEQ ID NO: 1692267 - DNA, 25 bp, Homo sapien
tccagatgaacaatggcatttggct

SEQ ID NO: 1692268 - DNA, 25 bp, Homo sapien
atgaacaatggcatttggctgggcc

SEQ ID NO: 1692269 - DNA, 25 bp, Homo sapien
gaggttgagcacagctaaatattga

SEQ ID NO: 1692270 - DNA, 25 bp, Homo sapien
gttgagcacagctaaatattgaagg

SEQ ID NO: 1692271 - DNA, 25 bp, Homo sapien
tctggagaggttgagcacagctaaa

SEQ ID NO: 1692272 - DNA, 25 bp, Homo sapien
acagttctggagaggttgagcacag

SEQ ID NO: 1692273 - DNA, 25 bp, Homo sapien
gctcacccgtgagaaatacctataa

SEQ ID NO: 1692274 - DNA, 25 bp, Homo sapien
gacagattgcctgaccacataggag

SEQ ID NO: 1692275 - DNA, 25 bp, Homo sapien
gactggccctcgattacttctacaa

SEQ ID NO: 1692276 - DNA, 25 bp, Homo sapien
tatcacatagttcacgcaggcaggc

SEQ ID NO: 1692277 - DNA, 25 bp, Homo sapien
gcctgaaaggttgatgtgcatcaaa

SEQ ID NO: 1692278 - DNA, 25 bp, Homo sapien
aaaggttgatgtgcatcaaagccag

SEQ ID NO: 1692279 - DNA, 25 bp, Homo sapien
aaattgcttgaaagatggaggtact

SEQ ID NO: 1692280 - DNA, 25 bp, Homo sapien
attgcttgaaagatggaggtacttc

SEQ ID NO: 1692281 - DNA, 25 bp, Homo sapien
ccctcaagcacattcgtaaaaataa

SEQ ID NO: 1692282 - DNA, 25 bp, Homo sapien
tttgtctttggattatatatctttc

SEQ ID NO: 1692283 - DNA, 25 bp, Homo sapien
ataagttgaactttaaaagctctgg

SEQ ID NO: 1692284 - DNA, 25 bp, Homo sapien
gcacattcgtaaaaataagttgaac

SEQ ID NO: 1692285 - DNA, 25 bp, Homo sapien
gattacaagccaggcccaataacag

SEQ ID NO: 1692286 - DNA, 25 bp, Homo sapien
gttatgattacaagccaggcccaat

SEQ ID NO: 1692287 - DNA, 25 bp, Homo sapien
ttcaagttatgattacaagccaggc

SEQ ID NO: 1692288 - DNA, 25 bp, Homo sapien
acaagccaggcccaataacagtgct

SEQ ID NO: 1692289 - DNA, 25 bp, Homo sapien
tatgacataaatactgccctccaga

SEQ ID NO: 1692290 - DNA, 25 bp, Homo sapien
taaacttcctaacaatccattggga

SEQ ID NO: 1692291 - DNA, 25 bp, Homo sapien
tactattggcgatttggtgtccaag

SEQ ID NO: 1692292 - DNA, 25 bp, Homo sapien
taattggtgttcactccagcttgaa

SEQ ID NO: 1692293 - DNA, 25 bp, Homo sapien
cagagatgtctaagctggtgatgtt

SEQ ID NO: 1692294 - DNA, 25 bp, Homo sapien
tgtcagagatgtctaagctggtgat

SEQ ID NO: 1692295 - DNA, 25 bp, Homo sapien
gtgtatttcagcaatgcaaccttct

SEQ ID NO: 1692296 - DNA, 25 bp, Homo sapien
gcaaccttctaatacttgagcacct

SEQ ID NO: 1692297 - DNA, 25 bp, Homo sapien
tcttccggggccatgggcatttgtt

SEQ ID NO: 1692298 - DNA, 25 bp, Homo sapien
ctgtcaccagacccgagtcaattaa

SEQ ID NO: 1692299 - DNA, 25 bp, Homo sapien
agatccttttccagaaatacctgtc

SEQ ID NO: 1692300 - DNA, 25 bp, Homo sapien
gacactgagtcagaattcttcatcc

SEQ ID NO: 1692301 - DNA, 25 bp, Homo sapien
tccccaccccagtgggaactgtgca

SEQ ID NO: 1692302 - DNA, 25 bp, Homo sapien
cactttgctggttcagccttcgtgt

SEQ ID NO: 1692303 - DNA, 25 bp, Homo sapien
agagccaaattcatcctcttaccag

SEQ ID NO: 1692304 - DNA, 25 bp, Homo sapien
acaggttcctgtggagacactgagt

SEQ ID NO: 1692305 - DNA, 25 bp, Homo sapien
gagtcaattaaacagctggtcctcc

SEQ ID NO: 1692306 - DNA, 25 bp, Homo sapien
aactctgatgtggaatgcagtcctc

SEQ ID NO: 1692307 - DNA, 25 bp, Homo sapien
gacttctagctgtctgtgaatatcc

SEQ ID NO: 1692308 - DNA, 25 bp, Homo sapien
ggatgaagaattctgactcagtgtc

SEQ ID NO: 1692309 - DNA, 25 bp, Homo sapien
tgcacagttcccactggggtgggga

SEQ ID NO: 1692310 - DNA, 25 bp, Homo sapien
ggatattcacagacagctagaagtc

SEQ ID NO: 1692311 - DNA, 25 bp, Homo sapien
gaggactgcattccacatcagagtt

SEQ ID NO: 1692312 - DNA, 25 bp, Homo sapien
ctggtaagaggatgaatttggctct

SEQ ID NO: 1692313 - DNA, 25 bp, Homo sapien
aacaaatgcccatggccccggaaga

SEQ ID NO: 1692314 - DNA, 25 bp, Homo sapien
ttaattgactcgggtctggtgacag

SEQ ID NO: 1692315 - DNA, 25 bp, Homo sapien
ggaggaccagctgtttaattgactc

SEQ ID NO: 1692316 - DNA, 25 bp, Homo sapien
actcagtgtctccacaggaacctgt

SEQ ID NO: 1692317 - DNA, 25 bp, Homo sapien
gacaggtatttctggaaaaggatct

SEQ ID NO: 1692318 - DNA, 25 bp, Homo sapien
acacgaaggctgaaccagcaaagtg

SEQ ID NO: 1692319 - DNA, 25 bp, Homo sapien
tattgatctgtttttactgagccac

SEQ ID NO: 1692320 - DNA, 25 bp, Homo sapien
tattaaggtagataggtcagattct

SEQ ID NO: 1692321 - DNA, 25 bp, Homo sapien
aatttttgcctaacgccaggtgttg

SEQ ID NO: 1692322 - DNA, 25 bp, Homo sapien
taacgccaggtgttgtattgatctg

SEQ ID NO: 1692323 - DNA, 25 bp, Homo sapien
tactaagttgtccaatacaggtgtc

SEQ ID NO: 1692324 - DNA, 25 bp, Homo sapien
aatcatctgtactaagttgtccaat

SEQ ID NO: 1692325 - DNA, 25 bp, Homo sapien
gttgtccaatacaggtgtcagattt

SEQ ID NO: 1692326 - DNA, 25 bp, Homo sapien
tctgtactaagttgtccaatacagg

SEQ ID NO: 1692327 - DNA, 25 bp, Homo sapien
tgatgatggtgacctcagtcttgag

SEQ ID NO: 1692328 - DNA, 25 bp, Homo sapien
cgttgccgctaatgtccactttggt

SEQ ID NO: 1692329 - DNA, 25 bp, Homo sapien
cagtgctttggccagcatcttcgct

SEQ ID NO: 1692330 - DNA, 25 bp, Homo sapien
cagtcttgagtttcgagtcagccag

SEQ ID NO: 1692331 - DNA, 25 bp, Homo sapien
agctatatcctgaaagccttgtgca

SEQ ID NO: 1692332 - DNA, 25 bp, Homo sapien
ttccatagcaacagctatatcctga

SEQ ID NO: 1692333 - DNA, 25 bp, Homo sapien
gtttgtttttagggcttgagaagca

SEQ ID NO: 1692334 - DNA, 25 bp, Homo sapien
gaatacatttcaacccagcggagaa

SEQ ID NO: 1692335 - DNA, 25 bp, Homo sapien
tgaccccacaaaacacatgggatgg

SEQ ID NO: 1692336 - DNA, 25 bp, Homo sapien
gaaacagtcagttgccgaacttaaa

SEQ ID NO: 1692337 - DNA, 25 bp, Homo sapien
gaagcgtgaatatacacatcctgcc

SEQ ID NO: 1692338 - DNA, 25 bp, Homo sapien
ttgaaggtattttctagtctcgtga

SEQ ID NO: 1692339 - DNA, 25 bp, Homo sapien
ctcgtgatttcgtagcaggtagttt

SEQ ID NO: 1692340 - DNA, 25 bp, Homo sapien
gcggtaggcctgctcttgaaggtat

SEQ ID NO: 1692341 - DNA, 25 bp, Homo sapien
ggtgacaataccctgctgcaggcgg

SEQ ID NO: 1692342 - DNA, 25 bp, Homo sapien
tatagaaacctatcttactggcaat

SEQ ID NO: 1692343 - DNA, 25 bp, Homo sapien
ggaatctgtattctacccatggaag

SEQ ID NO: 1692344 - DNA, 25 bp, Homo sapien
gaaattactcgaatgctagaagtcc

SEQ ID NO: 1692345 - DNA, 25 bp, Homo sapien
tagaagtcctttgctctcagagggt

SEQ ID NO: 1692346 - DNA, 25 bp, Homo sapien
gaacagaggcaccttacagtgggag

SEQ ID NO: 1692347 - DNA, 25 bp, Homo sapien
tccaaggcacagagcgtcatttccc

SEQ ID NO: 1692348 - DNA, 25 bp, Homo sapien
caggacagtatagcactccagtgca

SEQ ID NO: 1692349 - DNA, 25 bp, Homo sapien
ccagtgcaggctaagaggttgaaca

SEQ ID NO: 1692350 - DNA, 25 bp, Homo sapien
aggttaccccttgccaccagcaact

SEQ ID NO: 1692351 - DNA, 25 bp, Homo sapien
taccccttgccaccagcaacttaaa

SEQ ID NO: 1692352 - DNA, 25 bp, Homo sapien
aataaactggacacctggcatagag

SEQ ID NO: 1692353 - DNA, 25 bp, Homo sapien
agagaaataaactggacacctggca

SEQ ID NO: 1692354 - DNA, 25 bp, Homo sapien
gagttgagatgatcttgtactttca

SEQ ID NO: 1692355 - DNA, 25 bp, Homo sapien
ccccacaatttcgtaaggagttgag

SEQ ID NO: 1692356 - DNA, 25 bp, Homo sapien
ttagcatcacgcatgagccgctctg

SEQ ID NO: 1692357 - DNA, 25 bp, Homo sapien
taaatcttcctggatagcgtctccc

SEQ ID NO: 1692358 - DNA, 25 bp, Homo sapien
aaagtgtaggtgtttgccacaccag

SEQ ID NO: 1692359 - DNA, 25 bp, Homo sapien
tctctgcatacactaaatgggtgtc

SEQ ID NO: 1692360 - DNA, 25 bp, Homo sapien
gaaagttgagctgcttttactcaca

SEQ ID NO: 1692361 - DNA, 25 bp, Homo sapien
gctccccttcatgtcttaatgtctt

SEQ ID NO: 1692362 - DNA, 25 bp, Homo sapien
tctccagccattgattccagggtct

SEQ ID NO: 1692363 - DNA, 25 bp, Homo sapien
tccagggtctcctgaattggactgg

SEQ ID NO: 1692364 - DNA, 25 bp, Homo sapien
caagatgcaccaccaacatggtata

SEQ ID NO: 1692365 - DNA, 25 bp, Homo sapien
atagtaagccactggctcccgccca

SEQ ID NO: 1692366 - DNA, 25 bp, Homo sapien
tcacattgggacaaagattctcagc

SEQ ID NO: 1692367 - DNA, 25 bp, Homo sapien
taaggatatcaattccagactgctc

SEQ ID NO: 1692368 - DNA, 25 bp, Homo sapien
gaaatcttttcggtgctggcatgaa

SEQ ID NO: 1692369 - DNA, 25 bp, Homo sapien
cagcagcatcaaccatggactcaag

SEQ ID NO: 1692370 - DNA, 25 bp, Homo sapien
tggcaatgtgagagtgcatccagga

SEQ ID NO: 1692371 - DNA, 25 bp, Homo sapien
aggatttcatccacaattctatcag

SEQ ID NO: 1692372 - DNA, 25 bp, Homo sapien
caattctatcagacaggaacgaggc

SEQ ID NO: 1692373 - DNA, 25 bp, Homo sapien
ggaacgaggccactgtcaattttac

SEQ ID NO: 1692374 - DNA, 25 bp, Homo sapien
tatctgaaagtcattgaaaccaagg

SEQ ID NO: 1692375 - DNA, 25 bp, Homo sapien
accagttggcaagtccacggaaact

SEQ ID NO: 1692376 - DNA, 25 bp, Homo sapien
aaattaacaaacttcagtgctgagc

SEQ ID NO: 1692377 - DNA, 25 bp, Homo sapien
gagctgatctgacaccaggaacttt

SEQ ID NO: 1692378 - DNA, 25 bp, Homo sapien
aagggtcttgccacgtctgctgaaa

SEQ ID NO: 1692379 - DNA, 25 bp, Homo sapien
tgccacgtctgctgaaatggtcagc

SEQ ID NO: 1692380 - DNA, 25 bp, Homo sapien
gaggaagggtcttgccacgtctgct

SEQ ID NO: 1692381 - DNA, 25 bp, Homo sapien
ttgccacgtctgctgaaatggtcag

SEQ ID NO: 1692382 - DNA, 25 bp, Homo sapien
gccagctcgatctctaaggattctt

SEQ ID NO: 1692383 - DNA, 25 bp, Homo sapien
ccactgtgatgatggaacgtttaac

SEQ ID NO: 1692384 - DNA, 25 bp, Homo sapien
agatcttccaaacgctctatctctg

SEQ ID NO: 1692385 - DNA, 25 bp, Homo sapien
gatgatggaacgtttaactggcttc

SEQ ID NO: 1692386 - DNA, 25 bp, Homo sapien
caaacgctctatctctgttagctcc

SEQ ID NO: 1692387 - DNA, 25 bp, Homo sapien
aataacatatagagaggcacaggag

SEQ ID NO: 1692388 - DNA, 25 bp, Homo sapien
taattttccgccctgcagttaagga

SEQ ID NO: 1692389 - DNA, 25 bp, Homo sapien
cacaggaggtttcaggtaagccaaa

SEQ ID NO: 1692390 - DNA, 25 bp, Homo sapien
gaatagtgcctgaacgtcacaggta

SEQ ID NO: 1692391 - DNA, 25 bp, Homo sapien
gacaaagacaccaaccagatcataa

SEQ ID NO: 1692392 - DNA, 25 bp, Homo sapien
ctgatggataacaatgacaaagaca

SEQ ID NO: 1692393 - DNA, 25 bp, Homo sapien
aaagacaccaaccagatcataatag

SEQ ID NO: 1692394 - DNA, 25 bp, Homo sapien
tgacaaagacaccaaccagatcata

SEQ ID NO: 1692395 - DNA, 25 bp, Homo sapien
tattctgcagacactctaataggag

SEQ ID NO: 1692396 - DNA, 25 bp, Homo sapien
acactctaataggagcctgtctgaa

SEQ ID NO: 1692397 - DNA, 25 bp, Homo sapien
accatatacttccaccacctttgct

SEQ ID NO: 1692398 - DNA, 25 bp, Homo sapien
tgcagacactctaataggagcctgt

SEQ ID NO: 1692399 - DNA, 25 bp, Homo sapien
agcattcggctatggatactcttcc

SEQ ID NO: 1692400 - DNA, 25 bp, Homo sapien
caggccgcagcattcggctatggat

SEQ ID NO: 1692401 - DNA, 25 bp, Homo sapien
gaaacaggccgcagcattcggctat

SEQ ID NO: 1692402 - DNA, 25 bp, Homo sapien
agccctagaaacaggccgcagcatt

SEQ ID NO: 1692403 - DNA, 25 bp, Homo sapien
gcgggtcttcgatgtgaattggtac

SEQ ID NO: 1692404 - DNA, 25 bp, Homo sapien
gtacctcttccagcgctttatctag

SEQ ID NO: 1692405 - DNA, 25 bp, Homo sapien
gcgctttatctagatcaaactccat

SEQ ID NO: 1692406 - DNA, 25 bp, Homo sapien
ctcagagataaatcccgagctccgc

SEQ ID NO: 1692407 - DNA, 25 bp, Homo sapien
cccttgttcacatatttatctgctg

SEQ ID NO: 1692408 - DNA, 25 bp, Homo sapien
aaccagagacccttgttcacatatt

SEQ ID NO: 1692409 - DNA, 25 bp, Homo sapien
ctgaccttccctccactattgtcct

SEQ ID NO: 1692410 - DNA, 25 bp, Homo sapien
tgctgaccttccctccactattgtc

SEQ ID NO: 1692411 - DNA, 25 bp, Homo sapien
actctccccatgagaccattctgtt

SEQ ID NO: 1692412 - DNA, 25 bp, Homo sapien
gtgagactatgttggcagcacagac

SEQ ID NO: 1692413 - DNA, 25 bp, Homo sapien
caccatcttgtgagactatgttggc

SEQ ID NO: 1692414 - DNA, 25 bp, Homo sapien
ctgttcaccatcttgtgagactatg

SEQ ID NO: 1692415 - DNA, 25 bp, Homo sapien
tcaagatcgttggtggtcgctcgga

SEQ ID NO: 1692416 - DNA, 25 bp, Homo sapien
ggacttctgactgccccttttggtg

SEQ ID NO: 1692417 - DNA, 25 bp, Homo sapien
ccttcattaagctcatgggactctg

SEQ ID NO: 1692418 - DNA, 25 bp, Homo sapien
gaattgccattgtgctcggcggcct

SEQ ID NO: 1692419 - DNA, 25 bp, Homo sapien
cttctgcgcacacgcagctctcttc

SEQ ID NO: 1692420 - DNA, 25 bp, Homo sapien
ttctgcgcacacgcagctctcttct

SEQ ID NO: 1692421 - DNA, 25 bp, Homo sapien
ctcggaaggctcctcacaggtgaga

SEQ ID NO: 1692422 - DNA, 25 bp, Homo sapien
tgacctgtctccataggctctctgg

SEQ ID NO: 1692423 - DNA, 25 bp, Homo sapien
tgttgaacacctatgcaggctctgc

SEQ ID NO: 1692424 - DNA, 25 bp, Homo sapien
ggcccttgcatgctagaaatgtaca

SEQ ID NO: 1692425 - DNA, 25 bp, Homo sapien
tggaagaatcctgggatacggcatc

SEQ ID NO: 1692426 - DNA, 25 bp, Homo sapien
atccgaccgttctacgccgctcaaa

SEQ ID NO: 1692427 - DNA, 25 bp, Homo sapien
gttctacgccgctcaaagctgggct

SEQ ID NO: 1692428 - DNA, 25 bp, Homo sapien
gggatacggcatcattcccaagctt

SEQ ID NO: 1692429 - DNA, 25 bp, Homo sapien
tgtccaggcacaatgctacagtggg

SEQ ID NO: 1692430 - DNA, 25 bp, Homo sapien
tacagtgccgtaatcacatacaagg

SEQ ID NO: 1692431 - DNA, 25 bp, Homo sapien
tctgcaatcagaaggtaagcgcttt

SEQ ID NO: 1692432 - DNA, 25 bp, Homo sapien
gaaatcaaaaagtgccctgtccagg

SEQ ID NO: 1692433 - DNA, 25 bp, Homo sapien
cctgcttccgctttgggttctgctt

SEQ ID NO: 1692434 - DNA, 25 bp, Homo sapien
ctcgtaggtgtgctggatgagctcc

SEQ ID NO: 1692435 - DNA, 25 bp, Homo sapien
tgagctccgagacctggagcctgct

SEQ ID NO: 1692436 - DNA, 25 bp, Homo sapien
tttctgcgggatgacgggccgtgct

SEQ ID NO: 1692437 - DNA, 25 bp, Homo sapien
ctctgggaagccacctggtcacaat

SEQ ID NO: 1692438 - DNA, 25 bp, Homo sapien
gctggctctgggaagccacctggtc

SEQ ID NO: 1692439 - DNA, 25 bp, Homo sapien
gcccctgaaaccacctgcagagtct

SEQ ID NO: 1692440 - DNA, 25 bp, Homo sapien
tggtcacaatgcaactccctaactg

SEQ ID NO: 1692441 - DNA, 25 bp, Homo sapien
actttcacagctttgcataggtttc

SEQ ID NO: 1692442 - DNA, 25 bp, Homo sapien
ttgcataggtttcttgtgatcccct

SEQ ID NO: 1692443 - DNA, 25 bp, Homo sapien
tatggccctgttgcaagtataccac

SEQ ID NO: 1692444 - DNA, 25 bp, Homo sapien
caagccgagcactacagatgggtca

SEQ ID NO: 1692445 - DNA, 25 bp, Homo sapien
tcaaaatgtctgaacgccctggaga

SEQ ID NO: 1692446 - DNA, 25 bp, Homo sapien
cagatattagaaagccaagccgagc

SEQ ID NO: 1692447 - DNA, 25 bp, Homo sapien
tagaagacaatctacagccacgttc

SEQ ID NO: 1692448 - DNA, 25 bp, Homo sapien
tcttaagttggcgtgtgagtgtctg

SEQ ID NO: 1692449 - DNA, 25 bp, Homo sapien
cagtcgcctacttgcttaaccaaaa

SEQ ID NO: 1692450 - DNA, 25 bp, Homo sapien
tgagtgtctgtgcacgtagaagaca

SEQ ID NO: 1692451 - DNA, 25 bp, Homo sapien
tgcctttacctgttgtcaaacccag

SEQ ID NO: 1692452 - DNA, 25 bp, Homo sapien
cttctgacttaaacacaaaggctgt

SEQ ID NO: 1692453 - DNA, 25 bp, Homo sapien
tctgcacaaatatgaatctatcctg

SEQ ID NO: 1692454 - DNA, 25 bp, Homo sapien
tgtaggtcactaacaataatttgga

SEQ ID NO: 1692455 - DNA, 25 bp, Homo sapien
aaaaaataaagcatcatagaatttt

SEQ ID NO: 1692456 - DNA, 25 bp, Homo sapien
aataaagcatcatagaatttttctg

SEQ ID NO: 1692457 - DNA, 25 bp, Homo sapien
tcatagaatttttctggccaaaaat

SEQ ID NO: 1692458 - DNA, 25 bp, Homo sapien
aaagcatcatagaatttttctggcc

SEQ ID NO: 1692459 - DNA, 25 bp, Homo sapien
cacgtgaatcaaactgttccacaaa

SEQ ID NO: 1692460 - DNA, 25 bp, Homo sapien
tgaatcaaactgttccacaaactgg

SEQ ID NO: 1692461 - DNA, 25 bp, Homo sapien
caaactgttccacaaactggattcc

SEQ ID NO: 1692462 - DNA, 25 bp, Homo sapien
cacaaacacgtgaatcaaactgttc

SEQ ID NO: 1692463 - DNA, 25 bp, Homo sapien
aagaagggcaactttcgggctagat

SEQ ID NO: 1692464 - DNA, 25 bp, Homo sapien
aagggcaactttcgggctagatgga

SEQ ID NO: 1692465 - DNA, 25 bp, Homo sapien
actttcgggctagatggagagtctg

SEQ ID NO: 1692466 - DNA, 25 bp, Homo sapien
gcaactttcgggctagatggagagt

SEQ ID NO: 1692467 - DNA, 25 bp, Homo sapien
tccttggggagagctaacccagaga

SEQ ID NO: 1692468 - DNA, 25 bp, Homo sapien
tggggagagctaacccagagaaaag

SEQ ID NO: 1692469 - DNA, 25 bp, Homo sapien
cttggggagagctaacccagagaaa

SEQ ID NO: 1692470 - DNA, 25 bp, Homo sapien
ggggagagctaacccagagaaaaga

SEQ ID NO: 1692471 - DNA, 25 bp, Homo sapien
ctgtttcagaaattagttgggcatg

SEQ ID NO: 1692472 - DNA, 25 bp, Homo sapien
tgcccaattgcattcacttcctctt

SEQ ID NO: 1692473 - DNA, 25 bp, Homo sapien
cctctactggaaggcttgccactgt

SEQ ID NO: 1692474 - DNA, 25 bp, Homo sapien
ggtggagtacagttttgaagatctt

SEQ ID NO: 1692475 - DNA, 25 bp, Homo sapien
tctgcaatggtggagtacagttttg

SEQ ID NO: 1692476 - DNA, 25 bp, Homo sapien
gaaccactgtgcctcgctagaattt

SEQ ID NO: 1692477 - DNA, 25 bp, Homo sapien
gagaggctcgaacgtgatatctgtc

SEQ ID NO: 1692478 - DNA, 25 bp, Homo sapien
tatttgttaagagtgctggagcatc

SEQ ID NO: 1692479 - DNA, 25 bp, Homo sapien
cagaccctgtctatagtggcaataa

SEQ ID NO: 1692480 - DNA, 25 bp, Homo sapien
gggaaaaggttcggatgctgtactc

SEQ ID NO: 1692481 - DNA, 25 bp, Homo sapien
ttgggaaaaggttcggatgctgtac

SEQ ID NO: 1692482 - DNA, 25 bp, Homo sapien
cttgggaaaaggttcggatgctgta

SEQ ID NO: 1692483 - DNA, 25 bp, Homo sapien
tggaggaccgttgcttttgttcttg

SEQ ID NO: 1692484 - DNA, 25 bp, Homo sapien
catctttactggaggaccgttgctt

SEQ ID NO: 1692485 - DNA, 25 bp, Homo sapien
ttccccggagtcattagatttgctg

SEQ ID NO: 1692486 - DNA, 25 bp, Homo sapien
tcttccccggagtcattagatttgc

SEQ ID NO: 1692487 - DNA, 25 bp, Homo sapien
tacacttagcagtactccgaggtct

SEQ ID NO: 1692488 - DNA, 25 bp, Homo sapien
tcagataaattcaagtagggcccat

SEQ ID NO: 1692489 - DNA, 25 bp, Homo sapien
caaaaactcatcttgcagggcaatc

SEQ ID NO: 1692490 - DNA, 25 bp, Homo sapien
tagggcccatgggataattgctggc

SEQ ID NO: 1692491 - DNA, 25 bp, Homo sapien
actctgttcttagctgtgctcgttg

SEQ ID NO: 1692492 - DNA, 25 bp, Homo sapien
ggtcaccgaccaagctttaaatgta

SEQ ID NO: 1692493 - DNA, 25 bp, Homo sapien
tgatggtatgcaaaggtcaccgacc

SEQ ID NO: 1692494 - DNA, 25 bp, Homo sapien
attaatctgggcacatggtaaaatc

SEQ ID NO: 1692495 - DNA, 25 bp, Homo sapien
atatgcagacagaaattaaaggcct

SEQ ID NO: 1692496 - DNA, 25 bp, Homo sapien
atttttacaggtgtcaaagtattct

SEQ ID NO: 1692497 - DNA, 25 bp, Homo sapien
tcccagattgcttatctgagaacat

SEQ ID NO: 1692498 - DNA, 25 bp, Homo sapien
gattgcttatctgagaacattgatt

SEQ ID NO: 1692499 - DNA, 25 bp, Homo sapien
tctgagaacattgattattttggat

SEQ ID NO: 1692500 - DNA, 25 bp, Homo sapien
gtaatagttcccagattgcttatct

SEQ ID NO: 1692501 - DNA, 25 bp, Homo sapien
cttcactgggttcccggatgcaagc

SEQ ID NO: 1692502 - DNA, 25 bp, Homo sapien
agcttcactgggttcccggatgcaa

SEQ ID NO: 1692503 - DNA, 25 bp, Homo sapien
ctgatgggctccattgctgctccag

SEQ ID NO: 1692504 - DNA, 25 bp, Homo sapien
cattgctgctccagcacttagcttc

SEQ ID NO: 1692505 - DNA, 25 bp, Homo sapien
taattgcaattgagttctctccaac

SEQ ID NO: 1692506 - DNA, 25 bp, Homo sapien
tgatcaattgctggccaatggcctg

SEQ ID NO: 1692507 - DNA, 25 bp, Homo sapien
tgcaagctgtttgccccttcctaat

SEQ ID NO: 1692508 - DNA, 25 bp, Homo sapien
caatggcctgtgctagtagacccac

SEQ ID NO: 1692509 - DNA, 25 bp, Homo sapien
cactacagctattgaaggcattggt

SEQ ID NO: 1692510 - DNA, 25 bp, Homo sapien
actacagctattgaaggcattggtt

SEQ ID NO: 1692511 - DNA, 25 bp, Homo sapien
tcactacagctattgaaggcattgg

SEQ ID NO: 1692512 - DNA, 25 bp, Homo sapien
atcactacagctattgaaggcattg

SEQ ID NO: 1692513 - DNA, 25 bp, Homo sapien
gaaacctctactgttttcttagcac

SEQ ID NO: 1692514 - DNA, 25 bp, Homo sapien
ggaaacctctactgttttcttagca

SEQ ID NO: 1692515 - DNA, 25 bp, Homo sapien
aaatgagaaggtgcatcatgagcca

SEQ ID NO: 1692516 - DNA, 25 bp, Homo sapien
gaaatgacttgatcacagagaggac

SEQ ID NO: 1692517 - DNA, 25 bp, Homo sapien
tggtcaggccaaagggtcaaatgtc

SEQ ID NO: 1692518 - DNA, 25 bp, Homo sapien
tcatgagccagacccgaaatgactt

SEQ ID NO: 1692519 - DNA, 25 bp, Homo sapien
caaggaggctttagaagaagacctt

SEQ ID NO: 1692520 - DNA, 25 bp, Homo sapien
tccaaaaagtgcaccctgactcagg

SEQ ID NO: 1692521 - DNA, 25 bp, Homo sapien
ctgactcaggccaggaaacgccaag

SEQ ID NO: 1692522 - DNA, 25 bp, Homo sapien
cgccaagagtctgaataagaagagc

SEQ ID NO: 1692523 - DNA, 25 bp, Homo sapien
tctctggacttaatcacaaagggag

SEQ ID NO: 1692524 - DNA, 25 bp, Homo sapien
tggacttaatcacaaagggagatga

SEQ ID NO: 1692525 - DNA, 25 bp, Homo sapien
gctctctggacttaatcacaaaggg

SEQ ID NO: 1692526 - DNA, 25 bp, Homo sapien
cccagctctctggacttaatcacaa

SEQ ID NO: 1692527 - DNA, 25 bp, Homo sapien
tcaatggctccaccaggcaaagatc

SEQ ID NO: 1692528 - DNA, 25 bp, Homo sapien
tctggacaccttccatgttgtggaa

SEQ ID NO: 1692529 - DNA, 25 bp, Homo sapien
tcagcaaggagaaaagccaacattc

SEQ ID NO: 1692530 - DNA, 25 bp, Homo sapien
cagaacacagcccatgctgagggca

SEQ ID NO: 1692531 - DNA, 25 bp, Homo sapien
gcaaatccggttgccgaatacctct

SEQ ID NO: 1692532 - DNA, 25 bp, Homo sapien
tgccgaatacctctatgctaaattt

SEQ ID NO: 1692533 - DNA, 25 bp, Homo sapien
gttttgctgacattatgtggattaa

SEQ ID NO: 1692534 - DNA, 25 bp, Homo sapien
ccttgatagaaatttggcaaatccg

SEQ ID NO: 1692535 - DNA, 25 bp, Homo sapien
cagatgatccacctaaaacttccat

SEQ ID NO: 1692536 - DNA, 25 bp, Homo sapien
ctgccatgctaaattcagatgatcc

SEQ ID NO: 1692537 - DNA, 25 bp, Homo sapien
gatggagaaagttggactgatagca

SEQ ID NO: 1692538 - DNA, 25 bp, Homo sapien
caatgtgctccacacagttaagtcc

SEQ ID NO: 1692539 - DNA, 25 bp, Homo sapien
tttaacttgcttctcagactcggag

SEQ ID NO: 1692540 - DNA, 25 bp, Homo sapien
aggcgtccacggctcactgcttttg

SEQ ID NO: 1692541 - DNA, 25 bp, Homo sapien
gccctcagcaaaaccagcggctgga

SEQ ID NO: 1692542 - DNA, 25 bp, Homo sapien
gtgttgacgacgaagaccaggcacc

SEQ ID NO: 1692543 - DNA, 25 bp, Homo sapien
caagcgccccagagtcggttcccgg

SEQ ID NO: 1692544 - DNA, 25 bp, Homo sapien
tgccagacctgccagaagccagcgg

SEQ ID NO: 1692545 - DNA, 25 bp, Homo sapien
catccgcatcaaagcgctgccagac

SEQ ID NO: 1692546 - DNA, 25 bp, Homo sapien
tgccagaagccagcggcgtccaagc

SEQ ID NO: 1692547 - DNA, 25 bp, Homo sapien
tgtgtatcaccagtatgccaaacgt

SEQ ID NO: 1692548 - DNA, 25 bp, Homo sapien
ggcgcgctcgcacacaaagagagat

SEQ ID NO: 1692549 - DNA, 25 bp, Homo sapien
ggtacactgcattaacaacccaggt

SEQ ID NO: 1692550 - DNA, 25 bp, Homo sapien
cttggagccacgtctacacctgagt

SEQ ID NO: 1692551 - DNA, 25 bp, Homo sapien
tggagaaagaaagcatcgagttcct

SEQ ID NO: 1692552 - DNA, 25 bp, Homo sapien
taggagatgagagccatgaaacaca

SEQ ID NO: 1692553 - DNA, 25 bp, Homo sapien
gaaaaatgacagagatagacataaa

SEQ ID NO: 1692554 - DNA, 25 bp, Homo sapien
tgaagaaggcggaagccagcccttt

SEQ ID NO: 1692555 - DNA, 25 bp, Homo sapien
cagacaaagagcaataaaaggtaca

SEQ ID NO: 1692556 - DNA, 25 bp, Homo sapien
taaagaggagtgtgcgcaagtggtc

SEQ ID NO: 1692557 - DNA, 25 bp, Homo sapien
gggacttgtgtctctatccttctcg

SEQ ID NO: 1692558 - DNA, 25 bp, Homo sapien
gcgcaagtggtctgaccagaggaaa

SEQ ID NO: 1692559 - DNA, 25 bp, Homo sapien
gtgtctctatccttctcgtctgctg

SEQ ID NO: 1692560 - DNA, 25 bp, Homo sapien
ttagaggcatcttgggtagtcataa

SEQ ID NO: 1692561 - DNA, 25 bp, Homo sapien
gggtagtcataaactgctgtttcac

SEQ ID NO: 1692562 - DNA, 25 bp, Homo sapien
taaactgctgtttcaccttgtgcaa

SEQ ID NO: 1692563 - DNA, 25 bp, Homo sapien
tcttgggtagtcataaactgctgtt

SEQ ID NO: 1692564 - DNA, 25 bp, Homo sapien
ctctttcatccgaatgcgaccatct

SEQ ID NO: 1692565 - DNA, 25 bp, Homo sapien
ctgcataaactccacgctgctgtcc

SEQ ID NO: 1692566 - DNA, 25 bp, Homo sapien
ttttcccggcgaaagagcagaagaa

SEQ ID NO: 1692567 - DNA, 25 bp, Homo sapien
tgcataaactccacgctgctgtcca

SEQ ID NO: 1692568 - DNA, 25 bp, Homo sapien
tgggttttcccggcgaaagagcaga

SEQ ID NO: 1692569 - DNA, 25 bp, Homo sapien
agcaggtggctaagatcgtagcctt

SEQ ID NO: 1692570 - DNA, 25 bp, Homo sapien
gctaagatcgtagccttgtctcagt

SEQ ID NO: 1692571 - DNA, 25 bp, Homo sapien
gatcgtagccttgtctcagtcctct

SEQ ID NO: 1692572 - DNA, 25 bp, Homo sapien
tagccttgtctcagtcctctttctt

SEQ ID NO: 1692573 - DNA, 25 bp, Homo sapien
gggaccaaagtcctcatcactaagg

SEQ ID NO: 1692574 - DNA, 25 bp, Homo sapien
ggttataaacagaaggcccactagc

SEQ ID NO: 1692575 - DNA, 25 bp, Homo sapien
cattcttcagtgtacctgcctggcc

SEQ ID NO: 1692576 - DNA, 25 bp, Homo sapien
taagagaggccattgataccgcctt

SEQ ID NO: 1692577 - DNA, 25 bp, Homo sapien
tcagcagctgatataaagccactgc

SEQ ID NO: 1692578 - DNA, 25 bp, Homo sapien
gccactgctgtcagcgtcatatttg

SEQ ID NO: 1692579 - DNA, 25 bp, Homo sapien
gagctcagcagctgatataaagcca

SEQ ID NO: 1692580 - DNA, 25 bp, Homo sapien
tgtcagcgtcatatttgcgccaaat

SEQ ID NO: 1692581 - DNA, 25 bp, Homo sapien
ttttgtggtgaagaaagaggtctcg

SEQ ID NO: 1692582 - DNA, 25 bp, Homo sapien
tgaagaaagaggtctcggaggaagt

SEQ ID NO: 1692583 - DNA, 25 bp, Homo sapien
ggtgccagtgtattcttccagttta

SEQ ID NO: 1692584 - DNA, 25 bp, Homo sapien
tccagtttagcctcagaaatggcct

SEQ ID NO: 1692585 - DNA, 25 bp, Homo sapien
aacaaatcaacaccgtaagaagctg

SEQ ID NO: 1692586 - DNA, 25 bp, Homo sapien
ttcttcccagcggagactcacttga

SEQ ID NO: 1692587 - DNA, 25 bp, Homo sapien
cagggtcaagagcacttgccttctt

SEQ ID NO: 1692588 - DNA, 25 bp, Homo sapien
ccaattacaagttaccagggtcaag

SEQ ID NO: 1692589 - DNA, 25 bp, Homo sapien
cttgaaagacgtgggcctaactcca

SEQ ID NO: 1692590 - DNA, 25 bp, Homo sapien
ttgaaagacgtgggcctaactccat

SEQ ID NO: 1692591 - DNA, 25 bp, Homo sapien
taagtcatttagatccaaccgacca

SEQ ID NO: 1692592 - DNA, 25 bp, Homo sapien
catttagatccaaccgaccatcttt

SEQ ID NO: 1692593 - DNA, 25 bp, Homo sapien
cttgctaagtcatttagatccaacc

SEQ ID NO: 1692594 - DNA, 25 bp, Homo sapien
gatccaaccgaccatctttatttct

SEQ ID NO: 1692595 - DNA, 25 bp, Homo sapien
gagtcggctgagtagtcctgtgtcc

SEQ ID NO: 1692596 - DNA, 25 bp, Homo sapien
tcctgtgtcctgaaataactgctcg

SEQ ID NO: 1692597 - DNA, 25 bp, Homo sapien
gagccagtaaatgggatttgggaca

SEQ ID NO: 1692598 - DNA, 25 bp, Homo sapien
tcgacgttcccagagccagtaaatg

SEQ ID NO: 1692599 - DNA, 25 bp, Homo sapien
gacaacattttcatggacactgagc

SEQ ID NO: 1692600 - DNA, 25 bp, Homo sapien
cttctagccttcagacacttggtgc

SEQ ID NO: 1692601 - DNA, 25 bp, Homo sapien
tctagccttcagacacttggtgcct

SEQ ID NO: 1692602 - DNA, 25 bp, Homo sapien
acaacattttcatggacactgagcc

SEQ ID NO: 1692603 - DNA, 25 bp, Homo sapien
ggcaatggcttcctagatatgacat

SEQ ID NO: 1692604 - DNA, 25 bp, Homo sapien
cactgtattaaacaattaacatgaa

SEQ ID NO: 1692605 - DNA, 25 bp, Homo sapien
aatgaaattgtgcccccaccttaca

SEQ ID NO: 1692606 - DNA, 25 bp, Homo sapien
acgggtaaatcttcatgagcttgga

SEQ ID NO: 1692607 - DNA, 25 bp, Homo sapien
gaaggaagttttcctgaagagccag

SEQ ID NO: 1692608 - DNA, 25 bp, Homo sapien
gaagttttcctgaagagccagaatc

SEQ ID NO: 1692609 - DNA, 25 bp, Homo sapien
aggaagttttcctgaagagccagaa

SEQ ID NO: 1692610 - DNA, 25 bp, Homo sapien
attggagaaggaagttttcctgaag

SEQ ID NO: 1692611 - DNA, 25 bp, Homo sapien
tcttctttcctgctcaaatccgtag

SEQ ID NO: 1692612 - DNA, 25 bp, Homo sapien
tttaagatcccttgattccatgctg

SEQ ID NO: 1692613 - DNA, 25 bp, Homo sapien
tcaaatccgtagagaaacagcaatg

SEQ ID NO: 1692614 - DNA, 25 bp, Homo sapien
agcaatgacataaacccatctagag

SEQ ID NO: 1692615 - DNA, 25 bp, Homo sapien
catcatagtaggcaaagattttctc

SEQ ID NO: 1692616 - DNA, 25 bp, Homo sapien
tcatagtaggcaaagattttctcaa

SEQ ID NO: 1692617 - DNA, 25 bp, Homo sapien
ttttcctttcttcagtagaacaagc

SEQ ID NO: 1692618 - DNA, 25 bp, Homo sapien
aacatcatagtaggcaaagattttc

SEQ ID NO: 1692619 - DNA, 25 bp, Homo sapien
catcatgtctttgacaaacccatcc

SEQ ID NO: 1692620 - DNA, 25 bp, Homo sapien
tgtctttgacaaacccatccacttc

SEQ ID NO: 1692621 - DNA, 25 bp, Homo sapien
ctggacaagctccatcatgtctttg

SEQ ID NO: 1692622 - DNA, 25 bp, Homo sapien
gctccatcatgtctttgacaaaccc

SEQ ID NO: 1692623 - DNA, 25 bp, Homo sapien
ttctccactaaacggccccaggatc

SEQ ID NO: 1692624 - DNA, 25 bp, Homo sapien
cagcatcttcagtgacttgttggta

SEQ ID NO: 1692625 - DNA, 25 bp, Homo sapien
gggagttcatttgttgtacagtgca

SEQ ID NO: 1692626 - DNA, 25 bp, Homo sapien
caagtatagatgtggcccaaggaaa

SEQ ID NO: 1692627 - DNA, 25 bp, Homo sapien
taactggcaacatgggtgggcactg

SEQ ID NO: 1692628 - DNA, 25 bp, Homo sapien
taaattaaccaatcaggactcagct

SEQ ID NO: 1692629 - DNA, 25 bp, Homo sapien
gacagcttactcaagtaccctgaaa

SEQ ID NO: 1692630 - DNA, 25 bp, Homo sapien
tttttgactagagatgacagcttac

SEQ ID NO: 1692631 - DNA, 25 bp, Homo sapien
gcaggagaatctcgcggaacttatc

SEQ ID NO: 1692632 - DNA, 25 bp, Homo sapien
gattttcagcccaagacacaaagcc

SEQ ID NO: 1692633 - DNA, 25 bp, Homo sapien
acttatcaaggtccaccccgctgat

SEQ ID NO: 1692634 - DNA, 25 bp, Homo sapien
tcacgtcgcagtgacgcaggagaat

SEQ ID NO: 1692635 - DNA, 25 bp, Homo sapien
gttcttgcccaagaatagcacacca

SEQ ID NO: 1692636 - DNA, 25 bp, Homo sapien
tagcacaccatttgtgagtttgccc

SEQ ID NO: 1692637 - DNA, 25 bp, Homo sapien
tacaggattgccatgaatgccacac

SEQ ID NO: 1692638 - DNA, 25 bp, Homo sapien
tgagacagggatagatcacgccggt

SEQ ID NO: 1692639 - DNA, 25 bp, Homo sapien
catacttagatggtagagcctgcta

SEQ ID NO: 1692640 - DNA, 25 bp, Homo sapien
ttagatggtagagcctgctacacac

SEQ ID NO: 1692641 - DNA, 25 bp, Homo sapien
tacttagatggtagagcctgctaca

SEQ ID NO: 1692642 - DNA, 25 bp, Homo sapien
acatacttagatggtagagcctgct

SEQ ID NO: 1692643 - DNA, 25 bp, Homo sapien
cagcgttacacggttcttttccagg

SEQ ID NO: 1692644 - DNA, 25 bp, Homo sapien
tctgcagcgttacacggttcttttc

SEQ ID NO: 1692645 - DNA, 25 bp, Homo sapien
acttctgcagcgttacacggttctt

SEQ ID NO: 1692646 - DNA, 25 bp, Homo sapien
cacacacttctgcagcgttacacgg

SEQ ID NO: 1692647 - DNA, 25 bp, Homo sapien
gcttgctgtagtgagccaaacgtga

SEQ ID NO: 1692648 - DNA, 25 bp, Homo sapien
tctctggaagaaatggtggagcgct

SEQ ID NO: 1692649 - DNA, 25 bp, Homo sapien
tagcacctttagatgacacctccgg

SEQ ID NO: 1692650 - DNA, 25 bp, Homo sapien
caaacgtgatgcctcgctcgctata

SEQ ID NO: 1692651 - DNA, 25 bp, Homo sapien
tagaaatgacgtttacttagcaggc

SEQ ID NO: 1692652 - DNA, 25 bp, Homo sapien
ggttagaaatgacgtttacttagca

SEQ ID NO: 1692653 - DNA, 25 bp, Homo sapien
gttagaaatgacgtttacttagcag

SEQ ID NO: 1692654 - DNA, 25 bp, Homo sapien
ttagaaatgacgtttacttagcagg

SEQ ID NO: 1692655 - DNA, 25 bp, Homo sapien
gatgtaaatagaatagctctctttg

SEQ ID NO: 1692656 - DNA, 25 bp, Homo sapien
atgtaaatagaatagctctctttgc

SEQ ID NO: 1692657 - DNA, 25 bp, Homo sapien
gacaaaaagcgcaagagatgccgca

SEQ ID NO: 1692658 - DNA, 25 bp, Homo sapien
caggtccacgcggacactggaatct

SEQ ID NO: 1692659 - DNA, 25 bp, Homo sapien
tagtgacatttttgagcgcattgcc

SEQ ID NO: 1692660 - DNA, 25 bp, Homo sapien
ttacatctacaagctgctgaagcag

SEQ ID NO: 1692661 - DNA, 25 bp, Homo sapien
ctgaatgaatagcgcgtacccttcc

SEQ ID NO: 1692662 - DNA, 25 bp, Homo sapien
atgaatagcgcgtacccttcccccg

SEQ ID NO: 1692663 - DNA, 25 bp, Homo sapien
gaatgaatagcgcgtacccttcccc

SEQ ID NO: 1692664 - DNA, 25 bp, Homo sapien
tgaatagcgcgtacccttcccccga

SEQ ID NO: 1692665 - DNA, 25 bp, Homo sapien
gcagcccgttgacaccgcccacggg

SEQ ID NO: 1692666 - DNA, 25 bp, Homo sapien
cagaaccgccggcaggtacgctagc

SEQ ID NO: 1692667 - DNA, 25 bp, Homo sapien
tctcggcatcgttgcccttgctgag

SEQ ID NO: 1692668 - DNA, 25 bp, Homo sapien
ggcaggtacgctagcgtgcagcccc

SEQ ID NO: 1692669 - DNA, 25 bp, Homo sapien
ctaagccattgtcactcgggccagc

SEQ ID NO: 1692670 - DNA, 25 bp, Homo sapien
tcttcttgttccgacggcgttgccc

SEQ ID NO: 1692671 - DNA, 25 bp, Homo sapien
cttcttcttgttccgacggcgttgc

SEQ ID NO: 1692672 - DNA, 25 bp, Homo sapien
gccattgtcactcgggccagcagct

SEQ ID NO: 1692673 - DNA, 25 bp, Homo sapien
tctgagtcctgtttacgaaagctgt

SEQ ID NO: 1692674 - DNA, 25 bp, Homo sapien
tgtggtagtggctcccaatcctttg

SEQ ID NO: 1692675 - DNA, 25 bp, Homo sapien
aagttctgctgtcaatactaccgag

SEQ ID NO: 1692676 - DNA, 25 bp, Homo sapien
gaaactgcttcggataccccaataa

SEQ ID NO: 1692677 - DNA, 25 bp, Homo sapien
catagcatggctacggtcttctaga

SEQ ID NO: 1692678 - DNA, 25 bp, Homo sapien
caacaagagttgtgctgaaagctgc

SEQ ID NO: 1692679 - DNA, 25 bp, Homo sapien
catgcgccctaggagtatgtttaga

SEQ ID NO: 1692680 - DNA, 25 bp, Homo sapien
taaccatcctagaattctcggaagg

SEQ ID NO: 1692681 - DNA, 25 bp, Homo sapien
cagttgagtcaagagtcatggatcc

SEQ ID NO: 1692682 - DNA, 25 bp, Homo sapien
tagtggccataggaccagttgagtc

SEQ ID NO: 1692683 - DNA, 25 bp, Homo sapien
tgagtccacttctgagtagtggcca

SEQ ID NO: 1692684 - DNA, 25 bp, Homo sapien
aatcatagggatagggaaaatggcc

SEQ ID NO: 1692685 - DNA, 25 bp, Homo sapien
gataaagccaatttatcaatataag

SEQ ID NO: 1692686 - DNA, 25 bp, Homo sapien
tccaaaatcatgttatttgggtgcc

SEQ ID NO: 1692687 - DNA, 25 bp, Homo sapien
gatggtcatatattactggttgtaa

SEQ ID NO: 1692688 - DNA, 25 bp, Homo sapien
gggtgccatatgatggtcatatatt

SEQ ID NO: 1692689 - DNA, 25 bp, Homo sapien
tattctaagctctttgcaattgtct

SEQ ID NO: 1692690 - DNA, 25 bp, Homo sapien
aaatattctaagctctttgcaattg

SEQ ID NO: 1692691 - DNA, 25 bp, Homo sapien
ctgagggaggaagagtgcaggatcc

SEQ ID NO: 1692692 - DNA, 25 bp, Homo sapien
taagctctttgcaattgtctaattc

SEQ ID NO: 1692693 - DNA, 25 bp, Homo sapien
tctcttcctagggactggcatttac

SEQ ID NO: 1692694 - DNA, 25 bp, Homo sapien
ttctctcttcctagggactggcatt

SEQ ID NO: 1692695 - DNA, 25 bp, Homo sapien
cttcctagggactggcatttactta

SEQ ID NO: 1692696 - DNA, 25 bp, Homo sapien
tcttcctagggactggcatttactt

SEQ ID NO: 1692697 - DNA, 25 bp, Homo sapien
ccttgacatctggtccggtagacat

SEQ ID NO: 1692698 - DNA, 25 bp, Homo sapien
tcctcttgagccacgtttaaattgc

SEQ ID NO: 1692699 - DNA, 25 bp, Homo sapien
cacgtttaaattgccatcactggaa

SEQ ID NO: 1692700 - DNA, 25 bp, Homo sapien
tgtagccttgacatctggtccggta

SEQ ID NO: 1692701 - DNA, 25 bp, Homo sapien
ttctgtggaagcattgggctggcta

SEQ ID NO: 1692702 - DNA, 25 bp, Homo sapien
ccatagctgggatggcaatgctcaa

SEQ ID NO: 1692703 - DNA, 25 bp, Homo sapien
cagcccatgtcggactgaacaaaaa

SEQ ID NO: 1692704 - DNA, 25 bp, Homo sapien
cagtggagggccgttctgtggaagc

SEQ ID NO: 1692705 - DNA, 25 bp, Homo sapien
tgctttaaattcttttagagtttca

SEQ ID NO: 1692706 - DNA, 25 bp, Homo sapien
cattgctttaaattcttttagagtt

SEQ ID NO: 1692707 - DNA, 25 bp, Homo sapien
taactctttaagtcaaattatttga

SEQ ID NO: 1692708 - DNA, 25 bp, Homo sapien
tacttagtggttaaatgaatctcac

SEQ ID NO: 1692709 - DNA, 25 bp, Homo sapien
agaaagagtccagagtctcattaaa

SEQ ID NO: 1692710 - DNA, 25 bp, Homo sapien
catgctcggcctgatacttaggtac

SEQ ID NO: 1692711 - DNA, 25 bp, Homo sapien
ctgaggatgattccctggatttcag

SEQ ID NO: 1692712 - DNA, 25 bp, Homo sapien
tattccagccacatagccactgggg

SEQ ID NO: 1692713 - DNA, 25 bp, Homo sapien
aatgagccatagttgagggagctga

SEQ ID NO: 1692714 - DNA, 25 bp, Homo sapien
gccactggggattggagccaagaat

SEQ ID NO: 1692715 - DNA, 25 bp, Homo sapien
tgggctatgccttgtacaatccgga

SEQ ID NO: 1692716 - DNA, 25 bp, Homo sapien
agcaaggccactcccgcattagctg

SEQ ID NO: 1692717 - DNA, 25 bp, Homo sapien
tatgccttgtacaatccggaggaca

SEQ ID NO: 1692718 - DNA, 25 bp, Homo sapien
aatccggaggacaatgagcaaggcc

SEQ ID NO: 1692719 - DNA, 25 bp, Homo sapien
gacccaaattgaatactgaccagtt

SEQ ID NO: 1692720 - DNA, 25 bp, Homo sapien
gggagcccatttgacccaaattgaa

SEQ ID NO: 1692721 - DNA, 25 bp, Homo sapien
catttgacccaaattgaatactgac

SEQ ID NO: 1692722 - DNA, 25 bp, Homo sapien
tttccagtgggggagcccatttgac

SEQ ID NO: 1692723 - DNA, 25 bp, Homo sapien
gccatcctatggtctggcagaggag

SEQ ID NO: 1692724 - DNA, 25 bp, Homo sapien
aaagatatagaagacgtaaggccat

SEQ ID NO: 1692725 - DNA, 25 bp, Homo sapien
agcaagtagaacaatgaaggacccc

SEQ ID NO: 1692726 - DNA, 25 bp, Homo sapien
accagcaagtagaacaatgaaggac

SEQ ID NO: 1692727 - DNA, 25 bp, Homo sapien
aaccagagaggacaacaagcacagc

SEQ ID NO: 1692728 - DNA, 25 bp, Homo sapien
cagcactgataaagggatgattcac

SEQ ID NO: 1692729 - DNA, 25 bp, Homo sapien
agggatgattcacaggatcatcata

SEQ ID NO: 1692730 - DNA, 25 bp, Homo sapien
aaaccagagaggacaacaagcacag

SEQ ID NO: 1692731 - DNA, 25 bp, Homo sapien
gaacacacaatgtatctcttctcac

SEQ ID NO: 1692732 - DNA, 25 bp, Homo sapien
ctagagggacatagagaaatgtcag

SEQ ID NO: 1692733 - DNA, 25 bp, Homo sapien
tagagggacatagagaaatgtcaga

SEQ ID NO: 1692734 - DNA, 25 bp, Homo sapien
aagcacacatcaatgtcccctccgt

SEQ ID NO: 1692735 - DNA, 25 bp, Homo sapien
acacatcaatgtcccctccgtcaga

SEQ ID NO: 1692736 - DNA, 25 bp, Homo sapien
tcaatgtcccctccgtcagaaggca

SEQ ID NO: 1692737 - DNA, 25 bp, Homo sapien
catcaatgtcccctccgtcagaagg

SEQ ID NO: 1692738 - DNA, 25 bp, Homo sapien
tagccctaatgggaagagaccagcc

SEQ ID NO: 1692739 - DNA, 25 bp, Homo sapien
aaatggcccagagtggtaaggattt

SEQ ID NO: 1692740 - DNA, 25 bp, Homo sapien
ggtaaggatttgatcatagccctaa

SEQ ID NO: 1692741 - DNA, 25 bp, Homo sapien
tgatcatagccctaatgggaagaga

SEQ ID NO: 1692742 - DNA, 25 bp, Homo sapien
tgtacgccataatggtataaaaaag

SEQ ID NO: 1692743 - DNA, 25 bp, Homo sapien
atctctgaggttggcttgaagtacc

SEQ ID NO: 1692744 - DNA, 25 bp, Homo sapien
gatgtacgttggtgtgtacgccata

SEQ ID NO: 1692745 - DNA, 25 bp, Homo sapien
gcttgaagtaccgagctgatgtacg

SEQ ID NO: 1692746 - DNA, 25 bp, Homo sapien
atataggaaatttaggccagccatg

SEQ ID NO: 1692747 - DNA, 25 bp, Homo sapien
gaaagaattatcattggaatgggct

SEQ ID NO: 1692748 - DNA, 25 bp, Homo sapien
tacacattcatgtatgcttgcattc

SEQ ID NO: 1692749 - DNA, 25 bp, Homo sapien
ggcagattaggaacagtaatgaaag

SEQ ID NO: 1692750 - DNA, 25 bp, Homo sapien
cctccaaggataatgcagatacatc

SEQ ID NO: 1692751 - DNA, 25 bp, Homo sapien
gatacatccaacaacaaacggcaag

SEQ ID NO: 1692752 - DNA, 25 bp, Homo sapien
aagaaagtctgccagtagacctcca

SEQ ID NO: 1692753 - DNA, 25 bp, Homo sapien
aacaaacggcaaggcagacaggatc

SEQ ID NO: 1692754 - DNA, 25 bp, Homo sapien
ctctgagcttcccacgttcacccct

SEQ ID NO: 1692755 - DNA, 25 bp, Homo sapien
gagcttcccacgttcacccctgtgt

SEQ ID NO: 1692756 - DNA, 25 bp, Homo sapien
tggggtaggaggacaaacacagagt

SEQ ID NO: 1692757 - DNA, 25 bp, Homo sapien
ttcccacgttcacccctgtgtccag

SEQ ID NO: 1692758 - DNA, 25 bp, Homo sapien
caagaagttaacaagggctcctgat

SEQ ID NO: 1692759 - DNA, 25 bp, Homo sapien
acccagggcagggacacgaggatca

SEQ ID NO: 1692760 - DNA, 25 bp, Homo sapien
tatccaagaagttaacaagggctcc

SEQ ID NO: 1692761 - DNA, 25 bp, Homo sapien
gaaggtcatggtcatgctgtggctg

SEQ ID NO: 1692762 - DNA, 25 bp, Homo sapien
ctgttgactgggacagcaccctggg

SEQ ID NO: 1692763 - DNA, 25 bp, Homo sapien
gctatgtttggaagtctcagtcaac

SEQ ID NO: 1692764 - DNA, 25 bp, Homo sapien
tcagttgactctgagcatggccact

SEQ ID NO: 1692765 - DNA, 25 bp, Homo sapien
tgctgcattcctcaacagagagagg

SEQ ID NO: 1692766 - DNA, 25 bp, Homo sapien
gatgaaaaatccagcagcagtagga

SEQ ID NO: 1692767 - DNA, 25 bp, Homo sapien
tgactgatgaaaaatccagcagcag

SEQ ID NO: 1692768 - DNA, 25 bp, Homo sapien
gcaaagacttgcaatagtcctttga

SEQ ID NO: 1692769 - DNA, 25 bp, Homo sapien
gacttgcaatagtcctttgagaaag

SEQ ID NO: 1692770 - DNA, 25 bp, Homo sapien
tattaacggtcacccaattcctgtc

SEQ ID NO: 1692771 - DNA, 25 bp, Homo sapien
ggtgggtgaatgtctgctctttagc

SEQ ID NO: 1692772 - DNA, 25 bp, Homo sapien
agacatttctccaaccaaactctga

SEQ ID NO: 1692773 - DNA, 25 bp, Homo sapien
cccgatatgttaacagcagctgaaa

SEQ ID NO: 1692774 - DNA, 25 bp, Homo sapien
tctgctcggccaaagatgaggtaga

SEQ ID NO: 1692775 - DNA, 25 bp, Homo sapien
gcacaggtattccagaggcggctct

SEQ ID NO: 1692776 - DNA, 25 bp, Homo sapien
caaacgaaggcagatatcatgggtc

SEQ ID NO: 1692777 - DNA, 25 bp, Homo sapien
gattctcagttctcggtcccaaggt

SEQ ID NO: 1692778 - DNA, 25 bp, Homo sapien
gctgtctgtgttagaggcatcccca

SEQ ID NO: 1692779 - DNA, 25 bp, Homo sapien
cataggtttagatgactcgatgctc

SEQ ID NO: 1692780 - DNA, 25 bp, Homo sapien
gcgattcaatagcatttactggcac

SEQ ID NO: 1692781 - DNA, 25 bp, Homo sapien
cattgtagatgtgtgagctagtgca

SEQ ID NO: 1692782 - DNA, 25 bp, Homo sapien
gaaatgatacggagcagacccagtc

SEQ ID NO: 1692783 - DNA, 25 bp, Homo sapien
tgggaaacacgcatgtagcctctgg

SEQ ID NO: 1692784 - DNA, 25 bp, Homo sapien
caaatctccctttgtggatatccct

SEQ ID NO: 1692785 - DNA, 25 bp, Homo sapien
ttttcttcatgcataagaggctgac

SEQ ID NO: 1692786 - DNA, 25 bp, Homo sapien
aacaaaatggagaggtcttgtccac

SEQ ID NO: 1692787 - DNA, 25 bp, Homo sapien
tgctccctgggccagtaggtgttga

SEQ ID NO: 1692788 - DNA, 25 bp, Homo sapien
ggccccattgtcagttgcccacatg

SEQ ID NO: 1692789 - DNA, 25 bp, Homo sapien
cctgggccagtaggtgttgaaagca

SEQ ID NO: 1692790 - DNA, 25 bp, Homo sapien
cttgtttggccccattgtcagttgc

SEQ ID NO: 1692791 - DNA, 25 bp, Homo sapien
tcatccgctaggatgctgaccccac

SEQ ID NO: 1692792 - DNA, 25 bp, Homo sapien
gtgagcactttcttctgtctggctt

SEQ ID NO: 1692793 - DNA, 25 bp, Homo sapien
atacacatacaagactccttccctg

SEQ ID NO: 1692794 - DNA, 25 bp, Homo sapien
gggttgcctgataggagactgctcc

SEQ ID NO: 1692795 - DNA, 25 bp, Homo sapien
gaattctgatggtaaggggttgcct

SEQ ID NO: 1692796 - DNA, 25 bp, Homo sapien
cacggaaactgaagatacggacagg

SEQ ID NO: 1692797 - DNA, 25 bp, Homo sapien
tgcatcagtggctgctctatccacg

SEQ ID NO: 1692798 - DNA, 25 bp, Homo sapien
taagggtgtctgcttattatgccat

SEQ ID NO: 1692799 - DNA, 25 bp, Homo sapien
ggatgattttgacccacacaccttc

SEQ ID NO: 1692800 - DNA, 25 bp, Homo sapien
aaatcttgagagcacttatggcagg

SEQ ID NO: 1692801 - DNA, 25 bp, Homo sapien
gaacagcattgtatactcagagcca

SEQ ID NO: 1692802 - DNA, 25 bp, Homo sapien
ttttctgatgatccccatggctaaa

SEQ ID NO: 1692803 - DNA, 25 bp, Homo sapien
aggactacaaatgcgtcctccatct

SEQ ID NO: 1692804 - DNA, 25 bp, Homo sapien
tagttaggactacaaatgcgtcctc

SEQ ID NO: 1692805 - DNA, 25 bp, Homo sapien
tatcttttctgatgatccccatggc

SEQ ID NO: 1692806 - DNA, 25 bp, Homo sapien
tagagacaggtttcctatgatcaca

SEQ ID NO: 1692807 - DNA, 25 bp, Homo sapien
ggaaggtctgactcttaaaggtgct

SEQ ID NO: 1692808 - DNA, 25 bp, Homo sapien
aacaggattgtgcactggagtcctc

SEQ ID NO: 1692809 - DNA, 25 bp, Homo sapien
tgaaatgtaacccagaatcagagcc

SEQ ID NO: 1692810 - DNA, 25 bp, Homo sapien
ttctatcacttgtaagcacaggtgt

SEQ ID NO: 1692811 - DNA, 25 bp, Homo sapien
ttcagttggacttctatcacttgta

SEQ ID NO: 1692812 - DNA, 25 bp, Homo sapien
gacttctatcacttgtaagcacagg

SEQ ID NO: 1692813 - DNA, 25 bp, Homo sapien
gttggacttctatcacttgtaagca

SEQ ID NO: 1692814 - DNA, 25 bp, Homo sapien
ctctttctttctcttccaaagccat

SEQ ID NO: 1692815 - DNA, 25 bp, Homo sapien
tttctctttctttctcttccaaagc

SEQ ID NO: 1692816 - DNA, 25 bp, Homo sapien
ctcagtctccatattttctttttct

SEQ ID NO: 1692817 - DNA, 25 bp, Homo sapien
tctttttctctttctttctcttcca

SEQ ID NO: 1692818 - DNA, 25 bp, Homo sapien
gccccagaagaccaagagccaccac

SEQ ID NO: 1692819 - DNA, 25 bp, Homo sapien
gccaagggcaagtaacgtccccaga

SEQ ID NO: 1692820 - DNA, 25 bp, Homo sapien
ccagataataaagcccagcagagca

SEQ ID NO: 1692821 - DNA, 25 bp, Homo sapien
taacgtccccagataataaagccca

SEQ ID NO: 1692822 - DNA, 25 bp, Homo sapien
ggccattcgcaacggcgaggagctt

SEQ ID NO: 1692823 - DNA, 25 bp, Homo sapien
tcgcaacggcgaggagcttaacaag

SEQ ID NO: 1692824 - DNA, 25 bp, Homo sapien
cctgtagctggccattcgcaacggc

SEQ ID NO: 1692825 - DNA, 25 bp, Homo sapien
tagctggccattcgcaacggcgagg

SEQ ID NO: 1692826 - DNA, 25 bp, Homo sapien
gcaacccggcccgcgacaagaagac

SEQ ID NO: 1692827 - DNA, 25 bp, Homo sapien
agctggctggcaacccggcccgcga

SEQ ID NO: 1692828 - DNA, 25 bp, Homo sapien
ggagctggctggcaacccggcccgc

SEQ ID NO: 1692829 - DNA, 25 bp, Homo sapien
ctggcaacccggcccgcgacaagaa

SEQ ID NO: 1692830 - DNA, 25 bp, Homo sapien
aggagacatctggttgtgggaagca

SEQ ID NO: 1692831 - DNA, 25 bp, Homo sapien
ttggtcttccctggccgggctccag

SEQ ID NO: 1692832 - DNA, 25 bp, Homo sapien
tggcgctgaagtcccagacttggtc

SEQ ID NO: 1692833 - DNA, 25 bp, Homo sapien
cagagcgcaggtgtacctggcggcc

SEQ ID NO: 1692834 - DNA, 25 bp, Homo sapien
tggagaactcccttggaatatcttt

SEQ ID NO: 1692835 - DNA, 25 bp, Homo sapien
tgtcttgggaatcttggtctagagc

SEQ ID NO: 1692836 - DNA, 25 bp, Homo sapien
gtctagagccatttcaacccgattt

SEQ ID NO: 1692837 - DNA, 25 bp, Homo sapien
tttgtgaacctgaggcaacttttgg

SEQ ID NO: 1692838 - DNA, 25 bp, Homo sapien
ctttggttgatccttcttaacctct

SEQ ID NO: 1692839 - DNA, 25 bp, Homo sapien
caaagagctgctcttttcttggtgt

SEQ ID NO: 1692840 - DNA, 25 bp, Homo sapien
gagctgctcttttcttggtgtactt

SEQ ID NO: 1692841 - DNA, 25 bp, Homo sapien
ctgctcttttcttggtgtactttac

SEQ ID NO: 1692842 - DNA, 25 bp, Homo sapien
agagctgctcttttcttggtgtact

SEQ ID NO: 1692843 - DNA, 25 bp, Homo sapien
ggtcaggaagttaactcagaccgga

SEQ ID NO: 1692844 - DNA, 25 bp, Homo sapien
caggaagttaactcagaccggatta

SEQ ID NO: 1692845 - DNA, 25 bp, Homo sapien
ctgggtcaggaagttaactcagacc

SEQ ID NO: 1692846 - DNA, 25 bp, Homo sapien
tcaggaagttaactcagaccggatt

SEQ ID NO: 1692847 - DNA, 25 bp, Homo sapien
atattcgctgctagtcccctctgtt

SEQ ID NO: 1692848 - DNA, 25 bp, Homo sapien
ctagtcccctctgttgctgccactt

SEQ ID NO: 1692849 - DNA, 25 bp, Homo sapien
tagtcccctctgttgctgccacttc

SEQ ID NO: 1692850 - DNA, 25 bp, Homo sapien
ttcgctgctagtcccctctgttgct

SEQ ID NO: 1692851 - DNA, 25 bp, Homo sapien
tatccactgagaaaaccttagcctg

SEQ ID NO: 1692852 - DNA, 25 bp, Homo sapien
actgagaaaaccttagcctggacct

SEQ ID NO: 1692853 - DNA, 25 bp, Homo sapien
atatccactgagaaaaccttagcct

SEQ ID NO: 1692854 - DNA, 25 bp, Homo sapien
ctgagaaaaccttagcctggacctt

SEQ ID NO: 1692855 - DNA, 25 bp, Homo sapien
gaatttcttctgaagacgtgtattc

SEQ ID NO: 1692856 - DNA, 25 bp, Homo sapien
tgggccccactcatctaagttctga

SEQ ID NO: 1692857 - DNA, 25 bp, Homo sapien
tgtattccttggcaggctatttcct

SEQ ID NO: 1692858 - DNA, 25 bp, Homo sapien
ctgaatcttctgagatttggtgtaa

SEQ ID NO: 1692859 - DNA, 25 bp, Homo sapien
tgcacctctatgtgatgagctggct

SEQ ID NO: 1692860 - DNA, 25 bp, Homo sapien
aactgacttccataggtcttgaagg

SEQ ID NO: 1692861 - DNA, 25 bp, Homo sapien
gatgaaaatacacctcacctgcacc

SEQ ID NO: 1692862 - DNA, 25 bp, Homo sapien
agccagaattttccaccgtgatgaa

SEQ ID NO: 1692863 - DNA, 25 bp, Homo sapien
agcttttattgaaaagctccaatat

SEQ ID NO: 1692864 - DNA, 25 bp, Homo sapien
catatgaaatggagcccgacactgg

SEQ ID NO: 1692865 - DNA, 25 bp, Homo sapien
ctgcttgttgggtcggaggctatcc

SEQ ID NO: 1692866 - DNA, 25 bp, Homo sapien
gggcttcaatgaggcttcccagctg

SEQ ID NO: 1692867 - DNA, 25 bp, Homo sapien
tactgggttcgtcatcaggctcagg

SEQ ID NO: 1692868 - DNA, 25 bp, Homo sapien
cttcgcagaacaggtggaactgctc

SEQ ID NO: 1692869 - DNA, 25 bp, Homo sapien
ccctcgtcttcgcagaacaggtgga

SEQ ID NO: 1692870 - DNA, 25 bp, Homo sapien
tgcccctcgtcttcgcagaacaggt

SEQ ID NO: 1692871 - DNA, 25 bp, Homo sapien
tcgtcttcgcagaacaggtggaact

SEQ ID NO: 1692872 - DNA, 25 bp, Homo sapien
aacaagagctgtggtgtgccctttg

SEQ ID NO: 1692873 - DNA, 25 bp, Homo sapien
ctggcatacgtcttcaacaagagct

SEQ ID NO: 1692874 - DNA, 25 bp, Homo sapien
tcaacaagagctgtggtgtgccctt

SEQ ID NO: 1692875 - DNA, 25 bp, Homo sapien
ttgtagccctggcatacgtcttcaa

SEQ ID NO: 1692876 - DNA, 25 bp, Homo sapien
cgtacatctgtcttcaagttgcttc

SEQ ID NO: 1692877 - DNA, 25 bp, Homo sapien
gcttctgctccgtacatctgtcttc

SEQ ID NO: 1692878 - DNA, 25 bp, Homo sapien
ttagttattcgcattgctgtggaca

SEQ ID NO: 1692879 - DNA, 25 bp, Homo sapien
agttgcttcagttttgtcacagctt

SEQ ID NO: 1692880 - DNA, 25 bp, Homo sapien
gtaatgagttgaggcctgcaaacca

SEQ ID NO: 1692881 - DNA, 25 bp, Homo sapien
tgacgtatttaaagtttgagaccca

SEQ ID NO: 1692882 - DNA, 25 bp, Homo sapien
gacccactcgatgctttttctaggt

SEQ ID NO: 1692883 - DNA, 25 bp, Homo sapien
gcttcttctgactgaagtatcagga

SEQ ID NO: 1692884 - DNA, 25 bp, Homo sapien
ctgtaaagttgagagccagatgctc

SEQ ID NO: 1692885 - DNA, 25 bp, Homo sapien
ttctaagtgttcacaaagcttggtt

SEQ ID NO: 1692886 - DNA, 25 bp, Homo sapien
aagtgttcacaaagcttggtttctg

SEQ ID NO: 1692887 - DNA, 25 bp, Homo sapien
agtgttcacaaagcttggtttctgt

SEQ ID NO: 1692888 - DNA, 25 bp, Homo sapien
gttttctaagtgttcacaaagcttg

SEQ ID NO: 1692889 - DNA, 25 bp, Homo sapien
tcagaccggattttttgtctctgaa

SEQ ID NO: 1692890 - DNA, 25 bp, Homo sapien
aagtcagaccggattttttgtctct

SEQ ID NO: 1692891 - DNA, 25 bp, Homo sapien
ggagattcttaaagtcagaccggat

SEQ ID NO: 1692892 - DNA, 25 bp, Homo sapien
gagattcttaaagtcagaccggatt

SEQ ID NO: 1692893 - DNA, 25 bp, Homo sapien
agaccagcctcatagtccctcagtc

SEQ ID NO: 1692894 - DNA, 25 bp, Homo sapien
cctcagtctactcagagtctgttgt

SEQ ID NO: 1692895 - DNA, 25 bp, Homo sapien
tccaggatgtggctcttgagttcat

SEQ ID NO: 1692896 - DNA, 25 bp, Homo sapien
ttcattgctcttcagccccagacca

SEQ ID NO: 1692897 - DNA, 25 bp, Homo sapien
ggagcaagggttctacaagcaaatc

SEQ ID NO: 1692898 - DNA, 25 bp, Homo sapien
gtagattgtaccataacagctctgg

SEQ ID NO: 1692899 - DNA, 25 bp, Homo sapien
gaataattcctaccagcttctggga

SEQ ID NO: 1692900 - DNA, 25 bp, Homo sapien
cacacagtggtaaagcaatcatgct

SEQ ID NO: 1692901 - DNA, 25 bp, Homo sapien
tcatttctatatacgcacacccctc

SEQ ID NO: 1692902 - DNA, 25 bp, Homo sapien
ataagcagaggcgagagatttcttc

SEQ ID NO: 1692903 - DNA, 25 bp, Homo sapien
agcagaggcgagagatttcttcaga

SEQ ID NO: 1692904 - DNA, 25 bp, Homo sapien
ctagaataagcagaggcgagagatt

SEQ ID NO: 1692905 - DNA, 25 bp, Homo sapien
gcttggaaacattgcacatagtatg

SEQ ID NO: 1692906 - DNA, 25 bp, Homo sapien
gatgactccttaacattttcttcac

SEQ ID NO: 1692907 - DNA, 25 bp, Homo sapien
tcttcacatcgaagtaaagcttgga

SEQ ID NO: 1692908 - DNA, 25 bp, Homo sapien
tgcacatagtatgaagttccaagga

SEQ ID NO: 1692909 - DNA, 25 bp, Homo sapien
ttcaggaattctttagtgaacatac

SEQ ID NO: 1692910 - DNA, 25 bp, Homo sapien
aggccccttctatccacagtattca

SEQ ID NO: 1692911 - DNA, 25 bp, Homo sapien
tgcataaggccccttctatccacag

SEQ ID NO: 1692912 - DNA, 25 bp, Homo sapien
tattcaggaattctttagtgaacat

SEQ ID NO: 1692913 - DNA, 25 bp, Homo sapien
tagtctcatctcagtgccgttcagg

SEQ ID NO: 1692914 - DNA, 25 bp, Homo sapien
tgaaatccctggaacaaaatgggct

SEQ ID NO: 1692915 - DNA, 25 bp, Homo sapien
taactggccatgttagaagcccatg

SEQ ID NO: 1692916 - DNA, 25 bp, Homo sapien
caagggtggccttctatgattcctg

SEQ ID NO: 1692917 - DNA, 25 bp, Homo sapien
tgcccactgatgactaagctctttg

SEQ ID NO: 1692918 - DNA, 25 bp, Homo sapien
cacatgccagaagatatcagctata

SEQ ID NO: 1692919 - DNA, 25 bp, Homo sapien
gcctgaagggctaatggacatacaa

SEQ ID NO: 1692920 - DNA, 25 bp, Homo sapien
taaatcatgggtaaatcacagaggc

SEQ ID NO: 1692921 - DNA, 25 bp, Homo sapien
tccatattagagagaggatactata

SEQ ID NO: 1692922 - DNA, 25 bp, Homo sapien
ctatagcatatagagatgctgtctc

SEQ ID NO: 1692923 - DNA, 25 bp, Homo sapien
tatatgtaccaatcaatgcttcact

SEQ ID NO: 1692924 - DNA, 25 bp, Homo sapien
cactgtaccactcggcttgggcaac

SEQ ID NO: 1692925 - DNA, 25 bp, Homo sapien
aggcgggtcaatcacttgagtccaa

SEQ ID NO: 1692926 - DNA, 25 bp, Homo sapien
aggcattgtggtgcacaccaatagt

SEQ ID NO: 1692927 - DNA, 25 bp, Homo sapien
gcattgtggtgcacaccaatagtcc

SEQ ID NO: 1692928 - DNA, 25 bp, Homo sapien
gcctggtcaatatggccaaattcca

SEQ ID NO: 1692929 - DNA, 25 bp, Homo sapien
tatgagtgaaaagcaaggaaccaac

SEQ ID NO: 1692930 - DNA, 25 bp, Homo sapien
tccagggtgccagcactagattgga

SEQ ID NO: 1692931 - DNA, 25 bp, Homo sapien
gctgcttgagatagtagaggacacg

SEQ ID NO: 1692932 - DNA, 25 bp, Homo sapien
gacacatgtagaatatactctgctg

SEQ ID NO: 1692933 - DNA, 25 bp, Homo sapien
ctgtgaagaacacaggttattttat

SEQ ID NO: 1692934 - DNA, 25 bp, Homo sapien
tgtgaagaacacaggttattttatt

SEQ ID NO: 1692935 - DNA, 25 bp, Homo sapien
tgcccagccacaagttattttcaat

SEQ ID NO: 1692936 - DNA, 25 bp, Homo sapien
tattttcaataaaaccagcctgtgt

SEQ ID NO: 1692937 - DNA, 25 bp, Homo sapien
cagagagaattagttcgtgatgagc

SEQ ID NO: 1692938 - DNA, 25 bp, Homo sapien
ttagttcgtgatgagctgtatctgg

SEQ ID NO: 1692939 - DNA, 25 bp, Homo sapien
gatcctcagagagaattagttcgtg

SEQ ID NO: 1692940 - DNA, 25 bp, Homo sapien
ttgtctccgatcctcagagagaatt

SEQ ID NO: 1692941 - DNA, 25 bp, Homo sapien
agcctgagggtccagaatccagact

SEQ ID NO: 1692942 - DNA, 25 bp, Homo sapien
cttcgccaacatccacttcaaagta

SEQ ID NO: 1692943 - DNA, 25 bp, Homo sapien
caaagtaacgtcttcctgaggtgaa

SEQ ID NO: 1692944 - DNA, 25 bp, Homo sapien
gatgtggcagccagtattcccgtta

SEQ ID NO: 1692945 - DNA, 25 bp, Homo sapien
gctttgccccagtccaggttaacca

SEQ ID NO: 1692946 - DNA, 25 bp, Homo sapien
ggtaattggtcctagcagactggaa

SEQ ID NO: 1692947 - DNA, 25 bp, Homo sapien
tctaactactaaggaaatgacagcg

SEQ ID NO: 1692948 - DNA, 25 bp, Homo sapien
tccctacatgagttcaaatggcagc

SEQ ID NO: 1692949 - DNA, 25 bp, Homo sapien
tctgtggccctatcaagtagactaa

SEQ ID NO: 1692950 - DNA, 25 bp, Homo sapien
gactacgggtatatagaacaagtgc

SEQ ID NO: 1692951 - DNA, 25 bp, Homo sapien
ccaagtctgggtcagcataccgaga

SEQ ID NO: 1692952 - DNA, 25 bp, Homo sapien
gaacaagtgcaactggcgataatcc

SEQ ID NO: 1692953 - DNA, 25 bp, Homo sapien
ctgattttcagccaactaccctgga

SEQ ID NO: 1692954 - DNA, 25 bp, Homo sapien
ttcagcagcccaacctaagactgtt

SEQ ID NO: 1692955 - DNA, 25 bp, Homo sapien
aattctggctaatgcaaggcaagcc

SEQ ID NO: 1692956 - DNA, 25 bp, Homo sapien
tgacttcttaagtgtggccatgtac

SEQ ID NO: 1692957 - DNA, 25 bp, Homo sapien
ttatccaaaacttggaaacaagatg

SEQ ID NO: 1692958 - DNA, 25 bp, Homo sapien
ggtacttctgaataatggaatgtta

SEQ ID NO: 1692959 - DNA, 25 bp, Homo sapien
ggtaagtggataactgtggtacttc

SEQ ID NO: 1692960 - DNA, 25 bp, Homo sapien
actgatgcagggcaagcaagccaaa

SEQ ID NO: 1692961 - DNA, 25 bp, Homo sapien
tactctcgtgatatgagattgccaa

SEQ ID NO: 1692962 - DNA, 25 bp, Homo sapien
taacctgatttaaagcaggccaatg

SEQ ID NO: 1692963 - DNA, 25 bp, Homo sapien
aagaaaagccacacattggcaggta

SEQ ID NO: 1692964 - DNA, 25 bp, Homo sapien
tatttagctttagagtactctcgtg

SEQ ID NO: 1692965 - DNA, 25 bp, Homo sapien
agacccaaggagacacaagacaaag

SEQ ID NO: 1692966 - DNA, 25 bp, Homo sapien
aaggagcgctgaagactgaggaccc

SEQ ID NO: 1692967 - DNA, 25 bp, Homo sapien
ccgatgcccggaatatgacagtttg

SEQ ID NO: 1692968 - DNA, 25 bp, Homo sapien
caagatgtaaaaaatagtcctgtcc

SEQ ID NO: 1692969 - DNA, 25 bp, Homo sapien
gaagtacgttcagtgtcactccaga

SEQ ID NO: 1692970 - DNA, 25 bp, Homo sapien
cactccagagctgaaaccgccttct

SEQ ID NO: 1692971 - DNA, 25 bp, Homo sapien
tgaaaccgccttctggctggtccct

SEQ ID NO: 1692972 - DNA, 25 bp, Homo sapien
ttctaatttgtctggagcaggccgg

SEQ ID NO: 1692973 - DNA, 25 bp, Homo sapien
gggcgggcatggacctgggtaaggc

SEQ ID NO: 1692974 - DNA, 25 bp, Homo sapien
cgggcatggacctgggtaaggccag

SEQ ID NO: 1692975 - DNA, 25 bp, Homo sapien
ctgggtaaggccagagaaattgaca

SEQ ID NO: 1692976 - DNA, 25 bp, Homo sapien
tgggtaaggccagagaaattgacac

SEQ ID NO: 1692977 - DNA, 25 bp, Homo sapien
ttcagggcgtcctcgcgagtcgtgc

SEQ ID NO: 1692978 - DNA, 25 bp, Homo sapien
tatgaaagaggaagccgcggttcag

SEQ ID NO: 1692979 - DNA, 25 bp, Homo sapien
ccaagatttggtccagccgccaagg

SEQ ID NO: 1692980 - DNA, 25 bp, Homo sapien
tggtcacggcgctttccagctgcag

SEQ ID NO: 1692981 - DNA, 25 bp, Homo sapien
gaggccatttcgtggatccgctgag

SEQ ID NO: 1692982 - DNA, 25 bp, Homo sapien
cctcaaagaggccatttcgtggatc

SEQ ID NO: 1692983 - DNA, 25 bp, Homo sapien
cacagcctcaaagaggccatttcgt

SEQ ID NO: 1692984 - DNA, 25 bp, Homo sapien
catttcgtggatccgctgaggcttg

SEQ ID NO: 1692985 - DNA, 25 bp, Homo sapien
tgtgagaacggaccccaggctcaca

SEQ ID NO: 1692986 - DNA, 25 bp, Homo sapien
agagggcgcggcattcagaccccag

SEQ ID NO: 1692987 - DNA, 25 bp, Homo sapien
cccagatccagctgtgagaacggac

SEQ ID NO: 1692988 - DNA, 25 bp, Homo sapien
ttgagagaagcatcagcggagaccc

SEQ ID NO: 1692989 - DNA, 25 bp, Homo sapien
tcagacctgtagtcttccaccagga

SEQ ID NO: 1692990 - DNA, 25 bp, Homo sapien
tcgtttttcgtccagtggactcaga

SEQ ID NO: 1692991 - DNA, 25 bp, Homo sapien
caggatcggctcctttcccggagct

SEQ ID NO: 1692992 - DNA, 25 bp, Homo sapien
tcgtccagtggactcagacctgtag

SEQ ID NO: 1692993 - DNA, 25 bp, Homo sapien
ccactcccgcggtctcttaacgcac

SEQ ID NO: 1692994 - DNA, 25 bp, Homo sapien
cccactcccgcggtctcttaacgca

SEQ ID NO: 1692995 - DNA, 25 bp, Homo sapien
ccatttccccactcccgcggtctct

SEQ ID NO: 1692996 - DNA, 25 bp, Homo sapien
tcttcagcacatggctcccaaggat

SEQ ID NO: 1692997 - DNA, 25 bp, Homo sapien
ggagtattcgagaagacgtctctgc

SEQ ID NO: 1692998 - DNA, 25 bp, Homo sapien
cccaaaccacattgattgctgggag

SEQ ID NO: 1692999 - DNA, 25 bp, Homo sapien
tctccagtggtgactcaaagatgca

SEQ ID NO: 1693000 - DNA, 25 bp, Homo sapien
ctttggggtcttgctgctcttaggc

SEQ ID NO: 1693001 - DNA, 25 bp, Homo sapien
cttctgcaggacttcccttatcctt

SEQ ID NO: 1693002 - DNA, 25 bp, Homo sapien
cctttggggtcttgctgctcttagg

SEQ ID NO: 1693003 - DNA, 25 bp, Homo sapien
tgcaggacttcccttatcctttggg

SEQ ID NO: 1693004 - DNA, 25 bp, Homo sapien
taaacatctcaatgacttgaagagc

SEQ ID NO: 1693005 - DNA, 25 bp, Homo sapien
caatgacttgaagagcagtattgct

SEQ ID NO: 1693006 - DNA, 25 bp, Homo sapien
ggtccaggggaccggtgttcagcat

SEQ ID NO: 1693007 - DNA, 25 bp, Homo sapien
ggtgttcagcatacggaggatccca

SEQ ID NO: 1693008 - DNA, 25 bp, Homo sapien
acttaagcctaacacaaagtgtgtg

SEQ ID NO: 1693009 - DNA, 25 bp, Homo sapien
ccaaatagcatgcaggtcccatggg

SEQ ID NO: 1693010 - DNA, 25 bp, Homo sapien
ggtaaatatagctctgtcaggcagt

SEQ ID NO: 1693011 - DNA, 25 bp, Homo sapien
ggaggttttaccacgatggctgtta

SEQ ID NO: 1693012 - DNA, 25 bp, Homo sapien
tgttactggattcaactgccactgc

SEQ ID NO: 1693013 - DNA, 25 bp, Homo sapien
gacactggatcactactgttgctga

SEQ ID NO: 1693014 - DNA, 25 bp, Homo sapien
aactgaagccaactgctgttactgg

SEQ ID NO: 1693015 - DNA, 25 bp, Homo sapien
tcttcataaccagcacagggtgaca

SEQ ID NO: 1693016 - DNA, 25 bp, Homo sapien
gaaacaatgggatcaagctgcaagt

SEQ ID NO: 1693017 - DNA, 25 bp, Homo sapien
caagtgcacagttatctaagggaaa

SEQ ID NO: 1693018 - DNA, 25 bp, Homo sapien
tgtttggtccaaacccacatccctg

SEQ ID NO: 1693019 - DNA, 25 bp, Homo sapien
cagatagcattagctgggcagccct

SEQ ID NO: 1693020 - DNA, 25 bp, Homo sapien
cggtttcaaatctacaaggctgtca

SEQ ID NO: 1693021 - DNA, 25 bp, Homo sapien
tcatggaggttgcagaccaagtccg

SEQ ID NO: 1693022 - DNA, 25 bp, Homo sapien
ggcacctgaatgtgagaacatgacc

SEQ ID NO: 1693023 - DNA, 25 bp, Homo sapien
tcagtgtccggatgtacggtggcct

SEQ ID NO: 1693024 - DNA, 25 bp, Homo sapien
caagagaactgtatttcacccgagc

SEQ ID NO: 1693025 - DNA, 25 bp, Homo sapien
tatacagacacagctatgataaggc

SEQ ID NO: 1693026 - DNA, 25 bp, Homo sapien
tataggcacaatccaggcaagttcc

SEQ ID NO: 1693027 - DNA, 25 bp, Homo sapien
tggactgcagtagaccacaggaact

SEQ ID NO: 1693028 - DNA, 25 bp, Homo sapien
gaattgtatgcagatctcccttgcc

SEQ ID NO: 1693029 - DNA, 25 bp, Homo sapien
tacaaacagcagatatgtgtgcaca

SEQ ID NO: 1693030 - DNA, 25 bp, Homo sapien
tatagtacagtatgatgggctggtg

SEQ ID NO: 1693031 - DNA, 25 bp, Homo sapien
tattcttctaaggtggtcacgtgaa

SEQ ID NO: 1693032 - DNA, 25 bp, Homo sapien
aaaatgagtagcagttaagcagtcc

SEQ ID NO: 1693033 - DNA, 25 bp, Homo sapien
cagagccgcctgatgcttgcttcca

SEQ ID NO: 1693034 - DNA, 25 bp, Homo sapien
acatagtccctaattttgccacaaa

SEQ ID NO: 1693035 - DNA, 25 bp, Homo sapien
caatgctgtaatttagtatgcctgt

SEQ ID NO: 1693036 - DNA, 25 bp, Homo sapien
agcacagcggaacacccaacactag

SEQ ID NO: 1693037 - DNA, 25 bp, Homo sapien
gacggaaaaacagcacagcggaaca

SEQ ID NO: 1693038 - DNA, 25 bp, Homo sapien
aacacccaacactagcgcaaatacg

SEQ ID NO: 1693039 - DNA, 25 bp, Homo sapien
aaaaacagcacagcggaacacccaa

SEQ ID NO: 1693040 - DNA, 25 bp, Homo sapien
tagtggccaactgtttgcgtggcgc

SEQ ID NO: 1693041 - DNA, 25 bp, Homo sapien
ggtagtttacgaataagcagttcag

SEQ ID NO: 1693042 - DNA, 25 bp, Homo sapien
caccaggcgctggaaaggtagttta

SEQ ID NO: 1693043 - DNA, 25 bp, Homo sapien
cgagcagtttgcttagtgcgagcca

SEQ ID NO: 1693044 - DNA, 25 bp, Homo sapien
caggttagtgtcctcaaatagccct

SEQ ID NO: 1693045 - DNA, 25 bp, Homo sapien
gaaaagtgctcccaatgcattccct

SEQ ID NO: 1693046 - DNA, 25 bp, Homo sapien
gagcctttgcttggaccgtcagaga

SEQ ID NO: 1693047 - DNA, 25 bp, Homo sapien
cgcgaccggccgaaatcgattggtt

SEQ ID NO: 1693048 - DNA, 25 bp, Homo sapien
ttacttgaaaaggtggtggctctga

SEQ ID NO: 1693049 - DNA, 25 bp, Homo sapien
gatcagaccagagatccgcttcaca

SEQ ID NO: 1693050 - DNA, 25 bp, Homo sapien
taaccgccaaagccataaagggtgc

SEQ ID NO: 1693051 - DNA, 25 bp, Homo sapien
ctccgtataggtgacagcgtcacgg

SEQ ID NO: 1693052 - DNA, 25 bp, Homo sapien
gccctggatgttgtcacgcaacacc

SEQ ID NO: 1693053 - DNA, 25 bp, Homo sapien
aatgcaagctgtggagaaatcagca

SEQ ID NO: 1693054 - DNA, 25 bp, Homo sapien
gaaatgcaagctgtggagaaatcag

SEQ ID NO: 1693055 - DNA, 25 bp, Homo sapien
gcaagctgtggagaaatcagcaacc

SEQ ID NO: 1693056 - DNA, 25 bp, Homo sapien
tgcaagctgtggagaaatcagcaac

SEQ ID NO: 1693057 - DNA, 25 bp, Homo sapien
tcgcgccaaggctaagactcggtct

SEQ ID NO: 1693058 - DNA, 25 bp, Homo sapien
gcaattggccatccgcaatgacgag

SEQ ID NO: 1693059 - DNA, 25 bp, Homo sapien
tatctcgcggcggtgcttgagtacc

SEQ ID NO: 1693060 - DNA, 25 bp, Homo sapien
gactcggtcttctcgtgcaggtttg

SEQ ID NO: 1693061 - DNA, 25 bp, Homo sapien
tgacgttgcccagctgcttgttgac

SEQ ID NO: 1693062 - DNA, 25 bp, Homo sapien
tgaatattggacaggacgcctccct

SEQ ID NO: 1693063 - DNA, 25 bp, Homo sapien
gtcttgtcacgtatggcgctgccca

SEQ ID NO: 1693064 - DNA, 25 bp, Homo sapien
gacgcctccctgagcaatagtgacg

SEQ ID NO: 1693065 - DNA, 25 bp, Homo sapien
tcattggctgaagagtgaccagact

SEQ ID NO: 1693066 - DNA, 25 bp, Homo sapien
tgtagtgaactgagagcaagtggcc

SEQ ID NO: 1693067 - DNA, 25 bp, Homo sapien
gacaatcttattggatgagttgccc

SEQ ID NO: 1693068 - DNA, 25 bp, Homo sapien
agtcccgcgcgataaaatcattggc

SEQ ID NO: 1693069 - DNA, 25 bp, Homo sapien
gcgtttagcgtgaatagcgcacaga

SEQ ID NO: 1693070 - DNA, 25 bp, Homo sapien
cacagattggtgtcttcgaagagtc

SEQ ID NO: 1693071 - DNA, 25 bp, Homo sapien
cggatgcgacgtgccagctggatat

SEQ ID NO: 1693072 - DNA, 25 bp, Homo sapien
tagcgacggatttcgcgcaaggcca

SEQ ID NO: 1693073 - DNA, 25 bp, Homo sapien
gaaactaacatagacaaccgaatgg

SEQ ID NO: 1693074 - DNA, 25 bp, Homo sapien
cccaggagcctttcaatatgtaagt

SEQ ID NO: 1693075 - DNA, 25 bp, Homo sapien
tggatggtcatacgcaagtcttgtg

SEQ ID NO: 1693076 - DNA, 25 bp, Homo sapien
aaaaggcctgatagacttgtctgca

SEQ ID NO: 1693077 - DNA, 25 bp, Homo sapien
caatcccgccgctgaaatagagttg

SEQ ID NO: 1693078 - DNA, 25 bp, Homo sapien
tcccgccgctgaaatagagttgatg

SEQ ID NO: 1693079 - DNA, 25 bp, Homo sapien
ccacaatcccgccgctgaaatagag

SEQ ID NO: 1693080 - DNA, 25 bp, Homo sapien
cccgccgctgaaatagagttgatgt

SEQ ID NO: 1693081 - DNA, 25 bp, Homo sapien
tatatggtctgagtccaggccttcc

SEQ ID NO: 1693082 - DNA, 25 bp, Homo sapien
cacaatcgaaaagggctaggcacgg

SEQ ID NO: 1693083 - DNA, 25 bp, Homo sapien
tggtccctcagtaatctcagcatgg

SEQ ID NO: 1693084 - DNA, 25 bp, Homo sapien
gacaggttccattcccactagggtg

SEQ ID NO: 1693085 - DNA, 25 bp, Homo sapien
gcatgttagattctgggtccttcat

SEQ ID NO: 1693086 - DNA, 25 bp, Homo sapien
cagcatgttagattctgggtccttc

SEQ ID NO: 1693087 - DNA, 25 bp, Homo sapien
ctctccagcatgttagattctgggt

SEQ ID NO: 1693088 - DNA, 25 bp, Homo sapien
tccagcatgttagattctgggtcct

SEQ ID NO: 1693089 - DNA, 25 bp, Homo sapien
gtatgcaaattttggcaattcaaga

SEQ ID NO: 1693090 - DNA, 25 bp, Homo sapien
ctgatttgctccaaacctttacata

SEQ ID NO: 1693091 - DNA, 25 bp, Homo sapien
cctttacatatctagcaaattcaac

SEQ ID NO: 1693092 - DNA, 25 bp, Homo sapien
tccaaacctttacatatctagcaaa

SEQ ID NO: 1693093 - DNA, 25 bp, Homo sapien
acaggtctttcagaactttagttct

SEQ ID NO: 1693094 - DNA, 25 bp, Homo sapien
gctccagaagtcaccctacagctat

SEQ ID NO: 1693095 - DNA, 25 bp, Homo sapien
cagaaggtacctgcttgtgaaacac

SEQ ID NO: 1693096 - DNA, 25 bp, Homo sapien
tacagctattgcctaggctcaggag

SEQ ID NO: 1693097 - DNA, 25 bp, Homo sapien
gaccgcggtctgcaaaagcatcagg

SEQ ID NO: 1693098 - DNA, 25 bp, Homo sapien
aggaccgcggtctgcaaaagcatca

SEQ ID NO: 1693099 - DNA, 25 bp, Homo sapien
ccgcggtctgcaaaagcatcaggag

SEQ ID NO: 1693100 - DNA, 25 bp, Homo sapien
tgcaggaccgcggtctgcaaaagca

SEQ ID NO: 1693101 - DNA, 25 bp, Homo sapien
tccaaagttagcaaactcccaagcg

SEQ ID NO: 1693102 - DNA, 25 bp, Homo sapien
ttccaaaagtcactccgcagagccg

SEQ ID NO: 1693103 - DNA, 25 bp, Homo sapien
gagggacccctatctgcagttcagt

SEQ ID NO: 1693104 - DNA, 25 bp, Homo sapien
tatctgcagttcagtggtaggcact

SEQ ID NO: 1693105 - DNA, 25 bp, Homo sapien
caaacaaggaaagaccaaggtcctg

SEQ ID NO: 1693106 - DNA, 25 bp, Homo sapien
tgctctgaggcacccatgaagaggt

SEQ ID NO: 1693107 - DNA, 25 bp, Homo sapien
cccatgaagaggtagtgcagagagt

SEQ ID NO: 1693108 - DNA, 25 bp, Homo sapien
aaggaaagaccaaggtcctgctctg

SEQ ID NO: 1693109 - DNA, 25 bp, Homo sapien
gcagccacatctggcttgaaattct

SEQ ID NO: 1693110 - DNA, 25 bp, Homo sapien
gaaacccatggagttcggggctcca

SEQ ID NO: 1693111 - DNA, 25 bp, Homo sapien
acggcgactctcatgatcatagaac

SEQ ID NO: 1693112 - DNA, 25 bp, Homo sapien
gttcggggctccacacggcgactct

SEQ ID NO: 1693113 - DNA, 25 bp, Homo sapien
ataatagtccagaagtcaacagtga

SEQ ID NO: 1693114 - DNA, 25 bp, Homo sapien
cataatagtccagaagtcaacagtg

SEQ ID NO: 1693115 - DNA, 25 bp, Homo sapien
ttgctgtggttgtgattttccataa

SEQ ID NO: 1693116 - DNA, 25 bp, Homo sapien
gttgtcttcttgcatttcacagccc

SEQ ID NO: 1693117 - DNA, 25 bp, Homo sapien
tactgttgtcttcttgcatttcaca

SEQ ID NO: 1693118 - DNA, 25 bp, Homo sapien
tcggtactgttgtcttcttgcattt

SEQ ID NO: 1693119 - DNA, 25 bp, Homo sapien
gtcttcttgcatttcacagcccagg

SEQ ID NO: 1693120 - DNA, 25 bp, Homo sapien
atcatacccgtacttccagtagccc

SEQ ID NO: 1693121 - DNA, 25 bp, Homo sapien
catcatacccgtacttccagtagcc

SEQ ID NO: 1693122 - DNA, 25 bp, Homo sapien
tctccaatccagtgtgtcagggcag

SEQ ID NO: 1693123 - DNA, 25 bp, Homo sapien
gtcagggcagaattcaaggtggtcc

SEQ ID NO: 1693124 - DNA, 25 bp, Homo sapien
agtccctctccaggtaggccctgtt

SEQ ID NO: 1693125 - DNA, 25 bp, Homo sapien
tctgcctggcccgaatcttgtgcct

SEQ ID NO: 1693126 - DNA, 25 bp, Homo sapien
tgaaactccaaccagggattccgtg

SEQ ID NO: 1693127 - DNA, 25 bp, Homo sapien
ataggggcagaagtgtgtttccacc

SEQ ID NO: 1693128 - DNA, 25 bp, Homo sapien
tccactctgccactagagtataggg

SEQ ID NO: 1693129 - DNA, 25 bp, Homo sapien
caaccagggattccgtgccctgcaa

SEQ ID NO: 1693130 - DNA, 25 bp, Homo sapien
tagagactctaggattgagaaagtc

SEQ ID NO: 1693131 - DNA, 25 bp, Homo sapien
agagactctaggattgagaaagtcc

SEQ ID NO: 1693132 - DNA, 25 bp, Homo sapien
aggtagagactctaggattgagaaa

SEQ ID NO: 1693133 - DNA, 25 bp, Homo sapien
ataaggtagagactctaggattgag

SEQ ID NO: 1693134 - DNA, 25 bp, Homo sapien
cggacttgtaagataggtagcttca

SEQ ID NO: 1693135 - DNA, 25 bp, Homo sapien
gagcagtcagatcagcttgttctcc

SEQ ID NO: 1693136 - DNA, 25 bp, Homo sapien
cctgggtcaacctaggaggcattgt

SEQ ID NO: 1693137 - DNA, 25 bp, Homo sapien
gaggcattgttataagaagcggact

SEQ ID NO: 1693138 - DNA, 25 bp, Homo sapien
aggagaggggatctgtttacccttg

SEQ ID NO: 1693139 - DNA, 25 bp, Homo sapien
gaggggatctgtttacccttgccag

SEQ ID NO: 1693140 - DNA, 25 bp, Homo sapien
gggatctgtttacccttgccaggaa

SEQ ID NO: 1693141 - DNA, 25 bp, Homo sapien
atgaggagaggggatctgtttaccc

SEQ ID NO: 1693142 - DNA, 25 bp, Homo sapien
tgtgtcaccttcaccaaaggaggca

SEQ ID NO: 1693143 - DNA, 25 bp, Homo sapien
atgatgtgtcaccttcaccaaagga

SEQ ID NO: 1693144 - DNA, 25 bp, Homo sapien
gatgtgtcaccttcaccaaaggagg

SEQ ID NO: 1693145 - DNA, 25 bp, Homo sapien
tgatgtgtcaccttcaccaaaggag

SEQ ID NO: 1693146 - DNA, 25 bp, Homo sapien
tagtagttcaaggcccgacaccgta

SEQ ID NO: 1693147 - DNA, 25 bp, Homo sapien
tcaaggcccgacaccgtagagtggt

SEQ ID NO: 1693148 - DNA, 25 bp, Homo sapien
agttcaaggcccgacaccgtagagt

SEQ ID NO: 1693149 - DNA, 25 bp, Homo sapien
gatgttctgggggtagtagttcaag

SEQ ID NO: 1693150 - DNA, 25 bp, Homo sapien
gtctttaggttcgaactccttggca

SEQ ID NO: 1693151 - DNA, 25 bp, Homo sapien
tccccattgggcaatacgtctttag

SEQ ID NO: 1693152 - DNA, 25 bp, Homo sapien
gccaaggttatccagccctggtagg

SEQ ID NO: 1693153 - DNA, 25 bp, Homo sapien
caaggttatccagccctggtaggtc

SEQ ID NO: 1693154 - DNA, 25 bp, Homo sapien
tccacctggcacgtatatctctgct

SEQ ID NO: 1693155 - DNA, 25 bp, Homo sapien
cccagatcacaatgaggggctgatc

SEQ ID NO: 1693156 - DNA, 25 bp, Homo sapien
cagatcacaatgaggggctgatcca

SEQ ID NO: 1693157 - DNA, 25 bp, Homo sapien
gtgctccacctggcacgtatatctc

SEQ ID NO: 1693158 - DNA, 25 bp, Homo sapien
tcctctcaacccccaatagattttc

SEQ ID NO: 1693159 - DNA, 25 bp, Homo sapien
aaattccaatgaacaagatgacgac

SEQ ID NO: 1693160 - DNA, 25 bp, Homo sapien
ctgatgactccaatgactagggtgc

SEQ ID NO: 1693161 - DNA, 25 bp, Homo sapien
caatgactagggtgccagacggtga

SEQ ID NO: 1693162 - DNA, 25 bp, Homo sapien
gatgacgacaaaaacagcaattcca

SEQ ID NO: 1693163 - DNA, 25 bp, Homo sapien
ttcagctaagacgtagtgccccatg

SEQ ID NO: 1693164 - DNA, 25 bp, Homo sapien
gttcagctaagacgtagtgccccat

SEQ ID NO: 1693165 - DNA, 25 bp, Homo sapien
cttgaggttcatgagagacagttcc

SEQ ID NO: 1693166 - DNA, 25 bp, Homo sapien
caaggagttcgtcaggcaatttcta

SEQ ID NO: 1693167 - DNA, 25 bp, Homo sapien
gcaggaactcagaaacctaaatggg

SEQ ID NO: 1693168 - DNA, 25 bp, Homo sapien
agggatcaccggcatgcaggaactc

SEQ ID NO: 1693169 - DNA, 25 bp, Homo sapien
ctagagtagcatcccaaatgaaggc

SEQ ID NO: 1693170 - DNA, 25 bp, Homo sapien
tatgactagccacgtcccagggttc

SEQ ID NO: 1693171 - DNA, 25 bp, Homo sapien
cattatcagaacaaggagagaccag

SEQ ID NO: 1693172 - DNA, 25 bp, Homo sapien
tgaacgggtccagaaaatgcataga

SEQ ID NO: 1693173 - DNA, 25 bp, Homo sapien
gttccccttcatgtgattcaagctc

SEQ ID NO: 1693174 - DNA, 25 bp, Homo sapien
ccttgcgtagggtccaaagaaatga

SEQ ID NO: 1693175 - DNA, 25 bp, Homo sapien
tatcaaacggtcagattgactgagt

SEQ ID NO: 1693176 - DNA, 25 bp, Homo sapien
aaatgaatgccaaagagagcaacag

SEQ ID NO: 1693177 - DNA, 25 bp, Homo sapien
aaataccaccagagttctgactcca

SEQ ID NO: 1693178 - DNA, 25 bp, Homo sapien
ccaccagagttctgactccagaggc

SEQ ID NO: 1693179 - DNA, 25 bp, Homo sapien
taccaccagagttctgactccagag

SEQ ID NO: 1693180 - DNA, 25 bp, Homo sapien
aataccaccagagttctgactccag

SEQ ID NO: 1693181 - DNA, 25 bp, Homo sapien
aatgtgcaccggaaccccagtggct

SEQ ID NO: 1693182 - DNA, 25 bp, Homo sapien
ccattataccatctcaaaatgagag

SEQ ID NO: 1693183 - DNA, 25 bp, Homo sapien
tgggcatcctctaagccacttggtg

SEQ ID NO: 1693184 - DNA, 25 bp, Homo sapien
gcaattcctgaatgtcctggttaga

SEQ ID NO: 1693185 - DNA, 25 bp, Homo sapien
gcagccaagtgcatgtagtaacata

SEQ ID NO: 1693186 - DNA, 25 bp, Homo sapien
agaatgcttgtaccacatttatgca

SEQ ID NO: 1693187 - DNA, 25 bp, Homo sapien
tgcttgtaccacatttatgcagcca

SEQ ID NO: 1693188 - DNA, 25 bp, Homo sapien
gtaaacacatgccatctggatatat

SEQ ID NO: 1693189 - DNA, 25 bp, Homo sapien
gtatatggtatcctgaagcacctgc

SEQ ID NO: 1693190 - DNA, 25 bp, Homo sapien
agctgtatatggtatcctgaagcac

SEQ ID NO: 1693191 - DNA, 25 bp, Homo sapien
tgtatatggtatcctgaagcacctg

SEQ ID NO: 1693192 - DNA, 25 bp, Homo sapien
gctgtatatggtatcctgaagcacc

SEQ ID NO: 1693193 - DNA, 25 bp, Homo sapien
ttttcactggctaattaaataacag

SEQ ID NO: 1693194 - DNA, 25 bp, Homo sapien
caacaataatactaacaggtaatag

SEQ ID NO: 1693195 - DNA, 25 bp, Homo sapien
tctacaatgagcgtaaatcacattt

SEQ ID NO: 1693196 - DNA, 25 bp, Homo sapien
tactaacaggtaatagacaagttgt

SEQ ID NO: 1693197 - DNA, 25 bp, Homo sapien
cacctgctgtacttgactcaatgat

SEQ ID NO: 1693198 - DNA, 25 bp, Homo sapien
caagtgatttccagtgcacgcccct

SEQ ID NO: 1693199 - DNA, 25 bp, Homo sapien
tcagcgctgcatctctggtcaccgg

SEQ ID NO: 1693200 - DNA, 25 bp, Homo sapien
ttaccttcaggaaaaccctcagcgc

SEQ ID NO: 1693201 - DNA, 25 bp, Homo sapien
gagtgtagaagttaatcgctgatgc

SEQ ID NO: 1693202 - DNA, 25 bp, Homo sapien
cattatacccaaagcctacagagag

SEQ ID NO: 1693203 - DNA, 25 bp, Homo sapien
taaatgcatgcaggatgtcaacgca

SEQ ID NO: 1693204 - DNA, 25 bp, Homo sapien
gaaatagaatgcttgagataccaga

SEQ ID NO: 1693205 - DNA, 25 bp, Homo sapien
catcatgtgaactaccctggaacac

SEQ ID NO: 1693206 - DNA, 25 bp, Homo sapien
taaccagaggtctaggatgcctttc

SEQ ID NO: 1693207 - DNA, 25 bp, Homo sapien
ttccactctgcgaagaattcaggca

SEQ ID NO: 1693208 - DNA, 25 bp, Homo sapien
ggctcactcgcctaatctgtatggc

SEQ ID NO: 1693209 - DNA, 25 bp, Homo sapien
cgcagtggaaggtatgaactgaaac

SEQ ID NO: 1693210 - DNA, 25 bp, Homo sapien
tatcgcagtggaaggtatgaactga

SEQ ID NO: 1693211 - DNA, 25 bp, Homo sapien
agtggaaggtatgaactgaaacagt

SEQ ID NO: 1693212 - DNA, 25 bp, Homo sapien
ctatcgcagtggaaggtatgaactg

SEQ ID NO: 1693213 - DNA, 25 bp, Homo sapien
tcatagataagaccggaaatgcgct

SEQ ID NO: 1693214 - DNA, 25 bp, Homo sapien
gaatagccggttttgtaatgccctg

SEQ ID NO: 1693215 - DNA, 25 bp, Homo sapien
gatgttatcccggagcaccttacga

SEQ ID NO: 1693216 - DNA, 25 bp, Homo sapien
gaaaaccttaagcacacctcgagtc

SEQ ID NO: 1693217 - DNA, 25 bp, Homo sapien
gccatacagagtgcgcccctgacgt

SEQ ID NO: 1693218 - DNA, 25 bp, Homo sapien
cgcccctgacgttttagggcatata

SEQ ID NO: 1693219 - DNA, 25 bp, Homo sapien
cagagtgcgcccctgacgttttagg

SEQ ID NO: 1693220 - DNA, 25 bp, Homo sapien
gaagccatacagagtgcgcccctga

SEQ ID NO: 1693221 - DNA, 25 bp, Homo sapien
gaagttctcaggagaccgcgtattc

SEQ ID NO: 1693222 - DNA, 25 bp, Homo sapien
gttctcaggagaccgcgtattctta

SEQ ID NO: 1693223 - DNA, 25 bp, Homo sapien
agttctcaggagaccgcgtattctt

SEQ ID NO: 1693224 - DNA, 25 bp, Homo sapien
ctcaggagaccgcgtattcttagat

SEQ ID NO: 1693225 - DNA, 25 bp, Homo sapien
ttgtcagagactgccgtatatctag

SEQ ID NO: 1693226 - DNA, 25 bp, Homo sapien
agaggtccaggaactaaaaagtctg

SEQ ID NO: 1693227 - DNA, 25 bp, Homo sapien
agactgccgtatatctagaggtcca

SEQ ID NO: 1693228 - DNA, 25 bp, Homo sapien
cagaaaaagggcttcttgtcagaga

SEQ ID NO: 1693229 - DNA, 25 bp, Homo sapien
accagcggcctaagctcacgagaaa

SEQ ID NO: 1693230 - DNA, 25 bp, Homo sapien
cctaagctcacgagaaaacaaacaa

SEQ ID NO: 1693231 - DNA, 25 bp, Homo sapien
gcggcctaagctcacgagaaaacaa

SEQ ID NO: 1693232 - DNA, 25 bp, Homo sapien
aaaaccagcggcctaagctcacgag

SEQ ID NO: 1693233 - DNA, 25 bp, Homo sapien
gcgggatttcgctttggcgcgagct

SEQ ID NO: 1693234 - DNA, 25 bp, Homo sapien
ccgctctgcgtagttgcctttacgg

SEQ ID NO: 1693235 - DNA, 25 bp, Homo sapien
gaagagcgggatttcgctttggcgc

SEQ ID NO: 1693236 - DNA, 25 bp, Homo sapien
cgctctgcgtagttgcctttacgga

SEQ ID NO: 1693237 - DNA, 25 bp, Homo sapien
tggtcacccggcctagcagtttgtt

SEQ ID NO: 1693238 - DNA, 25 bp, Homo sapien
cacccggcctagcagtttgttgagc

SEQ ID NO: 1693239 - DNA, 25 bp, Homo sapien
ggtcacccggcctagcagtttgttg

SEQ ID NO: 1693240 - DNA, 25 bp, Homo sapien
agcaatggtcacccggcctagcagt

SEQ ID NO: 1693241 - DNA, 25 bp, Homo sapien
ttgatagcgtttccgggagctcaga

SEQ ID NO: 1693242 - DNA, 25 bp, Homo sapien
tgggtttgatagcgtttccgggagc

SEQ ID NO: 1693243 - DNA, 25 bp, Homo sapien
gtttgatagcgtttccgggagctca

SEQ ID NO: 1693244 - DNA, 25 bp, Homo sapien
atagcgtttccgggagctcagatac

SEQ ID NO: 1693245 - DNA, 25 bp, Homo sapien
taactatggtcgatcttacaaagca

SEQ ID NO: 1693246 - DNA, 25 bp, Homo sapien
taatacgctttgctcaaggttggca

SEQ ID NO: 1693247 - DNA, 25 bp, Homo sapien
gaggcatccctgcatgtaaactgtt

SEQ ID NO: 1693248 - DNA, 25 bp, Homo sapien
gaagtgtttagatcacgaggcatcc

SEQ ID NO: 1693249 - DNA, 25 bp, Homo sapien
cacacactcggatttgaaggctcca

SEQ ID NO: 1693250 - DNA, 25 bp, Homo sapien
tccgtttctactggtggcgggcgct

SEQ ID NO: 1693251 - DNA, 25 bp, Homo sapien
gagatccggaagaaaacctcggcga

SEQ ID NO: 1693252 - DNA, 25 bp, Homo sapien
cagctgggcgcagatgcataggcaa

SEQ ID NO: 1693253 - DNA, 25 bp, Homo sapien
tcacacaccgattgggagctggaat

SEQ ID NO: 1693254 - DNA, 25 bp, Homo sapien
ctaaccttaggatcgaaattctcgg

SEQ ID NO: 1693255 - DNA, 25 bp, Homo sapien
gagattaagccctaggccaaggtca

SEQ ID NO: 1693256 - DNA, 25 bp, Homo sapien
tacctcttcgtgtagattccctggg

SEQ ID NO: 1693257 - DNA, 25 bp, Homo sapien
gaaaacactattagcaacctattag

SEQ ID NO: 1693258 - DNA, 25 bp, Homo sapien
ctctacaacaaagtgcttcctggct

SEQ ID NO: 1693259 - DNA, 25 bp, Homo sapien
ttagtaataaaccaactctctacaa

SEQ ID NO: 1693260 - DNA, 25 bp, Homo sapien
tacttaatgtcttccttagtaataa

SEQ ID NO: 1693261 - DNA, 25 bp, Homo sapien
tgagacaccagatcagcctcagaag

SEQ ID NO: 1693262 - DNA, 25 bp, Homo sapien
gacaccagatcagcctcagaagaca

SEQ ID NO: 1693263 - DNA, 25 bp, Homo sapien
gtgagacaccagatcagcctcagaa

SEQ ID NO: 1693264 - DNA, 25 bp, Homo sapien
gagacaccagatcagcctcagaaga

SEQ ID NO: 1693265 - DNA, 25 bp, Homo sapien
ggtgaacaccgccacacctgactaa

SEQ ID NO: 1693266 - DNA, 25 bp, Homo sapien
actacaggcgcctacaggtgaacac

SEQ ID NO: 1693267 - DNA, 25 bp, Homo sapien
aggcgcctacaggtgaacaccgcca

SEQ ID NO: 1693268 - DNA, 25 bp, Homo sapien
acctgactaatttgtgtagttttat

SEQ ID NO: 1693269 - DNA, 25 bp, Homo sapien
agagaatcctgtcgctacacatgag

SEQ ID NO: 1693270 - DNA, 25 bp, Homo sapien
gtgtaaatataggtaatgactgtcc

SEQ ID NO: 1693271 - DNA, 25 bp, Homo sapien
tacacatgagcacttattccatttg

SEQ ID NO: 1693272 - DNA, 25 bp, Homo sapien
gctcctcttacttggtttggtacaa

SEQ ID NO: 1693273 - DNA, 25 bp, Homo sapien
gcccggctgggatggaataaattta

SEQ ID NO: 1693274 - DNA, 25 bp, Homo sapien
tctttcaactgtaggcaatgtgcac

SEQ ID NO: 1693275 - DNA, 25 bp, Homo sapien
taaagatcacaggatagggccctaa

SEQ ID NO: 1693276 - DNA, 25 bp, Homo sapien
taaatcctaagacatgttggctcct

SEQ ID NO: 1693277 - DNA, 25 bp, Homo sapien
gccagggctgccactttgatgtcag

SEQ ID NO: 1693278 - DNA, 25 bp, Homo sapien
gagcctagcctgaacaaccatttga

SEQ ID NO: 1693279 - DNA, 25 bp, Homo sapien
tatagaacaggatcatagagctacc

SEQ ID NO: 1693280 - DNA, 25 bp, Homo sapien
ggtgtgacccaaggatttaatcagc

SEQ ID NO: 1693281 - DNA, 25 bp, Homo sapien
tttgctcttcagatagggttgctag

SEQ ID NO: 1693282 - DNA, 25 bp, Homo sapien
tagttctttacaggtaccacagccc

SEQ ID NO: 1693283 - DNA, 25 bp, Homo sapien
gacctatccagactagacactccag

SEQ ID NO: 1693284 - DNA, 25 bp, Homo sapien
cctgtggtgtaaaaggacctatcca

SEQ ID NO: 1693285 - DNA, 25 bp, Homo sapien
taagaacgttgagtctagcccaaga

SEQ ID NO: 1693286 - DNA, 25 bp, Homo sapien
aactcaagtgcctaccaacagtgga

SEQ ID NO: 1693287 - DNA, 25 bp, Homo sapien
tagaattggtaagtttggcaggcac

SEQ ID NO: 1693288 - DNA, 25 bp, Homo sapien
tacacagtctgctacctgacaagaa

SEQ ID NO: 1693289 - DNA, 25 bp, Homo sapien
tgtttctattacaatgtatacatta

SEQ ID NO: 1693290 - DNA, 25 bp, Homo sapien
ttctattacaatgtatacattatac

SEQ ID NO: 1693291 - DNA, 25 bp, Homo sapien
gtttctattacaatgtatacattat

SEQ ID NO: 1693292 - DNA, 25 bp, Homo sapien
cattaccttttattacctcatgcca

SEQ ID NO: 1693293 - DNA, 25 bp, Homo sapien
ttgcattaccttttattacctcatg

SEQ ID NO: 1693294 - DNA, 25 bp, Homo sapien
ctttgcattaccttttattacctca

SEQ ID NO: 1693295 - DNA, 25 bp, Homo sapien
taccttttattacctcatgccaggc

SEQ ID NO: 1693296 - DNA, 25 bp, Homo sapien
gaaatttccatacagagtaggcctc

SEQ ID NO: 1693297 - DNA, 25 bp, Homo sapien
taaccagggaggtgtcctaggcaga

SEQ ID NO: 1693298 - DNA, 25 bp, Homo sapien
aatacagcagtggaccatacaggcc

SEQ ID NO: 1693299 - DNA, 25 bp, Homo sapien
taaaaccagaccttgactgcagatg

SEQ ID NO: 1693300 - DNA, 25 bp, Homo sapien
tgagcgagagcaattcgagccggaa

SEQ ID NO: 1693301 - DNA, 25 bp, Homo sapien
agagcaattcgagccggaagcagag

SEQ ID NO: 1693302 - DNA, 25 bp, Homo sapien
aaggcaagcgtgagcgagagcaatt

SEQ ID NO: 1693303 - DNA, 25 bp, Homo sapien
aattcgagccggaagcagaggcact

SEQ ID NO: 1693304 - DNA, 25 bp, Homo sapien
cttggaggcggcaacagctttagta

SEQ ID NO: 1693305 - DNA, 25 bp, Homo sapien
ttgagtttgaaggaacccgacgcgc

SEQ ID NO: 1693306 - DNA, 25 bp, Homo sapien
ttgcgggccttcttcttcacgggag

SEQ ID NO: 1693307 - DNA, 25 bp, Homo sapien
tttagtaatgagctcggacaccggg

SEQ ID NO: 1693308 - DNA, 25 bp, Homo sapien
gcttggcggtctttggtttagccgc

SEQ ID NO: 1693309 - DNA, 25 bp, Homo sapien
tgccttgggcttggcggtctttggt

SEQ ID NO: 1693310 - DNA, 25 bp, Homo sapien
tgggcttggcggtctttggtttagc

SEQ ID NO: 1693311 - DNA, 25 bp, Homo sapien
ggcttctaagcagttggccaaagga

SEQ ID NO: 1693312 - DNA, 25 bp, Homo sapien
atcactcccgccgaggccctgttca

SEQ ID NO: 1693313 - DNA, 25 bp, Homo sapien
gaaaataatcactcccgccgaggcc

SEQ ID NO: 1693314 - DNA, 25 bp, Homo sapien
tcactcccgccgaggccctgttcat

SEQ ID NO: 1693315 - DNA, 25 bp, Homo sapien
tgagaaaataatcactcccgccgag

SEQ ID NO: 1693316 - DNA, 25 bp, Homo sapien
ggagcagacttggtaggttcaggca

SEQ ID NO: 1693317 - DNA, 25 bp, Homo sapien
caggagcagacttggtaggttcagg

SEQ ID NO: 1693318 - DNA, 25 bp, Homo sapien
gcaggagcagacttggtaggttcag

SEQ ID NO: 1693319 - DNA, 25 bp, Homo sapien
gggcaggagcagacttggtaggttc

SEQ ID NO: 1693320 - DNA, 25 bp, Homo sapien
ttattgaaaacatgcgtggctctta

SEQ ID NO: 1693321 - DNA, 25 bp, Homo sapien
attgaaaacatgcgtggctcttaaa

SEQ ID NO: 1693322 - DNA, 25 bp, Homo sapien
tattgaaaacatgcgtggctcttaa

SEQ ID NO: 1693323 - DNA, 25 bp, Homo sapien
tctagtacctattgttattccctgt

SEQ ID NO: 1693324 - DNA, 25 bp, Homo sapien
cgtacccatagcactcaatttctag

SEQ ID NO: 1693325 - DNA, 25 bp, Homo sapien
gatactaaatgagctaacgatctaa

SEQ ID NO: 1693326 - DNA, 25 bp, Homo sapien
tatttcctctgcagtactaacgtaa

SEQ ID NO: 1693327 - DNA, 25 bp, Homo sapien
agctccaaacataaggaagttgtca

SEQ ID NO: 1693328 - DNA, 25 bp, Homo sapien
ccgagtcccggatcaacatcacgat

SEQ ID NO: 1693329 - DNA, 25 bp, Homo sapien
ttgtcaagagcgtgcactttcgtgc

SEQ ID NO: 1693330 - DNA, 25 bp, Homo sapien
actttcgtgctcagggcgggccgtc

SEQ ID NO: 1693331 - DNA, 25 bp, Homo sapien
tgtagtccaagccttagcagtagaa

SEQ ID NO: 1693332 - DNA, 25 bp, Homo sapien
gaatccctatggtatgaatgccagg

SEQ ID NO: 1693333 - DNA, 25 bp, Homo sapien
ttccacgggttgagtaaaagccagc

SEQ ID NO: 1693334 - DNA, 25 bp, Homo sapien
caggaacaagtaagcatcgatggct

SEQ ID NO: 1693335 - DNA, 25 bp, Homo sapien
aggtaagcccaaaatagaacataat

SEQ ID NO: 1693336 - DNA, 25 bp, Homo sapien
cacaaaaggcattgcggcttattcc

SEQ ID NO: 1693337 - DNA, 25 bp, Homo sapien
tattcttatctgaaagggtgtagct

SEQ ID NO: 1693338 - DNA, 25 bp, Homo sapien
agtaagctaagatcaggtccctgca

SEQ ID NO: 1693339 - DNA, 25 bp, Homo sapien
tgtgccggaggaaatggctcacacc

SEQ ID NO: 1693340 - DNA, 25 bp, Homo sapien
gggtggtatagagggctggctgatc

SEQ ID NO: 1693341 - DNA, 25 bp, Homo sapien
tttcccaaatctgtgtgtctgagtg

SEQ ID NO: 1693342 - DNA, 25 bp, Homo sapien
ggcttgtccacttggcatcttccag

SEQ ID NO: 1693343 - DNA, 25 bp, Homo sapien
gatgggctggccagtgggtggtata

SEQ ID NO: 1693344 - DNA, 25 bp, Homo sapien
atggccatgcacttcttgcccatcc

SEQ ID NO: 1693345 - DNA, 25 bp, Homo sapien
cctttccctgcctcaagccccaggg

SEQ ID NO: 1693346 - DNA, 25 bp, Homo sapien
gcacttcttgcccatcccatccctt

SEQ ID NO: 1693347 - DNA, 25 bp, Homo sapien
gccatgcacttcttgcccatcccat

SEQ ID NO: 1693348 - DNA, 25 bp, Homo sapien
gccttcttgtgggctgcatagttgg

SEQ ID NO: 1693349 - DNA, 25 bp, Homo sapien
agagagaacatggtgatgataaacc

SEQ ID NO: 1693350 - DNA, 25 bp, Homo sapien
aaggtcagagaaacataaatcatct

SEQ ID NO: 1693351 - DNA, 25 bp, Homo sapien
tatagtctttcctgatatgagcagc

SEQ ID NO: 1693352 - DNA, 25 bp, Homo sapien
tttcctgatatgagcagcatctctc

SEQ ID NO: 1693353 - DNA, 25 bp, Homo sapien
cataaatcatctttcaatatagtct

SEQ ID NO: 1693354 - DNA, 25 bp, Homo sapien
cccacatcccaaggcttctttgtgc

SEQ ID NO: 1693355 - DNA, 25 bp, Homo sapien
tggtgctggatacagtacatggctg

SEQ ID NO: 1693356 - DNA, 25 bp, Homo sapien
cccagaagcagcataggaaaaacaa

SEQ ID NO: 1693357 - DNA, 25 bp, Homo sapien
taaaccccagataagaacagccttc

SEQ ID NO: 1693358 - DNA, 25 bp, Homo sapien
tcgtgccgaccaccaatctatgttg

SEQ ID NO: 1693359 - DNA, 25 bp, Homo sapien
aaagccaaaagtatccccctctgct

SEQ ID NO: 1693360 - DNA, 25 bp, Homo sapien
tgctcgtgccgaccaccaatctatg

SEQ ID NO: 1693361 - DNA, 25 bp, Homo sapien
gtgccgaccaccaatctatgttgag

SEQ ID NO: 1693362 - DNA, 25 bp, Homo sapien
tactatcaacgtgcctgaagtggga

SEQ ID NO: 1693363 - DNA, 25 bp, Homo sapien
tctattatgagcgtaaggtgcaacc

SEQ ID NO: 1693364 - DNA, 25 bp, Homo sapien
taaataaatatgataccctagccca

SEQ ID NO: 1693365 - DNA, 25 bp, Homo sapien
caaggacccttcaacatgggaggat

SEQ ID NO: 1693366 - DNA, 25 bp, Homo sapien
tttcttagcaaaggtagtccatggc

SEQ ID NO: 1693367 - DNA, 25 bp, Homo sapien
tgatgaaccagtgtgcagcaaacca

SEQ ID NO: 1693368 - DNA, 25 bp, Homo sapien
aaagtaacatgaagtgcaaacacct

SEQ ID NO: 1693369 - DNA, 25 bp, Homo sapien
ggcagatgagacttcctaagttcta

SEQ ID NO: 1693370 - DNA, 25 bp, Homo sapien
ggagcctgcgtggaggggcacgacc

SEQ ID NO: 1693371 - DNA, 25 bp, Homo sapien
tgcgtggaggggcacgaccggcccc

SEQ ID NO: 1693372 - DNA, 25 bp, Homo sapien
ctatgagggagcctgcgtggagggg

SEQ ID NO: 1693373 - DNA, 25 bp, Homo sapien
tggaggggcacgaccggccccaaga

SEQ ID NO: 1693374 - DNA, 25 bp, Homo sapien
gcggcgtaacgtgtggctctgtggt

SEQ ID NO: 1693375 - DNA, 25 bp, Homo sapien
gggcgtggccggacggccctatgag

SEQ ID NO: 1693376 - DNA, 25 bp, Homo sapien
cgtttttggcgagggttgatgggat

SEQ ID NO: 1693377 - DNA, 25 bp, Homo sapien
gtgacgccctatgcgggagccggat

SEQ ID NO: 1693378 - DNA, 25 bp, Homo sapien
taatgagcttagatcagggcactgc

SEQ ID NO: 1693379 - DNA, 25 bp, Homo sapien
gccaagtccggtcagatattccaag

SEQ ID NO: 1693380 - DNA, 25 bp, Homo sapien
taccatgagataggaacaggcagtc

SEQ ID NO: 1693381 - DNA, 25 bp, Homo sapien
cagccgtctgaaaaacccttgtgag

SEQ ID NO: 1693382 - DNA, 25 bp, Homo sapien
gctgaagggtgttacctggaccaca

SEQ ID NO: 1693383 - DNA, 25 bp, Homo sapien
gctcagataaaggtcaataggccat

SEQ ID NO: 1693384 - DNA, 25 bp, Homo sapien
tgcctgtctagtcatatttcctgaa

SEQ ID NO: 1693385 - DNA, 25 bp, Homo sapien
catttaaatctcactgggtccgatg

SEQ ID NO: 1693386 - DNA, 25 bp, Homo sapien
ggcgggagcggatttcgctggctca

SEQ ID NO: 1693387 - DNA, 25 bp, Homo sapien
ggggcgggagcggatttcgctggct

SEQ ID NO: 1693388 - DNA, 25 bp, Homo sapien
tcttcggggcgggagcggatttcgc

SEQ ID NO: 1693389 - DNA, 25 bp, Homo sapien
gagcggatttcgctggctcaggcat

SEQ ID NO: 1693390 - DNA, 25 bp, Homo sapien
gttgacaaaggaattcatgatcccc

SEQ ID NO: 1693391 - DNA, 25 bp, Homo sapien
gacaaaggaattcatgatccccatg

SEQ ID NO: 1693392 - DNA, 25 bp, Homo sapien
ctcgaagatgtcgttgacaaaggaa

SEQ ID NO: 1693393 - DNA, 25 bp, Homo sapien
gtcgttgacaaaggaattcatgatc

SEQ ID NO: 1693394 - DNA, 25 bp, Homo sapien
agagcctttgggtttactaaggcag

SEQ ID NO: 1693395 - DNA, 25 bp, Homo sapien
gagtcacggcatgtacagtttcgga

SEQ ID NO: 1693396 - DNA, 25 bp, Homo sapien
aaggccgctgcgcttcttggagacg

SEQ ID NO: 1693397 - DNA, 25 bp, Homo sapien
tagtgatgaactcacataccggagg

SEQ ID NO: 1693398 - DNA, 25 bp, Homo sapien
aacacctacttgagcgcggccacag

SEQ ID NO: 1693399 - DNA, 25 bp, Homo sapien
cgggaatgaacctgaggcgctgcac

SEQ ID NO: 1693400 - DNA, 25 bp, Homo sapien
ggcgctgcactccttagcacgaaga

SEQ ID NO: 1693401 - DNA, 25 bp, Homo sapien
ctaacactgcctggtttggcgggaa

SEQ ID NO: 1693402 - DNA, 25 bp, Homo sapien
tcccctcacggaattggtgcaaaaa

SEQ ID NO: 1693403 - DNA, 25 bp, Homo sapien
gataaataaacacttcgtccacaac

SEQ ID NO: 1693404 - DNA, 25 bp, Homo sapien
tttttggagcaggagcggacttagc

SEQ ID NO: 1693405 - DNA, 25 bp, Homo sapien
gcccttttttggagcaggagcggac

SEQ ID NO: 1693406 - DNA, 25 bp, Homo sapien
cttttttggagcaggagcggactta

SEQ ID NO: 1693407 - DNA, 25 bp, Homo sapien
ttttggagcaggagcggacttagca

SEQ ID NO: 1693408 - DNA, 25 bp, Homo sapien
tggtctagacctacacagcagcaac

SEQ ID NO: 1693409 - DNA, 25 bp, Homo sapien
caaatggtattttgccagtggccaa

SEQ ID NO: 1693410 - DNA, 25 bp, Homo sapien
caatgctgcgatgactaaaccggaa

SEQ ID NO: 1693411 - DNA, 25 bp, Homo sapien
gctagccttctaaccagcacttggg

SEQ ID NO: 1693412 - DNA, 25 bp, Homo sapien
ttcttgtctgccatttctaggtgct

SEQ ID NO: 1693413 - DNA, 25 bp, Homo sapien
ttctaggtgcttaggcatatggaca

SEQ ID NO: 1693414 - DNA, 25 bp, Homo sapien
attcttgtctgccatttctaggtgc

SEQ ID NO: 1693415 - DNA, 25 bp, Homo sapien
tgccatttctaggtgcttaggcata

SEQ ID NO: 1693416 - DNA, 25 bp, Homo sapien
aattacagagatactggatgccctc

SEQ ID NO: 1693417 - DNA, 25 bp, Homo sapien
ttacagagatactggatgccctcat

SEQ ID NO: 1693418 - DNA, 25 bp, Homo sapien
aggtaattacagagatactggatgc

SEQ ID NO: 1693419 - DNA, 25 bp, Homo sapien
gtctctggacggctgtggtgtaggg

SEQ ID NO: 1693420 - DNA, 25 bp, Homo sapien
actccgtctgtaggtatctctgtcg

SEQ ID NO: 1693421 - DNA, 25 bp, Homo sapien
cttgtcagcaccaggggacacagca

SEQ ID NO: 1693422 - DNA, 25 bp, Homo sapien
gtcagcaccaggggacacagcactc

SEQ ID NO: 1693423 - DNA, 25 bp, Homo sapien
cgtctgtaggtatctctgtcggctt

SEQ ID NO: 1693424 - DNA, 25 bp, Homo sapien
atctgcctctaaactggaattcggt

SEQ ID NO: 1693425 - DNA, 25 bp, Homo sapien
tgcctctaaactggaattcggttgt

SEQ ID NO: 1693426 - DNA, 25 bp, Homo sapien
actggaattcggttgttgacccagc

SEQ ID NO: 1693427 - DNA, 25 bp, Homo sapien
caggcccacgaccaaatctgcctct

SEQ ID NO: 1693428 - DNA, 25 bp, Homo sapien
atttaatagaacattagttaataca

SEQ ID NO: 1693429 - DNA, 25 bp, Homo sapien
tttaatagaacattagttaatacat

SEQ ID NO: 1693430 - DNA, 25 bp, Homo sapien
tgaaaaacaagcgacggtagtattc

SEQ ID NO: 1693431 - DNA, 25 bp, Homo sapien
tatgccgggaattcggacctaaatg

SEQ ID NO: 1693432 - DNA, 25 bp, Homo sapien
caagcgacggtagtattcttatatg

SEQ ID NO: 1693433 - DNA, 25 bp, Homo sapien
agtattcttatatgccgggaattcg

SEQ ID NO: 1693434 - DNA, 25 bp, Homo sapien
gaccaacacaccaacgaaaatagcc

SEQ ID NO: 1693435 - DNA, 25 bp, Homo sapien
caccaacgaaaatagccgcaaaaat

SEQ ID NO: 1693436 - DNA, 25 bp, Homo sapien
cacaccaacgaaaatagccgcaaaa

SEQ ID NO: 1693437 - DNA, 25 bp, Homo sapien
caacacaccaacgaaaatagccgca

SEQ ID NO: 1693438 - DNA, 25 bp, Homo sapien
ccctggatgttatctcgcaggacct

SEQ ID NO: 1693439 - DNA, 25 bp, Homo sapien
cttacggtgacgcttagcgcctcct

SEQ ID NO: 1693440 - DNA, 25 bp, Homo sapien
gcatcacgaatcacgttttccagaa

SEQ ID NO: 1693441 - DNA, 25 bp, Homo sapien
tccgtgtaagtcacagcatcacgaa

SEQ ID NO: 1693442 - DNA, 25 bp, Homo sapien
tgcgtgagcttatctaccccaggaa

SEQ ID NO: 1693443 - DNA, 25 bp, Homo sapien
taagtaatagaaaacaggccgctag

SEQ ID NO: 1693444 - DNA, 25 bp, Homo sapien
tcataacttctaagggacaactggg

SEQ ID NO: 1693445 - DNA, 25 bp, Homo sapien
tagggagtctcacggtctcgatgca

SEQ ID NO: 1693446 - DNA, 25 bp, Homo sapien
aaatctcgttttccgccgtgcgcgg

SEQ ID NO: 1693447 - DNA, 25 bp, Homo sapien
ggtggtaggatagcttaaactctcg

SEQ ID NO: 1693448 - DNA, 25 bp, Homo sapien
taaactctcgggctagagactgcag

SEQ ID NO: 1693449 - DNA, 25 bp, Homo sapien
caggaacatgtgaatacgctagtgc

SEQ ID NO: 1693450 - DNA, 25 bp, Homo sapien
gcagaagaactaacaatccactgaa

SEQ ID NO: 1693451 - DNA, 25 bp, Homo sapien
acagcagaagaactaacaatccact

SEQ ID NO: 1693452 - DNA, 25 bp, Homo sapien
cctaacagcagaagaactaacaatc

SEQ ID NO: 1693453 - DNA, 25 bp, Homo sapien
gaagaactaacaatccactgaataa

SEQ ID NO: 1693454 - DNA, 25 bp, Homo sapien
gatggtcacgcgacctagaagctta

SEQ ID NO: 1693455 - DNA, 25 bp, Homo sapien
ggtgcacacggccaactggaaactg

SEQ ID NO: 1693456 - DNA, 25 bp, Homo sapien
tagcttttgcccgagctttgccgcc

SEQ ID NO: 1693457 - DNA, 25 bp, Homo sapien
tagctctaagatctcggccgtcaga

SEQ ID NO: 1693458 - DNA, 25 bp, Homo sapien
ttcaggcatcgtatgtgtattccag

SEQ ID NO: 1693459 - DNA, 25 bp, Homo sapien
ggcatcgtatgtgtattccagcact

SEQ ID NO: 1693460 - DNA, 25 bp, Homo sapien
cactgacggatttgactagtaatca

SEQ ID NO: 1693461 - DNA, 25 bp, Homo sapien
tctgggactcgggatcactgacgga

SEQ ID NO: 1693462 - DNA, 25 bp, Homo sapien
aaaaagcccgccctgaaatgctaat

SEQ ID NO: 1693463 - DNA, 25 bp, Homo sapien
ccgccctgaaatgctaatgggcagc

SEQ ID NO: 1693464 - DNA, 25 bp, Homo sapien
tgagcccagccggaatgcagtcatc

SEQ ID NO: 1693465 - DNA, 25 bp, Homo sapien
gaatgcagtcatctttaaaacttaa

SEQ ID NO: 1693466 - DNA, 25 bp, Homo sapien
ttaggaggctgtctgccaccagtgg

SEQ ID NO: 1693467 - DNA, 25 bp, Homo sapien
gacttccgtgtggttggcttggtgc

SEQ ID NO: 1693468 - DNA, 25 bp, Homo sapien
tctgccaccagtggacttccgtgtg

SEQ ID NO: 1693469 - DNA, 25 bp, Homo sapien
ctgcttaggaggctgtctgccacca

SEQ ID NO: 1693470 - DNA, 25 bp, Homo sapien
aaaaggattctggttgtcataagcc

SEQ ID NO: 1693471 - DNA, 25 bp, Homo sapien
gagccccaatttgattgagtaaaga

SEQ ID NO: 1693472 - DNA, 25 bp, Homo sapien
ggaagaatgtatcccactataaaaa

SEQ ID NO: 1693473 - DNA, 25 bp, Homo sapien
gaatgtcagggagttatactatggg

SEQ ID NO: 1693474 - DNA, 25 bp, Homo sapien
caaataacaggacttcttaacttgg

SEQ ID NO: 1693475 - DNA, 25 bp, Homo sapien
ccaaataacaggacttcttaacttg

SEQ ID NO: 1693476 - DNA, 25 bp, Homo sapien
cactctgattggattgtggacgatc

SEQ ID NO: 1693477 - DNA, 25 bp, Homo sapien
ggaagtggccgtagagattcacgat

SEQ ID NO: 1693478 - DNA, 25 bp, Homo sapien
ggtttgcccctctatataggaacag

SEQ ID NO: 1693479 - DNA, 25 bp, Homo sapien
tcggttgctaaattccggaagtggc

SEQ ID NO: 1693480 - DNA, 25 bp, Homo sapien
ggccagctgtttgcgcggtgcttta

SEQ ID NO: 1693481 - DNA, 25 bp, Homo sapien
tggtcacgcgtttggcatgaatagc

SEQ ID NO: 1693482 - DNA, 25 bp, Homo sapien
tggtgtcctcgaaaagccccaccaa

SEQ ID NO: 1693483 - DNA, 25 bp, Homo sapien
taccgcctgtggatttacgagccgt

SEQ ID NO: 1693484 - DNA, 25 bp, Homo sapien
caccacatgaaagagcgttgagcca

SEQ ID NO: 1693485 - DNA, 25 bp, Homo sapien
ttagaccagtatcaggcgcacagag

SEQ ID NO: 1693486 - DNA, 25 bp, Homo sapien
aaaacactagtggagtaaggcagcc

SEQ ID NO: 1693487 - DNA, 25 bp, Homo sapien
taaaccaatggagaacagcgtaggg

SEQ ID NO: 1693488 - DNA, 25 bp, Homo sapien
tttaagatatcagccggaaggccgg

SEQ ID NO: 1693489 - DNA, 25 bp, Homo sapien
taagaactttgaagccgtccaagga

SEQ ID NO: 1693490 - DNA, 25 bp, Homo sapien
actgcaccccatatcaaaactgagg

SEQ ID NO: 1693491 - DNA, 25 bp, Homo sapien
gacttcttactatggctaccttggc

SEQ ID NO: 1693492 - DNA, 25 bp, Homo sapien
tacaggttaaaacttgttgagctag

SEQ ID NO: 1693493 - DNA, 25 bp, Homo sapien
gcttctatctagcataataggatgt

SEQ ID NO: 1693494 - DNA, 25 bp, Homo sapien
tcttaaagaaagtacaggatacagg

SEQ ID NO: 1693495 - DNA, 25 bp, Homo sapien
gaaacaacattcaaatagagaatgc

SEQ ID NO: 1693496 - DNA, 25 bp, Homo sapien
aagtcctcacgtactgaattccagt

SEQ ID NO: 1693497 - DNA, 25 bp, Homo sapien
ggcaaatgaccatgctagatgttct

SEQ ID NO: 1693498 - DNA, 25 bp, Homo sapien
tgttctggtggatttaatgatataa

SEQ ID NO: 1693499 - DNA, 25 bp, Homo sapien
tattttacatctcaacttgactaaa

SEQ ID NO: 1693500 - DNA, 25 bp, Homo sapien
cggaggacgcggtgtattagcccta

SEQ ID NO: 1693501 - DNA, 25 bp, Homo sapien
atgctggtccaacccgctcggagta

SEQ ID NO: 1693502 - DNA, 25 bp, Homo sapien
tgccgccaggtaacactagcatgct

SEQ ID NO: 1693503 - DNA, 25 bp, Homo sapien
tagccctactggcaactgtaggccc

SEQ ID NO: 1693504 - DNA, 25 bp, Homo sapien
ctgtatgttgtcacgcagcactttg

SEQ ID NO: 1693505 - DNA, 25 bp, Homo sapien
cacgcagcactttgcgatggcgctt

SEQ ID NO: 1693506 - DNA, 25 bp, Homo sapien
tatgttgtcacgcagcactttgcga

SEQ ID NO: 1693507 - DNA, 25 bp, Homo sapien
gcactttgcgatggcgcttggcgcc

SEQ ID NO: 1693508 - DNA, 25 bp, Homo sapien
gccgcgtcgggccaagcgacggatg

SEQ ID NO: 1693509 - DNA, 25 bp, Homo sapien
aaatgaggcccgaaatgcgtttcac

SEQ ID NO: 1693510 - DNA, 25 bp, Homo sapien
caagcgacggatggcgggcttcgtg

SEQ ID NO: 1693511 - DNA, 25 bp, Homo sapien
atgcgtttcacgccgccgcgtcggg

SEQ ID NO: 1693512 - DNA, 25 bp, Homo sapien
tgcagtgactgtcttacgcttggcg

SEQ ID NO: 1693513 - DNA, 25 bp, Homo sapien
agtgactgtcttacgcttggcgtgc

SEQ ID NO: 1693514 - DNA, 25 bp, Homo sapien
gcttggcgtgctccgtgtaggttac

SEQ ID NO: 1693515 - DNA, 25 bp, Homo sapien
acgcttggcgtgctccgtgtaggtt

SEQ ID NO: 1693516 - DNA, 25 bp, Homo sapien
tcagccaccaaagccgtacagagtg

SEQ ID NO: 1693517 - DNA, 25 bp, Homo sapien
ttttatgggtgagctgttaaataaa

SEQ ID NO: 1693518 - DNA, 25 bp, Homo sapien
ccgcattcgcggagagagggcataa

SEQ ID NO: 1693519 - DNA, 25 bp, Homo sapien
tgtgtgctatccacgccaagcgagt

SEQ ID NO: 1693520 - DNA, 25 bp, Homo sapien
gaaatccgccgctatcagaaatcga

SEQ ID NO: 1693521 - DNA, 25 bp, Homo sapien
taagttgtactgagggtgtgcgcca

SEQ ID NO: 1693522 - DNA, 25 bp, Homo sapien
gggagcggacttagctggatcaggc

SEQ ID NO: 1693523 - DNA, 25 bp, Homo sapien
gcgggagcggacttagctggatcag

SEQ ID NO: 1693524 - DNA, 25 bp, Homo sapien
atcgttgacaaaggaattcatgatc

SEQ ID NO: 1693525 - DNA, 25 bp, Homo sapien
gggcgggagcggacttagctggatc

SEQ ID NO: 1693526 - DNA, 25 bp, Homo sapien
ctgtattggcgacacttctcccata

SEQ ID NO: 1693527 - DNA, 25 bp, Homo sapien
cctttgggtttgaacatgcgtccat

SEQ ID NO: 1693528 - DNA, 25 bp, Homo sapien
ggcgacacttctcccatagaataca

SEQ ID NO: 1693529 - DNA, 25 bp, Homo sapien
agcctttgggtttgaacatgcgtcc

SEQ ID NO: 1693530 - DNA, 25 bp, Homo sapien
ataaacaggtgatgtaggaaaattt

SEQ ID NO: 1693531 - DNA, 25 bp, Homo sapien
taagaccagcgcttgagtttaagac

SEQ ID NO: 1693532 - DNA, 25 bp, Homo sapien
gcttagtgtttgtcaaacgcacaga

SEQ ID NO: 1693533 - DNA, 25 bp, Homo sapien
tgaacaatgtagttgtaccccacct

SEQ ID NO: 1693534 - DNA, 25 bp, Homo sapien
gggaggaggcaagaatgtctacttt

SEQ ID NO: 1693535 - DNA, 25 bp, Homo sapien
gattatgttaattcaccttttggca

SEQ ID NO: 1693536 - DNA, 25 bp, Homo sapien
gatgagaatataaatgggtagcccc

SEQ ID NO: 1693537 - DNA, 25 bp, Homo sapien
tattaaagcacttctatgaaatcct

SEQ ID NO: 1693538 - DNA, 25 bp, Homo sapien
gcttgaagaacatgcaagggcctgg

SEQ ID NO: 1693539 - DNA, 25 bp, Homo sapien
tgcagagtagacagtggtttgtgac

SEQ ID NO: 1693540 - DNA, 25 bp, Homo sapien
tgggacaatgtctgttagggctgca

SEQ ID NO: 1693541 - DNA, 25 bp, Homo sapien
gagccccagcagtgtcatatatctt

SEQ ID NO: 1693542 - DNA, 25 bp, Homo sapien
gatctgcgctttcagagttccgcgg

SEQ ID NO: 1693543 - DNA, 25 bp, Homo sapien
ttcaggtagtctgagatggcccgca

SEQ ID NO: 1693544 - DNA, 25 bp, Homo sapien
gattcgccgctatcagaagtcgact

SEQ ID NO: 1693545 - DNA, 25 bp, Homo sapien
ggtttccgggcagtaattctatcca

SEQ ID NO: 1693546 - DNA, 25 bp, Homo sapien
gcaaagttactatcgcgcagggcgg

SEQ ID NO: 1693547 - DNA, 25 bp, Homo sapien
taaacacctgcttttcgattggctg

SEQ ID NO: 1693548 - DNA, 25 bp, Homo sapien
gctaaaacgcactcttccagggctg

SEQ ID NO: 1693549 - DNA, 25 bp, Homo sapien
taaatacttcactgcgtctggatgt

SEQ ID NO: 1693550 - DNA, 25 bp, Homo sapien
gttcgcagccgaagtgataccgtca

SEQ ID NO: 1693551 - DNA, 25 bp, Homo sapien
gtgataccgtcaaatgaccacagga

SEQ ID NO: 1693552 - DNA, 25 bp, Homo sapien
tgctggtgagcccaaacgccctcat

SEQ ID NO: 1693553 - DNA, 25 bp, Homo sapien
gccgaagtgataccgtcaaatgacc

SEQ ID NO: 1693554 - DNA, 25 bp, Homo sapien
ataatccccatagccttggacgaga

SEQ ID NO: 1693555 - DNA, 25 bp, Homo sapien
gcctcgcctgcaatgcgctcgaaaa

SEQ ID NO: 1693556 - DNA, 25 bp, Homo sapien
ggagttcataatccccatagccttg

SEQ ID NO: 1693557 - DNA, 25 bp, Homo sapien
gttcataatccccatagccttggac

SEQ ID NO: 1693558 - DNA, 25 bp, Homo sapien
gctcttagaagagcctttgggtcgt

SEQ ID NO: 1693559 - DNA, 25 bp, Homo sapien
ttagaagagcctttgggtcgttagc

SEQ ID NO: 1693560 - DNA, 25 bp, Homo sapien
agaagagcctttgggtcgttagcgc

SEQ ID NO: 1693561 - DNA, 25 bp, Homo sapien
tcttagaagagcctttgggtcgtta

SEQ ID NO: 1693562 - DNA, 25 bp, Homo sapien
ggcattgagccttctagtcagtttt

SEQ ID NO: 1693563 - DNA, 25 bp, Homo sapien
gacagccaaatagagaaagttctct

SEQ ID NO: 1693564 - DNA, 25 bp, Homo sapien
tttcatcccaaagaatgcaacagaa

SEQ ID NO: 1693565 - DNA, 25 bp, Homo sapien
actattgggagttttagagacagcc

SEQ ID NO: 1693566 - DNA, 25 bp, Homo sapien
tgggcccagcacgcttccgctgcgc

SEQ ID NO: 1693567 - DNA, 25 bp, Homo sapien
cccagcacgcttccgctgcgccact

SEQ ID NO: 1693568 - DNA, 25 bp, Homo sapien
ggcccagcacgcttccgctgcgcca

SEQ ID NO: 1693569 - DNA, 25 bp, Homo sapien
gggcccagcacgcttccgctgcgcc

SEQ ID NO: 1693570 - DNA, 25 bp, Homo sapien
gaagtcagacgccttatccattagg

SEQ ID NO: 1693571 - DNA, 25 bp, Homo sapien
cgaagggattcgaaccctcaatctt

SEQ ID NO: 1693572 - DNA, 25 bp, Homo sapien
ccacgaagggattcgaaccctcaat

SEQ ID NO: 1693573 - DNA, 25 bp, Homo sapien
cctcaatcttctgatccgaagtcag

SEQ ID NO: 1693574 - DNA, 25 bp, Homo sapien
gcagctgccaaaactccttggtaca

SEQ ID NO: 1693575 - DNA, 25 bp, Homo sapien
aactagtaacataggcttcagcagc

SEQ ID NO: 1693576 - DNA, 25 bp, Homo sapien
ttaaaatggagagtaagaactagta

SEQ ID NO: 1693577 - DNA, 25 bp, Homo sapien
tgccaaaactccttggtacacgcgg

SEQ ID NO: 1693578 - DNA, 25 bp, Homo sapien
gaggtgtacccacttggctgcaagc

SEQ ID NO: 1693579 - DNA, 25 bp, Homo sapien
cttcgaggtgtacccacttggctgc

SEQ ID NO: 1693580 - DNA, 25 bp, Homo sapien
acttggctgcaagcgctgccaatca

SEQ ID NO: 1693581 - DNA, 25 bp, Homo sapien
gtacccacttggctgcaagcgctgc

SEQ ID NO: 1693582 - DNA, 25 bp, Homo sapien
tagcaagtgtcatgtaactcctgac

SEQ ID NO: 1693583 - DNA, 25 bp, Homo sapien
tctagcttctgagtagtatcatgtc

SEQ ID NO: 1693584 - DNA, 25 bp, Homo sapien
tcatgtccttgtacattcttggtct

SEQ ID NO: 1693585 - DNA, 25 bp, Homo sapien
tcacggtttcttcttcggattagca

SEQ ID NO: 1693586 - DNA, 25 bp, Homo sapien
gccagtttcgtaggtttggagacca

SEQ ID NO: 1693587 - DNA, 25 bp, Homo sapien
gaaatgcgcatttgtaggcttcaat

SEQ ID NO: 1693588 - DNA, 25 bp, Homo sapien
tgtggagagctttcagccagtttcg

SEQ ID NO: 1693589 - DNA, 25 bp, Homo sapien
caaggtatcctggtggaaatgcgca

SEQ ID NO: 1693590 - DNA, 25 bp, Homo sapien
aaaggagtcccaagttgtgctgagt

SEQ ID NO: 1693591 - DNA, 25 bp, Homo sapien
tgagttttacctcctcgtatttcat

SEQ ID NO: 1693592 - DNA, 25 bp, Homo sapien
ttgtgctgagttttacctcctcgta

SEQ ID NO: 1693593 - DNA, 25 bp, Homo sapien
gtgctgagttttacctcctcgtatt

SEQ ID NO: 1693594 - DNA, 25 bp, Homo sapien
agtttcatccccactcgacctggag

SEQ ID NO: 1693595 - DNA, 25 bp, Homo sapien
acttggagccatcctggacattact

SEQ ID NO: 1693596 - DNA, 25 bp, Homo sapien
tgcctgcaacacttcatgccttctt

SEQ ID NO: 1693597 - DNA, 25 bp, Homo sapien
taaacattggcgctttttccatgct

SEQ ID NO: 1693598 - DNA, 25 bp, Homo sapien
aaagcctctcgcaagagtgctccca

SEQ ID NO: 1693599 - DNA, 25 bp, Homo sapien
agagcagctatagttgctttgcaag

SEQ ID NO: 1693600 - DNA, 25 bp, Homo sapien
tagttgctttgcaagtgaggcctat

SEQ ID NO: 1693601 - DNA, 25 bp, Homo sapien
agctatagttgctttgcaagtgagg

SEQ ID NO: 1693602 - DNA, 25 bp, Homo sapien
tctataccacggctcgtagaaagcc

SEQ ID NO: 1693603 - DNA, 25 bp, Homo sapien
tataccacggctcgtagaaagccga

SEQ ID NO: 1693604 - DNA, 25 bp, Homo sapien
ctataccacggctcgtagaaagccg

SEQ ID NO: 1693605 - DNA, 25 bp, Homo sapien
gcaattgtgttcgtagccgcagccg

SEQ ID NO: 1693606 - DNA, 25 bp, Homo sapien
attgtgttcgtagccgcagccgtcc

SEQ ID NO: 1693607 - DNA, 25 bp, Homo sapien
tgcaattgtgttcgtagccgcagcc

SEQ ID NO: 1693608 - DNA, 25 bp, Homo sapien
cgcagccgtcctgccgtcgctctcc

SEQ ID NO: 1693609 - DNA, 25 bp, Homo sapien
ctcaatcttctgatccgaagtcaga

SEQ ID NO: 1693610 - DNA, 25 bp, Homo sapien
cacggagggattcgaaccctcaatc

SEQ ID NO: 1693611 - DNA, 25 bp, Homo sapien
ccacggagggattcgaaccctcaat

SEQ ID NO: 1693612 - DNA, 25 bp, Homo sapien
ggagggattcgaaccctcaatcttc

SEQ ID NO: 1693613 - DNA, 25 bp, Homo sapien
cccaatggatttctagtccatcgcc

SEQ ID NO: 1693614 - DNA, 25 bp, Homo sapien
agaccccaatggatttctagtccat

SEQ ID NO: 1693615 - DNA, 25 bp, Homo sapien
atggatttctagtccatcgccttaa

SEQ ID NO: 1693616 - DNA, 25 bp, Homo sapien
tagtcggcaggattcgaacctgcgc

SEQ ID NO: 1693617 - DNA, 25 bp, Homo sapien
gccagccaggagtcgaacctggaat

SEQ ID NO: 1693618 - DNA, 25 bp, Homo sapien
gccaggagtcgaacctggaatcttc

SEQ ID NO: 1693619 - DNA, 25 bp, Homo sapien
gtcgaacctggaatcttctgatccg

SEQ ID NO: 1693620 - DNA, 25 bp, Homo sapien
gagccagccaggagtcgaacctgga

SEQ ID NO: 1693621 - DNA, 25 bp, Homo sapien
tccagcgatctgattttgaagaatt

SEQ ID NO: 1693622 - DNA, 25 bp, Homo sapien
caggtccagcgatctgattttgaag

SEQ ID NO: 1693623 - DNA, 25 bp, Homo sapien
agtttcaggtccagcgatctgattt

SEQ ID NO: 1693624 - DNA, 25 bp, Homo sapien
ttgaagaattatcggggtgtgaaat

SEQ ID NO: 1693625 - DNA, 25 bp, Homo sapien
tttggctctaggatcatggagttct

SEQ ID NO: 1693626 - DNA, 25 bp, Homo sapien
tcaccaagagatcattgagcggctt

SEQ ID NO: 1693627 - DNA, 25 bp, Homo sapien
tcttcactggatcttcagcatttga

SEQ ID NO: 1693628 - DNA, 25 bp, Homo sapien
tcattgagcggctttggctctagga

SEQ ID NO: 1693629 - DNA, 25 bp, Homo sapien
gagaggcaggccataagtcatctgt

SEQ ID NO: 1693630 - DNA, 25 bp, Homo sapien
tatagtgttgttagcagagtctcca

SEQ ID NO: 1693631 - DNA, 25 bp, Homo sapien
tactggtgttgatgcaggtgctgca

SEQ ID NO: 1693632 - DNA, 25 bp, Homo sapien
aagagtcagcagatccctcggtggt

SEQ ID NO: 1693633 - DNA, 25 bp, Homo sapien
ccaaaggtagagcagaagtaggtgg

SEQ ID NO: 1693634 - DNA, 25 bp, Homo sapien
caaaggtagagcagaagtaggtggc

SEQ ID NO: 1693635 - DNA, 25 bp, Homo sapien
tggaagaattagttttttgattggc

SEQ ID NO: 1693636 - DNA, 25 bp, Homo sapien
tattcccattggagaatcagagccc

SEQ ID NO: 1693637 - DNA, 25 bp, Homo sapien
cattctttctattatggcttagcct

SEQ ID NO: 1693638 - DNA, 25 bp, Homo sapien
taaagacggtcaatcaataattctc

SEQ ID NO: 1693639 - DNA, 25 bp, Homo sapien
tcagagcccacagaataaagacggt

SEQ ID NO: 1693640 - DNA, 25 bp, Homo sapien
cgctcctcccatgcgttgtagccca

SEQ ID NO: 1693641 - DNA, 25 bp, Homo sapien
ttctctgggagagtactctccctgc

SEQ ID NO: 1693642 - DNA, 25 bp, Homo sapien
actcaccactctcagcgattcagcc

SEQ ID NO: 1693643 - DNA, 25 bp, Homo sapien
gcgttgtagcccaggctctaatcaa

SEQ ID NO: 1693644 - DNA, 25 bp, Homo sapien
tggccatgtacacatggcaagtgcc

SEQ ID NO: 1693645 - DNA, 25 bp, Homo sapien
tttaggagcggctttctgagtcaga

SEQ ID NO: 1693646 - DNA, 25 bp, Homo sapien
caatgtagtagcttgtaaccatggg

SEQ ID NO: 1693647 - DNA, 25 bp, Homo sapien
taaggctgttcaatctagtaaaatc

SEQ ID NO: 1693648 - DNA, 25 bp, Homo sapien
ccactatggtagagttaggaacaca

SEQ ID NO: 1693649 - DNA, 25 bp, Homo sapien
tgatctcagtcatgggacaaaacca

SEQ ID NO: 1693650 - DNA, 25 bp, Homo sapien
ggtaaaggctctacaagtcacaagc

SEQ ID NO: 1693651 - DNA, 25 bp, Homo sapien
agaatgttcacaattggcccagcaa

SEQ ID NO: 1693652 - DNA, 25 bp, Homo sapien
tgtctgtccttgagtgtctttacct

SEQ ID NO: 1693653 - DNA, 25 bp, Homo sapien
tgtccttgagtgtctttacctttgg

SEQ ID NO: 1693654 - DNA, 25 bp, Homo sapien
tgagtgtctttacctttgggttcca

SEQ ID NO: 1693655 - DNA, 25 bp, Homo sapien
ctgtccttgagtgtctttacctttg

SEQ ID NO: 1693656 - DNA, 25 bp, Homo sapien
acttccccagggctaactcaaatat

SEQ ID NO: 1693657 - DNA, 25 bp, Homo sapien
ttccccagggctaactcaaatatgg

SEQ ID NO: 1693658 - DNA, 25 bp, Homo sapien
tccccagggctaactcaaatatggt

SEQ ID NO: 1693659 - DNA, 25 bp, Homo sapien
ccccagggctaactcaaatatggtg

SEQ ID NO: 1693660 - DNA, 25 bp, Homo sapien
agggagacatgaaagttgagcagaa

SEQ ID NO: 1693661 - DNA, 25 bp, Homo sapien
gagggagacatgaaagttgagcaga

SEQ ID NO: 1693662 - DNA, 25 bp, Homo sapien
gacatgaaagttgagcagaaggaaa

SEQ ID NO: 1693663 - DNA, 25 bp, Homo sapien
gagacatgaaagttgagcagaagga

SEQ ID NO: 1693664 - DNA, 25 bp, Homo sapien
gaacacaatcctaacagaaggacca

SEQ ID NO: 1693665 - DNA, 25 bp, Homo sapien
gatccttcaggttgggatggacttc

SEQ ID NO: 1693666 - DNA, 25 bp, Homo sapien
ccaggtatgggaatgagttaaaggt

SEQ ID NO: 1693667 - DNA, 25 bp, Homo sapien
tctcagacagggaaggcgagataca

SEQ ID NO: 1693668 - DNA, 25 bp, Homo sapien
aggatgggcccagagggtccaagca

SEQ ID NO: 1693669 - DNA, 25 bp, Homo sapien
ggcccagagggtccaagcacagaaa

SEQ ID NO: 1693670 - DNA, 25 bp, Homo sapien
tgggcccagagggtccaagcacaga

SEQ ID NO: 1693671 - DNA, 25 bp, Homo sapien
gatgggcccagagggtccaagcaca

SEQ ID NO: 1693672 - DNA, 25 bp, Homo sapien
ctgccttaggctggaacttacccac

SEQ ID NO: 1693673 - DNA, 25 bp, Homo sapien
ccacctgccttaggctggaacttac

SEQ ID NO: 1693674 - DNA, 25 bp, Homo sapien
caccacctgccttaggctggaactt

SEQ ID NO: 1693675 - DNA, 25 bp, Homo sapien
cctgccttaggctggaacttaccca

SEQ ID NO: 1693676 - DNA, 25 bp, Homo sapien
cagtgatgccatcccgcagaatcga

SEQ ID NO: 1693677 - DNA, 25 bp, Homo sapien
aagtcaccatcttggaaataacaca

SEQ ID NO: 1693678 - DNA, 25 bp, Homo sapien
gttctccctcgatacggtgcactct

SEQ ID NO: 1693679 - DNA, 25 bp, Homo sapien
cagaggctgtgacgttgtgtattcg

SEQ ID NO: 1693680 - DNA, 25 bp, Homo sapien
tgcaacacgtaagaaatacagctag

SEQ ID NO: 1693681 - DNA, 25 bp, Homo sapien
gaatctcatccagagcagagggcta

SEQ ID NO: 1693682 - DNA, 25 bp, Homo sapien
cagagggctaagtctatgaactccc

SEQ ID NO: 1693683 - DNA, 25 bp, Homo sapien
gattgattaaggctctcactcagaa

SEQ ID NO: 1693684 - DNA, 25 bp, Homo sapien
gatgatgcaggatacaccctccccg

SEQ ID NO: 1693685 - DNA, 25 bp, Homo sapien
aacccttcacttcgacgtgaagatt

SEQ ID NO: 1693686 - DNA, 25 bp, Homo sapien
ttcgacgtgaagattagaacccagt

SEQ ID NO: 1693687 - DNA, 25 bp, Homo sapien
gatgcaggatacaccctccccggag

SEQ ID NO: 1693688 - DNA, 25 bp, Homo sapien
acagctcagctcagaaaacctgagg

SEQ ID NO: 1693689 - DNA, 25 bp, Homo sapien
cagctcagaaaacctgaggccaagc

SEQ ID NO: 1693690 - DNA, 25 bp, Homo sapien
tcagaaaacctgaggccaagcaggt

SEQ ID NO: 1693691 - DNA, 25 bp, Homo sapien
tgccacagctcagctcagaaaacct

SEQ ID NO: 1693692 - DNA, 25 bp, Homo sapien
ctgcgaaggggagagctgtaggtca

SEQ ID NO: 1693693 - DNA, 25 bp, Homo sapien
tgcgaaggggagagctgtaggtcat

SEQ ID NO: 1693694 - DNA, 25 bp, Homo sapien
cacaagaagtaactggctccggcga

SEQ ID NO: 1693695 - DNA, 25 bp, Homo sapien
tccacaagaagtaactggctccggc

SEQ ID NO: 1693696 - DNA, 25 bp, Homo sapien
aagaagtaactggctccggcgagaa

SEQ ID NO: 1693697 - DNA, 25 bp, Homo sapien
acaagaagtaactggctccggcgag

SEQ ID NO: 1693698 - DNA, 25 bp, Homo sapien
tcccgctctgttgcagcatatccca

SEQ ID NO: 1693699 - DNA, 25 bp, Homo sapien
tttcccgctctgttgcagcatatcc

SEQ ID NO: 1693700 - DNA, 25 bp, Homo sapien
tatttcccgctctgttgcagcatat

SEQ ID NO: 1693701 - DNA, 25 bp, Homo sapien
atttcccgctctgttgcagcatatc

SEQ ID NO: 1693702 - DNA, 25 bp, Homo sapien
ttagattctctgcttgcgttggata

SEQ ID NO: 1693703 - DNA, 25 bp, Homo sapien
tagattctctgcttgcgttggatac

SEQ ID NO: 1693704 - DNA, 25 bp, Homo sapien
agagtcatcaaggtgctcaaagcga

SEQ ID NO: 1693705 - DNA, 25 bp, Homo sapien
ggaatgaacagggaagagtcatcaa

SEQ ID NO: 1693706 - DNA, 25 bp, Homo sapien
tcaaggtgctcaaagcgaggatagg

SEQ ID NO: 1693707 - DNA, 25 bp, Homo sapien
caaagcgaggataggaagacatgtc

SEQ ID NO: 1693708 - DNA, 25 bp, Homo sapien
gaagcagagagagagtaacagattt

SEQ ID NO: 1693709 - DNA, 25 bp, Homo sapien
ttcaaccctgggctatgacttatgg

SEQ ID NO: 1693710 - DNA, 25 bp, Homo sapien
gatccaagaccacttttcaaccctg

SEQ ID NO: 1693711 - DNA, 25 bp, Homo sapien
tgggctatgacttatgggctggaaa

SEQ ID NO: 1693712 - DNA, 25 bp, Homo sapien
aatctgtatcatttcgtaccttgct

SEQ ID NO: 1693713 - DNA, 25 bp, Homo sapien
tatgtgtatgcctaggagtacaaga

SEQ ID NO: 1693714 - DNA, 25 bp, Homo sapien
ctatatgtgtatgcctaggagtaca

SEQ ID NO: 1693715 - DNA, 25 bp, Homo sapien
tctatatgtgtatgcctaggagtac

SEQ ID NO: 1693716 - DNA, 25 bp, Homo sapien
tcaggctgacttattggtatcggac

SEQ ID NO: 1693717 - DNA, 25 bp, Homo sapien
ggtatcggacgaagactcctctcca

SEQ ID NO: 1693718 - DNA, 25 bp, Homo sapien
tattggtatcggacgaagactcctc

SEQ ID NO: 1693719 - DNA, 25 bp, Homo sapien
gacttattggtatcggacgaagact

SEQ ID NO: 1693720 - DNA, 25 bp, Homo sapien
ttctcaaaaatgtcaggcttggctc

SEQ ID NO: 1693721 - DNA, 25 bp, Homo sapien
gctctgatggatcagaggtggcacc

SEQ ID NO: 1693722 - DNA, 25 bp, Homo sapien
aaaatgtcaggcttggctccctgtg

SEQ ID NO: 1693723 - DNA, 25 bp, Homo sapien
ctcctctacagctctgatggatcag

SEQ ID NO: 1693724 - DNA, 25 bp, Homo sapien
aggcttgaagagggccatttttcca

SEQ ID NO: 1693725 - DNA, 25 bp, Homo sapien
gcttgaagagggccatttttccatt

SEQ ID NO: 1693726 - DNA, 25 bp, Homo sapien
ggcttgaagagggccatttttccat

SEQ ID NO: 1693727 - DNA, 25 bp, Homo sapien
caggcttgaagagggccatttttcc

SEQ ID NO: 1693728 - DNA, 25 bp, Homo sapien
tgatagctgcaaggccgtctctgtg

SEQ ID NO: 1693729 - DNA, 25 bp, Homo sapien
tctatggacagtgccactgggctcc

SEQ ID NO: 1693730 - DNA, 25 bp, Homo sapien
ctagcgctgtagaaggcaatcatat

SEQ ID NO: 1693731 - DNA, 25 bp, Homo sapien
taaacatatgaatctctagcgctgt

SEQ ID NO: 1693732 - DNA, 25 bp, Homo sapien
caaggtggagcctcatctgaagcat

SEQ ID NO: 1693733 - DNA, 25 bp, Homo sapien
tttaacaaggtggagcctcatctga

SEQ ID NO: 1693734 - DNA, 25 bp, Homo sapien
gagcctcatctgaagcatttcctca

SEQ ID NO: 1693735 - DNA, 25 bp, Homo sapien
ttatttaacaaggtggagcctcatc

SEQ ID NO: 1693736 - DNA, 25 bp, Homo sapien
accactcgtgagctaaatgagttcc

SEQ ID NO: 1693737 - DNA, 25 bp, Homo sapien
tttcaatcttcactcgaccactcgt

SEQ ID NO: 1693738 - DNA, 25 bp, Homo sapien
cactcgaccactcgtgagctaaatg

SEQ ID NO: 1693739 - DNA, 25 bp, Homo sapien
tcttcactcgaccactcgtgagcta

SEQ ID NO: 1693740 - DNA, 25 bp, Homo sapien
cctagcctgccctgaatgtgattct

SEQ ID NO: 1693741 - DNA, 25 bp, Homo sapien
gatttaagagccacagcatgcaagg

SEQ ID NO: 1693742 - DNA, 25 bp, Homo sapien
tgcctaacccaataccctgatgcgg

SEQ ID NO: 1693743 - DNA, 25 bp, Homo sapien
cttgggccatgctgaggaggtcctt

SEQ ID NO: 1693744 - DNA, 25 bp, Homo sapien
ctgcagagagtttgaggaggtgtcc

SEQ ID NO: 1693745 - DNA, 25 bp, Homo sapien
tggggctcctcagcacgctgtacac

SEQ ID NO: 1693746 - DNA, 25 bp, Homo sapien
tgtctctctgacatgaagctttcac

SEQ ID NO: 1693747 - DNA, 25 bp, Homo sapien
tcccagtagtgtctctctgacatga

SEQ ID NO: 1693748 - DNA, 25 bp, Homo sapien
gttgtctggtaggtcatggggctcc

SEQ ID NO: 1693749 - DNA, 25 bp, Homo sapien
ctctacttttggtattgggcaaacg

SEQ ID NO: 1693750 - DNA, 25 bp, Homo sapien
cagggaatgatcaggcactaggtcg

SEQ ID NO: 1693751 - DNA, 25 bp, Homo sapien
tgtagatatgagatccatccgtggc

SEQ ID NO: 1693752 - DNA, 25 bp, Homo sapien
tccgtggcattgtagaacgagatat

SEQ ID NO: 1693753 - DNA, 25 bp, Homo sapien
tggagggtgagacccttagctccag

SEQ ID NO: 1693754 - DNA, 25 bp, Homo sapien
tgtggagggtgagacccttagctcc

SEQ ID NO: 1693755 - DNA, 25 bp, Homo sapien
ttgtggagggtgagacccttagctc

SEQ ID NO: 1693756 - DNA, 25 bp, Homo sapien
ctgttgtggagggtgagacccttag

SEQ ID NO: 1693757 - DNA, 25 bp, Homo sapien
tgtgggaactgcaacgttattctct

SEQ ID NO: 1693758 - DNA, 25 bp, Homo sapien
tgctgggtctaaggctctgataatc

SEQ ID NO: 1693759 - DNA, 25 bp, Homo sapien
catctgtgccccattattaactgag

SEQ ID NO: 1693760 - DNA, 25 bp, Homo sapien
cagtgatctcgatcctggagctgtc

SEQ ID NO: 1693761 - DNA, 25 bp, Homo sapien
caactagaacttgacaagcacttgc

SEQ ID NO: 1693762 - DNA, 25 bp, Homo sapien
acaactagaacttgacaagcacttg

SEQ ID NO: 1693763 - DNA, 25 bp, Homo sapien
aacaactagaacttgacaagcactt

SEQ ID NO: 1693764 - DNA, 25 bp, Homo sapien
gaacaactagaacttgacaagcact

SEQ ID NO: 1693765 - DNA, 25 bp, Homo sapien
tttggagttgcggactcggtatctg

SEQ ID NO: 1693766 - DNA, 25 bp, Homo sapien
ggactcggtatctgggacctgttct

SEQ ID NO: 1693767 - DNA, 25 bp, Homo sapien
cctattaatcgcgatgtttggagtt

SEQ ID NO: 1693768 - DNA, 25 bp, Homo sapien
tcgcgatgtttggagttgcggactc

SEQ ID NO: 1693769 - DNA, 25 bp, Homo sapien
accaccagacaacaaagcatcccaa

SEQ ID NO: 1693770 - DNA, 25 bp, Homo sapien
gtcaccaccagacaacaaagcatcc

SEQ ID NO: 1693771 - DNA, 25 bp, Homo sapien
cagacaacaaagcatcccaaagaga

SEQ ID NO: 1693772 - DNA, 25 bp, Homo sapien
caccagacaacaaagcatcccaaag

SEQ ID NO: 1693773 - DNA, 25 bp, Homo sapien
ccctctgatcctcacatgacgattt

SEQ ID NO: 1693774 - DNA, 25 bp, Homo sapien
gatcctcacatgacgattttccgat

SEQ ID NO: 1693775 - DNA, 25 bp, Homo sapien
cctcacatgacgattttccgataca

SEQ ID NO: 1693776 - DNA, 25 bp, Homo sapien
catgacgattttccgatacaactca

SEQ ID NO: 1693777 - DNA, 25 bp, Homo sapien
taagtaagccatcaatgcagagatc

SEQ ID NO: 1693778 - DNA, 25 bp, Homo sapien
actcaagtaggtctcatcggtgccc

SEQ ID NO: 1693779 - DNA, 25 bp, Homo sapien
gggagtcgcttgcatctcaaggctc

SEQ ID NO: 1693780 - DNA, 25 bp, Homo sapien
tatctccgaaagagggattccgtaa

SEQ ID NO: 1693781 - DNA, 25 bp, Homo sapien
gcacccagggcaggcagagaccaga

SEQ ID NO: 1693782 - DNA, 25 bp, Homo sapien
gagcacccagggcaggcagagacca

SEQ ID NO: 1693783 - DNA, 25 bp, Homo sapien
acccagggcaggcagagaccagagg

SEQ ID NO: 1693784 - DNA, 25 bp, Homo sapien
cccagggcaggcagagaccagaggc

SEQ ID NO: 1693785 - DNA, 25 bp, Homo sapien
gaccagtgcacacaggctgagaagg

SEQ ID NO: 1693786 - DNA, 25 bp, Homo sapien
aggctggcagggagaagtgcagagc

SEQ ID NO: 1693787 - DNA, 25 bp, Homo sapien
gagaccagtgcacacaggctgagaa

SEQ ID NO: 1693788 - DNA, 25 bp, Homo sapien
ctgagaccagtgcacacaggctgag

SEQ ID NO: 1693789 - DNA, 25 bp, Homo sapien
caggatgggattagctggccccacg

SEQ ID NO: 1693790 - DNA, 25 bp, Homo sapien
ggatgggattagctggccccacgac

SEQ ID NO: 1693791 - DNA, 25 bp, Homo sapien
atgggattagctggccccacgacag

SEQ ID NO: 1693792 - DNA, 25 bp, Homo sapien
gattagctggccccacgacagtaaa

SEQ ID NO: 1693793 - DNA, 25 bp, Homo sapien
gacagatggcagcgtaatgtagtgt

SEQ ID NO: 1693794 - DNA, 25 bp, Homo sapien
tgacagatggcagcgtaatgtagtg

SEQ ID NO: 1693795 - DNA, 25 bp, Homo sapien
ggtgacagatggcagcgtaatgtag

SEQ ID NO: 1693796 - DNA, 25 bp, Homo sapien
gtgacagatggcagcgtaatgtagt

SEQ ID NO: 1693797 - DNA, 25 bp, Homo sapien
tgcgggggagaactgagaccggaac

SEQ ID NO: 1693798 - DNA, 25 bp, Homo sapien
tgagaccggaaccaccgcacctcca

SEQ ID NO: 1693799 - DNA, 25 bp, Homo sapien
ctgcgggggagaactgagaccggaa

SEQ ID NO: 1693800 - DNA, 25 bp, Homo sapien
agaactgagaccggaaccaccgcac

SEQ ID NO: 1693801 - DNA, 25 bp, Homo sapien
ctgctcctctgttctctctctccca

SEQ ID NO: 1693802 - DNA, 25 bp, Homo sapien
gctcctctgttctctctctcccacc

SEQ ID NO: 1693803 - DNA, 25 bp, Homo sapien
tgctcctctgttctctctctcccac

SEQ ID NO: 1693804 - DNA, 25 bp, Homo sapien
caccacgaggcgtaggatggcctca

SEQ ID NO: 1693805 - DNA, 25 bp, Homo sapien
acagcggtagatcccattctcctgg

SEQ ID NO: 1693806 - DNA, 25 bp, Homo sapien
cacgaggcgtaggatggcctcatcg

SEQ ID NO: 1693807 - DNA, 25 bp, Homo sapien
ttggaagtaacagcggtagatccca

SEQ ID NO: 1693808 - DNA, 25 bp, Homo sapien
tagaaatatctggatgcccctggga

SEQ ID NO: 1693809 - DNA, 25 bp, Homo sapien
tagacagaactagctggcaaagcca

SEQ ID NO: 1693810 - DNA, 25 bp, Homo sapien
ttcacagttgtttacctcccagagg

SEQ ID NO: 1693811 - DNA, 25 bp, Homo sapien
gacacttctgtctagttcagggcct

SEQ ID NO: 1693812 - DNA, 25 bp, Homo sapien
gcatcagcgatggaaacctccttca

SEQ ID NO: 1693813 - DNA, 25 bp, Homo sapien
cagatatgcactccagccagatgct

SEQ ID NO: 1693814 - DNA, 25 bp, Homo sapien
tgaccatgaagaggccgtcagcatc

SEQ ID NO: 1693815 - DNA, 25 bp, Homo sapien
ttgatttcaatgaggggcttagacc

SEQ ID NO: 1693816 - DNA, 25 bp, Homo sapien
gtttccttctcctggccgagcaggg

SEQ ID NO: 1693817 - DNA, 25 bp, Homo sapien
tctttgaatctccctttgtgaggag

SEQ ID NO: 1693818 - DNA, 25 bp, Homo sapien
gaggggagacgtctcaactcagctg

SEQ ID NO: 1693819 - DNA, 25 bp, Homo sapien
gagaagaggctcctactcttgtgtt

SEQ ID NO: 1693820 - DNA, 25 bp, Homo sapien
gaggatcctgcatacacttgatagg

SEQ ID NO: 1693821 - DNA, 25 bp, Homo sapien
tcacacccctggaactctctatttt

SEQ ID NO: 1693822 - DNA, 25 bp, Homo sapien
ctacatgctcgtcaccatgtgatag

SEQ ID NO: 1693823 - DNA, 25 bp, Homo sapien
cttgttaataattctgatgcctcac

SEQ ID NO: 1693824 - DNA, 25 bp, Homo sapien
ccttaagcatctgatggttccttgt

SEQ ID NO: 1693825 - DNA, 25 bp, Homo sapien
caggatgacagtcatggacaccatc

SEQ ID NO: 1693826 - DNA, 25 bp, Homo sapien
ccatccagggagatgcggtcaggat

SEQ ID NO: 1693827 - DNA, 25 bp, Homo sapien
tgaagtttcttgatgcaacagatgc

SEQ ID NO: 1693828 - DNA, 25 bp, Homo sapien
cagatgctgacagccatgaagatga

SEQ ID NO: 1693829 - DNA, 25 bp, Homo sapien
tatgcctaaggaacagtcagaaacc

SEQ ID NO: 1693830 - DNA, 25 bp, Homo sapien
tatgacatgagagttccaagccctt

SEQ ID NO: 1693831 - DNA, 25 bp, Homo sapien
tccctaagccggtacctgtgagagc

SEQ ID NO: 1693832 - DNA, 25 bp, Homo sapien
cagatggctgggtagtatcagtaca

SEQ ID NO: 1693833 - DNA, 25 bp, Homo sapien
gacactgctaagtaagcagaacaca

SEQ ID NO: 1693834 - DNA, 25 bp, Homo sapien
gaggtgaatgtcacgagacactgct

SEQ ID NO: 1693835 - DNA, 25 bp, Homo sapien
agacagaggtgaatgtcacgagaca

SEQ ID NO: 1693836 - DNA, 25 bp, Homo sapien
tgaatgtcacgagacactgctaagt

SEQ ID NO: 1693837 - DNA, 25 bp, Homo sapien
taaggagtcctgttagctggctagt

SEQ ID NO: 1693838 - DNA, 25 bp, Homo sapien
aaggagtcctgttagctggctagtg

SEQ ID NO: 1693839 - DNA, 25 bp, Homo sapien
ctaaggagtcctgttagctggctag

SEQ ID NO: 1693840 - DNA, 25 bp, Homo sapien
taccctgagaattacggaagctgca

SEQ ID NO: 1693841 - DNA, 25 bp, Homo sapien
cattgctgggacaccgttgatgaac

SEQ ID NO: 1693842 - DNA, 25 bp, Homo sapien
tgcacagtctataccattcccagga

SEQ ID NO: 1693843 - DNA, 25 bp, Homo sapien
catgggccctggtatctggtaaagt

SEQ ID NO: 1693844 - DNA, 25 bp, Homo sapien
ctgcagaggaagtctcaggtttatg

SEQ ID NO: 1693845 - DNA, 25 bp, Homo sapien
tgcagaggaagtctcaggtttatgc

SEQ ID NO: 1693846 - DNA, 25 bp, Homo sapien
catgtgtagatgtgcgatctgtccc

SEQ ID NO: 1693847 - DNA, 25 bp, Homo sapien
ggctgactgtcgaatctctctgggt

SEQ ID NO: 1693848 - DNA, 25 bp, Homo sapien
gatctgtccctcatgttgtagaagg

SEQ ID NO: 1693849 - DNA, 25 bp, Homo sapien
gaggaatcagcaggacctccccttt

SEQ ID NO: 1693850 - DNA, 25 bp, Homo sapien
tttcaggccctcttcaggcaccatg

SEQ ID NO: 1693851 - DNA, 25 bp, Homo sapien
tcaggccctcttcaggcaccatgac

SEQ ID NO: 1693852 - DNA, 25 bp, Homo sapien
tctgtgaagtttcaggccctcttca

SEQ ID NO: 1693853 - DNA, 25 bp, Homo sapien
tgtgaagtttcaggccctcttcagg

SEQ ID NO: 1693854 - DNA, 25 bp, Homo sapien
tttgactgggagctatgaaacaact

SEQ ID NO: 1693855 - DNA, 25 bp, Homo sapien
taaacagtaggttcgctgcccaaca

SEQ ID NO: 1693856 - DNA, 25 bp, Homo sapien
tatctgcatggctgtgagtccaagg

SEQ ID NO: 1693857 - DNA, 25 bp, Homo sapien
tgagccaaaccacatccacatgagt

SEQ ID NO: 1693858 - DNA, 25 bp, Homo sapien
aagctctttaaagtcctcaataact

SEQ ID NO: 1693859 - DNA, 25 bp, Homo sapien
acacaatagattgctttttcacaaa

SEQ ID NO: 1693860 - DNA, 25 bp, Homo sapien
cctatctacattaacctataactga

SEQ ID NO: 1693861 - DNA, 25 bp, Homo sapien
ggtgtccccattgaacctgaatgct

SEQ ID NO: 1693862 - DNA, 25 bp, Homo sapien
tcttattaagccagacatgagatct

SEQ ID NO: 1693863 - DNA, 25 bp, Homo sapien
tttgggattcctagagagaactctg

SEQ ID NO: 1693864 - DNA, 25 bp, Homo sapien
tctgatgtactcttaaggagtcccc

SEQ ID NO: 1693865 - DNA, 25 bp, Homo sapien
taacttccaggatccactattctag

SEQ ID NO: 1693866 - DNA, 25 bp, Homo sapien
ctcctggtacaagtcctgaagttca

SEQ ID NO: 1693867 - DNA, 25 bp, Homo sapien
taggcatagatatagatgcacatac

SEQ ID NO: 1693868 - DNA, 25 bp, Homo sapien
tatggaggctaagaaatcgcacaac

SEQ ID NO: 1693869 - DNA, 25 bp, Homo sapien
gttgtattgggcacccagccaacag

SEQ ID NO: 1693870 - DNA, 25 bp, Homo sapien
gggtcatcgtgaggaataataacaa

SEQ ID NO: 1693871 - DNA, 25 bp, Homo sapien
cgggtcatcgtgaggaataataaca

SEQ ID NO: 1693872 - DNA, 25 bp, Homo sapien
tgtcgggtcatcgtgaggaataata

SEQ ID NO: 1693873 - DNA, 25 bp, Homo sapien
tcgggtcatcgtgaggaataataac

SEQ ID NO: 1693874 - DNA, 25 bp, Homo sapien
agaagaaaggcagttaatagttctc

SEQ ID NO: 1693875 - DNA, 25 bp, Homo sapien
ctttctactatggttaaatctcctt

SEQ ID NO: 1693876 - DNA, 25 bp, Homo sapien
tccattctttctactatggttaaat

SEQ ID NO: 1693877 - DNA, 25 bp, Homo sapien
tctgaaaatcacagcccacagaaga

SEQ ID NO: 1693878 - DNA, 25 bp, Homo sapien
agctatagaattccaaatggaaacc

SEQ ID NO: 1693879 - DNA, 25 bp, Homo sapien
gaagctatagaattccaaatggaaa

SEQ ID NO: 1693880 - DNA, 25 bp, Homo sapien
aagctatagaattccaaatggaaac

SEQ ID NO: 1693881 - DNA, 25 bp, Homo sapien
agtgaggcatgagcagctgaagcaa

SEQ ID NO: 1693882 - DNA, 25 bp, Homo sapien
tgaggcatgagcagctgaagcaaaa

SEQ ID NO: 1693883 - DNA, 25 bp, Homo sapien
gtgaggcatgagcagctgaagcaaa

SEQ ID NO: 1693884 - DNA, 25 bp, Homo sapien
tctgcactcatggtcgggaacaggt

SEQ ID NO: 1693885 - DNA, 25 bp, Homo sapien
cagaggctgtgacgttgtgtattcg

SEQ ID NO: 1693886 - DNA, 25 bp, Homo sapien
cagtgatgccatcccgcagaatcga

SEQ ID NO: 1693887 - DNA, 25 bp, Homo sapien
cgttcaccacctgccttaggctgga

SEQ ID NO: 1693888 - DNA, 25 bp, Homo sapien
gtggaaggatgaattagcctaaatt

SEQ ID NO: 1693889 - DNA, 25 bp, Homo sapien
tgtggaaggatgaattagcctaaat

SEQ ID NO: 1693890 - DNA, 25 bp, Homo sapien
ctgtggaaggatgaattagcctaaa

SEQ ID NO: 1693891 - DNA, 25 bp, Homo sapien
tccttgtaacccttcacatcaacgt

SEQ ID NO: 1693892 - DNA, 25 bp, Homo sapien
catcaacgtgaagatcagaacccag

SEQ ID NO: 1693893 - DNA, 25 bp, Homo sapien
tccaggccgaggagggaacttctga

SEQ ID NO: 1693894 - DNA, 25 bp, Homo sapien
tgctactgcatacaggcccactccg

SEQ ID NO: 1693895 - DNA, 25 bp, Homo sapien
aatgtttgcgtcatgaacagcttta

SEQ ID NO: 1693896 - DNA, 25 bp, Homo sapien
agacccaggttgactgcagacacta

SEQ ID NO: 1693897 - DNA, 25 bp, Homo sapien
gctttgggccttatattcagtgcag

SEQ ID NO: 1693898 - DNA, 25 bp, Homo sapien
caattactgttatacttctggcaga

SEQ ID NO: 1693899 - DNA, 25 bp, Homo sapien
taaagtgcctgacacctagtgagtg

SEQ ID NO: 1693900 - DNA, 25 bp, Homo sapien
caaccttgtgcagtcataatcagtg

SEQ ID NO: 1693901 - DNA, 25 bp, Homo sapien
cagaagcggaattttggatcactaa

SEQ ID NO: 1693902 - DNA, 25 bp, Homo sapien
caagtcatcccagcagatgcctagg

SEQ ID NO: 1693903 - DNA, 25 bp, Homo sapien
taaaaagtcacgtaagtctcccatc

SEQ ID NO: 1693904 - DNA, 25 bp, Homo sapien
tgtcaatgctggctcctttaggtga

SEQ ID NO: 1693905 - DNA, 25 bp, Homo sapien
tgcagtgtgactttagactaattac

SEQ ID NO: 1693906 - DNA, 25 bp, Homo sapien
taagaacaggaactttggagctgga

SEQ ID NO: 1693907 - DNA, 25 bp, Homo sapien
agtgttagctgctcaccccaggtca

SEQ ID NO: 1693908 - DNA, 25 bp, Homo sapien
ccaagtgttagctgctcaccccagg

SEQ ID NO: 1693909 - DNA, 25 bp, Homo sapien
atgggggccggtgcactcagcctcc

SEQ ID NO: 1693910 - DNA, 25 bp, Homo sapien
ctgtgaaggcaacggctgtgggtca

SEQ ID NO: 1693911 - DNA, 25 bp, Homo sapien
cctgccagggcggcgatccacctct

SEQ ID NO: 1693912 - DNA, 25 bp, Homo sapien
tgccagggcggcgatccacctctgg

SEQ ID NO: 1693913 - DNA, 25 bp, Homo sapien
ccagggcggcgatccacctctgggc

SEQ ID NO: 1693914 - DNA, 25 bp, Homo sapien
tgccacaggaagtaaccggctcccc

SEQ ID NO: 1693915 - DNA, 25 bp, Homo sapien
tgcatcaaggcgcataaagcaggga

SEQ ID NO: 1693916 - DNA, 25 bp, Homo sapien
catcaaggcgcataaagcagggaca

SEQ ID NO: 1693917 - DNA, 25 bp, Homo sapien
aaggcgcataaagcagggacaggaa

SEQ ID NO: 1693918 - DNA, 25 bp, Homo sapien
gaagatgcatcaaggcgcataaagc

SEQ ID NO: 1693919 - DNA, 25 bp, Homo sapien
gagatgcatactggatacttctcca

SEQ ID NO: 1693920 - DNA, 25 bp, Homo sapien
agatgcatactggatacttctccat

SEQ ID NO: 1693921 - DNA, 25 bp, Homo sapien
gatgcatactggatacttctccatc

SEQ ID NO: 1693922 - DNA, 25 bp, Homo sapien
gtggaaactattcaagcacagacag

SEQ ID NO: 1693923 - DNA, 25 bp, Homo sapien
caatgactaggaattggcacatcta

SEQ ID NO: 1693924 - DNA, 25 bp, Homo sapien
caaagggatctaagaccacttccca

SEQ ID NO: 1693925 - DNA, 25 bp, Homo sapien
aagagttaagagtggaaactattca

SEQ ID NO: 1693926 - DNA, 25 bp, Homo sapien
attataggctgaatgtctctctccc

SEQ ID NO: 1693927 - DNA, 25 bp, Homo sapien
cattataggctgaatgtctctctcc

SEQ ID NO: 1693928 - DNA, 25 bp, Homo sapien
ttataggctgaatgtctctctcccc

SEQ ID NO: 1693929 - DNA, 25 bp, Homo sapien
caggcttgaagagggcctttttcca

SEQ ID NO: 1693930 - DNA, 25 bp, Homo sapien
aggcttgaagagggcctttttccat

SEQ ID NO: 1693931 - DNA, 25 bp, Homo sapien
ttatttaacaaagtggagcctcatc

SEQ ID NO: 1693932 - DNA, 25 bp, Homo sapien
gagcctcatctgaagcatttcctca

SEQ ID NO: 1693933 - DNA, 25 bp, Homo sapien
taacaaagtggagcctcatctgaag

SEQ ID NO: 1693934 - DNA, 25 bp, Homo sapien
agtggagcctcatctgaagcatttc

SEQ ID NO: 1693935 - DNA, 25 bp, Homo sapien
tcacgctggacaaatagtcagggcc

SEQ ID NO: 1693936 - DNA, 25 bp, Homo sapien
tctgaaaacaggatatagagcctca

SEQ ID NO: 1693937 - DNA, 25 bp, Homo sapien
tgatatgaagctctcacagccgaga

SEQ ID NO: 1693938 - DNA, 25 bp, Homo sapien
tatgaatatgcgatccatccacagc

SEQ ID NO: 1693939 - DNA, 25 bp, Homo sapien
caaatcacgtgtcatgtgggtacgg

SEQ ID NO: 1693940 - DNA, 25 bp, Homo sapien
tcggtcagaattggaggaactctct

SEQ ID NO: 1693941 - DNA, 25 bp, Homo sapien
tctagggaatgatcagcactcggtc

SEQ ID NO: 1693942 - DNA, 25 bp, Homo sapien
tacagtgatccttatcctggagcca

SEQ ID NO: 1693943 - DNA, 25 bp, Homo sapien
cgcgatatgtgaagttgtgggaccc

SEQ ID NO: 1693944 - DNA, 25 bp, Homo sapien
gggcacaggcactactagtcacaaa

SEQ ID NO: 1693945 - DNA, 25 bp, Homo sapien
tgtgggacccgggatcagattctct

SEQ ID NO: 1693946 - DNA, 25 bp, Homo sapien
tgcctcccacttactcgcgatatgt

SEQ ID NO: 1693947 - DNA, 25 bp, Homo sapien
cccagagcaggcagggacaggaggc

SEQ ID NO: 1693948 - DNA, 25 bp, Homo sapien
gagcacccagagcaggcagggacag

SEQ ID NO: 1693949 - DNA, 25 bp, Homo sapien
gcacccagagcaggcagggacagga

SEQ ID NO: 1693950 - DNA, 25 bp, Homo sapien
acccagagcaggcagggacaggagg

SEQ ID NO: 1693951 - DNA, 25 bp, Homo sapien
gctggccgggagaagtgcagggcag

SEQ ID NO: 1693952 - DNA, 25 bp, Homo sapien
ggccgggagaagtgcagggcagcag

SEQ ID NO: 1693953 - DNA, 25 bp, Homo sapien
aggctggccgggagaagtgcagggc

SEQ ID NO: 1693954 - DNA, 25 bp, Homo sapien
ctgagaccagtgcacacaggctgag

SEQ ID NO: 1693955 - DNA, 25 bp, Homo sapien
acagcagcaagtggcacacatccct

SEQ ID NO: 1693956 - DNA, 25 bp, Homo sapien
gataagtcaacaactccacagtcct

SEQ ID NO: 1693957 - DNA, 25 bp, Homo sapien
gatcctttctgataggtgacagcag

SEQ ID NO: 1693958 - DNA, 25 bp, Homo sapien
tctttgcctttgcagactacagggt

SEQ ID NO: 1693959 - DNA, 25 bp, Homo sapien
cgttatcctcggctgtgacattgtg

SEQ ID NO: 1693960 - DNA, 25 bp, Homo sapien
cagcattttcctcgggtgacagaca

SEQ ID NO: 1693961 - DNA, 25 bp, Homo sapien
tgacagacagcatcgtaacgtagtg

SEQ ID NO: 1693962 - DNA, 25 bp, Homo sapien
gacattgtgtatgatcagggccacg

SEQ ID NO: 1693963 - DNA, 25 bp, Homo sapien
gctaaggcaggcataggacttctct

SEQ ID NO: 1693964 - DNA, 25 bp, Homo sapien
gcagggcaaactcactcatggtggc

SEQ ID NO: 1693965 - DNA, 25 bp, Homo sapien
tctcaagaagtcaagcccacggctt

SEQ ID NO: 1693966 - DNA, 25 bp, Homo sapien
caaatatcgtagttctctgggcagt

SEQ ID NO: 1693967 - DNA, 25 bp, Homo sapien
tcattgatagagcaggacacgttcc

SEQ ID NO: 1693968 - DNA, 25 bp, Homo sapien
ctctcatttcaatgacgggctcaga

SEQ ID NO: 1693969 - DNA, 25 bp, Homo sapien
ttcaatgacgggctcagagtccagt

SEQ ID NO: 1693970 - DNA, 25 bp, Homo sapien
catgaagaggctgtctgcgtcaggg

SEQ ID NO: 1693971 - DNA, 25 bp, Homo sapien
catggagacctgctgggcataaagg

SEQ ID NO: 1693972 - DNA, 25 bp, Homo sapien
atcatgataacaggcaggatcacca

SEQ ID NO: 1693973 - DNA, 25 bp, Homo sapien
gcaatgggtatcatcagaataatca

SEQ ID NO: 1693974 - DNA, 25 bp, Homo sapien
cacatggagacctgctgggcataaa

SEQ ID NO: 1693975 - DNA, 25 bp, Homo sapien
ccagttcctttagtgcagtttcttt

SEQ ID NO: 1693976 - DNA, 25 bp, Homo sapien
tccagttcctttagtgcagtttctt

SEQ ID NO: 1693977 - DNA, 25 bp, Homo sapien
gcagaacacaaattgtacatggagt

SEQ ID NO: 1693978 - DNA, 25 bp, Homo sapien
agaacacaaattgtacatggagtag

SEQ ID NO: 1693979 - DNA, 25 bp, Homo sapien
aggctaaacgtatgcaattcttcag

SEQ ID NO: 1693980 - DNA, 25 bp, Homo sapien
aaggctaaacgtatgcaattcttca

SEQ ID NO: 1693981 - DNA, 25 bp, Homo sapien
gacagaggttgaatgtcatgagatg

SEQ ID NO: 1693982 - DNA, 25 bp, Homo sapien
cagacagaggttgaatgtcatgaga

SEQ ID NO: 1693983 - DNA, 25 bp, Homo sapien
gggacagacagaggttgaatgtcat

SEQ ID NO: 1693984 - DNA, 25 bp, Homo sapien
gacagacagaggttgaatgtcatga

SEQ ID NO: 1693985 - DNA, 25 bp, Homo sapien
agcatgtaagaatgttcttctccat

SEQ ID NO: 1693986 - DNA, 25 bp, Homo sapien
cagcatgtaagaatgttcttctcca

SEQ ID NO: 1693987 - DNA, 25 bp, Homo sapien
gcatgtaagaatgttcttctccatc

SEQ ID NO: 1693988 - DNA, 25 bp, Homo sapien
tgttccttttaccagatgacaactg

SEQ ID NO: 1693989 - DNA, 25 bp, Homo sapien
ctgtcctggaggataaagggtttct

SEQ ID NO: 1693990 - DNA, 25 bp, Homo sapien
gatttaaatgactgacgagggcacc

SEQ ID NO: 1693991 - DNA, 25 bp, Homo sapien
taagcagcaccctcaggttgagaag

SEQ ID NO: 1693992 - DNA, 25 bp, Homo sapien
ggaactctgtgtggttcctggtgcc

SEQ ID NO: 1693993 - DNA, 25 bp, Homo sapien
tcaggaactctgtgtggttcctggt

SEQ ID NO: 1693994 - DNA, 25 bp, Homo sapien
ctcaggaactctgtgtggttcctgg

SEQ ID NO: 1693995 - DNA, 25 bp, Homo sapien
aggaactctgtgtggttcctggtgc

SEQ ID NO: 1693996 - DNA, 25 bp, Homo sapien
gaatccacttaagggaggtcagggc

SEQ ID NO: 1693997 - DNA, 25 bp, Homo sapien
gacacgaagagatagggatgaccag

SEQ ID NO: 1693998 - DNA, 25 bp, Homo sapien
ttgcccggaatgctctccctggagg

SEQ ID NO: 1693999 - DNA, 25 bp, Homo sapien
tctgaggaagtagtgggacctccca

SEQ ID NO: 1694000 - DNA, 25 bp, Homo sapien
cagattaagatttggctgtcataag

SEQ ID NO: 1694001 - DNA, 25 bp, Homo sapien
ttaagatttggctgtcataagaccc

SEQ ID NO: 1694002 - DNA, 25 bp, Homo sapien
tggctgtcataagaccctaagctga

SEQ ID NO: 1694003 - DNA, 25 bp, Homo sapien
cagagcagattaagatttggctgtc

SEQ ID NO: 1694004 - DNA, 25 bp, Homo sapien
ccatggctgtgagactggggaactg

SEQ ID NO: 1694005 - DNA, 25 bp, Homo sapien
ttccaccagaggcattgtgcagtgg

SEQ ID NO: 1694006 - DNA, 25 bp, Homo sapien
agttccctatgcctggattccatcc

SEQ ID NO: 1694007 - DNA, 25 bp, Homo sapien
caactagttccctatgcctggattc

SEQ ID NO: 1694008 - DNA, 25 bp, Homo sapien
acaactagttccctatgcctggatt

SEQ ID NO: 1694009 - DNA, 25 bp, Homo sapien
actagttccctatgcctggattcca

SEQ ID NO: 1694010 - DNA, 25 bp, Homo sapien
tccttgtttattgcagggacacgtg

SEQ ID NO: 1694011 - DNA, 25 bp, Homo sapien
gccaactggcatactgggttcaatg

SEQ ID NO: 1694012 - DNA, 25 bp, Homo sapien
ttgaatgctgatgtagaccttgtcc

SEQ ID NO: 1694013 - DNA, 25 bp, Homo sapien
tcaaggccctcagtagttattaagt

SEQ ID NO: 1694014 - DNA, 25 bp, Homo sapien
actagggaagccgattgtgtaaatc

SEQ ID NO: 1694015 - DNA, 25 bp, Homo sapien
gagaaatcccatgacagctcgtctg

SEQ ID NO: 1694016 - DNA, 25 bp, Homo sapien
cagggcttcctggtacaagtcccaa

SEQ ID NO: 1694017 - DNA, 25 bp, Homo sapien
tcccaaagttcaaaggcccgagagc

SEQ ID NO: 1694018 - DNA, 25 bp, Homo sapien
aaagacagacgttcctaaagcagcc

SEQ ID NO: 1694019 - DNA, 25 bp, Homo sapien
agaggcctccccttcggaacacatt

SEQ ID NO: 1694020 - DNA, 25 bp, Homo sapien
tgggagcgcaacgggagaccgggac

SEQ ID NO: 1694021 - DNA, 25 bp, Homo sapien
catttcagaggcctccccttcggaa

SEQ ID NO: 1694022 - DNA, 25 bp, Homo sapien
catctccacggggatctctagtaag

SEQ ID NO: 1694023 - DNA, 25 bp, Homo sapien
gcctggactgcacattaattgttat

SEQ ID NO: 1694024 - DNA, 25 bp, Homo sapien
tattgacctgcctactctgcatctc

SEQ ID NO: 1694025 - DNA, 25 bp, Homo sapien
ggcatgcacatttattattgacctg

SEQ ID NO: 1694026 - DNA, 25 bp, Homo sapien
aagaatggtggttaatagttctcca

SEQ ID NO: 1694027 - DNA, 25 bp, Homo sapien
tcacagcccactgaagaatggtggt

SEQ ID NO: 1694028 - DNA, 25 bp, Homo sapien
tgagtctctcattccgaagaaagga

SEQ ID NO: 1694029 - DNA, 25 bp, Homo sapien
cattctttctattatggttgagtct

SEQ ID NO: 1694030 - DNA, 25 bp, Homo sapien
ctgagtctgggaatggcctctgaga

SEQ ID NO: 1694031 - DNA, 25 bp, Homo sapien
gagtctgggaatggcctctgagaac

SEQ ID NO: 1694032 - DNA, 25 bp, Homo sapien
tctgggaatggcctctgagaacaag

SEQ ID NO: 1694033 - DNA, 25 bp, Homo sapien
tgggaatggcctctgagaacaaggt

SEQ ID NO: 1694034 - DNA, 25 bp, Homo sapien
tgtctgtccttgagtgtctttacct

SEQ ID NO: 1694035 - DNA, 25 bp, Homo sapien
tgagtgtctttacctttgggttcca

SEQ ID NO: 1694036 - DNA, 25 bp, Homo sapien
ctgtccttgagtgtctttacctttg

SEQ ID NO: 1694037 - DNA, 25 bp, Homo sapien
tgtccttgagtgtctttacctttgg

SEQ ID NO: 1694038 - DNA, 25 bp, Homo sapien
gtgtgggacagacactatggcctgg

SEQ ID NO: 1694039 - DNA, 25 bp, Homo sapien
tgtgggacagacactatggcctgga

SEQ ID NO: 1694040 - DNA, 25 bp, Homo sapien
aggtgtgggacagacactatggcct

SEQ ID NO: 1694041 - DNA, 25 bp, Homo sapien
aaggtgtgggacagacactatggcc

SEQ ID NO: 1694042 - DNA, 25 bp, Homo sapien
agggagacatgaaagttgagcagaa

SEQ ID NO: 1694043 - DNA, 25 bp, Homo sapien
gagggagacatgaaagttgagcaga

SEQ ID NO: 1694044 - DNA, 25 bp, Homo sapien
gacatgaaagttgagcagaaggaaa

SEQ ID NO: 1694045 - DNA, 25 bp, Homo sapien
gagacatgaaagttgagcagaagga

SEQ ID NO: 1694046 - DNA, 25 bp, Homo sapien
aggatgggcccagagggtccaagca

SEQ ID NO: 1694047 - DNA, 25 bp, Homo sapien
tgggcccagagggtccaagcacaga

SEQ ID NO: 1694048 - DNA, 25 bp, Homo sapien
ggcccagagggtccaagcacagaaa

SEQ ID NO: 1694049 - DNA, 25 bp, Homo sapien
gatgggcccagagggtccaagcaca

SEQ ID NO: 1694050 - DNA, 25 bp, Homo sapien
ggcagatcagcgtcttcacccacca

SEQ ID NO: 1694051 - DNA, 25 bp, Homo sapien
ggaacaggtgacagggcagatcagc

SEQ ID NO: 1694052 - DNA, 25 bp, Homo sapien
acaggtgacagggcagatcagcgtc

SEQ ID NO: 1694053 - DNA, 25 bp, Homo sapien
gcagatcagcgtcttcacccaccat

SEQ ID NO: 1694054 - DNA, 25 bp, Homo sapien
cgttcaccacctgccttaggctgga

SEQ ID NO: 1694055 - DNA, 25 bp, Homo sapien
gttctccctcgatacggtgcactct

SEQ ID NO: 1694056 - DNA, 25 bp, Homo sapien
cagaggctgtgacgttgtgtattcg

SEQ ID NO: 1694057 - DNA, 25 bp, Homo sapien
cagtgatgccatcccgcagaatcga

SEQ ID NO: 1694058 - DNA, 25 bp, Homo sapien
tctcccttggtgtcgctccacttta

SEQ ID NO: 1694059 - DNA, 25 bp, Homo sapien
gatgcaggatacacccccaccagag

SEQ ID NO: 1694060 - DNA, 25 bp, Homo sapien
ttggtgtcgctccactttatttggg

SEQ ID NO: 1694061 - DNA, 25 bp, Homo sapien
gatgatgcaggatacacccccacca

SEQ ID NO: 1694062 - DNA, 25 bp, Homo sapien
taaagcagtgagtagccttcaggtc

SEQ ID NO: 1694063 - DNA, 25 bp, Homo sapien
tgagccttacatgcattgtagagac

SEQ ID NO: 1694064 - DNA, 25 bp, Homo sapien
catttgactttacataaggagcttc

SEQ ID NO: 1694065 - DNA, 25 bp, Homo sapien
ttgtagagacccaggttgaccgcag

SEQ ID NO: 1694066 - DNA, 25 bp, Homo sapien
gccagggccgcgatccagggctggg

SEQ ID NO: 1694067 - DNA, 25 bp, Homo sapien
cagcaacgagataggcagggtccct

SEQ ID NO: 1694068 - DNA, 25 bp, Homo sapien
cagggtccctgccagggccgcgatc

SEQ ID NO: 1694069 - DNA, 25 bp, Homo sapien
ctgcgagaagcagcaacgagatagg

SEQ ID NO: 1694070 - DNA, 25 bp, Homo sapien
tccctggacagagcaattttttcct

SEQ ID NO: 1694071 - DNA, 25 bp, Homo sapien
cttgctctgttgcagcgtatcccat

SEQ ID NO: 1694072 - DNA, 25 bp, Homo sapien
cttctgttgtctccacaagaagtaa

SEQ ID NO: 1694073 - DNA, 25 bp, Homo sapien
ctcttaggcttatttcttgctctgt

SEQ ID NO: 1694074 - DNA, 25 bp, Homo sapien
gccatgtactggattttcctccact

SEQ ID NO: 1694075 - DNA, 25 bp, Homo sapien
agccatgtactggattttcctccac

SEQ ID NO: 1694076 - DNA, 25 bp, Homo sapien
gagccatgtactggattttcctcca

SEQ ID NO: 1694077 - DNA, 25 bp, Homo sapien
atgataggccaaagacttctctcca

SEQ ID NO: 1694078 - DNA, 25 bp, Homo sapien
tgataggccaaagacttctctccac

SEQ ID NO: 1694079 - DNA, 25 bp, Homo sapien
catgataggccaaagacttctctcc

SEQ ID NO: 1694080 - DNA, 25 bp, Homo sapien
caggtttgaagagggccattttcca

SEQ ID NO: 1694081 - DNA, 25 bp, Homo sapien
aggtttgaagagggccattttccat

SEQ ID NO: 1694082 - DNA, 25 bp, Homo sapien
ctgcagagagtttgaggaggtgtcc

SEQ ID NO: 1694083 - DNA, 25 bp, Homo sapien
tacttcttttggtattgggcaaatg

SEQ ID NO: 1694084 - DNA, 25 bp, Homo sapien
tatagaacgagatctctccagtctc

SEQ ID NO: 1694085 - DNA, 25 bp, Homo sapien
ctcagagaaagaggcgtgcggaaag

SEQ ID NO: 1694086 - DNA, 25 bp, Homo sapien
ctctcagggttgtctggcagatccc

SEQ ID NO: 1694087 - DNA, 25 bp, Homo sapien
gggtgggcagggagaagcagagatg

SEQ ID NO: 1694088 - DNA, 25 bp, Homo sapien
agggtgggcagggagaagcagagat

SEQ ID NO: 1694089 - DNA, 25 bp, Homo sapien
gtgggcagggagaagcagagatgtt

SEQ ID NO: 1694090 - DNA, 25 bp, Homo sapien
gggcagggagaagcagagatgttac

SEQ ID NO: 1694091 - DNA, 25 bp, Homo sapien
tagcttatggttctgattggttgtt

SEQ ID NO: 1694092 - DNA, 25 bp, Homo sapien
gtagcttatggttctgattggttgt

SEQ ID NO: 1694093 - DNA, 25 bp, Homo sapien
tagggatgtcaactccacaagcact

SEQ ID NO: 1694094 - DNA, 25 bp, Homo sapien
gaacaggcaattagccagggactaa

SEQ ID NO: 1694095 - DNA, 25 bp, Homo sapien
tacatgtgggctcttcctgtgggaa

SEQ ID NO: 1694096 - DNA, 25 bp, Homo sapien
tgcaaaatatgactacccgacaggg

SEQ ID NO: 1694097 - DNA, 25 bp, Homo sapien
ttgaacaactagaacttgacaacca

SEQ ID NO: 1694098 - DNA, 25 bp, Homo sapien
tgaacaactagaacttgacaaccac

SEQ ID NO: 1694099 - DNA, 25 bp, Homo sapien
tattgaacaactagaacttgacaac

SEQ ID NO: 1694100 - DNA, 25 bp, Homo sapien
attgaacaactagaacttgacaacc

SEQ ID NO: 1694101 - DNA, 25 bp, Homo sapien
ccagggctttgaagtagcccttttg

SEQ ID NO: 1694102 - DNA, 25 bp, Homo sapien
cagcctctgccaaagttgatctgag

SEQ ID NO: 1694103 - DNA, 25 bp, Homo sapien
cttttgccagaagcatccagctaag

SEQ ID NO: 1694104 - DNA, 25 bp, Homo sapien
ccagaagcatccagctaagccaggc

SEQ ID NO: 1694105 - DNA, 25 bp, Homo sapien
tgcaggaaacgaaatctggtctcct

SEQ ID NO: 1694106 - DNA, 25 bp, Homo sapien
tttggagatgcaggaaacgaaatct

SEQ ID NO: 1694107 - DNA, 25 bp, Homo sapien
ccttctcctaggtcgccatgtttgg

SEQ ID NO: 1694108 - DNA, 25 bp, Homo sapien
ctaggtcgccatgtttggagatgca

SEQ ID NO: 1694109 - DNA, 25 bp, Homo sapien
ggcacaggcactactagacacaaac

SEQ ID NO: 1694110 - DNA, 25 bp, Homo sapien
gggcacaggcactactagacacaaa

SEQ ID NO: 1694111 - DNA, 25 bp, Homo sapien
ggggcacaggcactactagacacaa

SEQ ID NO: 1694112 - DNA, 25 bp, Homo sapien
aggggcacaggcactactagacaca

SEQ ID NO: 1694113 - DNA, 25 bp, Homo sapien
ttcttttctccgctggttctcgacg

SEQ ID NO: 1694114 - DNA, 25 bp, Homo sapien
tttctccgctggttctcgacgattc

SEQ ID NO: 1694115 - DNA, 25 bp, Homo sapien
gacgattctccagtcgtccctcttc

SEQ ID NO: 1694116 - DNA, 25 bp, Homo sapien
tctccgctggttctcgacgattctc

SEQ ID NO: 1694117 - DNA, 25 bp, Homo sapien
catccgaaggctcaggtatgtcccg

SEQ ID NO: 1694118 - DNA, 25 bp, Homo sapien
ttccatgaagtaagccatcaatgcc

SEQ ID NO: 1694119 - DNA, 25 bp, Homo sapien
tcagggagtcccctgcatccgaagg

SEQ ID NO: 1694120 - DNA, 25 bp, Homo sapien
tatgtcccgagagagggattcctta

SEQ ID NO: 1694121 - DNA, 25 bp, Homo sapien
gcacccagagcaggcagggacagga

SEQ ID NO: 1694122 - DNA, 25 bp, Homo sapien
gagcacccagagcaggcagggacag

SEQ ID NO: 1694123 - DNA, 25 bp, Homo sapien
cccagagcaggcagggacaggaggc

SEQ ID NO: 1694124 - DNA, 25 bp, Homo sapien
acccagagcaggcagggacaggagg

SEQ ID NO: 1694125 - DNA, 25 bp, Homo sapien
aggctggccgggagaagtgcagggc

SEQ ID NO: 1694126 - DNA, 25 bp, Homo sapien
ggccgggagaagtgcagggcagcag

SEQ ID NO: 1694127 - DNA, 25 bp, Homo sapien
gctggccgggagaagtgcagggcag

SEQ ID NO: 1694128 - DNA, 25 bp, Homo sapien
aggagggaggctggccgggagaagt

SEQ ID NO: 1694129 - DNA, 25 bp, Homo sapien
caaccgtggccaagatgggatcagt

SEQ ID NO: 1694130 - DNA, 25 bp, Homo sapien
tagtgttttctccaaccgtggccaa

SEQ ID NO: 1694131 - DNA, 25 bp, Homo sapien
tgacagatggcagcgtaacgtagtg

SEQ ID NO: 1694132 - DNA, 25 bp, Homo sapien
tgggatcagtgggccccacgacaat

SEQ ID NO: 1694133 - DNA, 25 bp, Homo sapien
tggaagtaacagcggtaggtgccgt

SEQ ID NO: 1694134 - DNA, 25 bp, Homo sapien
cggtaggtgccgttttcctgggctg

SEQ ID NO: 1694135 - DNA, 25 bp, Homo sapien
aacagcggtaggtgccgttttcctg

SEQ ID NO: 1694136 - DNA, 25 bp, Homo sapien
ttggaagtaacagcggtaggtgccg

SEQ ID NO: 1694137 - DNA, 25 bp, Homo sapien
caagatcgtgccagcgagggtacaa

SEQ ID NO: 1694138 - DNA, 25 bp, Homo sapien
cacggcctcagctgaattctgcatg

SEQ ID NO: 1694139 - DNA, 25 bp, Homo sapien
gcagggcaaacccactcatgtgtcc

SEQ ID NO: 1694140 - DNA, 25 bp, Homo sapien
gcacagttcaatcctaaggcaggta

SEQ ID NO: 1694141 - DNA, 25 bp, Homo sapien
tctctatggagttagcaggaactat

SEQ ID NO: 1694142 - DNA, 25 bp, Homo sapien
cctattacctcccagcaaaattcgt

SEQ ID NO: 1694143 - DNA, 25 bp, Homo sapien
gcttctgtatttcgtcttggtttaa

SEQ ID NO: 1694144 - DNA, 25 bp, Homo sapien
cgtagtctttctctatggagttagc

SEQ ID NO: 1694145 - DNA, 25 bp, Homo sapien
tcctgccgcgcagaaaccataactg

SEQ ID NO: 1694146 - DNA, 25 bp, Homo sapien
accataactggtcaaccctggagtg

SEQ ID NO: 1694147 - DNA, 25 bp, Homo sapien
cctaagcaatccaattcagagtggg

SEQ ID NO: 1694148 - DNA, 25 bp, Homo sapien
tctatgaggttcaatacaggcaagc

SEQ ID NO: 1694149 - DNA, 25 bp, Homo sapien
gcatcctcgatttctgagggtcagg

SEQ ID NO: 1694150 - DNA, 25 bp, Homo sapien
catcctcgatttctgagggtcaggt

SEQ ID NO: 1694151 - DNA, 25 bp, Homo sapien
tcctcgatttctgagggtcaggtga

SEQ ID NO: 1694152 - DNA, 25 bp, Homo sapien
ctcgatttctgagggtcaggtgatc

SEQ ID NO: 1694153 - DNA, 25 bp, Homo sapien
gacgacttctcagtagacctcagct

SEQ ID NO: 1694154 - DNA, 25 bp, Homo sapien
aacaggcaggttttggatttcactt

SEQ ID NO: 1694155 - DNA, 25 bp, Homo sapien
ggtgtgtcgactccaacttcaaaca

SEQ ID NO: 1694156 - DNA, 25 bp, Homo sapien
tctgcttctgggacgacttctcagt

SEQ ID NO: 1694157 - DNA, 25 bp, Homo sapien
gaaatgaggggcttagagcctagtc

SEQ ID NO: 1694158 - DNA, 25 bp, Homo sapien
tgaaatgaggggcttagagcctagt

SEQ ID NO: 1694159 - DNA, 25 bp, Homo sapien
tgaagaggccgtctgcatcaggcat

SEQ ID NO: 1694160 - DNA, 25 bp, Homo sapien
tgttgttgatagagcaggacatgtt

SEQ ID NO: 1694161 - DNA, 25 bp, Homo sapien
tcaggcatggagacctctttcaggg

SEQ ID NO: 1694162 - DNA, 25 bp, Homo sapien
tctctgatgatcacagccgtggtga

SEQ ID NO: 1694163 - DNA, 25 bp, Homo sapien
gatggctacagcatacaggaacacc

SEQ ID NO: 1694164 - DNA, 25 bp, Homo sapien
tctaaaaattgctggccgggtatgg

SEQ ID NO: 1694165 - DNA, 25 bp, Homo sapien
taagcatctgatgactccttgccat

SEQ ID NO: 1694166 - DNA, 25 bp, Homo sapien
ggaaaatcccctgcacaggaaggga

SEQ ID NO: 1694167 - DNA, 25 bp, Homo sapien
ctgcacagggagacacactgggcat

SEQ ID NO: 1694168 - DNA, 25 bp, Homo sapien
gggagacacactgggcataaaggat

SEQ ID NO: 1694169 - DNA, 25 bp, Homo sapien
agggagacacactgggcataaagga

SEQ ID NO: 1694170 - DNA, 25 bp, Homo sapien
cacagggagacacactgggcataaa

SEQ ID NO: 1694171 - DNA, 25 bp, Homo sapien
gggtatcatcagaataaccacaatg

SEQ ID NO: 1694172 - DNA, 25 bp, Homo sapien
tgggtatcatcagaataaccacaat

SEQ ID NO: 1694173 - DNA, 25 bp, Homo sapien
atgggtatcatcagaataaccacaa

SEQ ID NO: 1694174 - DNA, 25 bp, Homo sapien
aatgggtatcatcagaataaccaca

SEQ ID NO: 1694175 - DNA, 25 bp, Homo sapien
tttgttgatccaatagatgcatacg

SEQ ID NO: 1694176 - DNA, 25 bp, Homo sapien
gtttgttgatccaatagatgcatac

SEQ ID NO: 1694177 - DNA, 25 bp, Homo sapien
cagcatgtaagaatgttcttctcca

SEQ ID NO: 1694178 - DNA, 25 bp, Homo sapien
agcatgtaagaatgttcttctccat

SEQ ID NO: 1694179 - DNA, 25 bp, Homo sapien
gcatgtaagaatgttcttctccatc

SEQ ID NO: 1694180 - DNA, 25 bp, Homo sapien
ctgagggaacatcagaggcactcac

SEQ ID NO: 1694181 - DNA, 25 bp, Homo sapien
tcctgttagctggctagtgtggaga

SEQ ID NO: 1694182 - DNA, 25 bp, Homo sapien
agtcctgttagctggctagtgtgga

SEQ ID NO: 1694183 - DNA, 25 bp, Homo sapien
ctgttagctggctagtgtggagaaa

SEQ ID NO: 1694184 - DNA, 25 bp, Homo sapien
aggagtcctgttagctggctagtgt

SEQ ID NO: 1694185 - DNA, 25 bp, Homo sapien
tcccacggcaggctatacacaaagt

SEQ ID NO: 1694186 - DNA, 25 bp, Homo sapien
tcaggcttactagggaccctcctgg

SEQ ID NO: 1694187 - DNA, 25 bp, Homo sapien
catgtgccatggtatctggtaaagc

SEQ ID NO: 1694188 - DNA, 25 bp, Homo sapien
ggcaattgggttctgtgctctccca

SEQ ID NO: 1694189 - DNA, 25 bp, Homo sapien
accccaaatgaagacctatgatctc

SEQ ID NO: 1694190 - DNA, 25 bp, Homo sapien
tgaagggatccccacgtagtggcca

SEQ ID NO: 1694191 - DNA, 25 bp, Homo sapien
agaggaagtctcaggtttaggcctg

SEQ ID NO: 1694192 - DNA, 25 bp, Homo sapien
cctgatccccagagaggtctcagat

SEQ ID NO: 1694193 - DNA, 25 bp, Homo sapien
tgatcctaggcagctcacacactga

SEQ ID NO: 1694194 - DNA, 25 bp, Homo sapien
cgggatgagcggtgtctggatccag

SEQ ID NO: 1694195 - DNA, 25 bp, Homo sapien
tcgggatgagcggtgtctggatcca

SEQ ID NO: 1694196 - DNA, 25 bp, Homo sapien
ggttgtcaggcacgctctcccctag

SEQ ID NO: 1694197 - DNA, 25 bp, Homo sapien
acacggcccggtattgccctttatg

SEQ ID NO: 1694198 - DNA, 25 bp, Homo sapien
ctgaagcgaagctctcccggcctag

SEQ ID NO: 1694199 - DNA, 25 bp, Homo sapien
acgctctcccctaggtgcctgaagg

SEQ ID NO: 1694200 - DNA, 25 bp, Homo sapien
gcagatgaagatggggctgtcctca

SEQ ID NO: 1694201 - DNA, 25 bp, Homo sapien
gtgagtgcagggcagatgaagatgg

SEQ ID NO: 1694202 - DNA, 25 bp, Homo sapien
cctgtgagtgcagggcagatgaaga

SEQ ID NO: 1694203 - DNA, 25 bp, Homo sapien
aagatggggctgtcctcacacccca

SEQ ID NO: 1694204 - DNA, 25 bp, Homo sapien
tataggctctggtgggtccccactc

SEQ ID NO: 1694205 - DNA, 25 bp, Homo sapien
tccccactctgtgaagtgtcaggcc

SEQ ID NO: 1694206 - DNA, 25 bp, Homo sapien
tgggtccccactctgtgaagtgtca

SEQ ID NO: 1694207 - DNA, 25 bp, Homo sapien
ggtccccactctgtgaagtgtcagg

SEQ ID NO: 1694208 - DNA, 25 bp, Homo sapien
tgagatgaccagggcttgtctacat

SEQ ID NO: 1694209 - DNA, 25 bp, Homo sapien
agatgaccagggcttgtctacatgg

SEQ ID NO: 1694210 - DNA, 25 bp, Homo sapien
gagatgaccagggcttgtctacatg

SEQ ID NO: 1694211 - DNA, 25 bp, Homo sapien
ggggaggagggcgtgtcttccacca

SEQ ID NO: 1694212 - DNA, 25 bp, Homo sapien
aaaaacacagcctagtgaggaggag

SEQ ID NO: 1694213 - DNA, 25 bp, Homo sapien
tactgactccttgccaactgcaggg

SEQ ID NO: 1694214 - DNA, 25 bp, Homo sapien
gaatactgggcttaatgtggtcacc

SEQ ID NO: 1694215 - DNA, 25 bp, Homo sapien
tggtgtccccactgaacttgaatac

SEQ ID NO: 1694216 - DNA, 25 bp, Homo sapien
tacatcctggtgaaccctgtaggcc

SEQ ID NO: 1694217 - DNA, 25 bp, Homo sapien
ttgactgccgccgactgaagttcgg

SEQ ID NO: 1694218 - DNA, 25 bp, Homo sapien
tttgcaaaccatcagaacgatcggg

SEQ ID NO: 1694219 - DNA, 25 bp, Homo sapien
gaggttcagtgagctccattccaca

SEQ ID NO: 1694220 - DNA, 25 bp, Homo sapien
catagtctgatcacttggctgcagg

SEQ ID NO: 1694221 - DNA, 25 bp, Homo sapien
ccgagatcctgtgaacatgtgccga

SEQ ID NO: 1694222 - DNA, 25 bp, Homo sapien
tcagccagatatgagtgcccagtgg

SEQ ID NO: 1694223 - DNA, 25 bp, Homo sapien
catgtgccgaagtggttgggctcca

SEQ ID NO: 1694224 - DNA, 25 bp, Homo sapien
gagagagacctatctgaaaccagct

SEQ ID NO: 1694225 - DNA, 25 bp, Homo sapien
agcccagatcccattcttaagagca

SEQ ID NO: 1694226 - DNA, 25 bp, Homo sapien
aggaaaatctcaaccagggggctgg

SEQ ID NO: 1694227 - DNA, 25 bp, Homo sapien
taagagcaaggagaattttcttcat

SEQ ID NO: 1694228 - DNA, 25 bp, Homo sapien
ttacagatgactccacagcccagat

SEQ ID NO: 1694229 - DNA, 25 bp, Homo sapien
cctgttttcagagataaggcagcaa

SEQ ID NO: 1694230 - DNA, 25 bp, Homo sapien
gctgcttaagggagcctatggctac

SEQ ID NO: 1694231 - DNA, 25 bp, Homo sapien
tattagttgacatgaggtggctgct

SEQ ID NO: 1694232 - DNA, 25 bp, Homo sapien
ctgaagcctcaggagacgaaatgga

SEQ ID NO: 1694233 - DNA, 25 bp, Homo sapien
gctcaaactcaggtcatgggtaacc

SEQ ID NO: 1694234 - DNA, 25 bp, Homo sapien
tcaaactcaggtcatgggtaaccat

SEQ ID NO: 1694235 - DNA, 25 bp, Homo sapien
ctcaaactcaggtcatgggtaacca

SEQ ID NO: 1694236 - DNA, 25 bp, Homo sapien
ctgtgactgctgcatctgtcctcca

SEQ ID NO: 1694237 - DNA, 25 bp, Homo sapien
tgactgctgcatctgtcctccaatc

SEQ ID NO: 1694238 - DNA, 25 bp, Homo sapien
tgtgactgctgcatctgtcctccaa

SEQ ID NO: 1694239 - DNA, 25 bp, Homo sapien
gtgactgctgcatctgtcctccaat

SEQ ID NO: 1694240 - DNA, 25 bp, Homo sapien
gctcttttccattttgcagtaacgg

SEQ ID NO: 1694241 - DNA, 25 bp, Homo sapien
tggacacaattgtgctcttttccat

SEQ ID NO: 1694242 - DNA, 25 bp, Homo sapien
cttttccattttgcagtaacggagg

SEQ ID NO: 1694243 - DNA, 25 bp, Homo sapien
ctggacacaattgtgctcttttcca

SEQ ID NO: 1694244 - DNA, 25 bp, Homo sapien
acaagaggccactgctaccaagtga

SEQ ID NO: 1694245 - DNA, 25 bp, Homo sapien
ctggctgtggcccccggggcaaaag

SEQ ID NO: 1694246 - DNA, 25 bp, Homo sapien
aaaaggaagcgggaggtgctctcag

SEQ ID NO: 1694247 - DNA, 25 bp, Homo sapien
cacaagaggccactgctaccaagtg

SEQ ID NO: 1694248 - DNA, 25 bp, Homo sapien
cttgaagagtagagggcctaggacc

SEQ ID NO: 1694249 - DNA, 25 bp, Homo sapien
agaaatggagtccaaggaaatgaat

SEQ ID NO: 1694250 - DNA, 25 bp, Homo sapien
gaagtatgctatgcccctctggctg

SEQ ID NO: 1694251 - DNA, 25 bp, Homo sapien
gataagggtataaaggcagaaatgg

SEQ ID NO: 1694252 - DNA, 25 bp, Homo sapien
cccttctggagcagcaagataactg

SEQ ID NO: 1694253 - DNA, 25 bp, Homo sapien
gcaagataactgatgtgagtcccct

SEQ ID NO: 1694254 - DNA, 25 bp, Homo sapien
actgatgtgagtcccctcaggagct

SEQ ID NO: 1694255 - DNA, 25 bp, Homo sapien
tctggagcagcaagataactgatgt

SEQ ID NO: 1694256 - DNA, 25 bp, Homo sapien
tctggggagaccggagcttgggaaa

SEQ ID NO: 1694257 - DNA, 25 bp, Homo sapien
agacatctggggagaccggagcttg

SEQ ID NO: 1694258 - DNA, 25 bp, Homo sapien
acatctggggagaccggagcttggg

SEQ ID NO: 1694259 - DNA, 25 bp, Homo sapien
ggagaccggagcttgggaaaactgc

SEQ ID NO: 1694260 - DNA, 25 bp, Homo sapien
cgtgtactccccgtcgtcagagact

SEQ ID NO: 1694261 - DNA, 25 bp, Homo sapien
tcggaaccagcgtagctccaagtgc

SEQ ID NO: 1694262 - DNA, 25 bp, Homo sapien
gatgcaccagggcttcttcgtagct

SEQ ID NO: 1694263 - DNA, 25 bp, Homo sapien
gtcagagactctgacgccacggatc

SEQ ID NO: 1694264 - DNA, 25 bp, Homo sapien
tctggacttaatgttttagcggacc

SEQ ID NO: 1694265 - DNA, 25 bp, Homo sapien
gagaatctggacttaatgttttagc

SEQ ID NO: 1694266 - DNA, 25 bp, Homo sapien
gagagagaatctggacttaatgttt

SEQ ID NO: 1694267 - DNA, 25 bp, Homo sapien
tggagagagaatctggacttaatgt

SEQ ID NO: 1694268 - DNA, 25 bp, Homo sapien
caggacacatttttcgcagaagtgt

SEQ ID NO: 1694269 - DNA, 25 bp, Homo sapien
cagtgaacaaaccttcttcatcagg

SEQ ID NO: 1694270 - DNA, 25 bp, Homo sapien
aagcagccacagtgaacaaaccttc

SEQ ID NO: 1694271 - DNA, 25 bp, Homo sapien
ctggggctctgggtaccatcccact

SEQ ID NO: 1694272 - DNA, 25 bp, Homo sapien
agaagtcctagaaccatcaggatga

SEQ ID NO: 1694273 - DNA, 25 bp, Homo sapien
tcctagaaccatcaggatgacagcc

SEQ ID NO: 1694274 - DNA, 25 bp, Homo sapien
tctctgggtctttcgttgtatagtc

SEQ ID NO: 1694275 - DNA, 25 bp, Homo sapien
cgttgtatagtctccaagtgaaaaa

SEQ ID NO: 1694276 - DNA, 25 bp, Homo sapien
ctgcatgcaaggtagcctttttcca

SEQ ID NO: 1694277 - DNA, 25 bp, Homo sapien
cactgttgtaggagttgacaggtct

SEQ ID NO: 1694278 - DNA, 25 bp, Homo sapien
tacaggttgcaggactgtctttcct

SEQ ID NO: 1694279 - DNA, 25 bp, Homo sapien
catcagtgaatattacaggttgcag

SEQ ID NO: 1694280 - DNA, 25 bp, Homo sapien
gaatattacaggttgcaggactgtc

SEQ ID NO: 1694281 - DNA, 25 bp, Homo sapien
tctgacatcagtgaatattacaggt

SEQ ID NO: 1694282 - DNA, 25 bp, Homo sapien
gacgtgaatcttccagtcgaacaga

SEQ ID NO: 1694283 - DNA, 25 bp, Homo sapien
gaccataggcaaaagaagggccgga

SEQ ID NO: 1694284 - DNA, 25 bp, Homo sapien
ccttagaaaggtcctgggcattagc

SEQ ID NO: 1694285 - DNA, 25 bp, Homo sapien
tcctgaggtgaaggtctcacggccc

SEQ ID NO: 1694286 - DNA, 25 bp, Homo sapien
aatacacaggtgcaatcagtccagc

SEQ ID NO: 1694287 - DNA, 25 bp, Homo sapien
gatttggaaggtgcaatccccaccc

SEQ ID NO: 1694288 - DNA, 25 bp, Homo sapien
gaattttccacttgcctaaagcctg

SEQ ID NO: 1694289 - DNA, 25 bp, Homo sapien
tgagcaacgtctatcctggaaactg

SEQ ID NO: 1694290 - DNA, 25 bp, Homo sapien
cgacctgaacgcagcgccttagacc

SEQ ID NO: 1694291 - DNA, 25 bp, Homo sapien
gacctgaacgcagcgccttagaccg

SEQ ID NO: 1694292 - DNA, 25 bp, Homo sapien
gtggtcacccgggacccagatctgg

SEQ ID NO: 1694293 - DNA, 25 bp, Homo sapien
ggcagggtccggactgggagaggcc

SEQ ID NO: 1694294 - DNA, 25 bp, Homo sapien
gtagggaagagacgttcgccaccgc

SEQ ID NO: 1694295 - DNA, 25 bp, Homo sapien
tggcggctccgtggcctgaagaggc

SEQ ID NO: 1694296 - DNA, 25 bp, Homo sapien
tcagtttccaaaagtcaactccgga

SEQ ID NO: 1694297 - DNA, 25 bp, Homo sapien
catagtagtgaggaagcgaatgcac

SEQ ID NO: 1694298 - DNA, 25 bp, Homo sapien
tccgtaaacggcctgtgaatcttcc

SEQ ID NO: 1694299 - DNA, 25 bp, Homo sapien
tagaggccgtctaacaactcagttt

SEQ ID NO: 1694300 - DNA, 25 bp, Homo sapien
ccattataatattagcaaggtatat

SEQ ID NO: 1694301 - DNA, 25 bp, Homo sapien
taacagagctataccattataatat

SEQ ID NO: 1694302 - DNA, 25 bp, Homo sapien
cagcaacagaatacattaagtataa

SEQ ID NO: 1694303 - DNA, 25 bp, Homo sapien
ctaagagaattcattaacagagcta

SEQ ID NO: 1694304 - DNA, 25 bp, Homo sapien
tcctctccaatttcagacgtgtgga

SEQ ID NO: 1694305 - DNA, 25 bp, Homo sapien
ttcagacgtgtggagcggagccaat

SEQ ID NO: 1694306 - DNA, 25 bp, Homo sapien
gcagtctgtgacacagccacctgca

SEQ ID NO: 1694307 - DNA, 25 bp, Homo sapien
ttgttttacatgactgtcggcagtc

SEQ ID NO: 1694308 - DNA, 25 bp, Homo sapien
tatctgggtgaacgcctgtaagccg

SEQ ID NO: 1694309 - DNA, 25 bp, Homo sapien
tctctgccggctgaaaaatggcggt

SEQ ID NO: 1694310 - DNA, 25 bp, Homo sapien
aatggcggtgaaaagcaagccctgc

SEQ ID NO: 1694311 - DNA, 25 bp, Homo sapien
tctggtagctacttctgcacacgcc

SEQ ID NO: 1694312 - DNA, 25 bp, Homo sapien
gtcgaacctggaatcttctgatccg

SEQ ID NO: 1694313 - DNA, 25 bp, Homo sapien
gagccagccaggagtcgaacctgga

SEQ ID NO: 1694314 - DNA, 25 bp, Homo sapien
gccagccaggagtcgaacctggaat

SEQ ID NO: 1694315 - DNA, 25 bp, Homo sapien
gccaggagtcgaacctggaatcttc

SEQ ID NO: 1694316 - DNA, 25 bp, Homo sapien
gcaaagaaatgataaccccatatgt

SEQ ID NO: 1694317 - DNA, 25 bp, Homo sapien
atgctccgcaaagaaatgataaccc

SEQ ID NO: 1694318 - DNA, 25 bp, Homo sapien
cccatatgttgtcgggagctgcccc

SEQ ID NO: 1694319 - DNA, 25 bp, Homo sapien
aatgataaccccatatgttgtcggg

SEQ ID NO: 1694320 - DNA, 25 bp, Homo sapien
ctttcgcgtgtgaggcgaacgtgat

SEQ ID NO: 1694321 - DNA, 25 bp, Homo sapien
tgataaccactacactacggaaacc

SEQ ID NO: 1694322 - DNA, 25 bp, Homo sapien
gggacctttcgcgtgtgaggcgaac

SEQ ID NO: 1694323 - DNA, 25 bp, Homo sapien
ccggggacctttcgcgtgtgaggcg

SEQ ID NO: 1694324 - DNA, 25 bp, Homo sapien
taagacagagaagacgagcggagcc

SEQ ID NO: 1694325 - DNA, 25 bp, Homo sapien
tccaagccggagagagctggttctc

SEQ ID NO: 1694326 - DNA, 25 bp, Homo sapien
gcactgctgccccgatctagcaaga

SEQ ID NO: 1694327 - DNA, 25 bp, Homo sapien
ccctggcgatacgtgtgtgagcctc

SEQ ID NO: 1694328 - DNA, 25 bp, Homo sapien
gaatcccagctgaggcccgtgacgc

SEQ ID NO: 1694329 - DNA, 25 bp, Homo sapien
gagccctaggcgtgggcagggccag

SEQ ID NO: 1694330 - DNA, 25 bp, Homo sapien
cgtgacgcgccggagccctaggcgt

SEQ ID NO: 1694331 - DNA, 25 bp, Homo sapien
aatcccagctgaggcccgtgacgcg

SEQ ID NO: 1694332 - DNA, 25 bp, Homo sapien
gagtctcgtggccgtccgaggggcg

SEQ ID NO: 1694333 - DNA, 25 bp, Homo sapien
cgagtctcgtggccgtccgaggggc

SEQ ID NO: 1694334 - DNA, 25 bp, Homo sapien
ccgagtctcgtggccgtccgagggg

SEQ ID NO: 1694335 - DNA, 25 bp, Homo sapien
ttcccagggattcacactcggagct

SEQ ID NO: 1694336 - DNA, 25 bp, Homo sapien
gattcacactcggagctcaggagag

SEQ ID NO: 1694337 - DNA, 25 bp, Homo sapien
tgtgaccccacctctggattcagct

SEQ ID NO: 1694338 - DNA, 25 bp, Homo sapien
ttaggacttctcatcccggtcgggc

SEQ ID NO: 1694339 - DNA, 25 bp, Homo sapien
gctgttgagcacatgcccaagttta

SEQ ID NO: 1694340 - DNA, 25 bp, Homo sapien
aaatatcacattcggttgggcgcgg

SEQ ID NO: 1694341 - DNA, 25 bp, Homo sapien
tatgatctgagaggctaggcttggc

SEQ ID NO: 1694342 - DNA, 25 bp, Homo sapien
ttcaagtcaacgtctacccaagcag

SEQ ID NO: 1694343 - DNA, 25 bp, Homo sapien
ggataaatccttgtcatctcctagg

SEQ ID NO: 1694344 - DNA, 25 bp, Homo sapien
gctaactgggatcggagaaagatga

SEQ ID NO: 1694345 - DNA, 25 bp, Homo sapien
cctttctgggcaccataataacttg

SEQ ID NO: 1694346 - DNA, 25 bp, Homo sapien
ggctaaagtattcctgctaactggg

SEQ ID NO: 1694347 - DNA, 25 bp, Homo sapien
ggtaccttgtttcggcagccctagc

SEQ ID NO: 1694348 - DNA, 25 bp, Homo sapien
ctagcggactaacataggagggaac

SEQ ID NO: 1694349 - DNA, 25 bp, Homo sapien
tgtaagaatttagtgactcaggcag

SEQ ID NO: 1694350 - DNA, 25 bp, Homo sapien
taggatacagacaacatagaggaac

SEQ ID NO: 1694351 - DNA, 25 bp, Homo sapien
tcgagttagatccattgaagtccat

SEQ ID NO: 1694352 - DNA, 25 bp, Homo sapien
ccattgaagtccatccgaagtaggg

SEQ ID NO: 1694353 - DNA, 25 bp, Homo sapien
ccatttcctggtgtgagaatgctca

SEQ ID NO: 1694354 - DNA, 25 bp, Homo sapien
tgggttcagtcttcttcgagttaga

SEQ ID NO: 1694355 - DNA, 25 bp, Homo sapien
caaaacccttatgtactgctgtgtg

SEQ ID NO: 1694356 - DNA, 25 bp, Homo sapien
tgacaatatcaagggctcagctgat

SEQ ID NO: 1694357 - DNA, 25 bp, Homo sapien
tagcccagagcacagattgagagcc

SEQ ID NO: 1694358 - DNA, 25 bp, Homo sapien
aattctgtaaccttgtgagtggcca

SEQ ID NO: 1694359 - DNA, 25 bp, Homo sapien
gcttgagcagtcctgttgggtgctt

SEQ ID NO: 1694360 - DNA, 25 bp, Homo sapien
tgagcagtcctgttgggtgcttctg

SEQ ID NO: 1694361 - DNA, 25 bp, Homo sapien
gttcgcaggtggcttgagcagtcct

SEQ ID NO: 1694362 - DNA, 25 bp, Homo sapien
tagcagcagtgttcgcaggtggctt

SEQ ID NO: 1694363 - DNA, 25 bp, Homo sapien
caaccgagctgatctcctctgtggc

SEQ ID NO: 1694364 - DNA, 25 bp, Homo sapien
acaaccgagctgatctcctctgtgg

SEQ ID NO: 1694365 - DNA, 25 bp, Homo sapien
agtgccttccgctttctgggactgg

SEQ ID NO: 1694366 - DNA, 25 bp, Homo sapien
gtgccttccgctttctgggactgga

SEQ ID NO: 1694367 - DNA, 25 bp, Homo sapien
tgactttgggtaggaaaggatctcc

SEQ ID NO: 1694368 - DNA, 25 bp, Homo sapien
cgatgtcatcaacagaaagcctgag

SEQ ID NO: 1694369 - DNA, 25 bp, Homo sapien
tctcaggcccactttgacatggagg

SEQ ID NO: 1694370 - DNA, 25 bp, Homo sapien
tgcagagacaaccacttcgaatatg

SEQ ID NO: 1694371 - DNA, 25 bp, Homo sapien
gaatagccaagacactccaaggaag

SEQ ID NO: 1694372 - DNA, 25 bp, Homo sapien
tatcagaccttttcctaaagttgca

SEQ ID NO: 1694373 - DNA, 25 bp, Homo sapien
gacaacattgtaaagatgacatggt

SEQ ID NO: 1694374 - DNA, 25 bp, Homo sapien
tactgtactgctacaagattagaca

SEQ ID NO: 1694375 - DNA, 25 bp, Homo sapien
ccgggacctcatacatgcgaagcat

SEQ ID NO: 1694376 - DNA, 25 bp, Homo sapien
cgaacccgggacctcatacatgcga

SEQ ID NO: 1694377 - DNA, 25 bp, Homo sapien
gacctcatacatgcgaagcatgcgc

SEQ ID NO: 1694378 - DNA, 25 bp, Homo sapien
tcgaacccgggacctcatacatgcg

SEQ ID NO: 1694379 - DNA, 25 bp, Homo sapien
agaatttcatcagtgtttcggaatg

SEQ ID NO: 1694380 - DNA, 25 bp, Homo sapien
catcaagaatttcatcagtgtttcg

SEQ ID NO: 1694381 - DNA, 25 bp, Homo sapien
tctccaagaagttttaaaaactgca

SEQ ID NO: 1694382 - DNA, 25 bp, Homo sapien
tcagtgtttcggaatgttttcattt

SEQ ID NO: 1694383 - DNA, 25 bp, Homo sapien
acccgcgaccttggcgttattagca

SEQ ID NO: 1694384 - DNA, 25 bp, Homo sapien
gatcgaacccgcgaccttggcgtta

SEQ ID NO: 1694385 - DNA, 25 bp, Homo sapien
tggcgttattagcaccacgctctaa

SEQ ID NO: 1694386 - DNA, 25 bp, Homo sapien
tctaaccaactgagctaaccggcca

SEQ ID NO: 1694387 - DNA, 25 bp, Homo sapien
aagcccacgtggagctcgtgagttg

SEQ ID NO: 1694388 - DNA, 25 bp, Homo sapien
ggagctcgtgagttgcgatcagcat

SEQ ID NO: 1694389 - DNA, 25 bp, Homo sapien
acgtggagctcgtgagttgcgatca

SEQ ID NO: 1694390 - DNA, 25 bp, Homo sapien
cccacgtggagctcgtgagttgcga

SEQ ID NO: 1694391 - DNA, 25 bp, Homo sapien
ggatttgaacccgggacctctcgca

SEQ ID NO: 1694392 - DNA, 25 bp, Homo sapien
atcatacccctagaccaacgagccg

SEQ ID NO: 1694393 - DNA, 25 bp, Homo sapien
ctcgcaccctaagcgagaatcatac

SEQ ID NO: 1694394 - DNA, 25 bp, Homo sapien
gggacctctcgcaccctaagcgaga

SEQ ID NO: 1694395 - DNA, 25 bp, Homo sapien
ctttgcgggacccgtatgtttgctc

SEQ ID NO: 1694396 - DNA, 25 bp, Homo sapien
tttgcgggacccgtatgtttgctca

SEQ ID NO: 1694397 - DNA, 25 bp, Homo sapien
ttgcgggacccgtatgtttgctcat

SEQ ID NO: 1694398 - DNA, 25 bp, Homo sapien
tcctgccaagctatatggccctcaa

SEQ ID NO: 1694399 - DNA, 25 bp, Homo sapien
tatatggccctcaagaaaatgtctg

SEQ ID NO: 1694400 - DNA, 25 bp, Homo sapien
aagaaaatgtctgcggtgttctccc

SEQ ID NO: 1694401 - DNA, 25 bp, Homo sapien
caagaaaatgtctgcggtgttctcc

SEQ ID NO: 1694402 - DNA, 25 bp, Homo sapien
caatgtggctccaagcatagtccca

SEQ ID NO: 1694403 - DNA, 25 bp, Homo sapien
cttaggtcctcgagcccaaacaatt

SEQ ID NO: 1694404 - DNA, 25 bp, Homo sapien
tccagacccggttaccaatgtggct

SEQ ID NO: 1694405 - DNA, 25 bp, Homo sapien
ctctctgtggcccagtgaggcgttc

SEQ ID NO: 1694406 - DNA, 25 bp, Homo sapien
cgtggggctcgaacccacgaccctg

SEQ ID NO: 1694407 - DNA, 25 bp, Homo sapien
tcatgctctaccgactgagctagcc

SEQ ID NO: 1694408 - DNA, 25 bp, Homo sapien
ctctaccgactgagctagccgggct

SEQ ID NO: 1694409 - DNA, 25 bp, Homo sapien
tcgaacccacgaccctgagattaag

SEQ ID NO: 1694410 - DNA, 25 bp, Homo sapien
acaaagcatagaaacgatcactgaa

SEQ ID NO: 1694411 - DNA, 25 bp, Homo sapien
aaagcatagaaacgatcactgaaag

SEQ ID NO: 1694412 - DNA, 25 bp, Homo sapien
gaaacgatcactgaaagtagtcttg

SEQ ID NO: 1694413 - DNA, 25 bp, Homo sapien
catagaaacgatcactgaaagtagt

SEQ ID NO: 1694414 - DNA, 25 bp, Homo sapien
aacagtaactgtactgtaatgcttc

SEQ ID NO: 1694415 - DNA, 25 bp, Homo sapien
cagataacgccggaagaaccccaag

SEQ ID NO: 1694416 - DNA, 25 bp, Homo sapien
gtgcagcagcgccagataacgccgg

SEQ ID NO: 1694417 - DNA, 25 bp, Homo sapien
ctgtggcatgtgtttcaacagtaac

SEQ ID NO: 1694418 - DNA, 25 bp, Homo sapien
ggagaaaacgggagcaccaccctca

SEQ ID NO: 1694419 - DNA, 25 bp, Homo sapien
catccactaccccttcggaactgac

SEQ ID NO: 1694420 - DNA, 25 bp, Homo sapien
ccccttcggaactgactgatattca

SEQ ID NO: 1694421 - DNA, 25 bp, Homo sapien
gaactgactgatattcagaggccct

SEQ ID NO: 1694422 - DNA, 25 bp, Homo sapien
tgactgatattcagaggcccttttc

SEQ ID NO: 1694423 - DNA, 25 bp, Homo sapien
ttgggcaatcgtggatgcttgtcgt

SEQ ID NO: 1694424 - DNA, 25 bp, Homo sapien
tctgcggaaggttgggcaatcgtgg

SEQ ID NO: 1694425 - DNA, 25 bp, Homo sapien
cgtggatgcttgtcgtcctgtttac

SEQ ID NO: 1694426 - DNA, 25 bp, Homo sapien
gggatgccatctctgcggaaggttg

SEQ ID NO: 1694427 - DNA, 25 bp, Homo sapien
ggatgtctaaggacacagccaacta

SEQ ID NO: 1694428 - DNA, 25 bp, Homo sapien
taaggatgtctaaggacacagccaa

SEQ ID NO: 1694429 - DNA, 25 bp, Homo sapien
gacctaaggatgtctaaggacacag

SEQ ID NO: 1694430 - DNA, 25 bp, Homo sapien
tctaaggacacagccaactacagtc

SEQ ID NO: 1694431 - DNA, 25 bp, Homo sapien
tctctgctagggtcgaaagacacca

SEQ ID NO: 1694432 - DNA, 25 bp, Homo sapien
tatagggttcagacgctagtggttc

SEQ ID NO: 1694433 - DNA, 25 bp, Homo sapien
ggttcagcttgtaactgactcgcaa

SEQ ID NO: 1694434 - DNA, 25 bp, Homo sapien
tcatcccggcttcagatgtataggg

SEQ ID NO: 1694435 - DNA, 25 bp, Homo sapien
gcccttaataggagtggcttccaat

SEQ ID NO: 1694436 - DNA, 25 bp, Homo sapien
tcaaaacttgcagtacaggaaagtc

SEQ ID NO: 1694437 - DNA, 25 bp, Homo sapien
ttccaatgcgttttgggcagggctc

SEQ ID NO: 1694438 - DNA, 25 bp, Homo sapien
tatgccagatctctactttgtgagc

SEQ ID NO: 1694439 - DNA, 25 bp, Homo sapien
aataatttgtacacccctggatcga

SEQ ID NO: 1694440 - DNA, 25 bp, Homo sapien
cagtagctggtactcaataggccca

SEQ ID NO: 1694441 - DNA, 25 bp, Homo sapien
taaaagacctactatgccctgcgca

SEQ ID NO: 1694442 - DNA, 25 bp, Homo sapien
taatcttagggatcaaggtgcatcc

SEQ ID NO: 1694443 - DNA, 25 bp, Homo sapien
ttagtttaatgaacctacagtcctc

SEQ ID NO: 1694444 - DNA, 25 bp, Homo sapien
tagtttaatgaacctacagtcctcc

SEQ ID NO: 1694445 - DNA, 25 bp, Homo sapien
cttagtttaatgaacctacagtcct

SEQ ID NO: 1694446 - DNA, 25 bp, Homo sapien
agtttaatgaacctacagtcctccg

SEQ ID NO: 1694447 - DNA, 25 bp, Homo sapien
taaagcagtattctcatacaccgga

SEQ ID NO: 1694448 - DNA, 25 bp, Homo sapien
tgtatagctcaaaccaaaaacctta

SEQ ID NO: 1694449 - DNA, 25 bp, Homo sapien
tgttctaggtaattggcttcatggg

SEQ ID NO: 1694450 - DNA, 25 bp, Homo sapien
aactacgatcggctttaaagcagta

SEQ ID NO: 1694451 - DNA, 25 bp, Homo sapien
tgcttaatgagcctacagtcctccg

SEQ ID NO: 1694452 - DNA, 25 bp, Homo sapien
gataccttgcttaatgagcctacag

SEQ ID NO: 1694453 - DNA, 25 bp, Homo sapien
cagcgacctaaggataccttgctta

SEQ ID NO: 1694454 - DNA, 25 bp, Homo sapien
ccttgcttaatgagcctacagtcct

SEQ ID NO: 1694455 - DNA, 25 bp, Homo sapien
cctcccttagaatagataggaccat

SEQ ID NO: 1694456 - DNA, 25 bp, Homo sapien
cagctgtcctgtccgcttagcacct

SEQ ID NO: 1694457 - DNA, 25 bp, Homo sapien
tattgcgcgtgttgtccagctgtcc

SEQ ID NO: 1694458 - DNA, 25 bp, Homo sapien
ggaccattgcccttattgcgcgtgt

SEQ ID NO: 1694459 - DNA, 25 bp, Homo sapien
cattcaaacccctacagtcctccgc

SEQ ID NO: 1694460 - DNA, 25 bp, Homo sapien
acattcaaacccctacagtcctccg

SEQ ID NO: 1694461 - DNA, 25 bp, Homo sapien
gttgactgacacgagcggcacgacg

SEQ ID NO: 1694462 - DNA, 25 bp, Homo sapien
aaagtgccttgccaactgacgcaaa

SEQ ID NO: 1694463 - DNA, 25 bp, Homo sapien
gcacgacggccgtaaagtgccttgc

SEQ ID NO: 1694464 - DNA, 25 bp, Homo sapien
actgacgcaaaacgcgtgcgacggc

SEQ ID NO: 1694465 - DNA, 25 bp, Homo sapien
gccttctccgattcctctgcctcca

SEQ ID NO: 1694466 - DNA, 25 bp, Homo sapien
tgccacaggccgcttcttcggattc

SEQ ID NO: 1694467 - DNA, 25 bp, Homo sapien
ttgctgccacaggccgcttcttcgg

SEQ ID NO: 1694468 - DNA, 25 bp, Homo sapien
agcggctcttgctccgttgcggcct

SEQ ID NO: 1694469 - DNA, 25 bp, Homo sapien
aagacgcgtccgacctcgccatagg

SEQ ID NO: 1694470 - DNA, 25 bp, Homo sapien
gaagcgcggcgggatatggcccagg

SEQ ID NO: 1694471 - DNA, 25 bp, Homo sapien
gacctcgccataggcgctgagaagg

SEQ ID NO: 1694472 - DNA, 25 bp, Homo sapien
agcctgaaagaagacgcgtccgacc

SEQ ID NO: 1694473 - DNA, 25 bp, Homo sapien
tgaacgctgcttaaaaccggcacaa

SEQ ID NO: 1694474 - DNA, 25 bp, Homo sapien
tgaagagtttttgcccaggaggaag

SEQ ID NO: 1694475 - DNA, 25 bp, Homo sapien
gaggaagggaactgtaaatcgcacc

SEQ ID NO: 1694476 - DNA, 25 bp, Homo sapien
caaatagtttcttgacctaggcagc

SEQ ID NO: 1694477 - DNA, 25 bp, Homo sapien
gaccgcttttttcctccggcagctg

SEQ ID NO: 1694478 - DNA, 25 bp, Homo sapien
ttcttcttgcgtctcacgaaccggt

SEQ ID NO: 1694479 - DNA, 25 bp, Homo sapien
tgtagtccttggtgtaggaccgctt

SEQ ID NO: 1694480 - DNA, 25 bp, Homo sapien
tgaggttccaaagatcataacggaa

SEQ ID NO: 1694481 - DNA, 25 bp, Homo sapien
tcacgcttggcttgagcaacctccg

SEQ ID NO: 1694482 - DNA, 25 bp, Homo sapien
gaagatagaagtcggtctcacgctt

SEQ ID NO: 1694483 - DNA, 25 bp, Homo sapien
agcagggtccccatcggccgcaaga

SEQ ID NO: 1694484 - DNA, 25 bp, Homo sapien
catcggccgcaagaaagcgttgtcc

SEQ ID NO: 1694485 - DNA, 25 bp, Homo sapien
gttgccaggcgagcccgttcacgtc

SEQ ID NO: 1694486 - DNA, 25 bp, Homo sapien
agccctttgttggagcgggccttgt

SEQ ID NO: 1694487 - DNA, 25 bp, Homo sapien
ctccatgctctctgagggtggcggg

SEQ ID NO: 1694488 - DNA, 25 bp, Homo sapien
tcaggagtccctgacaagggaaggt

SEQ ID NO: 1694489 - DNA, 25 bp, Homo sapien
ccaggcacatacaggagttcggagt

SEQ ID NO: 1694490 - DNA, 25 bp, Homo sapien
cagtaaaatgtctgcccgggtagtc

SEQ ID NO: 1694491 - DNA, 25 bp, Homo sapien
caaaactccatgtttgggccatcag

SEQ ID NO: 1694492 - DNA, 25 bp, Homo sapien
tatgaattaggtgactcagccaggc

SEQ ID NO: 1694493 - DNA, 25 bp, Homo sapien
cagagaaagattgcctggactaggc

SEQ ID NO: 1694494 - DNA, 25 bp, Homo sapien
tcacctgtgactgctaaacagagaa

SEQ ID NO: 1694495 - DNA, 25 bp, Homo sapien
cagacgtaggcagccaagagtcaaa

SEQ ID NO: 1694496 - DNA, 25 bp, Homo sapien
gatgctaataccaccctcacctgtg

SEQ ID NO: 1694497 - DNA, 25 bp, Homo sapien
ccatatgtaagtgcacctgaggtgc

SEQ ID NO: 1694498 - DNA, 25 bp, Homo sapien
tggaaaacttggtgaggactgactc

SEQ ID NO: 1694499 - DNA, 25 bp, Homo sapien
caatcaggttcccattgagaggact

SEQ ID NO: 1694500 - DNA, 25 bp, Homo sapien
ggtgcactggttctctactaggctt

SEQ ID NO: 1694501 - DNA, 25 bp, Homo sapien
ctttaagacatcaatgatctgagga

SEQ ID NO: 1694502 - DNA, 25 bp, Homo sapien
ggtatgtgggttgtgagaaatgtta

SEQ ID NO: 1694503 - DNA, 25 bp, Homo sapien
tttgtgtgccaagtataagaggtat

SEQ ID NO: 1694504 - DNA, 25 bp, Homo sapien
tgaggaaacaattcacatgaaacaa

SEQ ID NO: 1694505 - DNA, 25 bp, Homo sapien
caccttggtatctctttatctagca

SEQ ID NO: 1694506 - DNA, 25 bp, Homo sapien
taaaaccccagtatgtctactgtac

SEQ ID NO: 1694507 - DNA, 25 bp, Homo sapien
taagctgttagcaactagagggaaa

SEQ ID NO: 1694508 - DNA, 25 bp, Homo sapien
ttatctagcagaagtagcaatgggc

SEQ ID NO: 1694509 - DNA, 25 bp, Homo sapien
aacatactgttatctaacgctgtcc

SEQ ID NO: 1694510 - DNA, 25 bp, Homo sapien
aaagtcaagatgaaagttcctagga

SEQ ID NO: 1694511 - DNA, 25 bp, Homo sapien
tattttcctacactcaatgggctta

SEQ ID NO: 1694512 - DNA, 25 bp, Homo sapien
acctgtgacttacttagcttgcctg

SEQ ID NO: 1694513 - DNA, 25 bp, Homo sapien
ttccaatacacggagaagtagcctc

SEQ ID NO: 1694514 - DNA, 25 bp, Homo sapien
ggcacaattggttagcgcgttcggc

SEQ ID NO: 1694515 - DNA, 25 bp, Homo sapien
aagtcactcggccaaggtcttgcag

SEQ ID NO: 1694516 - DNA, 25 bp, Homo sapien
cctcgggtgccggaatttcatgaga

SEQ ID NO: 1694517 - DNA, 25 bp, Homo sapien
tcctaatgtaacctgactcttgggc

SEQ ID NO: 1694518 - DNA, 25 bp, Homo sapien
tatgcaacagccttccagtggtttc

SEQ ID NO: 1694519 - DNA, 25 bp, Homo sapien
tcaggctcgcagtttggtggacaag

SEQ ID NO: 1694520 - DNA, 25 bp, Homo sapien
gatgtatccgaatgcctagaactgt

SEQ ID NO: 1694521 - DNA, 25 bp, Homo sapien
aaagctcagctaaccctaagtgcgg

SEQ ID NO: 1694522 - DNA, 25 bp, Homo sapien
gattttctgtaagacgtttggccca

SEQ ID NO: 1694523 - DNA, 25 bp, Homo sapien
gcaagcagattcgatgacctccagt

SEQ ID NO: 1694524 - DNA, 25 bp, Homo sapien
tcacttaggagaacaagcacttggg

SEQ ID NO: 1694525 - DNA, 25 bp, Homo sapien
aaaccaattcctgtaagcatcccaa

SEQ ID NO: 1694526 - DNA, 25 bp, Homo sapien
tcaggctgacaggtctgccaagtcc

SEQ ID NO: 1694527 - DNA, 25 bp, Homo sapien
tatttaggctagtatagaagcccaa

SEQ ID NO: 1694528 - DNA, 25 bp, Homo sapien
catatacagatccttctggatcttc

SEQ ID NO: 1694529 - DNA, 25 bp, Homo sapien
gttgactcctgcttctaccacatta

SEQ ID NO: 1694530 - DNA, 25 bp, Homo sapien
ctggttgactcctgcttctaccaca

SEQ ID NO: 1694531 - DNA, 25 bp, Homo sapien
tgactcctgcttctaccacattact

SEQ ID NO: 1694532 - DNA, 25 bp, Homo sapien
tcctggttgactcctgcttctacca

SEQ ID NO: 1694533 - DNA, 25 bp, Homo sapien
atccctccaagagccccttgaccag

SEQ ID NO: 1694534 - DNA, 25 bp, Homo sapien
tgaccactagaataagtctcatcat

SEQ ID NO: 1694535 - DNA, 25 bp, Homo sapien
aaatgacattggcagctcctacagc

SEQ ID NO: 1694536 - DNA, 25 bp, Homo sapien
tagaataagtctcatcatccctcca

SEQ ID NO: 1694537 - DNA, 25 bp, Homo sapien
gaagtacaaacctcataaggcatcg

SEQ ID NO: 1694538 - DNA, 25 bp, Homo sapien
tatataatgtatgccctcggaaggg

SEQ ID NO: 1694539 - DNA, 25 bp, Homo sapien
tggcatcacttagcgctttcaggac

SEQ ID NO: 1694540 - DNA, 25 bp, Homo sapien
ttgtccaccagcgaagccatactgg

SEQ ID NO: 1694541 - DNA, 25 bp, Homo sapien
tccggagagtaaccggaagtgctgt

SEQ ID NO: 1694542 - DNA, 25 bp, Homo sapien
cgccaggaagcccagattcgagtgt

SEQ ID NO: 1694543 - DNA, 25 bp, Homo sapien
taggtcttgtccgtgccgggttcgc

SEQ ID NO: 1694544 - DNA, 25 bp, Homo sapien
tagatctactatcgcagagtctgcg

SEQ ID NO: 1694545 - DNA, 25 bp, Homo sapien
catcttcgtggatgacagcgctgcc

SEQ ID NO: 1694546 - DNA, 25 bp, Homo sapien
tgagtcctcggttaacagccttggg

SEQ ID NO: 1694547 - DNA, 25 bp, Homo sapien
gaagactcggctcctattggcccag

SEQ ID NO: 1694548 - DNA, 25 bp, Homo sapien
tcttcttagacagggtggcagcgat

SEQ ID NO: 1694549 - DNA, 25 bp, Homo sapien
ggtgacaaaaatcggagacttgaaa

SEQ ID NO: 1694550 - DNA, 25 bp, Homo sapien
gagaagggtgacaaaaatcggagac

SEQ ID NO: 1694551 - DNA, 25 bp, Homo sapien
gtgagaagggtgacaaaaatcggag

SEQ ID NO: 1694552 - DNA, 25 bp, Homo sapien
aagggtgacaaaaatcggagacttg

SEQ ID NO: 1694553 - DNA, 25 bp, Homo sapien
gggttagctcagttactccagagct

SEQ ID NO: 1694554 - DNA, 25 bp, Homo sapien
ccagggtctatttgaaaccttagag

SEQ ID NO: 1694555 - DNA, 25 bp, Homo sapien
gggttgtaacctcaatctgtaaatc

SEQ ID NO: 1694556 - DNA, 25 bp, Homo sapien
gagaaagcgctatggtcattgctgg

SEQ ID NO: 1694557 - DNA, 25 bp, Homo sapien
gctctcaagagctgatgcgggactt

SEQ ID NO: 1694558 - DNA, 25 bp, Homo sapien
acaagattgtttctctccgccacgg

SEQ ID NO: 1694559 - DNA, 25 bp, Homo sapien
tgctagggtaaagcaagagctcacg

SEQ ID NO: 1694560 - DNA, 25 bp, Homo sapien
tgcttaaccatcttgacctcctgaa

SEQ ID NO: 1694561 - DNA, 25 bp, Homo sapien
cttgttccttgtagctgagactctc

SEQ ID NO: 1694562 - DNA, 25 bp, Homo sapien
gactctctgggggttgtgagatggt

SEQ ID NO: 1694563 - DNA, 25 bp, Homo sapien
tcacttgttccttgtagctgagact

SEQ ID NO: 1694564 - DNA, 25 bp, Homo sapien
tctctgggggttgtgagatggtcca

SEQ ID NO: 1694565 - DNA, 25 bp, Homo sapien
gaagtttagggtattccaggacaga

SEQ ID NO: 1694566 - DNA, 25 bp, Homo sapien
tgtttatccttagtgggtggcctgg

SEQ ID NO: 1694567 - DNA, 25 bp, Homo sapien
cacgtcccagcaaagaagacctatc

SEQ ID NO: 1694568 - DNA, 25 bp, Homo sapien
ggaaaactcacgctgccaaaatgtg

SEQ ID NO: 1694569 - DNA, 25 bp, Homo sapien
gaatgtgggcattgatcccactacc

SEQ ID NO: 1694570 - DNA, 25 bp, Homo sapien
gtgggcattgatcccactacctctt

SEQ ID NO: 1694571 - DNA, 25 bp, Homo sapien
ggagaatgtgggcattgatcccact

SEQ ID NO: 1694572 - DNA, 25 bp, Homo sapien
actacctcttgcatgctaagcaagc

SEQ ID NO: 1694573 - DNA, 25 bp, Homo sapien
accaaagacaccgagagcagtgtct

SEQ ID NO: 1694574 - DNA, 25 bp, Homo sapien
tgaaccaaagacaccgagagcagtg

SEQ ID NO: 1694575 - DNA, 25 bp, Homo sapien
ctcctatgtcttgaaccaaagacac

SEQ ID NO: 1694576 - DNA, 25 bp, Homo sapien
gctcctatgtcttgaaccaaagaca

SEQ ID NO: 1694577 - DNA, 25 bp, Homo sapien
caaagtgtgtgcaacccagtggtca

SEQ ID NO: 1694578 - DNA, 25 bp, Homo sapien
ggcccctatggttcctgatgcgaaa

SEQ ID NO: 1694579 - DNA, 25 bp, Homo sapien
ggtgcgtccacaagctcatgaacaa

SEQ ID NO: 1694580 - DNA, 25 bp, Homo sapien
taagttgttcgggattagagccact

SEQ ID NO: 1694581 - DNA, 25 bp, Homo sapien
tgtggcccagtcatctagcttttcc

SEQ ID NO: 1694582 - DNA, 25 bp, Homo sapien
ggcccagtcatctagcttttccctt

SEQ ID NO: 1694583 - DNA, 25 bp, Homo sapien
cttgtggcccagtcatctagctttt

SEQ ID NO: 1694584 - DNA, 25 bp, Homo sapien
cagagatcttagtcactcttctttt

SEQ ID NO: 1694585 - DNA, 25 bp, Homo sapien
gaggtagacatatgacatagcttgt

SEQ ID NO: 1694586 - DNA, 25 bp, Homo sapien
tgtattcaaaccactaagaagccaa

SEQ ID NO: 1694587 - DNA, 25 bp, Homo sapien
catagcttgtagtttcttgtgtaat

SEQ ID NO: 1694588 - DNA, 25 bp, Homo sapien
tatctcttcaccacgccttgtattc

SEQ ID NO: 1694589 - DNA, 25 bp, Homo sapien
gaccttcagagcagacaattggaag

SEQ ID NO: 1694590 - DNA, 25 bp, Homo sapien
tggaagagaaatttcccctgcttcc

SEQ ID NO: 1694591 - DNA, 25 bp, Homo sapien
tgaccttcagagcagacaattggaa

SEQ ID NO: 1694592 - DNA, 25 bp, Homo sapien
accttcagagcagacaattggaaga

SEQ ID NO: 1694593 - DNA, 25 bp, Homo sapien
ccttgcaactatgacgtagtatcac

SEQ ID NO: 1694594 - DNA, 25 bp, Homo sapien
cactgtgaattactgtacccaaaac

SEQ ID NO: 1694595 - DNA, 25 bp, Homo sapien
caaggtatgcgcttgagaaatattt

SEQ ID NO: 1694596 - DNA, 25 bp, Homo sapien
aaacagtctcttaacaaggtatgcg

SEQ ID NO: 1694597 - DNA, 25 bp, Homo sapien
tccaccgcagatattctggccaggc

SEQ ID NO: 1694598 - DNA, 25 bp, Homo sapien
cctgagcactctgtttgtactgaga

SEQ ID NO: 1694599 - DNA, 25 bp, Homo sapien
cacaacagagtaaaggatgtgtgcc

SEQ ID NO: 1694600 - DNA, 25 bp, Homo sapien
acaagatcgtttctctccaccgcag

SEQ ID NO: 1694601 - DNA, 25 bp, Homo sapien
acattctggtgatgctgtgcaggaa

SEQ ID NO: 1694602 - DNA, 25 bp, Homo sapien
cagtatttgtcaagacattgggtgg

SEQ ID NO: 1694603 - DNA, 25 bp, Homo sapien
gacaaagacactgggaagtcttgag

SEQ ID NO: 1694604 - DNA, 25 bp, Homo sapien
tgctgcagaatacatcctccataaa

SEQ ID NO: 1694605 - DNA, 25 bp, Homo sapien
tataggttgcctccttgctaaggtg

SEQ ID NO: 1694606 - DNA, 25 bp, Homo sapien
gaaaagcctggccacttggagatat

SEQ ID NO: 1694607 - DNA, 25 bp, Homo sapien
tatggtggagaaaaccgggctgttc

SEQ ID NO: 1694608 - DNA, 25 bp, Homo sapien
caacaaaattacagagcagagccat

SEQ ID NO: 1694609 - DNA, 25 bp, Homo sapien
ccactacctcttgcatgctaagcaa

SEQ ID NO: 1694610 - DNA, 25 bp, Homo sapien
aatgtgggcatcgatcccactacct

SEQ ID NO: 1694611 - DNA, 25 bp, Homo sapien
actacctcttgcatgctaagcaagc

SEQ ID NO: 1694612 - DNA, 25 bp, Homo sapien
gagaatgtgggcatcgatcccacta

SEQ ID NO: 1694613 - DNA, 25 bp, Homo sapien
ggctcctgggttcccgatgagaaat

SEQ ID NO: 1694614 - DNA, 25 bp, Homo sapien
tttcagccattaattcttcacagtt

SEQ ID NO: 1694615 - DNA, 25 bp, Homo sapien
gaagatacttttgctccacatacca

SEQ ID NO: 1694616 - DNA, 25 bp, Homo sapien
cacataccattctgggttgataatg

SEQ ID NO: 1694617 - DNA, 25 bp, Homo sapien
ctggttgttaagtggtctagggatt

SEQ ID NO: 1694618 - DNA, 25 bp, Homo sapien
catctagatacaatgacaactgcat

SEQ ID NO: 1694619 - DNA, 25 bp, Homo sapien
ttcaatctggttgttaagtggtcta

SEQ ID NO: 1694620 - DNA, 25 bp, Homo sapien
agtctgttatgtctacccagacatt

SEQ ID NO: 1694621 - DNA, 25 bp, Homo sapien
tccaggtaccggtgcgttctctgtt

SEQ ID NO: 1694622 - DNA, 25 bp, Homo sapien
aggtaccggtgcgttctctgttcac

SEQ ID NO: 1694623 - DNA, 25 bp, Homo sapien
gttgtccaggtaccggtgcgttctc

SEQ ID NO: 1694624 - DNA, 25 bp, Homo sapien
tgtccaggtaccggtgcgttctctg

SEQ ID NO: 1694625 - DNA, 25 bp, Homo sapien
gcatctctatgactggagacattca

SEQ ID NO: 1694626 - DNA, 25 bp, Homo sapien
gaattatactaggagacttagggag

SEQ ID NO: 1694627 - DNA, 25 bp, Homo sapien
gggagtttacttgatgtagtctgac

SEQ ID NO: 1694628 - DNA, 25 bp, Homo sapien
gaaacaattgtaactgtcttgctgc

SEQ ID NO: 1694629 - DNA, 25 bp, Homo sapien
caagtttagagtattccgggacaga

SEQ ID NO: 1694630 - DNA, 25 bp, Homo sapien
gacagaaaagggcacgtcctagcaa

SEQ ID NO: 1694631 - DNA, 25 bp, Homo sapien
tcacaacgggaaaacttcacgctgc

SEQ ID NO: 1694632 - DNA, 25 bp, Homo sapien
gcacgtcctagcaaaggaggacctg

SEQ ID NO: 1694633 - DNA, 25 bp, Homo sapien
ggcagcattatttattgttagcagg

SEQ ID NO: 1694634 - DNA, 25 bp, Homo sapien
cattatttattgttagcaggtggcc

SEQ ID NO: 1694635 - DNA, 25 bp, Homo sapien
catcagggcagcattatttattgtt

SEQ ID NO: 1694636 - DNA, 25 bp, Homo sapien
ttatttattgttagcaggtggcctg

SEQ ID NO: 1694637 - DNA, 25 bp, Homo sapien
ccactacctcttgcgtgctaagcaa

SEQ ID NO: 1694638 - DNA, 25 bp, Homo sapien
gcatcgatcccactacctcttgcgt

SEQ ID NO: 1694639 - DNA, 25 bp, Homo sapien
gatcccactacctcttgcgtgctaa

SEQ ID NO: 1694640 - DNA, 25 bp, Homo sapien
cttgcgtgctaagcaagcgctctac

SEQ ID NO: 1694641 - DNA, 25 bp, Homo sapien
tctgttactctcaatatatgggtct

SEQ ID NO: 1694642 - DNA, 25 bp, Homo sapien
tgaactttacactctgttactctca

SEQ ID NO: 1694643 - DNA, 25 bp, Homo sapien
tacactctgttactctcaatatatg

SEQ ID NO: 1694644 - DNA, 25 bp, Homo sapien
tttgaactttacactctgttactct

SEQ ID NO: 1694645 - DNA, 25 bp, Homo sapien
aactcaggaaactcttagcaatagc

SEQ ID NO: 1694646 - DNA, 25 bp, Homo sapien
caggaaactcttagcaatagctcca

SEQ ID NO: 1694647 - DNA, 25 bp, Homo sapien
ctcaggaaactcttagcaatagctc

SEQ ID NO: 1694648 - DNA, 25 bp, Homo sapien
aaaactcaggaaactcttagcaata

SEQ ID NO: 1694649 - DNA, 25 bp, Homo sapien
tacacttgactagggttcccggtgc

SEQ ID NO: 1694650 - DNA, 25 bp, Homo sapien
caaggaaccacttgcgctggtgcgt

SEQ ID NO: 1694651 - DNA, 25 bp, Homo sapien
tgagtgaaggtctcgtctcccacga

SEQ ID NO: 1694652 - DNA, 25 bp, Homo sapien
acatcgtccccgttcctgagtgaag

SEQ ID NO: 1694653 - DNA, 25 bp, Homo sapien
gctaagcgagtactctaccacttgc

SEQ ID NO: 1694654 - DNA, 25 bp, Homo sapien
cctctcacatgctaagcgagtactc

SEQ ID NO: 1694655 - DNA, 25 bp, Homo sapien
acctctcacatgctaagcgagtact

SEQ ID NO: 1694656 - DNA, 25 bp, Homo sapien
gagtactctaccacttgcgctcact

SEQ ID NO: 1694657 - DNA, 25 bp, Homo sapien
tgcgttaccaggatcaattgtacct

SEQ ID NO: 1694658 - DNA, 25 bp, Homo sapien
cagaaaccttagtcactcttacact

SEQ ID NO: 1694659 - DNA, 25 bp, Homo sapien
ttccctcagaaaccttagtcactct

SEQ ID NO: 1694660 - DNA, 25 bp, Homo sapien
tccagtatttcataggaccgtctgg

SEQ ID NO: 1694661 - DNA, 25 bp, Homo sapien
tgccctctctgaggcttgaactcag

SEQ ID NO: 1694662 - DNA, 25 bp, Homo sapien
agattatgagactgacgcgctgcca

SEQ ID NO: 1694663 - DNA, 25 bp, Homo sapien
cgctgccagctgcgctaagagggct

SEQ ID NO: 1694664 - DNA, 25 bp, Homo sapien
gccctctctgaggcttgaactcagg

SEQ ID NO: 1694665 - DNA, 25 bp, Homo sapien
gagaaagcgctatggcagttgctgg

SEQ ID NO: 1694666 - DNA, 25 bp, Homo sapien
aagcgctatggcagttgctggaaga

SEQ ID NO: 1694667 - DNA, 25 bp, Homo sapien
gcaagcgctctaccgcttgagctaa

SEQ ID NO: 1694668 - DNA, 25 bp, Homo sapien
aatgtgggcatcgatcccactacct

SEQ ID NO: 1694669 - DNA, 25 bp, Homo sapien
gagaatgtgggcatcgatcccacta

SEQ ID NO: 1694670 - DNA, 25 bp, Homo sapien
ccactacctcttgcatgctaagcaa

SEQ ID NO: 1694671 - DNA, 25 bp, Homo sapien
ggagaatgtgggcatcaatcccact

SEQ ID NO: 1694672 - DNA, 25 bp, Homo sapien
tctcacatgctaagcgagcactcca

SEQ ID NO: 1694673 - DNA, 25 bp, Homo sapien
gctaagcgagcactccaccacttga

SEQ ID NO: 1694674 - DNA, 25 bp, Homo sapien
gagcactccaccacttgagctactt

SEQ ID NO: 1694675 - DNA, 25 bp, Homo sapien
ggagatccaggtacgcatttgtttt

SEQ ID NO: 1694676 - DNA, 25 bp, Homo sapien
gatccaggtacgcatttgttttagc

SEQ ID NO: 1694677 - DNA, 25 bp, Homo sapien
cgcatttgttttagcggcattcacc

SEQ ID NO: 1694678 - DNA, 25 bp, Homo sapien
tccaggtacgcatttgttttagcgg

SEQ ID NO: 1694679 - DNA, 25 bp, Homo sapien
gggttgcgtttgcagttcagtgttc

SEQ ID NO: 1694680 - DNA, 25 bp, Homo sapien
cgctgaatcgtagggttgcgtttgc

SEQ ID NO: 1694681 - DNA, 25 bp, Homo sapien
acgtagttcgctgaatcgtagggtt

SEQ ID NO: 1694682 - DNA, 25 bp, Homo sapien
aatcgtagggttgcgtttgcagttc

SEQ ID NO: 1694683 - DNA, 25 bp, Homo sapien
aggaactggcggcaattccttccgt

SEQ ID NO: 1694684 - DNA, 25 bp, Homo sapien
cctgggtggggacttatactggcct

SEQ ID NO: 1694685 - DNA, 25 bp, Homo sapien
tcaatttcttcacgggtcgctcaga

SEQ ID NO: 1694686 - DNA, 25 bp, Homo sapien
cttgacggcccgtggaaaggaactg

SEQ ID NO: 1694687 - DNA, 25 bp, Homo sapien
tattcaaccaccttgtcgacgctgc

SEQ ID NO: 1694688 - DNA, 25 bp, Homo sapien
tactgtgggtgttcctgcgtattca

SEQ ID NO: 1694689 - DNA, 25 bp, Homo sapien
tttgggacagaaggcatcaacctcg

SEQ ID NO: 1694690 - DNA, 25 bp, Homo sapien
tctaaaggtcatgagtcgggctgca

SEQ ID NO: 1694691 - DNA, 25 bp, Homo sapien
gtcacccaggtactcgctctcttgt

SEQ ID NO: 1694692 - DNA, 25 bp, Homo sapien
gtctcttcacggatcaccgaaaccg

SEQ ID NO: 1694693 - DNA, 25 bp, Homo sapien
ttctccgggatgtaacagactcggg

SEQ ID NO: 1694694 - DNA, 25 bp, Homo sapien
aggcctccagggtgactaaagagag

SEQ ID NO: 1694695 - DNA, 25 bp, Homo sapien
ctcgcccttgggcaagtgcagaatc

SEQ ID NO: 1694696 - DNA, 25 bp, Homo sapien
cctcgcccttgggcaagtgcagaat

SEQ ID NO: 1694697 - DNA, 25 bp, Homo sapien
gatgggatctggcatgcgtttgtca

SEQ ID NO: 1694698 - DNA, 25 bp, Homo sapien
cgtaaggattttatgtcgtgagaca

SEQ ID NO: 1694699 - DNA, 25 bp, Homo sapien
tgagctttaaagacagatgggatct

SEQ ID NO: 1694700 - DNA, 25 bp, Homo sapien
cgtgtctaacgtcacacattgagct

SEQ ID NO: 1694701 - DNA, 25 bp, Homo sapien
tttaggttactctaagtccttcaga

SEQ ID NO: 1694702 - DNA, 25 bp, Homo sapien
atttaggttactctaagtccttcag

SEQ ID NO: 1694703 - DNA, 25 bp, Homo sapien
tatttaggttactctaagtccttca

SEQ ID NO: 1694704 - DNA, 25 bp, Homo sapien
ttctgggagacagcctcagacctgg

SEQ ID NO: 1694705 - DNA, 25 bp, Homo sapien
gaatgaagtttctgggagacagcct

SEQ ID NO: 1694706 - DNA, 25 bp, Homo sapien
cgaggaatgaagtttctgggagaca

SEQ ID NO: 1694707 - DNA, 25 bp, Homo sapien
caaggcgaagcgaggaatgaagttt

SEQ ID NO: 1694708 - DNA, 25 bp, Homo sapien
tccagcttttcaaacacctccggga

SEQ ID NO: 1694709 - DNA, 25 bp, Homo sapien
aggcgtcgatcctgctacctcttgc

SEQ ID NO: 1694710 - DNA, 25 bp, Homo sapien
tgctacctcttgcatgctaagcaag

SEQ ID NO: 1694711 - DNA, 25 bp, Homo sapien
gagagtgcaggcgtcgatcctgcta

SEQ ID NO: 1694712 - DNA, 25 bp, Homo sapien
gtgcaggcgtcgatcctgctacctc

SEQ ID NO: 1694713 - DNA, 25 bp, Homo sapien
tgcaggcaaggccgcccggaagtag

SEQ ID NO: 1694714 - DNA, 25 bp, Homo sapien
gaacttcacgccatacgcgccgcat

SEQ ID NO: 1694715 - DNA, 25 bp, Homo sapien
aggcaaggccgcccggaagtagtgg

SEQ ID NO: 1694716 - DNA, 25 bp, Homo sapien
agccccagaacttcacgccatacgc

SEQ ID NO: 1694717 - DNA, 25 bp, Homo sapien
cacgttccagttggagaagcaccac

SEQ ID NO: 1694718 - DNA, 25 bp, Homo sapien
tctcggaagtagagagcacgttcca

SEQ ID NO: 1694719 - DNA, 25 bp, Homo sapien
tgcagcccgctctagagctgtgatc

SEQ ID NO: 1694720 - DNA, 25 bp, Homo sapien
gcttgcgggcacagctattgcagcc

SEQ ID NO: 1694721 - DNA, 25 bp, Homo sapien
gagaatgcgggcgtcgatcccgcta

SEQ ID NO: 1694722 - DNA, 25 bp, Homo sapien
cgcatgctaagcgagcgctctaccg

SEQ ID NO: 1694723 - DNA, 25 bp, Homo sapien
gcgggcgtcgatcccgctacctctc

SEQ ID NO: 1694724 - DNA, 25 bp, Homo sapien
ctctaccgcctgagctaattcccca

SEQ ID NO: 1694725 - DNA, 25 bp, Homo sapien
tctggaggagacgatatttgtgaag

SEQ ID NO: 1694726 - DNA, 25 bp, Homo sapien
gggcatcacttttagctgtacttgt

SEQ ID NO: 1694727 - DNA, 25 bp, Homo sapien
aattgagagatcgtgtgggcatcac

SEQ ID NO: 1694728 - DNA, 25 bp, Homo sapien
tgtagtaggaattgagagatcgtgt

SEQ ID NO: 1694729 - DNA, 25 bp, Homo sapien
gctacacggcgagtgggagggtggg

SEQ ID NO: 1694730 - DNA, 25 bp, Homo sapien
gcaggtgctcaaagacgaagaaaat

SEQ ID NO: 1694731 - DNA, 25 bp, Homo sapien
tcagagatgcagagtgctacacggc

SEQ ID NO: 1694732 - DNA, 25 bp, Homo sapien
gcgggaactccgagcaggtgctcaa

SEQ ID NO: 1694733 - DNA, 25 bp, Homo sapien
tataaataaatcaggtctgtttttc

SEQ ID NO: 1694734 - DNA, 25 bp, Homo sapien
caaacggttcccacggcaggggctg

SEQ ID NO: 1694735 - DNA, 25 bp, Homo sapien
gaagtataaataaatcaggtctgtt

SEQ ID NO: 1694736 - DNA, 25 bp, Homo sapien
ctttgaagtataaataaatcaggtc

SEQ ID NO: 1694737 - DNA, 25 bp, Homo sapien
agctgtacgcctgggtgtagatgtc

SEQ ID NO: 1694738 - DNA, 25 bp, Homo sapien
tttttatggtacacagacgacaggg

SEQ ID NO: 1694739 - DNA, 25 bp, Homo sapien
cagacgacagggaatcattgggcat

SEQ ID NO: 1694740 - DNA, 25 bp, Homo sapien
ggtgtagatgtcgaatacattgatc

SEQ ID NO: 1694741 - DNA, 25 bp, Homo sapien
agggtccgcgtcctcatcctccggc

SEQ ID NO: 1694742 - DNA, 25 bp, Homo sapien
cccacatgcctcaaatagccaatag

SEQ ID NO: 1694743 - DNA, 25 bp, Homo sapien
tagtccggaaaaatcccccacatgc

SEQ ID NO: 1694744 - DNA, 25 bp, Homo sapien
ttagcggaatttgtaacccgctcac

SEQ ID NO: 1694745 - DNA, 25 bp, Homo sapien
gttagcggaatttgtaacccgctca

SEQ ID NO: 1694746 - DNA, 25 bp, Homo sapien
tcaagcaagtggaaccgtgtcgggc

SEQ ID NO: 1694747 - DNA, 25 bp, Homo sapien
cttcccggcacttgtgatagctgta

SEQ ID NO: 1694748 - DNA, 25 bp, Homo sapien
tgatagctgtaacccgtattccctt

SEQ ID NO: 1694749 - DNA, 25 bp, Homo sapien
tgggtgctcgtttgacacgcgctcc

SEQ ID NO: 1694750 - DNA, 25 bp, Homo sapien
attggaaataatcttggaaaactag

SEQ ID NO: 1694751 - DNA, 25 bp, Homo sapien
tggaaataatcttggaaaactagcg

SEQ ID NO: 1694752 - DNA, 25 bp, Homo sapien
gaaataatcttggaaaactagcgac

SEQ ID NO: 1694753 - DNA, 25 bp, Homo sapien
ctattggaaataatcttggaaaact

SEQ ID NO: 1694754 - DNA, 25 bp, Homo sapien
ttccgatgggctaaaaaggagccta

SEQ ID NO: 1694755 - DNA, 25 bp, Homo sapien
cgattgtgaggttcttccgatgggc

SEQ ID NO: 1694756 - DNA, 25 bp, Homo sapien
ctatggcttccgattgtgaggttct

SEQ ID NO: 1694757 - DNA, 25 bp, Homo sapien
tgaggttcttccgatgggctaaaaa

SEQ ID NO: 1694758 - DNA, 25 bp, Homo sapien
tccaggtaagcatttgttttagcgg

SEQ ID NO: 1694759 - DNA, 25 bp, Homo sapien
aagcatttgttttagcggcattcac

SEQ ID NO: 1694760 - DNA, 25 bp, Homo sapien
agcatttgttttagcggcattcacc

SEQ ID NO: 1694761 - DNA, 25 bp, Homo sapien
ggagatccaggtaagcatttgtttt

SEQ ID NO: 1694762 - DNA, 25 bp, Homo sapien
tgacggcccgtggaaagaaactggc

SEQ ID NO: 1694763 - DNA, 25 bp, Homo sapien
tcaatttcttcacgggttgctcaga

SEQ ID NO: 1694764 - DNA, 25 bp, Homo sapien
cctgggtggggacttatattggcct

SEQ ID NO: 1694765 - DNA, 25 bp, Homo sapien
tggccttgacggcccgtggaaagaa

SEQ ID NO: 1694766 - DNA, 25 bp, Homo sapien
gagctcccggagagtgtttcttaat

SEQ ID NO: 1694767 - DNA, 25 bp, Homo sapien
tttgggacagaaggcatcaacctcg

SEQ ID NO: 1694768 - DNA, 25 bp, Homo sapien
ggacttatacctgtttcatcgagaa

SEQ ID NO: 1694769 - DNA, 25 bp, Homo sapien
tctaaaggtcatgagtcgggctgca

SEQ ID NO: 1694770 - DNA, 25 bp, Homo sapien
gcaggatgcggccccattacccagg

SEQ ID NO: 1694771 - DNA, 25 bp, Homo sapien
caggatgcggccccattacccagga

SEQ ID NO: 1694772 - DNA, 25 bp, Homo sapien
tgcaggatgcggccccattacccag

SEQ ID NO: 1694773 - DNA, 25 bp, Homo sapien
gtgggtgttcctgcgtattcaacca

SEQ ID NO: 1694774 - DNA, 25 bp, Homo sapien
tactgtgggtgttcctgcgtattca

SEQ ID NO: 1694775 - DNA, 25 bp, Homo sapien
ggtactgtgggtgttcctgcgtatt

SEQ ID NO: 1694776 - DNA, 25 bp, Homo sapien
actgtgggtgttcctgcgtattcaa

SEQ ID NO: 1694777 - DNA, 25 bp, Homo sapien
tcagctgatctcggcgttcagtcgt

SEQ ID NO: 1694778 - DNA, 25 bp, Homo sapien
cagtcgtgcgtgattttggatttgc

SEQ ID NO: 1694779 - DNA, 25 bp, Homo sapien
tgatctcggcgttcagtcgtgcgtg

SEQ ID NO: 1694780 - DNA, 25 bp, Homo sapien
gcgttcagtcgtgcgtgattttgga

SEQ ID NO: 1694781 - DNA, 25 bp, Homo sapien
acggattttgtgtcgtgaggcactc

SEQ ID NO: 1694782 - DNA, 25 bp, Homo sapien
aatcatacggattttgtgtcgtgag

SEQ ID NO: 1694783 - DNA, 25 bp, Homo sapien
catacggattttgtgtcgtgaggca

SEQ ID NO: 1694784 - DNA, 25 bp, Homo sapien
aaaaatcatacggattttgtgtcgt

SEQ ID NO: 1694785 - DNA, 25 bp, Homo sapien
ggaaggcagtgaccatcctctgctt

SEQ ID NO: 1694786 - DNA, 25 bp, Homo sapien
gaaggcagtgaccatcctctgcttt

SEQ ID NO: 1694787 - DNA, 25 bp, Homo sapien
aaggcagtgaccatcctctgctttt

SEQ ID NO: 1694788 - DNA, 25 bp, Homo sapien
tgcatgctaagcaggcaccctaccg

SEQ ID NO: 1694789 - DNA, 25 bp, Homo sapien
agcaggcaccctaccgcttgagcta

SEQ ID NO: 1694790 - DNA, 25 bp, Homo sapien
aggcgtcgatcctgctacctcttgc

SEQ ID NO: 1694791 - DNA, 25 bp, Homo sapien
cttgcatgctaagcaggcaccctac

SEQ ID NO: 1694792 - DNA, 25 bp, Homo sapien
aggagttgagaaagagaaagcttga

SEQ ID NO: 1694793 - DNA, 25 bp, Homo sapien
tagcactttcctcctgtaggactca

SEQ ID NO: 1694794 - DNA, 25 bp, Homo sapien
cctcctgtaggactcagaaagtgat

SEQ ID NO: 1694795 - DNA, 25 bp, Homo sapien
tttcctcctgtaggactcagaaagt

SEQ ID NO: 1694796 - DNA, 25 bp, Homo sapien
aatagcactttcctcctgtaggact

SEQ ID NO: 1694797 - DNA, 25 bp, Homo sapien
ccagagcttcacggcatagccgcat

SEQ ID NO: 1694798 - DNA, 25 bp, Homo sapien
ccagccccagagcttcacggcatag

SEQ ID NO: 1694799 - DNA, 25 bp, Homo sapien
cagctattccagcacgctctagagt

SEQ ID NO: 1694800 - DNA, 25 bp, Homo sapien
cacgctctagagttgtgatcgtcac

SEQ ID NO: 1694801 - DNA, 25 bp, Homo sapien
gcatagctaagcgagcgctccaccg

SEQ ID NO: 1694802 - DNA, 25 bp, Homo sapien
gtcgatctcgctacctctcgcatag

SEQ ID NO: 1694803 - DNA, 25 bp, Homo sapien
tctcgctacctctcgcatagctaag

SEQ ID NO: 1694804 - DNA, 25 bp, Homo sapien
ctcgcatagctaagcgagcgctcca

SEQ ID NO: 1694805 - DNA, 25 bp, Homo sapien
caacagttgatgaggaggaggtttt

SEQ ID NO: 1694806 - DNA, 25 bp, Homo sapien
tcaacagttgatgaggaggaggttt

SEQ ID NO: 1694807 - DNA, 25 bp, Homo sapien
agtcaacagttgatgaggaggaggt

SEQ ID NO: 1694808 - DNA, 25 bp, Homo sapien
gtcaacagttgatgaggaggaggtt

SEQ ID NO: 1694809 - DNA, 25 bp, Homo sapien
agcggcctgcaggatccacgtctgc

SEQ ID NO: 1694810 - DNA, 25 bp, Homo sapien
tgcaggatccacgtctgcattctcc

SEQ ID NO: 1694811 - DNA, 25 bp, Homo sapien
gtgggctaccttcgcttcccagttg

SEQ ID NO: 1694812 - DNA, 25 bp, Homo sapien
tctgggtgggctaccttcgcttccc

SEQ ID NO: 1694813 - DNA, 25 bp, Homo sapien
ggtacttgttatagctgtaatccac

SEQ ID NO: 1694814 - DNA, 25 bp, Homo sapien
cactccctttacagctagggtataa

SEQ ID NO: 1694815 - DNA, 25 bp, Homo sapien
tctaaaatatcaagcatgtggaatt

SEQ ID NO: 1694816 - DNA, 25 bp, Homo sapien
catgtggaattgtgtccggcccaga

SEQ ID NO: 1694817 - DNA, 25 bp, Homo sapien
tgggccccgtaagcttggcatgaac

SEQ ID NO: 1694818 - DNA, 25 bp, Homo sapien
ttgggccccgtaagcttggcatgaa

SEQ ID NO: 1694819 - DNA, 25 bp, Homo sapien
tgcattgggccccgtaagcttggca

SEQ ID NO: 1694820 - DNA, 25 bp, Homo sapien
cattgggccccgtaagcttggcatg

SEQ ID NO: 1694821 - DNA, 25 bp, Homo sapien
acccatagcatggatgctgttgagc

SEQ ID NO: 1694822 - DNA, 25 bp, Homo sapien
agcatggatgctgttgagcttccac

SEQ ID NO: 1694823 - DNA, 25 bp, Homo sapien
tagcatggatgctgttgagcttcca

SEQ ID NO: 1694824 - DNA, 25 bp, Homo sapien
catagcatggatgctgttgagcttc

SEQ ID NO: 1694825 - DNA, 25 bp, Homo sapien
gacgcgctgcccgctgcgctaagag

SEQ ID NO: 1694826 - DNA, 25 bp, Homo sapien
tgagactgacgcgctgcccgctgcg

SEQ ID NO: 1694827 - DNA, 25 bp, Homo sapien
ctctctgaggctcgaactcaggacc

SEQ ID NO: 1694828 - DNA, 25 bp, Homo sapien
cgctgcccgctgcgctaagagggcg

SEQ ID NO: 1694829 - DNA, 25 bp, Homo sapien
acccgcgaccttggcgttattagca

SEQ ID NO: 1694830 - DNA, 25 bp, Homo sapien
ttggcgttattagcaccacgctctg

SEQ ID NO: 1694831 - DNA, 25 bp, Homo sapien
cgttattagcaccacgctctgacca

SEQ ID NO: 1694832 - DNA, 25 bp, Homo sapien
gatcgaacccgcgaccttggcgtta

SEQ ID NO: 1694833 - DNA, 25 bp, Homo sapien
tttcttcaccatgaagtgtgaaggg

SEQ ID NO: 1694834 - DNA, 25 bp, Homo sapien
ttctttatccatgctatgatgttca

SEQ ID NO: 1694835 - DNA, 25 bp, Homo sapien
tctttatccatgctatgatgttcat

SEQ ID NO: 1694836 - DNA, 25 bp, Homo sapien
gttttcttcaccatgaagtgtgaag

SEQ ID NO: 1694837 - DNA, 25 bp, Homo sapien
cctttaacagaacgttggtgtagag

SEQ ID NO: 1694838 - DNA, 25 bp, Homo sapien
tctggccaaggtaataagcaaatac

SEQ ID NO: 1694839 - DNA, 25 bp, Homo sapien
tgcatactcaagaaaccctgtgaag

SEQ ID NO: 1694840 - DNA, 25 bp, Homo sapien
tggtgtagagcaaatcagcacaatc

SEQ ID NO: 1694841 - DNA, 25 bp, Homo sapien
cagtggttttagcagatagggagca

SEQ ID NO: 1694842 - DNA, 25 bp, Homo sapien
tctgactctggagtaacggaactct

SEQ ID NO: 1694843 - DNA, 25 bp, Homo sapien
tagtctgtctgtcagcggtcaggga

SEQ ID NO: 1694844 - DNA, 25 bp, Homo sapien
tgaacggtaggacctatcaccagct

SEQ ID NO: 1694845 - DNA, 25 bp, Homo sapien
taaatacaagatgctgtgttcagca

SEQ ID NO: 1694846 - DNA, 25 bp, Homo sapien
ggcatcaatgacagcagttacagta

SEQ ID NO: 1694847 - DNA, 25 bp, Homo sapien
gcatctcattttagaagaagaggca

SEQ ID NO: 1694848 - DNA, 25 bp, Homo sapien
cattttcttacatactcagtagaag

SEQ ID NO: 1694849 - DNA, 25 bp, Homo sapien
gtgagcacataatggcaccagtgac

SEQ ID NO: 1694850 - DNA, 25 bp, Homo sapien
tgagcacataatggcaccagtgaca

SEQ ID NO: 1694851 - DNA, 25 bp, Homo sapien
tggcccaaacaggaatgaggggcac

SEQ ID NO: 1694852 - DNA, 25 bp, Homo sapien
ggagcaacggggagatcccacaagc

SEQ ID NO: 1694853 - DNA, 25 bp, Homo sapien
ccaggggcaggagcaacggggagat

SEQ ID NO: 1694854 - DNA, 25 bp, Homo sapien
ctgccactcagtccaggggcaggag

SEQ ID NO: 1694855 - DNA, 25 bp, Homo sapien
caacggggagatcccacaagcaaag

SEQ ID NO: 1694856 - DNA, 25 bp, Homo sapien
gcagtgaaattgaaggcagaatcac

SEQ ID NO: 1694857 - DNA, 25 bp, Homo sapien
ggcagaatcaccaggatggaacaca

SEQ ID NO: 1694858 - DNA, 25 bp, Homo sapien
ctgtgcagtgaaattgaaggcagaa

SEQ ID NO: 1694859 - DNA, 25 bp, Homo sapien
gcagaatcaccaggatggaacacag

SEQ ID NO: 1694860 - DNA, 25 bp, Homo sapien
aagaggactccagtgtcccgcaggg

SEQ ID NO: 1694861 - DNA, 25 bp, Homo sapien
caaagggaaagaggactccagtgtc

SEQ ID NO: 1694862 - DNA, 25 bp, Homo sapien
gggaaagaggactccagtgtcccgc

SEQ ID NO: 1694863 - DNA, 25 bp, Homo sapien
gaaagaggactccagtgtcccgcag

SEQ ID NO: 1694864 - DNA, 25 bp, Homo sapien
atccctgccccgctgttttgctccg

SEQ ID NO: 1694865 - DNA, 25 bp, Homo sapien
cattgtaccgcaggggccgaactgt

SEQ ID NO: 1694866 - DNA, 25 bp, Homo sapien
gccccgctgttttgctccgctggcc

SEQ ID NO: 1694867 - DNA, 25 bp, Homo sapien
accgcaggggccgaactgtagaccg

SEQ ID NO: 1694868 - DNA, 25 bp, Homo sapien
ctgcagcgcactgttgatccgctgg

SEQ ID NO: 1694869 - DNA, 25 bp, Homo sapien
cagggcaatcttgcgtctacggggc

SEQ ID NO: 1694870 - DNA, 25 bp, Homo sapien
gcaatcttgcgtctacggggcctag

SEQ ID NO: 1694871 - DNA, 25 bp, Homo sapien
ggcagcagggcaatcttgcgtctac

SEQ ID NO: 1694872 - DNA, 25 bp, Homo sapien
actgccttgagtagtgaccccgacg

SEQ ID NO: 1694873 - DNA, 25 bp, Homo sapien
atccactgccttgagtagtgacccc

SEQ ID NO: 1694874 - DNA, 25 bp, Homo sapien
ccactgccttgagtagtgaccccga

SEQ ID NO: 1694875 - DNA, 25 bp, Homo sapien
ccttgagtagtgaccccgacgtggg

SEQ ID NO: 1694876 - DNA, 25 bp, Homo sapien
ctcgagctggcctttcgtttgcggc

SEQ ID NO: 1694877 - DNA, 25 bp, Homo sapien
gagctggcctttcgtttgcggcaca

SEQ ID NO: 1694878 - DNA, 25 bp, Homo sapien
gctggcctttcgtttgcggcacaat

SEQ ID NO: 1694879 - DNA, 25 bp, Homo sapien
ggcctttcgtttgcggcacaatctg

SEQ ID NO: 1694880 - DNA, 25 bp, Homo sapien
gagacagcctgaggtccgtcctaac

SEQ ID NO: 1694881 - DNA, 25 bp, Homo sapien
agagacagcctgaggtccgtcctaa

SEQ ID NO: 1694882 - DNA, 25 bp, Homo sapien
tcacaccgggtgtgacccgaagaga

SEQ ID NO: 1694883 - DNA, 25 bp, Homo sapien
ctgccgccttttcacaccgggtgtg

SEQ ID NO: 1694884 - DNA, 25 bp, Homo sapien
ctgttgatgcggggcctagaggcct

SEQ ID NO: 1694885 - DNA, 25 bp, Homo sapien
aggcctgggatcacggggagccacc

SEQ ID NO: 1694886 - DNA, 25 bp, Homo sapien
tgggatcacggggagccacccctgg

SEQ ID NO: 1694887 - DNA, 25 bp, Homo sapien
gggcctagaggcctgggatcacggg

SEQ ID NO: 1694888 - DNA, 25 bp, Homo sapien
ccttgagtagtgaccccgacgtggg

SEQ ID NO: 1694889 - DNA, 25 bp, Homo sapien
ccactgccttgagtagtgaccccga

SEQ ID NO: 1694890 - DNA, 25 bp, Homo sapien
actgccttgagtagtgaccccgacg

SEQ ID NO: 1694891 - DNA, 25 bp, Homo sapien
atccactgccttgagtagtgacccc

SEQ ID NO: 1694892 - DNA, 25 bp, Homo sapien
gagcttgagctggcctttcgtttgc

SEQ ID NO: 1694893 - DNA, 25 bp, Homo sapien
tccatagaactgtgggagcttgagc

SEQ ID NO: 1694894 - DNA, 25 bp, Homo sapien
tgagctggcctttcgtttgcggcac

SEQ ID NO: 1694895 - DNA, 25 bp, Homo sapien
gccttattttcacaccgggtgtgac

SEQ ID NO: 1694896 - DNA, 25 bp, Homo sapien
ctctgcagcagatgctagggggggc

SEQ ID NO: 1694897 - DNA, 25 bp, Homo sapien
cagatgctagggggggccactaggc

SEQ ID NO: 1694898 - DNA, 25 bp, Homo sapien
cttgggtctgtcctgctgtgcatcc

SEQ ID NO: 1694899 - DNA, 25 bp, Homo sapien
cagtcttgggacttgggtctgtcct

SEQ ID NO: 1694900 - DNA, 25 bp, Homo sapien
gaggagaacaggggtcctggtggtc

SEQ ID NO: 1694901 - DNA, 25 bp, Homo sapien
agaacaggggtcctggtggtctttg

SEQ ID NO: 1694902 - DNA, 25 bp, Homo sapien
tcctggtggtctttgtttcttccca

SEQ ID NO: 1694903 - DNA, 25 bp, Homo sapien
ctttgtttcttcccagacacgggag

SEQ ID NO: 1694904 - DNA, 25 bp, Homo sapien
gcagcgggatgaggctgacaccctc

SEQ ID NO: 1694905 - DNA, 25 bp, Homo sapien
ccttgagtagtgaccccgacgtggg

SEQ ID NO: 1694906 - DNA, 25 bp, Homo sapien
agcgggatgaggctgacaccctcct

SEQ ID NO: 1694907 - DNA, 25 bp, Homo sapien
tccactgccttgagtagtgaccccg

SEQ ID NO: 1694908 - DNA, 25 bp, Homo sapien
gccctggtgctgtatctgccgcctt

SEQ ID NO: 1694909 - DNA, 25 bp, Homo sapien
tgagtgtctgccctggtgctgtatc

SEQ ID NO: 1694910 - DNA, 25 bp, Homo sapien
ggtgctgtatctgccgccttttcac

SEQ ID NO: 1694911 - DNA, 25 bp, Homo sapien
ccctgggggtgagtgtctgccctgg

SEQ ID NO: 1694912 - DNA, 25 bp, Homo sapien
tgttgcaagtgaggacagtgtggga

SEQ ID NO: 1694913 - DNA, 25 bp, Homo sapien
aggacagtgtgggaaggccgtgagg

SEQ ID NO: 1694914 - DNA, 25 bp, Homo sapien
gagatggccttgtcctcaacgtgca

SEQ ID NO: 1694915 - DNA, 25 bp, Homo sapien
gtccgagatggccttgtcctcaacg

SEQ ID NO: 1694916 - DNA, 25 bp, Homo sapien
tgctttagaaacgggaggcccacca

SEQ ID NO: 1694917 - DNA, 25 bp, Homo sapien
cagtcttgggacttgggtctgtcct

SEQ ID NO: 1694918 - DNA, 25 bp, Homo sapien
cttgggtctgtcctgctgtgcatcc

SEQ ID NO: 1694919 - DNA, 25 bp, Homo sapien
tagaaacgggaggcccaccagaagc

SEQ ID NO: 1694920 - DNA, 25 bp, Homo sapien
agggggcaggaatcagcgaggtgac

SEQ ID NO: 1694921 - DNA, 25 bp, Homo sapien
ggaagggggcaggaatcagcgaggt

SEQ ID NO: 1694922 - DNA, 25 bp, Homo sapien
ctgggaagggggcaggaatcagcga

SEQ ID NO: 1694923 - DNA, 25 bp, Homo sapien
gggaagggggcaggaatcagcgagg

SEQ ID NO: 1694924 - DNA, 25 bp, Homo sapien
tgctgatacaggaccaaagcatcct

SEQ ID NO: 1694925 - DNA, 25 bp, Homo sapien
cctgctgatacaggaccaaagcatc

SEQ ID NO: 1694926 - DNA, 25 bp, Homo sapien
tcctgctgatacaggaccaaagcat

SEQ ID NO: 1694927 - DNA, 25 bp, Homo sapien
ctgctgatacaggaccaaagcatcc

SEQ ID NO: 1694928 - DNA, 25 bp, Homo sapien
ttgtctcctttattacatgggactc

SEQ ID NO: 1694929 - DNA, 25 bp, Homo sapien
tttgtctcctttattacatgggact

SEQ ID NO: 1694930 - DNA, 25 bp, Homo sapien
tgttgattctggcaagtgaaatcat

SEQ ID NO: 1694931 - DNA, 25 bp, Homo sapien
tgtcttgctattgttgattctggca

SEQ ID NO: 1694932 - DNA, 25 bp, Homo sapien
gaagagatcaaagcctgtcttgcta

SEQ ID NO: 1694933 - DNA, 25 bp, Homo sapien
ccattgtttgcatatgaatcagact

SEQ ID NO: 1694934 - DNA, 25 bp, Homo sapien
tcactcatgttacctgatggaaaat

SEQ ID NO: 1694935 - DNA, 25 bp, Homo sapien
cactcatgttacctgatggaaaatc

SEQ ID NO: 1694936 - DNA, 25 bp, Homo sapien
ctcactcatgttacctgatggaaaa

SEQ ID NO: 1694937 - DNA, 25 bp, Homo sapien
tctcactcatgttacctgatggaaa

SEQ ID NO: 1694938 - DNA, 25 bp, Homo sapien
aagaaggcctatttattgcattcat

SEQ ID NO: 1694939 - DNA, 25 bp, Homo sapien
ttgaagtaagaaggcctatttattg

SEQ ID NO: 1694940 - DNA, 25 bp, Homo sapien
cagttgattttgaagtaagaaggcc

SEQ ID NO: 1694941 - DNA, 25 bp, Homo sapien
aagtaagaaggcctatttattgcat

SEQ ID NO: 1694942 - DNA, 25 bp, Homo sapien
tctggttctttggtgtagtcctgaa

SEQ ID NO: 1694943 - DNA, 25 bp, Homo sapien
ccacacaatgcaacagagtgaagga

SEQ ID NO: 1694944 - DNA, 25 bp, Homo sapien
cacaatgcaacagagtgaaggagca

SEQ ID NO: 1694945 - DNA, 25 bp, Homo sapien
tagagagcagtcatgatggcctgca

SEQ ID NO: 1694946 - DNA, 25 bp, Homo sapien
ttatgtaacctcttccttgaaaaca

SEQ ID NO: 1694947 - DNA, 25 bp, Homo sapien
ttccttgaaaacaacaatttactca

SEQ ID NO: 1694948 - DNA, 25 bp, Homo sapien
tgtaacctcttccttgaaaacaaca

SEQ ID NO: 1694949 - DNA, 25 bp, Homo sapien
tccttgaaaacaacaatttactcat

SEQ ID NO: 1694950 - DNA, 25 bp, Homo sapien
taacttcgaacattattgatgttct

SEQ ID NO: 1694951 - DNA, 25 bp, Homo sapien
tttataacttcgaacattattgatg

SEQ ID NO: 1694952 - DNA, 25 bp, Homo sapien
tataacttcgaacattattgatgtt

SEQ ID NO: 1694953 - DNA, 25 bp, Homo sapien
ttataacttcgaacattattgatgt

SEQ ID NO: 1694954 - DNA, 25 bp, Homo sapien
ttttcaggatcaatgcgttgaggat

SEQ ID NO: 1694955 - DNA, 25 bp, Homo sapien
actactttgataccaactatatccg

SEQ ID NO: 1694956 - DNA, 25 bp, Homo sapien
gaggattaggaatggcaatgtgtat

SEQ ID NO: 1694957 - DNA, 25 bp, Homo sapien
aactatatccgatctaatgttggaa

SEQ ID NO: 1694958 - DNA, 25 bp, Homo sapien
ctgcagacaccttgttttctgactt

SEQ ID NO: 1694959 - DNA, 25 bp, Homo sapien
aggagaggttggtcctgcagacacc

SEQ ID NO: 1694960 - DNA, 25 bp, Homo sapien
ctagagcatccagaggagaggttgg

SEQ ID NO: 1694961 - DNA, 25 bp, Homo sapien
cctgcagacaccttgttttctgact

SEQ ID NO: 1694962 - DNA, 25 bp, Homo sapien
gaatatcaaagcacccttaactcat

SEQ ID NO: 1694963 - DNA, 25 bp, Homo sapien
gcatcagggtggaacaaactacacg

SEQ ID NO: 1694964 - DNA, 25 bp, Homo sapien
gctgaggcaggtgactccctttaag

SEQ ID NO: 1694965 - DNA, 25 bp, Homo sapien
gaaacaatgagtgtcatggtctgaa

SEQ ID NO: 1694966 - DNA, 25 bp, Homo sapien
tctccaggttatagcatttgaaggc

SEQ ID NO: 1694967 - DNA, 25 bp, Homo sapien
ggtcactagaaaaacgcaggcaatt

SEQ ID NO: 1694968 - DNA, 25 bp, Homo sapien
gcagttgatgggctaaccacgttcc

SEQ ID NO: 1694969 - DNA, 25 bp, Homo sapien
ttttctgagaggataccatcgagca

SEQ ID NO: 1694970 - DNA, 25 bp, Homo sapien
ctggtcagttgggagaaagatccta

SEQ ID NO: 1694971 - DNA, 25 bp, Homo sapien
gatagcaaagctcatagaattaggg

SEQ ID NO: 1694972 - DNA, 25 bp, Homo sapien
tgattcacaggaagactggtcagtt

SEQ ID NO: 1694973 - DNA, 25 bp, Homo sapien
tcctaaagatgttacactggttttc

SEQ ID NO: 1694974 - DNA, 25 bp, Homo sapien
aagtgtgtggtatctcccctttgcc

SEQ ID NO: 1694975 - DNA, 25 bp, Homo sapien
aatcatgtttcctgtagagcctatg

SEQ ID NO: 1694976 - DNA, 25 bp, Homo sapien
tctggcccatgaggtttattacaaa

SEQ ID NO: 1694977 - DNA, 25 bp, Homo sapien
caactcttgtaataagcttctctgg

SEQ ID NO: 1694978 - DNA, 25 bp, Homo sapien
atctgggtctcccgcgcagacatct

SEQ ID NO: 1694979 - DNA, 25 bp, Homo sapien
ggacagcgacccagcgccgcacagg

SEQ ID NO: 1694980 - DNA, 25 bp, Homo sapien
tgggtctcccgcgcagacatctgct

SEQ ID NO: 1694981 - DNA, 25 bp, Homo sapien
atatctgggtctcccgcgcagacat

SEQ ID NO: 1694982 - DNA, 25 bp, Homo sapien
atccctagaaagagatcttcatgca

SEQ ID NO: 1694983 - DNA, 25 bp, Homo sapien
ctaatggaaaacatcaatccctaga

SEQ ID NO: 1694984 - DNA, 25 bp, Homo sapien
tccctagaaagagatcttcatgcaa

SEQ ID NO: 1694985 - DNA, 25 bp, Homo sapien
cttttattcagctatgcactacccc

SEQ ID NO: 1694986 - DNA, 25 bp, Homo sapien
attcagctatgcactacccccagag

SEQ ID NO: 1694987 - DNA, 25 bp, Homo sapien
gccttttattcagctatgcactacc

SEQ ID NO: 1694988 - DNA, 25 bp, Homo sapien
ttattcagctatgcactacccccag

SEQ ID NO: 1694989 - DNA, 25 bp, Homo sapien
agacttaggaaagggcagacgctcc

SEQ ID NO: 1694990 - DNA, 25 bp, Homo sapien
accggtcctgaaagcgcggagcatg

SEQ ID NO: 1694991 - DNA, 25 bp, Homo sapien
aacatccggcgtgtttgctctggtc

SEQ ID NO: 1694992 - DNA, 25 bp, Homo sapien
tgcggaaacgaaagcgaatacttct

SEQ ID NO: 1694993 - DNA, 25 bp, Homo sapien
cggcatcactcgcacacatactgcc

SEQ ID NO: 1694994 - DNA, 25 bp, Homo sapien
tcggcatcactcgcacacatactgc

SEQ ID NO: 1694995 - DNA, 25 bp, Homo sapien
gcacacatactgccatataagtacc

SEQ ID NO: 1694996 - DNA, 25 bp, Homo sapien
cacatactgccatataagtaccgcg

SEQ ID NO: 1694997 - DNA, 25 bp, Homo sapien
gcgttgcttggttctaaaaaggcta

SEQ ID NO: 1694998 - DNA, 25 bp, Homo sapien
tcactgcggcgcaacggattttgtt

SEQ ID NO: 1694999 - DNA, 25 bp, Homo sapien
tagaaggtagctaactcactgcggc

SEQ ID NO: 1695000 - DNA, 25 bp, Homo sapien
cacgttaaagacgatggagtcggat

SEQ ID NO: 1695001 - DNA, 25 bp, Homo sapien
tcaatgcttatcacctgatgggagt

SEQ ID NO: 1695002 - DNA, 25 bp, Homo sapien
gatcgatgatcctaagaacaaagtg

SEQ ID NO: 1695003 - DNA, 25 bp, Homo sapien
gctgctagatcttccatgactgttg

SEQ ID NO: 1695004 - DNA, 25 bp, Homo sapien
ggctccccgaggaacgatgatcgat

SEQ ID NO: 1695005 - DNA, 25 bp, Homo sapien
atggtgccctaggctggagatttca

SEQ ID NO: 1695006 - DNA, 25 bp, Homo sapien
gatggtgccctaggctggagatttc

SEQ ID NO: 1695007 - DNA, 25 bp, Homo sapien
tgaacttcttaacatgggagctggc

SEQ ID NO: 1695008 - DNA, 25 bp, Homo sapien
tctgcaaaccatcgcagtctctagg

SEQ ID NO: 1695009 - DNA, 25 bp, Homo sapien
catgtggttagcttgagcctctgca

SEQ ID NO: 1695010 - DNA, 25 bp, Homo sapien
tgatgtcttagaatagttggagtag

SEQ ID NO: 1695011 - DNA, 25 bp, Homo sapien
gagagcttatctctacactatgtgg

SEQ ID NO: 1695012 - DNA, 25 bp, Homo sapien
gcaaagccttttaaggcccaggctg

SEQ ID NO: 1695013 - DNA, 25 bp, Homo sapien
cattccattggccaagcaagttgag

SEQ ID NO: 1695014 - DNA, 25 bp, Homo sapien
caggctgggaataagcacaccatca

SEQ ID NO: 1695015 - DNA, 25 bp, Homo sapien
tttcatacaggcttattggagaagt

SEQ ID NO: 1695016 - DNA, 25 bp, Homo sapien
atcctcctcttcagaccggtgggtg

SEQ ID NO: 1695017 - DNA, 25 bp, Homo sapien
cctcctcttcagaccggtgggtgac

SEQ ID NO: 1695018 - DNA, 25 bp, Homo sapien
gagaagtcagctggtctaggctggg

SEQ ID NO: 1695019 - DNA, 25 bp, Homo sapien
cataacaaactatcttcaaagctca

SEQ ID NO: 1695020 - DNA, 25 bp, Homo sapien
gcataacaaactatcttcaaagctc

SEQ ID NO: 1695021 - DNA, 25 bp, Homo sapien
taacaaactatcttcaaagctcaag

SEQ ID NO: 1695022 - DNA, 25 bp, Homo sapien
aacaaactatcttcaaagctcaagg

SEQ ID NO: 1695023 - DNA, 25 bp, Homo sapien
tccttctatataggttccatcttga

SEQ ID NO: 1695024 - DNA, 25 bp, Homo sapien
aaatatcacaattgtgtctcctacc

SEQ ID NO: 1695025 - DNA, 25 bp, Homo sapien
catctaagcaaatagttaggtggtt

SEQ ID NO: 1695026 - DNA, 25 bp, Homo sapien
gaggtcagagctacttaaagtactt

SEQ ID NO: 1695027 - DNA, 25 bp, Homo sapien
ctcatccagggaatagtcttccttt

SEQ ID NO: 1695028 - DNA, 25 bp, Homo sapien
atagctcccagagtaaatataagca

SEQ ID NO: 1695029 - DNA, 25 bp, Homo sapien
aatagctcccagagtaaatataagc

SEQ ID NO: 1695030 - DNA, 25 bp, Homo sapien
caatagctcccagagtaaatataag

SEQ ID NO: 1695031 - DNA, 25 bp, Homo sapien
tagctcccagagtaaatataagcat

SEQ ID NO: 1695032 - DNA, 25 bp, Homo sapien
aagagaagagtctgaggtcctttgt

SEQ ID NO: 1695033 - DNA, 25 bp, Homo sapien
cccagggattgacatcatgcagaag

SEQ ID NO: 1695034 - DNA, 25 bp, Homo sapien
ttgacatcatgcagaaggacccctt

SEQ ID NO: 1695035 - DNA, 25 bp, Homo sapien
ttctgggttcagcaaattatggagc

SEQ ID NO: 1695036 - DNA, 25 bp, Homo sapien
aaacttatgatattgacattgtgac

SEQ ID NO: 1695037 - DNA, 25 bp, Homo sapien
gttttgtcacttgaatctttactac

SEQ ID NO: 1695038 - DNA, 25 bp, Homo sapien
ttgaatctttactactgtcaccaga

SEQ ID NO: 1695039 - DNA, 25 bp, Homo sapien
ttgctccttgggctcgtggctttct

SEQ ID NO: 1695040 - DNA, 25 bp, Homo sapien
tgtcacttgaatctttactactgtc

SEQ ID NO: 1695041 - DNA, 25 bp, Homo sapien
aagattcaatatgagctccacatct

SEQ ID NO: 1695042 - DNA, 25 bp, Homo sapien
agattcaatatgagctccacatctt

SEQ ID NO: 1695043 - DNA, 25 bp, Homo sapien
aaagattcaatatgagctccacatc

SEQ ID NO: 1695044 - DNA, 25 bp, Homo sapien
tggagaagtgggtccatggcttatc

SEQ ID NO: 1695045 - DNA, 25 bp, Homo sapien
aagtgggtccatggcttatcatctg

SEQ ID NO: 1695046 - DNA, 25 bp, Homo sapien
gagatcagagctactcaaagtactc

SEQ ID NO: 1695047 - DNA, 25 bp, Homo sapien
gatcagagctactcaaagtactctc

SEQ ID NO: 1695048 - DNA, 25 bp, Homo sapien
tacatatacatctgagaagacactg

SEQ ID NO: 1695049 - DNA, 25 bp, Homo sapien
ctgaagtccctaatgaatgtgtcat

SEQ ID NO: 1695050 - DNA, 25 bp, Homo sapien
caagaatggcagccttaaagtttaa

SEQ ID NO: 1695051 - DNA, 25 bp, Homo sapien
agacactgaagtccctaatgaatgt

SEQ ID NO: 1695052 - DNA, 25 bp, Homo sapien
aggtgagtgtacctgacaactgtgg

SEQ ID NO: 1695053 - DNA, 25 bp, Homo sapien
tctttctggtccacaagggagccag

SEQ ID NO: 1695054 - DNA, 25 bp, Homo sapien
gggagccagagccattgtacagcag

SEQ ID NO: 1695055 - DNA, 25 bp, Homo sapien
cacagactccccaggtgagtgtacc

SEQ ID NO: 1695056 - DNA, 25 bp, Homo sapien
gcctgtatcatctaggaagtttttc

SEQ ID NO: 1695057 - DNA, 25 bp, Homo sapien
gctgctattgtcttgggcattcctt

SEQ ID NO: 1695058 - DNA, 25 bp, Homo sapien
gataagcaacaattttacagcctgt

SEQ ID NO: 1695059 - DNA, 25 bp, Homo sapien
cctcatgcaggctctgggactgatg

SEQ ID NO: 1695060 - DNA, 25 bp, Homo sapien
gaaacaagggaaggacttgtcatgc

SEQ ID NO: 1695061 - DNA, 25 bp, Homo sapien
caagggaaggacttgtcatgcagac

SEQ ID NO: 1695062 - DNA, 25 bp, Homo sapien
agagaaacaagggaaggacttgtca

SEQ ID NO: 1695063 - DNA, 25 bp, Homo sapien
aacaagggaaggacttgtcatgcag

SEQ ID NO: 1695064 - DNA, 25 bp, Homo sapien
gtcttattaccgatctccctgctag

SEQ ID NO: 1695065 - DNA, 25 bp, Homo sapien
aaacagatcatcagaaggagaacac

SEQ ID NO: 1695066 - DNA, 25 bp, Homo sapien
ctgtgaatcagcacaaaagggctga

SEQ ID NO: 1695067 - DNA, 25 bp, Homo sapien
catcttgcaagactatcagtgtgag

SEQ ID NO: 1695068 - DNA, 25 bp, Homo sapien
acacccgaagcgagaatcatacccc

SEQ ID NO: 1695069 - DNA, 25 bp, Homo sapien
ggacctctcacacccgaagcgagaa

SEQ ID NO: 1695070 - DNA, 25 bp, Homo sapien
ggatttgaacccgggacctctcaca

SEQ ID NO: 1695071 - DNA, 25 bp, Homo sapien
tgaacccgggacctctcacacccga

SEQ ID NO: 1695072 - DNA, 25 bp, Homo sapien
cacaatggattagcagtccatcgcc

SEQ ID NO: 1695073 - DNA, 25 bp, Homo sapien
gcacaatggattagcagtccatcgc

SEQ ID NO: 1695074 - DNA, 25 bp, Homo sapien
atggattagcagtccatcgccttaa

SEQ ID NO: 1695075 - DNA, 25 bp, Homo sapien
agcacaatggattagcagtccatcg

SEQ ID NO: 1695076 - DNA, 25 bp, Homo sapien
ctcttttacaaaggtgctaatccca

SEQ ID NO: 1695077 - DNA, 25 bp, Homo sapien
ggactccaccctcatggtctaatta

SEQ ID NO: 1695078 - DNA, 25 bp, Homo sapien
tatatgttatagtcagtgtaggctg

SEQ ID NO: 1695079 - DNA, 25 bp, Homo sapien
gactgcgtggtttataaaccatagg

SEQ ID NO: 1695080 - DNA, 25 bp, Homo sapien
tgagttccaaaagacactagtcctg

SEQ ID NO: 1695081 - DNA, 25 bp, Homo sapien
ttgtgggtatacattttcctggacc

SEQ ID NO: 1695082 - DNA, 25 bp, Homo sapien
tagtctgctggttgtagggatatgc

SEQ ID NO: 1695083 - DNA, 25 bp, Homo sapien
cctgtattaaggcaattgagttcca

SEQ ID NO: 1695084 - DNA, 25 bp, Homo sapien
aatgatgatgtcattaggactaaag

SEQ ID NO: 1695085 - DNA, 25 bp, Homo sapien
atgatgatgtcattaggactaaagt

SEQ ID NO: 1695086 - DNA, 25 bp, Homo sapien
cacttctaggctcgccatcttccaa

SEQ ID NO: 1695087 - DNA, 25 bp, Homo sapien
cttcagaggctgaaggaacatggcc

SEQ ID NO: 1695088 - DNA, 25 bp, Homo sapien
ttctccacttctaggctcgccatct

SEQ ID NO: 1695089 - DNA, 25 bp, Homo sapien
tggcctagcatctggggcccttcct

SEQ ID NO: 1695090 - DNA, 25 bp, Homo sapien
gagcgcaactcactacgagcaacca

SEQ ID NO: 1695091 - DNA, 25 bp, Homo sapien
gcgcaactcactacgagcaaccaca

SEQ ID NO: 1695092 - DNA, 25 bp, Homo sapien
gcgagcgcaactcactacgagcaac

SEQ ID NO: 1695093 - DNA, 25 bp, Homo sapien
agcgagcgcaactcactacgagcaa

SEQ ID NO: 1695094 - DNA, 25 bp, Homo sapien
gagaccggccctagaagagcgagtc

SEQ ID NO: 1695095 - DNA, 25 bp, Homo sapien
agaccggccctagaagagcgagtct

SEQ ID NO: 1695096 - DNA, 25 bp, Homo sapien
ggagaccggccctagaagagcgagt

SEQ ID NO: 1695097 - DNA, 25 bp, Homo sapien
tggagaccggccctagaagagcgag

SEQ ID NO: 1695098 - DNA, 25 bp, Homo sapien
gcccttcgccttgtggtggctctca

SEQ ID NO: 1695099 - DNA, 25 bp, Homo sapien
tggctctcagtctttttgggcagta

SEQ ID NO: 1695100 - DNA, 25 bp, Homo sapien
ggtggctctcagtctttttgggcag

SEQ ID NO: 1695101 - DNA, 25 bp, Homo sapien
gctctcagtctttttgggcagtagc

SEQ ID NO: 1695102 - DNA, 25 bp, Homo sapien
gactcgattttacttgagctgccac

SEQ ID NO: 1695103 - DNA, 25 bp, Homo sapien
tgaaaagagccgttggtttggactc

SEQ ID NO: 1695104 - DNA, 25 bp, Homo sapien
tcttttagagaagacgtgggtggcc

SEQ ID NO: 1695105 - DNA, 25 bp, Homo sapien
taaatctgcggtgttcgctacactg

SEQ ID NO: 1695106 - DNA, 25 bp, Homo sapien
tgtggacacacactgattaagttta

SEQ ID NO: 1695107 - DNA, 25 bp, Homo sapien
ttgggccaaagtgcttcaagaactc

SEQ ID NO: 1695108 - DNA, 25 bp, Homo sapien
ctggcccgcgtggaacagctgtctg

SEQ ID NO: 1695109 - DNA, 25 bp, Homo sapien
tctagcccgggcgataactcttttg

SEQ ID NO: 1695110 - DNA, 25 bp, Homo sapien
gctgtctgctaaattctagcccggg

SEQ ID NO: 1695111 - DNA, 25 bp, Homo sapien
tctcgcaggagcggcagcttgctga

SEQ ID NO: 1695112 - DNA, 25 bp, Homo sapien
tgccgggcacgtagcggcgggactt

SEQ ID NO: 1695113 - DNA, 25 bp, Homo sapien
cagctcggagttctggtagcgccga

SEQ ID NO: 1695114 - DNA, 25 bp, Homo sapien
gaacgtcgcgcagggccactgtgcc

SEQ ID NO: 1695115 - DNA, 25 bp, Homo sapien
cctcgctctcgtgcagcggcgtcac

SEQ ID NO: 1695116 - DNA, 25 bp, Homo sapien
agcctcgctctcgtgcagcggcgtc

SEQ ID NO: 1695117 - DNA, 25 bp, Homo sapien
tcagcctcgctctcgtgcagcggcg

SEQ ID NO: 1695118 - DNA, 25 bp, Homo sapien
cagcctcgctctcgtgcagcggcgt

SEQ ID NO: 1695119 - DNA, 25 bp, Homo sapien
taagattacttcagagtgggccggg

SEQ ID NO: 1695120 - DNA, 25 bp, Homo sapien
ttgtgtcaggaacgcccaataccct

SEQ ID NO: 1695121 - DNA, 25 bp, Homo sapien
ggctccagataacgtcatcccagta

SEQ ID NO: 1695122 - DNA, 25 bp, Homo sapien
catgttaccagacagccaaaagtgt

SEQ ID NO: 1695123 - DNA, 25 bp, Homo sapien
ggaagatgtcctccctgtaccaaaa

SEQ ID NO: 1695124 - DNA, 25 bp, Homo sapien
agttgaaaccaagagaattctgtcc

SEQ ID NO: 1695125 - DNA, 25 bp, Homo sapien
cgcatagcaattagtgacaaggata

SEQ ID NO: 1695126 - DNA, 25 bp, Homo sapien
ttaaaattcccctgtggaagatgtc

SEQ ID NO: 1695127 - DNA, 25 bp, Homo sapien
gaccagactgaaaaccggaagagct

SEQ ID NO: 1695128 - DNA, 25 bp, Homo sapien
gagaacaaaggtctgctgcctgtga

SEQ ID NO: 1695129 - DNA, 25 bp, Homo sapien
acaagtctaagaatcaaggtccctc

SEQ ID NO: 1695130 - DNA, 25 bp, Homo sapien
tttatgggtaacctctgcggaccag

SEQ ID NO: 1695131 - DNA, 25 bp, Homo sapien
gataccctggatgttgtcgcgcagc

SEQ ID NO: 1695132 - DNA, 25 bp, Homo sapien
caggcccttacctcctttgccgcgt

SEQ ID NO: 1695133 - DNA, 25 bp, Homo sapien
taccctggatgttgtcgcgcagcac

SEQ ID NO: 1695134 - DNA, 25 bp, Homo sapien
cttcaacactccgcgggtctcctca

SEQ ID NO: 1695135 - DNA, 25 bp, Homo sapien
taatccgagcggtaaaccggctgca

SEQ ID NO: 1695136 - DNA, 25 bp, Homo sapien
tctcctgagacgtatttgaaggtcc

SEQ ID NO: 1695137 - DNA, 25 bp, Homo sapien
gacaatggccctattaagagactca

SEQ ID NO: 1695138 - DNA, 25 bp, Homo sapien
cctttttagagaatgactgggcttc

SEQ ID NO: 1695139 - DNA, 25 bp, Homo sapien
ggctccaacccgctcggcataatta

SEQ ID NO: 1695140 - DNA, 25 bp, Homo sapien
aacccgctcggcataattacccttg

SEQ ID NO: 1695141 - DNA, 25 bp, Homo sapien
cgctcggcataattacccttgcgga

SEQ ID NO: 1695142 - DNA, 25 bp, Homo sapien
ggcataattacccttgcggagcagg

SEQ ID NO: 1695143 - DNA, 25 bp, Homo sapien
gagcctttgttttccagttttcaca

SEQ ID NO: 1695144 - DNA, 25 bp, Homo sapien
tttccagttttcacaacctcgctcc

SEQ ID NO: 1695145 - DNA, 25 bp, Homo sapien
tgttttccagttttcacaacctcgc

SEQ ID NO: 1695146 - DNA, 25 bp, Homo sapien
ttttccagttttcacaacctcgctc

SEQ ID NO: 1695147 - DNA, 25 bp, Homo sapien
ccagggacctttcacgtgtgagact

SEQ ID NO: 1695148 - DNA, 25 bp, Homo sapien
ggacctttcacgtgtgagactaacg

SEQ ID NO: 1695149 - DNA, 25 bp, Homo sapien
gactaacgtgataaccaccatacta

SEQ ID NO: 1695150 - DNA, 25 bp, Homo sapien
tcacgtgtgagactaacgtgataac

SEQ ID NO: 1695151 - DNA, 25 bp, Homo sapien
ttcgaaccgaggttgctgcggccac

SEQ ID NO: 1695152 - DNA, 25 bp, Homo sapien
tgccgtgactcggattcgaaccgag

SEQ ID NO: 1695153 - DNA, 25 bp, Homo sapien
ctcggattcgaaccgaggttgctgc

SEQ ID NO: 1695154 - DNA, 25 bp, Homo sapien
tgactcggattcgaaccgaggttgc

SEQ ID NO: 1695155 - DNA, 25 bp, Homo sapien
gctttgaccagctaagccacagggc

SEQ ID NO: 1695156 - DNA, 25 bp, Homo sapien
tttgaccagctaagccacagggccc

SEQ ID NO: 1695157 - DNA, 25 bp, Homo sapien
aggcgctttgaccagctaagccaca

SEQ ID NO: 1695158 - DNA, 25 bp, Homo sapien
gcgctttgaccagctaagccacagg

SEQ ID NO: 1695159 - DNA, 25 bp, Homo sapien
ggcgtgtgccacgatgcctgggtaa

SEQ ID NO: 1695160 - DNA, 25 bp, Homo sapien
gcgtgtgccacgatgcctgggtaat

SEQ ID NO: 1695161 - DNA, 25 bp, Homo sapien
aggcgtgtgccacgatgcctgggta

SEQ ID NO: 1695162 - DNA, 25 bp, Homo sapien
tcggttttacatcgaactccgtagc

SEQ ID NO: 1695163 - DNA, 25 bp, Homo sapien
cacacctcgcttgtaaacttcggtt

SEQ ID NO: 1695164 - DNA, 25 bp, Homo sapien
tttacatcgaactccgtagcctcgc

SEQ ID NO: 1695165 - DNA, 25 bp, Homo sapien
gaactccgtagcctcgcctatccat

SEQ ID NO: 1695166 - DNA, 25 bp, Homo sapien
gagtcctccgaaccctccgatcctg

SEQ ID NO: 1695167 - DNA, 25 bp, Homo sapien
cgcgatcgcaagcttggagctgctt

SEQ ID NO: 1695168 - DNA, 25 bp, Homo sapien
gatcctgcgaacctgcggcggctct

SEQ ID NO: 1695169 - DNA, 25 bp, Homo sapien
gttccgtgaggaactggccgcgatc

SEQ ID NO: 1695170 - DNA, 25 bp, Homo sapien
tcgctagcccctcccgaaggagaat

SEQ ID NO: 1695171 - DNA, 25 bp, Homo sapien
gacgcgtctccccatgaaagataat

SEQ ID NO: 1695172 - DNA, 25 bp, Homo sapien
gatttattcgtcacttcgggcggga

SEQ ID NO: 1695173 - DNA, 25 bp, Homo sapien
ggacgagtccctaagatttactgga

SEQ ID NO: 1695174 - DNA, 25 bp, Homo sapien
ttggatttcgagtccaacgccttaa

SEQ ID NO: 1695175 - DNA, 25 bp, Homo sapien
cccattggatttcgagtccaacgcc

SEQ ID NO: 1695176 - DNA, 25 bp, Homo sapien
tgtgagcaggatttgaacctgcgcg

SEQ ID NO: 1695177 - DNA, 25 bp, Homo sapien
agaccccattggatttcgagtccaa

SEQ ID NO: 1695178 - DNA, 25 bp, Homo sapien
tttggatacggcttgttttcacaat

SEQ ID NO: 1695179 - DNA, 25 bp, Homo sapien
agatgcgaatcttggcatcagggac

SEQ ID NO: 1695180 - DNA, 25 bp, Homo sapien
atgcgaatcttggcatcagggacac

SEQ ID NO: 1695181 - DNA, 25 bp, Homo sapien
taagatgcgaatcttggcatcaggg

SEQ ID NO: 1695182 - DNA, 25 bp, Homo sapien
ctaagatgcgaatcttggcatcagg

SEQ ID NO: 1695183 - DNA, 25 bp, Homo sapien
tctgacgccatgtgaccaaagagag

SEQ ID NO: 1695184 - DNA, 25 bp, Homo sapien
ctgacgccatgtgaccaaagagagg

SEQ ID NO: 1695185 - DNA, 25 bp, Homo sapien
ggatatgaaagccatttttgccaca

SEQ ID NO: 1695186 - DNA, 25 bp, Homo sapien
ctcggatatgaaagccatttttgcc

SEQ ID NO: 1695187 - DNA, 25 bp, Homo sapien
gatatgaaagccatttttgccacaa

SEQ ID NO: 1695188 - DNA, 25 bp, Homo sapien
tcggatatgaaagccatttttgcca

SEQ ID NO: 1695189 - DNA, 25 bp, Homo sapien
cacaggacaacatcctgttgatgca

SEQ ID NO: 1695190 - DNA, 25 bp, Homo sapien
agatgacgtggaaggggtgcagccg

SEQ ID NO: 1695191 - DNA, 25 bp, Homo sapien
gatgcagatgacgtggaaggggtgc

SEQ ID NO: 1695192 - DNA, 25 bp, Homo sapien
caacatcctgttgatgcagatgacg

SEQ ID NO: 1695193 - DNA, 25 bp, Homo sapien
gaacttgaacttgaccctgcgaagg

SEQ ID NO: 1695194 - DNA, 25 bp, Homo sapien
ggaacttgaacttgaccctgcgaag

SEQ ID NO: 1695195 - DNA, 25 bp, Homo sapien
gatcggggatgtacttgatcccaca

SEQ ID NO: 1695196 - DNA, 25 bp, Homo sapien
ccttctttgaaatgtggaccttctg

SEQ ID NO: 1695197 - DNA, 25 bp, Homo sapien
aagccctcatgaatgcaaagccctc

SEQ ID NO: 1695198 - DNA, 25 bp, Homo sapien
ggaagccctcatgaatgcaaagccc

SEQ ID NO: 1695199 - DNA, 25 bp, Homo sapien
cctcatgaatgcaaagccctccctt

SEQ ID NO: 1695200 - DNA, 25 bp, Homo sapien
catgaatgcaaagccctcccttgtc

SEQ ID NO: 1695201 - DNA, 25 bp, Homo sapien
gccaggagtcgaacctagaatcttc

SEQ ID NO: 1695202 - DNA, 25 bp, Homo sapien
cagccaggagtcgaacctagaatct

SEQ ID NO: 1695203 - DNA, 25 bp, Homo sapien
ggagtcgaacctagaatcttctgat

SEQ ID NO: 1695204 - DNA, 25 bp, Homo sapien
agccagccaggagtcgaacctagaa

SEQ ID NO: 1695205 - DNA, 25 bp, Homo sapien
agtggctgttgtggacagtgctgct

SEQ ID NO: 1695206 - DNA, 25 bp, Homo sapien
ttgaaatatgtgtgagtggctgttg

SEQ ID NO: 1695207 - DNA, 25 bp, Homo sapien
tatcatatcaaaggtcaaaggcttc

SEQ ID NO: 1695208 - DNA, 25 bp, Homo sapien
cccaatctgcttatcatatcaaagg

SEQ ID NO: 1695209 - DNA, 25 bp, Homo sapien
ctttcgcgtgttaggcaaacgtgat

SEQ ID NO: 1695210 - DNA, 25 bp, Homo sapien
acctttcgcgtgttaggcaaacgtg

SEQ ID NO: 1695211 - DNA, 25 bp, Homo sapien
cgcgtgttaggcaaacgtgataacc

SEQ ID NO: 1695212 - DNA, 25 bp, Homo sapien
gtgttaggcaaacgtgataaccact

SEQ ID NO: 1695213 - DNA, 25 bp, Homo sapien
aaggaagcccctctcgtgaatggtt

SEQ ID NO: 1695214 - DNA, 25 bp, Homo sapien
tctcatttcccacgggagaggcgaa

SEQ ID NO: 1695215 - DNA, 25 bp, Homo sapien
tctgtagtattttctccgggcggaa

SEQ ID NO: 1695216 - DNA, 25 bp, Homo sapien
tttggatggaaaactcagaacgacc

SEQ ID NO: 1695217 - DNA, 25 bp, Homo sapien
tatggagcggattcctcatgccgcg

SEQ ID NO: 1695218 - DNA, 25 bp, Homo sapien
taataacgcgtagtggagcaacaga

SEQ ID NO: 1695219 - DNA, 25 bp, Homo sapien
tgacatttgcctgccgcctagagga

SEQ ID NO: 1695220 - DNA, 25 bp, Homo sapien
ttatgaacccgcgaggcatagctgc

SEQ ID NO: 1695221 - DNA, 25 bp, Homo sapien
gcccgaggcgcagcgaatgtgtacc

SEQ ID NO: 1695222 - DNA, 25 bp, Homo sapien
ttgttgaacttgagcacccttaggc

SEQ ID NO: 1695223 - DNA, 25 bp, Homo sapien
atgtgtaccaggaaccgtagccgcg

SEQ ID NO: 1695224 - DNA, 25 bp, Homo sapien
gaagtccttagtcttccaacagcca

SEQ ID NO: 1695225 - DNA, 25 bp, Homo sapien
caatattttgaagcctaagggccca

SEQ ID NO: 1695226 - DNA, 25 bp, Homo sapien
tagaaatccgagaaacctccaagtg

SEQ ID NO: 1695227 - DNA, 25 bp, Homo sapien
gagcactcgctcgtggataccattg

SEQ ID NO: 1695228 - DNA, 25 bp, Homo sapien
gagggccactcagaccagatattac

SEQ ID NO: 1695229 - DNA, 25 bp, Homo sapien
ggactctgttctcccccaggaggac

SEQ ID NO: 1695230 - DNA, 25 bp, Homo sapien
ctctgttctcccccaggaggacctt

SEQ ID NO: 1695231 - DNA, 25 bp, Homo sapien
gggactctgttctcccccaggagga

SEQ ID NO: 1695232 - DNA, 25 bp, Homo sapien
ttcgggactctgttctcccccagga

SEQ ID NO: 1695233 - DNA, 25 bp, Homo sapien
gagggaaaccaagagcagagggccc

SEQ ID NO: 1695234 - DNA, 25 bp, Homo sapien
tgaaactgctgaatgtgctcaccca

SEQ ID NO: 1695235 - DNA, 25 bp, Homo sapien
cacgttgaaggggtccagcagttgc

SEQ ID NO: 1695236 - DNA, 25 bp, Homo sapien
ctgtaggaaggatcgtctgtcggac

SEQ ID NO: 1695237 - DNA, 25 bp, Homo sapien
tcacccaggcgcctaagaagggagg

SEQ ID NO: 1695238 - DNA, 25 bp, Homo sapien
tcaccccctagatgcaggaatatgg

SEQ ID NO: 1695239 - DNA, 25 bp, Homo sapien
gcaggaatatgggtccatcctggcc

SEQ ID NO: 1695240 - DNA, 25 bp, Homo sapien
tccatcctggccaacccaatgttgg

SEQ ID NO: 1695241 - DNA, 25 bp, Homo sapien
aacccaatgttggtcattcacccag

SEQ ID NO: 1695242 - DNA, 25 bp, Homo sapien
tatactcaggccataaaatctgtgt

SEQ ID NO: 1695243 - DNA, 25 bp, Homo sapien
gttccaggcttatcaccagggcgcc

SEQ ID NO: 1695244 - DNA, 25 bp, Homo sapien
gcctccagcaggtatactcaggcca

SEQ ID NO: 1695245 - DNA, 25 bp, Homo sapien
aaggcggctggacaagaagcggagc

SEQ ID NO: 1695246 - DNA, 25 bp, Homo sapien
tgggaatccctgaagatttccccat

SEQ ID NO: 1695247 - DNA, 25 bp, Homo sapien
cgctgggaatccctgaagatttccc

SEQ ID NO: 1695248 - DNA, 25 bp, Homo sapien
gggactcggtcggtcctcatcgctg

SEQ ID NO: 1695249 - DNA, 25 bp, Homo sapien
ggactcggtcggtcctcatcgctgg

SEQ ID NO: 1695250 - DNA, 25 bp, Homo sapien
ttaaagaggcgggaaagtgccaggc

SEQ ID NO: 1695251 - DNA, 25 bp, Homo sapien
gagatgttaaagaggcgggaaagtg

SEQ ID NO: 1695252 - DNA, 25 bp, Homo sapien
atgttaaagaggcgggaaagtgcca

SEQ ID NO: 1695253 - DNA, 25 bp, Homo sapien
gaggcgggaaagtgccaggcgggca

SEQ ID NO: 1695254 - DNA, 25 bp, Homo sapien
ccaaggagccggcataggagcctcc

SEQ ID NO: 1695255 - DNA, 25 bp, Homo sapien
agccggcataggagcctccgaagca

SEQ ID NO: 1695256 - DNA, 25 bp, Homo sapien
cccaggcggccaaggagccggcata

SEQ ID NO: 1695257 - DNA, 25 bp, Homo sapien
aggagcctccgaagcagatccaggg

SEQ ID NO: 1695258 - DNA, 25 bp, Homo sapien
atctcgggctcttgtgaggacagct

SEQ ID NO: 1695259 - DNA, 25 bp, Homo sapien
taatctcgggctcttgtgaggacag

SEQ ID NO: 1695260 - DNA, 25 bp, Homo sapien
tgtaatctcgggctcttgtgaggac

SEQ ID NO: 1695261 - DNA, 25 bp, Homo sapien
tgtgtaatctcgggctcttgtgagg

SEQ ID NO: 1695262 - DNA, 25 bp, Homo sapien
agcacggcccgcaccggggcggagg

SEQ ID NO: 1695263 - DNA, 25 bp, Homo sapien
tcattatactcggagaaatccagca

SEQ ID NO: 1695264 - DNA, 25 bp, Homo sapien
ggaggcgaccgacgcgaaaatgaga

SEQ ID NO: 1695265 - DNA, 25 bp, Homo sapien
gcgaccgacgcgaaaatgagatggg

SEQ ID NO: 1695266 - DNA, 25 bp, Homo sapien
cagaggaaggtatccggaagtgtca

SEQ ID NO: 1695267 - DNA, 25 bp, Homo sapien
cggaagtgtcaagggactccgcccg

SEQ ID NO: 1695268 - DNA, 25 bp, Homo sapien
ggtatccggaagtgtcaagggactc

SEQ ID NO: 1695269 - DNA, 25 bp, Homo sapien
tgggcggaccgcagaggaaggtatc

SEQ ID NO: 1695270 - DNA, 25 bp, Homo sapien
tgctcattaggcttcgggataccac

SEQ ID NO: 1695271 - DNA, 25 bp, Homo sapien
gatcgcggtgctcattaggcttcgg

SEQ ID NO: 1695272 - DNA, 25 bp, Homo sapien
ccgccgatcgcggtgctcattaggc

SEQ ID NO: 1695273 - DNA, 25 bp, Homo sapien
agggacccgccgatcgcggtgctca

SEQ ID NO: 1695274 - DNA, 25 bp, Homo sapien
agaccccgccacgttgcaggtttcg

SEQ ID NO: 1695275 - DNA, 25 bp, Homo sapien
cgccacgttgcaggtttcgcccttc

SEQ ID NO: 1695276 - DNA, 25 bp, Homo sapien
cttagaccccgccacgttgcaggtt

SEQ ID NO: 1695277 - DNA, 25 bp, Homo sapien
cccgccacgttgcaggtttcgccct

SEQ ID NO: 1695278 - DNA, 25 bp, Homo sapien
ccggataggattgtccctgcccaaa

SEQ ID NO: 1695279 - DNA, 25 bp, Homo sapien
tcttcgtcagctcccgccttcttcc

SEQ ID NO: 1695280 - DNA, 25 bp, Homo sapien
tggtgcccctcctcttcgtcagctc

SEQ ID NO: 1695281 - DNA, 25 bp, Homo sapien
caaaacctgcgtattcccccgagct

SEQ ID NO: 1695282 - DNA, 25 bp, Homo sapien
ccaagacttaggctgggcctcggct

SEQ ID NO: 1695283 - DNA, 25 bp, Homo sapien
gaagcaagaggcgatgtccgccaag

SEQ ID NO: 1695284 - DNA, 25 bp, Homo sapien
ccaggacctgcgtcctccttgggtt

SEQ ID NO: 1695285 - DNA, 25 bp, Homo sapien
cactttcccctagcgggactcagag

SEQ ID NO: 1695286 - DNA, 25 bp, Homo sapien
cgctccacttcagcgaaggcgacgg

SEQ ID NO: 1695287 - DNA, 25 bp, Homo sapien
cacttcagcgaaggcgacggacacc

SEQ ID NO: 1695288 - DNA, 25 bp, Homo sapien
tccacttcagcgaaggcgacggaca

SEQ ID NO: 1695289 - DNA, 25 bp, Homo sapien
ttcagcgaaggcgacggacaccgcc

SEQ ID NO: 1695290 - DNA, 25 bp, Homo sapien
gtccgcagagctgtcgcacgcttag

SEQ ID NO: 1695291 - DNA, 25 bp, Homo sapien
cgtctgcccatcatactgcactaca

SEQ ID NO: 1695292 - DNA, 25 bp, Homo sapien
caacagctccgcctggttttcagcg

SEQ ID NO: 1695293 - DNA, 25 bp, Homo sapien
gacgaagcccgcagtagggcgtgga

SEQ ID NO: 1695294 - DNA, 25 bp, Homo sapien
tctgctcgggaaaagcttaaacact

SEQ ID NO: 1695295 - DNA, 25 bp, Homo sapien
ctctgctcgggaaaagcttaaacac

SEQ ID NO: 1695296 - DNA, 25 bp, Homo sapien
agaagccgaactcggtacatgtctg

SEQ ID NO: 1695297 - DNA, 25 bp, Homo sapien
ggtcacccacaccagacagttgagg

SEQ ID NO: 1695298 - DNA, 25 bp, Homo sapien
tgtctgatacaaccactgccggtca

SEQ ID NO: 1695299 - DNA, 25 bp, Homo sapien
tcggtacatgtctgatacaaccact

SEQ ID NO: 1695300 - DNA, 25 bp, Homo sapien
ggaggccaccctattgagacttgaa

SEQ ID NO: 1695301 - DNA, 25 bp, Homo sapien
ttgtatctggcaacactaccctggg

SEQ ID NO: 1695302 - DNA, 25 bp, Homo sapien
gagaacacagagctatcgaagtcgg

SEQ ID NO: 1695303 - DNA, 25 bp, Homo sapien
caaaggtctggaatgctcggagctc

SEQ ID NO: 1695304 - DNA, 25 bp, Homo sapien
gacatctgggattctcacaggtgac

SEQ ID NO: 1695305 - DNA, 25 bp, Homo sapien
catctgggattctcacaggtgacat

SEQ ID NO: 1695306 - DNA, 25 bp, Homo sapien
ggacatctgggattctcacaggtga

SEQ ID NO: 1695307 - DNA, 25 bp, Homo sapien
aaggacatctgggattctcacaggt

SEQ ID NO: 1695308 - DNA, 25 bp, Homo sapien
gagcccaaacacctgctcacatagg

SEQ ID NO: 1695309 - DNA, 25 bp, Homo sapien
ctgagagcccaaacacctgctcaca

SEQ ID NO: 1695310 - DNA, 25 bp, Homo sapien
agcccaaacacctgctcacataggt

SEQ ID NO: 1695311 - DNA, 25 bp, Homo sapien
gagagcccaaacacctgctcacata

SEQ ID NO: 1695312 - DNA, 25 bp, Homo sapien
aacaaacagcactttgttagcccca

SEQ ID NO: 1695313 - DNA, 25 bp, Homo sapien
gtagtaggagttcgtctgagccaca

SEQ ID NO: 1695314 - DNA, 25 bp, Homo sapien
ggtctggccaccgtagtaggagttc

SEQ ID NO: 1695315 - DNA, 25 bp, Homo sapien
aaacagcactttgttagccccaggg

SEQ ID NO: 1695316 - DNA, 25 bp, Homo sapien
taggatggggctaggtagatgggtg

SEQ ID NO: 1695317 - DNA, 25 bp, Homo sapien
aggataggatggggctaggtagatg

SEQ ID NO: 1695318 - DNA, 25 bp, Homo sapien
gataggatggggctaggtagatggg

SEQ ID NO: 1695319 - DNA, 25 bp, Homo sapien
aaaggataggatggggctaggtaga

SEQ ID NO: 1695320 - DNA, 25 bp, Homo sapien
taaagcctgtgttacacttagcaca

SEQ ID NO: 1695321 - DNA, 25 bp, Homo sapien
gccagtgcggataagaagagttgat

SEQ ID NO: 1695322 - DNA, 25 bp, Homo sapien
aagagttgattctgaggatcctaaa

SEQ ID NO: 1695323 - DNA, 25 bp, Homo sapien
tctcaggtgccatgtccaagcagtg

SEQ ID NO: 1695324 - DNA, 25 bp, Homo sapien
cagcttgagccaggtctgtagctgc

SEQ ID NO: 1695325 - DNA, 25 bp, Homo sapien
ccttaatctggctctcctttgccag

SEQ ID NO: 1695326 - DNA, 25 bp, Homo sapien
aggtctgtagctgctggaagatgtt

SEQ ID NO: 1695327 - DNA, 25 bp, Homo sapien
tcctttgccagcttgagccaggtct

SEQ ID NO: 1695328 - DNA, 25 bp, Homo sapien
gcctaagcaggcacccttgggatta

SEQ ID NO: 1695329 - DNA, 25 bp, Homo sapien
aaccagaatctgatcagcagggcga

SEQ ID NO: 1695330 - DNA, 25 bp, Homo sapien
gaggttgcctcttacccacaaggaa

SEQ ID NO: 1695331 - DNA, 25 bp, Homo sapien
tgccaattacgtgcggaacaggtgc

SEQ ID NO: 1695332 - DNA, 25 bp, Homo sapien
cagcttccagttaaggcatacctag

SEQ ID NO: 1695333 - DNA, 25 bp, Homo sapien
tgagggaaagccatacatgtactcc

SEQ ID NO: 1695334 - DNA, 25 bp, Homo sapien
aatcagggtattcacagaggtaacc

SEQ ID NO: 1695335 - DNA, 25 bp, Homo sapien
catatgatgcccctcttctagttag

SEQ ID NO: 1695336 - DNA, 25 bp, Homo sapien
cgaaaaaattcaagttcccgcgcag

SEQ ID NO: 1695337 - DNA, 25 bp, Homo sapien
aggcccgggagtaaacgccaagctg

SEQ ID NO: 1695338 - DNA, 25 bp, Homo sapien
tctgactcgaaaaaattcaagttcc

SEQ ID NO: 1695339 - DNA, 25 bp, Homo sapien
gtaaacgccaagctgctccaactct

SEQ ID NO: 1695340 - DNA, 25 bp, Homo sapien
gacctttagcgtaattaacacaaca

SEQ ID NO: 1695341 - DNA, 25 bp, Homo sapien
taacacaacactctaagcaaccgag

SEQ ID NO: 1695342 - DNA, 25 bp, Homo sapien
gaggatcaaacccacgacctttagc

SEQ ID NO: 1695343 - DNA, 25 bp, Homo sapien
cactctaagcaaccgagctaaccgg

SEQ ID NO: 1695344 - DNA, 25 bp, Homo sapien
gctcccctggtgtttcgccctggaa

SEQ ID NO: 1695345 - DNA, 25 bp, Homo sapien
cagtcatagaattccttgagggttt

SEQ ID NO: 1695346 - DNA, 25 bp, Homo sapien
gaatcggaattggaaccagtcatag

SEQ ID NO: 1695347 - DNA, 25 bp, Homo sapien
gcaaagctgtcataattgtcatgag

SEQ ID NO: 1695348 - DNA, 25 bp, Homo sapien
tgttttgctttatatttcaagccct

SEQ ID NO: 1695349 - DNA, 25 bp, Homo sapien
tgctttgttttgctttatatttcaa

SEQ ID NO: 1695350 - DNA, 25 bp, Homo sapien
tttgctttatatttcaagccctttc

SEQ ID NO: 1695351 - DNA, 25 bp, Homo sapien
tttgttttgctttatatttcaagcc

SEQ ID NO: 1695352 - DNA, 25 bp, Homo sapien
atactgacatgcgttttacaagcat

SEQ ID NO: 1695353 - DNA, 25 bp, Homo sapien
ccttgattgtgagttggggcctggc

SEQ ID NO: 1695354 - DNA, 25 bp, Homo sapien
tctaatactgacatgcgttttacaa

SEQ ID NO: 1695355 - DNA, 25 bp, Homo sapien
tgtcttccggggaacaaaccagaga

SEQ ID NO: 1695356 - DNA, 25 bp, Homo sapien
cttgaagaaacatccaggaatgttt

SEQ ID NO: 1695357 - DNA, 25 bp, Homo sapien
tgaagaaacatccaggaatgtttac

SEQ ID NO: 1695358 - DNA, 25 bp, Homo sapien
ttgaagaaacatccaggaatgttta

SEQ ID NO: 1695359 - DNA, 25 bp, Homo sapien
agaggccgagctctctccattcaga

SEQ ID NO: 1695360 - DNA, 25 bp, Homo sapien
taagaggccgagctctctccattca

SEQ ID NO: 1695361 - DNA, 25 bp, Homo sapien
tctaagaggccgagctctctccatt

SEQ ID NO: 1695362 - DNA, 25 bp, Homo sapien
ctctaagaggccgagctctctccat

SEQ ID NO: 1695363 - DNA, 25 bp, Homo sapien
caagggacccgaggatcctgacctt

SEQ ID NO: 1695364 - DNA, 25 bp, Homo sapien
cttccgtaggtagagcgccaaggga

SEQ ID NO: 1695365 - DNA, 25 bp, Homo sapien
gggacccgaggatcctgaccttgac

SEQ ID NO: 1695366 - DNA, 25 bp, Homo sapien
tccgtaggtagagcgccaagggacc

SEQ ID NO: 1695367 - DNA, 25 bp, Homo sapien
acttagcctctgtcttttcttcctt

SEQ ID NO: 1695368 - DNA, 25 bp, Homo sapien
gtacttagcctctgtcttttcttcc

SEQ ID NO: 1695369 - DNA, 25 bp, Homo sapien
tacttagcctctgtcttttcttcct

SEQ ID NO: 1695370 - DNA, 25 bp, Homo sapien
ttagcctctgtcttttcttccttct

SEQ ID NO: 1695371 - DNA, 25 bp, Homo sapien
gatctggcgggacgatttctgagca

SEQ ID NO: 1695372 - DNA, 25 bp, Homo sapien
tcaacttcgttcatgtagccgtcca

SEQ ID NO: 1695373 - DNA, 25 bp, Homo sapien
cattgatgacaaatagaacccagcg

SEQ ID NO: 1695374 - DNA, 25 bp, Homo sapien
tctgtaatttcttccggtggccgaa

SEQ ID NO: 1695375 - DNA, 25 bp, Homo sapien
gaaactgcagttgcacggcctcgac

SEQ ID NO: 1695376 - DNA, 25 bp, Homo sapien
tcgcatccagcagagtattcctgac

SEQ ID NO: 1695377 - DNA, 25 bp, Homo sapien
cggcctcgacaaggcggacaatgcc

SEQ ID NO: 1695378 - DNA, 25 bp, Homo sapien
gccagttcgcatccagcagagtatt

SEQ ID NO: 1695379 - DNA, 25 bp, Homo sapien
aagccattgtatttggctaaatatt

SEQ ID NO: 1695380 - DNA, 25 bp, Homo sapien
agccattgtatttggctaaatattc

SEQ ID NO: 1695381 - DNA, 25 bp, Homo sapien
tgcaaacaccgcctcctagtttcaa

SEQ ID NO: 1695382 - DNA, 25 bp, Homo sapien
caaacaccgcctcctagtttcaagc

SEQ ID NO: 1695383 - DNA, 25 bp, Homo sapien
aacaccgcctcctagtttcaagcgt

SEQ ID NO: 1695384 - DNA, 25 bp, Homo sapien
caccgcctcctagtttcaagcgttt

SEQ ID NO: 1695385 - DNA, 25 bp, Homo sapien
gaaattagcagcaactaggactcat

SEQ ID NO: 1695386 - DNA, 25 bp, Homo sapien
catgattgtgtaagggagatgctac

SEQ ID NO: 1695387 - DNA, 25 bp, Homo sapien
tgcccacaaacctttggatcatgat

SEQ ID NO: 1695388 - DNA, 25 bp, Homo sapien
tattgtaagtataacactgcccaca

SEQ ID NO: 1695389 - DNA, 25 bp, Homo sapien
aggaaattggaacaccttcgcctcg

SEQ ID NO: 1695390 - DNA, 25 bp, Homo sapien
gaacaccttcgcctcggggctctat

SEQ ID NO: 1695391 - DNA, 25 bp, Homo sapien
acaccttcgcctcggggctctatgg

SEQ ID NO: 1695392 - DNA, 25 bp, Homo sapien
attggaacaccttcgcctcggggct

SEQ ID NO: 1695393 - DNA, 25 bp, Homo sapien
atatggggatcgaacccacgacctt

SEQ ID NO: 1695394 - DNA, 25 bp, Homo sapien
gatatggggatcgaacccacgacct

SEQ ID NO: 1695395 - DNA, 25 bp, Homo sapien
tggccgatatggggatcgaacccac

SEQ ID NO: 1695396 - DNA, 25 bp, Homo sapien
gccgatatggggatcgaacccacga

SEQ ID NO: 1695397 - DNA, 25 bp, Homo sapien
catctgagagcactgttaatcaccc

SEQ ID NO: 1695398 - DNA, 25 bp, Homo sapien
gctggctaaaaaccgacgagttgca

SEQ ID NO: 1695399 - DNA, 25 bp, Homo sapien
ttaatcaccctcagctcttcgctgg

SEQ ID NO: 1695400 - DNA, 25 bp, Homo sapien
taattatccttagctctttggtggc

SEQ ID NO: 1695401 - DNA, 25 bp, Homo sapien
agaaatgatggcagggaatttgtac

SEQ ID NO: 1695402 - DNA, 25 bp, Homo sapien
ttaagaaatgatggcagggaatttg

SEQ ID NO: 1695403 - DNA, 25 bp, Homo sapien
aagaaatgatggcagggaatttgta

SEQ ID NO: 1695404 - DNA, 25 bp, Homo sapien
taagaaatgatggcagggaatttgt

SEQ ID NO: 1695405 - DNA, 25 bp, Homo sapien
ggcaggactcccgatcttgggccct

SEQ ID NO: 1695406 - DNA, 25 bp, Homo sapien
cggcaggactcccgatcttgggccc

SEQ ID NO: 1695407 - DNA, 25 bp, Homo sapien
ggactcccgatcttgggccctctgc

SEQ ID NO: 1695408 - DNA, 25 bp, Homo sapien
caggactcccgatcttgggccctct

SEQ ID NO: 1695409 - DNA, 25 bp, Homo sapien
aaccttgacattattagcaccacgc

SEQ ID NO: 1695410 - DNA, 25 bp, Homo sapien
tcggggatccaacccgcaaccttga

SEQ ID NO: 1695411 - DNA, 25 bp, Homo sapien
caacccgcaaccttgacattattag

SEQ ID NO: 1695412 - DNA, 25 bp, Homo sapien
ggatccaacccgcaaccttgacatt

SEQ ID NO: 1695413 - DNA, 25 bp, Homo sapien
tccagagcccgctatgcacagttct

SEQ ID NO: 1695414 - DNA, 25 bp, Homo sapien
tgagctgagccggatgccgagtcct

SEQ ID NO: 1695415 - DNA, 25 bp, Homo sapien
gtcttcgtccccaccttgagctgag

SEQ ID NO: 1695416 - DNA, 25 bp, Homo sapien
ggcagctgccagtctagataccctg

SEQ ID NO: 1695417 - DNA, 25 bp, Homo sapien
taaggcgaatgtgataaccactaca

SEQ ID NO: 1695418 - DNA, 25 bp, Homo sapien
tgataaccactacaccacggaaacc

SEQ ID NO: 1695419 - DNA, 25 bp, Homo sapien
ttcgcgtgtaaggcgaatgtgataa

SEQ ID NO: 1695420 - DNA, 25 bp, Homo sapien
tcgacccgaggacctttcgcgtgta

SEQ ID NO: 1695421 - DNA, 25 bp, Homo sapien
tcgaaacctcgaccctggcattagt

SEQ ID NO: 1695422 - DNA, 25 bp, Homo sapien
aacctcgaccctggcattagtagca

SEQ ID NO: 1695423 - DNA, 25 bp, Homo sapien
gaaacctcgaccctggcattagtag

SEQ ID NO: 1695424 - DNA, 25 bp, Homo sapien
gggatcgaaacctcgaccctggcat

SEQ ID NO: 1695425 - DNA, 25 bp, Homo sapien
gatttgaactcggattaccggattc

SEQ ID NO: 1695426 - DNA, 25 bp, Homo sapien
tgaactcggattaccggattcagag

SEQ ID NO: 1695427 - DNA, 25 bp, Homo sapien
tcggattaccggattcagagtccag

SEQ ID NO: 1695428 - DNA, 25 bp, Homo sapien
ctcggattaccggattcagagtcca

SEQ ID NO: 1695429 - DNA, 25 bp, Homo sapien
cacaatggattagcagtccatcgcc

SEQ ID NO: 1695430 - DNA, 25 bp, Homo sapien
agcacaatggattagcagtccatcg

SEQ ID NO: 1695431 - DNA, 25 bp, Homo sapien
gcacaatggattagcagtccatcgc

SEQ ID NO: 1695432 - DNA, 25 bp, Homo sapien
atggattagcagtccatcgccttaa

SEQ ID NO: 1695433 - DNA, 25 bp, Homo sapien
aaacagcagcataaatatattccac

SEQ ID NO: 1695434 - DNA, 25 bp, Homo sapien
cagcagcataaatatattccacata

SEQ ID NO: 1695435 - DNA, 25 bp, Homo sapien
cctaaacagcagcataaatatattc

SEQ ID NO: 1695436 - DNA, 25 bp, Homo sapien
aatatattccacatatgaaagttta

SEQ ID NO: 1695437 - DNA, 25 bp, Homo sapien
cattagtggatttgctggtggctac

SEQ ID NO: 1695438 - DNA, 25 bp, Homo sapien
gatttgaggtttgagccatgcccac

SEQ ID NO: 1695439 - DNA, 25 bp, Homo sapien
tatggaacacccctgatgataactg

SEQ ID NO: 1695440 - DNA, 25 bp, Homo sapien
tagcaataagttccccatgagccca

SEQ ID NO: 1695441 - DNA, 25 bp, Homo sapien
tctgtaccggaagaaatctggaaat

SEQ ID NO: 1695442 - DNA, 25 bp, Homo sapien
gagaaagtctgtaccggaagaaatc

SEQ ID NO: 1695443 - DNA, 25 bp, Homo sapien
agagaaagtctgtaccggaagaaat

SEQ ID NO: 1695444 - DNA, 25 bp, Homo sapien
aagtctgtaccggaagaaatctgga

SEQ ID NO: 1695445 - DNA, 25 bp, Homo sapien
aaccatggatggtgtcttagactgc

SEQ ID NO: 1695446 - DNA, 25 bp, Homo sapien
atctacttctggtgacggcttcaag

SEQ ID NO: 1695447 - DNA, 25 bp, Homo sapien
tgtcttgtacttgttgcatccccag

SEQ ID NO: 1695448 - DNA, 25 bp, Homo sapien
tatctggaacctacttaaaccatgg

SEQ ID NO: 1695449 - DNA, 25 bp, Homo sapien
aaattagagggtgacgacggccagc

SEQ ID NO: 1695450 - DNA, 25 bp, Homo sapien
cctccagaggtcagaaataggtggt

SEQ ID NO: 1695451 - DNA, 25 bp, Homo sapien
ggccagcgggcgctggtcataaaat

SEQ ID NO: 1695452 - DNA, 25 bp, Homo sapien
gaggcgaactctccgagagccacaa

SEQ ID NO: 1695453 - DNA, 25 bp, Homo sapien
tgtatcctgcgggaacccgagcctg

SEQ ID NO: 1695454 - DNA, 25 bp, Homo sapien
tggaaggcttctaggcgcaggagcg

SEQ ID NO: 1695455 - DNA, 25 bp, Homo sapien
cgggcagtgtatcctgcgggaaccc

SEQ ID NO: 1695456 - DNA, 25 bp, Homo sapien
tgcgtctgtcgctgattccaaaagg

SEQ ID NO: 1695457 - DNA, 25 bp, Homo sapien
tgggagtggaggctctcttttatac

SEQ ID NO: 1695458 - DNA, 25 bp, Homo sapien
aaagcggccagaaggagcgggtggg

SEQ ID NO: 1695459 - DNA, 25 bp, Homo sapien
aggtgggagtggaggctctctttta

SEQ ID NO: 1695460 - DNA, 25 bp, Homo sapien
ctttcaggagaaagcggccagaagg

SEQ ID NO: 1695461 - DNA, 25 bp, Homo sapien
cctgataggtgggtaggcactcgcc

SEQ ID NO: 1695462 - DNA, 25 bp, Homo sapien
gccagagccatgcaagcgcagttct

SEQ ID NO: 1695463 - DNA, 25 bp, Homo sapien
atgtagtctgcggacaagagccagc

SEQ ID NO: 1695464 - DNA, 25 bp, Homo sapien
cagttgcacgtcttacctgataggt

SEQ ID NO: 1695465 - DNA, 25 bp, Homo sapien
tggacctaagtctcctgacgcggac

SEQ ID NO: 1695466 - DNA, 25 bp, Homo sapien
gatcatgctctgctcggtatgcggg

SEQ ID NO: 1695467 - DNA, 25 bp, Homo sapien
gattaaagagaaacccatgcgtcga

SEQ ID NO: 1695468 - DNA, 25 bp, Homo sapien
tgacgcggacgaccagttgcaaaac

SEQ ID NO: 1695469 - DNA, 25 bp, Homo sapien
tggtcccggggccctgtaagcctca

SEQ ID NO: 1695470 - DNA, 25 bp, Homo sapien
tcccggggccctgtaagcctcactc

SEQ ID NO: 1695471 - DNA, 25 bp, Homo sapien
cccggggccctgtaagcctcactca

SEQ ID NO: 1695472 - DNA, 25 bp, Homo sapien
ccggggccctgtaagcctcactcac

SEQ ID NO: 1695473 - DNA, 25 bp, Homo sapien
tttttagcactaacagcgctggcca

SEQ ID NO: 1695474 - DNA, 25 bp, Homo sapien
tgggcagcctcagtttaatcacaga

SEQ ID NO: 1695475 - DNA, 25 bp, Homo sapien
gaaaatcttgtcctaccaaaggtga

SEQ ID NO: 1695476 - DNA, 25 bp, Homo sapien
taaactaaggactggcactcaagca

SEQ ID NO: 1695477 - DNA, 25 bp, Homo sapien
tttatgataaaagacagatctgagc

SEQ ID NO: 1695478 - DNA, 25 bp, Homo sapien
ggtgatccagcctctttgacgttct

SEQ ID NO: 1695479 - DNA, 25 bp, Homo sapien
tctctaaaccctttaggtgatccag

SEQ ID NO: 1695480 - DNA, 25 bp, Homo sapien
gggtatgagttcaaagacactatgg

SEQ ID NO: 1695481 - DNA, 25 bp, Homo sapien
caaagtctcatctggagatgaattt

SEQ ID NO: 1695482 - DNA, 25 bp, Homo sapien
tcaaaagtcccaagtccaagtccaa

SEQ ID NO: 1695483 - DNA, 25 bp, Homo sapien
ctcaaaagtcccaagtccaagtcca

SEQ ID NO: 1695484 - DNA, 25 bp, Homo sapien
agatgaatttcttccacctatgaac

SEQ ID NO: 1695485 - DNA, 25 bp, Homo sapien
caggaaaataggaagatctgggaac

SEQ ID NO: 1695486 - DNA, 25 bp, Homo sapien
cagcagcctttgtcaggaaaatagg

SEQ ID NO: 1695487 - DNA, 25 bp, Homo sapien
gatctgggaacctgtgccttttctt

SEQ ID NO: 1695488 - DNA, 25 bp, Homo sapien
aataggaagatctgggaacctgtgc

SEQ ID NO: 1695489 - DNA, 25 bp, Homo sapien
ttattcttccttcaactgggtgatc

SEQ ID NO: 1695490 - DNA, 25 bp, Homo sapien
ctgaagatccaacatctactattat

SEQ ID NO: 1695491 - DNA, 25 bp, Homo sapien
cttcctgaagatccaacatctacta

SEQ ID NO: 1695492 - DNA, 25 bp, Homo sapien
tcctgaagatccaacatctactatt

SEQ ID NO: 1695493 - DNA, 25 bp, Homo sapien
ggaaatgagcaggtgtaccagctga

SEQ ID NO: 1695494 - DNA, 25 bp, Homo sapien
gagttattgggtaatatgctaaccc

SEQ ID NO: 1695495 - DNA, 25 bp, Homo sapien
catggtgaacacagagacatcaaga

SEQ ID NO: 1695496 - DNA, 25 bp, Homo sapien
gaagaatcaagactctcaagtgtag

SEQ ID NO: 1695497 - DNA, 25 bp, Homo sapien
catttaaagtgtaaatgtcatctgt

SEQ ID NO: 1695498 - DNA, 25 bp, Homo sapien
agacatttaaagtgtaaatgtcatc

SEQ ID NO: 1695499 - DNA, 25 bp, Homo sapien
ctgaaagacatttaaagtgtaaatg

SEQ ID NO: 1695500 - DNA, 25 bp, Homo sapien
gaaagacatttaaagtgtaaatgtc

SEQ ID NO: 1695501 - DNA, 25 bp, Homo sapien
taagagacgagcttcgactgaacac

SEQ ID NO: 1695502 - DNA, 25 bp, Homo sapien
gactaagatgtgtgctccggctaaa

SEQ ID NO: 1695503 - DNA, 25 bp, Homo sapien
tgaacggtcaccgaaggctttccca

SEQ ID NO: 1695504 - DNA, 25 bp, Homo sapien
tgttcagtaagcgatgagatccaac

SEQ ID NO: 1695505 - DNA, 25 bp, Homo sapien
caagattggtgagggtcaaagccac

SEQ ID NO: 1695506 - DNA, 25 bp, Homo sapien
taatgtcagtgttttcggaagccga

SEQ ID NO: 1695507 - DNA, 25 bp, Homo sapien
tagtagggacaaaacaggcctgccc

SEQ ID NO: 1695508 - DNA, 25 bp, Homo sapien
gattaaaactagagtccaggctggc

SEQ ID NO: 1695509 - DNA, 25 bp, Homo sapien
caaatcttgtagtgacatctccgcc

SEQ ID NO: 1695510 - DNA, 25 bp, Homo sapien
tgcaaatcttgtagtgacatctccg

SEQ ID NO: 1695511 - DNA, 25 bp, Homo sapien
aatcttgtagtgacatctccgcctc

SEQ ID NO: 1695512 - DNA, 25 bp, Homo sapien
gcaaatcttgtagtgacatctccgc

SEQ ID NO: 1695513 - DNA, 25 bp, Homo sapien
ctttctccttatagatatgagtgat

SEQ ID NO: 1695514 - DNA, 25 bp, Homo sapien
ccctttctccttatagatatgagtg

SEQ ID NO: 1695515 - DNA, 25 bp, Homo sapien
cctttctccttatagatatgagtga

SEQ ID NO: 1695516 - DNA, 25 bp, Homo sapien
ttctccttatagatatgagtgatgg

SEQ ID NO: 1695517 - DNA, 25 bp, Homo sapien
cattatcccaggtcacatttgcata

SEQ ID NO: 1695518 - DNA, 25 bp, Homo sapien
gcattatcaaagtattcaatcacat

SEQ ID NO: 1695519 - DNA, 25 bp, Homo sapien
tattcaatcacattatcccaggtca

SEQ ID NO: 1695520 - DNA, 25 bp, Homo sapien
tttgcatataaccaagagatgaaca

SEQ ID NO: 1695521 - DNA, 25 bp, Homo sapien
cagattaatcttcaccctcaagcca

SEQ ID NO: 1695522 - DNA, 25 bp, Homo sapien
ccctcaagccagacttaaccaccat

SEQ ID NO: 1695523 - DNA, 25 bp, Homo sapien
tcatttctgaaccatacagtctctt

SEQ ID NO: 1695524 - DNA, 25 bp, Homo sapien
tctctcatttctgaaccatacagtc

SEQ ID NO: 1695525 - DNA, 25 bp, Homo sapien
gctgtaccatgttgcatctctaccg

SEQ ID NO: 1695526 - DNA, 25 bp, Homo sapien
caccactggagtatggacagagtag

SEQ ID NO: 1695527 - DNA, 25 bp, Homo sapien
ctgaaggaaatactggttacttcca

SEQ ID NO: 1695528 - DNA, 25 bp, Homo sapien
gatgccaatgagtgcgattgctgaa

SEQ ID NO: 1695529 - DNA, 25 bp, Homo sapien
cagcttgtggtagttgccaggattc

SEQ ID NO: 1695530 - DNA, 25 bp, Homo sapien
gatccttgacttaatcatgcctgca

SEQ ID NO: 1695531 - DNA, 25 bp, Homo sapien
caaataatattcacgggttccaggg

SEQ ID NO: 1695532 - DNA, 25 bp, Homo sapien
gagtccacgctgctaaccaggataa

SEQ ID NO: 1695533 - DNA, 25 bp, Homo sapien
tacctagtaacatgtatagcttctg

SEQ ID NO: 1695534 - DNA, 25 bp, Homo sapien
tatttccaaatagatttactccaca

SEQ ID NO: 1695535 - DNA, 25 bp, Homo sapien
taattatcaccgtacttttcagtcc

SEQ ID NO: 1695536 - DNA, 25 bp, Homo sapien
tatggccaccattcagtttatcttt

SEQ ID NO: 1695537 - DNA, 25 bp, Homo sapien
ggtcataaaacccacactaggccag

SEQ ID NO: 1695538 - DNA, 25 bp, Homo sapien
tggcactgacctaccctaatggtgg

SEQ ID NO: 1695539 - DNA, 25 bp, Homo sapien
caggtttcacactcaggattattgc

SEQ ID NO: 1695540 - DNA, 25 bp, Homo sapien
actaggccagttagctgtctctgga

SEQ ID NO: 1695541 - DNA, 25 bp, Homo sapien
agctcctgagatggaaggtagtggg

SEQ ID NO: 1695542 - DNA, 25 bp, Homo sapien
gggtgatggaggcttgagaacagtc

SEQ ID NO: 1695543 - DNA, 25 bp, Homo sapien
ccagaggaacgggatgagctcctga

SEQ ID NO: 1695544 - DNA, 25 bp, Homo sapien
gcctggcgaaccctggtgttcaagt

SEQ ID NO: 1695545 - DNA, 25 bp, Homo sapien
tgtgtgacgtatgctgctgacgcca

SEQ ID NO: 1695546 - DNA, 25 bp, Homo sapien
tagcacctcttggtcactttgcaag

SEQ ID NO: 1695547 - DNA, 25 bp, Homo sapien
tcttttagggtagacaacctcagcg

SEQ ID NO: 1695548 - DNA, 25 bp, Homo sapien
gactctgatgtgtgattgtgtgacg

SEQ ID NO: 1695549 - DNA, 25 bp, Homo sapien
cggcgaaaatgtgcggcccatcgca

SEQ ID NO: 1695550 - DNA, 25 bp, Homo sapien
ggagcaaaagactggcggcgaaaat

SEQ ID NO: 1695551 - DNA, 25 bp, Homo sapien
tcagacaagtttacaatgcacacgc

SEQ ID NO: 1695552 - DNA, 25 bp, Homo sapien
cgcatacctgaaacaggagcaaaag

SEQ ID NO: 1695553 - DNA, 25 bp, Homo sapien
gctttactaagtggcaaaacatggg

SEQ ID NO: 1695554 - DNA, 25 bp, Homo sapien
gtctgagagacttgaccttggcccc

SEQ ID NO: 1695555 - DNA, 25 bp, Homo sapien
tggccatgggctacacttgcagcta

SEQ ID NO: 1695556 - DNA, 25 bp, Homo sapien
tattatctccgggtttccttaagca

SEQ ID NO: 1695557 - DNA, 25 bp, Homo sapien
tttaagtatagaaggacatttgatt

SEQ ID NO: 1695558 - DNA, 25 bp, Homo sapien
caactccagctttgaataaagttag

SEQ ID NO: 1695559 - DNA, 25 bp, Homo sapien
tttgcaactccagctttgaataaag

SEQ ID NO: 1695560 - DNA, 25 bp, Homo sapien
taagtatagaaggacatttgatttg

SEQ ID NO: 1695561 - DNA, 25 bp, Homo sapien
atggatttctagtccatcgccttaa

SEQ ID NO: 1695562 - DNA, 25 bp, Homo sapien
cccaatggatttctagtccatcgcc

SEQ ID NO: 1695563 - DNA, 25 bp, Homo sapien
tagtcggcaggattcgaacctgcgc

SEQ ID NO: 1695564 - DNA, 25 bp, Homo sapien
agaccccaatggatttctagtccat

SEQ ID NO: 1695565 - DNA, 25 bp, Homo sapien
tactcaccactatactaacgaggaa

SEQ ID NO: 1695566 - DNA, 25 bp, Homo sapien
tcccgcgtgacaggcggggatactc

SEQ ID NO: 1695567 - DNA, 25 bp, Homo sapien
gggatactcaccactatactaacga

SEQ ID NO: 1695568 - DNA, 25 bp, Homo sapien
tcgaaccccggtctcccgcgtgaca

SEQ ID NO: 1695569 - DNA, 25 bp, Homo sapien
taagataaaaattccagaccatatg

SEQ ID NO: 1695570 - DNA, 25 bp, Homo sapien
tgctgtcatatctttaagatcttct

SEQ ID NO: 1695571 - DNA, 25 bp, Homo sapien
gatcttctataatgtggactattta

SEQ ID NO: 1695572 - DNA, 25 bp, Homo sapien
tcaccaactatttcaataatgtcct

SEQ ID NO: 1695573 - DNA, 25 bp, Homo sapien
cacaatggtgcaatacgggacacac

SEQ ID NO: 1695574 - DNA, 25 bp, Homo sapien
caagttctatgcacgttggtagccc

SEQ ID NO: 1695575 - DNA, 25 bp, Homo sapien
ggtagccccaaactctgaccagtat

SEQ ID NO: 1695576 - DNA, 25 bp, Homo sapien
catgcagctactggatctctacaga

SEQ ID NO: 1695577 - DNA, 25 bp, Homo sapien
ctcgaagaaatagtctccatcgagg

SEQ ID NO: 1695578 - DNA, 25 bp, Homo sapien
tcgaagaaatagtctccatcgaggc

SEQ ID NO: 1695579 - DNA, 25 bp, Homo sapien
cgaagaaatagtctccatcgaggct

SEQ ID NO: 1695580 - DNA, 25 bp, Homo sapien
ggtggagggagcgaaaaattatgtg

SEQ ID NO: 1695581 - DNA, 25 bp, Homo sapien
cctctgtgtcccttcgttgtgacat

SEQ ID NO: 1695582 - DNA, 25 bp, Homo sapien
aagtctcctctgtgtcccttcgttg

SEQ ID NO: 1695583 - DNA, 25 bp, Homo sapien
tctcctctgtgtcccttcgttgtga

SEQ ID NO: 1695584 - DNA, 25 bp, Homo sapien
tgatccggggtgttcggacttccag

SEQ ID NO: 1695585 - DNA, 25 bp, Homo sapien
ggattccaggcacggaatcgcttcc

SEQ ID NO: 1695586 - DNA, 25 bp, Homo sapien
taccgacggggagtcatggccaact

SEQ ID NO: 1695587 - DNA, 25 bp, Homo sapien
aaagctcctcggtgaacgacggtgt

SEQ ID NO: 1695588 - DNA, 25 bp, Homo sapien
gtcgaataacatccagcgagcgcct

SEQ ID NO: 1695589 - DNA, 25 bp, Homo sapien
tcagtcgaataacatccagcgagcg

SEQ ID NO: 1695590 - DNA, 25 bp, Homo sapien
gaataacatccagcgagcgcctgcc

SEQ ID NO: 1695591 - DNA, 25 bp, Homo sapien
tcgaataacatccagcgagcgcctg

SEQ ID NO: 1695592 - DNA, 25 bp, Homo sapien
tcatcgcacaagcattaacgtttcc

SEQ ID NO: 1695593 - DNA, 25 bp, Homo sapien
agcattaacgtttccagcaaatatc

SEQ ID NO: 1695594 - DNA, 25 bp, Homo sapien
gcacaagcattaacgtttccagcaa

SEQ ID NO: 1695595 - DNA, 25 bp, Homo sapien
tcgcacaagcattaacgtttccagc

SEQ ID NO: 1695596 - DNA, 25 bp, Homo sapien
cccaatggatttctagtccatcgcc

SEQ ID NO: 1695597 - DNA, 25 bp, Homo sapien
atggatttctagtccatcgccttaa

SEQ ID NO: 1695598 - DNA, 25 bp, Homo sapien
agaccccaatggatttctagtccat

SEQ ID NO: 1695599 - DNA, 25 bp, Homo sapien
tagtcggcaggattcgaacctgcgc

SEQ ID NO: 1695600 - DNA, 25 bp, Homo sapien
atggatttctagtccatcgccttaa

SEQ ID NO: 1695601 - DNA, 25 bp, Homo sapien
tagtcggcaggattcgaacctgcgc

SEQ ID NO: 1695602 - DNA, 25 bp, Homo sapien
cccaatggatttctagtccatcgcc

SEQ ID NO: 1695603 - DNA, 25 bp, Homo sapien
agaccccaatggatttctagtccat

SEQ ID NO: 1695604 - DNA, 25 bp, Homo sapien
gggatactcaccactatactaacga

SEQ ID NO: 1695605 - DNA, 25 bp, Homo sapien
tactcaccactatactaacgaggaa

SEQ ID NO: 1695606 - DNA, 25 bp, Homo sapien
tcgaaccccggtctcccgcgtgaca

SEQ ID NO: 1695607 - DNA, 25 bp, Homo sapien
tcccgcgtgacaggcggggatactc

SEQ ID NO: 1695608 - DNA, 25 bp, Homo sapien
catcattattaaccctgcgttgtag

SEQ ID NO: 1695609 - DNA, 25 bp, Homo sapien
tccaacatccgagacaaccgtgtct

SEQ ID NO: 1695610 - DNA, 25 bp, Homo sapien
cctgcgttgtagtttacctctttct

SEQ ID NO: 1695611 - DNA, 25 bp, Homo sapien
cgtgtctcgagtaagagagaatcta

SEQ ID NO: 1695612 - DNA, 25 bp, Homo sapien
tccaccgagatttgaactcggatcg

SEQ ID NO: 1695613 - DNA, 25 bp, Homo sapien
tttgaactcggatcgctggattcag

SEQ ID NO: 1695614 - DNA, 25 bp, Homo sapien
aggttccaccgagatttgaactcgg

SEQ ID NO: 1695615 - DNA, 25 bp, Homo sapien
tgaactcggatcgctggattcagag

SEQ ID NO: 1695616 - DNA, 25 bp, Homo sapien
gtgttgacagtgattgaagttacca

SEQ ID NO: 1695617 - DNA, 25 bp, Homo sapien
tgttgacagtgattgaagttaccat

SEQ ID NO: 1695618 - DNA, 25 bp, Homo sapien
cgtgttgacagtgattgaagttacc

SEQ ID NO: 1695619 - DNA, 25 bp, Homo sapien
tgaaaagcttcagcagctgttcggg

SEQ ID NO: 1695620 - DNA, 25 bp, Homo sapien
aaagcttcagcagctgttcgggctc

SEQ ID NO: 1695621 - DNA, 25 bp, Homo sapien
aatgaaaagcttcagcagctgttcg

SEQ ID NO: 1695622 - DNA, 25 bp, Homo sapien
gaaaagcttcagcagctgttcgggc

SEQ ID NO: 1695623 - DNA, 25 bp, Homo sapien
ctattgctcaaaatggctcctcagg

SEQ ID NO: 1695624 - DNA, 25 bp, Homo sapien
gctcctcaggctctcatcagttgtt

SEQ ID NO: 1695625 - DNA, 25 bp, Homo sapien
catcagttgtttcaaagctcaaccc

SEQ ID NO: 1695626 - DNA, 25 bp, Homo sapien
caggctctcatcagttgtttcaaag

SEQ ID NO: 1695627 - DNA, 25 bp, Homo sapien
tggtgtttggatctttctttactac

SEQ ID NO: 1695628 - DNA, 25 bp, Homo sapien
tttccataccggcatatgtgacaaa

SEQ ID NO: 1695629 - DNA, 25 bp, Homo sapien
tttctttactacacagtccgtgagc

SEQ ID NO: 1695630 - DNA, 25 bp, Homo sapien
caccttttccataccggcatatgtg

SEQ ID NO: 1695631 - DNA, 25 bp, Homo sapien
aaatcttccatccaccttgtgcggc

SEQ ID NO: 1695632 - DNA, 25 bp, Homo sapien
aaacagctgtctttggttccacaaa

SEQ ID NO: 1695633 - DNA, 25 bp, Homo sapien
aacagctgtctttggttccacaaat

SEQ ID NO: 1695634 - DNA, 25 bp, Homo sapien
cacaaatcttccatccaccttgtgc

SEQ ID NO: 1695635 - DNA, 25 bp, Homo sapien
tctttaacatctttatcacagttaa

SEQ ID NO: 1695636 - DNA, 25 bp, Homo sapien
agttcttctttaacatctttatcac

SEQ ID NO: 1695637 - DNA, 25 bp, Homo sapien
ttaacatctttatcacagttaagtg

SEQ ID NO: 1695638 - DNA, 25 bp, Homo sapien
taacatctttatcacagttaagtgg

SEQ ID NO: 1695639 - DNA, 25 bp, Homo sapien
ttgacagagcactcctaaagtcaca

SEQ ID NO: 1695640 - DNA, 25 bp, Homo sapien
ctttgacagagcactcctaaagtca

SEQ ID NO: 1695641 - DNA, 25 bp, Homo sapien
ttgctttgacagagcactcctaaag

SEQ ID NO: 1695642 - DNA, 25 bp, Homo sapien
tgctttgacagagcactcctaaagt

SEQ ID NO: 1695643 - DNA, 25 bp, Homo sapien
aaatcttctaccactgccgtaacta

SEQ ID NO: 1695644 - DNA, 25 bp, Homo sapien
taaaatcttctaccactgccgtaac

SEQ ID NO: 1695645 - DNA, 25 bp, Homo sapien
tctaccactgccgtaactactgctg

SEQ ID NO: 1695646 - DNA, 25 bp, Homo sapien
tcttctaccactgccgtaactactg

SEQ ID NO: 1695647 - DNA, 25 bp, Homo sapien
ttagtcataaatacagtcctcaagt

SEQ ID NO: 1695648 - DNA, 25 bp, Homo sapien
agttaggcccttccaccactgggct

SEQ ID NO: 1695649 - DNA, 25 bp, Homo sapien
agcagttaggcccttccaccactgg

SEQ ID NO: 1695650 - DNA, 25 bp, Homo sapien
ttaggcccttccaccactgggcttg

SEQ ID NO: 1695651 - DNA, 25 bp, Homo sapien
tagtcggcaggattcgaacctgcgt

SEQ ID NO: 1695652 - DNA, 25 bp, Homo sapien
cctgcgtggggaaaccccaatggat

SEQ ID NO: 1695653 - DNA, 25 bp, Homo sapien
aaaccccaatggatttctagtccat

SEQ ID NO: 1695654 - DNA, 25 bp, Homo sapien
atggatttctagtccatcgccttaa

SEQ ID NO: 1695655 - DNA, 25 bp, Homo sapien
ggatataatcgcaacctcacctcgg

SEQ ID NO: 1695656 - DNA, 25 bp, Homo sapien
gggctctttctgtgctcaggatata

SEQ ID NO: 1695657 - DNA, 25 bp, Homo sapien
gaattcctaggaagatactcagctg

SEQ ID NO: 1695658 - DNA, 25 bp, Homo sapien
tcttttggtcaatgcgttaacccat

SEQ ID NO: 1695659 - DNA, 25 bp, Homo sapien
caagtgggccaaggtgctctgaagg

SEQ ID NO: 1695660 - DNA, 25 bp, Homo sapien
ctctgaagggatgtatggactctcc

SEQ ID NO: 1695661 - DNA, 25 bp, Homo sapien
gccaaggtgctctgaagggatgtat

SEQ ID NO: 1695662 - DNA, 25 bp, Homo sapien
caagtgggcaagtgggccaaggtgc

SEQ ID NO: 1695663 - DNA, 25 bp, Homo sapien
gagccatgctgctaatttcgttgct

SEQ ID NO: 1695664 - DNA, 25 bp, Homo sapien
tgactttccaggctttatctgagcc

SEQ ID NO: 1695665 - DNA, 25 bp, Homo sapien
ctaaagcatatgactttccaggctt

SEQ ID NO: 1695666 - DNA, 25 bp, Homo sapien
gctaatttcgttgctaaacttaatc

SEQ ID NO: 1695667 - DNA, 25 bp, Homo sapien
gtttagtttcataaatggatacctg

SEQ ID NO: 1695668 - DNA, 25 bp, Homo sapien
tcctgtagagcacttagaaataatg

SEQ ID NO: 1695669 - DNA, 25 bp, Homo sapien
tggatacctgagaaacatgtttaaa

SEQ ID NO: 1695670 - DNA, 25 bp, Homo sapien
ttttgctcctgtagagcacttagaa

SEQ ID NO: 1695671 - DNA, 25 bp, Homo sapien
gagaggtctccgactcttcagccaa

SEQ ID NO: 1695672 - DNA, 25 bp, Homo sapien
taaatcaggagcctcttcgatggcg

SEQ ID NO: 1695673 - DNA, 25 bp, Homo sapien
tcagccaaacatgattcccgtaagt

SEQ ID NO: 1695674 - DNA, 25 bp, Homo sapien
gaacggctaaaactggactggcgcg

SEQ ID NO: 1695675 - DNA, 25 bp, Homo sapien
aaaccccaatggatttcaagtccat

SEQ ID NO: 1695676 - DNA, 25 bp, Homo sapien
tagtcggcaggattcgaacctgcgc

SEQ ID NO: 1695677 - DNA, 25 bp, Homo sapien
atggatttcaagtccatcgccttaa

SEQ ID NO: 1695678 - DNA, 25 bp, Homo sapien
cgtagtcggcaggattcgaacctgc

SEQ ID NO: 1695679 - DNA, 25 bp, Homo sapien
aacccgcaacctttgaatctcttga

SEQ ID NO: 1695680 - DNA, 25 bp, Homo sapien
cgaacccgcaacctttgaatctctt

SEQ ID NO: 1695681 - DNA, 25 bp, Homo sapien
gaacccgcaacctttgaatctcttg

SEQ ID NO: 1695682 - DNA, 25 bp, Homo sapien
acccgcaacctttgaatctcttgat

SEQ ID NO: 1695683 - DNA, 25 bp, Homo sapien
cattgtcctcaccagaccttcttct

SEQ ID NO: 1695684 - DNA, 25 bp, Homo sapien
ttcttcacctgctggcctttttctt

SEQ ID NO: 1695685 - DNA, 25 bp, Homo sapien
cgtctccattgtcctcaccagacct

SEQ ID NO: 1695686 - DNA, 25 bp, Homo sapien
ccttcctcacataccttctccccat

SEQ ID NO: 1695687 - DNA, 25 bp, Homo sapien
agtattcattaattcgtgagacact

SEQ ID NO: 1695688 - DNA, 25 bp, Homo sapien
ttaattcgtgagacactttgagcac

SEQ ID NO: 1695689 - DNA, 25 bp, Homo sapien
aggaaatagtgctcatggttcgttc

SEQ ID NO: 1695690 - DNA, 25 bp, Homo sapien
gctcatggttcgttcagtattcatt

SEQ ID NO: 1695691 - DNA, 25 bp, Homo sapien
taatgtgcacaattgcagggagaat

SEQ ID NO: 1695692 - DNA, 25 bp, Homo sapien
cactgtactttcattaaacagccta

SEQ ID NO: 1695693 - DNA, 25 bp, Homo sapien
caaagggagttcgttgctctgggca

SEQ ID NO: 1695694 - DNA, 25 bp, Homo sapien
gatccttggagaccgaatttgcagg

SEQ ID NO: 1695695 - DNA, 25 bp, Homo sapien
aagccattttagcaccaagcagata

SEQ ID NO: 1695696 - DNA, 25 bp, Homo sapien
attttagcaccaagcagataattta

SEQ ID NO: 1695697 - DNA, 25 bp, Homo sapien
tttagcaccaagcagataatttaac

SEQ ID NO: 1695698 - DNA, 25 bp, Homo sapien
ctaagccattttagcaccaagcaga

SEQ ID NO: 1695699 - DNA, 25 bp, Homo sapien
gttctacctactgagctacccaggt

SEQ ID NO: 1695700 - DNA, 25 bp, Homo sapien
ttctacctactgagctacccaggtt

SEQ ID NO: 1695701 - DNA, 25 bp, Homo sapien
ccttttttcttctgcaaaggtgctc

SEQ ID NO: 1695702 - DNA, 25 bp, Homo sapien
ttcttctgcaaaggtgctcagccat

SEQ ID NO: 1695703 - DNA, 25 bp, Homo sapien
ttttttcttctgcaaaggtgctcag

SEQ ID NO: 1695704 - DNA, 25 bp, Homo sapien
ttttcttctgcaaaggtgctcagcc

SEQ ID NO: 1695705 - DNA, 25 bp, Homo sapien
ttgcagaactgccgttttcagattt

SEQ ID NO: 1695706 - DNA, 25 bp, Homo sapien
cttttgcagaactgccgttttcaga

SEQ ID NO: 1695707 - DNA, 25 bp, Homo sapien
gcagaactgccgttttcagattttc

SEQ ID NO: 1695708 - DNA, 25 bp, Homo sapien
cagaactgccgttttcagattttcg

SEQ ID NO: 1695709 - DNA, 25 bp, Homo sapien
taaatttttaccaagctgatagcag

SEQ ID NO: 1695710 - DNA, 25 bp, Homo sapien
gataacaatgtgcttccttaccaga

SEQ ID NO: 1695711 - DNA, 25 bp, Homo sapien
tgttagacatagtcaaattcccctt

SEQ ID NO: 1695712 - DNA, 25 bp, Homo sapien
ctacctgttcctgtatgcactgaca

SEQ ID NO: 1695713 - DNA, 25 bp, Homo sapien
ggcgtccgctctaaagccgccttta

SEQ ID NO: 1695714 - DNA, 25 bp, Homo sapien
tgatgaagaagcctgggcgtccgct

SEQ ID NO: 1695715 - DNA, 25 bp, Homo sapien
ttaccagccagctacgatctctaag

SEQ ID NO: 1695716 - DNA, 25 bp, Homo sapien
aagggctgctgttcgcaataatgag

SEQ ID NO: 1695717 - DNA, 25 bp, Homo sapien
taactgcctggtgctttctgaaacc

SEQ ID NO: 1695718 - DNA, 25 bp, Homo sapien
tctgaaacctagtggttcactttca

SEQ ID NO: 1695719 - DNA, 25 bp, Homo sapien
tcaaagaacggaagcataagcggag

SEQ ID NO: 1695720 - DNA, 25 bp, Homo sapien
agtgaccgagggagtaaactctgtt

SEQ ID NO: 1695721 - DNA, 25 bp, Homo sapien
ctctcatgaatgactgaagacctac

SEQ ID NO: 1695722 - DNA, 25 bp, Homo sapien
agggccacaggaccacacagtgccc

SEQ ID NO: 1695723 - DNA, 25 bp, Homo sapien
ccacaggaccacacagtgcccttgt

SEQ ID NO: 1695724 - DNA, 25 bp, Homo sapien
gggccacaggaccacacagtgccct

SEQ ID NO: 1695725 - DNA, 25 bp, Homo sapien
ctggccgaggacagggccacaggac

SEQ ID NO: 1695726 - DNA, 25 bp, Homo sapien
tttgagtaggcatgtcgtctccacg

SEQ ID NO: 1695727 - DNA, 25 bp, Homo sapien
gcgagcaacgattttcagaagtaca

SEQ ID NO: 1695728 - DNA, 25 bp, Homo sapien
tcttccgttcgctgcatcttcagtt

SEQ ID NO: 1695729 - DNA, 25 bp, Homo sapien
tctgcctcaattccgcgagcaacga

SEQ ID NO: 1695730 - DNA, 25 bp, Homo sapien
ctcgcgatccatccgcctcgttctc

SEQ ID NO: 1695731 - DNA, 25 bp, Homo sapien
cctcgcgatccatccgcctcgttct

SEQ ID NO: 1695732 - DNA, 25 bp, Homo sapien
acagccatgcgcaatctcagccatg

SEQ ID NO: 1695733 - DNA, 25 bp, Homo sapien
attacagccatgcgcaatctcagcc

SEQ ID NO: 1695734 - DNA, 25 bp, Homo sapien
gtatagttccaatttgtgtatatgt

SEQ ID NO: 1695735 - DNA, 25 bp, Homo sapien
tctgtatagttccaatttgtgtata

SEQ ID NO: 1695736 - DNA, 25 bp, Homo sapien
cttctctgtatagttccaatttgtg

SEQ ID NO: 1695737 - DNA, 25 bp, Homo sapien
tctctgtatagttccaatttgtgta

SEQ ID NO: 1695738 - DNA, 25 bp, Homo sapien
taacccgaaagatagcaacataagg

SEQ ID NO: 1695739 - DNA, 25 bp, Homo sapien
cagcgtctgctgactacgagttaca

SEQ ID NO: 1695740 - DNA, 25 bp, Homo sapien
catcatttagaatagcaccgggcaa

SEQ ID NO: 1695741 - DNA, 25 bp, Homo sapien
ttgtgaaaaccaggagcgtacgcca

SEQ ID NO: 1695742 - DNA, 25 bp, Homo sapien
ttcattctaaatagcctgataaggc

SEQ ID NO: 1695743 - DNA, 25 bp, Homo sapien
gcagcttctggctttaagcaatagc

SEQ ID NO: 1695744 - DNA, 25 bp, Homo sapien
cctggggaagaatgcgatgcagctt

SEQ ID NO: 1695745 - DNA, 25 bp, Homo sapien
aattataccaatagaatgaattctc

SEQ ID NO: 1695746 - DNA, 25 bp, Homo sapien
ggtttgccataaactgctatgacgg

SEQ ID NO: 1695747 - DNA, 25 bp, Homo sapien
gctatgacggaggaagtctaggttc

SEQ ID NO: 1695748 - DNA, 25 bp, Homo sapien
ccgaccgatgcttcataaactttga

SEQ ID NO: 1695749 - DNA, 25 bp, Homo sapien
acattgggagcaccaccactgcaag

SEQ ID NO: 1695750 - DNA, 25 bp, Homo sapien
ttgagaatgtcgttttatgtttagg

SEQ ID NO: 1695751 - DNA, 25 bp, Homo sapien
tgtcgttttatgtttaggtacagtg

SEQ ID NO: 1695752 - DNA, 25 bp, Homo sapien
gcaggtccaagaaggatcgtgaagt

SEQ ID NO: 1695753 - DNA, 25 bp, Homo sapien
ggatcgtgaagtcccaacaagcctg

SEQ ID NO: 1695754 - DNA, 25 bp, Homo sapien
aggccctggtgagatttgaactcac

SEQ ID NO: 1695755 - DNA, 25 bp, Homo sapien
gcgctccaaccgctgagctacaggg

SEQ ID NO: 1695756 - DNA, 25 bp, Homo sapien
tggtgagatttgaactcacgacccc

SEQ ID NO: 1695757 - DNA, 25 bp, Homo sapien
taggtttacgagaccagcgctccaa

SEQ ID NO: 1695758 - DNA, 25 bp, Homo sapien
ttgttgcttgattgttcgattttgg

SEQ ID NO: 1695759 - DNA, 25 bp, Homo sapien
actttgttgcttgattgttcgattt

SEQ ID NO: 1695760 - DNA, 25 bp, Homo sapien
ctttgttgcttgattgttcgatttt

SEQ ID NO: 1695761 - DNA, 25 bp, Homo sapien
aactttgttgcttgattgttcgatt

SEQ ID NO: 1695762 - DNA, 25 bp, Homo sapien
gcaaccactccttatttgtgcagca

SEQ ID NO: 1695763 - DNA, 25 bp, Homo sapien
ttcagggaaaactggcacagcaacc

SEQ ID NO: 1695764 - DNA, 25 bp, Homo sapien
tacaaaggtcaaggcggtgttcacc

SEQ ID NO: 1695765 - DNA, 25 bp, Homo sapien
gctctgtgacatatacccgctcagt

SEQ ID NO: 1695766 - DNA, 25 bp, Homo sapien
tcacccgcacatatactgttgtata

SEQ ID NO: 1695767 - DNA, 25 bp, Homo sapien
cggcatcacccgcacatatactgtt

SEQ ID NO: 1695768 - DNA, 25 bp, Homo sapien
catcacccgcacatatactgttgta

SEQ ID NO: 1695769 - DNA, 25 bp, Homo sapien
cccgcacatatactgttgtataagt

SEQ ID NO: 1695770 - DNA, 25 bp, Homo sapien
gaaagctcttccttagtgggtggaa

SEQ ID NO: 1695771 - DNA, 25 bp, Homo sapien
ggagccatcctacgctgtcagaaag

SEQ ID NO: 1695772 - DNA, 25 bp, Homo sapien
tcctatcagttaggcgctcagtcgc

SEQ ID NO: 1695773 - DNA, 25 bp, Homo sapien
tgctcgagccataaggtcctatcag

SEQ ID NO: 1695774 - DNA, 25 bp, Homo sapien
tcaaaactcttccgtgaaggttgtg

SEQ ID NO: 1695775 - DNA, 25 bp, Homo sapien
cattattttcttgccggaaatcttt

SEQ ID NO: 1695776 - DNA, 25 bp, Homo sapien
taacattattttcttgccggaaatc

SEQ ID NO: 1695777 - DNA, 25 bp, Homo sapien
caaaactcttccgtgaaggttgtgt

SEQ ID NO: 1695778 - DNA, 25 bp, Homo sapien
ccagcaggggcatccatcttgaagg

SEQ ID NO: 1695779 - DNA, 25 bp, Homo sapien
cagcaggggcatccatcttgaaggc

SEQ ID NO: 1695780 - DNA, 25 bp, Homo sapien
agcaggggcatccatcttgaaggct

SEQ ID NO: 1695781 - DNA, 25 bp, Homo sapien
ttatatccttatgcatattttcccc

SEQ ID NO: 1695782 - DNA, 25 bp, Homo sapien
tatccttatgcatattttcccccat

SEQ ID NO: 1695783 - DNA, 25 bp, Homo sapien
tatatccttatgcatattttccccc

SEQ ID NO: 1695784 - DNA, 25 bp, Homo sapien
tttatatccttatgcatattttccc

SEQ ID NO: 1695785 - DNA, 25 bp, Homo sapien
tgtcgaaacccggaattgaaccaga

SEQ ID NO: 1695786 - DNA, 25 bp, Homo sapien
ataagcactgatgtaatcggcgaag

SEQ ID NO: 1695787 - DNA, 25 bp, Homo sapien
gatgtaatcggcgaagatattcagg

SEQ ID NO: 1695788 - DNA, 25 bp, Homo sapien
tcaagacaacgccgccgaaaggaag

SEQ ID NO: 1695789 - DNA, 25 bp, Homo sapien
caacgccgccgaaaggaaggcgaat

SEQ ID NO: 1695790 - DNA, 25 bp, Homo sapien
accacgctctagccgactgagctaa

SEQ ID NO: 1695791 - DNA, 25 bp, Homo sapien
cgttattagcaccacgctctagccg

SEQ ID NO: 1695792 - DNA, 25 bp, Homo sapien
gttattagcaccacgctctagccga

SEQ ID NO: 1695793 - DNA, 25 bp, Homo sapien
ttagcaccacgctctagccgactga

SEQ ID NO: 1695794 - DNA, 25 bp, Homo sapien
ctgtggccaagttgaacggagaact

SEQ ID NO: 1695795 - DNA, 25 bp, Homo sapien
caagttgaacggagaactggcgatt

SEQ ID NO: 1695796 - DNA, 25 bp, Homo sapien
gccaagttgaacggagaactggcga

SEQ ID NO: 1695797 - DNA, 25 bp, Homo sapien
tggccaagttgaacggagaactggc

SEQ ID NO: 1695798 - DNA, 25 bp, Homo sapien
cagtatgcgctgtcaggggcactgc

SEQ ID NO: 1695799 - DNA, 25 bp, Homo sapien
caaacctggtagtccaaatgtgttg

SEQ ID NO: 1695800 - DNA, 25 bp, Homo sapien
gggcactgcgggtaaacgaatgaaa

SEQ ID NO: 1695801 - DNA, 25 bp, Homo sapien
tgaaaccacaaacctggtagtccaa

SEQ ID NO: 1695802 - DNA, 25 bp, Homo sapien
cctcaacatcgccccaatccaccac

SEQ ID NO: 1695803 - DNA, 25 bp, Homo sapien
accactcccgccacgggcctcttct

SEQ ID NO: 1695804 - DNA, 25 bp, Homo sapien
ccaccacttttcctccgccctgaga

SEQ ID NO: 1695805 - DNA, 25 bp, Homo sapien
accacttttcctccgccctgagatc

SEQ ID NO: 1695806 - DNA, 25 bp, Homo sapien
tgaagaaacgttgaatcataaaggc

SEQ ID NO: 1695807 - DNA, 25 bp, Homo sapien
ctgaagaaacgttgaatcataaagg

SEQ ID NO: 1695808 - DNA, 25 bp, Homo sapien
gaagtccacattcctggcgtctctg

SEQ ID NO: 1695809 - DNA, 25 bp, Homo sapien
tcacgtatatcttcttcatcggtat

SEQ ID NO: 1695810 - DNA, 25 bp, Homo sapien
tccctgggcatgactgttgtcaaaa

SEQ ID NO: 1695811 - DNA, 25 bp, Homo sapien
cattcctggcgtctctgaggcacag

SEQ ID NO: 1695812 - DNA, 25 bp, Homo sapien
tccaaccagagaactttaagcgtgt

SEQ ID NO: 1695813 - DNA, 25 bp, Homo sapien
tgttaacaactacactacagaaaac

SEQ ID NO: 1695814 - DNA, 25 bp, Homo sapien
ccatctggtatccaaccagagaact

SEQ ID NO: 1695815 - DNA, 25 bp, Homo sapien
agaactttaagcgtgtgaggcgaac

SEQ ID NO: 1695816 - DNA, 25 bp, Homo sapien
tctaaccaactgagctaaccggccg

SEQ ID NO: 1695817 - DNA, 25 bp, Homo sapien
acccgcgaccttggcgttattagca

SEQ ID NO: 1695818 - DNA, 25 bp, Homo sapien
gccagtacggggatcgaacccgcga

SEQ ID NO: 1695819 - DNA, 25 bp, Homo sapien
tggcgttattagcaccacgctctaa

SEQ ID NO: 1695820 - DNA, 25 bp, Homo sapien
taaccgctgtcgagtaagcgagggc

SEQ ID NO: 1695821 - DNA, 25 bp, Homo sapien
gcgagggcgcaccaaattcacagat

SEQ ID NO: 1695822 - DNA, 25 bp, Homo sapien
cacacaggtacacgtttagatcgat

SEQ ID NO: 1695823 - DNA, 25 bp, Homo sapien
tggaggcagcggaaagaaacgtccc

SEQ ID NO: 1695824 - DNA, 25 bp, Homo sapien
ctctgtagttcctgtcacgtgagat

SEQ ID NO: 1695825 - DNA, 25 bp, Homo sapien
tcctgtcacgtgagatgtatttctg

SEQ ID NO: 1695826 - DNA, 25 bp, Homo sapien
gagatgtatttctgtcctaagccaa

SEQ ID NO: 1695827 - DNA, 25 bp, Homo sapien
cctaagccaattggattattcttcc

SEQ ID NO: 1695828 - DNA, 25 bp, Homo sapien
ttcgatccgcatcaaaaaacctggc

SEQ ID NO: 1695829 - DNA, 25 bp, Homo sapien
tttgggcacaagagctcagggcgtt

SEQ ID NO: 1695830 - DNA, 25 bp, Homo sapien
gaagggtttgcatcccctggcgtca

SEQ ID NO: 1695831 - DNA, 25 bp, Homo sapien
gaagcccacttccagaaaaactcga

SEQ ID NO: 1695832 - DNA, 25 bp, Homo sapien
agaggagtccctgcagagtcatcga

SEQ ID NO: 1695833 - DNA, 25 bp, Homo sapien
cagacctaggtttctcgacatttcc

SEQ ID NO: 1695834 - DNA, 25 bp, Homo sapien
ggcgaagcgccgacacttcatctgc

SEQ ID NO: 1695835 - DNA, 25 bp, Homo sapien
ttgcactggagtcccgaggcgaagc

SEQ ID NO: 1695836 - DNA, 25 bp, Homo sapien
catttgttcataatgctactgccaa

SEQ ID NO: 1695837 - DNA, 25 bp, Homo sapien
tttgttcataatgctactgccaagg

SEQ ID NO: 1695838 - DNA, 25 bp, Homo sapien
tgcatttgttcataatgctactgcc

SEQ ID NO: 1695839 - DNA, 25 bp, Homo sapien
ttgttcataatgctactgccaagga

SEQ ID NO: 1695840 - DNA, 25 bp, Homo sapien
gctgtcgccataaacttagtcaagg

SEQ ID NO: 1695841 - DNA, 25 bp, Homo sapien
ccataaacttagtcaaggccaccat

SEQ ID NO: 1695842 - DNA, 25 bp, Homo sapien
tcgccataaacttagtcaaggccac

SEQ ID NO: 1695843 - DNA, 25 bp, Homo sapien
ctgctgtcgccataaacttagtcaa

SEQ ID NO: 1695844 - DNA, 25 bp, Homo sapien
gttctattggacagcattgggctag

SEQ ID NO: 1695845 - DNA, 25 bp, Homo sapien
ggacaacacagatacaggataaagt

SEQ ID NO: 1695846 - DNA, 25 bp, Homo sapien
catagcgattactgtgttggacaac

SEQ ID NO: 1695847 - DNA, 25 bp, Homo sapien
ctgaggtcaagggatatgcctgcct

SEQ ID NO: 1695848 - DNA, 25 bp, Homo sapien
taaatcatccagaggtggcactact

SEQ ID NO: 1695849 - DNA, 25 bp, Homo sapien
tggcactactgtcaagaatgtcccc

SEQ ID NO: 1695850 - DNA, 25 bp, Homo sapien
tattagtcccaacgtgcacagtggc

SEQ ID NO: 1695851 - DNA, 25 bp, Homo sapien
taagaggtcccaaggtaaatcatcc

SEQ ID NO: 1695852 - DNA, 25 bp, Homo sapien
taacttctacagttgcaaatggccc

SEQ ID NO: 1695853 - DNA, 25 bp, Homo sapien
ccagaagagccccacaattggttca

SEQ ID NO: 1695854 - DNA, 25 bp, Homo sapien
tgggcctcacacatcatgcagttgg

SEQ ID NO: 1695855 - DNA, 25 bp, Homo sapien
gatgtccagactagcttcatgggca

SEQ ID NO: 1695856 - DNA, 25 bp, Homo sapien
cagcaccgggaattgcgaaggtaga

SEQ ID NO: 1695857 - DNA, 25 bp, Homo sapien
gatgttaaaactctgacagctccac

SEQ ID NO: 1695858 - DNA, 25 bp, Homo sapien
ccacagcaccgggaattgcgaaggt

SEQ ID NO: 1695859 - DNA, 25 bp, Homo sapien
aatagtatccatgtggcttggttga

SEQ ID NO: 1695860 - DNA, 25 bp, Homo sapien
cactaatcttggagtaagtgtgagt

SEQ ID NO: 1695861 - DNA, 25 bp, Homo sapien
ccccagttatgggtagagagtcctc

SEQ ID NO: 1695862 - DNA, 25 bp, Homo sapien
gagtggctgaggcatccccagttat

SEQ ID NO: 1695863 - DNA, 25 bp, Homo sapien
ccataatcagtgacactaatcttgg

SEQ ID NO: 1695864 - DNA, 25 bp, Homo sapien
ttttagtagacgcttctggagggaa

SEQ ID NO: 1695865 - DNA, 25 bp, Homo sapien
aacctaaactttacagacagaggag

SEQ ID NO: 1695866 - DNA, 25 bp, Homo sapien
cctgcagaataggaagcgcagtaag

SEQ ID NO: 1695867 - DNA, 25 bp, Homo sapien
ggacaacaaaatacccctgcagaat

SEQ ID NO: 1695868 - DNA, 25 bp, Homo sapien
ttaaactcggctaggtgccatgggt

SEQ ID NO: 1695869 - DNA, 25 bp, Homo sapien
aggagaatcaagcttaggaggtgga

SEQ ID NO: 1695870 - DNA, 25 bp, Homo sapien
gttaaactcggctaggtgccatggg

SEQ ID NO: 1695871 - DNA, 25 bp, Homo sapien
agttaaactcggctaggtgccatgg

SEQ ID NO: 1695872 - DNA, 25 bp, Homo sapien
tgtttctctacgtaagtacaattta

SEQ ID NO: 1695873 - DNA, 25 bp, Homo sapien
ttttttgcagcacacatctagttac

SEQ ID NO: 1695874 - DNA, 25 bp, Homo sapien
gtgcagaggaccagaagaggacctc

SEQ ID NO: 1695875 - DNA, 25 bp, Homo sapien
gcagcacacatctagttactaggaa

SEQ ID NO: 1695876 - DNA, 25 bp, Homo sapien
cctttagtgaagtagaagtagtagg

SEQ ID NO: 1695877 - DNA, 25 bp, Homo sapien
aaaaatcgggacagtgcctttagtg

SEQ ID NO: 1695878 - DNA, 25 bp, Homo sapien
tggaggtttgaattcagcaggcaaa

SEQ ID NO: 1695879 - DNA, 25 bp, Homo sapien
aatgctgtggtttccactagggcac

SEQ ID NO: 1695880 - DNA, 25 bp, Homo sapien
ggcgctttaaccagctaagccacga

SEQ ID NO: 1695881 - DNA, 25 bp, Homo sapien
ctttaaccagctaagccacgaagcc

SEQ ID NO: 1695882 - DNA, 25 bp, Homo sapien
actagacaggcgctttaaccagcta

SEQ ID NO: 1695883 - DNA, 25 bp, Homo sapien
cgctttaaccagctaagccacgaag

SEQ ID NO: 1695884 - DNA, 25 bp, Homo sapien
acagataatgggcatgtactttgtc

SEQ ID NO: 1695885 - DNA, 25 bp, Homo sapien
atgtcctgctattagcacagataat

SEQ ID NO: 1695886 - DNA, 25 bp, Homo sapien
tatgccatctctagcagtaagtcct

SEQ ID NO: 1695887 - DNA, 25 bp, Homo sapien
gataatgggcatgtactttgtctcc

SEQ ID NO: 1695888 - DNA, 25 bp, Homo sapien
gatctggttctcatccgaatgcaga

SEQ ID NO: 1695889 - DNA, 25 bp, Homo sapien
tgggttccaccagctccgctagtgt

SEQ ID NO: 1695890 - DNA, 25 bp, Homo sapien
tagtgttaacaggaggaagtgtccc

SEQ ID NO: 1695891 - DNA, 25 bp, Homo sapien
tccacaaggaggtcggcaagtattt

SEQ ID NO: 1695892 - DNA, 25 bp, Homo sapien
ctcagggacttctaaatgtggtgct

SEQ ID NO: 1695893 - DNA, 25 bp, Homo sapien
cacaggcgagactggcttccttgga

SEQ ID NO: 1695894 - DNA, 25 bp, Homo sapien
catggtgtctgagtaggctcccagg

SEQ ID NO: 1695895 - DNA, 25 bp, Homo sapien
caatagtcggacttgcgagttttcc

SEQ ID NO: 1695896 - DNA, 25 bp, Homo sapien
tctaagggatgcaggataaattacc

SEQ ID NO: 1695897 - DNA, 25 bp, Homo sapien
tttatcaaactcttcctgtagctga

SEQ ID NO: 1695898 - DNA, 25 bp, Homo sapien
cttaaaacacacaagattgagctca

SEQ ID NO: 1695899 - DNA, 25 bp, Homo sapien
ctgactttaacaccttctctgtgga

SEQ ID NO: 1695900 - DNA, 25 bp, Homo sapien
gcttctcctctggtgcttctggagg

SEQ ID NO: 1695901 - DNA, 25 bp, Homo sapien
cagacaccctgtttgacattttcat

SEQ ID NO: 1695902 - DNA, 25 bp, Homo sapien
ctgggaaggccaaggaaagctgctt

SEQ ID NO: 1695903 - DNA, 25 bp, Homo sapien
gcttctggagggtgtcagacaccct

SEQ ID NO: 1695904 - DNA, 25 bp, Homo sapien
tggcaagtcaagaccccagccattg

SEQ ID NO: 1695905 - DNA, 25 bp, Homo sapien
cttggcaagtcaagaccccagccat

SEQ ID NO: 1695906 - DNA, 25 bp, Homo sapien
ttgtcgtcaccaggggagagaggca

SEQ ID NO: 1695907 - DNA, 25 bp, Homo sapien
cagccattgtcgtcaccaggggaga

SEQ ID NO: 1695908 - DNA, 25 bp, Homo sapien
gaaatggcgcggatccttattgccc

SEQ ID NO: 1695909 - DNA, 25 bp, Homo sapien
gactgacttgagctcggagtcctga

SEQ ID NO: 1695910 - DNA, 25 bp, Homo sapien
tgcttagtcggtagcagtggcccca

SEQ ID NO: 1695911 - DNA, 25 bp, Homo sapien
cgccaaggcttcaggtgacatcaca

SEQ ID NO: 1695912 - DNA, 25 bp, Homo sapien
cccagcacgcttccgctgcgccact

SEQ ID NO: 1695913 - DNA, 25 bp, Homo sapien
tgggcccagcacgcttccgctgcgc

SEQ ID NO: 1695914 - DNA, 25 bp, Homo sapien
ggcccagcacgcttccgctgcgcca

SEQ ID NO: 1695915 - DNA, 25 bp, Homo sapien
gggcccagcacgcttccgctgcgcc

SEQ ID NO: 1695916 - DNA, 25 bp, Homo sapien
catgcaaacaggttcccatctttca

SEQ ID NO: 1695917 - DNA, 25 bp, Homo sapien
tttcagtgactccacaagctcttct

SEQ ID NO: 1695918 - DNA, 25 bp, Homo sapien
acaggttcccatctttcagtgactc

SEQ ID NO: 1695919 - DNA, 25 bp, Homo sapien
ccacaagctcttctattttaatcat

SEQ ID NO: 1695920 - DNA, 25 bp, Homo sapien
ggtccgacctttgcgcttgagggca

SEQ ID NO: 1695921 - DNA, 25 bp, Homo sapien
gaaattccttgagcatccacgggtt

SEQ ID NO: 1695922 - DNA, 25 bp, Homo sapien
taagtcagtcaagcgcatccgggat

SEQ ID NO: 1695923 - DNA, 25 bp, Homo sapien
tgagaccagaatgcgtttgacaccg

SEQ ID NO: 1695924 - DNA, 25 bp, Homo sapien
cgctccagcaccgacccgctccgca

SEQ ID NO: 1695925 - DNA, 25 bp, Homo sapien
aggcgatgcactcggcctacgggaa

SEQ ID NO: 1695926 - DNA, 25 bp, Homo sapien
agcaccgacccgctccgcatagttg

SEQ ID NO: 1695927 - DNA, 25 bp, Homo sapien
caggcgatgcactcggcctacggga

SEQ ID NO: 1695928 - DNA, 25 bp, Homo sapien
tttggattgaacgtcgaatgcccgg

SEQ ID NO: 1695929 - DNA, 25 bp, Homo sapien
tgctgaaggcctacccaacagtaac

SEQ ID NO: 1695930 - DNA, 25 bp, Homo sapien
caacagtaaccggattggcgaagga

SEQ ID NO: 1695931 - DNA, 25 bp, Homo sapien
tacctaaccaagacaccgaagactg

SEQ ID NO: 1695932 - DNA, 25 bp, Homo sapien
gaatctcgcggagagccactgtacc

SEQ ID NO: 1695933 - DNA, 25 bp, Homo sapien
cgaatctcgcggagagccactgtac

SEQ ID NO: 1695934 - DNA, 25 bp, Homo sapien
accaggccgatagcgatggggcttc

SEQ ID NO: 1695935 - DNA, 25 bp, Homo sapien
actgtaccaggccgatagcgatggg

SEQ ID NO: 1695936 - DNA, 25 bp, Homo sapien
tcaagccctctcgccgcggatacga

SEQ ID NO: 1695937 - DNA, 25 bp, Homo sapien
cctctcgccgcggatacgacgtgcg

SEQ ID NO: 1695938 - DNA, 25 bp, Homo sapien
tcgccgcggatacgacgtgcgagct

SEQ ID NO: 1695939 - DNA, 25 bp, Homo sapien
tctcgccgcggatacgacgtgcgag

SEQ ID NO: 1695940 - DNA, 25 bp, Homo sapien
ttgtataacgtctggaaatgggccc

SEQ ID NO: 1695941 - DNA, 25 bp, Homo sapien
tagaagcaccatccggtcaaaaccg

SEQ ID NO: 1695942 - DNA, 25 bp, Homo sapien
cagatcttttcagcgcgcatgtggg

SEQ ID NO: 1695943 - DNA, 25 bp, Homo sapien
caatgcttacggaaaaatgccggac

SEQ ID NO: 1695944 - DNA, 25 bp, Homo sapien
gtaaagaccgagttgaaaagcgcat

SEQ ID NO: 1695945 - DNA, 25 bp, Homo sapien
agccaccacaagactaagtaaagac

SEQ ID NO: 1695946 - DNA, 25 bp, Homo sapien
caagactaagtaaagaccgagttga

SEQ ID NO: 1695947 - DNA, 25 bp, Homo sapien
agtaaagaccgagttgaaaagcgca

SEQ ID NO: 1695948 - DNA, 25 bp, Homo sapien
gccatccgcaacgatgaggagctca

SEQ ID NO: 1695949 - DNA, 25 bp, Homo sapien
caacgatgaggagctcaacaagctt

SEQ ID NO: 1695950 - DNA, 25 bp, Homo sapien
atccgcaacgatgaggagctcaaca

SEQ ID NO: 1695951 - DNA, 25 bp, Homo sapien
ccgcaacgatgaggagctcaacaag

SEQ ID NO: 1695952 - DNA, 25 bp, Homo sapien
aaaggtaatagaccttttgccatgt

SEQ ID NO: 1695953 - DNA, 25 bp, Homo sapien
aaggtaatagaccttttgccatgtc

SEQ ID NO: 1695954 - DNA, 25 bp, Homo sapien
taaaggtaatagaccttttgccatg

SEQ ID NO: 1695955 - DNA, 25 bp, Homo sapien
ccaattccccgggtagcagtaggcg

SEQ ID NO: 1695956 - DNA, 25 bp, Homo sapien
aatgcgccaggcgtgacgcttctcc

SEQ ID NO: 1695957 - DNA, 25 bp, Homo sapien
ccttttttagggactggagcagatt

SEQ ID NO: 1695958 - DNA, 25 bp, Homo sapien
tccggcgatacgctcaaagatgtcg

SEQ ID NO: 1695959 - DNA, 25 bp, Homo sapien
cggaactgttactgcagcgagaggc

SEQ ID NO: 1695960 - DNA, 25 bp, Homo sapien
tcacggcggaactgttactgcagcg

SEQ ID NO: 1695961 - DNA, 25 bp, Homo sapien
tgtgggtcacggcggaactgttact

SEQ ID NO: 1695962 - DNA, 25 bp, Homo sapien
tgggtcacggcggaactgttactgc

SEQ ID NO: 1695963 - DNA, 25 bp, Homo sapien
acagttggcggaccgaactgagaac

SEQ ID NO: 1695964 - DNA, 25 bp, Homo sapien
cctttatacgacagttggcggaccg

SEQ ID NO: 1695965 - DNA, 25 bp, Homo sapien
tctggcctgaggcagcgcctttata

SEQ ID NO: 1695966 - DNA, 25 bp, Homo sapien
tgaggcagcgcctttatacgacagt

SEQ ID NO: 1695967 - DNA, 25 bp, Homo sapien
gatgccctggatattgtcgcgcagt

SEQ ID NO: 1695968 - DNA, 25 bp, Homo sapien
attgtcgcgcagtactttacggtgg

SEQ ID NO: 1695969 - DNA, 25 bp, Homo sapien
gatattgtcgcgcagtactttacgg

SEQ ID NO: 1695970 - DNA, 25 bp, Homo sapien
cctggatattgtcgcgcagtacttt

SEQ ID NO: 1695971 - DNA, 25 bp, Homo sapien
cctgaaaagggccttttattgatag

SEQ ID NO: 1695972 - DNA, 25 bp, Homo sapien
ctgaaaagggccttttattgataga

SEQ ID NO: 1695973 - DNA, 25 bp, Homo sapien
gccttttattgatagaaagggacgc

SEQ ID NO: 1695974 - DNA, 25 bp, Homo sapien
tgaaaagggccttttattgatagaa

SEQ ID NO: 1695975 - DNA, 25 bp, Homo sapien
tttaagaggtcgcactttgagaggc

SEQ ID NO: 1695976 - DNA, 25 bp, Homo sapien
tactggagatctactttaaagcatg

SEQ ID NO: 1695977 - DNA, 25 bp, Homo sapien
caaggatggaggtaacaatgggact

SEQ ID NO: 1695978 - DNA, 25 bp, Homo sapien
caaatcaagtgtccaatgccagatg

SEQ ID NO: 1695979 - DNA, 25 bp, Homo sapien
atgggccgtcgcgcagactgtagtg

SEQ ID NO: 1695980 - DNA, 25 bp, Homo sapien
gggccgtcgcgcagactgtagtgca

SEQ ID NO: 1695981 - DNA, 25 bp, Homo sapien
ggccgtcgcgcagactgtagtgcag

SEQ ID NO: 1695982 - DNA, 25 bp, Homo sapien
tgggccgtcgcgcagactgtagtgc

SEQ ID NO: 1695983 - DNA, 25 bp, Homo sapien
ttaaagcctcataacgtggtaacaa

SEQ ID NO: 1695984 - DNA, 25 bp, Homo sapien
aactagcctgtgtgatgggataaca

SEQ ID NO: 1695985 - DNA, 25 bp, Homo sapien
tttcaggttctcagttcggtccgcc

SEQ ID NO: 1695986 - DNA, 25 bp, Homo sapien
tcagaacacggaaacaagaagctcg

SEQ ID NO: 1695987 - DNA, 25 bp, Homo sapien
tcctagctatagagagggccttcta

SEQ ID NO: 1695988 - DNA, 25 bp, Homo sapien
caggatctccagtccattgaaatac

SEQ ID NO: 1695989 - DNA, 25 bp, Homo sapien
tgatgttgaggactccatcctgatt

SEQ ID NO: 1695990 - DNA, 25 bp, Homo sapien
agtaaatgatacagctccatagaag

SEQ ID NO: 1695991 - DNA, 25 bp, Homo sapien
taaagtgaccatcgcccagggtggt

SEQ ID NO: 1695992 - DNA, 25 bp, Homo sapien
aacaagctgcttggtaaagtgacca

SEQ ID NO: 1695993 - DNA, 25 bp, Homo sapien
cgtgctgctgcctaagaaaactgag

SEQ ID NO: 1695994 - DNA, 25 bp, Homo sapien
ggccaagggcaagtagcggggctgg

SEQ ID NO: 1695995 - DNA, 25 bp, Homo sapien
gaagacggtagctctgtcaacctac

SEQ ID NO: 1695996 - DNA, 25 bp, Homo sapien
aaaaaacaggaagacggtagctctg

SEQ ID NO: 1695997 - DNA, 25 bp, Homo sapien
gtcaacctaccgcttattcactgct

SEQ ID NO: 1695998 - DNA, 25 bp, Homo sapien
tcactgcttcttaacgcaagtgggg

SEQ ID NO: 1695999 - DNA, 25 bp, Homo sapien
gagcggactttgagggctcgggcat

SEQ ID NO: 1696000 - DNA, 25 bp, Homo sapien
ggagcggactttgagggctcgggca

SEQ ID NO: 1696001 - DNA, 25 bp, Homo sapien
gggcaggagcggactttgagggctc

SEQ ID NO: 1696002 - DNA, 25 bp, Homo sapien
caggagcggactttgagggctcggg

SEQ ID NO: 1696003 - DNA, 25 bp, Homo sapien
ctttggggtgtgggccgagactgac

SEQ ID NO: 1696004 - DNA, 25 bp, Homo sapien
cctttggggtgtgggccgagactga

SEQ ID NO: 1696005 - DNA, 25 bp, Homo sapien
gagcctttggggtgtgggccgagac

SEQ ID NO: 1696006 - DNA, 25 bp, Homo sapien
aagagcctttggggtgtgggccgag

SEQ ID NO: 1696007 - DNA, 25 bp, Homo sapien
gaatccatgggccttcttaatgctc

SEQ ID NO: 1696008 - DNA, 25 bp, Homo sapien
aatccatgggccttcttaatgctct

SEQ ID NO: 1696009 - DNA, 25 bp, Homo sapien
ctgaatccatgggccttcttaatgc

SEQ ID NO: 1696010 - DNA, 25 bp, Homo sapien
atccatgggccttcttaatgctctc

SEQ ID NO: 1696011 - DNA, 25 bp, Homo sapien
gtctacagattgagaagcaagggta

SEQ ID NO: 1696012 - DNA, 25 bp, Homo sapien
tagtctacagattgagaagcaaggg

SEQ ID NO: 1696013 - DNA, 25 bp, Homo sapien
ttagtctacagattgagaagcaagg

SEQ ID NO: 1696014 - DNA, 25 bp, Homo sapien
tctacagattgagaagcaagggtac

SEQ ID NO: 1696015 - DNA, 25 bp, Homo sapien
caagatcctccaagcacttcctggg

SEQ ID NO: 1696016 - DNA, 25 bp, Homo sapien
gaatcaggatttttggtctagggtc

SEQ ID NO: 1696017 - DNA, 25 bp, Homo sapien
tgaagcaccatcaagatcctccaag

SEQ ID NO: 1696018 - DNA, 25 bp, Homo sapien
acttcctgggaatcaggatttttgg

SEQ ID NO: 1696019 - DNA, 25 bp, Homo sapien
cacttcttctcggtaataagaccct

SEQ ID NO: 1696020 - DNA, 25 bp, Homo sapien
ttctcggtaataagaccctctgctt

SEQ ID NO: 1696021 - DNA, 25 bp, Homo sapien
tccacttcttctcggtaataagacc

SEQ ID NO: 1696022 - DNA, 25 bp, Homo sapien
tgtccacttcttctcggtaataaga

SEQ ID NO: 1696023 - DNA, 25 bp, Homo sapien
tgcaaagccccaccgagaaggtggc

SEQ ID NO: 1696024 - DNA, 25 bp, Homo sapien
cttctttgggatcagcatggttctg

SEQ ID NO: 1696025 - DNA, 25 bp, Homo sapien
aagccccaccgagaaggtggctgcg

SEQ ID NO: 1696026 - DNA, 25 bp, Homo sapien
ctgttgcaaagccccaccgagaagg

SEQ ID NO: 1696027 - DNA, 25 bp, Homo sapien
caaccaggcgcatggacaaattggc

SEQ ID NO: 1696028 - DNA, 25 bp, Homo sapien
tgcccacagctctcgagggaagaaa

SEQ ID NO: 1696029 - DNA, 25 bp, Homo sapien
aagtctagaaatacccaaccaggcg

SEQ ID NO: 1696030 - DNA, 25 bp, Homo sapien
tgataatcaatgtggaggacttccg

SEQ ID NO: 1696031 - DNA, 25 bp, Homo sapien
gaaataatattagcccacagaccca

SEQ ID NO: 1696032 - DNA, 25 bp, Homo sapien
acagacccactacaagggcctcagg

SEQ ID NO: 1696033 - DNA, 25 bp, Homo sapien
gatggctatggcagaagctgatgca

SEQ ID NO: 1696034 - DNA, 25 bp, Homo sapien
tatagaaatcactgtccttaggaca

SEQ ID NO: 1696035 - DNA, 25 bp, Homo sapien
tcaatctcttgcaatataaatgtca

SEQ ID NO: 1696036 - DNA, 25 bp, Homo sapien
caatctcttgcaatataaatgtcat

SEQ ID NO: 1696037 - DNA, 25 bp, Homo sapien
taagtgtgcaggaagggatactcca

SEQ ID NO: 1696038 - DNA, 25 bp, Homo sapien
tgaatgggccctccaaagaacaggt

SEQ ID NO: 1696039 - DNA, 25 bp, Homo sapien
cccaagcccagtgagatctagaagc

SEQ ID NO: 1696040 - DNA, 25 bp, Homo sapien
ggaattagagttcggatgccagcaa

SEQ ID NO: 1696041 - DNA, 25 bp, Homo sapien
gaaacatgatttcttgatccaacaa

SEQ ID NO: 1696042 - DNA, 25 bp, Homo sapien
gtgatacacaactgaaccaacatgg

SEQ ID NO: 1696043 - DNA, 25 bp, Homo sapien
tttcctctagttctatggctaagta

SEQ ID NO: 1696044 - DNA, 25 bp, Homo sapien
tcttctaccaataaggtagtgcaat

SEQ ID NO: 1696045 - DNA, 25 bp, Homo sapien
caagattcatagactgactctgtca

SEQ ID NO: 1696046 - DNA, 25 bp, Homo sapien
aaataggcataggatgatagcagcc

SEQ ID NO: 1696047 - DNA, 25 bp, Homo sapien
gatagcagcctcaaaaggttagtgc

SEQ ID NO: 1696048 - DNA, 25 bp, Homo sapien
actgattctctaggtgatatactga

SEQ ID NO: 1696049 - DNA, 25 bp, Homo sapien
gacatagagggcgtctgcaggcatt

SEQ ID NO: 1696050 - DNA, 25 bp, Homo sapien
tagacagagagtgctcataattccc

SEQ ID NO: 1696051 - DNA, 25 bp, Homo sapien
tacaatactcaataggcagactgct

SEQ ID NO: 1696052 - DNA, 25 bp, Homo sapien
tttcaagacagcaataatggtcagc

SEQ ID NO: 1696053 - DNA, 25 bp, Homo sapien
ctcttcccaccagttagaaatgagg

SEQ ID NO: 1696054 - DNA, 25 bp, Homo sapien
aaatgaggtttggatccttccttgc

SEQ ID NO: 1696055 - DNA, 25 bp, Homo sapien
ggtttggatccttccttgctaatcc

SEQ ID NO: 1696056 - DNA, 25 bp, Homo sapien
cccaccagttagaaatgaggtttgg

SEQ ID NO: 1696057 - DNA, 25 bp, Homo sapien
gcgcgttacaacaagcgttcgacca

SEQ ID NO: 1696058 - DNA, 25 bp, Homo sapien
tggcgcgttacaacaagcgttcgac

SEQ ID NO: 1696059 - DNA, 25 bp, Homo sapien
gcgttacaacaagcgttcgaccatc

SEQ ID NO: 1696060 - DNA, 25 bp, Homo sapien
gttacaacaagcgttcgaccatcac

SEQ ID NO: 1696061 - DNA, 25 bp, Homo sapien
cttcgagcgtattgcgggcgaggct

SEQ ID NO: 1696062 - DNA, 25 bp, Homo sapien
gatcttgaacaccttcgttatgcca

SEQ ID NO: 1696063 - DNA, 25 bp, Homo sapien
gggatcttgaacaccttcgttatgc

SEQ ID NO: 1696064 - DNA, 25 bp, Homo sapien
atcttgaacaccttcgttatgccat

SEQ ID NO: 1696065 - DNA, 25 bp, Homo sapien
ggggatcttgaacaccttcgttatg

SEQ ID NO: 1696066 - DNA, 25 bp, Homo sapien
gctccgtgtacttgtacaaggtgct

SEQ ID NO: 1696067 - DNA, 25 bp, Homo sapien
gttccaagaagactattactaaggc

SEQ ID NO: 1696068 - DNA, 25 bp, Homo sapien
ctattactaaggcaagaagcgaaag

SEQ ID NO: 1696069 - DNA, 25 bp, Homo sapien
tccgtgtacttgtacaaggtgctga

SEQ ID NO: 1696070 - DNA, 25 bp, Homo sapien
agaacagccgagagaagttcaccag

SEQ ID NO: 1696071 - DNA, 25 bp, Homo sapien
gagaacagccgagagaagttcacca

SEQ ID NO: 1696072 - DNA, 25 bp, Homo sapien
gacgaagaaacgataaatggaggaa

SEQ ID NO: 1696073 - DNA, 25 bp, Homo sapien
gagaccggcacgagaagagcgggtc

SEQ ID NO: 1696074 - DNA, 25 bp, Homo sapien
ggagaccggcacgagaagagcgggt

SEQ ID NO: 1696075 - DNA, 25 bp, Homo sapien
aaagagccgttgtattggaaagtga

SEQ ID NO: 1696076 - DNA, 25 bp, Homo sapien
ccagctctcccgcagaaatagtagg

SEQ ID NO: 1696077 - DNA, 25 bp, Homo sapien
aaatgtttaaccagtggcccagctc

SEQ ID NO: 1696078 - DNA, 25 bp, Homo sapien
tcccgcagaaatagtaggtggctct

SEQ ID NO: 1696079 - DNA, 25 bp, Homo sapien
aatttgggagtccaaccgcgagcgg

SEQ ID NO: 1696080 - DNA, 25 bp, Homo sapien
tcttgccaccatgtcggaaaccgct

SEQ ID NO: 1696081 - DNA, 25 bp, Homo sapien
gagcatagcagcaacgcaaaacctg

SEQ ID NO: 1696082 - DNA, 25 bp, Homo sapien
aatcacagggcagcgccggcttata

SEQ ID NO: 1696083 - DNA, 25 bp, Homo sapien
ccttttcagcgcttggtacgggaga

SEQ ID NO: 1696084 - DNA, 25 bp, Homo sapien
cacaggactttaagaccgatctgcg

SEQ ID NO: 1696085 - DNA, 25 bp, Homo sapien
tatgcctaaagacatccagcttgcg

SEQ ID NO: 1696086 - DNA, 25 bp, Homo sapien
gataccaacctgtgcgccattcacg

SEQ ID NO: 1696087 - DNA, 25 bp, Homo sapien
gggtttccactctgcacattgtaga

SEQ ID NO: 1696088 - DNA, 25 bp, Homo sapien
ggtttccactctgcacattgtagag

SEQ ID NO: 1696089 - DNA, 25 bp, Homo sapien
tttccactctgcacattgtagaggg

SEQ ID NO: 1696090 - DNA, 25 bp, Homo sapien
agggtttccactctgcacattgtag

SEQ ID NO: 1696091 - DNA, 25 bp, Homo sapien
gcctgatgttcgtgtccctctcata

SEQ ID NO: 1696092 - DNA, 25 bp, Homo sapien
aagcctgatgttcgtgtccctctca

SEQ ID NO: 1696093 - DNA, 25 bp, Homo sapien
aaaagcctgatgttcgtgtccctct

SEQ ID NO: 1696094 - DNA, 25 bp, Homo sapien
cctgatgttcgtgtccctctcatag

SEQ ID NO: 1696095 - DNA, 25 bp, Homo sapien
ctgcaactcccccacagcaatgcca

SEQ ID NO: 1696096 - DNA, 25 bp, Homo sapien
tgcaactcccccacagcaatgccat

SEQ ID NO: 1696097 - DNA, 25 bp, Homo sapien
ttctctttggaatcataaagtggaa

SEQ ID NO: 1696098 - DNA, 25 bp, Homo sapien
acagagtccccagaactcgtgtggc

SEQ ID NO: 1696099 - DNA, 25 bp, Homo sapien
tcgtgtggccatttccgccagcatc

SEQ ID NO: 1696100 - DNA, 25 bp, Homo sapien
tctttggaatcataaagtggaacag

SEQ ID NO: 1696101 - DNA, 25 bp, Homo sapien
aatttcctgtaggacgagtgcaccg

SEQ ID NO: 1696102 - DNA, 25 bp, Homo sapien
caaaacccgctcctctagagctggg

SEQ ID NO: 1696103 - DNA, 25 bp, Homo sapien
tggtaaagttaccatcgctcagggc

SEQ ID NO: 1696104 - DNA, 25 bp, Homo sapien
gctgggctccaatttcctgtaggac

SEQ ID NO: 1696105 - DNA, 25 bp, Homo sapien
aggagagtgaaagagcactcaaata

SEQ ID NO: 1696106 - DNA, 25 bp, Homo sapien
ggcggaggagagtgaaagagcactc

SEQ ID NO: 1696107 - DNA, 25 bp, Homo sapien
ggaggagagtgaaagagcactcaaa

SEQ ID NO: 1696108 - DNA, 25 bp, Homo sapien
cggaggagagtgaaagagcactcaa

SEQ ID NO: 1696109 - DNA, 25 bp, Homo sapien
ggagcagatttagccgggtcgggca

SEQ ID NO: 1696110 - DNA, 25 bp, Homo sapien
gcaggagcagatttagccgggtcgg

SEQ ID NO: 1696111 - DNA, 25 bp, Homo sapien
caggagcagatttagccgggtcggg

SEQ ID NO: 1696112 - DNA, 25 bp, Homo sapien
gggcaggagcagatttagccgggtc

SEQ ID NO: 1696113 - DNA, 25 bp, Homo sapien
ggagtccacccaaaagactacaagc

SEQ ID NO: 1696114 - DNA, 25 bp, Homo sapien
tccctcctaatggaggccggccgga

SEQ ID NO: 1696115 - DNA, 25 bp, Homo sapien
ctttctctggaagcgtgagtggctc

SEQ ID NO: 1696116 - DNA, 25 bp, Homo sapien
aaaagagcctttggattgctggcag

SEQ ID NO: 1696117 - DNA, 25 bp, Homo sapien
cagcgatgccagacgagatgcctat

SEQ ID NO: 1696118 - DNA, 25 bp, Homo sapien
taacattgcaaaaaagcggctttcc

SEQ ID NO: 1696119 - DNA, 25 bp, Homo sapien
gatccgtacaactgcagtaagaggg

SEQ ID NO: 1696120 - DNA, 25 bp, Homo sapien
taagagggacggttaattcacagct

SEQ ID NO: 1696121 - DNA, 25 bp, Homo sapien
tattcgtccgagatagccttccacc

SEQ ID NO: 1696122 - DNA, 25 bp, Homo sapien
attcgtccgagatagccttccaccc

SEQ ID NO: 1696123 - DNA, 25 bp, Homo sapien
ctattcgtccgagatagccttccac

SEQ ID NO: 1696124 - DNA, 25 bp, Homo sapien
tgggcagggagaaacgaatctcgaa

SEQ ID NO: 1696125 - DNA, 25 bp, Homo sapien
caagtaacttagcttgtcgataagc

SEQ ID NO: 1696126 - DNA, 25 bp, Homo sapien
cagatgttctctcaaggacgcggga

SEQ ID NO: 1696127 - DNA, 25 bp, Homo sapien
cggaggataatcacccctcagatgt

SEQ ID NO: 1696128 - DNA, 25 bp, Homo sapien
aatggacatgaagggtaggatctaa

SEQ ID NO: 1696129 - DNA, 25 bp, Homo sapien
taggatctaatgatagtaaacagag

SEQ ID NO: 1696130 - DNA, 25 bp, Homo sapien
agccttgtagaaatgaatggacatg

SEQ ID NO: 1696131 - DNA, 25 bp, Homo sapien
taaggttctataaagtatggacagc

SEQ ID NO: 1696132 - DNA, 25 bp, Homo sapien
cgccagaccgtgaagttattttgaa

SEQ ID NO: 1696133 - DNA, 25 bp, Homo sapien
tagaacaagtcctggcacatcttag

SEQ ID NO: 1696134 - DNA, 25 bp, Homo sapien
tataggcgtgaaccctctcgccaga

SEQ ID NO: 1696135 - DNA, 25 bp, Homo sapien
tggttgccatcatacctagaacaag

SEQ ID NO: 1696136 - DNA, 25 bp, Homo sapien
caagaccctgggagagatcctagta

SEQ ID NO: 1696137 - DNA, 25 bp, Homo sapien
gaattttcatcatctggctaggaga

SEQ ID NO: 1696138 - DNA, 25 bp, Homo sapien
cagataggtgagttgttgttagccc

SEQ ID NO: 1696139 - DNA, 25 bp, Homo sapien
agacttttgacactgcctgctgaca

SEQ ID NO: 1696140 - DNA, 25 bp, Homo sapien
agttttctcacaagagccatacaca

SEQ ID NO: 1696141 - DNA, 25 bp, Homo sapien
taaacacagtgacatgacagttttc

SEQ ID NO: 1696142 - DNA, 25 bp, Homo sapien
tcttccttatcgagtcttccctttg

SEQ ID NO: 1696143 - DNA, 25 bp, Homo sapien
caaagtggttaagccatctgttcac

SEQ ID NO: 1696144 - DNA, 25 bp, Homo sapien
ccagaggctgcaacaagtttctaca

SEQ ID NO: 1696145 - DNA, 25 bp, Homo sapien
tgtcaaaatcatcgctccagaggct

SEQ ID NO: 1696146 - DNA, 25 bp, Homo sapien
caaactgatgatagtggacacctct

SEQ ID NO: 1696147 - DNA, 25 bp, Homo sapien
tgtgacatgcgttcccagcaacagc

SEQ ID NO: 1696148 - DNA, 25 bp, Homo sapien
tgtattatcgttttccacacctgca

SEQ ID NO: 1696149 - DNA, 25 bp, Homo sapien
ttgtattatcgttttccacacctgc

SEQ ID NO: 1696150 - DNA, 25 bp, Homo sapien
agaacttgtattatcgttttccaca

SEQ ID NO: 1696151 - DNA, 25 bp, Homo sapien
acttgtattatcgttttccacacct

SEQ ID NO: 1696152 - DNA, 25 bp, Homo sapien
aaccacaaagacgatcagctctagg

SEQ ID NO: 1696153 - DNA, 25 bp, Homo sapien
acaaagacgatcagctctaggtggg

SEQ ID NO: 1696154 - DNA, 25 bp, Homo sapien
ggggacgatcagagaagcccaccag

SEQ ID NO: 1696155 - DNA, 25 bp, Homo sapien
ggacaaccacaaagacgatcagctc

SEQ ID NO: 1696156 - DNA, 25 bp, Homo sapien
gacaacaattagatgcgagctgcaa

SEQ ID NO: 1696157 - DNA, 25 bp, Homo sapien
gatggtcttatctggaccccaaagg

SEQ ID NO: 1696158 - DNA, 25 bp, Homo sapien
aaagtacagctggatggcacaaccc

SEQ ID NO: 1696159 - DNA, 25 bp, Homo sapien
gaaagtggtcaactcgtctgtgccc

SEQ ID NO: 1696160 - DNA, 25 bp, Homo sapien
tgtgtggaccgaacatcactggctc

SEQ ID NO: 1696161 - DNA, 25 bp, Homo sapien
taatgggaggtacaaaatggcctgg

SEQ ID NO: 1696162 - DNA, 25 bp, Homo sapien
catctgggtagttgcctaagctagc

SEQ ID NO: 1696163 - DNA, 25 bp, Homo sapien
ccagtcctggcacaacggagttgta

SEQ ID NO: 1696164 - DNA, 25 bp, Homo sapien
ttttcactctaatttctcaatgtta

SEQ ID NO: 1696165 - DNA, 25 bp, Homo sapien
ttttttcactctaatttctcaatgt

SEQ ID NO: 1696166 - DNA, 25 bp, Homo sapien
tagctattattagattcggtcataa

SEQ ID NO: 1696167 - DNA, 25 bp, Homo sapien
tagatagctattattagattcggtc

SEQ ID NO: 1696168 - DNA, 25 bp, Homo sapien
tgtgggactgtacatgtggtgtaac

SEQ ID NO: 1696169 - DNA, 25 bp, Homo sapien
gaaactccagccaaggtcgatctga

SEQ ID NO: 1696170 - DNA, 25 bp, Homo sapien
caggcgtgacactagaataatggtc

SEQ ID NO: 1696171 - DNA, 25 bp, Homo sapien
tgtaacaaagatccaggagtgatag

SEQ ID NO: 1696172 - DNA, 25 bp, Homo sapien
aagatattcagtagcccccaaggcc

SEQ ID NO: 1696173 - DNA, 25 bp, Homo sapien
caaatgctttttgtcgaccttcagc

SEQ ID NO: 1696174 - DNA, 25 bp, Homo sapien
taaaaccagtaacccaggatgcagc

SEQ ID NO: 1696175 - DNA, 25 bp, Homo sapien
cagggtagacaaccacactgagtta

SEQ ID NO: 1696176 - DNA, 25 bp, Homo sapien
gtatcctcaatactgctcggacaat

SEQ ID NO: 1696177 - DNA, 25 bp, Homo sapien
gttcctaagtgtatatataagggga

SEQ ID NO: 1696178 - DNA, 25 bp, Homo sapien
aagtgtatatataaggggattcagc

SEQ ID NO: 1696179 - DNA, 25 bp, Homo sapien
attcagcatgggtgcaatgattcca

SEQ ID NO: 1696180 - DNA, 25 bp, Homo sapien
gattcagcatgggtgcaatgattcc

SEQ ID NO: 1696181 - DNA, 25 bp, Homo sapien
gattaagaagactcttgcaaccaac

SEQ ID NO: 1696182 - DNA, 25 bp, Homo sapien
cttgattaagaagactcttgcaacc

SEQ ID NO: 1696183 - DNA, 25 bp, Homo sapien
tttcttgattaagaagactcttgca

SEQ ID NO: 1696184 - DNA, 25 bp, Homo sapien
tatttcttgattaagaagactcttg

SEQ ID NO: 1696185 - DNA, 25 bp, Homo sapien
acaacaaaaatagggcaacttacag

SEQ ID NO: 1696186 - DNA, 25 bp, Homo sapien
caaaaatagggcaacttacagagaa

SEQ ID NO: 1696187 - DNA, 25 bp, Homo sapien
ttatttgagggagtttacattgttc

SEQ ID NO: 1696188 - DNA, 25 bp, Homo sapien
tacattgttctctacagtaacaaca

SEQ ID NO: 1696189 - DNA, 25 bp, Homo sapien
taataggtaggaagtgagatacacc

SEQ ID NO: 1696190 - DNA, 25 bp, Homo sapien
ataggtaggaagtgagatacaccat

SEQ ID NO: 1696191 - DNA, 25 bp, Homo sapien
ggaaggtaataggtaggaagtgaga

SEQ ID NO: 1696192 - DNA, 25 bp, Homo sapien
ggtaataggtaggaagtgagataca

SEQ ID NO: 1696193 - DNA, 25 bp, Homo sapien
cttgtttagccagtcatcagttgcc

SEQ ID NO: 1696194 - DNA, 25 bp, Homo sapien
tcagttgcctccatgcctactctgt

SEQ ID NO: 1696195 - DNA, 25 bp, Homo sapien
ataaccttgtttagccagtcatcag

SEQ ID NO: 1696196 - DNA, 25 bp, Homo sapien
tagccagtcatcagttgcctccatg

SEQ ID NO: 1696197 - DNA, 25 bp, Homo sapien
cagcagcaggacctgcagagcccag

SEQ ID NO: 1696198 - DNA, 25 bp, Homo sapien
agcaggacctgcagagcccagagaa

SEQ ID NO: 1696199 - DNA, 25 bp, Homo sapien
accagcaggcacactggcaagctca

SEQ ID NO: 1696200 - DNA, 25 bp, Homo sapien
caccagcaggcacactggcaagctc

SEQ ID NO: 1696201 - DNA, 25 bp, Homo sapien
tctttcttctgcagcaggggtagaa

SEQ ID NO: 1696202 - DNA, 25 bp, Homo sapien
ctttcttctgcagcaggggtagaac

SEQ ID NO: 1696203 - DNA, 25 bp, Homo sapien
catctttcttctgcagcaggggtag

SEQ ID NO: 1696204 - DNA, 25 bp, Homo sapien
tcatctttcttctgcagcaggggta

SEQ ID NO: 1696205 - DNA, 25 bp, Homo sapien
gcatgctcctttgggtaattaacta

SEQ ID NO: 1696206 - DNA, 25 bp, Homo sapien
gggggttgcatgctcctttgggtaa

SEQ ID NO: 1696207 - DNA, 25 bp, Homo sapien
gggttgcatgctcctttgggtaatt

SEQ ID NO: 1696208 - DNA, 25 bp, Homo sapien
tgctcctttgggtaattaactagtg

SEQ ID NO: 1696209 - DNA, 25 bp, Homo sapien
tgaaagttggcacaacgtattttct

SEQ ID NO: 1696210 - DNA, 25 bp, Homo sapien
ctgaaagttggcacaacgtattttc

SEQ ID NO: 1696211 - DNA, 25 bp, Homo sapien
aagttggcacaacgtattttcttgc

SEQ ID NO: 1696212 - DNA, 25 bp, Homo sapien
aaagttggcacaacgtattttcttg

SEQ ID NO: 1696213 - DNA, 25 bp, Homo sapien
caagataaaaccatacactgagctg

SEQ ID NO: 1696214 - DNA, 25 bp, Homo sapien
taaaaccatacactgagctgacatt

SEQ ID NO: 1696215 - DNA, 25 bp, Homo sapien
tgagctgacattggatttttccatt

SEQ ID NO: 1696216 - DNA, 25 bp, Homo sapien
ttgccttcctttcacatcatctgta

SEQ ID NO: 1696217 - DNA, 25 bp, Homo sapien
gttgagagtctaatatacacacaag

SEQ ID NO: 1696218 - DNA, 25 bp, Homo sapien
tacacacaaggattatggttgaatt

SEQ ID NO: 1696219 - DNA, 25 bp, Homo sapien
cagcacagccactgaatacagaata

SEQ ID NO: 1696220 - DNA, 25 bp, Homo sapien
tatggttgaatttcccagcacagcc

SEQ ID NO: 1696221 - DNA, 25 bp, Homo sapien
taccagcatttgtgggatgcaacta

SEQ ID NO: 1696222 - DNA, 25 bp, Homo sapien
acagccagcacagctaatagtcttg

SEQ ID NO: 1696223 - DNA, 25 bp, Homo sapien
agctaatagtcttgtcagggcccca

SEQ ID NO: 1696224 - DNA, 25 bp, Homo sapien
tactgaagcagagatctagaaagga

SEQ ID NO: 1696225 - DNA, 25 bp, Homo sapien
gacagccagaaggatgcactcaatt

SEQ ID NO: 1696226 - DNA, 25 bp, Homo sapien
acagccagaaggatgcactcaattc

SEQ ID NO: 1696227 - DNA, 25 bp, Homo sapien
cagccagaaggatgcactcaattcc

SEQ ID NO: 1696228 - DNA, 25 bp, Homo sapien
agccagaaggatgcactcaattccc

SEQ ID NO: 1696229 - DNA, 25 bp, Homo sapien
agatagcgcaacggtttgcagactg

SEQ ID NO: 1696230 - DNA, 25 bp, Homo sapien
atagcgcaacggtttgcagactgca

SEQ ID NO: 1696231 - DNA, 25 bp, Homo sapien
gatagcgcaacggtttgcagactgc

SEQ ID NO: 1696232 - DNA, 25 bp, Homo sapien
cagatagcgcaacggtttgcagact

SEQ ID NO: 1696233 - DNA, 25 bp, Homo sapien
gaaatggttaactcggcggcggcca

SEQ ID NO: 1696234 - DNA, 25 bp, Homo sapien
tgacaacggcattgaccagtccact

SEQ ID NO: 1696235 - DNA, 25 bp, Homo sapien
tcattgttagtggtgacatgacaac

SEQ ID NO: 1696236 - DNA, 25 bp, Homo sapien
cacttctggagagggtcattgttag

SEQ ID NO: 1696237 - DNA, 25 bp, Homo sapien
actgcacgaacatccaaacaagcca

SEQ ID NO: 1696238 - DNA, 25 bp, Homo sapien
ccactgcacgaacatccaaacaagc

SEQ ID NO: 1696239 - DNA, 25 bp, Homo sapien
ttccactgcacgaacatccaaacaa

SEQ ID NO: 1696240 - DNA, 25 bp, Homo sapien
ctgcacgaacatccaaacaagccat

SEQ ID NO: 1696241 - DNA, 25 bp, Homo sapien
gagctacaggtatggaaggccttcc

SEQ ID NO: 1696242 - DNA, 25 bp, Homo sapien
cattgcctggcagctgacttgatgc

SEQ ID NO: 1696243 - DNA, 25 bp, Homo sapien
tgcagcaatgtagccgtaggagaca

SEQ ID NO: 1696244 - DNA, 25 bp, Homo sapien
cagattcaacataggagtcaccagg

SEQ ID NO: 1696245 - DNA, 25 bp, Homo sapien
accttttactgcctccatggatcat

SEQ ID NO: 1696246 - DNA, 25 bp, Homo sapien
ggcaccttttactgcctccatggat

SEQ ID NO: 1696247 - DNA, 25 bp, Homo sapien
tctccctcgcggcaccttttactgc

SEQ ID NO: 1696248 - DNA, 25 bp, Homo sapien
gcggcaccttttactgcctccatgg

SEQ ID NO: 1696249 - DNA, 25 bp, Homo sapien
gctgggccaccagctcggtgctttg

SEQ ID NO: 1696250 - DNA, 25 bp, Homo sapien
ggccaccagctcggtgctttgggaa

SEQ ID NO: 1696251 - DNA, 25 bp, Homo sapien
caccagctcggtgctttgggaatca

SEQ ID NO: 1696252 - DNA, 25 bp, Homo sapien
ctgggccaccagctcggtgctttgg

SEQ ID NO: 1696253 - DNA, 25 bp, Homo sapien
aagagccaatcagtcacaattttta

SEQ ID NO: 1696254 - DNA, 25 bp, Homo sapien
gagccaatcagtcacaatttttagt

SEQ ID NO: 1696255 - DNA, 25 bp, Homo sapien
agagccaatcagtcacaatttttag

SEQ ID NO: 1696256 - DNA, 25 bp, Homo sapien
agccaatcagtcacaatttttagta

SEQ ID NO: 1696257 - DNA, 25 bp, Homo sapien
attgaatgcacggcttttcctcctg

SEQ ID NO: 1696258 - DNA, 25 bp, Homo sapien
ttgaatgcacggcttttcctcctgt

SEQ ID NO: 1696259 - DNA, 25 bp, Homo sapien
gttttgcagcagtacttcttatgac

SEQ ID NO: 1696260 - DNA, 25 bp, Homo sapien
aggagttttgcagcagtacttctta

SEQ ID NO: 1696261 - DNA, 25 bp, Homo sapien
tgcagcagtacttcttatgactgga

SEQ ID NO: 1696262 - DNA, 25 bp, Homo sapien
caacagtaggagttttgcagcagta

SEQ ID NO: 1696263 - DNA, 25 bp, Homo sapien
catctttgctcgtttagatctgaaa

SEQ ID NO: 1696264 - DNA, 25 bp, Homo sapien
aacatctttgctcgtttagatctga

SEQ ID NO: 1696265 - DNA, 25 bp, Homo sapien
ctttgctcgtttagatctgaaactc

SEQ ID NO: 1696266 - DNA, 25 bp, Homo sapien
agcaacatctttgctcgtttagatc

SEQ ID NO: 1696267 - DNA, 25 bp, Homo sapien
gcttcagttcagctcggcatgcatc

SEQ ID NO: 1696268 - DNA, 25 bp, Homo sapien
catagtcatccgcttgttgcttcag

SEQ ID NO: 1696269 - DNA, 25 bp, Homo sapien
agtcgttcttaagctcgggcatggg

SEQ ID NO: 1696270 - DNA, 25 bp, Homo sapien
gacctggatgaactactttgagcat

SEQ ID NO: 1696271 - DNA, 25 bp, Homo sapien
tggcttcacgctccagagaaaatgc

SEQ ID NO: 1696272 - DNA, 25 bp, Homo sapien
gaactggcttcacgctccagagaaa

SEQ ID NO: 1696273 - DNA, 25 bp, Homo sapien
caagaactggcttcacgctccagag

SEQ ID NO: 1696274 - DNA, 25 bp, Homo sapien
aacaccaagaactggcttcacgctc

SEQ ID NO: 1696275 - DNA, 25 bp, Homo sapien
ctggttggtcatgacagtggataat

SEQ ID NO: 1696276 - DNA, 25 bp, Homo sapien
agcccgtgtggctgatagtcttgcc

SEQ ID NO: 1696277 - DNA, 25 bp, Homo sapien
aatgatgatgttgcccactaaggtc

SEQ ID NO: 1696278 - DNA, 25 bp, Homo sapien
tgggtctgcctgagaaacccagtaa

SEQ ID NO: 1696279 - DNA, 25 bp, Homo sapien
caaggtagaagatgaggacaaacac

SEQ ID NO: 1696280 - DNA, 25 bp, Homo sapien
tgcataatgacagaatagtgaaggg

SEQ ID NO: 1696281 - DNA, 25 bp, Homo sapien
ccagcacagctgagggtgcataatg

SEQ ID NO: 1696282 - DNA, 25 bp, Homo sapien
gcttgcagattgcaatgaagcggtc

SEQ ID NO: 1696283 - DNA, 25 bp, Homo sapien
gagaactgaggagtccaacaccccc

SEQ ID NO: 1696284 - DNA, 25 bp, Homo sapien
tcttccacatcgtggcagcttcata

SEQ ID NO: 1696285 - DNA, 25 bp, Homo sapien
aatgtttcaacttacatcttccaca

SEQ ID NO: 1696286 - DNA, 25 bp, Homo sapien
catcgtggcagcttcatagtcacag

SEQ ID NO: 1696287 - DNA, 25 bp, Homo sapien
tattagagctggcatctcacacagg

SEQ ID NO: 1696288 - DNA, 25 bp, Homo sapien
tctctggttatcgtccaagagaacg

SEQ ID NO: 1696289 - DNA, 25 bp, Homo sapien
cgttctcttggacgataaccagaga

SEQ ID NO: 1696290 - DNA, 25 bp, Homo sapien
ttcttcctgcggctgacttgattct

SEQ ID NO: 1696291 - DNA, 25 bp, Homo sapien
tctcagcactgctagggcaatgtag

SEQ ID NO: 1696292 - DNA, 25 bp, Homo sapien
cccgcacatattgaaggccttcctt

SEQ ID NO: 1696293 - DNA, 25 bp, Homo sapien
acggtgaggtgggacccgcacatat

SEQ ID NO: 1696294 - DNA, 25 bp, Homo sapien
ctgagaagaattatttcatggttgc

SEQ ID NO: 1696295 - DNA, 25 bp, Homo sapien
agaattatttcatggttgcatatac

SEQ ID NO: 1696296 - DNA, 25 bp, Homo sapien
gagaagaattatttcatggttgcat

SEQ ID NO: 1696297 - DNA, 25 bp, Homo sapien
gaagaattatttcatggttgcatat

SEQ ID NO: 1696298 - DNA, 25 bp, Homo sapien
catgggggtcattaagttgtagaaa

SEQ ID NO: 1696299 - DNA, 25 bp, Homo sapien
ttcagtgcaccttttacatccttgt

SEQ ID NO: 1696300 - DNA, 25 bp, Homo sapien
aagcctcttcagtgcaccttttaca

SEQ ID NO: 1696301 - DNA, 25 bp, Homo sapien
aacatgggggtcattaagttgtaga

SEQ ID NO: 1696302 - DNA, 25 bp, Homo sapien
tcactgtcactgtgttttctagaca

SEQ ID NO: 1696303 - DNA, 25 bp, Homo sapien
cagtcactgtcactgtgttttctag

SEQ ID NO: 1696304 - DNA, 25 bp, Homo sapien
tcaagagcagtcactgtcactgtgt

SEQ ID NO: 1696305 - DNA, 25 bp, Homo sapien
cactgtcactgtgttttctagacac

SEQ ID NO: 1696306 - DNA, 25 bp, Homo sapien
gggtcacgcagccaccataggtgat

SEQ ID NO: 1696307 - DNA, 25 bp, Homo sapien
tatggaggcgaggatctacaatgga

SEQ ID NO: 1696308 - DNA, 25 bp, Homo sapien
tctgagggacagtacaagtggtcaa

SEQ ID NO: 1696309 - DNA, 25 bp, Homo sapien
tccccttaaagttgaccagtgtctg

SEQ ID NO: 1696310 - DNA, 25 bp, Homo sapien
gcagacaataagacacactccactc

SEQ ID NO: 1696311 - DNA, 25 bp, Homo sapien
atgtagtggagtgggcggcagacgg

SEQ ID NO: 1696312 - DNA, 25 bp, Homo sapien
catgtagtggagtgggcggcagacg

SEQ ID NO: 1696313 - DNA, 25 bp, Homo sapien
gagtgggcggcagacggctgcatag

SEQ ID NO: 1696314 - DNA, 25 bp, Homo sapien
ggcggcagacggctgcatagcggtc

SEQ ID NO: 1696315 - DNA, 25 bp, Homo sapien
aagaaaatgatcactaccaggaggt

SEQ ID NO: 1696316 - DNA, 25 bp, Homo sapien
tcctgtgaataactggagggaggct

SEQ ID NO: 1696317 - DNA, 25 bp, Homo sapien
tcaggactgcatgagtaatgtgacc

SEQ ID NO: 1696318 - DNA, 25 bp, Homo sapien
ggttacaaccaactgcaagcaaagt

SEQ ID NO: 1696319 - DNA, 25 bp, Homo sapien
cttagttgcccctttgacttccttg

SEQ ID NO: 1696320 - DNA, 25 bp, Homo sapien
tcctccccactagtcttcttagttg

SEQ ID NO: 1696321 - DNA, 25 bp, Homo sapien
aaaccctgcgttaactttctcatgc

SEQ ID NO: 1696322 - DNA, 25 bp, Homo sapien
aatgtttggaactgcaaaccctgcg

SEQ ID NO: 1696323 - DNA, 25 bp, Homo sapien
cagttatactgtcatgtgctgaggc

SEQ ID NO: 1696324 - DNA, 25 bp, Homo sapien
tgggactttcaacatcagatgctgg

SEQ ID NO: 1696325 - DNA, 25 bp, Homo sapien
caagtgcaataccttagccatggga

SEQ ID NO: 1696326 - DNA, 25 bp, Homo sapien
tagaccagtaaaccatagcagtgag

SEQ ID NO: 1696327 - DNA, 25 bp, Homo sapien
ctggaagaactacgactccagatga

SEQ ID NO: 1696328 - DNA, 25 bp, Homo sapien
gaaggtgctctggaagaactacgac

SEQ ID NO: 1696329 - DNA, 25 bp, Homo sapien
aaggatgtgaaaggagcacttaaga

SEQ ID NO: 1696330 - DNA, 25 bp, Homo sapien
cacttaagaaggtgctctggaagaa

SEQ ID NO: 1696331 - DNA, 25 bp, Homo sapien
aacaactactctcaggatcagggca

SEQ ID NO: 1696332 - DNA, 25 bp, Homo sapien
caactactctcaggatcagggcaag

SEQ ID NO: 1696333 - DNA, 25 bp, Homo sapien
agcccggcaacaactactctcagga

SEQ ID NO: 1696334 - DNA, 25 bp, Homo sapien
cggcaacaactactctcaggatcag

SEQ ID NO: 1696335 - DNA, 25 bp, Homo sapien
tggagcaattgctgaccatcctgac

SEQ ID NO: 1696336 - DNA, 25 bp, Homo sapien
tcctgacaagggaactgcagagctg

SEQ ID NO: 1696337 - DNA, 25 bp, Homo sapien
ctttgagcttctgacgttggagcaa

SEQ ID NO: 1696338 - DNA, 25 bp, Homo sapien
agctggttttgagaactacttccag

SEQ ID NO: 1696339 - DNA, 25 bp, Homo sapien
taacattatcagagcagaagtgcag

SEQ ID NO: 1696340 - DNA, 25 bp, Homo sapien
gttgccaacttgagaagcccaggag

SEQ ID NO: 1696341 - DNA, 25 bp, Homo sapien
cataagagtgtgcaagagagggttc

SEQ ID NO: 1696342 - DNA, 25 bp, Homo sapien
ggcagtgatccgagccaatggccag

SEQ ID NO: 1696343 - DNA, 25 bp, Homo sapien
aaggtaccacaaagatcagccccac

SEQ ID NO: 1696344 - DNA, 25 bp, Homo sapien
gaggatataggataccaggatacac

SEQ ID NO: 1696345 - DNA, 25 bp, Homo sapien
cactgaaggtaccacaaagatcagc

SEQ ID NO: 1696346 - DNA, 25 bp, Homo sapien
acagcagaaacaatgaggatatagg

SEQ ID NO: 1696347 - DNA, 25 bp, Homo sapien
caacacaggtgctacaaccataaaa

SEQ ID NO: 1696348 - DNA, 25 bp, Homo sapien
aaaaatgactgatgcggctgagtct

SEQ ID NO: 1696349 - DNA, 25 bp, Homo sapien
tcttaaactgtaaatgaatggattc

SEQ ID NO: 1696350 - DNA, 25 bp, Homo sapien
ctttttcagtagagtgattggataa

SEQ ID NO: 1696351 - DNA, 25 bp, Homo sapien
actcgagagcatccttgctgtaagg

SEQ ID NO: 1696352 - DNA, 25 bp, Homo sapien
tctttagagtgattatgttgttccc

SEQ ID NO: 1696353 - DNA, 25 bp, Homo sapien
tgttgttcccaacagatctatgcaa

SEQ ID NO: 1696354 - DNA, 25 bp, Homo sapien
gccagtatgatctccattgccagaa

SEQ ID NO: 1696355 - DNA, 25 bp, Homo sapien
ggactcattgagggatacaggaatg

SEQ ID NO: 1696356 - DNA, 25 bp, Homo sapien
tggactcattgagggatacaggaat

SEQ ID NO: 1696357 - DNA, 25 bp, Homo sapien
tacaggaatggtgccagagattctg

SEQ ID NO: 1696358 - DNA, 25 bp, Homo sapien
gatacaggaatggtgccagagattc

SEQ ID NO: 1696359 - DNA, 25 bp, Homo sapien
taccccagtggaactcagatattca

SEQ ID NO: 1696360 - DNA, 25 bp, Homo sapien
tctgaggccttgtttgattcatccc

SEQ ID NO: 1696361 - DNA, 25 bp, Homo sapien
cacgcagcagggttgcaactgaaac

SEQ ID NO: 1696362 - DNA, 25 bp, Homo sapien
tggtgaaattgaagcccacgcagca

SEQ ID NO: 1696363 - DNA, 25 bp, Homo sapien
ccattgtagtagtgtgtcttgctaa

SEQ ID NO: 1696364 - DNA, 25 bp, Homo sapien
cttcctgggtctcttcgggcgcaga

SEQ ID NO: 1696365 - DNA, 25 bp, Homo sapien
cgggatgcctttggactacaattcc

SEQ ID NO: 1696366 - DNA, 25 bp, Homo sapien
tgctaaataacagaagggactcctg

SEQ ID NO: 1696367 - DNA, 25 bp, Homo sapien
gacagggctgattccgatcggacac

SEQ ID NO: 1696368 - DNA, 25 bp, Homo sapien
gatcggacacttccggtggaaggac

SEQ ID NO: 1696369 - DNA, 25 bp, Homo sapien
tgagcggcgctacacttcaagaatt

SEQ ID NO: 1696370 - DNA, 25 bp, Homo sapien
gaattccgtccacagggacttgtga

SEQ ID NO: 1696371 - DNA, 25 bp, Homo sapien
cactaaatgcgtaagcgcgcctgcg

SEQ ID NO: 1696372 - DNA, 25 bp, Homo sapien
aattcaggatcagtaggacagcccc

SEQ ID NO: 1696373 - DNA, 25 bp, Homo sapien
gttcccaacgccgaagctggttcta

SEQ ID NO: 1696374 - DNA, 25 bp, Homo sapien
ctctgagggccaaggtctggtcacc

SEQ ID NO: 1696375 - DNA, 25 bp, Homo sapien
agatctgagacatgtggcacccctc

SEQ ID NO: 1696376 - DNA, 25 bp, Homo sapien
cctcgcagcagtttcttttcgcaga

SEQ ID NO: 1696377 - DNA, 25 bp, Homo sapien
gtcaataaatttcaggacaagcggg

SEQ ID NO: 1696378 - DNA, 25 bp, Homo sapien
tcttttcgcagacaatggcagatct

SEQ ID NO: 1696379 - DNA, 25 bp, Homo sapien
ttaactgcatcctcggcacacagga

SEQ ID NO: 1696380 - DNA, 25 bp, Homo sapien
agtgttggtttaactgcatcctcgg

SEQ ID NO: 1696381 - DNA, 25 bp, Homo sapien
tttctcaagggcagggggtcagtgt

SEQ ID NO: 1696382 - DNA, 25 bp, Homo sapien
gggtcagtgttggtttaactgcatc

SEQ ID NO: 1696383 - DNA, 25 bp, Homo sapien
ctgagcagctggttctatgacatgt

SEQ ID NO: 1696384 - DNA, 25 bp, Homo sapien
tgtgaagaaacgctaggagaacaga

SEQ ID NO: 1696385 - DNA, 25 bp, Homo sapien
tagtaagatgggtgtaaagtaggcc

SEQ ID NO: 1696386 - DNA, 25 bp, Homo sapien
tatgacatgttatctcagctgacag

SEQ ID NO: 1696387 - DNA, 25 bp, Homo sapien
gtcttctttagtttcaagagtcctc

SEQ ID NO: 1696388 - DNA, 25 bp, Homo sapien
ctgctttggaaagggtcttctttag

SEQ ID NO: 1696389 - DNA, 25 bp, Homo sapien
atattatcagaactgctttggaaag

SEQ ID NO: 1696390 - DNA, 25 bp, Homo sapien
ctgtggatagaatatattatcagaa

SEQ ID NO: 1696391 - DNA, 25 bp, Homo sapien
acttctctgtaagcaagtgtcctgc

SEQ ID NO: 1696392 - DNA, 25 bp, Homo sapien
ggagttcacttctctgtaagcaagt

SEQ ID NO: 1696393 - DNA, 25 bp, Homo sapien
agcaagtgtcctgcccatggataaa

SEQ ID NO: 1696394 - DNA, 25 bp, Homo sapien
tcctgcccatggataaattcttcct

SEQ ID NO: 1696395 - DNA, 25 bp, Homo sapien
gcggctcagtgcctcgcgaggtcca

SEQ ID NO: 1696396 - DNA, 25 bp, Homo sapien
ctgttccttggtatggatctctggc

SEQ ID NO: 1696397 - DNA, 25 bp, Homo sapien
tccaggagaatcctggtagcagaac

SEQ ID NO: 1696398 - DNA, 25 bp, Homo sapien
taatgttcatgtacccaggcctgca

SEQ ID NO: 1696399 - DNA, 25 bp, Homo sapien
tctccaaatcttctagtatggtcac

SEQ ID NO: 1696400 - DNA, 25 bp, Homo sapien
ctggagtactgcttcatcagtgcct

SEQ ID NO: 1696401 - DNA, 25 bp, Homo sapien
ctctccaaatcttctagtatggtca

SEQ ID NO: 1696402 - DNA, 25 bp, Homo sapien
gtactgcttcatcagtgcctctctc

SEQ ID NO: 1696403 - DNA, 25 bp, Homo sapien
tgacattaagtgctggtccaggagg

SEQ ID NO: 1696404 - DNA, 25 bp, Homo sapien
gtaacttgacattaagtgctggtcc

SEQ ID NO: 1696405 - DNA, 25 bp, Homo sapien
aaaatgggccttggtctccactggc

SEQ ID NO: 1696406 - DNA, 25 bp, Homo sapien
ggttctgatgaatcaaaatgggcct

SEQ ID NO: 1696407 - DNA, 25 bp, Homo sapien
catggatctactgttttcactctca

SEQ ID NO: 1696408 - DNA, 25 bp, Homo sapien
tcttgagactcaccagatgcttctg

SEQ ID NO: 1696409 - DNA, 25 bp, Homo sapien
tgggcagacgagagtctctgagact

SEQ ID NO: 1696410 - DNA, 25 bp, Homo sapien
ttccagatataattctctgtgattc

SEQ ID NO: 1696411 - DNA, 25 bp, Homo sapien
tgaattcgccgatgtctagtaagat

SEQ ID NO: 1696412 - DNA, 25 bp, Homo sapien
caagttttgagctgtgcctgaaagc

SEQ ID NO: 1696413 - DNA, 25 bp, Homo sapien
taatctcctctcacatccatcgtgg

SEQ ID NO: 1696414 - DNA, 25 bp, Homo sapien
ggtcacaggtaccatgtttacaaga

SEQ ID NO: 1696415 - DNA, 25 bp, Homo sapien
attaataggttttccctcatgtgaa

SEQ ID NO: 1696416 - DNA, 25 bp, Homo sapien
tggtgttgactaaggtttgagctct

SEQ ID NO: 1696417 - DNA, 25 bp, Homo sapien
gttgactaaggtttgagctctgact

SEQ ID NO: 1696418 - DNA, 25 bp, Homo sapien
tctctggtgttgactaaggtttgag

SEQ ID NO: 1696419 - DNA, 25 bp, Homo sapien
gtcttccatcttgcccaatatttat

SEQ ID NO: 1696420 - DNA, 25 bp, Homo sapien
tttcctcagcatttacttacaaatt

SEQ ID NO: 1696421 - DNA, 25 bp, Homo sapien
tcttccatcttgcccaatatttatt

SEQ ID NO: 1696422 - DNA, 25 bp, Homo sapien
ttcctcagcatttacttacaaattt

SEQ ID NO: 1696423 - DNA, 25 bp, Homo sapien
cattgcactgccatagactacccta

SEQ ID NO: 1696424 - DNA, 25 bp, Homo sapien
ttttaaagggatgctctgaaaacac

SEQ ID NO: 1696425 - DNA, 25 bp, Homo sapien
tttggcctcatataggaatgccacc

SEQ ID NO: 1696426 - DNA, 25 bp, Homo sapien
tcactcctgggtttagctgacctct

SEQ ID NO: 1696427 - DNA, 25 bp, Homo sapien
gaagatgggcgggtaccgcggctcc

SEQ ID NO: 1696428 - DNA, 25 bp, Homo sapien
gaccacacatcctggccggaagatg

SEQ ID NO: 1696429 - DNA, 25 bp, Homo sapien
cagtaggctcccgtcctagcgggtc

SEQ ID NO: 1696430 - DNA, 25 bp, Homo sapien
tccggctcctctaggaagaggctct

SEQ ID NO: 1696431 - DNA, 25 bp, Homo sapien
tgaaaaaagtcagaggtgtgaagtg

SEQ ID NO: 1696432 - DNA, 25 bp, Homo sapien
gccacaaactcggtcccggacgcca

SEQ ID NO: 1696433 - DNA, 25 bp, Homo sapien
aaaaagtcagaggtgtgaagtgcac

SEQ ID NO: 1696434 - DNA, 25 bp, Homo sapien
cacaaactcggtcccggacgccaca

SEQ ID NO: 1696435 - DNA, 25 bp, Homo sapien
tcctggggcccgtcttggcgttgtg

SEQ ID NO: 1696436 - DNA, 25 bp, Homo sapien
ggaagtcttctcttcacgccctcct

SEQ ID NO: 1696437 - DNA, 25 bp, Homo sapien
ggtccgcagtcgcagcctcctcttg

SEQ ID NO: 1696438 - DNA, 25 bp, Homo sapien
tgtggtggagggggacgaatctggg

SEQ ID NO: 1696439 - DNA, 25 bp, Homo sapien
ctctgctaatgcttctgggagacac

SEQ ID NO: 1696440 - DNA, 25 bp, Homo sapien
acagggctcctctgctaatgcttct

SEQ ID NO: 1696441 - DNA, 25 bp, Homo sapien
gctcctctgctaatgcttctgggag

SEQ ID NO: 1696442 - DNA, 25 bp, Homo sapien
tctcccacagggctcctctgctaat

SEQ ID NO: 1696443 - DNA, 25 bp, Homo sapien
gcacaaactaggtaagacagacata

SEQ ID NO: 1696444 - DNA, 25 bp, Homo sapien
caaggactttctaaacaccgcataa

SEQ ID NO: 1696445 - DNA, 25 bp, Homo sapien
tactaactcgcagaaatgaaaaggt

SEQ ID NO: 1696446 - DNA, 25 bp, Homo sapien
tgtcagacccagataaaatacggcg

SEQ ID NO: 1696447 - DNA, 25 bp, Homo sapien
gcaaagttcccagaatcagctcaca

SEQ ID NO: 1696448 - DNA, 25 bp, Homo sapien
tcttggccccaagtgtagtcctctg

SEQ ID NO: 1696449 - DNA, 25 bp, Homo sapien
gatgagctacctcccggttgctgga

SEQ ID NO: 1696450 - DNA, 25 bp, Homo sapien
aatgcctaacgttctgatgagctac

SEQ ID NO: 1696451 - DNA, 25 bp, Homo sapien
caaatcctccgatatgatcaccatt

SEQ ID NO: 1696452 - DNA, 25 bp, Homo sapien
gatgctctaacatccgggcttggag

SEQ ID NO: 1696453 - DNA, 25 bp, Homo sapien
tccaaatcctccgatatgatcacca

SEQ ID NO: 1696454 - DNA, 25 bp, Homo sapien
tctgttctccggctgatgctctaac

SEQ ID NO: 1696455 - DNA, 25 bp, Homo sapien
gagggaggacagcattacgccattc

SEQ ID NO: 1696456 - DNA, 25 bp, Homo sapien
catcaggtcttgttggtgccacata

SEQ ID NO: 1696457 - DNA, 25 bp, Homo sapien
gagacttacatatcaagcgggaggg

SEQ ID NO: 1696458 - DNA, 25 bp, Homo sapien
tatggctgggcttgtgaaagactca

SEQ ID NO: 1696459 - DNA, 25 bp, Homo sapien
gacacattatttagagccagagctg

SEQ ID NO: 1696460 - DNA, 25 bp, Homo sapien
taccttcacgggcacataggagaaa

SEQ ID NO: 1696461 - DNA, 25 bp, Homo sapien
tcttggcctacatttcactgctgga

SEQ ID NO: 1696462 - DNA, 25 bp, Homo sapien
taatcctatcatacagggccctgcc

SEQ ID NO: 1696463 - DNA, 25 bp, Homo sapien
caaccagtgagattcaggagtttac

SEQ ID NO: 1696464 - DNA, 25 bp, Homo sapien
gatagagttaatcttccccggttga

SEQ ID NO: 1696465 - DNA, 25 bp, Homo sapien
gagtttacatctctacttcacaggg

SEQ ID NO: 1696466 - DNA, 25 bp, Homo sapien
gatgacaactgagctccttttagag

SEQ ID NO: 1696467 - DNA, 25 bp, Homo sapien
tgtctcatccgaaagaaagggtttg

SEQ ID NO: 1696468 - DNA, 25 bp, Homo sapien
tcgcagcgttgagtccgtcagtcct

SEQ ID NO: 1696469 - DNA, 25 bp, Homo sapien
aaagggtttgagttccagcttcgca

SEQ ID NO: 1696470 - DNA, 25 bp, Homo sapien
aggcgggaacctccccagacttcat

SEQ ID NO: 1696471 - DNA, 25 bp, Homo sapien
ccgtgcagtgtctcggacggcgctt

SEQ ID NO: 1696472 - DNA, 25 bp, Homo sapien
cagtctgccccgtgcagtgtctcgg

SEQ ID NO: 1696473 - DNA, 25 bp, Homo sapien
cagtgtctcggacggcgcttccagc

SEQ ID NO: 1696474 - DNA, 25 bp, Homo sapien
tgccccgtgcagtgtctcggacggc

SEQ ID NO: 1696475 - DNA, 25 bp, Homo sapien
acgtccggcccgcgtgggggagctg

SEQ ID NO: 1696476 - DNA, 25 bp, Homo sapien
cgtgggggagctgggctccggttgg

SEQ ID NO: 1696477 - DNA, 25 bp, Homo sapien
cgtccggcccgcgtgggggagctgg

SEQ ID NO: 1696478 - DNA, 25 bp, Homo sapien
ccgcgtgggggagctgggctccggt

SEQ ID NO: 1696479 - DNA, 25 bp, Homo sapien
tgtgaaccagagtcggacttcgcaa

SEQ ID NO: 1696480 - DNA, 25 bp, Homo sapien
gaaccagagtcggacttcgcaacgt

SEQ ID NO: 1696481 - DNA, 25 bp, Homo sapien
gtgaaccagagtcggacttcgcaac

SEQ ID NO: 1696482 - DNA, 25 bp, Homo sapien
ctgtgaaccagagtcggacttcgca

SEQ ID NO: 1696483 - DNA, 25 bp, Homo sapien
gagaaaagggtggtccgcatagacc

SEQ ID NO: 1696484 - DNA, 25 bp, Homo sapien
aagggtggtccgcatagaccgacca

SEQ ID NO: 1696485 - DNA, 25 bp, Homo sapien
tccgcatagaccgaccaggtcggca

SEQ ID NO: 1696486 - DNA, 25 bp, Homo sapien
ggtggtccgcatagaccgaccaggt

SEQ ID NO: 1696487 - DNA, 25 bp, Homo sapien
gatcacaaaaaacttccaatagtcg

SEQ ID NO: 1696488 - DNA, 25 bp, Homo sapien
agatcacaaaaaacttccaatagtc

SEQ ID NO: 1696489 - DNA, 25 bp, Homo sapien
tcacaaaaaacttccaatagtcggc

SEQ ID NO: 1696490 - DNA, 25 bp, Homo sapien
cacaaaaaacttccaatagtcggcg

SEQ ID NO: 1696491 - DNA, 25 bp, Homo sapien
gctatgttccttaagccatcagggc

SEQ ID NO: 1696492 - DNA, 25 bp, Homo sapien
tctgtaacataaacgaaatggcaga

SEQ ID NO: 1696493 - DNA, 25 bp, Homo sapien
cctcggactcgggaagatctggcta

SEQ ID NO: 1696494 - DNA, 25 bp, Homo sapien
gatcatcagtggacaaccataacga

SEQ ID NO: 1696495 - DNA, 25 bp, Homo sapien
gggctctaaggattaattcagggac

SEQ ID NO: 1696496 - DNA, 25 bp, Homo sapien
gctctaaggattaattcagggactt

SEQ ID NO: 1696497 - DNA, 25 bp, Homo sapien
tgggctctaaggattaattcaggga

SEQ ID NO: 1696498 - DNA, 25 bp, Homo sapien
ggctctaaggattaattcagggact

SEQ ID NO: 1696499 - DNA, 25 bp, Homo sapien
gcaataaggccctctactgccttct

SEQ ID NO: 1696500 - DNA, 25 bp, Homo sapien
tttggcacacaacttaggaccacgc

SEQ ID NO: 1696501 - DNA, 25 bp, Homo sapien
tctgttacccaatcggcatctttga

SEQ ID NO: 1696502 - DNA, 25 bp, Homo sapien
tgtgcttagcttctgttacccaatc

SEQ ID NO: 1696503 - DNA, 25 bp, Homo sapien
tggccaggaacagctcaagcaacag

SEQ ID NO: 1696504 - DNA, 25 bp, Homo sapien
tcaagcaacagcaagtctaacatct

SEQ ID NO: 1696505 - DNA, 25 bp, Homo sapien
aggccaggagctcctcgggcagaat

SEQ ID NO: 1696506 - DNA, 25 bp, Homo sapien
gaatctcaggccttaaccactcaca

SEQ ID NO: 1696507 - DNA, 25 bp, Homo sapien
tccagcaaaaccactgcctcctctc

SEQ ID NO: 1696508 - DNA, 25 bp, Homo sapien
tcctctccattctttggatgatact

SEQ ID NO: 1696509 - DNA, 25 bp, Homo sapien
ctctccattctttggatgatactca

SEQ ID NO: 1696510 - DNA, 25 bp, Homo sapien
tccattctttggatgatactcatgc

SEQ ID NO: 1696511 - DNA, 25 bp, Homo sapien
tgactctcatctgggtcttggaact

SEQ ID NO: 1696512 - DNA, 25 bp, Homo sapien
aaatgactctcatctgggtcttgga

SEQ ID NO: 1696513 - DNA, 25 bp, Homo sapien
tcttgagaaaaatgactctcatctg

SEQ ID NO: 1696514 - DNA, 25 bp, Homo sapien
tgagaaaaatgactctcatctgggt

SEQ ID NO: 1696515 - DNA, 25 bp, Homo sapien
cactcggctctctgatatatttctg

SEQ ID NO: 1696516 - DNA, 25 bp, Homo sapien
tgggattccatatctacagtaagtt

SEQ ID NO: 1696517 - DNA, 25 bp, Homo sapien
ctgcccttgaatcagttctatttta

SEQ ID NO: 1696518 - DNA, 25 bp, Homo sapien
cactgcactcggctctctgatatat

SEQ ID NO: 1696519 - DNA, 25 bp, Homo sapien
catgaagagggtgtgttaccagtac

SEQ ID NO: 1696520 - DNA, 25 bp, Homo sapien
gaagagggtgtgttaccagtacaga

SEQ ID NO: 1696521 - DNA, 25 bp, Homo sapien
attacatgaagagggtgtgttacca

SEQ ID NO: 1696522 - DNA, 25 bp, Homo sapien
tattttatgtctaatggggcttgag

SEQ ID NO: 1696523 - DNA, 25 bp, Homo sapien
tccatatgcatcacatttgcagggc

SEQ ID NO: 1696524 - DNA, 25 bp, Homo sapien
catagggcttctctctaccgtggat

SEQ ID NO: 1696525 - DNA, 25 bp, Homo sapien
aaagatgtgagctgttactgaaagc

SEQ ID NO: 1696526 - DNA, 25 bp, Homo sapien
tggtgtccaacaagagctgaactgt

SEQ ID NO: 1696527 - DNA, 25 bp, Homo sapien
tgatactaagccatcatagcccctg

SEQ ID NO: 1696528 - DNA, 25 bp, Homo sapien
aaatagacaaagtacttaacctgca

SEQ ID NO: 1696529 - DNA, 25 bp, Homo sapien
taaaaatatgaacaagccaatagaa

SEQ ID NO: 1696530 - DNA, 25 bp, Homo sapien
gcctctgacaatatgatactaagcc

SEQ ID NO: 1696531 - DNA, 25 bp, Homo sapien
gccccgaacaaagactagactcaaa

SEQ ID NO: 1696532 - DNA, 25 bp, Homo sapien
tagactcaaagacaccaatcggcgc

SEQ ID NO: 1696533 - DNA, 25 bp, Homo sapien
cagggaggaacaggtgcaacagcta

SEQ ID NO: 1696534 - DNA, 25 bp, Homo sapien
ctagcgtcctttggacagccccgaa

SEQ ID NO: 1696535 - DNA, 25 bp, Homo sapien
ctttgccaggagatttatcctctat

SEQ ID NO: 1696536 - DNA, 25 bp, Homo sapien
tgggctttgccaggagatttatcct

SEQ ID NO: 1696537 - DNA, 25 bp, Homo sapien
gctttgccaggagatttatcctcta

SEQ ID NO: 1696538 - DNA, 25 bp, Homo sapien
ctgtgaggactgcacttttgtgagc

SEQ ID NO: 1696539 - DNA, 25 bp, Homo sapien
gaagtgttgtctatagagttccctc

SEQ ID NO: 1696540 - DNA, 25 bp, Homo sapien
tctgccttaattatcagaagtcctt

SEQ ID NO: 1696541 - DNA, 25 bp, Homo sapien
tcctgtccccagtaatggtcctctg

SEQ ID NO: 1696542 - DNA, 25 bp, Homo sapien
taagagcttcacggggtccaggtgc

SEQ ID NO: 1696543 - DNA, 25 bp, Homo sapien
gagcttcacggggtccaggtgcatc

SEQ ID NO: 1696544 - DNA, 25 bp, Homo sapien
ccacagctgggtaagagcttcacgg

SEQ ID NO: 1696545 - DNA, 25 bp, Homo sapien
cacagctgggtaagagcttcacggg

SEQ ID NO: 1696546 - DNA, 25 bp, Homo sapien
caggtctttaggaagaatgctcagg

SEQ ID NO: 1696547 - DNA, 25 bp, Homo sapien
ccatgcttgcaggtctttaggaaga

SEQ ID NO: 1696548 - DNA, 25 bp, Homo sapien
gcttgcaggtctttaggaagaatgc

SEQ ID NO: 1696549 - DNA, 25 bp, Homo sapien
gtctttaggaagaatgctcaggaac

SEQ ID NO: 1696550 - DNA, 25 bp, Homo sapien
tccagtctctggatggtgtgcacgc

SEQ ID NO: 1696551 - DNA, 25 bp, Homo sapien
cagtctctggatggtgtgcacgcac

SEQ ID NO: 1696552 - DNA, 25 bp, Homo sapien
ctccagtctctggatggtgtgcacg

SEQ ID NO: 1696553 - DNA, 25 bp, Homo sapien
ccagtctctggatggtgtgcacgca

SEQ ID NO: 1696554 - DNA, 25 bp, Homo sapien
gctttccaggttcatcaagctctct

SEQ ID NO: 1696555 - DNA, 25 bp, Homo sapien
tgctttccaggttcatcaagctctc

SEQ ID NO: 1696556 - DNA, 25 bp, Homo sapien
gtatgtcccgtctttctgaattgcc

SEQ ID NO: 1696557 - DNA, 25 bp, Homo sapien
ctggacagtcagtgattcatatggc

SEQ ID NO: 1696558 - DNA, 25 bp, Homo sapien
cagtcagtgattcatatggccttcc

SEQ ID NO: 1696559 - DNA, 25 bp, Homo sapien
caagggggccaacttgtccatgagt

SEQ ID NO: 1696560 - DNA, 25 bp, Homo sapien
tccactcctagagttaaagcactga

SEQ ID NO: 1696561 - DNA, 25 bp, Homo sapien
cagataggaggttcttaacgtcact

SEQ ID NO: 1696562 - DNA, 25 bp, Homo sapien
ttccagatagcagctaggaacatct

SEQ ID NO: 1696563 - DNA, 25 bp, Homo sapien
tctaaagccaaacagtaaccagcac

SEQ ID NO: 1696564 - DNA, 25 bp, Homo sapien
tcacggtgtatctctagtatggtaa

SEQ ID NO: 1696565 - DNA, 25 bp, Homo sapien
tagctatcctctttgtagttcacgg

SEQ ID NO: 1696566 - DNA, 25 bp, Homo sapien
tatttttgcaggtgcacctcaggga

SEQ ID NO: 1696567 - DNA, 25 bp, Homo sapien
caagcaagcctactctgtgatattt

SEQ ID NO: 1696568 - DNA, 25 bp, Homo sapien
gaacaactcttcattcttagtccta

SEQ ID NO: 1696569 - DNA, 25 bp, Homo sapien
caataatatctttggacttaggatg

SEQ ID NO: 1696570 - DNA, 25 bp, Homo sapien
ccaaggaattccttgtctttgggca

SEQ ID NO: 1696571 - DNA, 25 bp, Homo sapien
tctttgggcatatcttccttctgga

SEQ ID NO: 1696572 - DNA, 25 bp, Homo sapien
ccaatgagatgtgagcgctgaatga

SEQ ID NO: 1696573 - DNA, 25 bp, Homo sapien
caatgagatgtgagcgctgaatgaa

SEQ ID NO: 1696574 - DNA, 25 bp, Homo sapien
tccaatgagatgtgagcgctgaatg

SEQ ID NO: 1696575 - DNA, 25 bp, Homo sapien
ttttactcccgtgtgtactctatga

SEQ ID NO: 1696576 - DNA, 25 bp, Homo sapien
gggtttttcacctgtgtggattctc

SEQ ID NO: 1696577 - DNA, 25 bp, Homo sapien
tggattctctgatgctgaataagac

SEQ ID NO: 1696578 - DNA, 25 bp, Homo sapien
tagggtttttcacctgtgtggattc

SEQ ID NO: 1696579 - DNA, 25 bp, Homo sapien
tcggaaaggccttccacactcatca

SEQ ID NO: 1696580 - DNA, 25 bp, Homo sapien
agtttatttgcggtatgaattcttt

SEQ ID NO: 1696581 - DNA, 25 bp, Homo sapien
ttagtagagtttatttgcggtatga

SEQ ID NO: 1696582 - DNA, 25 bp, Homo sapien
tagtagagtttatttgcggtatgaa

SEQ ID NO: 1696583 - DNA, 25 bp, Homo sapien
agagtttatttgcggtatgaattct

SEQ ID NO: 1696584 - DNA, 25 bp, Homo sapien
ttgataactagttaggcctgagtgt

SEQ ID NO: 1696585 - DNA, 25 bp, Homo sapien
gctttgaccacattgaggaaactca

SEQ ID NO: 1696586 - DNA, 25 bp, Homo sapien
taaaatagattctttgataactagt

SEQ ID NO: 1696587 - DNA, 25 bp, Homo sapien
ttaatgatgactgaagctttgacca

SEQ ID NO: 1696588 - DNA, 25 bp, Homo sapien
ttcactaccaacccatctgtgtctg

SEQ ID NO: 1696589 - DNA, 25 bp, Homo sapien
agttcactaccaacccatctgtgtc

SEQ ID NO: 1696590 - DNA, 25 bp, Homo sapien
gttcactaccaacccatctgtgtct

SEQ ID NO: 1696591 - DNA, 25 bp, Homo sapien
tcctgtatcattcctctgattcttc

SEQ ID NO: 1696592 - DNA, 25 bp, Homo sapien
atttcaacgtcccttctcctgtatc

SEQ ID NO: 1696593 - DNA, 25 bp, Homo sapien
tcaacgtcccttctcctgtatcatt

SEQ ID NO: 1696594 - DNA, 25 bp, Homo sapien
ccttctcctgtatcattcctctgat

SEQ ID NO: 1696595 - DNA, 25 bp, Homo sapien
tggataggctcgaccgtccggtttg

SEQ ID NO: 1696596 - DNA, 25 bp, Homo sapien
aaaacgctacgtgagctgggccctg

SEQ ID NO: 1696597 - DNA, 25 bp, Homo sapien
ctctagccacttccggttgctaacg

SEQ ID NO: 1696598 - DNA, 25 bp, Homo sapien
ccagaggcagaaaacggacggaaga

SEQ ID NO: 1696599 - DNA, 25 bp, Homo sapien
agtgcttaggcagccgggaaaggcc

SEQ ID NO: 1696600 - DNA, 25 bp, Homo sapien
aagtgcttaggcagccgggaaaggc

SEQ ID NO: 1696601 - DNA, 25 bp, Homo sapien
ccaagtgcttaggcagccgggaaag

SEQ ID NO: 1696602 - DNA, 25 bp, Homo sapien
caagtgcttaggcagccgggaaagg

SEQ ID NO: 1696603 - DNA, 25 bp, Homo sapien
gcctcgttcaaatcagatgccagac

SEQ ID NO: 1696604 - DNA, 25 bp, Homo sapien
gatgccagacagtgtttcttgggat

SEQ ID NO: 1696605 - DNA, 25 bp, Homo sapien
ggatccatccaaataggtcccttat

SEQ ID NO: 1696606 - DNA, 25 bp, Homo sapien
tgcgccgagcctcgttcaaatcaga

SEQ ID NO: 1696607 - DNA, 25 bp, Homo sapien
gtagcggcagatgcgggtccccagg

SEQ ID NO: 1696608 - DNA, 25 bp, Homo sapien
ctgcagagagggtcgggataggaaa

SEQ ID NO: 1696609 - DNA, 25 bp, Homo sapien
gcatcccggaggttcccacaggtct

SEQ ID NO: 1696610 - DNA, 25 bp, Homo sapien
tcgggataggaaattgcgggtagcg

SEQ ID NO: 1696611 - DNA, 25 bp, Homo sapien
gggtctgcgggaccccacgctcaaa

SEQ ID NO: 1696612 - DNA, 25 bp, Homo sapien
tcggccccctaggtgccagggtctg

SEQ ID NO: 1696613 - DNA, 25 bp, Homo sapien
gggctctttcgaagcggcagctctg

SEQ ID NO: 1696614 - DNA, 25 bp, Homo sapien
gtaggaccgctcttctaccccaaga

SEQ ID NO: 1696615 - DNA, 25 bp, Homo sapien
ttcgtctccgtaagtccgcaaggtc

SEQ ID NO: 1696616 - DNA, 25 bp, Homo sapien
tatcctaaagtcaagaacgtccgag

SEQ ID NO: 1696617 - DNA, 25 bp, Homo sapien
gtaaagggaagaacgctcctcggca

SEQ ID NO: 1696618 - DNA, 25 bp, Homo sapien
gcaaatacagtctgcgaccgcgaga

SEQ ID NO: 1696619 - DNA, 25 bp, Homo sapien
cccctgggggtagatatcggacgtg

SEQ ID NO: 1696620 - DNA, 25 bp, Homo sapien
tccgcgcgctcgctgtcaatagtaa

SEQ ID NO: 1696621 - DNA, 25 bp, Homo sapien
gatatcggacgtggggaggctggag

SEQ ID NO: 1696622 - DNA, 25 bp, Homo sapien
ctgtcaatagtaacggtcccctggg

SEQ ID NO: 1696623 - DNA, 25 bp, Homo sapien
tacaagctctatggtcggccgactg

SEQ ID NO: 1696624 - DNA, 25 bp, Homo sapien
taacttctaaatctgcggaggcaca

SEQ ID NO: 1696625 - DNA, 25 bp, Homo sapien
gatgaaagctgtactcggaccaggc

SEQ ID NO: 1696626 - DNA, 25 bp, Homo sapien
tgcaacggataaacagactcgaagg

SEQ ID NO: 1696627 - DNA, 25 bp, Homo sapien
tccggcccagagcccgaccgtactc

SEQ ID NO: 1696628 - DNA, 25 bp, Homo sapien
ccggcccagagcccgaccgtactca

SEQ ID NO: 1696629 - DNA, 25 bp, Homo sapien
cggcccagagcccgaccgtactcac

SEQ ID NO: 1696630 - DNA, 25 bp, Homo sapien
agcaactaaggcgtcagaatcggtc

SEQ ID NO: 1696631 - DNA, 25 bp, Homo sapien
gtccgcggcgccgaacaccgcacag

SEQ ID NO: 1696632 - DNA, 25 bp, Homo sapien
cagtcctcagctgcggcctggacca

SEQ ID NO: 1696633 - DNA, 25 bp, Homo sapien
taaggcgtcagaatcggtccgcggc

SEQ ID NO: 1696634 - DNA, 25 bp, Homo sapien
ttccctcgcaaaaagttcaagggca

SEQ ID NO: 1696635 - DNA, 25 bp, Homo sapien
caaaaagttcaagggcaattcgtgg

SEQ ID NO: 1696636 - DNA, 25 bp, Homo sapien
cctcgcaaaaagttcaagggcaatt

SEQ ID NO: 1696637 - DNA, 25 bp, Homo sapien
tcgcaaaaagttcaagggcaattcg

SEQ ID NO: 1696638 - DNA, 25 bp, Homo sapien
gaacacctagtcaagtttacatgag

SEQ ID NO: 1696639 - DNA, 25 bp, Homo sapien
cctctcagttttgtgcgtacatgtc

SEQ ID NO: 1696640 - DNA, 25 bp, Homo sapien
tgtaatcctgtgagatgctgaaggc

SEQ ID NO: 1696641 - DNA, 25 bp, Homo sapien
tgagcactttgtggatacagactga

SEQ ID NO: 1696642 - DNA, 25 bp, Homo sapien
gcaatcccactacttaccagtacag

SEQ ID NO: 1696643 - DNA, 25 bp, Homo sapien
tgcaatcccactacttaccagtaca

SEQ ID NO: 1696644 - DNA, 25 bp, Homo sapien
catacggatcatcaaggcagtgctt

SEQ ID NO: 1696645 - DNA, 25 bp, Homo sapien
actcaatttcggcagagttcacaga

SEQ ID NO: 1696646 - DNA, 25 bp, Homo sapien
tcaagttagacaaggccgggaacaa

SEQ ID NO: 1696647 - DNA, 25 bp, Homo sapien
tacagatcagaagaaccaaggagca

SEQ ID NO: 1696648 - DNA, 25 bp, Homo sapien
gtagcataccctaaaccagttgtca

SEQ ID NO: 1696649 - DNA, 25 bp, Homo sapien
ccagttgtcatgagatgctaacatc

SEQ ID NO: 1696650 - DNA, 25 bp, Homo sapien
taaaaccagagacctatagtccaca

SEQ ID NO: 1696651 - DNA, 25 bp, Homo sapien
gtggccatggccttattgcaaatgt

SEQ ID NO: 1696652 - DNA, 25 bp, Homo sapien
aatttgaggtatggatggaggttca

SEQ ID NO: 1696653 - DNA, 25 bp, Homo sapien
ggattctcctttatctacttaactg

SEQ ID NO: 1696654 - DNA, 25 bp, Homo sapien
caccaatacagaatagtcttgattg

SEQ ID NO: 1696655 - DNA, 25 bp, Homo sapien
taggtgggtcttgcaactttgttgt

SEQ ID NO: 1696656 - DNA, 25 bp, Homo sapien
aggttaacttcctctactatggacg

SEQ ID NO: 1696657 - DNA, 25 bp, Homo sapien
tatggacgtgacctccaactcagaa

SEQ ID NO: 1696658 - DNA, 25 bp, Homo sapien
ctatggagcactccaaggaacctgg

SEQ ID NO: 1696659 - DNA, 25 bp, Homo sapien
taatctggttctacacgcttcagct

SEQ ID NO: 1696660 - DNA, 25 bp, Homo sapien
gaaaagctcaggaagttcgtttcca

SEQ ID NO: 1696661 - DNA, 25 bp, Homo sapien
aaagctcaggaagttcgtttccact

SEQ ID NO: 1696662 - DNA, 25 bp, Homo sapien
ctgaaggctttcttgattcttcagc

SEQ ID NO: 1696663 - DNA, 25 bp, Homo sapien
aaggctttcttgattcttcagccat

SEQ ID NO: 1696664 - DNA, 25 bp, Homo sapien
gaaggctttcttgattcttcagcca

SEQ ID NO: 1696665 - DNA, 25 bp, Homo sapien
tgaaggctttcttgattcttcagcc

SEQ ID NO: 1696666 - DNA, 25 bp, Homo sapien
tgtctcctggtagcgtaactgcctg

SEQ ID NO: 1696667 - DNA, 25 bp, Homo sapien
cgcaggcggaacacttcttggccaa

SEQ ID NO: 1696668 - DNA, 25 bp, Homo sapien
caaagggcccgtagttggatcagag

SEQ ID NO: 1696669 - DNA, 25 bp, Homo sapien
gagggttactttcatgcagactaga

SEQ ID NO: 1696670 - DNA, 25 bp, Homo sapien
ggactcccacagtcatagcacgcat

SEQ ID NO: 1696671 - DNA, 25 bp, Homo sapien
tgctctcccactgtgatgcctatgt

SEQ ID NO: 1696672 - DNA, 25 bp, Homo sapien
tatgtccctctaccaagcttccagg

SEQ ID NO: 1696673 - DNA, 25 bp, Homo sapien
gactcccacagtcatagcacgcata

SEQ ID NO: 1696674 - DNA, 25 bp, Homo sapien
ctatgtccatgtacgcgagctgaga

SEQ ID NO: 1696675 - DNA, 25 bp, Homo sapien
tatgtccatgtacgcgagctgagac

SEQ ID NO: 1696676 - DNA, 25 bp, Homo sapien
atgttgggttgcctcagattggagc

SEQ ID NO: 1696677 - DNA, 25 bp, Homo sapien
cagatgctgaatgtactacctcctc

SEQ ID NO: 1696678 - DNA, 25 bp, Homo sapien
cttggggcactggagatttatgttg

SEQ ID NO: 1696679 - DNA, 25 bp, Homo sapien
gatgctgaatgtactacctcctccc

SEQ ID NO: 1696680 - DNA, 25 bp, Homo sapien
tatcatcaatgaaatctggctactc

SEQ ID NO: 1696681 - DNA, 25 bp, Homo sapien
atcatcaatgaaatctggctactca

SEQ ID NO: 1696682 - DNA, 25 bp, Homo sapien
tcatcaatgaaatctggctactcac

SEQ ID NO: 1696683 - DNA, 25 bp, Homo sapien
tttctgggaacgagtaggactctgg

SEQ ID NO: 1696684 - DNA, 25 bp, Homo sapien
tctgggaacgagtaggactctggga

SEQ ID NO: 1696685 - DNA, 25 bp, Homo sapien
cctttctgggaacgagtaggactct

SEQ ID NO: 1696686 - DNA, 25 bp, Homo sapien
ctttctgggaacgagtaggactctg

SEQ ID NO: 1696687 - DNA, 25 bp, Homo sapien
tgaaacaaaacaagatccccatttg

SEQ ID NO: 1696688 - DNA, 25 bp, Homo sapien
ctgaaacaaaacaagatccccattt

SEQ ID NO: 1696689 - DNA, 25 bp, Homo sapien
gaagccactcctctcgaataaggga

SEQ ID NO: 1696690 - DNA, 25 bp, Homo sapien
cactcctctcgaataagggacacag

SEQ ID NO: 1696691 - DNA, 25 bp, Homo sapien
cctctcgaataagggacacagccat

SEQ ID NO: 1696692 - DNA, 25 bp, Homo sapien
gccactcctctcgaataagggacac

SEQ ID NO: 1696693 - DNA, 25 bp, Homo sapien
catttatgtcgtctctcttgtgtgg

SEQ ID NO: 1696694 - DNA, 25 bp, Homo sapien
aagacccctgataacatccccgttg

SEQ ID NO: 1696695 - DNA, 25 bp, Homo sapien
gaaggtctcgggcttcttcatgctc

SEQ ID NO: 1696696 - DNA, 25 bp, Homo sapien
tgtgtgggatttccccgctgcctct

SEQ ID NO: 1696697 - DNA, 25 bp, Homo sapien
tcaataaggcctgacttctgactga

SEQ ID NO: 1696698 - DNA, 25 bp, Homo sapien
tggtgcagaataaggcccgcactct

SEQ ID NO: 1696699 - DNA, 25 bp, Homo sapien
gaagggctgacctgtaactgaaggc

SEQ ID NO: 1696700 - DNA, 25 bp, Homo sapien
taagatgtgagctccgcctgaaggt

SEQ ID NO: 1696701 - DNA, 25 bp, Homo sapien
tgaattctcaggtgttgaatgagac

SEQ ID NO: 1696702 - DNA, 25 bp, Homo sapien
cctgtgtgaattctcaggtgttgaa

SEQ ID NO: 1696703 - DNA, 25 bp, Homo sapien
actcattacattggtagggcttctc

SEQ ID NO: 1696704 - DNA, 25 bp, Homo sapien
tgtgaattctcaggtgttgaatgag

SEQ ID NO: 1696705 - DNA, 25 bp, Homo sapien
gcttatggattcagatttttcacca

SEQ ID NO: 1696706 - DNA, 25 bp, Homo sapien
atggattcagatttttcaccactgt

SEQ ID NO: 1696707 - DNA, 25 bp, Homo sapien
aacgcttatggattcagatttttca

SEQ ID NO: 1696708 - DNA, 25 bp, Homo sapien
ctaaacgcttatggattcagatttt

SEQ ID NO: 1696709 - DNA, 25 bp, Homo sapien
gcacaggaactaggagtagccagcc

SEQ ID NO: 1696710 - DNA, 25 bp, Homo sapien
taatcaaccttcaccaaggcactgg

SEQ ID NO: 1696711 - DNA, 25 bp, Homo sapien
tacattaggtcatcaggagctccat

SEQ ID NO: 1696712 - DNA, 25 bp, Homo sapien
tcagattaggaatacaagggcacct

SEQ ID NO: 1696713 - DNA, 25 bp, Homo sapien
gaccatctagtcagggagtttgcac

SEQ ID NO: 1696714 - DNA, 25 bp, Homo sapien
tacagatggagtgcaccagagttca

SEQ ID NO: 1696715 - DNA, 25 bp, Homo sapien
gcactgcaccttgctccatggagaa

SEQ ID NO: 1696716 - DNA, 25 bp, Homo sapien
caatgtgttgctctggtctatggcc

SEQ ID NO: 1696717 - DNA, 25 bp, Homo sapien
catactggctgggtgatattggtca

SEQ ID NO: 1696718 - DNA, 25 bp, Homo sapien
agaattacagtaacctgggcctcag

SEQ ID NO: 1696719 - DNA, 25 bp, Homo sapien
gatgaacatgagctgggaccaaaga

SEQ ID NO: 1696720 - DNA, 25 bp, Homo sapien
aaggatcccacaagccaaaggaggg

SEQ ID NO: 1696721 - DNA, 25 bp, Homo sapien
cagcgtttctctgcctgtgagcagc

SEQ ID NO: 1696722 - DNA, 25 bp, Homo sapien
ctgtgagcagcaaccagctccgagg

SEQ ID NO: 1696723 - DNA, 25 bp, Homo sapien
gtgagcagcaaccagctccgaggcc

SEQ ID NO: 1696724 - DNA, 25 bp, Homo sapien
gcctgtgagcagcaaccagctccga

SEQ ID NO: 1696725 - DNA, 25 bp, Homo sapien
cagaatccttggaaccagcgaaacc

SEQ ID NO: 1696726 - DNA, 25 bp, Homo sapien
agatgcagtcatgcagcttttcctg

SEQ ID NO: 1696727 - DNA, 25 bp, Homo sapien
taattgacgagttttcaggaacact

SEQ ID NO: 1696728 - DNA, 25 bp, Homo sapien
gatgatcaggaactggcctcagcca

SEQ ID NO: 1696729 - DNA, 25 bp, Homo sapien
ctcataacaactctagacaggtgct

SEQ ID NO: 1696730 - DNA, 25 bp, Homo sapien
tgacttggccaaaatcacaggtagt

SEQ ID NO: 1696731 - DNA, 25 bp, Homo sapien
gccaaaatcacaggtagtgtggctt

SEQ ID NO: 1696732 - DNA, 25 bp, Homo sapien
tagcaggtactgttcatgtaatcct

SEQ ID NO: 1696733 - DNA, 25 bp, Homo sapien
tggatcctgcgcctgggcatctggt

SEQ ID NO: 1696734 - DNA, 25 bp, Homo sapien
gctgtcggcctagaaagcttgactt

SEQ ID NO: 1696735 - DNA, 25 bp, Homo sapien
gcttgactttgacttccgtggatcc

SEQ ID NO: 1696736 - DNA, 25 bp, Homo sapien
ctatctgaccaagcgactgaggaca

SEQ ID NO: 1696737 - DNA, 25 bp, Homo sapien
tggtgtgggtccatccttagaaaaa

SEQ ID NO: 1696738 - DNA, 25 bp, Homo sapien
taactggtcctcatactgagagact

SEQ ID NO: 1696739 - DNA, 25 bp, Homo sapien
cattatatatgctagggaccttctg

SEQ ID NO: 1696740 - DNA, 25 bp, Homo sapien
caggagtttgtaaagtatccccatt

SEQ ID NO: 1696741 - DNA, 25 bp, Homo sapien
agagtgaatcctctggtgattaata

SEQ ID NO: 1696742 - DNA, 25 bp, Homo sapien
acagtgagggttgagcgcacgctaa

SEQ ID NO: 1696743 - DNA, 25 bp, Homo sapien
tcaggtgtgcccttacactgaaggc

SEQ ID NO: 1696744 - DNA, 25 bp, Homo sapien
taagcgttgagatctggctgaatgc

SEQ ID NO: 1696745 - DNA, 25 bp, Homo sapien
gattttagagccttagaaacaatgc

SEQ ID NO: 1696746 - DNA, 25 bp, Homo sapien
ggtatcttccgatgtaacaaaagcc

SEQ ID NO: 1696747 - DNA, 25 bp, Homo sapien
caagggtgaagtgtcaattaaggca

SEQ ID NO: 1696748 - DNA, 25 bp, Homo sapien
aacaatgctgatggagttacttttg

SEQ ID NO: 1696749 - DNA, 25 bp, Homo sapien
tcaggactattactcaggagggaga

SEQ ID NO: 1696750 - DNA, 25 bp, Homo sapien
aatgtgaaccaccaaagctatctgc

SEQ ID NO: 1696751 - DNA, 25 bp, Homo sapien
tcgatttggcacatcttgaacctaa

SEQ ID NO: 1696752 - DNA, 25 bp, Homo sapien
tccctttgcaacacagagcctcttt

SEQ ID NO: 1696753 - DNA, 25 bp, Homo sapien
ttctctaatgtgccccattccctga

SEQ ID NO: 1696754 - DNA, 25 bp, Homo sapien
cttctctaatgtgccccattccctg

SEQ ID NO: 1696755 - DNA, 25 bp, Homo sapien
ttcctcaacgtgagctccagaacca

SEQ ID NO: 1696756 - DNA, 25 bp, Homo sapien
tcctcaacgtgagctccagaaccat

SEQ ID NO: 1696757 - DNA, 25 bp, Homo sapien
caaaccaagatagctggggttagaa

SEQ ID NO: 1696758 - DNA, 25 bp, Homo sapien
gaagaagcagtgcaaaagaattcac

SEQ ID NO: 1696759 - DNA, 25 bp, Homo sapien
cacagaaatggggtgacaggtcaaa

SEQ ID NO: 1696760 - DNA, 25 bp, Homo sapien
caaatcaaggaaaacctagtctcct

SEQ ID NO: 1696761 - DNA, 25 bp, Homo sapien
gtgggatatggcgtcactttcagtg

SEQ ID NO: 1696762 - DNA, 25 bp, Homo sapien
agtgctgatcccaaaagggtgtcct

SEQ ID NO: 1696763 - DNA, 25 bp, Homo sapien
ctggtttggagtgggatatggcgtc

SEQ ID NO: 1696764 - DNA, 25 bp, Homo sapien
tatagttgtgctggtttggagtggg

SEQ ID NO: 1696765 - DNA, 25 bp, Homo sapien
tccttcaaagtcttcagaataccac

SEQ ID NO: 1696766 - DNA, 25 bp, Homo sapien
tcctccttcaaagtcttcagaatac

SEQ ID NO: 1696767 - DNA, 25 bp, Homo sapien
tcaaagtcttcagaataccactcac

SEQ ID NO: 1696768 - DNA, 25 bp, Homo sapien
agtcttcagaataccactcactgct

SEQ ID NO: 1696769 - DNA, 25 bp, Homo sapien
tgcgagcctcgagattagggtgctt

SEQ ID NO: 1696770 - DNA, 25 bp, Homo sapien
tacacatatcctgatcgcttaatgg

SEQ ID NO: 1696771 - DNA, 25 bp, Homo sapien
ccctgtcaccaaatagtctgcgagc

SEQ ID NO: 1696772 - DNA, 25 bp, Homo sapien
cactaataccttactttgagctcaa

SEQ ID NO: 1696773 - DNA, 25 bp, Homo sapien
aagtgctaggagtggaaaagtacta

SEQ ID NO: 1696774 - DNA, 25 bp, Homo sapien
ccttcatgaggtgtacggcctttgt

SEQ ID NO: 1696775 - DNA, 25 bp, Homo sapien
taaatactgaaagtgaagacaagtg

SEQ ID NO: 1696776 - DNA, 25 bp, Homo sapien
taaagagacctctaaacagaggtgc

SEQ ID NO: 1696777 - DNA, 25 bp, Homo sapien
caggtgtcgtggtggtcagttaaaa

SEQ ID NO: 1696778 - DNA, 25 bp, Homo sapien
gcaaagaaccaggaacagccaagac

SEQ ID NO: 1696779 - DNA, 25 bp, Homo sapien
cagtagcattagcaagaggctcagc

SEQ ID NO: 1696780 - DNA, 25 bp, Homo sapien
cagtcaagccttagatcagcagtag

SEQ ID NO: 1696781 - DNA, 25 bp, Homo sapien
aaaacacgcgtaactcatcatggtg

SEQ ID NO: 1696782 - DNA, 25 bp, Homo sapien
taactcatcatggtgttacaaggaa

SEQ ID NO: 1696783 - DNA, 25 bp, Homo sapien
cacgcgtaactcatcatggtgttac

SEQ ID NO: 1696784 - DNA, 25 bp, Homo sapien
catcatggtgttacaaggaatcatg

SEQ ID NO: 1696785 - DNA, 25 bp, Homo sapien
cactgttagcttccctatggtcata

SEQ ID NO: 1696786 - DNA, 25 bp, Homo sapien
cataaagcttctatctagtgtggac

SEQ ID NO: 1696787 - DNA, 25 bp, Homo sapien
tccccatgcgggaatcttgatgccc

SEQ ID NO: 1696788 - DNA, 25 bp, Homo sapien
taagatctgaactttgactgaaggt

SEQ ID NO: 1696789 - DNA, 25 bp, Homo sapien
gtgatctcagtcttcataccatcat

SEQ ID NO: 1696790 - DNA, 25 bp, Homo sapien
gacacagtttcattacatccatcaa

SEQ ID NO: 1696791 - DNA, 25 bp, Homo sapien
gtctcttctatgtttggcatgctga

SEQ ID NO: 1696792 - DNA, 25 bp, Homo sapien
catcgtgcatttccaaattgccatt

SEQ ID NO: 1696793 - DNA, 25 bp, Homo sapien
catcaaactcctccctatgtggttc

SEQ ID NO: 1696794 - DNA, 25 bp, Homo sapien
taagaggtgaacactgcctgaaggc

SEQ ID NO: 1696795 - DNA, 25 bp, Homo sapien
aagttccgcatgtgtgatgaaggcc

SEQ ID NO: 1696796 - DNA, 25 bp, Homo sapien
cattctgtacatgggtatggctcct

SEQ ID NO: 1696797 - DNA, 25 bp, Homo sapien
ttaaggccggcatactgagtgaagg

SEQ ID NO: 1696798 - DNA, 25 bp, Homo sapien
tccagctaaaggctcatccacatac

SEQ ID NO: 1696799 - DNA, 25 bp, Homo sapien
gctccagctaaaggctcatccacat

SEQ ID NO: 1696800 - DNA, 25 bp, Homo sapien
agctccagctaaaggctcatccaca

SEQ ID NO: 1696801 - DNA, 25 bp, Homo sapien
gagctccagctaaaggctcatccac

SEQ ID NO: 1696802 - DNA, 25 bp, Homo sapien
gcttcctcaggccagttgacagagt

SEQ ID NO: 1696803 - DNA, 25 bp, Homo sapien
tctgagatggcaactaagacctgtc

SEQ ID NO: 1696804 - DNA, 25 bp, Homo sapien
gccacacacttgacactgatagagc

SEQ ID NO: 1696805 - DNA, 25 bp, Homo sapien
aatcccctggtgttcgataagatcc

SEQ ID NO: 1696806 - DNA, 25 bp, Homo sapien
gagcttccactgcaggctttgcacc

SEQ ID NO: 1696807 - DNA, 25 bp, Homo sapien
ctgagcttccactgcaggctttgca

SEQ ID NO: 1696808 - DNA, 25 bp, Homo sapien
gcttccactgcaggctttgcaccac

SEQ ID NO: 1696809 - DNA, 25 bp, Homo sapien
ccactgcaggctttgcaccactcac

SEQ ID NO: 1696810 - DNA, 25 bp, Homo sapien
gtgacctcagcagtgtcttggtcgg

SEQ ID NO: 1696811 - DNA, 25 bp, Homo sapien
tcttggtcgggagatgttagaggag

SEQ ID NO: 1696812 - DNA, 25 bp, Homo sapien
agccatcttggacaccgggagttgt

SEQ ID NO: 1696813 - DNA, 25 bp, Homo sapien
ttggacaccgggagttgtgacctca

SEQ ID NO: 1696814 - DNA, 25 bp, Homo sapien
cacaatggattagcagtccatcgcc

SEQ ID NO: 1696815 - DNA, 25 bp, Homo sapien
agcacaatggattagcagtccatcg

SEQ ID NO: 1696816 - DNA, 25 bp, Homo sapien
gcacaatggattagcagtccatcgc

SEQ ID NO: 1696817 - DNA, 25 bp, Homo sapien
atggattagcagtccatcgccttaa

SEQ ID NO: 1696818 - DNA, 25 bp, Homo sapien
gaactgtgattaagggatcctggac

SEQ ID NO: 1696819 - DNA, 25 bp, Homo sapien
tgaagaagttcaggttttcccctca

SEQ ID NO: 1696820 - DNA, 25 bp, Homo sapien
tttcccctcagatagattgtagtgc

SEQ ID NO: 1696821 - DNA, 25 bp, Homo sapien
gtttcagagcatatcaaacacctca

SEQ ID NO: 1696822 - DNA, 25 bp, Homo sapien
gggaacaaagatgccgacctctcct

SEQ ID NO: 1696823 - DNA, 25 bp, Homo sapien
agaagcgcggcacgaacaatggccg

SEQ ID NO: 1696824 - DNA, 25 bp, Homo sapien
cccggcgttgctagaagcgcggcac

SEQ ID NO: 1696825 - DNA, 25 bp, Homo sapien
aacaatggccgggcagggaacaaag

SEQ ID NO: 1696826 - DNA, 25 bp, Homo sapien
gacccggaacgcgcaaggagggaga

SEQ ID NO: 1696827 - DNA, 25 bp, Homo sapien
acccggaacgcgcaaggagggagag

SEQ ID NO: 1696828 - DNA, 25 bp, Homo sapien
gagacccggaacgcgcaaggaggga

SEQ ID NO: 1696829 - DNA, 25 bp, Homo sapien
agacccggaacgcgcaaggagggag

SEQ ID NO: 1696830 - DNA, 25 bp, Homo sapien
tcttgtacaatgtccccacagctgg

SEQ ID NO: 1696831 - DNA, 25 bp, Homo sapien
gggtatacaggttctccatcgtgaa

SEQ ID NO: 1696832 - DNA, 25 bp, Homo sapien
tcccagcggctgaggttcactttcc

SEQ ID NO: 1696833 - DNA, 25 bp, Homo sapien
ccatcgtgaaggctgccaaagtctt

SEQ ID NO: 1696834 - DNA, 25 bp, Homo sapien
ccatgaattagggactgcaccgatc

SEQ ID NO: 1696835 - DNA, 25 bp, Homo sapien
cataggccctaaagctcttctctga

SEQ ID NO: 1696836 - DNA, 25 bp, Homo sapien
gaggacaatcctaagaagccaaaga

SEQ ID NO: 1696837 - DNA, 25 bp, Homo sapien
tgcaccgatcactcagaaagtctga

SEQ ID NO: 1696838 - DNA, 25 bp, Homo sapien
gcttaaaaggtaccctccagctgga

SEQ ID NO: 1696839 - DNA, 25 bp, Homo sapien
cctccagctggagctatgcttcaag

SEQ ID NO: 1696840 - DNA, 25 bp, Homo sapien
cttgaccttgaacagcttaaaaggt

SEQ ID NO: 1696841 - DNA, 25 bp, Homo sapien
cagctggagctatgcttcaagacaa

SEQ ID NO: 1696842 - DNA, 25 bp, Homo sapien
ttcagtctggattcctgccattgaa

SEQ ID NO: 1696843 - DNA, 25 bp, Homo sapien
cttgccagtggattactgcgtttca

SEQ ID NO: 1696844 - DNA, 25 bp, Homo sapien
tcgggaacttgaacacccagggata

SEQ ID NO: 1696845 - DNA, 25 bp, Homo sapien
cactttcattgtcagaagttcttcc

SEQ ID NO: 1696846 - DNA, 25 bp, Homo sapien
catgttgtggttcatcgagctctct

SEQ ID NO: 1696847 - DNA, 25 bp, Homo sapien
tcgaaagtgccttcggaagatttcc

SEQ ID NO: 1696848 - DNA, 25 bp, Homo sapien
aagttcctggagtcgagtaagagcc

SEQ ID NO: 1696849 - DNA, 25 bp, Homo sapien
gtctcttggtagcacagctgtcgaa

SEQ ID NO: 1696850 - DNA, 25 bp, Homo sapien
ctggggacaaaaagacaagatttga

SEQ ID NO: 1696851 - DNA, 25 bp, Homo sapien
ggtgtctgctctgctagaggcacca

SEQ ID NO: 1696852 - DNA, 25 bp, Homo sapien
tctgagcagagtcacatgtgagctg

SEQ ID NO: 1696853 - DNA, 25 bp, Homo sapien
agaggcaccatctctttacagagga

SEQ ID NO: 1696854 - DNA, 25 bp, Homo sapien
tgtggctccttaggctgggactgaa

SEQ ID NO: 1696855 - DNA, 25 bp, Homo sapien
ccaggtgggattcgttcaacatcaa

SEQ ID NO: 1696856 - DNA, 25 bp, Homo sapien
ttgtttttgcttgaccaggtgggat

SEQ ID NO: 1696857 - DNA, 25 bp, Homo sapien
cattactgctatctggtaaggagtc

SEQ ID NO: 1696858 - DNA, 25 bp, Homo sapien
tcaacatcaaataaatgctgtccct

SEQ ID NO: 1696859 - DNA, 25 bp, Homo sapien
ctgcacgcagggagaagggtcaaag

SEQ ID NO: 1696860 - DNA, 25 bp, Homo sapien
cacactaggctctcagaagaactga

SEQ ID NO: 1696861 - DNA, 25 bp, Homo sapien
gagcacactaggctctcagaagaac

SEQ ID NO: 1696862 - DNA, 25 bp, Homo sapien
cagggagaagggtcaaagatgagca

SEQ ID NO: 1696863 - DNA, 25 bp, Homo sapien
ccagaaagcttccagggtggtactc

SEQ ID NO: 1696864 - DNA, 25 bp, Homo sapien
cagaaagcttccagggtggtactca

SEQ ID NO: 1696865 - DNA, 25 bp, Homo sapien
tccagggtggtactcagggagaagt

SEQ ID NO: 1696866 - DNA, 25 bp, Homo sapien
tctgaggtacatactggttacggac

SEQ ID NO: 1696867 - DNA, 25 bp, Homo sapien
taaggcagcgcaagtagactaaacc

SEQ ID NO: 1696868 - DNA, 25 bp, Homo sapien
gctcagtactatatccacaagggtg

SEQ ID NO: 1696869 - DNA, 25 bp, Homo sapien
cagcttccatgaggcgatgccagga

SEQ ID NO: 1696870 - DNA, 25 bp, Homo sapien
tactcagcagggttctagatgcagt

SEQ ID NO: 1696871 - DNA, 25 bp, Homo sapien
aaatttgtaacacatacctgcgctg

SEQ ID NO: 1696872 - DNA, 25 bp, Homo sapien
cagatgccctctggatattctccta

SEQ ID NO: 1696873 - DNA, 25 bp, Homo sapien
gaagctataagaaggtctgcacaga

SEQ ID NO: 1696874 - DNA, 25 bp, Homo sapien
gatcacaacaggtttggaaaataaa

SEQ ID NO: 1696875 - DNA, 25 bp, Homo sapien
gggatcacaacaggtttggaaaata

SEQ ID NO: 1696876 - DNA, 25 bp, Homo sapien
ctgggggatcacaacaggtttggaa

SEQ ID NO: 1696877 - DNA, 25 bp, Homo sapien
tgggggatcacaacaggtttggaaa

SEQ ID NO: 1696878 - DNA, 25 bp, Homo sapien
ctcttaggactcctctgttgttagg

SEQ ID NO: 1696879 - DNA, 25 bp, Homo sapien
cctctgttgttaggccatgtttctc

SEQ ID NO: 1696880 - DNA, 25 bp, Homo sapien
aacagaagggctagtgtggtaacac

SEQ ID NO: 1696881 - DNA, 25 bp, Homo sapien
aaaggaagtgggctagaaacagaag

SEQ ID NO: 1696882 - DNA, 25 bp, Homo sapien
ggaggaacgtttgccctctttggca

SEQ ID NO: 1696883 - DNA, 25 bp, Homo sapien
ccatccccatgtagacttggcctga

SEQ ID NO: 1696884 - DNA, 25 bp, Homo sapien
ggctaggtaaatgtcacttgttccc

SEQ ID NO: 1696885 - DNA, 25 bp, Homo sapien
aaggctaggtaaatgtcacttgttc

SEQ ID NO: 1696886 - DNA, 25 bp, Homo sapien
aaaaaggctaggtaaatgtcacttg

SEQ ID NO: 1696887 - DNA, 25 bp, Homo sapien
agaaaaaggctaggtaaatgtcact

SEQ ID NO: 1696888 - DNA, 25 bp, Homo sapien
taggacagtctttccttagcaccaa

SEQ ID NO: 1696889 - DNA, 25 bp, Homo sapien
cctgctgtgatacctcccaggtctg

SEQ ID NO: 1696890 - DNA, 25 bp, Homo sapien
tctatcctatccttatgttcaccaa

SEQ ID NO: 1696891 - DNA, 25 bp, Homo sapien
catgtggttccactatcttaggaca

SEQ ID NO: 1696892 - DNA, 25 bp, Homo sapien
taagacccgcactctgactgaagac

SEQ ID NO: 1696893 - DNA, 25 bp, Homo sapien
tggattcctcggtgattaaaaagac

SEQ ID NO: 1696894 - DNA, 25 bp, Homo sapien
tccttgcagtggtaccgtttctgta

SEQ ID NO: 1696895 - DNA, 25 bp, Homo sapien
actgcactggctgcactgatacggc

SEQ ID NO: 1696896 - DNA, 25 bp, Homo sapien
atgcactggtgaggtcgctcccctg

SEQ ID NO: 1696897 - DNA, 25 bp, Homo sapien
tgttcaatgagaaatgaacgccgac

SEQ ID NO: 1696898 - DNA, 25 bp, Homo sapien
tgaggttgcagtgtcgattaaagct

SEQ ID NO: 1696899 - DNA, 25 bp, Homo sapien
cattcaatgcactggtgaggtcgct

SEQ ID NO: 1696900 - DNA, 25 bp, Homo sapien
ttataaataagagggacacagctag

SEQ ID NO: 1696901 - DNA, 25 bp, Homo sapien
gatctggaaaacttgctcatagcca

SEQ ID NO: 1696902 - DNA, 25 bp, Homo sapien
gaagggtttagcagccatctcaaaa

SEQ ID NO: 1696903 - DNA, 25 bp, Homo sapien
cccacacaacttgggtggtgatctg

SEQ ID NO: 1696904 - DNA, 25 bp, Homo sapien
caacgctgggcggttgctacagacc

SEQ ID NO: 1696905 - DNA, 25 bp, Homo sapien
ctgggcggttgctacagacccagag

SEQ ID NO: 1696906 - DNA, 25 bp, Homo sapien
acgctgggcggttgctacagaccca

SEQ ID NO: 1696907 - DNA, 25 bp, Homo sapien
ctcaacgctgggcggttgctacaga

SEQ ID NO: 1696908 - DNA, 25 bp, Homo sapien
actatacgaggtcgaccaggaggac

SEQ ID NO: 1696909 - DNA, 25 bp, Homo sapien
tagttgcggaatcttgggagccgcc

SEQ ID NO: 1696910 - DNA, 25 bp, Homo sapien
tctgcatagcagtgacgatggtagc

SEQ ID NO: 1696911 - DNA, 25 bp, Homo sapien
gatgtcctcggaatagctggaccgg

SEQ ID NO: 1696912 - DNA, 25 bp, Homo sapien
ttcatcctcaactggggtatgttcg

SEQ ID NO: 1696913 - DNA, 25 bp, Homo sapien
tcagaatctagctgagggaactttg

SEQ ID NO: 1696914 - DNA, 25 bp, Homo sapien
gggtatgttcgtcagaatctagctg

SEQ ID NO: 1696915 - DNA, 25 bp, Homo sapien
tcagcctcctctgccgatggctctc

SEQ ID NO: 1696916 - DNA, 25 bp, Homo sapien
cttgtttcttgaacgactggtcttc

SEQ ID NO: 1696917 - DNA, 25 bp, Homo sapien
tcctatgttcttccgagttggaatc

SEQ ID NO: 1696918 - DNA, 25 bp, Homo sapien
ggaatctgaactgctgcttttctga

SEQ ID NO: 1696919 - DNA, 25 bp, Homo sapien
tgctttcttttagacgacttattct

SEQ ID NO: 1696920 - DNA, 25 bp, Homo sapien
agagtcagaatttgtgtcagactct

SEQ ID NO: 1696921 - DNA, 25 bp, Homo sapien
gagtcagaatttgtgtcagactctg

SEQ ID NO: 1696922 - DNA, 25 bp, Homo sapien
tctgagtctttacagcttgagtcac

SEQ ID NO: 1696923 - DNA, 25 bp, Homo sapien
cttctgagtctttacagcttgagtc

SEQ ID NO: 1696924 - DNA, 25 bp, Homo sapien
ctgagtctttacagcttgagtcact

SEQ ID NO: 1696925 - DNA, 25 bp, Homo sapien
cctcttctgagtctttacagcttga

SEQ ID NO: 1696926 - DNA, 25 bp, Homo sapien
tattaaatccatagtatctgccaca

SEQ ID NO: 1696927 - DNA, 25 bp, Homo sapien
gctgcaccttcaccgggaagcaaag

SEQ ID NO: 1696928 - DNA, 25 bp, Homo sapien
gagcattcaaaagaaccgatctctt

SEQ ID NO: 1696929 - DNA, 25 bp, Homo sapien
ggaagcaaagcatggccatacttca

SEQ ID NO: 1696930 - DNA, 25 bp, Homo sapien
tttgtgcaccatctctcggaaactg

SEQ ID NO: 1696931 - DNA, 25 bp, Homo sapien
catctctcggaaactggctaaaatc

SEQ ID NO: 1696932 - DNA, 25 bp, Homo sapien
tgtctttttgtgcaccatctctcgg

SEQ ID NO: 1696933 - DNA, 25 bp, Homo sapien
caccatctctcggaaactggctaaa

SEQ ID NO: 1696934 - DNA, 25 bp, Homo sapien
taactctcctcctataatggttgaa

SEQ ID NO: 1696935 - DNA, 25 bp, Homo sapien
ttcctgagggacttactaatatggt

SEQ ID NO: 1696936 - DNA, 25 bp, Homo sapien
taatatggtaagtacagtagcactg

SEQ ID NO: 1696937 - DNA, 25 bp, Homo sapien
tactcttgtatatgcacagaatgta

SEQ ID NO: 1696938 - DNA, 25 bp, Homo sapien
atcacattctgtgggaacaagagcc

SEQ ID NO: 1696939 - DNA, 25 bp, Homo sapien
gcactggcattaggctggttcccca

SEQ ID NO: 1696940 - DNA, 25 bp, Homo sapien
gcctcatcgtgggaacaccttacca

SEQ ID NO: 1696941 - DNA, 25 bp, Homo sapien
taggtggccctaatctactcaagca

SEQ ID NO: 1696942 - DNA, 25 bp, Homo sapien
caacaacgctatagaagagtggaca

SEQ ID NO: 1696943 - DNA, 25 bp, Homo sapien
attctatgatggcaaggagcaagtc

SEQ ID NO: 1696944 - DNA, 25 bp, Homo sapien
gaaggtggtgttgcaatatctacta

SEQ ID NO: 1696945 - DNA, 25 bp, Homo sapien
agtggacaaaggttatcagaggagc

SEQ ID NO: 1696946 - DNA, 25 bp, Homo sapien
ctctgcttcttatacgtatacagca

SEQ ID NO: 1696947 - DNA, 25 bp, Homo sapien
agttcttatcttctggtaatgatgc

SEQ ID NO: 1696948 - DNA, 25 bp, Homo sapien
tacgtatacagcaaggtctcattca

SEQ ID NO: 1696949 - DNA, 25 bp, Homo sapien
tatcttctggtaatgatgcttcctg

SEQ ID NO: 1696950 - DNA, 25 bp, Homo sapien
aggacccaaacgctctgaaacagcg

SEQ ID NO: 1696951 - DNA, 25 bp, Homo sapien
gaacgctggaggaccttggctcgat

SEQ ID NO: 1696952 - DNA, 25 bp, Homo sapien
gaaacagcgtcttagctcatcgccg

SEQ ID NO: 1696953 - DNA, 25 bp, Homo sapien
tcagctctagctcttcggagcgctt

SEQ ID NO: 1696954 - DNA, 25 bp, Homo sapien
cctcggtcgagggaagattctctgc

SEQ ID NO: 1696955 - DNA, 25 bp, Homo sapien
tccacagcttcatcactctcatagg

SEQ ID NO: 1696956 - DNA, 25 bp, Homo sapien
aaggttgtactctgtttaccagatc

SEQ ID NO: 1696957 - DNA, 25 bp, Homo sapien
tatctacttaaaattgcgctgaatg

SEQ ID NO: 1696958 - DNA, 25 bp, Homo sapien
tggtctccccgttattcctcaaata

SEQ ID NO: 1696959 - DNA, 25 bp, Homo sapien
gagtctccaagtaaagaagctttaa

SEQ ID NO: 1696960 - DNA, 25 bp, Homo sapien
tcctgaccgcaaaagccacttaggt

SEQ ID NO: 1696961 - DNA, 25 bp, Homo sapien
tgttcactgctccaaccgctctggt

SEQ ID NO: 1696962 - DNA, 25 bp, Homo sapien
caaacagactggtctgagacaccaa

SEQ ID NO: 1696963 - DNA, 25 bp, Homo sapien
caaacagtgatcattctaaggagga

SEQ ID NO: 1696964 - DNA, 25 bp, Homo sapien
agctatttgagccagaaaactgacc

SEQ ID NO: 1696965 - DNA, 25 bp, Homo sapien
tattatgtccctgctatgcctgtta

SEQ ID NO: 1696966 - DNA, 25 bp, Homo sapien
tgggaaacatctacatgtaagaaac

SEQ ID NO: 1696967 - DNA, 25 bp, Homo sapien
aaacagaagtgagatggaactggaa

SEQ ID NO: 1696968 - DNA, 25 bp, Homo sapien
ttcagtgtagtagttagttatggct

SEQ ID NO: 1696969 - DNA, 25 bp, Homo sapien
gaaaacgttatatggagccggaatc

SEQ ID NO: 1696970 - DNA, 25 bp, Homo sapien
attttgtagccctcaaaataactga

SEQ ID NO: 1696971 - DNA, 25 bp, Homo sapien
gggtttatacatttcctattatcca

SEQ ID NO: 1696972 - DNA, 25 bp, Homo sapien
gctaacaagaacagtaacattttct

SEQ ID NO: 1696973 - DNA, 25 bp, Homo sapien
tatcttacagaataccatctaatgt

SEQ ID NO: 1696974 - DNA, 25 bp, Homo sapien
ctaaaattatagtaacaagagtgac

SEQ ID NO: 1696975 - DNA, 25 bp, Homo sapien
ttatagtaacaagagtgacagaaac

SEQ ID NO: 1696976 - DNA, 25 bp, Homo sapien
aacaagagtgacagaaacagtaata

SEQ ID NO: 1696977 - DNA, 25 bp, Homo sapien
caagagtgacagaaacagtaatagt

SEQ ID NO: 1696978 - DNA, 25 bp, Homo sapien
ctttggactgtatcttcagagacac

SEQ ID NO: 1696979 - DNA, 25 bp, Homo sapien
tttggactgtatcttcagagacact

SEQ ID NO: 1696980 - DNA, 25 bp, Homo sapien
ttggactgtatcttcagagacactc

SEQ ID NO: 1696981 - DNA, 25 bp, Homo sapien
tctttggactgtatcttcagagaca

SEQ ID NO: 1696982 - DNA, 25 bp, Homo sapien
ggggagccagggaatgggcactcac

SEQ ID NO: 1696983 - DNA, 25 bp, Homo sapien
tcagattcaggggagccagggaatg

SEQ ID NO: 1696984 - DNA, 25 bp, Homo sapien
ccttcttcagattcaggggagccag

SEQ ID NO: 1696985 - DNA, 25 bp, Homo sapien
ctccttcttcagattcaggggagcc

SEQ ID NO: 1696986 - DNA, 25 bp, Homo sapien
cccaagtagagtagtgatcctccct

SEQ ID NO: 1696987 - DNA, 25 bp, Homo sapien
aagtagagtagtgatcctccctcac

SEQ ID NO: 1696988 - DNA, 25 bp, Homo sapien
ctgttcccaagtagagtagtgatcc

SEQ ID NO: 1696989 - DNA, 25 bp, Homo sapien
ttcccaagtagagtagtgatcctcc

SEQ ID NO: 1696990 - DNA, 25 bp, Homo sapien
ctgtccaaggcctttactgtttcct

SEQ ID NO: 1696991 - DNA, 25 bp, Homo sapien
tgaattgtttgcacaatggctcctg

SEQ ID NO: 1696992 - DNA, 25 bp, Homo sapien
ggtcctgtggtctcttcataacgca

SEQ ID NO: 1696993 - DNA, 25 bp, Homo sapien
tcataacgcaactgcctgaattgtt

SEQ ID NO: 1696994 - DNA, 25 bp, Homo sapien
tgttgacagagctcccggagccgac

SEQ ID NO: 1696995 - DNA, 25 bp, Homo sapien
tccttaggcaggatgatcagaaact

SEQ ID NO: 1696996 - DNA, 25 bp, Homo sapien
agctgcaaatcctccagaacaacaa

SEQ ID NO: 1696997 - DNA, 25 bp, Homo sapien
agctccttaggcaggatgatcagaa

SEQ ID NO: 1696998 - DNA, 25 bp, Homo sapien
aaatcctccagaacaacaaccacgt

SEQ ID NO: 1696999 - DNA, 25 bp, Homo sapien
gctgttcagtaaaacacctaggtgt

SEQ ID NO: 1697000 - DNA, 25 bp, Homo sapien
tagtaattctccttccgctgatgag

SEQ ID NO: 1697001 - DNA, 25 bp, Homo sapien
agttttctccaagcaagggccaggt

SEQ ID NO: 1697002 - DNA, 25 bp, Homo sapien
tgtccacctgtctggccagagatct

SEQ ID NO: 1697003 - DNA, 25 bp, Homo sapien
attttttgtttctttggctggtctg

SEQ ID NO: 1697004 - DNA, 25 bp, Homo sapien
tttgtttctttggctggtctgggtc

SEQ ID NO: 1697005 - DNA, 25 bp, Homo sapien
caagtattttttgtttctttggctg

SEQ ID NO: 1697006 - DNA, 25 bp, Homo sapien
gctttgtaacttcacactcatgccg

SEQ ID NO: 1697007 - DNA, 25 bp, Homo sapien
taacttcacactcatgccgaacctg

SEQ ID NO: 1697008 - DNA, 25 bp, Homo sapien
tcatgccgaacctgctgttcctgta

SEQ ID NO: 1697009 - DNA, 25 bp, Homo sapien
ctgttcctgtactcctttcagaggg

SEQ ID NO: 1697010 - DNA, 25 bp, Homo sapien
ttcaaaggctaggagcatgactggg

SEQ ID NO: 1697011 - DNA, 25 bp, Homo sapien
taaaaaggaaagagtggatgacagc

SEQ ID NO: 1697012 - DNA, 25 bp, Homo sapien
caaaagagggttaatcagtgtgagc

SEQ ID NO: 1697013 - DNA, 25 bp, Homo sapien
tagctaaggataactcttcaaaggc

SEQ ID NO: 1697014 - DNA, 25 bp, Homo sapien
atatataccaccaattacttgtctt

SEQ ID NO: 1697015 - DNA, 25 bp, Homo sapien
tatataccaccaattacttgtcttt

SEQ ID NO: 1697016 - DNA, 25 bp, Homo sapien
aatatataccaccaattacttgtct

SEQ ID NO: 1697017 - DNA, 25 bp, Homo sapien
tgacacacatcagactcgcagagtt

SEQ ID NO: 1697018 - DNA, 25 bp, Homo sapien
tactcgcatgttcaatcaggtccaa

SEQ ID NO: 1697019 - DNA, 25 bp, Homo sapien
caagttagagccctcattatgagcc

SEQ ID NO: 1697020 - DNA, 25 bp, Homo sapien
cctgtaagactggaactctgacaca

SEQ ID NO: 1697021 - DNA, 25 bp, Homo sapien
tgagatgttccaaaaggcctgcatt

SEQ ID NO: 1697022 - DNA, 25 bp, Homo sapien
taaggtgagagctgcgcctaaaatt

SEQ ID NO: 1697023 - DNA, 25 bp, Homo sapien
gcttttggagtgactatggattctc

SEQ ID NO: 1697024 - DNA, 25 bp, Homo sapien
ttccacaatggatacatagataagg

SEQ ID NO: 1697025 - DNA, 25 bp, Homo sapien
tctctgatgttgaaaaagacctgac

SEQ ID NO: 1697026 - DNA, 25 bp, Homo sapien
tcaagccagtttgtctttgtggtga

SEQ ID NO: 1697027 - DNA, 25 bp, Homo sapien
tttgtggtgatatctctgatgttga

SEQ ID NO: 1697028 - DNA, 25 bp, Homo sapien
ttgtctttgtggtgatatctctgat

SEQ ID NO: 1697029 - DNA, 25 bp, Homo sapien
tattgtggtccaaagctgacttcaa

SEQ ID NO: 1697030 - DNA, 25 bp, Homo sapien
aatctgtgggcacttgattcactgc

SEQ ID NO: 1697031 - DNA, 25 bp, Homo sapien
tctgcttaagcctgcaaatctgtgg

SEQ ID NO: 1697032 - DNA, 25 bp, Homo sapien
cacagtgggctacggtgacttttcc

SEQ ID NO: 1697033 - DNA, 25 bp, Homo sapien
gaatagtgtctatgcagcagccact

SEQ ID NO: 1697034 - DNA, 25 bp, Homo sapien
ttacatgaagctaaccctgaaggca

SEQ ID NO: 1697035 - DNA, 25 bp, Homo sapien
tactggcactggagttatcaagtca

SEQ ID NO: 1697036 - DNA, 25 bp, Homo sapien
tgaagttcaccagcgaaaattatct

SEQ ID NO: 1697037 - DNA, 25 bp, Homo sapien
ggctgagggctgaagttgtcactct

SEQ ID NO: 1697038 - DNA, 25 bp, Homo sapien
caggatatatatggattgcagaggc

SEQ ID NO: 1697039 - DNA, 25 bp, Homo sapien
ctcccaagaccaggatatatatgga

SEQ ID NO: 1697040 - DNA, 25 bp, Homo sapien
gctattcacagtataaagatcatga

SEQ ID NO: 1697041 - DNA, 25 bp, Homo sapien
ggtgatcaaactgtaaatgacgtaa

SEQ ID NO: 1697042 - DNA, 25 bp, Homo sapien
caatggggacatataccatagaata

SEQ ID NO: 1697043 - DNA, 25 bp, Homo sapien
gaatactgcacagcttatatggaaa

SEQ ID NO: 1697044 - DNA, 25 bp, Homo sapien
taaatgacgtaaatgatgaacaatg

SEQ ID NO: 1697045 - DNA, 25 bp, Homo sapien
caggcactgaataccggcgtgtcta

SEQ ID NO: 1697046 - DNA, 25 bp, Homo sapien
caaagacgtagctgacctcgtgaaa

SEQ ID NO: 1697047 - DNA, 25 bp, Homo sapien
taatggaccaaaagttcaggaacgc

SEQ ID NO: 1697048 - DNA, 25 bp, Homo sapien
tcaggaacgcgcacaacaaagacgt

SEQ ID NO: 1697049 - DNA, 25 bp, Homo sapien
tcaagaaatactgatgggcttcttc

SEQ ID NO: 1697050 - DNA, 25 bp, Homo sapien
attcaagaaatactgatgggcttct

SEQ ID NO: 1697051 - DNA, 25 bp, Homo sapien
ttcttcacgaatgcacgtaaagcac

SEQ ID NO: 1697052 - DNA, 25 bp, Homo sapien
tgatgggcttcttcacgaatgcacg

SEQ ID NO: 1697053 - DNA, 25 bp, Homo sapien
aatgttctgttacggtattcctgcc

SEQ ID NO: 1697054 - DNA, 25 bp, Homo sapien
aactccccgcttctatggtcactgg

SEQ ID NO: 1697055 - DNA, 25 bp, Homo sapien
gaagactcaaatctttggcaccagc

SEQ ID NO: 1697056 - DNA, 25 bp, Homo sapien
caaagctgcgttcactcggtatttc

SEQ ID NO: 1697057 - DNA, 25 bp, Homo sapien
aggctaaagcttcacttagcttggg

SEQ ID NO: 1697058 - DNA, 25 bp, Homo sapien
gcttagaggctaaagcttcacttag

SEQ ID NO: 1697059 - DNA, 25 bp, Homo sapien
gttgagcttagaggctaaagcttca

SEQ ID NO: 1697060 - DNA, 25 bp, Homo sapien
ttagaggctaaagcttcacttagct

SEQ ID NO: 1697061 - DNA, 25 bp, Homo sapien
tgtctctagattctccagcactgtc

SEQ ID NO: 1697062 - DNA, 25 bp, Homo sapien
ccggtctcagccattgatgacaaag

SEQ ID NO: 1697063 - DNA, 25 bp, Homo sapien
gaggatatgtcttcacacagggctg

SEQ ID NO: 1697064 - DNA, 25 bp, Homo sapien
caggcggcaaatctcctgagtgtgg

SEQ ID NO: 1697065 - DNA, 25 bp, Homo sapien
cagaaatacacaccgaatagccagg

SEQ ID NO: 1697066 - DNA, 25 bp, Homo sapien
taatgggacaaatcatcactacgca

SEQ ID NO: 1697067 - DNA, 25 bp, Homo sapien
ggtattctagccaaaatgtgcagcc

SEQ ID NO: 1697068 - DNA, 25 bp, Homo sapien
gacagcagctactccagattcacag

SEQ ID NO: 1697069 - DNA, 25 bp, Homo sapien
ctgccaccattgggtgcatgtcctg

SEQ ID NO: 1697070 - DNA, 25 bp, Homo sapien
cctgtccctgaatatagacagaggc

SEQ ID NO: 1697071 - DNA, 25 bp, Homo sapien
tctgccaccattgggtgcatgtcct

SEQ ID NO: 1697072 - DNA, 25 bp, Homo sapien
tcctgtccctgaatatagacagagg

SEQ ID NO: 1697073 - DNA, 25 bp, Homo sapien
tgaggacgctgtggaggttcacact

SEQ ID NO: 1697074 - DNA, 25 bp, Homo sapien
ctgtggaggttcacacttcagggtg

SEQ ID NO: 1697075 - DNA, 25 bp, Homo sapien
gacgctgtggaggttcacacttcag

SEQ ID NO: 1697076 - DNA, 25 bp, Homo sapien
cgctgtggaggttcacacttcaggg

SEQ ID NO: 1697077 - DNA, 25 bp, Homo sapien
aacacaggcactacagccttgtctc

SEQ ID NO: 1697078 - DNA, 25 bp, Homo sapien
acaggcactacagccttgtctctgg

SEQ ID NO: 1697079 - DNA, 25 bp, Homo sapien
acacaggcactacagccttgtctct

SEQ ID NO: 1697080 - DNA, 25 bp, Homo sapien
cacaggcactacagccttgtctctg

SEQ ID NO: 1697081 - DNA, 25 bp, Homo sapien
gctctggtgttgcatgcataggtat

SEQ ID NO: 1697082 - DNA, 25 bp, Homo sapien
gctatttaatttccacgcgtttgtg

SEQ ID NO: 1697083 - DNA, 25 bp, Homo sapien
tctgtctggatgatgtgtcaattac

SEQ ID NO: 1697084 - DNA, 25 bp, Homo sapien
attcttatgtcccacgtgctgatga

SEQ ID NO: 1697085 - DNA, 25 bp, Homo sapien
cttgttccacacagggtcatcacaa

SEQ ID NO: 1697086 - DNA, 25 bp, Homo sapien
ttaggtctgacattttaaacgggca

SEQ ID NO: 1697087 - DNA, 25 bp, Homo sapien
gacacagagtgtcacgtttaagaat

SEQ ID NO: 1697088 - DNA, 25 bp, Homo sapien
cacagggtcatcacaaactttcaat

SEQ ID NO: 1697089 - DNA, 25 bp, Homo sapien
ttgagactccttttaacagatttgg

SEQ ID NO: 1697090 - DNA, 25 bp, Homo sapien
tttgagactccttttaacagatttg

SEQ ID NO: 1697091 - DNA, 25 bp, Homo sapien
tctatgtatttggttgaacagcact

SEQ ID NO: 1697092 - DNA, 25 bp, Homo sapien
tatgtatttggttgaacagcacttc

SEQ ID NO: 1697093 - DNA, 25 bp, Homo sapien
ttttctatgtatttggttgaacagc

SEQ ID NO: 1697094 - DNA, 25 bp, Homo sapien
ttctatgtatttggttgaacagcac

SEQ ID NO: 1697095 - DNA, 25 bp, Homo sapien
tcatcggactgaggctcataactgt

SEQ ID NO: 1697096 - DNA, 25 bp, Homo sapien
agaggttcctccgagtcagactcag

SEQ ID NO: 1697097 - DNA, 25 bp, Homo sapien
ctcataactgtctcctgagctgagt

SEQ ID NO: 1697098 - DNA, 25 bp, Homo sapien
agactcagatgtgaccacttctctg

SEQ ID NO: 1697099 - DNA, 25 bp, Homo sapien
cttgctttgctttaaacaatctatc

SEQ ID NO: 1697100 - DNA, 25 bp, Homo sapien
aatgttgggcattcccgaggcttct

SEQ ID NO: 1697101 - DNA, 25 bp, Homo sapien
aagtttcttgctttgcataggagta

SEQ ID NO: 1697102 - DNA, 25 bp, Homo sapien
atcctgagaagcctcggaatgttgg

SEQ ID NO: 1697103 - DNA, 25 bp, Homo sapien
tcagaagtttcttgctttgcatagg

SEQ ID NO: 1697104 - DNA, 25 bp, Homo sapien
tgtctgcatgtattcaacacatcca

SEQ ID NO: 1697105 - DNA, 25 bp, Homo sapien
tcttaaagttccctgacatccataa

SEQ ID NO: 1697106 - DNA, 25 bp, Homo sapien
gtgttctgttggtaaactagtcaag

SEQ ID NO: 1697107 - DNA, 25 bp, Homo sapien
taaagtgtttatcatccagggtgtc

SEQ ID NO: 1697108 - DNA, 25 bp, Homo sapien
gcctgggagaaataactgagtatcc

SEQ ID NO: 1697109 - DNA, 25 bp, Homo sapien
tcactcctcaggatggaactaactg

SEQ ID NO: 1697110 - DNA, 25 bp, Homo sapien
ggaggactttggctagattaaacat

SEQ ID NO: 1697111 - DNA, 25 bp, Homo sapien
gaacatgttataaaaatcctcaatc

SEQ ID NO: 1697112 - DNA, 25 bp, Homo sapien
tttcagtagcaataggagtactaca

SEQ ID NO: 1697113 - DNA, 25 bp, Homo sapien
tagcaataggagtactacaaggaat

SEQ ID NO: 1697114 - DNA, 25 bp, Homo sapien
ataggagtactacaaggaatctggg

SEQ ID NO: 1697115 - DNA, 25 bp, Homo sapien
tcagtagcaataggagtactacaag

SEQ ID NO: 1697116 - DNA, 25 bp, Homo sapien
tattccagggatgagatgtgcatgc

SEQ ID NO: 1697117 - DNA, 25 bp, Homo sapien
gacggtccttcagagtgttcaaatg

SEQ ID NO: 1697118 - DNA, 25 bp, Homo sapien
taggtggccattatctgcaaagtgc

SEQ ID NO: 1697119 - DNA, 25 bp, Homo sapien
gattgcatctctaaccaggttctga

SEQ ID NO: 1697120 - DNA, 25 bp, Homo sapien
gatttccacctaacccaagatcagg

SEQ ID NO: 1697121 - DNA, 25 bp, Homo sapien
gggatactgacctctctctaaaaga

SEQ ID NO: 1697122 - DNA, 25 bp, Homo sapien
cattgactggttctatgcccacagc

SEQ ID NO: 1697123 - DNA, 25 bp, Homo sapien
caacaaatctccgaaaatccaaggg

SEQ ID NO: 1697124 - DNA, 25 bp, Homo sapien
tacttgttacaatagtctttgaaac

SEQ ID NO: 1697125 - DNA, 25 bp, Homo sapien
tactttgggagggtacaacagcatg

SEQ ID NO: 1697126 - DNA, 25 bp, Homo sapien
ttgaaactctatataaatgtctgat

SEQ ID NO: 1697127 - DNA, 25 bp, Homo sapien
tcttattaatgtctgcactatgtcc

SEQ ID NO: 1697128 - DNA, 25 bp, Homo sapien
tcaaaggcactgcttcacctctggt

SEQ ID NO: 1697129 - DNA, 25 bp, Homo sapien
tcaacactaaggagtcacagtccgt

SEQ ID NO: 1697130 - DNA, 25 bp, Homo sapien
tcacagaaatgaggtggagcctgtc

SEQ ID NO: 1697131 - DNA, 25 bp, Homo sapien
taagcctagacatctcctcaggtga

SEQ ID NO: 1697132 - DNA, 25 bp, Homo sapien
ggcagtgatcccttgcacaccttta

SEQ ID NO: 1697133 - DNA, 25 bp, Homo sapien
aaaaggttcacgtgacctccagatc

SEQ ID NO: 1697134 - DNA, 25 bp, Homo sapien
cagtgaatgggcaaacccacaaggg

SEQ ID NO: 1697135 - DNA, 25 bp, Homo sapien
taaagcaatcctatgcagacctcga

SEQ ID NO: 1697136 - DNA, 25 bp, Homo sapien
aagactggtgagaagcggagtttct

SEQ ID NO: 1697137 - DNA, 25 bp, Homo sapien
ttctgagatggaagtattgccagct

SEQ ID NO: 1697138 - DNA, 25 bp, Homo sapien
catagaagtaatgttcggcccgttt

SEQ ID NO: 1697139 - DNA, 25 bp, Homo sapien
gtattgccagctaaagacatagaag

SEQ ID NO: 1697140 - DNA, 25 bp, Homo sapien
agacatctctgggagacttgccaac

SEQ ID NO: 1697141 - DNA, 25 bp, Homo sapien
cctgggccttgagcgactctgagac

SEQ ID NO: 1697142 - DNA, 25 bp, Homo sapien
ggccttgagcgactctgagacatct

SEQ ID NO: 1697143 - DNA, 25 bp, Homo sapien
acatctctgggagacttgccaacag

SEQ ID NO: 1697144 - DNA, 25 bp, Homo sapien
ctctgaagataaaatgctgaatggg

SEQ ID NO: 1697145 - DNA, 25 bp, Homo sapien
cactaaagtgccaccaaattggctg

SEQ ID NO: 1697146 - DNA, 25 bp, Homo sapien
gaagtcctagttgtggccatgccag

SEQ ID NO: 1697147 - DNA, 25 bp, Homo sapien
caaggctcaacctatctggagaaca

SEQ ID NO: 1697148 - DNA, 25 bp, Homo sapien
tatctatggtgctatggcatgccac

SEQ ID NO: 1697149 - DNA, 25 bp, Homo sapien
caacactgaagccttgcgtggtcct

SEQ ID NO: 1697150 - DNA, 25 bp, Homo sapien
cagctgaggtttccttatctatggt

SEQ ID NO: 1697151 - DNA, 25 bp, Homo sapien
aaccccagtgctcagatagtccctt

SEQ ID NO: 1697152 - DNA, 25 bp, Homo sapien
ctctttaattcatagccttttatgt

SEQ ID NO: 1697153 - DNA, 25 bp, Homo sapien
aaatctctgttcttcacaaggtacc

SEQ ID NO: 1697154 - DNA, 25 bp, Homo sapien
caatgcaggtcattactgtaagttt

SEQ ID NO: 1697155 - DNA, 25 bp, Homo sapien
aattctcaatgcaggtcattactgt

SEQ ID NO: 1697156 - DNA, 25 bp, Homo sapien
tcccctaggaatgtgatagatagct

SEQ ID NO: 1697157 - DNA, 25 bp, Homo sapien
tcaaaggatattcagaggtgcatct

SEQ ID NO: 1697158 - DNA, 25 bp, Homo sapien
gaaccacttgtctacaaaccaggtg

SEQ ID NO: 1697159 - DNA, 25 bp, Homo sapien
aatcattgctatggtctcccctagg

SEQ ID NO: 1697160 - DNA, 25 bp, Homo sapien
agttgaattctaggatgtctttgac

SEQ ID NO: 1697161 - DNA, 25 bp, Homo sapien
catcaactccactaactactctgtg

SEQ ID NO: 1697162 - DNA, 25 bp, Homo sapien
tggtccactgagatttttgtcttgt

SEQ ID NO: 1697163 - DNA, 25 bp, Homo sapien
ccccaggagttgaattctaggatgt

SEQ ID NO: 1697164 - DNA, 25 bp, Homo sapien
aatgaaacagtgagcctggttccct

SEQ ID NO: 1697165 - DNA, 25 bp, Homo sapien
cctggaatgaaacagtgagcctggt

SEQ ID NO: 1697166 - DNA, 25 bp, Homo sapien
gaatgaaacagtgagcctggttccc

SEQ ID NO: 1697167 - DNA, 25 bp, Homo sapien
tggaatgaaacagtgagcctggttc

SEQ ID NO: 1697168 - DNA, 25 bp, Homo sapien
tgccccgaaggtgagtcttggcccc

SEQ ID NO: 1697169 - DNA, 25 bp, Homo sapien
tgccggtgccccgaaggtgagtctt

SEQ ID NO: 1697170 - DNA, 25 bp, Homo sapien
aaggtgagtcttggccccttgtcgc

SEQ ID NO: 1697171 - DNA, 25 bp, Homo sapien
gtcgcgacccgccaggttcccagaa

SEQ ID NO: 1697172 - DNA, 25 bp, Homo sapien
cattggggtgctgcagccccgccac

SEQ ID NO: 1697173 - DNA, 25 bp, Homo sapien
tcattggggtgctgcagccccgcca

SEQ ID NO: 1697174 - DNA, 25 bp, Homo sapien
agccagtgggctcagaacggctgac

SEQ ID NO: 1697175 - DNA, 25 bp, Homo sapien
atttccggcctttgcggttgatcgg

SEQ ID NO: 1697176 - DNA, 25 bp, Homo sapien
gctcagaacggctgacgcatttccg

SEQ ID NO: 1697177 - DNA, 25 bp, Homo sapien
gaacggctgacgcatttccggcctt

SEQ ID NO: 1697178 - DNA, 25 bp, Homo sapien
tcaccaagcagcagccacctctgga

SEQ ID NO: 1697179 - DNA, 25 bp, Homo sapien
accaagcagcagccacctctggaat

SEQ ID NO: 1697180 - DNA, 25 bp, Homo sapien
caagcagcagccacctctggaattc

SEQ ID NO: 1697181 - DNA, 25 bp, Homo sapien
ccaagcagcagccacctctggaatt

SEQ ID NO: 1697182 - DNA, 25 bp, Homo sapien
atttctccgcctcgcacccagtggg

SEQ ID NO: 1697183 - DNA, 25 bp, Homo sapien
ctccgcctcgcacccagtgggactg

SEQ ID NO: 1697184 - DNA, 25 bp, Homo sapien
aatgcctcgccggatttctccgcct

SEQ ID NO: 1697185 - DNA, 25 bp, Homo sapien
catagaaatgcctcgccggatttct

SEQ ID NO: 1697186 - DNA, 25 bp, Homo sapien
cagcttgtaagcgatcaggatctca

SEQ ID NO: 1697187 - DNA, 25 bp, Homo sapien
caccttccggctctaatgttttggg

SEQ ID NO: 1697188 - DNA, 25 bp, Homo sapien
tcctaactggaactcttcgcaggct

SEQ ID NO: 1697189 - DNA, 25 bp, Homo sapien
tctgtccccagttggaaagtgtcca

SEQ ID NO: 1697190 - DNA, 25 bp, Homo sapien
cgattcaccccatactcacaaagtg

SEQ ID NO: 1697191 - DNA, 25 bp, Homo sapien
ctacccggggacaaaagaactgcag

SEQ ID NO: 1697192 - DNA, 25 bp, Homo sapien
agtggaaggccgacgccgattcacc

SEQ ID NO: 1697193 - DNA, 25 bp, Homo sapien
gagagccgcgggatgagatttaacc

SEQ ID NO: 1697194 - DNA, 25 bp, Homo sapien
ctaaacaagggacacccatattggg

SEQ ID NO: 1697195 - DNA, 25 bp, Homo sapien
gcaggaacgccgaggaccacttcat

SEQ ID NO: 1697196 - DNA, 25 bp, Homo sapien
ttgggctctacgcaggaacgccgag

SEQ ID NO: 1697197 - DNA, 25 bp, Homo sapien
acccatattgggctctacgcaggaa

SEQ ID NO: 1697198 - DNA, 25 bp, Homo sapien
gcagtgcaaaaatgtaacggctccc

SEQ ID NO: 1697199 - DNA, 25 bp, Homo sapien
ccattctcgaggcttgtctatgtga

SEQ ID NO: 1697200 - DNA, 25 bp, Homo sapien
ctcaagaaccgacccggacactcgg

SEQ ID NO: 1697201 - DNA, 25 bp, Homo sapien
gcttgtctatgtgacccatgcatcc

SEQ ID NO: 1697202 - DNA, 25 bp, Homo sapien
ccccaaacctgaatcccatagtaag

SEQ ID NO: 1697203 - DNA, 25 bp, Homo sapien
gtaaacttgcaagtagtcccttctc

SEQ ID NO: 1697204 - DNA, 25 bp, Homo sapien
taaggttcccaaaggatgtcctgga

SEQ ID NO: 1697205 - DNA, 25 bp, Homo sapien
tggttctgcagcttaatcctctaca

SEQ ID NO: 1697206 - DNA, 25 bp, Homo sapien
ctcaggcctcactctagcttccagc

SEQ ID NO: 1697207 - DNA, 25 bp, Homo sapien
gcctcactctagcttccagcgctat

SEQ ID NO: 1697208 - DNA, 25 bp, Homo sapien
ctcactctagcttccagcgctattt

SEQ ID NO: 1697209 - DNA, 25 bp, Homo sapien
aggcctcactctagcttccagcgct

SEQ ID NO: 1697210 - DNA, 25 bp, Homo sapien
atctgggctactgggaaaaccggct

SEQ ID NO: 1697211 - DNA, 25 bp, Homo sapien
cacctttatgaccagaagctccatc

SEQ ID NO: 1697212 - DNA, 25 bp, Homo sapien
ccagggctgtgctttcacttaattc

SEQ ID NO: 1697213 - DNA, 25 bp, Homo sapien
cctcagaacccagatctgggctact

SEQ ID NO: 1697214 - DNA, 25 bp, Homo sapien
gcagcctccgggtagcggaagcctc

SEQ ID NO: 1697215 - DNA, 25 bp, Homo sapien
tctccaaatactccaatagcaccac

SEQ ID NO: 1697216 - DNA, 25 bp, Homo sapien
tgcagattccccggcaggatggtca

SEQ ID NO: 1697217 - DNA, 25 bp, Homo sapien
gcggcgccggctcatccagctgcct

SEQ ID NO: 1697218 - DNA, 25 bp, Homo sapien
ggaaacaggccacagcgctcagata

SEQ ID NO: 1697219 - DNA, 25 bp, Homo sapien
aggccacagcgctcagatactaaac

SEQ ID NO: 1697220 - DNA, 25 bp, Homo sapien
tgatctgggatttcaggaggaaaca

SEQ ID NO: 1697221 - DNA, 25 bp, Homo sapien
ctgggatttcaggaggaaacaggcc

SEQ ID NO: 1697222 - DNA, 25 bp, Homo sapien
tacaggccttgggtgcaacagaccc

SEQ ID NO: 1697223 - DNA, 25 bp, Homo sapien
tcaggtagaatgatgccagagcaca

SEQ ID NO: 1697224 - DNA, 25 bp, Homo sapien
tgaagctaagagactcgcactgact

SEQ ID NO: 1697225 - DNA, 25 bp, Homo sapien
cgtgaaatcacctaacatggcctgg

SEQ ID NO: 1697226 - DNA, 25 bp, Homo sapien
gccttcattagctgaaattggctac

SEQ ID NO: 1697227 - DNA, 25 bp, Homo sapien
gagccttcattagctgaaattggct

SEQ ID NO: 1697228 - DNA, 25 bp, Homo sapien
agctgaaattggctactttgtgacc

SEQ ID NO: 1697229 - DNA, 25 bp, Homo sapien
gaaattggctactttgtgaccctgg

SEQ ID NO: 1697230 - DNA, 25 bp, Homo sapien
gagtaagcctagaagctaccacttt

SEQ ID NO: 1697231 - DNA, 25 bp, Homo sapien
gaagctaccactttatcttctctgc

SEQ ID NO: 1697232 - DNA, 25 bp, Homo sapien
ctgggactctggagtaagcctagaa

SEQ ID NO: 1697233 - DNA, 25 bp, Homo sapien
gcatcctccatgggcaagcacgggg

SEQ ID NO: 1697234 - DNA, 25 bp, Homo sapien
atctctacagagattcccctgagat

SEQ ID NO: 1697235 - DNA, 25 bp, Homo sapien
tctctacagagattcccctgagatg

SEQ ID NO: 1697236 - DNA, 25 bp, Homo sapien
tggcttatgccatggaaggaaagct

SEQ ID NO: 1697237 - DNA, 25 bp, Homo sapien
actgtggcttatgccatggaaggaa

SEQ ID NO: 1697238 - DNA, 25 bp, Homo sapien
tgtggcttatgccatggaaggaaag

SEQ ID NO: 1697239 - DNA, 25 bp, Homo sapien
gcaactgtggcttatgccatggaag

SEQ ID NO: 1697240 - DNA, 25 bp, Homo sapien
tctctcaggtggcacgatatcttcc

SEQ ID NO: 1697241 - DNA, 25 bp, Homo sapien
ctctcaggtggcacgatatcttccc

SEQ ID NO: 1697242 - DNA, 25 bp, Homo sapien
tctcaggtggcacgatatcttccca

SEQ ID NO: 1697243 - DNA, 25 bp, Homo sapien
cattcatggcagatgtgccgcctcc

SEQ ID NO: 1697244 - DNA, 25 bp, Homo sapien
cacattcatggcagatgtgccgcct

SEQ ID NO: 1697245 - DNA, 25 bp, Homo sapien
cctccctcctgtggcatttttctgc

SEQ ID NO: 1697246 - DNA, 25 bp, Homo sapien
tccacattcatggcagatgtgccgc

SEQ ID NO: 1697247 - DNA, 25 bp, Homo sapien
ctctgatgaatgacaagggcagagc

SEQ ID NO: 1697248 - DNA, 25 bp, Homo sapien
atactgcactgatacggcttctccc

SEQ ID NO: 1697249 - DNA, 25 bp, Homo sapien
actgcactgatacggcttctcccca

SEQ ID NO: 1697250 - DNA, 25 bp, Homo sapien
tgcactgatacggcttctccccagt

SEQ ID NO: 1697251 - DNA, 25 bp, Homo sapien
tactgcactgatacggcttctcccc

SEQ ID NO: 1697252 - DNA, 25 bp, Homo sapien
tcaggttcctgaacatttttatccc

SEQ ID NO: 1697253 - DNA, 25 bp, Homo sapien
atgaggcctgtattctgagtgaaac

SEQ ID NO: 1697254 - DNA, 25 bp, Homo sapien
caaggtatgaaattcgggtgaagcc

SEQ ID NO: 1697255 - DNA, 25 bp, Homo sapien
ggctttccatcctacttttccaggc

SEQ ID NO: 1697256 - DNA, 25 bp, Homo sapien
actgtgataggatgtttttccctac

SEQ ID NO: 1697257 - DNA, 25 bp, Homo sapien
tcactgtgataggatgtttttccct

SEQ ID NO: 1697258 - DNA, 25 bp, Homo sapien
cactgtgataggatgtttttcccta

SEQ ID NO: 1697259 - DNA, 25 bp, Homo sapien
tcaaaaagaatggtcagagaagcag

SEQ ID NO: 1697260 - DNA, 25 bp, Homo sapien
cagtagacatcaccaagtgctggtt

SEQ ID NO: 1697261 - DNA, 25 bp, Homo sapien
ccaactctggcatgtatggcatggg

SEQ ID NO: 1697262 - DNA, 25 bp, Homo sapien
aatttctatagttgagactccaggg

SEQ ID NO: 1697263 - DNA, 25 bp, Homo sapien
ctatgaaggtaatctcactggtaca

SEQ ID NO: 1697264 - DNA, 25 bp, Homo sapien
gcctatgtacttggtaagaaacaca

SEQ ID NO: 1697265 - DNA, 25 bp, Homo sapien
aattccacggatggcacacattcgt

SEQ ID NO: 1697266 - DNA, 25 bp, Homo sapien
cacaaatggccttggcgagaagttc

SEQ ID NO: 1697267 - DNA, 25 bp, Homo sapien
tttcacactgtctgaataggaaagt

SEQ ID NO: 1697268 - DNA, 25 bp, Homo sapien
aacattaaagagtgaaatttgggct

SEQ ID NO: 1697269 - DNA, 25 bp, Homo sapien
taaagagtgaaatttgggctgggta

SEQ ID NO: 1697270 - DNA, 25 bp, Homo sapien
cactgtctgaataggaaagtttttt

SEQ ID NO: 1697271 - DNA, 25 bp, Homo sapien
tgaaacctcgtctcatcattctcag

SEQ ID NO: 1697272 - DNA, 25 bp, Homo sapien
gtgaaacctcgtctcatcattctca

SEQ ID NO: 1697273 - DNA, 25 bp, Homo sapien
cagtgaaacctcgtctcatcattct

SEQ ID NO: 1697274 - DNA, 25 bp, Homo sapien
cacagtgaaacctcgtctcatcatt

SEQ ID NO: 1697275 - DNA, 25 bp, Homo sapien
cagtcagacactaataatggcgttc

SEQ ID NO: 1697276 - DNA, 25 bp, Homo sapien
aaaattgagatgctgttaccacacg

SEQ ID NO: 1697277 - DNA, 25 bp, Homo sapien
gatttgtgtcccctagatccctgaa

SEQ ID NO: 1697278 - DNA, 25 bp, Homo sapien
tgctggtgccagaaaccgagtgaga

SEQ ID NO: 1697279 - DNA, 25 bp, Homo sapien
ccaggctcctactgccaattggaag

SEQ ID NO: 1697280 - DNA, 25 bp, Homo sapien
cagccgttccctatcctgatctgta

SEQ ID NO: 1697281 - DNA, 25 bp, Homo sapien
tttatcaggaactctgctagatgct

SEQ ID NO: 1697282 - DNA, 25 bp, Homo sapien
gaatactttggtctctggcactcag

SEQ ID NO: 1697283 - DNA, 25 bp, Homo sapien
ttgggcaactgggttcaatcctacc

SEQ ID NO: 1697284 - DNA, 25 bp, Homo sapien
aaggcattgggcaactgggttcaat

SEQ ID NO: 1697285 - DNA, 25 bp, Homo sapien
ggcattgggcaactgggttcaatcc

SEQ ID NO: 1697286 - DNA, 25 bp, Homo sapien
cattgggcaactgggttcaatccta

SEQ ID NO: 1697287 - DNA, 25 bp, Homo sapien
tcttagaagcatcagagcctagggc

SEQ ID NO: 1697288 - DNA, 25 bp, Homo sapien
cctagggctaggcaaagattcttaa

SEQ ID NO: 1697289 - DNA, 25 bp, Homo sapien
gaggaatcactgtacccgatgtcaa

SEQ ID NO: 1697290 - DNA, 25 bp, Homo sapien
tggcaatagagcaccgaacatccgt

SEQ ID NO: 1697291 - DNA, 25 bp, Homo sapien
taattgtgtgcatagaatattccaa

SEQ ID NO: 1697292 - DNA, 25 bp, Homo sapien
ccataacattgggatgaagacaaga

SEQ ID NO: 1697293 - DNA, 25 bp, Homo sapien
tagatttcatgtacacgcacaaaag

SEQ ID NO: 1697294 - DNA, 25 bp, Homo sapien
tgtataaccatacaattggcacaga

SEQ ID NO: 1697295 - DNA, 25 bp, Homo sapien
cagcattggaaaaagccacttggac

SEQ ID NO: 1697296 - DNA, 25 bp, Homo sapien
cagagctgtcagaagacttgggaag

SEQ ID NO: 1697297 - DNA, 25 bp, Homo sapien
tttgccagcattggaaaaagccact

SEQ ID NO: 1697298 - DNA, 25 bp, Homo sapien
aaaaagccacttggacttcacagag

SEQ ID NO: 1697299 - DNA, 25 bp, Homo sapien
tgacggcagcggcacgtgaaagtac

SEQ ID NO: 1697300 - DNA, 25 bp, Homo sapien
ggtttcagattcgtgcgctccggcc

SEQ ID NO: 1697301 - DNA, 25 bp, Homo sapien
ctttctggcctttgtgacggacctt

SEQ ID NO: 1697302 - DNA, 25 bp, Homo sapien
gaatgctgagacagccgttgacggc

SEQ ID NO: 1697303 - DNA, 25 bp, Homo sapien
tgtatccttgggttcagcgcttacc

SEQ ID NO: 1697304 - DNA, 25 bp, Homo sapien
ttcgggctgtgtatccttgggttca

SEQ ID NO: 1697305 - DNA, 25 bp, Homo sapien
tccttgggttcagcgcttaccgaca

SEQ ID NO: 1697306 - DNA, 25 bp, Homo sapien
cttccgcgtttgcttcgggctgtgt

SEQ ID NO: 1697307 - DNA, 25 bp, Homo sapien
ccttcgctccgtaggagggagttct

SEQ ID NO: 1697308 - DNA, 25 bp, Homo sapien
caggtgagcgatgttgtgctctgta

SEQ ID NO: 1697309 - DNA, 25 bp, Homo sapien
caaaagggttcgaggcctcttgcct

SEQ ID NO: 1697310 - DNA, 25 bp, Homo sapien
tccggcctttgtgggtcacttttga

SEQ ID NO: 1697311 - DNA, 25 bp, Homo sapien
ccctatgctaatggtcacgatattg

SEQ ID NO: 1697312 - DNA, 25 bp, Homo sapien
caaaagctggcttccgtatacgttt

SEQ ID NO: 1697313 - DNA, 25 bp, Homo sapien
cagctgacaggtccttatggccaaa

SEQ ID NO: 1697314 - DNA, 25 bp, Homo sapien
aaatactttacatggtccccacaat

SEQ ID NO: 1697315 - DNA, 25 bp, Homo sapien
gagggaaagaccctgatgcctgaga

SEQ ID NO: 1697316 - DNA, 25 bp, Homo sapien
aaagaccctgatgcctgagaccctg

SEQ ID NO: 1697317 - DNA, 25 bp, Homo sapien
gaccctgatgcctgagaccctggag

SEQ ID NO: 1697318 - DNA, 25 bp, Homo sapien
tgaggatagagggaaagaccctgat

SEQ ID NO: 1697319 - DNA, 25 bp, Homo sapien
tgctcgttggggccgaattgaggaa

SEQ ID NO: 1697320 - DNA, 25 bp, Homo sapien
cgttggggccgaattgaggaatctc

SEQ ID NO: 1697321 - DNA, 25 bp, Homo sapien
ctaaggtgctcgttggggccgaatt

SEQ ID NO: 1697322 - DNA, 25 bp, Homo sapien
ctcgttggggccgaattgaggaatc

SEQ ID NO: 1697323 - DNA, 25 bp, Homo sapien
gccatcccaggatcttggttgggct

SEQ ID NO: 1697324 - DNA, 25 bp, Homo sapien
agccatcccaggatcttggttgggc

SEQ ID NO: 1697325 - DNA, 25 bp, Homo sapien
cagccatcccaggatcttggttggg

SEQ ID NO: 1697326 - DNA, 25 bp, Homo sapien
tcagccatcccaggatcttggttgg

SEQ ID NO: 1697327 - DNA, 25 bp, Homo sapien
agggccagtctgtgcactgcgacct

SEQ ID NO: 1697328 - DNA, 25 bp, Homo sapien
tgagcttcggagtcgggctaccgct

SEQ ID NO: 1697329 - DNA, 25 bp, Homo sapien
ctgtgcactgcgacctggactgggt

SEQ ID NO: 1697330 - DNA, 25 bp, Homo sapien
tctcctctcacggatgcctcggtga

SEQ ID NO: 1697331 - DNA, 25 bp, Homo sapien
ccagggtggatccagcgccagccac

SEQ ID NO: 1697332 - DNA, 25 bp, Homo sapien
atgtctcaagccaccacagtcgtct

SEQ ID NO: 1697333 - DNA, 25 bp, Homo sapien
tgcaatgctggatactgggctcaaa

SEQ ID NO: 1697334 - DNA, 25 bp, Homo sapien
aatgctggatactgggctcaaaggc

SEQ ID NO: 1697335 - DNA, 25 bp, Homo sapien
gctgcaatgctggatactgggctca

SEQ ID NO: 1697336 - DNA, 25 bp, Homo sapien
cggccacgttaagtgagggtcgtct

SEQ ID NO: 1697337 - DNA, 25 bp, Homo sapien
agtgagggtcgtcttgttccgccgc

SEQ ID NO: 1697338 - DNA, 25 bp, Homo sapien
cacgttaagtgagggtcgtcttgtt

SEQ ID NO: 1697339 - DNA, 25 bp, Homo sapien
cgacagcggccacgttaagtgaggg

SEQ ID NO: 1697340 - DNA, 25 bp, Homo sapien
aggatcaatgtagaaaaacactggc

SEQ ID NO: 1697341 - DNA, 25 bp, Homo sapien
agcaaattcaggatcaatgtagaaa

SEQ ID NO: 1697342 - DNA, 25 bp, Homo sapien
aaaacactggcatatctacttcctc

SEQ ID NO: 1697343 - DNA, 25 bp, Homo sapien
ttcaggatcaatgtagaaaaacact

SEQ ID NO: 1697344 - DNA, 25 bp, Homo sapien
tcttgtggacttcttttgttagagg

SEQ ID NO: 1697345 - DNA, 25 bp, Homo sapien
agaacaccatacgcccaactcggta

SEQ ID NO: 1697346 - DNA, 25 bp, Homo sapien
gacattggaacgacgaatcattaaa

SEQ ID NO: 1697347 - DNA, 25 bp, Homo sapien
ggtagcctacgagtctcttgtggac

SEQ ID NO: 1697348 - DNA, 25 bp, Homo sapien
gggtctgaagctacacctccttgcc

SEQ ID NO: 1697349 - DNA, 25 bp, Homo sapien
gaggttcaagctcgggaccttcaga

SEQ ID NO: 1697350 - DNA, 25 bp, Homo sapien
ttcaagctcgggaccttcagattat

SEQ ID NO: 1697351 - DNA, 25 bp, Homo sapien
ctctgaggttcaagctcgggacctt

SEQ ID NO: 1697352 - DNA, 25 bp, Homo sapien
tctctgaggttcaagctcgggacct

SEQ ID NO: 1697353 - DNA, 25 bp, Homo sapien
gagatcctgggttcgactcccagtg

SEQ ID NO: 1697354 - DNA, 25 bp, Homo sapien
tagttggttaaagcgcctgtctcgt

SEQ ID NO: 1697355 - DNA, 25 bp, Homo sapien
tcttgacgaagaactgcgtcctccc

SEQ ID NO: 1697356 - DNA, 25 bp, Homo sapien
tctaaagagtgcttccgcgtggctc

SEQ ID NO: 1697357 - DNA, 25 bp, Homo sapien
ctgtggaatgctacaaaagcaggtc

SEQ ID NO: 1697358 - DNA, 25 bp, Homo sapien
caggccaggtataatagaatgtcaa

SEQ ID NO: 1697359 - DNA, 25 bp, Homo sapien
gggaacatttgtaacttaagtgcat

SEQ ID NO: 1697360 - DNA, 25 bp, Homo sapien
atcaaaactaaaattacaggccagg

SEQ ID NO: 1697361 - DNA, 25 bp, Homo sapien
ccttcagcctgaatgctttgtgcct

SEQ ID NO: 1697362 - DNA, 25 bp, Homo sapien
aatccaggttctatcctcctaatgc

SEQ ID NO: 1697363 - DNA, 25 bp, Homo sapien
cctgagtatgcgggaaaggtcttca

SEQ ID NO: 1697364 - DNA, 25 bp, Homo sapien
tccaggttctatcctcctaatgcct

SEQ ID NO: 1697365 - DNA, 25 bp, Homo sapien
cttttggtatcttggcagggactta

SEQ ID NO: 1697366 - DNA, 25 bp, Homo sapien
tcttttggtatcttggcagggactt

SEQ ID NO: 1697367 - DNA, 25 bp, Homo sapien
cagtcttttggtatcttggcaggga

SEQ ID NO: 1697368 - DNA, 25 bp, Homo sapien
cctctgcagtcttttggtatcttgg

SEQ ID NO: 1697369 - DNA, 25 bp, Homo sapien
agatggacgacccttaactgtgtag

SEQ ID NO: 1697370 - DNA, 25 bp, Homo sapien
gaagcagatggacgacccttaactg

SEQ ID NO: 1697371 - DNA, 25 bp, Homo sapien
gggaagcagatggacgacccttaac

SEQ ID NO: 1697372 - DNA, 25 bp, Homo sapien
gcagatggacgacccttaactgtgt

SEQ ID NO: 1697373 - DNA, 25 bp, Homo sapien
agtccccacctactctaaagcccat

SEQ ID NO: 1697374 - DNA, 25 bp, Homo sapien
gctgtgtctgagacaagtccactca

SEQ ID NO: 1697375 - DNA, 25 bp, Homo sapien
tctctgattttatccatccttaaaa

SEQ ID NO: 1697376 - DNA, 25 bp, Homo sapien
tatccatccttaaaacttccacatt

SEQ ID NO: 1697377 - DNA, 25 bp, Homo sapien
tgctgccagacacatgtgtcttatc

SEQ ID NO: 1697378 - DNA, 25 bp, Homo sapien
ctgcctccaagttatcgcattcatt

SEQ ID NO: 1697379 - DNA, 25 bp, Homo sapien
tgccagacacatgtgtcttatcaat

SEQ ID NO: 1697380 - DNA, 25 bp, Homo sapien
gcctccaagttatcgcattcattat

SEQ ID NO: 1697381 - DNA, 25 bp, Homo sapien
tctatgtccaaaccatccggtgaga

SEQ ID NO: 1697382 - DNA, 25 bp, Homo sapien
aagtgtaccgatgccacagtgctca

SEQ ID NO: 1697383 - DNA, 25 bp, Homo sapien
tgctcatggaatacagaatatatat

SEQ ID NO: 1697384 - DNA, 25 bp, Homo sapien
gccacaaattgctcatggaatacag

SEQ ID NO: 1697385 - DNA, 25 bp, Homo sapien
tacccttacagtgttcatgcagtac

SEQ ID NO: 1697386 - DNA, 25 bp, Homo sapien
cctcctctgtctctacccttacagt

SEQ ID NO: 1697387 - DNA, 25 bp, Homo sapien
tctgtctctacccttacagtgttca

SEQ ID NO: 1697388 - DNA, 25 bp, Homo sapien
tctacccttacagtgttcatgcagt

SEQ ID NO: 1697389 - DNA, 25 bp, Homo sapien
tagttgcttatctttccccaggtct

SEQ ID NO: 1697390 - DNA, 25 bp, Homo sapien
gaacctgggcaattcccatccctgg

SEQ ID NO: 1697391 - DNA, 25 bp, Homo sapien
aggtcttctgacctcttactccact

SEQ ID NO: 1697392 - DNA, 25 bp, Homo sapien
ctcatcagcaggtagagtagaaaga

SEQ ID NO: 1697393 - DNA, 25 bp, Homo sapien
gaagtcaaagaatagttatgttcta

SEQ ID NO: 1697394 - DNA, 25 bp, Homo sapien
caaagaatagttatgttctaaccaa

SEQ ID NO: 1697395 - DNA, 25 bp, Homo sapien
aagaatagttatgttctaaccaaga

SEQ ID NO: 1697396 - DNA, 25 bp, Homo sapien
gtcaaagaatagttatgttctaacc

SEQ ID NO: 1697397 - DNA, 25 bp, Homo sapien
acaataattcctggcatctgtgtaa

SEQ ID NO: 1697398 - DNA, 25 bp, Homo sapien
taatactggtaacaataattcctgg

SEQ ID NO: 1697399 - DNA, 25 bp, Homo sapien
aagtgataatactggtaacaataat

SEQ ID NO: 1697400 - DNA, 25 bp, Homo sapien
tggtaacaataattcctggcatctg

SEQ ID NO: 1697401 - DNA, 25 bp, Homo sapien
cctttctcgtctttgtggcaatcca

SEQ ID NO: 1697402 - DNA, 25 bp, Homo sapien
atggtgcctttctcgtctttgtggc

SEQ ID NO: 1697403 - DNA, 25 bp, Homo sapien
aacatattcattcttattaagtgcg

SEQ ID NO: 1697404 - DNA, 25 bp, Homo sapien
cgatggcctcatagtcatagatggt

SEQ ID NO: 1697405 - DNA, 25 bp, Homo sapien
cgttgacgaagaggatgtgcttgcc

SEQ ID NO: 1697406 - DNA, 25 bp, Homo sapien
cacgttgacgaagaggatgtgcttg

SEQ ID NO: 1697407 - DNA, 25 bp, Homo sapien
aggtggccacgttgacgaagaggat

SEQ ID NO: 1697408 - DNA, 25 bp, Homo sapien
gccacgttgacgaagaggatgtgct

SEQ ID NO: 1697409 - DNA, 25 bp, Homo sapien
tatcaagaagacttctggaatcttc

SEQ ID NO: 1697410 - DNA, 25 bp, Homo sapien
ggctcctagttctcaagtatatatt

SEQ ID NO: 1697411 - DNA, 25 bp, Homo sapien
cctgtatttatcaagaagacttctg

SEQ ID NO: 1697412 - DNA, 25 bp, Homo sapien
tgtatttatcaagaagacttctgga

SEQ ID NO: 1697413 - DNA, 25 bp, Homo sapien
ttgttatctcctggttcttgctttc

SEQ ID NO: 1697414 - DNA, 25 bp, Homo sapien
gggaaagcccaacacaactagacca

SEQ ID NO: 1697415 - DNA, 25 bp, Homo sapien
caacacaactagaccatagggcttc

SEQ ID NO: 1697416 - DNA, 25 bp, Homo sapien
aactagaccatagggcttcagctcc

SEQ ID NO: 1697417 - DNA, 25 bp, Homo sapien
gctggaaactaggtacaaatcctcc

SEQ ID NO: 1697418 - DNA, 25 bp, Homo sapien
aagctggaaactaggtacaaatcct

SEQ ID NO: 1697419 - DNA, 25 bp, Homo sapien
agctggaaactaggtacaaatcctc

SEQ ID NO: 1697420 - DNA, 25 bp, Homo sapien
tcaagaaactgaagactttctgttc

SEQ ID NO: 1697421 - DNA, 25 bp, Homo sapien
aagactttctgttctttttcaccat

SEQ ID NO: 1697422 - DNA, 25 bp, Homo sapien
cttcaagaaactgaagactttctgt

SEQ ID NO: 1697423 - DNA, 25 bp, Homo sapien
aagaaactgaagactttctgttctt

SEQ ID NO: 1697424 - DNA, 25 bp, Homo sapien
caggatatagatttgaatgtgccca

SEQ ID NO: 1697425 - DNA, 25 bp, Homo sapien
catggacctttacagggtcccagga

SEQ ID NO: 1697426 - DNA, 25 bp, Homo sapien
ttcaaagttccaacggatgtcatgg

SEQ ID NO: 1697427 - DNA, 25 bp, Homo sapien
tgggaccagcgcatgacagggattc

SEQ ID NO: 1697428 - DNA, 25 bp, Homo sapien
cttcaagtacgccaggatgtctgtc

SEQ ID NO: 1697429 - DNA, 25 bp, Homo sapien
ttgcttcaagtacgccaggatgtct

SEQ ID NO: 1697430 - DNA, 25 bp, Homo sapien
gaattgcttcaagtacgccaggatg

SEQ ID NO: 1697431 - DNA, 25 bp, Homo sapien
tttgaattgcttcaagtacgccagg

SEQ ID NO: 1697432 - DNA, 25 bp, Homo sapien
tgctcctgcccttaactccaccttc

SEQ ID NO: 1697433 - DNA, 25 bp, Homo sapien
ggttgctcctgcccttaactccacc

SEQ ID NO: 1697434 - DNA, 25 bp, Homo sapien
tgagaagtagggttgctcctgccct

SEQ ID NO: 1697435 - DNA, 25 bp, Homo sapien
gtgagaagtagggttgctcctgccc

SEQ ID NO: 1697436 - DNA, 25 bp, Homo sapien
aggggtggggagagcaagtcattag

SEQ ID NO: 1697437 - DNA, 25 bp, Homo sapien
tttggaggggtggggagagcaagtc

SEQ ID NO: 1697438 - DNA, 25 bp, Homo sapien
gaggggtggggagagcaagtcatta

SEQ ID NO: 1697439 - DNA, 25 bp, Homo sapien
tggaggggtggggagagcaagtcat

SEQ ID NO: 1697440 - DNA, 25 bp, Homo sapien
gagcagtagccttccaaatataaat

SEQ ID NO: 1697441 - DNA, 25 bp, Homo sapien
aattctggcagtatgtggcggtgat

SEQ ID NO: 1697442 - DNA, 25 bp, Homo sapien
ttcacccacatactcttgagaggca

SEQ ID NO: 1697443 - DNA, 25 bp, Homo sapien
cggtgatttactcaggtggagccca

SEQ ID NO: 1697444 - DNA, 25 bp, Homo sapien
gatggaagagtcagaatgtctagga

SEQ ID NO: 1697445 - DNA, 25 bp, Homo sapien
tgtgtgactgtgaccccattgctat

SEQ ID NO: 1697446 - DNA, 25 bp, Homo sapien
tctacacctccagggtagagagaga

SEQ ID NO: 1697447 - DNA, 25 bp, Homo sapien
gatgtgatggccgactgaaccattg

SEQ ID NO: 1697448 - DNA, 25 bp, Homo sapien
ggctcgttctgaaggtgaggaatcc

SEQ ID NO: 1697449 - DNA, 25 bp, Homo sapien
gatgatacacgtttgtcctaggaga

SEQ ID NO: 1697450 - DNA, 25 bp, Homo sapien
cattttattggagacagtggcaggg

SEQ ID NO: 1697451 - DNA, 25 bp, Homo sapien
tccagggttgagatgggaaatccca

SEQ ID NO: 1697452 - DNA, 25 bp, Homo sapien
tattccgcctgcacaaaaccagcga

SEQ ID NO: 1697453 - DNA, 25 bp, Homo sapien
ttccaccaagaagcgcgtattccgc

SEQ ID NO: 1697454 - DNA, 25 bp, Homo sapien
tacattcggagtgaagtttccacca

SEQ ID NO: 1697455 - DNA, 25 bp, Homo sapien
cattgtttcggaatcccgcgggctt

SEQ ID NO: 1697456 - DNA, 25 bp, Homo sapien
caggtgcactgtcttataagtaccg

SEQ ID NO: 1697457 - DNA, 25 bp, Homo sapien
gctcacaggtgcactgtcttataag

SEQ ID NO: 1697458 - DNA, 25 bp, Homo sapien
acctcggcattgctcacaggtgcac

SEQ ID NO: 1697459 - DNA, 25 bp, Homo sapien
cattgctcacaggtgcactgtctta

SEQ ID NO: 1697460 - DNA, 25 bp, Homo sapien
tcaacatacctctgtgagaccggat

SEQ ID NO: 1697461 - DNA, 25 bp, Homo sapien
gctggctaccgacgaaggattgaaa

SEQ ID NO: 1697462 - DNA, 25 bp, Homo sapien
tcagttttgaaaatacagcatcact

SEQ ID NO: 1697463 - DNA, 25 bp, Homo sapien
taaatatacattatcccctgagggt

SEQ ID NO: 1697464 - DNA, 25 bp, Homo sapien
tacacccaggctttatttagggcca

SEQ ID NO: 1697465 - DNA, 25 bp, Homo sapien
gctgtagagtgtttccctcgaccca

SEQ ID NO: 1697466 - DNA, 25 bp, Homo sapien
atgtgcgcggcgacaatcgggcctc

SEQ ID NO: 1697467 - DNA, 25 bp, Homo sapien
tccgatcttcgtttccttgcctagg

SEQ ID NO: 1697468 - DNA, 25 bp, Homo sapien
ccagcgatggtttatcacggtgaca

SEQ ID NO: 1697469 - DNA, 25 bp, Homo sapien
gccagataactaggtaattccggag

SEQ ID NO: 1697470 - DNA, 25 bp, Homo sapien
tttcaggtcgctgcggtgagcacca

SEQ ID NO: 1697471 - DNA, 25 bp, Homo sapien
tacagattcgctgacgtggtagtcc

SEQ ID NO: 1697472 - DNA, 25 bp, Homo sapien
tctagttccgatccgaaagagttag

SEQ ID NO: 1697473 - DNA, 25 bp, Homo sapien
cagtgagactcacgctgacaggaaa

SEQ ID NO: 1697474 - DNA, 25 bp, Homo sapien
ccacaagggtacagtaggtaagtat

SEQ ID NO: 1697475 - DNA, 25 bp, Homo sapien
aaagctgacgctttgctgctgaaga

SEQ ID NO: 1697476 - DNA, 25 bp, Homo sapien
tgctaaccattacaccatgggacca

SEQ ID NO: 1697477 - DNA, 25 bp, Homo sapien
tcccaccgagattcgaactcggatt

SEQ ID NO: 1697478 - DNA, 25 bp, Homo sapien
cgaactcggattgctggattcaaag

SEQ ID NO: 1697479 - DNA, 25 bp, Homo sapien
ttcgaactcggattgctggattcaa

SEQ ID NO: 1697480 - DNA, 25 bp, Homo sapien
tcgtaagtcgataagagcagcatct

SEQ ID NO: 1697481 - DNA, 25 bp, Homo sapien
tcttctaggcgaaagagcttggtac

SEQ ID NO: 1697482 - DNA, 25 bp, Homo sapien
gagagttcaataccgtgcacgcgac

SEQ ID NO: 1697483 - DNA, 25 bp, Homo sapien
tacacgcaggacttggttgtggcag

SEQ ID NO: 1697484 - DNA, 25 bp, Homo sapien
ggtgagtttttctctccggctggaa

SEQ ID NO: 1697485 - DNA, 25 bp, Homo sapien
gtggataccagggacccgagccctc

SEQ ID NO: 1697486 - DNA, 25 bp, Homo sapien
tggaagactcgacgccgtggatacc

SEQ ID NO: 1697487 - DNA, 25 bp, Homo sapien
caccgtgtctggtcctgaattggga

SEQ ID NO: 1697488 - DNA, 25 bp, Homo sapien
ggcgagatgccaggcgaacggctga

SEQ ID NO: 1697489 - DNA, 25 bp, Homo sapien
gatgccaggcgaacggctgaaggca

SEQ ID NO: 1697490 - DNA, 25 bp, Homo sapien
ctgaagaggcgagatgccaggcgaa

SEQ ID NO: 1697491 - DNA, 25 bp, Homo sapien
gcagaggtctttttacccccatctc

SEQ ID NO: 1697492 - DNA, 25 bp, Homo sapien
agctccaagggactgtttcccggat

SEQ ID NO: 1697493 - DNA, 25 bp, Homo sapien
tgcttcggaccgagtgtttggtagt

SEQ ID NO: 1697494 - DNA, 25 bp, Homo sapien
gactgtttcccggatgcttcggacc

SEQ ID NO: 1697495 - DNA, 25 bp, Homo sapien
tcccggatgcttcggaccgagtgtt

SEQ ID NO: 1697496 - DNA, 25 bp, Homo sapien
acttataagcatcccaaacaggcag

SEQ ID NO: 1697497 - DNA, 25 bp, Homo sapien
tccaaatacatcagggacagctggg

SEQ ID NO: 1697498 - DNA, 25 bp, Homo sapien
tctgggtcacgttgtgcaggcacca

SEQ ID NO: 1697499 - DNA, 25 bp, Homo sapien
gctggacaagccaaggatgggacct

SEQ ID NO: 1697500 - DNA, 25 bp, Homo sapien
ccagaaggtactccttcactcaggc

SEQ ID NO: 1697501 - DNA, 25 bp, Homo sapien
gccagaaggtactccttcactcagg

SEQ ID NO: 1697502 - DNA, 25 bp, Homo sapien
caggcattatctgcactatcagcat

SEQ ID NO: 1697503 - DNA, 25 bp, Homo sapien
attatctgcactatcagcatagcca

SEQ ID NO: 1697504 - DNA, 25 bp, Homo sapien
acgcgctctaccactgagctacacc

SEQ ID NO: 1697505 - DNA, 25 bp, Homo sapien
gctctaccactgagctacaccccca

SEQ ID NO: 1697506 - DNA, 25 bp, Homo sapien
gcgctctaccactgagctacacccc

SEQ ID NO: 1697507 - DNA, 25 bp, Homo sapien
gctaagcacgcgctctaccactgag

SEQ ID NO: 1697508 - DNA, 25 bp, Homo sapien
tttaacggccagaaggtcagcgcag

SEQ ID NO: 1697509 - DNA, 25 bp, Homo sapien
tagaaggcccgagtgtataaggtga

SEQ ID NO: 1697510 - DNA, 25 bp, Homo sapien
ccagatgtaaagaagctgccgatgt

SEQ ID NO: 1697511 - DNA, 25 bp, Homo sapien
gatgtaccagcgtttatagaaggcc

SEQ ID NO: 1697512 - DNA, 25 bp, Homo sapien
cgcgcagatccggtcctcgggcgac

SEQ ID NO: 1697513 - DNA, 25 bp, Homo sapien
gtcctcgggcgaccgctctgtccca

SEQ ID NO: 1697514 - DNA, 25 bp, Homo sapien
ctctgtcccagttgggcgagactac

SEQ ID NO: 1697515 - DNA, 25 bp, Homo sapien
agatccggtcctcgggcgaccgctc

SEQ ID NO: 1697516 - DNA, 25 bp, Homo sapien
agaggctttgggtggcggcgtgttt

SEQ ID NO: 1697517 - DNA, 25 bp, Homo sapien
ggtcgggaagaaccgcgcagaggcc

SEQ ID NO: 1697518 - DNA, 25 bp, Homo sapien
tgaagcagcggggaacctctcctca

SEQ ID NO: 1697519 - DNA, 25 bp, Homo sapien
cgtcgggccccgacttgaagcagcg

SEQ ID NO: 1697520 - DNA, 25 bp, Homo sapien
gatattttacaattgctgacgagag

SEQ ID NO: 1697521 - DNA, 25 bp, Homo sapien
atattttacaattgctgacgagagc

SEQ ID NO: 1697522 - DNA, 25 bp, Homo sapien
tggcctgaatccgagaagcacaacc

SEQ ID NO: 1697523 - DNA, 25 bp, Homo sapien
gagaactttggcctgaatccgagaa

SEQ ID NO: 1697524 - DNA, 25 bp, Homo sapien
cctgaatccgagaagcacaacccat

SEQ ID NO: 1697525 - DNA, 25 bp, Homo sapien
actttggcctgaatccgagaagcac

SEQ ID NO: 1697526 - DNA, 25 bp, Homo sapien
gcccgagagcggggagaaagggcca

SEQ ID NO: 1697527 - DNA, 25 bp, Homo sapien
agagcggggagaaagggccatgttt

SEQ ID NO: 1697528 - DNA, 25 bp, Homo sapien
ccgagagcggggagaaagggccatg

SEQ ID NO: 1697529 - DNA, 25 bp, Homo sapien
gagagcggggagaaagggccatgtt

SEQ ID NO: 1697530 - DNA, 25 bp, Homo sapien
gagacgaggcttggtctgcgaggaa

SEQ ID NO: 1697531 - DNA, 25 bp, Homo sapien
aatgttagtccgctgaaactgcgat

SEQ ID NO: 1697532 - DNA, 25 bp, Homo sapien
tctgcgaggaatgttagtccgctga

SEQ ID NO: 1697533 - DNA, 25 bp, Homo sapien
ctaagaaggcagagacgaggcttgg

SEQ ID NO: 1697534 - DNA, 25 bp, Homo sapien
cactgacgaccgagcaaggcttgtt

SEQ ID NO: 1697535 - DNA, 25 bp, Homo sapien
tggagaagtcaatggaccaccccaa

SEQ ID NO: 1697536 - DNA, 25 bp, Homo sapien
gcttgttccaatgacagagagagga

SEQ ID NO: 1697537 - DNA, 25 bp, Homo sapien
tgaaccggcaaggacaaggagtccg

SEQ ID NO: 1697538 - DNA, 25 bp, Homo sapien
tgcggacagaggggtacagcaaggg

SEQ ID NO: 1697539 - DNA, 25 bp, Homo sapien
gacagaggggtacagcaaggggcag

SEQ ID NO: 1697540 - DNA, 25 bp, Homo sapien
cggacagaggggtacagcaaggggc

SEQ ID NO: 1697541 - DNA, 25 bp, Homo sapien
ctgcggacagaggggtacagcaagg

SEQ ID NO: 1697542 - DNA, 25 bp, Homo sapien
tgattcaaaagctttcatcttagct

SEQ ID NO: 1697543 - DNA, 25 bp, Homo sapien
aaagctttcatcttagcttttgcct

SEQ ID NO: 1697544 - DNA, 25 bp, Homo sapien
tcaaaagctttcatcttagcttttg

SEQ ID NO: 1697545 - DNA, 25 bp, Homo sapien
gattcaaaagctttcatcttagctt

SEQ ID NO: 1697546 - DNA, 25 bp, Homo sapien
aggctctctttgcttatttctagag

SEQ ID NO: 1697547 - DNA, 25 bp, Homo sapien
taggctctctttgcttatttctaga

SEQ ID NO: 1697548 - DNA, 25 bp, Homo sapien
ttaggctctctttgcttatttctag

SEQ ID NO: 1697549 - DNA, 25 bp, Homo sapien
gagacgacgtttttgctcttactgc

SEQ ID NO: 1697550 - DNA, 25 bp, Homo sapien
gacgacgtttttgctcttactgccc

SEQ ID NO: 1697551 - DNA, 25 bp, Homo sapien
cgacgtttttgctcttactgcccag

SEQ ID NO: 1697552 - DNA, 25 bp, Homo sapien
tgagacgacgtttttgctcttactg

SEQ ID NO: 1697553 - DNA, 25 bp, Homo sapien
atcgaacccgggacctcatacatgc

SEQ ID NO: 1697554 - DNA, 25 bp, Homo sapien
gggatcgaacccgggacctcataca

SEQ ID NO: 1697555 - DNA, 25 bp, Homo sapien
cgaacccgggacctcatacatgcaa

SEQ ID NO: 1697556 - DNA, 25 bp, Homo sapien
atacatgcaaagcatgcgctctacc

SEQ ID NO: 1697557 - DNA, 25 bp, Homo sapien
aaatggcaatgctccaaattttggc

SEQ ID NO: 1697558 - DNA, 25 bp, Homo sapien
caagagaggaattaagaaagacttt

SEQ ID NO: 1697559 - DNA, 25 bp, Homo sapien
tctgaatgggatacgaaatggcaat

SEQ ID NO: 1697560 - DNA, 25 bp, Homo sapien
aagactttaggattcaagggcatta

SEQ ID NO: 1697561 - DNA, 25 bp, Homo sapien
tgcttttaccacctcctacgatggc

SEQ ID NO: 1697562 - DNA, 25 bp, Homo sapien
tttgcttttaccacctcctacgatg

SEQ ID NO: 1697563 - DNA, 25 bp, Homo sapien
cacctcctacgatggcctcttcctc

SEQ ID NO: 1697564 - DNA, 25 bp, Homo sapien
tctttgcttttaccacctcctacga

SEQ ID NO: 1697565 - DNA, 25 bp, Homo sapien
cctcctgcataaggattcaacttgg

SEQ ID NO: 1697566 - DNA, 25 bp, Homo sapien
cctgcataaggattcaacttggtat

SEQ ID NO: 1697567 - DNA, 25 bp, Homo sapien
gcataaggattcaacttggtatcat

SEQ ID NO: 1697568 - DNA, 25 bp, Homo sapien
catctcctcctgcataaggattcaa

SEQ ID NO: 1697569 - DNA, 25 bp, Homo sapien
aagcttcggtgtcaggtgagctaga

SEQ ID NO: 1697570 - DNA, 25 bp, Homo sapien
cgttttcatctatttggacagttcc

SEQ ID NO: 1697571 - DNA, 25 bp, Homo sapien
aaaggtcaggcaggattttcacgtt

SEQ ID NO: 1697572 - DNA, 25 bp, Homo sapien
cagagttcccagataaagcttcggt

SEQ ID NO: 1697573 - DNA, 25 bp, Homo sapien
cccgggaaaggctgttgcgtgcagc

SEQ ID NO: 1697574 - DNA, 25 bp, Homo sapien
aggttgggggcgttgcggctgccgc

SEQ ID NO: 1697575 - DNA, 25 bp, Homo sapien
cagagaagcgctttcaaaggttggg

SEQ ID NO: 1697576 - DNA, 25 bp, Homo sapien
ggtcccgggaaaggctgttgcgtgc

SEQ ID NO: 1697577 - DNA, 25 bp, Homo sapien
ttggttggtccaaaaggctcatcag

SEQ ID NO: 1697578 - DNA, 25 bp, Homo sapien
tgaagtggttttgaacctgaaagga

SEQ ID NO: 1697579 - DNA, 25 bp, Homo sapien
aagactcttcacgttcagagacatc

SEQ ID NO: 1697580 - DNA, 25 bp, Homo sapien
tgaaaggatcccacttgtctggcaa

SEQ ID NO: 1697581 - DNA, 25 bp, Homo sapien
tgggagtaggttggtgagtgtagaa

SEQ ID NO: 1697582 - DNA, 25 bp, Homo sapien
ggtggctttcgaaaaaagccagatg

SEQ ID NO: 1697583 - DNA, 25 bp, Homo sapien
ttttgtttgaggtgtagtagcggct

SEQ ID NO: 1697584 - DNA, 25 bp, Homo sapien
gaaatgggatttgccggctgctttt

SEQ ID NO: 1697585 - DNA, 25 bp, Homo sapien
cagagctgaacgcttcgggagcgta

SEQ ID NO: 1697586 - DNA, 25 bp, Homo sapien
cattcctttttacgcaaacaactgt

SEQ ID NO: 1697587 - DNA, 25 bp, Homo sapien
caactgtcggcttttgagagcgtcg

SEQ ID NO: 1697588 - DNA, 25 bp, Homo sapien
tgagagcgtcgttgggctgtttcca

SEQ ID NO: 1697589 - DNA, 25 bp, Homo sapien
aaatgcagagcgacagcgtgtgtct

SEQ ID NO: 1697590 - DNA, 25 bp, Homo sapien
agcgacagcgtgtgtctggcaaatc

SEQ ID NO: 1697591 - DNA, 25 bp, Homo sapien
ggccaggaccgacagctgcttttcc

SEQ ID NO: 1697592 - DNA, 25 bp, Homo sapien
gcaaatctggggtggttacacggcc

SEQ ID NO: 1697593 - DNA, 25 bp, Homo sapien
cctggcgggcacttccattcacaaa

SEQ ID NO: 1697594 - DNA, 25 bp, Homo sapien
tgtcagcttgctccaaggtccgctc

SEQ ID NO: 1697595 - DNA, 25 bp, Homo sapien
aggtccgctccacaaccgactccct

SEQ ID NO: 1697596 - DNA, 25 bp, Homo sapien
cccaggaatgaagcattttcttgcc

SEQ ID NO: 1697597 - DNA, 25 bp, Homo sapien
aaagggctctgctcgttcccagaca

SEQ ID NO: 1697598 - DNA, 25 bp, Homo sapien
tgaaagcttcccgtgaacaaagggc

SEQ ID NO: 1697599 - DNA, 25 bp, Homo sapien
cactgcttgaaggtttccgggcctc

SEQ ID NO: 1697600 - DNA, 25 bp, Homo sapien
tccgtgggttctcaaagggaaggca

SEQ ID NO: 1697601 - DNA, 25 bp, Homo sapien
ctcctgcaccatgcaccttcaaatc

SEQ ID NO: 1697602 - DNA, 25 bp, Homo sapien
ggaagccaccaataacagtggctcc

SEQ ID NO: 1697603 - DNA, 25 bp, Homo sapien
ctgtggtgcttatggaagccaccaa

SEQ ID NO: 1697604 - DNA, 25 bp, Homo sapien
ggctcctgcaccatgcaccttcaaa

SEQ ID NO: 1697605 - DNA, 25 bp, Homo sapien
tctcgtaagtcttcaatgttggctt

SEQ ID NO: 1697606 - DNA, 25 bp, Homo sapien
cgtaagtcttcaatgttggcttctg

SEQ ID NO: 1697607 - DNA, 25 bp, Homo sapien
gtaagtcttcaatgttggcttctgc

SEQ ID NO: 1697608 - DNA, 25 bp, Homo sapien
ctcgtaagtcttcaatgttggcttc

SEQ ID NO: 1697609 - DNA, 25 bp, Homo sapien
gctaagcacgcgctctaccactgag

SEQ ID NO: 1697610 - DNA, 25 bp, Homo sapien
gcgctctaccactgagctacacccc

SEQ ID NO: 1697611 - DNA, 25 bp, Homo sapien
gctctaccactgagctacaccccct

SEQ ID NO: 1697612 - DNA, 25 bp, Homo sapien
acgcgctctaccactgagctacacc

SEQ ID NO: 1697613 - DNA, 25 bp, Homo sapien
ccacatggggtgtcttctgatgata

SEQ ID NO: 1697614 - DNA, 25 bp, Homo sapien
tgtcttctgatgataatggatgttt

SEQ ID NO: 1697615 - DNA, 25 bp, Homo sapien
gtgtcttctgatgataatggatgtt

SEQ ID NO: 1697616 - DNA, 25 bp, Homo sapien
acatggggtgtcttctgatgataat

SEQ ID NO: 1697617 - DNA, 25 bp, Homo sapien
tttctttgcagttgataatatccat

SEQ ID NO: 1697618 - DNA, 25 bp, Homo sapien
acatcaagcactgatcatccacttc

SEQ ID NO: 1697619 - DNA, 25 bp, Homo sapien
tgtagcacacatcaagcactgatca

SEQ ID NO: 1697620 - DNA, 25 bp, Homo sapien
cttcttctgtagcacacatcaagca

SEQ ID NO: 1697621 - DNA, 25 bp, Homo sapien
gcacacatcaagcactgatcatcca

SEQ ID NO: 1697622 - DNA, 25 bp, Homo sapien
gctctaccactgagctacacccccg

SEQ ID NO: 1697623 - DNA, 25 bp, Homo sapien
gctaagcacgcgctctaccactgag

SEQ ID NO: 1697624 - DNA, 25 bp, Homo sapien
gcgctctaccactgagctacacccc

SEQ ID NO: 1697625 - DNA, 25 bp, Homo sapien
acgcgctctaccactgagctacacc

SEQ ID NO: 1697626 - DNA, 25 bp, Homo sapien
gctttaaccaactaagctacggagc

SEQ ID NO: 1697627 - DNA, 25 bp, Homo sapien
gacaggcgctttaaccaactaagct

SEQ ID NO: 1697628 - DNA, 25 bp, Homo sapien
aggcgctttaaccaactaagctacg

SEQ ID NO: 1697629 - DNA, 25 bp, Homo sapien
gctgggagtcgaacccaggatctcc

SEQ ID NO: 1697630 - DNA, 25 bp, Homo sapien
ggcctcgtacatgcgaagcacgcgc

SEQ ID NO: 1697631 - DNA, 25 bp, Homo sapien
gggcctcgtacatgcgaagcacgcg

SEQ ID NO: 1697632 - DNA, 25 bp, Homo sapien
cgaacccggggcctcgtacatgcga

SEQ ID NO: 1697633 - DNA, 25 bp, Homo sapien
ccggggcctcgtacatgcgaagcac

SEQ ID NO: 1697634 - DNA, 25 bp, Homo sapien
cagacagccagaagcagtgaaaatt

SEQ ID NO: 1697635 - DNA, 25 bp, Homo sapien
gctctggtgcaacggtgtaggaaat

SEQ ID NO: 1697636 - DNA, 25 bp, Homo sapien
aaatctgtgatagggtggagactac

SEQ ID NO: 1697637 - DNA, 25 bp, Homo sapien
cagccagaagcagtgaaaattcagg

SEQ ID NO: 1697638 - DNA, 25 bp, Homo sapien
ctgagtgggttcttgcggcaaggaa

SEQ ID NO: 1697639 - DNA, 25 bp, Homo sapien
gagtgggttcttgcggcaaggaact

SEQ ID NO: 1697640 - DNA, 25 bp, Homo sapien
tgagtgggttcttgcggcaaggaac

SEQ ID NO: 1697641 - DNA, 25 bp, Homo sapien
taaatgtactgttccatttggaagt

SEQ ID NO: 1697642 - DNA, 25 bp, Homo sapien
tttataaatgtactgttccatttgg

SEQ ID NO: 1697643 - DNA, 25 bp, Homo sapien
aaatgtactgttccatttggaagta

SEQ ID NO: 1697644 - DNA, 25 bp, Homo sapien
tataaatgtactgttccatttggaa

SEQ ID NO: 1697645 - DNA, 25 bp, Homo sapien
ctctcaggtccttttcagatttatg

SEQ ID NO: 1697646 - DNA, 25 bp, Homo sapien
atgatgtagatgccatcgcttttac

SEQ ID NO: 1697647 - DNA, 25 bp, Homo sapien
atttatgatgtagatgccatcgctt

SEQ ID NO: 1697648 - DNA, 25 bp, Homo sapien
tatgatgtagatgccatcgctttta

SEQ ID NO: 1697649 - DNA, 25 bp, Homo sapien
gcaaggttttcaatggcagcaatgg

SEQ ID NO: 1697650 - DNA, 25 bp, Homo sapien
cagcaaggttttcaatggcagcaat

SEQ ID NO: 1697651 - DNA, 25 bp, Homo sapien
catcagcaaggttttcaatggcagc

SEQ ID NO: 1697652 - DNA, 25 bp, Homo sapien
tcagcaaggttttcaatggcagcaa

SEQ ID NO: 1697653 - DNA, 25 bp, Homo sapien
attaaaggctggtggtcaaccctgg

SEQ ID NO: 1697654 - DNA, 25 bp, Homo sapien
cattaaaggctggtggtcaaccctg

SEQ ID NO: 1697655 - DNA, 25 bp, Homo sapien
ccattaaaggctggtggtcaaccct

SEQ ID NO: 1697656 - DNA, 25 bp, Homo sapien
tccattaaaggctggtggtcaaccc

SEQ ID NO: 1697657 - DNA, 25 bp, Homo sapien
cgggaaatggtgcaacttatgcgcc

SEQ ID NO: 1697658 - DNA, 25 bp, Homo sapien
ggaaatggtgcaacttatgcgccga

SEQ ID NO: 1697659 - DNA, 25 bp, Homo sapien
aaatggtgcaacttatgcgccgaac

SEQ ID NO: 1697660 - DNA, 25 bp, Homo sapien
cacgggaaatggtgcaacttatgcg

SEQ ID NO: 1697661 - DNA, 25 bp, Homo sapien
tcttcgggatctctgtagaagcagg

SEQ ID NO: 1697662 - DNA, 25 bp, Homo sapien
ttcgggatctctgtagaagcaggga

SEQ ID NO: 1697663 - DNA, 25 bp, Homo sapien
tcgggatctctgtagaagcagggat

SEQ ID NO: 1697664 - DNA, 25 bp, Homo sapien
gggatctctgtagaagcagggatca

SEQ ID NO: 1697665 - DNA, 25 bp, Homo sapien
tgcaggccttcagacctgtctgcaa

SEQ ID NO: 1697666 - DNA, 25 bp, Homo sapien
gcaggccttcagacctgtctgcaac

SEQ ID NO: 1697667 - DNA, 25 bp, Homo sapien
ctgcaggccttcagacctgtctgca

SEQ ID NO: 1697668 - DNA, 25 bp, Homo sapien
tcagtcttctgtgtcaggctgagcg

SEQ ID NO: 1697669 - DNA, 25 bp, Homo sapien
ttcagtaggtaactgctggataggc

SEQ ID NO: 1697670 - DNA, 25 bp, Homo sapien
taactgctggataggcacagacggc

SEQ ID NO: 1697671 - DNA, 25 bp, Homo sapien
aggtaactgctggataggcacagac

SEQ ID NO: 1697672 - DNA, 25 bp, Homo sapien
ttaagaccattcagtggttgcttct

SEQ ID NO: 1697673 - DNA, 25 bp, Homo sapien
cattcagtggttgcttctacccatt

SEQ ID NO: 1697674 - DNA, 25 bp, Homo sapien
cattcagtggcctgagcagtttgag

SEQ ID NO: 1697675 - DNA, 25 bp, Homo sapien
agaccattcagtggttgcttctacc

SEQ ID NO: 1697676 - DNA, 25 bp, Homo sapien
ccaaaattcgtatctggattaaaca

SEQ ID NO: 1697677 - DNA, 25 bp, Homo sapien
ccctgctgggtttacaatgttctcc

SEQ ID NO: 1697678 - DNA, 25 bp, Homo sapien
tctggattaaacagtcgcaccacat

SEQ ID NO: 1697679 - DNA, 25 bp, Homo sapien
gcccctgctgggtttacaatgttct

SEQ ID NO: 1697680 - DNA, 25 bp, Homo sapien
acacgccctcgaaaatgctcagcct

SEQ ID NO: 1697681 - DNA, 25 bp, Homo sapien
gagaactgacacaacgtcactttcc

SEQ ID NO: 1697682 - DNA, 25 bp, Homo sapien
aaacctccaataccaggggctactg

SEQ ID NO: 1697683 - DNA, 25 bp, Homo sapien
gggctactgctccacgaatactcaa

SEQ ID NO: 1697684 - DNA, 25 bp, Homo sapien
ccttcattgcagacttgagttcttg

SEQ ID NO: 1697685 - DNA, 25 bp, Homo sapien
gcagacttgagttcttggctcatat

SEQ ID NO: 1697686 - DNA, 25 bp, Homo sapien
gctgtcatgtccactccttcattgc

SEQ ID NO: 1697687 - DNA, 25 bp, Homo sapien
tcatatttctgtacccgaacgtgca

SEQ ID NO: 1697688 - DNA, 25 bp, Homo sapien
cagggacttgaaccctgcaccgtca

SEQ ID NO: 1697689 - DNA, 25 bp, Homo sapien
gaacagggacttgaaccctgcaccg

SEQ ID NO: 1697690 - DNA, 25 bp, Homo sapien
gggacttgaaccctgcaccgtcaga

SEQ ID NO: 1697691 - DNA, 25 bp, Homo sapien
taaaagtctgatgttctaccaactg

SEQ ID NO: 1697692 - DNA, 25 bp, Homo sapien
gcaacagagtacgatgtttgtcatc

SEQ ID NO: 1697693 - DNA, 25 bp, Homo sapien
gtttgtcatcagtccaccagtctaa

SEQ ID NO: 1697694 - DNA, 25 bp, Homo sapien
tgtttgccgttgaatcaaaagtgtc

SEQ ID NO: 1697695 - DNA, 25 bp, Homo sapien
ccagtctaacactctgtcagggtag

SEQ ID NO: 1697696 - DNA, 25 bp, Homo sapien
cagggacctttagatcttcagtcta

SEQ ID NO: 1697697 - DNA, 25 bp, Homo sapien
ctctcccaactgagcaattttggct

SEQ ID NO: 1697698 - DNA, 25 bp, Homo sapien
gatcgaaccagggacctttagatct

SEQ ID NO: 1697699 - DNA, 25 bp, Homo sapien
agtctaacgctctcccaactgagca

SEQ ID NO: 1697700 - DNA, 25 bp, Homo sapien
tcatgcttagtctcaaagctgccgg

SEQ ID NO: 1697701 - DNA, 25 bp, Homo sapien
gaaatcgggaaatcactgcagctcc

SEQ ID NO: 1697702 - DNA, 25 bp, Homo sapien
aagctgccggtagattccgcttcta

SEQ ID NO: 1697703 - DNA, 25 bp, Homo sapien
gcttctaactttccacacaggcgcg

SEQ ID NO: 1697704 - DNA, 25 bp, Homo sapien
cacacgaattcctcgggtaggaaga

SEQ ID NO: 1697705 - DNA, 25 bp, Homo sapien
catcagccaataggccagaggagga

SEQ ID NO: 1697706 - DNA, 25 bp, Homo sapien
gctttggacgattttcaccggtatc

SEQ ID NO: 1697707 - DNA, 25 bp, Homo sapien
ggaacatatccgaagagaggccaga

SEQ ID NO: 1697708 - DNA, 25 bp, Homo sapien
taactggaaggctcataatcctccc

SEQ ID NO: 1697709 - DNA, 25 bp, Homo sapien
tctaccgcggaaagaagcacaagtc

SEQ ID NO: 1697710 - DNA, 25 bp, Homo sapien
ggtgatgagcgctcagccccattct

SEQ ID NO: 1697711 - DNA, 25 bp, Homo sapien
cggaaagaagcacaagtccctccgg

SEQ ID NO: 1697712 - DNA, 25 bp, Homo sapien
cgctctgtcgcccagtggcacgatc

SEQ ID NO: 1697713 - DNA, 25 bp, Homo sapien
gctctgtcgcccagtggcacgatct

SEQ ID NO: 1697714 - DNA, 25 bp, Homo sapien
ttggtgagccagacccggcacacgg

SEQ ID NO: 1697715 - DNA, 25 bp, Homo sapien
gcgtgttgagtgtataccgccctcg

SEQ ID NO: 1697716 - DNA, 25 bp, Homo sapien
cacacggagggcttgatgaatcgtt

SEQ ID NO: 1697717 - DNA, 25 bp, Homo sapien
tcgttttctgccaatcgggaccgga

SEQ ID NO: 1697718 - DNA, 25 bp, Homo sapien
cctacgaaggaaacactttatagat

SEQ ID NO: 1697719 - DNA, 25 bp, Homo sapien
tgcctacggccctcctacgaaggaa

SEQ ID NO: 1697720 - DNA, 25 bp, Homo sapien
ctacgaaggaaacactttatagatt

SEQ ID NO: 1697721 - DNA, 25 bp, Homo sapien
ggctgcctacggccctcctacgaag

SEQ ID NO: 1697722 - DNA, 25 bp, Homo sapien
gaagtggggcttcaacatcatgcca

SEQ ID NO: 1697723 - DNA, 25 bp, Homo sapien
ggggcttcaacatcatgccattcct

SEQ ID NO: 1697724 - DNA, 25 bp, Homo sapien
tggaagtggggcttcaacatcatgc

SEQ ID NO: 1697725 - DNA, 25 bp, Homo sapien
ggcttcaacatcatgccattcctgc

SEQ ID NO: 1697726 - DNA, 25 bp, Homo sapien
atgcagcgccctttggcttgccggg

SEQ ID NO: 1697727 - DNA, 25 bp, Homo sapien
ttgatgtgataacgcacagcagggc

SEQ ID NO: 1697728 - DNA, 25 bp, Homo sapien
tgccgggccttgattctgcggatct

SEQ ID NO: 1697729 - DNA, 25 bp, Homo sapien
cagggcacagcacaatgggccagat

SEQ ID NO: 1697730 - DNA, 25 bp, Homo sapien
gagatgccagtggtccgggtcacct

SEQ ID NO: 1697731 - DNA, 25 bp, Homo sapien
gatgccagtggtccgggtcaccttc

SEQ ID NO: 1697732 - DNA, 25 bp, Homo sapien
tgccagtggtccgggtcaccttctt

SEQ ID NO: 1697733 - DNA, 25 bp, Homo sapien
ccagtggtccgggtcaccttcttgt

SEQ ID NO: 1697734 - DNA, 25 bp, Homo sapien
ctgtcagctgggtggccaatttctg

SEQ ID NO: 1697735 - DNA, 25 bp, Homo sapien
cagctgggtggccaatttctgttct

SEQ ID NO: 1697736 - DNA, 25 bp, Homo sapien
ggtggccaatttctgttcttcagca

SEQ ID NO: 1697737 - DNA, 25 bp, Homo sapien
attcttgatgggcatgaccggtcct

SEQ ID NO: 1697738 - DNA, 25 bp, Homo sapien
aagagccgagcattgccgccaagca

SEQ ID NO: 1697739 - DNA, 25 bp, Homo sapien
gactagcgaaagctttgcaattcct

SEQ ID NO: 1697740 - DNA, 25 bp, Homo sapien
caagcattggcaccggccatgcgga

SEQ ID NO: 1697741 - DNA, 25 bp, Homo sapien
agctttgcaattcctctacttctca

SEQ ID NO: 1697742 - DNA, 25 bp, Homo sapien
tcaatcttctgatccggaatcagac

SEQ ID NO: 1697743 - DNA, 25 bp, Homo sapien
ggaatcagacgccttatccattagg

SEQ ID NO: 1697744 - DNA, 25 bp, Homo sapien
cgaaccctcaatcttctgatccgga

SEQ ID NO: 1697745 - DNA, 25 bp, Homo sapien
gaccacgaagggactcgaaccctca

SEQ ID NO: 1697746 - DNA, 25 bp, Homo sapien
agacactggagagccgacccagcga

SEQ ID NO: 1697747 - DNA, 25 bp, Homo sapien
tccaaacaatgaagtcctgggggag

SEQ ID NO: 1697748 - DNA, 25 bp, Homo sapien
gggaggctaaccacgatcaagattt

SEQ ID NO: 1697749 - DNA, 25 bp, Homo sapien
cagcgaccgaagaagcaaaagatct

SEQ ID NO: 1697750 - DNA, 25 bp, Homo sapien
tattgaacctctaccgtgtttgcca

SEQ ID NO: 1697751 - DNA, 25 bp, Homo sapien
ttttagcggtgtcgctggcctctag

SEQ ID NO: 1697752 - DNA, 25 bp, Homo sapien
ggcactgttacctggacggcattgg

SEQ ID NO: 1697753 - DNA, 25 bp, Homo sapien
cagggctccattaaaatttgtgacc

SEQ ID NO: 1697754 - DNA, 25 bp, Homo sapien
tgtgcagaaaaggtggagtaacctc

SEQ ID NO: 1697755 - DNA, 25 bp, Homo sapien
gaggtctccttctacaacgtgacag

SEQ ID NO: 1697756 - DNA, 25 bp, Homo sapien
tgtccggccctacttcagtctgagt

SEQ ID NO: 1697757 - DNA, 25 bp, Homo sapien
tcatcgccgggagacattattggga

SEQ ID NO: 1697758 - DNA, 25 bp, Homo sapien
ctatagacatccttgcagggctagg

SEQ ID NO: 1697759 - DNA, 25 bp, Homo sapien
gatacgtcttacttctcataggcca

SEQ ID NO: 1697760 - DNA, 25 bp, Homo sapien
cacaaggtcacatctagctatgagg

SEQ ID NO: 1697761 - DNA, 25 bp, Homo sapien
tattggataggcaactggcagtctt

SEQ ID NO: 1697762 - DNA, 25 bp, Homo sapien
tgtaaatcctgaaaggagccctgag

SEQ ID NO: 1697763 - DNA, 25 bp, Homo sapien
gatgaaccacagctctactcagtaa

SEQ ID NO: 1697764 - DNA, 25 bp, Homo sapien
gacctgggctgaatataagggtagt

SEQ ID NO: 1697765 - DNA, 25 bp, Homo sapien
cctaagaaaggtgtgactggcctgc

SEQ ID NO: 1697766 - DNA, 25 bp, Homo sapien
catgctaatctgtgcatggttccca

SEQ ID NO: 1697767 - DNA, 25 bp, Homo sapien
ctgtgcatggttcccatttgaggat

SEQ ID NO: 1697768 - DNA, 25 bp, Homo sapien
aatctgtgcatggttcccatttgag

SEQ ID NO: 1697769 - DNA, 25 bp, Homo sapien
gctaatctgtgcatggttcccattt

SEQ ID NO: 1697770 - DNA, 25 bp, Homo sapien
gtgcgcgggcgcgtctgggatacgg

SEQ ID NO: 1697771 - DNA, 25 bp, Homo sapien
cgcccggtgcctctcaggaacagcg

SEQ ID NO: 1697772 - DNA, 25 bp, Homo sapien
cactccaagccttcggtgcgcgggc

SEQ ID NO: 1697773 - DNA, 25 bp, Homo sapien
aggcgcaggcatcggcccggccact

SEQ ID NO: 1697774 - DNA, 25 bp, Homo sapien
aatcctcaacacgaggaagccaagc

SEQ ID NO: 1697775 - DNA, 25 bp, Homo sapien
gaccagaatcctcaacacgaggaag

SEQ ID NO: 1697776 - DNA, 25 bp, Homo sapien
cagaatcctcaacacgaggaagcca

SEQ ID NO: 1697777 - DNA, 25 bp, Homo sapien
gagaccagaatcctcaacacgagga

SEQ ID NO: 1697778 - DNA, 25 bp, Homo sapien
caaagtgtcagggatcgggggttct

SEQ ID NO: 1697779 - DNA, 25 bp, Homo sapien
cgggctatgctgagaagcaaggaat

SEQ ID NO: 1697780 - DNA, 25 bp, Homo sapien
ggttctcgggctatgctgagaagca

SEQ ID NO: 1697781 - DNA, 25 bp, Homo sapien
ttctcgggctatgctgagaagcaag

SEQ ID NO: 1697782 - DNA, 25 bp, Homo sapien
cctggaatccaagtggatgtggagc

SEQ ID NO: 1697783 - DNA, 25 bp, Homo sapien
ggagcccatggcgtcctctggcgct

SEQ ID NO: 1697784 - DNA, 25 bp, Homo sapien
ctctggcgctctcggtctcttcgac

SEQ ID NO: 1697785 - DNA, 25 bp, Homo sapien
ttttactgtgttgatgataaatggg

SEQ ID NO: 1697786 - DNA, 25 bp, Homo sapien
ctgaagtggatgaagggcgagggga

SEQ ID NO: 1697787 - DNA, 25 bp, Homo sapien
gctcaaaccaaacggttggccttgc

SEQ ID NO: 1697788 - DNA, 25 bp, Homo sapien
ctcaaaccaaacggttggccttgct

SEQ ID NO: 1697789 - DNA, 25 bp, Homo sapien
ccttgtgaagttccgtggagacact

SEQ ID NO: 1697790 - DNA, 25 bp, Homo sapien
ctgaaacgaagacaagacaaataat

SEQ ID NO: 1697791 - DNA, 25 bp, Homo sapien
tcctcccttgtgaagttccgtggag

SEQ ID NO: 1697792 - DNA, 25 bp, Homo sapien
gaagttccgtggagacactcggtcc

SEQ ID NO: 1697793 - DNA, 25 bp, Homo sapien
gagtctttccctctatgattagggc

SEQ ID NO: 1697794 - DNA, 25 bp, Homo sapien
tgattagggctttcgtagatgtacc

SEQ ID NO: 1697795 - DNA, 25 bp, Homo sapien
tcatttctgggccaggaacgaggag

SEQ ID NO: 1697796 - DNA, 25 bp, Homo sapien
tagggctttcgtagatgtaccgcct

SEQ ID NO: 1697797 - DNA, 25 bp, Homo sapien
gatgacaaaactacgtagtacaagg

SEQ ID NO: 1697798 - DNA, 25 bp, Homo sapien
taaggcgtaactatgattcaattca

SEQ ID NO: 1697799 - DNA, 25 bp, Homo sapien
tctggactttgcgaaaggccttcct

SEQ ID NO: 1697800 - DNA, 25 bp, Homo sapien
ctgcgaaggcaattgagtctggact

SEQ ID NO: 1697801 - DNA, 25 bp, Homo sapien
tctgaggttcgaactcaggaccttc

SEQ ID NO: 1697802 - DNA, 25 bp, Homo sapien
cccctctgaggttcgaactcaggac

SEQ ID NO: 1697803 - DNA, 25 bp, Homo sapien
cgctgcctactgcgctaaggaggca

SEQ ID NO: 1697804 - DNA, 25 bp, Homo sapien
gacgcgctgcctactgcgctaagga

SEQ ID NO: 1697805 - DNA, 25 bp, Homo sapien
ctctaccgactgagctatccgggct

SEQ ID NO: 1697806 - DNA, 25 bp, Homo sapien
cctcagattaaaagtctgatgctct

SEQ ID NO: 1697807 - DNA, 25 bp, Homo sapien
ttgaaccctggaccctcagattaaa

SEQ ID NO: 1697808 - DNA, 25 bp, Homo sapien
cgcccgaacagggacttgaaccctg

SEQ ID NO: 1697809 - DNA, 25 bp, Homo sapien
ctagacaaaattacactccctcagg

SEQ ID NO: 1697810 - DNA, 25 bp, Homo sapien
gagaccgggtctcgtcggatgtccc

SEQ ID NO: 1697811 - DNA, 25 bp, Homo sapien
ccccgggagtaccatgttggtgcca

SEQ ID NO: 1697812 - DNA, 25 bp, Homo sapien
aactgcaggcgttgctcgcaggcgc

SEQ ID NO: 1697813 - DNA, 25 bp, Homo sapien
agtttgacctgctccgtgtccggcc

SEQ ID NO: 1697814 - DNA, 25 bp, Homo sapien
gggccgcggcggtgagagcgccgaa

SEQ ID NO: 1697815 - DNA, 25 bp, Homo sapien
gccgcggcggtgagagcgccgaatc

SEQ ID NO: 1697816 - DNA, 25 bp, Homo sapien
cccgggccgcggcggtgagagcgcc

SEQ ID NO: 1697817 - DNA, 25 bp, Homo sapien
atcgaacccgggccgcggcggtgag

SEQ ID NO: 1697818 - DNA, 25 bp, Homo sapien
gactgaattggtgctgggtcacaca

SEQ ID NO: 1697819 - DNA, 25 bp, Homo sapien
cacacagctcgggattggaacttag

SEQ ID NO: 1697820 - DNA, 25 bp, Homo sapien
aacttagtgtcgatctggaaaggcc

SEQ ID NO: 1697821 - DNA, 25 bp, Homo sapien
aaggcctgcttggagaaattcacga

SEQ ID NO: 1697822 - DNA, 25 bp, Homo sapien
tcaaaggcatcattccagagactga

SEQ ID NO: 1697823 - DNA, 25 bp, Homo sapien
tcctgctaggtgctaattggttcaa

SEQ ID NO: 1697824 - DNA, 25 bp, Homo sapien
tggccgaacttgagggagaccactt

SEQ ID NO: 1697825 - DNA, 25 bp, Homo sapien
ggtgtttgcaatcctgcacggtaaa

SEQ ID NO: 1697826 - DNA, 25 bp, Homo sapien
gtaggcgcgcctcttttgtcacctg

SEQ ID NO: 1697827 - DNA, 25 bp, Homo sapien
ctccgtattccccaaggtaggcgcg

SEQ ID NO: 1697828 - DNA, 25 bp, Homo sapien
cagcaatagtttcctctccactatc

SEQ ID NO: 1697829 - DNA, 25 bp, Homo sapien
tctgcctggttctctcagtccctca

SEQ ID NO: 1697830 - DNA, 25 bp, Homo sapien
tttctcttagtgcaggcgacagcgc

SEQ ID NO: 1697831 - DNA, 25 bp, Homo sapien
aaaggcacaagacggttcagtttga

SEQ ID NO: 1697832 - DNA, 25 bp, Homo sapien
gcgacagcgcgtcggtctccttggc

SEQ ID NO: 1697833 - DNA, 25 bp, Homo sapien
gacaaagttgttcgttgcgtttctc

SEQ ID NO: 1697834 - DNA, 25 bp, Homo sapien
acgcccccgaagagactggagcctt

SEQ ID NO: 1697835 - DNA, 25 bp, Homo sapien
cccgaagagactggagccttaatcc

SEQ ID NO: 1697836 - DNA, 25 bp, Homo sapien
gagactggagccttaatccagcgcc

SEQ ID NO: 1697837 - DNA, 25 bp, Homo sapien
tgaacccacgcccccgaagagactg

SEQ ID NO: 1697838 - DNA, 25 bp, Homo sapien
taccaaaccattagggaacgatgag

SEQ ID NO: 1697839 - DNA, 25 bp, Homo sapien
tgaggcctgtataaccttaatacca

SEQ ID NO: 1697840 - DNA, 25 bp, Homo sapien
aatcaataaaggtggtcaggcgtgg

SEQ ID NO: 1697841 - DNA, 25 bp, Homo sapien
tctagcatggagaagttggattagc

SEQ ID NO: 1697842 - DNA, 25 bp, Homo sapien
tcagagtagacctccttgggaagat

SEQ ID NO: 1697843 - DNA, 25 bp, Homo sapien
tagattttagcgaaggtagaaccac

SEQ ID NO: 1697844 - DNA, 25 bp, Homo sapien
taaggcccatcaggattggaaggag

SEQ ID NO: 1697845 - DNA, 25 bp, Homo sapien
ttcatgtaaagcaaggtaaggccca

SEQ ID NO: 1697846 - DNA, 25 bp, Homo sapien
gacatgaattacatagccaataaat

SEQ ID NO: 1697847 - DNA, 25 bp, Homo sapien
tgctgtgtcgaatcagtttctgaca

SEQ ID NO: 1697848 - DNA, 25 bp, Homo sapien
gttaccaaatctgcagaatatcaca

SEQ ID NO: 1697849 - DNA, 25 bp, Homo sapien
tatagaccttcttattcacgtgatt

SEQ ID NO: 1697850 - DNA, 25 bp, Homo sapien
acaagagtttcgctcgtttcacagg

SEQ ID NO: 1697851 - DNA, 25 bp, Homo sapien
aagagtttcgctcgtttcacaggcc

SEQ ID NO: 1697852 - DNA, 25 bp, Homo sapien
caagagtttcgctcgtttcacaggc

SEQ ID NO: 1697853 - DNA, 25 bp, Homo sapien
ttccagatgtatagaggttaccgac

SEQ ID NO: 1697854 - DNA, 25 bp, Homo sapien
taccggcgtttataggagacctgcg

SEQ ID NO: 1697855 - DNA, 25 bp, Homo sapien
ggagacctgcgtgtataatgtgaga

SEQ ID NO: 1697856 - DNA, 25 bp, Homo sapien
caggacacatttagcgatttggaga

SEQ ID NO: 1697857 - DNA, 25 bp, Homo sapien
cttaacggccggaaggtcagcgaag

SEQ ID NO: 1697858 - DNA, 25 bp, Homo sapien
tgaggacgggtggaatggtagcgac

SEQ ID NO: 1697859 - DNA, 25 bp, Homo sapien
cagacaacagccttaacggccggaa

SEQ ID NO: 1697860 - DNA, 25 bp, Homo sapien
tggtcctgatgacaacagacaacag

SEQ ID NO: 1697861 - DNA, 25 bp, Homo sapien
ggtcccaacttctattccaatctgt

SEQ ID NO: 1697862 - DNA, 25 bp, Homo sapien
cggtcccaacttctattccaatctg

SEQ ID NO: 1697863 - DNA, 25 bp, Homo sapien
ttcggtcccaacttctattccaatc

SEQ ID NO: 1697864 - DNA, 25 bp, Homo sapien
gtcccaacttctattccaatctgtc

SEQ ID NO: 1697865 - DNA, 25 bp, Homo sapien
caaggctagggcgagggattctgct

SEQ ID NO: 1697866 - DNA, 25 bp, Homo sapien
agctgaacgctcaccccactgaagt

SEQ ID NO: 1697867 - DNA, 25 bp, Homo sapien
tgcagtgtgctcaagaggcaaggct

SEQ ID NO: 1697868 - DNA, 25 bp, Homo sapien
ggaacatggccctttaggagctgaa

SEQ ID NO: 1697869 - DNA, 25 bp, Homo sapien
ctacatccctgcctctgagttgcat

SEQ ID NO: 1697870 - DNA, 25 bp, Homo sapien
catccctgcctctgagttgcatcat

SEQ ID NO: 1697871 - DNA, 25 bp, Homo sapien
tacatccctgcctctgagttgcatc

SEQ ID NO: 1697872 - DNA, 25 bp, Homo sapien
acatccctgcctctgagttgcatca

SEQ ID NO: 1697873 - DNA, 25 bp, Homo sapien
tgtcactctctacctggcctacgac

SEQ ID NO: 1697874 - DNA, 25 bp, Homo sapien
tacctggcctacgacctcatcatgt

SEQ ID NO: 1697875 - DNA, 25 bp, Homo sapien
tacgacctcatcatgtataaactga

SEQ ID NO: 1697876 - DNA, 25 bp, Homo sapien
taaactgatgaaggggctctctggt

SEQ ID NO: 1697877 - DNA, 25 bp, Homo sapien
aggtgaaatctgatatttttctgtt

SEQ ID NO: 1697878 - DNA, 25 bp, Homo sapien
aaaggtgaaatctgatatttttctg

SEQ ID NO: 1697879 - DNA, 25 bp, Homo sapien
aaggtgaaatctgatatttttctgt

SEQ ID NO: 1697880 - DNA, 25 bp, Homo sapien
tgctccagacaggtacaaagatatc

SEQ ID NO: 1697881 - DNA, 25 bp, Homo sapien
ttgactcttgaaaaagatgtaaggg

SEQ ID NO: 1697882 - DNA, 25 bp, Homo sapien
ccatattgttgataatgaaatgatc

SEQ ID NO: 1697883 - DNA, 25 bp, Homo sapien
gctggagagctaggaacgttgaact

SEQ ID NO: 1697884 - DNA, 25 bp, Homo sapien
aaaagtatcccaattccagatagtg

SEQ ID NO: 1697885 - DNA, 25 bp, Homo sapien
gagaaaaaagtatcccaattccaga

SEQ ID NO: 1697886 - DNA, 25 bp, Homo sapien
agtatcccaattccagatagtgtgc

SEQ ID NO: 1697887 - DNA, 25 bp, Homo sapien
tcccaattccagatagtgtgcacca

SEQ ID NO: 1697888 - DNA, 25 bp, Homo sapien
accaccagtaggacacactctgcgg

SEQ ID NO: 1697889 - DNA, 25 bp, Homo sapien
acaggtttcctatcagtgttatcaa

SEQ ID NO: 1697890 - DNA, 25 bp, Homo sapien
ttgaactgtacaaccagcataagag

SEQ ID NO: 1697891 - DNA, 25 bp, Homo sapien
caccagtaggacacactctgcggtt

SEQ ID NO: 1697892 - DNA, 25 bp, Homo sapien
ctaggcgatgtctacataggggtat

SEQ ID NO: 1697893 - DNA, 25 bp, Homo sapien
aggcgatgtctacataggggtatcc

SEQ ID NO: 1697894 - DNA, 25 bp, Homo sapien
tctacataggggtatccagaaagta

SEQ ID NO: 1697895 - DNA, 25 bp, Homo sapien
gtctacataggggtatccagaaagt

SEQ ID NO: 1697896 - DNA, 25 bp, Homo sapien
catgataatcgcagaagtgctggag

SEQ ID NO: 1697897 - DNA, 25 bp, Homo sapien
tcaacacatgataatcgcagaagtg

SEQ ID NO: 1697898 - DNA, 25 bp, Homo sapien
ctaggtatcaacacatgataatcgc

SEQ ID NO: 1697899 - DNA, 25 bp, Homo sapien
gaagtgctggagcttcacagaagaa

SEQ ID NO: 1697900 - DNA, 25 bp, Homo sapien
gatgggctccacatgtcctaagcac

SEQ ID NO: 1697901 - DNA, 25 bp, Homo sapien
agatgggctccacatgtcctaagca

SEQ ID NO: 1697902 - DNA, 25 bp, Homo sapien
taagatgggctccacatgtcctaag

SEQ ID NO: 1697903 - DNA, 25 bp, Homo sapien
gggctccacatgtcctaagcacttt

SEQ ID NO: 1697904 - DNA, 25 bp, Homo sapien
ccattcccaccccattagtctcttc

SEQ ID NO: 1697905 - DNA, 25 bp, Homo sapien
ccccattcccaccccattagtctct

SEQ ID NO: 1697906 - DNA, 25 bp, Homo sapien
ccaccccattagtctcttcactgcc

SEQ ID NO: 1697907 - DNA, 25 bp, Homo sapien
accccattagtctcttcactgcccc

SEQ ID NO: 1697908 - DNA, 25 bp, Homo sapien
tgcaagcaaggaaaaggtaggaatt

SEQ ID NO: 1697909 - DNA, 25 bp, Homo sapien
agatgcaagcaaggaaaaggtagga

SEQ ID NO: 1697910 - DNA, 25 bp, Homo sapien
gatgcaagcaaggaaaaggtaggaa

SEQ ID NO: 1697911 - DNA, 25 bp, Homo sapien
cagatgcaagcaaggaaaaggtagg

SEQ ID NO: 1697912 - DNA, 25 bp, Homo sapien
gcattgacttttccatcatcattca

SEQ ID NO: 1697913 - DNA, 25 bp, Homo sapien
cattgacttttccatcatcattcat

SEQ ID NO: 1697914 - DNA, 25 bp, Homo sapien
ctagcattgacttttccatcatcat

SEQ ID NO: 1697915 - DNA, 25 bp, Homo sapien
tagcattgacttttccatcatcatt

SEQ ID NO: 1697916 - DNA, 25 bp, Homo sapien
ttcccagtgcgagaacaaagtaaag

SEQ ID NO: 1697917 - DNA, 25 bp, Homo sapien
gcagaaacgagggtgcatgaggaca

SEQ ID NO: 1697918 - DNA, 25 bp, Homo sapien
cagtaggacacactctgtggttccc

SEQ ID NO: 1697919 - DNA, 25 bp, Homo sapien
caggtttcctatcagtgtcatcaag

SEQ ID NO: 1697920 - DNA, 25 bp, Homo sapien
gatgagctccacatgttccaaacac

SEQ ID NO: 1697921 - DNA, 25 bp, Homo sapien
tacagctcggacgatggcaccataa

SEQ ID NO: 1697922 - DNA, 25 bp, Homo sapien
gatggtggctggagatatatgcaca

SEQ ID NO: 1697923 - DNA, 25 bp, Homo sapien
cattgacatgggtatcaacacacga

SEQ ID NO: 1697924 - DNA, 25 bp, Homo sapien
ccaccccattagtctcttcactgcc

SEQ ID NO: 1697925 - DNA, 25 bp, Homo sapien
tcccaccccattagtctcttcactg

SEQ ID NO: 1697926 - DNA, 25 bp, Homo sapien
accccattagtctcttcactgcccc

SEQ ID NO: 1697927 - DNA, 25 bp, Homo sapien
tcattcccaccccattagtctcttc

SEQ ID NO: 1697928 - DNA, 25 bp, Homo sapien
atctgcctttggttgccaagacact

SEQ ID NO: 1697929 - DNA, 25 bp, Homo sapien
cagatctgcctttggttgccaagac

SEQ ID NO: 1697930 - DNA, 25 bp, Homo sapien
caccagatctgcctttggttgccaa

SEQ ID NO: 1697931 - DNA, 25 bp, Homo sapien
ctttggttgccaagacactatgatt

SEQ ID NO: 1697932 - DNA, 25 bp, Homo sapien
tgtctccttgcaacattgacgtggc

SEQ ID NO: 1697933 - DNA, 25 bp, Homo sapien
tctccaggacctctataaagtaaca

SEQ ID NO: 1697934 - DNA, 25 bp, Homo sapien
taaagtaacacctcatagcagtaag

SEQ ID NO: 1697935 - DNA, 25 bp, Homo sapien
ccatcccccatgttaagccatagaa

SEQ ID NO: 1697936 - DNA, 25 bp, Homo sapien
ttccatttacgtgatctgtaagtgt

SEQ ID NO: 1697937 - DNA, 25 bp, Homo sapien
gctgttgctgataccaagacactca

SEQ ID NO: 1697938 - DNA, 25 bp, Homo sapien
aagagtttccatttacgtgatctgt

SEQ ID NO: 1697939 - DNA, 25 bp, Homo sapien
tcagagagttgcattctccctcatc

SEQ ID NO: 1697940 - DNA, 25 bp, Homo sapien
cctcatcatgaatcagcgcgtctgt

SEQ ID NO: 1697941 - DNA, 25 bp, Homo sapien
tcagatgctgtttaacctgggaagc

SEQ ID NO: 1697942 - DNA, 25 bp, Homo sapien
tgtatccttagtttccaccgtgtgg

SEQ ID NO: 1697943 - DNA, 25 bp, Homo sapien
ttatgtcctttgatcgctatgtggc

SEQ ID NO: 1697944 - DNA, 25 bp, Homo sapien
tgcgggaggtcctgaacccccagcc

SEQ ID NO: 1697945 - DNA, 25 bp, Homo sapien
ctgcagggcagaggctgcgggaggt

SEQ ID NO: 1697946 - DNA, 25 bp, Homo sapien
ggctgcgggaggtcctgaaccccca

SEQ ID NO: 1697947 - DNA, 25 bp, Homo sapien
gagcctgcagggcagaggctgcggg

SEQ ID NO: 1697948 - DNA, 25 bp, Homo sapien
taatgccgttgttcctgtcgtcagg

SEQ ID NO: 1697949 - DNA, 25 bp, Homo sapien
cttccggccgttgttaatgccgttg

SEQ ID NO: 1697950 - DNA, 25 bp, Homo sapien
gccgttgttaatgccgttgttcctg

SEQ ID NO: 1697951 - DNA, 25 bp, Homo sapien
ccgttgttcctgtcgtcaggactag

SEQ ID NO: 1697952 - DNA, 25 bp, Homo sapien
atccgtcgttgtctgggacaccgct

SEQ ID NO: 1697953 - DNA, 25 bp, Homo sapien
tccgtcgttgtctgggacaccgctc

SEQ ID NO: 1697954 - DNA, 25 bp, Homo sapien
cgtcgttgtctgggacaccgctcac

SEQ ID NO: 1697955 - DNA, 25 bp, Homo sapien
ccgtcgttgtctgggacaccgctca

SEQ ID NO: 1697956 - DNA, 25 bp, Homo sapien
ttctttgctaggacacttttatcac

SEQ ID NO: 1697957 - DNA, 25 bp, Homo sapien
tgtgaaacaaaaaggtcattagaac

SEQ ID NO: 1697958 - DNA, 25 bp, Homo sapien
tgctcaaaagtgctttagctactta

SEQ ID NO: 1697959 - DNA, 25 bp, Homo sapien
ggtcatcctatttgttggtgtaaaa

SEQ ID NO: 1697960 - DNA, 25 bp, Homo sapien
aaagatgtaaggagttgcctaactg

SEQ ID NO: 1697961 - DNA, 25 bp, Homo sapien
ctccagactggtacaaagatactgt

SEQ ID NO: 1697962 - DNA, 25 bp, Homo sapien
ccatattgttggtaatggaatgagc

SEQ ID NO: 1697963 - DNA, 25 bp, Homo sapien
gagttgcctaactggttgagttaca

SEQ ID NO: 1697964 - DNA, 25 bp, Homo sapien
tcttatacctaaagaaagaaccaca

SEQ ID NO: 1697965 - DNA, 25 bp, Homo sapien
aagtctgtccatgcattgtcaaccg

SEQ ID NO: 1697966 - DNA, 25 bp, Homo sapien
tgtcaaccgctcacttgcaaacaga

SEQ ID NO: 1697967 - DNA, 25 bp, Homo sapien
gaaccacataaactcaaagtctgtc

SEQ ID NO: 1697968 - DNA, 25 bp, Homo sapien
agaagtcttccgaacttgcattttt

SEQ ID NO: 1697969 - DNA, 25 bp, Homo sapien
tccaagtagaataaagaagtcttcc

SEQ ID NO: 1697970 - DNA, 25 bp, Homo sapien
ctgaggccaattagaaaatccaagt

SEQ ID NO: 1697971 - DNA, 25 bp, Homo sapien
gaggccaattagaaaatccaagtag

SEQ ID NO: 1697972 - DNA, 25 bp, Homo sapien
caagataaccacaaagagaactact

SEQ ID NO: 1697973 - DNA, 25 bp, Homo sapien
tcaagataaccacaaagagaactac

SEQ ID NO: 1697974 - DNA, 25 bp, Homo sapien
cccgggcaatggcaccataggcagt

SEQ ID NO: 1697975 - DNA, 25 bp, Homo sapien
gatgggctccacatgtcctaaacac

SEQ ID NO: 1697976 - DNA, 25 bp, Homo sapien
gaagtgatccactaggcgatgtcca

SEQ ID NO: 1697977 - DNA, 25 bp, Homo sapien
tcagctcatttgcatgggtgtcaac

SEQ ID NO: 1697978 - DNA, 25 bp, Homo sapien
cattgacttttccatcatcattcat

SEQ ID NO: 1697979 - DNA, 25 bp, Homo sapien
tagcattgacttttccatcatcatt

SEQ ID NO: 1697980 - DNA, 25 bp, Homo sapien
gcattgacttttccatcatcattca

SEQ ID NO: 1697981 - DNA, 25 bp, Homo sapien
ctagcattgacttttccatcatcat

SEQ ID NO: 1697982 - DNA, 25 bp, Homo sapien
caggtttcctatcagtgtcatcaag

SEQ ID NO: 1697983 - DNA, 25 bp, Homo sapien
ccaccagtaggacacactctgtggt

SEQ ID NO: 1697984 - DNA, 25 bp, Homo sapien
cagtaggacacactctgtggttccc

SEQ ID NO: 1697985 - DNA, 25 bp, Homo sapien
atgaacaggtttcctatcagtgtca

SEQ ID NO: 1697986 - DNA, 25 bp, Homo sapien
acacagaggtacccagaaggtgaag

SEQ ID NO: 1697987 - DNA, 25 bp, Homo sapien
gtcagtttattttcacgggtattga

SEQ ID NO: 1697988 - DNA, 25 bp, Homo sapien
cacgggtattgacaaatgataatca

SEQ ID NO: 1697989 - DNA, 25 bp, Homo sapien
tattttcacgggtattgacaaatga

SEQ ID NO: 1697990 - DNA, 25 bp, Homo sapien
cagtttattttcacgggtattgaca

SEQ ID NO: 1697991 - DNA, 25 bp, Homo sapien
ggcaatagcaccataggaagtgaaa

SEQ ID NO: 1697992 - DNA, 25 bp, Homo sapien
gcaatagcaccataggaagtgaaaa

SEQ ID NO: 1697993 - DNA, 25 bp, Homo sapien
tagagggttaagactaggtgtaaca

SEQ ID NO: 1697994 - DNA, 25 bp, Homo sapien
gaacttgccttgatcttgagaattc

SEQ ID NO: 1697995 - DNA, 25 bp, Homo sapien
cttagtctcttcactacccctctta

SEQ ID NO: 1697996 - DNA, 25 bp, Homo sapien
ttagtctcttcactacccctcttac

SEQ ID NO: 1697997 - DNA, 25 bp, Homo sapien
ccttagtctcttcactacccctctt

SEQ ID NO: 1697998 - DNA, 25 bp, Homo sapien
cccttagtctcttcactacccctct

SEQ ID NO: 1697999 - DNA, 25 bp, Homo sapien
tgggtaagcttaaggacaagggcaa

SEQ ID NO: 1698000 - DNA, 25 bp, Homo sapien
ttgggtaagcttaaggacaagggca

SEQ ID NO: 1698001 - DNA, 25 bp, Homo sapien
caccagatctgcctttggttgccaa

SEQ ID NO: 1698002 - DNA, 25 bp, Homo sapien
ctttggttgccaagacactatgatt

SEQ ID NO: 1698003 - DNA, 25 bp, Homo sapien
atctgcctttggttgccaagacact

SEQ ID NO: 1698004 - DNA, 25 bp, Homo sapien
cagatctgcctttggttgccaagac

SEQ ID NO: 1698005 - DNA, 25 bp, Homo sapien
ccatcccccatgttaagccatagaa

SEQ ID NO: 1698006 - DNA, 25 bp, Homo sapien
tgtctccttgcaacattgacgtggc

SEQ ID NO: 1698007 - DNA, 25 bp, Homo sapien
tctccaggacctctataaagtaaca

SEQ ID NO: 1698008 - DNA, 25 bp, Homo sapien
taaagtaacacctcatagcagtaag

SEQ ID NO: 1698009 - DNA, 25 bp, Homo sapien
cctccctgatttctggtattactgg

SEQ ID NO: 1698010 - DNA, 25 bp, Homo sapien
catttctccaacgatctctgtttct

SEQ ID NO: 1698011 - DNA, 25 bp, Homo sapien
tccagctttacccattgagagctct

SEQ ID NO: 1698012 - DNA, 25 bp, Homo sapien
caagttagctgctgggtcccttgga

SEQ ID NO: 1698013 - DNA, 25 bp, Homo sapien
ctcaagtatgctgtatagggcttcc

SEQ ID NO: 1698014 - DNA, 25 bp, Homo sapien
tcaagtatgctgtatagggcttccc

SEQ ID NO: 1698015 - DNA, 25 bp, Homo sapien
accagtgtatcacatctcttcagcc

SEQ ID NO: 1698016 - DNA, 25 bp, Homo sapien
cagtgtatcacatctcttcagccca

SEQ ID NO: 1698017 - DNA, 25 bp, Homo sapien
aagtagatgcctctagtaccagtgt

SEQ ID NO: 1698018 - DNA, 25 bp, Homo sapien
tctaaagtagatgcctctagtacca

SEQ ID NO: 1698019 - DNA, 25 bp, Homo sapien
gtggctgtcattgcaaattataatc

SEQ ID NO: 1698020 - DNA, 25 bp, Homo sapien
cagaaggatgaaatcactgtggctg

SEQ ID NO: 1698021 - DNA, 25 bp, Homo sapien
cttgttagagaagcccagaaggatg

SEQ ID NO: 1698022 - DNA, 25 bp, Homo sapien
aaggatgaaatcactgtggctgtca

SEQ ID NO: 1698023 - DNA, 25 bp, Homo sapien
ataaaaatgatccaaaaagtatctt

SEQ ID NO: 1698024 - DNA, 25 bp, Homo sapien
ccaaaaagtatcttctccaaatgtg

SEQ ID NO: 1698025 - DNA, 25 bp, Homo sapien
aaaatgatccaaaaagtatcttctc

SEQ ID NO: 1698026 - DNA, 25 bp, Homo sapien
caaaaagtatcttctccaaatgtgg

SEQ ID NO: 1698027 - DNA, 25 bp, Homo sapien
tcaaggacacaagaactatgaccat

SEQ ID NO: 1698028 - DNA, 25 bp, Homo sapien
caaggacacaagaactatgaccata

SEQ ID NO: 1698029 - DNA, 25 bp, Homo sapien
cttcaaggacacaagaactatgacc

SEQ ID NO: 1698030 - DNA, 25 bp, Homo sapien
ggacacaagaactatgaccatattt

SEQ ID NO: 1698031 - DNA, 25 bp, Homo sapien
acatagggatgtggagttttggatc

SEQ ID NO: 1698032 - DNA, 25 bp, Homo sapien
acagctgctggtcaaacagaggtct

SEQ ID NO: 1698033 - DNA, 25 bp, Homo sapien
aatacatagggatgtggagttttgg

SEQ ID NO: 1698034 - DNA, 25 bp, Homo sapien
gctggtcaaacagaggtctaccaag

SEQ ID NO: 1698035 - DNA, 25 bp, Homo sapien
ggtattttgcagtggatgacacact

SEQ ID NO: 1698036 - DNA, 25 bp, Homo sapien
gctacataacaatccacagccatga

SEQ ID NO: 1698037 - DNA, 25 bp, Homo sapien
gaaggacatattccgtggccccaag

SEQ ID NO: 1698038 - DNA, 25 bp, Homo sapien
aaacatagagttgaatggcacagcc

SEQ ID NO: 1698039 - DNA, 25 bp, Homo sapien
gcacagccttagcaatagcaccaga

SEQ ID NO: 1698040 - DNA, 25 bp, Homo sapien
gatagccagctgcagacaaagtttt

SEQ ID NO: 1698041 - DNA, 25 bp, Homo sapien
ggaggacaacactggcgatagacat

SEQ ID NO: 1698042 - DNA, 25 bp, Homo sapien
gaaggtagacacctgtgacagtgcc

SEQ ID NO: 1698043 - DNA, 25 bp, Homo sapien
tccccaatcttattagtgctccctt

SEQ ID NO: 1698044 - DNA, 25 bp, Homo sapien
ctcctccccaatcttattagtgctc

SEQ ID NO: 1698045 - DNA, 25 bp, Homo sapien
ccaatcttattagtgctccctttac

SEQ ID NO: 1698046 - DNA, 25 bp, Homo sapien
tcctccccaatcttattagtgctcc

SEQ ID NO: 1698047 - DNA, 25 bp, Homo sapien
gctgtatggataaagagcatatgga

SEQ ID NO: 1698048 - DNA, 25 bp, Homo sapien
ggctgtatggataaagagcatatgg

SEQ ID NO: 1698049 - DNA, 25 bp, Homo sapien
aaggctgtatggataaagagcatat

SEQ ID NO: 1698050 - DNA, 25 bp, Homo sapien
aggctgtatggataaagagcatatg

SEQ ID NO: 1698051 - DNA, 25 bp, Homo sapien
gatgtacaaggctgactttcaccag

SEQ ID NO: 1698052 - DNA, 25 bp, Homo sapien
ttaagttagatgtacaaggctgact

SEQ ID NO: 1698053 - DNA, 25 bp, Homo sapien
gactttgttcatccaaggccacatc

SEQ ID NO: 1698054 - DNA, 25 bp, Homo sapien
ctttgttcatccaaggccacatcca

SEQ ID NO: 1698055 - DNA, 25 bp, Homo sapien
ccatctcccatgttaagccagagag

SEQ ID NO: 1698056 - DNA, 25 bp, Homo sapien
cgccatctcccatgttaagccagag

SEQ ID NO: 1698057 - DNA, 25 bp, Homo sapien
gagagatctgctgtgagtctcatgt

SEQ ID NO: 1698058 - DNA, 25 bp, Homo sapien
tgctgtgagtctcatgtctcctggt

SEQ ID NO: 1698059 - DNA, 25 bp, Homo sapien
ccatgctcatgggaagttcatctcc

SEQ ID NO: 1698060 - DNA, 25 bp, Homo sapien
tctacacactgaggaataatgacgt

SEQ ID NO: 1698061 - DNA, 25 bp, Homo sapien
tcccatttgatagtagtgtccctct

SEQ ID NO: 1698062 - DNA, 25 bp, Homo sapien
gtctacatccagtccaacagttctt

SEQ ID NO: 1698063 - DNA, 25 bp, Homo sapien
gctatcttggatctttgttacacca

SEQ ID NO: 1698064 - DNA, 25 bp, Homo sapien
tagtcccacagatgttggtcaatgc

SEQ ID NO: 1698065 - DNA, 25 bp, Homo sapien
aaatatggtccttatcctgctgcca

SEQ ID NO: 1698066 - DNA, 25 bp, Homo sapien
gccattactggataaacatctccaa

SEQ ID NO: 1698067 - DNA, 25 bp, Homo sapien
tcagaagttgtcctaaatctcagag

SEQ ID NO: 1698068 - DNA, 25 bp, Homo sapien
ccagcttctccgttaatgacagtac

SEQ ID NO: 1698069 - DNA, 25 bp, Homo sapien
tattaagaacgccacattttccagg

SEQ ID NO: 1698070 - DNA, 25 bp, Homo sapien
cacacctagcattttgcagtatata

SEQ ID NO: 1698071 - DNA, 25 bp, Homo sapien
ggtcagaaaacaccataagaactgg

SEQ ID NO: 1698072 - DNA, 25 bp, Homo sapien
aaacaggtcaaacgaaggccggcat

SEQ ID NO: 1698073 - DNA, 25 bp, Homo sapien
ccagggagaacgaagacatcttggc

SEQ ID NO: 1698074 - DNA, 25 bp, Homo sapien
tgcttggtacagatcctggtcagaa

SEQ ID NO: 1698075 - DNA, 25 bp, Homo sapien
gacggtcagaaaatcccaataggat

SEQ ID NO: 1698076 - DNA, 25 bp, Homo sapien
tagccagggacggtcagaaaatccc

SEQ ID NO: 1698077 - DNA, 25 bp, Homo sapien
tcccaataggataaaatcatctagc

SEQ ID NO: 1698078 - DNA, 25 bp, Homo sapien
gataaaatcatctagcgagctttga

SEQ ID NO: 1698079 - DNA, 25 bp, Homo sapien
tccagatgggaaactaggataatgg

SEQ ID NO: 1698080 - DNA, 25 bp, Homo sapien
ggaaaagatgtaggccaccagaaag

SEQ ID NO: 1698081 - DNA, 25 bp, Homo sapien
ccagaaagattacagaggggtgtct

SEQ ID NO: 1698082 - DNA, 25 bp, Homo sapien
ggactgtcaagctggggatccagat

SEQ ID NO: 1698083 - DNA, 25 bp, Homo sapien
tccagcgactttcagcagagcagat

SEQ ID NO: 1698084 - DNA, 25 bp, Homo sapien
tatggcagcgtaacggtcaaaggcc

SEQ ID NO: 1698085 - DNA, 25 bp, Homo sapien
caatacaggctagtttcaaaagggc

SEQ ID NO: 1698086 - DNA, 25 bp, Homo sapien
gcattcagtagaacccagggccaaa

SEQ ID NO: 1698087 - DNA, 25 bp, Homo sapien
gtttaggaagccaaagacagtagga

SEQ ID NO: 1698088 - DNA, 25 bp, Homo sapien
taggaagccaaagacagtaggaaga

SEQ ID NO: 1698089 - DNA, 25 bp, Homo sapien
ctgtttaggaagccaaagacagtag

SEQ ID NO: 1698090 - DNA, 25 bp, Homo sapien
gaagccaaagacagtaggaagaaaa

SEQ ID NO: 1698091 - DNA, 25 bp, Homo sapien
aagaaggaatccactcattgaagtc

SEQ ID NO: 1698092 - DNA, 25 bp, Homo sapien
ccactcattgaagtcaaattgacca

SEQ ID NO: 1698093 - DNA, 25 bp, Homo sapien
cattgaagtcaaattgaccatagtc

SEQ ID NO: 1698094 - DNA, 25 bp, Homo sapien
gtcaaattgaccatagtctctctga

SEQ ID NO: 1698095 - DNA, 25 bp, Homo sapien
gttaatggcagcatgcatgagccca

SEQ ID NO: 1698096 - DNA, 25 bp, Homo sapien
gagacgacggtccacggtaatgatg

SEQ ID NO: 1698097 - DNA, 25 bp, Homo sapien
gattgctgcgtacctgtcataagac

SEQ ID NO: 1698098 - DNA, 25 bp, Homo sapien
gagaatacaaggtccacagtcgatg

SEQ ID NO: 1698099 - DNA, 25 bp, Homo sapien
cacttcagacaaaagacaaaataat

SEQ ID NO: 1698100 - DNA, 25 bp, Homo sapien
caaaagacaaaataatctatggaac

SEQ ID NO: 1698101 - DNA, 25 bp, Homo sapien
gacaaaagacaaaataatctatgga

SEQ ID NO: 1698102 - DNA, 25 bp, Homo sapien
cagacaaaagacaaaataatctatg

SEQ ID NO: 1698103 - DNA, 25 bp, Homo sapien
ttggcagtgtcaccgtagagtaaca

SEQ ID NO: 1698104 - DNA, 25 bp, Homo sapien
gaaaatgatggatacggttggaacc

SEQ ID NO: 1698105 - DNA, 25 bp, Homo sapien
acagagcatgctacaagaacgggtc

SEQ ID NO: 1698106 - DNA, 25 bp, Homo sapien
catcacggcgaacaacatggactcc

SEQ ID NO: 1698107 - DNA, 25 bp, Homo sapien
gctctctaacgcaggatggatatag

SEQ ID NO: 1698108 - DNA, 25 bp, Homo sapien
gaagctctctaacgcaggatggata

SEQ ID NO: 1698109 - DNA, 25 bp, Homo sapien
atgaagctctctaacgcaggatgga

SEQ ID NO: 1698110 - DNA, 25 bp, Homo sapien
tctctaacgcaggatggatataggt

SEQ ID NO: 1698111 - DNA, 25 bp, Homo sapien
tgggtttagtacaggagtgaccaca

SEQ ID NO: 1698112 - DNA, 25 bp, Homo sapien
agatcagtgggtttagtacaggagt

SEQ ID NO: 1698113 - DNA, 25 bp, Homo sapien
tgttcctcaaagtatagatcagtgg

SEQ ID NO: 1698114 - DNA, 25 bp, Homo sapien
agtgtacatgatggcaacaatccgg

SEQ ID NO: 1698115 - DNA, 25 bp, Homo sapien
aaagccttctgatcactctacccaa

SEQ ID NO: 1698116 - DNA, 25 bp, Homo sapien
agccttctgatcactctacccaagg

SEQ ID NO: 1698117 - DNA, 25 bp, Homo sapien
ttctgatcactctacccaaggcccc

SEQ ID NO: 1698118 - DNA, 25 bp, Homo sapien
ccttctgatcactctacccaaggcc

SEQ ID NO: 1698119 - DNA, 25 bp, Homo sapien
tgagtgttctgattcacagttaagg

SEQ ID NO: 1698120 - DNA, 25 bp, Homo sapien
acagttaaggaagctattcatgttt

SEQ ID NO: 1698121 - DNA, 25 bp, Homo sapien
cagttaaggaagctattcatgttta

SEQ ID NO: 1698122 - DNA, 25 bp, Homo sapien
gtgttctgattcacagttaaggaag

SEQ ID NO: 1698123 - DNA, 25 bp, Homo sapien
aggctgcagttcttgaatgtctgtc

SEQ ID NO: 1698124 - DNA, 25 bp, Homo sapien
gctgcagttcttgaatgtctgtcac

SEQ ID NO: 1698125 - DNA, 25 bp, Homo sapien
aaaggctgcagttcttgaatgtctg

SEQ ID NO: 1698126 - DNA, 25 bp, Homo sapien
gaaaaggctgcagttcttgaatgtc

SEQ ID NO: 1698127 - DNA, 25 bp, Homo sapien
ttggcagtgttacgctggagtagca

SEQ ID NO: 1698128 - DNA, 25 bp, Homo sapien
tttttggcagtgttacgctggagta

SEQ ID NO: 1698129 - DNA, 25 bp, Homo sapien
gcagtgttacgctggagtagcagat

SEQ ID NO: 1698130 - DNA, 25 bp, Homo sapien
catttttggcagtgttacgctggag

SEQ ID NO: 1698131 - DNA, 25 bp, Homo sapien
gagctgagggttcataatgacagtg

SEQ ID NO: 1698132 - DNA, 25 bp, Homo sapien
tcacggccaacaacatggcctctgt

SEQ ID NO: 1698133 - DNA, 25 bp, Homo sapien
aatcatccagattgtgatggccatc

SEQ ID NO: 1698134 - DNA, 25 bp, Homo sapien
gacagtgtagcgaagtggcttgcaa

SEQ ID NO: 1698135 - DNA, 25 bp, Homo sapien
tagaaccacagaagttcaagcgaga

SEQ ID NO: 1698136 - DNA, 25 bp, Homo sapien
gtgatagatacggttagaaccacag

SEQ ID NO: 1698137 - DNA, 25 bp, Homo sapien
ttcaagcgagaggtcattagggagt

SEQ ID NO: 1698138 - DNA, 25 bp, Homo sapien
agaagaagtgatagatacggttaga

SEQ ID NO: 1698139 - DNA, 25 bp, Homo sapien
tgagcagccactgattaagctcagc

SEQ ID NO: 1698140 - DNA, 25 bp, Homo sapien
cagtactgagcagccactgattaag

SEQ ID NO: 1698141 - DNA, 25 bp, Homo sapien
ctgtgacagtactgagcagccactg

SEQ ID NO: 1698142 - DNA, 25 bp, Homo sapien
actgattaagctcagctttagcaat

SEQ ID NO: 1698143 - DNA, 25 bp, Homo sapien
ctaaaagaatgagtcttgaagaaga

SEQ ID NO: 1698144 - DNA, 25 bp, Homo sapien
gtagaaataggagagtaatgtgaga

SEQ ID NO: 1698145 - DNA, 25 bp, Homo sapien
aataggagagtaatgtgagaaagaa

SEQ ID NO: 1698146 - DNA, 25 bp, Homo sapien
cagtgctttgcggagcatgctaaaa

SEQ ID NO: 1698147 - DNA, 25 bp, Homo sapien
tgaatataggtgaagagaacaggtg

SEQ ID NO: 1698148 - DNA, 25 bp, Homo sapien
aagagaacaggtgcatacaaaagaa

SEQ ID NO: 1698149 - DNA, 25 bp, Homo sapien
ctgaggcatgatgaatataggtgaa

SEQ ID NO: 1698150 - DNA, 25 bp, Homo sapien
agagaacaggtgcatacaaaagaat

SEQ ID NO: 1698151 - DNA, 25 bp, Homo sapien
gtatacatgatggcagtgatccggt

SEQ ID NO: 1698152 - DNA, 25 bp, Homo sapien
cagtatacatgatggcagtgatccg

SEQ ID NO: 1698153 - DNA, 25 bp, Homo sapien
ccacagtatacatgatggcagtgat

SEQ ID NO: 1698154 - DNA, 25 bp, Homo sapien
cacagtatacatgatggcagtgatc

SEQ ID NO: 1698155 - DNA, 25 bp, Homo sapien
cttttcattgctctattaaaggccc

SEQ ID NO: 1698156 - DNA, 25 bp, Homo sapien
cattgctctattaaaggcccctttc

SEQ ID NO: 1698157 - DNA, 25 bp, Homo sapien
gccaccttttcattgctctattaaa

SEQ ID NO: 1698158 - DNA, 25 bp, Homo sapien
agccaccttttcattgctctattaa

SEQ ID NO: 1698159 - DNA, 25 bp, Homo sapien
catctgatcgcagcactagatctcc

SEQ ID NO: 1698160 - DNA, 25 bp, Homo sapien
ggaaaaatcacaactatggaatcgt

SEQ ID NO: 1698161 - DNA, 25 bp, Homo sapien
cctgcatacctttgactggaagaca

SEQ ID NO: 1698162 - DNA, 25 bp, Homo sapien
tatggaatcgtgaaatgggcaaaga

SEQ ID NO: 1698163 - DNA, 25 bp, Homo sapien
catccagagcgagagatgtggcgcc

SEQ ID NO: 1698164 - DNA, 25 bp, Homo sapien
tgaggaaattgcctgccacggtcag

SEQ ID NO: 1698165 - DNA, 25 bp, Homo sapien
tatagccaatctccaaggccgagag

SEQ ID NO: 1698166 - DNA, 25 bp, Homo sapien
gatggtaacgaggatacgcccgtag

SEQ ID NO: 1698167 - DNA, 25 bp, Homo sapien
ccacttgtgatctcacaatgagaac

SEQ ID NO: 1698168 - DNA, 25 bp, Homo sapien
gcaattaagtcagactctcttcacg

SEQ ID NO: 1698169 - DNA, 25 bp, Homo sapien
tcagactctcttcacggccttgctg

SEQ ID NO: 1698170 - DNA, 25 bp, Homo sapien
tctggactggttggagcctccactt

SEQ ID NO: 1698171 - DNA, 25 bp, Homo sapien
aacaccgccgcccagaattgaaggc

SEQ ID NO: 1698172 - DNA, 25 bp, Homo sapien
gattatgtatgtctgagcttgccct

SEQ ID NO: 1698173 - DNA, 25 bp, Homo sapien
gagactagaagagtatggcctcatg

SEQ ID NO: 1698174 - DNA, 25 bp, Homo sapien
ggttcagttcctagcatgagaagca

SEQ ID NO: 1698175 - DNA, 25 bp, Homo sapien
cctggtcaacatggtgaaacctcgt

SEQ ID NO: 1698176 - DNA, 25 bp, Homo sapien
ctgaggtcagatgtttgagatcagc

SEQ ID NO: 1698177 - DNA, 25 bp, Homo sapien
agcctggtcaacatggtgaaacctc

SEQ ID NO: 1698178 - DNA, 25 bp, Homo sapien
tggtcaacatggtgaaacctcgtct

SEQ ID NO: 1698179 - DNA, 25 bp, Homo sapien
tattctaaatgttgtggtagttctg

SEQ ID NO: 1698180 - DNA, 25 bp, Homo sapien
caataaattgttaggctctatctta

SEQ ID NO: 1698181 - DNA, 25 bp, Homo sapien
tgtacatccataaagaattagaaaa

SEQ ID NO: 1698182 - DNA, 25 bp, Homo sapien
catggattaattaaccgatcttcat

SEQ ID NO: 1698183 - DNA, 25 bp, Homo sapien
gatcaaacgttgtctagcagaagtg

SEQ ID NO: 1698184 - DNA, 25 bp, Homo sapien
agcaggtggaacctcacattggtgc

SEQ ID NO: 1698185 - DNA, 25 bp, Homo sapien
ggtggaacctcacattggtgcctct

SEQ ID NO: 1698186 - DNA, 25 bp, Homo sapien
ctgatcaaacgttgtctagcagaag

SEQ ID NO: 1698187 - DNA, 25 bp, Homo sapien
agtcctttccagtgctgggtgttca

SEQ ID NO: 1698188 - DNA, 25 bp, Homo sapien
aagagagtcctttccagtgctgggt

SEQ ID NO: 1698189 - DNA, 25 bp, Homo sapien
gggtcaagaggtaggaagtgaagac

SEQ ID NO: 1698190 - DNA, 25 bp, Homo sapien
acaaccacaaagagagtcctttcca

SEQ ID NO: 1698191 - DNA, 25 bp, Homo sapien
cttgtggtaaagcagaggtccaaga

SEQ ID NO: 1698192 - DNA, 25 bp, Homo sapien
tgagaggcacaaccacgaagatgac

SEQ ID NO: 1698193 - DNA, 25 bp, Homo sapien
cagacagccacgtatcggtcaaagg

SEQ ID NO: 1698194 - DNA, 25 bp, Homo sapien
ccatgctgtggcagagttaatcctc

SEQ ID NO: 1698195 - DNA, 25 bp, Homo sapien
gacactggacacagccaactggatt

SEQ ID NO: 1698196 - DNA, 25 bp, Homo sapien
ctcctgagtgctcgctttatctcct

SEQ ID NO: 1698197 - DNA, 25 bp, Homo sapien
tcctgagtgctcgctttatctcctt

SEQ ID NO: 1698198 - DNA, 25 bp, Homo sapien
cagctttccctggagtctctttcct

SEQ ID NO: 1698199 - DNA, 25 bp, Homo sapien
agctttccctggagtctctttcctt

SEQ ID NO: 1698200 - DNA, 25 bp, Homo sapien
tcaagcacactcatgagaagcaagg

SEQ ID NO: 1698201 - DNA, 25 bp, Homo sapien
tacgtagatacatgcaaggtgtcca

SEQ ID NO: 1698202 - DNA, 25 bp, Homo sapien
gaatgctatgatggagtagttcccc

SEQ ID NO: 1698203 - DNA, 25 bp, Homo sapien
cattgaggcaggttctaaagggcct

SEQ ID NO: 1698204 - DNA, 25 bp, Homo sapien
gaaatcctaaaccaccaagatgatg

SEQ ID NO: 1698205 - DNA, 25 bp, Homo sapien
cctttcaccatgtgtgggcacagca

SEQ ID NO: 1698206 - DNA, 25 bp, Homo sapien
tgcaactttaatgtggccagaacca

SEQ ID NO: 1698207 - DNA, 25 bp, Homo sapien
catgaaatctgccttaatcttggag

SEQ ID NO: 1698208 - DNA, 25 bp, Homo sapien
ggagcagagaaatctcctcctggca

SEQ ID NO: 1698209 - DNA, 25 bp, Homo sapien
gaaggtaggtgaacagctctggtct

SEQ ID NO: 1698210 - DNA, 25 bp, Homo sapien
caagatgcggagctgcccatgtttc

SEQ ID NO: 1698211 - DNA, 25 bp, Homo sapien
atttcttgacataccactccactgg

SEQ ID NO: 1698212 - DNA, 25 bp, Homo sapien
ttattcagggttagagcttagagcc

SEQ ID NO: 1698213 - DNA, 25 bp, Homo sapien
tagcttagtggccaggtaaagactg

SEQ ID NO: 1698214 - DNA, 25 bp, Homo sapien
tatgcatgcatgtggccgtcggaac

SEQ ID NO: 1698215 - DNA, 25 bp, Homo sapien
taggttcctggaagtaatgtctccc

SEQ ID NO: 1698216 - DNA, 25 bp, Homo sapien
tgatcatcagcttggactcccgtga

SEQ ID NO: 1698217 - DNA, 25 bp, Homo sapien
tgtgacccagaagcaaagcgttagc

SEQ ID NO: 1698218 - DNA, 25 bp, Homo sapien
ctctctcggttctaggaggcaggaa

SEQ ID NO: 1698219 - DNA, 25 bp, Homo sapien
tgactgagaccgcaaaccgagtagc

SEQ ID NO: 1698220 - DNA, 25 bp, Homo sapien
ggctcttgttgggacagggcccctc

SEQ ID NO: 1698221 - DNA, 25 bp, Homo sapien
cttctgagctgcagtactcaatgtc

SEQ ID NO: 1698222 - DNA, 25 bp, Homo sapien
gagctgcagtactcaatgtccccta

SEQ ID NO: 1698223 - DNA, 25 bp, Homo sapien
agtactcaatgtcccctacaaatgc

SEQ ID NO: 1698224 - DNA, 25 bp, Homo sapien
gactctggaccgagacttaacattg

SEQ ID NO: 1698225 - DNA, 25 bp, Homo sapien
cacgttgtcctggttgagaggctcc

SEQ ID NO: 1698226 - DNA, 25 bp, Homo sapien
cagtcatcccaaggcgaccagggtt

SEQ ID NO: 1698227 - DNA, 25 bp, Homo sapien
tctggacccggatagggattgctgc

SEQ ID NO: 1698228 - DNA, 25 bp, Homo sapien
cactgaattgtcacgtccttgtaca

SEQ ID NO: 1698229 - DNA, 25 bp, Homo sapien
ccacagggctgacattattgggcat

SEQ ID NO: 1698230 - DNA, 25 bp, Homo sapien
attgtcacgtccttgtacacctcca

SEQ ID NO: 1698231 - DNA, 25 bp, Homo sapien
gctgacattattgggcatgctggaa

SEQ ID NO: 1698232 - DNA, 25 bp, Homo sapien
ttcttcccaaaatgacagacagcaa

SEQ ID NO: 1698233 - DNA, 25 bp, Homo sapien
ttcccaaaatgacagacagcaatcc

SEQ ID NO: 1698234 - DNA, 25 bp, Homo sapien
ccaaaatgacagacagcaatccaga

SEQ ID NO: 1698235 - DNA, 25 bp, Homo sapien
cagacagcaatccagaaatgataaa

SEQ ID NO: 1698236 - DNA, 25 bp, Homo sapien
tcttttcatccactccactttgtga

SEQ ID NO: 1698237 - DNA, 25 bp, Homo sapien
tttcatccactccactttgtgaaaa

SEQ ID NO: 1698238 - DNA, 25 bp, Homo sapien
cttttcatccactccactttgtgaa

SEQ ID NO: 1698239 - DNA, 25 bp, Homo sapien
ttcttttcatccactccactttgtg

SEQ ID NO: 1698240 - DNA, 25 bp, Homo sapien
cagagacttatggtgggacagacag

SEQ ID NO: 1698241 - DNA, 25 bp, Homo sapien
tcctcggcaggatgggacttcctct

SEQ ID NO: 1698242 - DNA, 25 bp, Homo sapien
gaggctgctgatcaggctgttccag

SEQ ID NO: 1698243 - DNA, 25 bp, Homo sapien
tgcttgcttgatgcacgacacatga

SEQ ID NO: 1698244 - DNA, 25 bp, Homo sapien
tctcattcttcgaaaagtagtggct

SEQ ID NO: 1698245 - DNA, 25 bp, Homo sapien
ttcgaaaagtagtggctgtcttggg

SEQ ID NO: 1698246 - DNA, 25 bp, Homo sapien
gctggtggtctcattcttcgaaaag

SEQ ID NO: 1698247 - DNA, 25 bp, Homo sapien
cattcttcgaaaagtagtggctgtc

SEQ ID NO: 1698248 - DNA, 25 bp, Homo sapien
cctggggcatgctggtgatcactgt

SEQ ID NO: 1698249 - DNA, 25 bp, Homo sapien
taagggtgcactccttgttcatctc

SEQ ID NO: 1698250 - DNA, 25 bp, Homo sapien
tctccaggacggtgtcagcaaatgc

SEQ ID NO: 1698251 - DNA, 25 bp, Homo sapien
ggtgatcactgtgtcactttgggtc

SEQ ID NO: 1698252 - DNA, 25 bp, Homo sapien
tgtaaacaagttactctctaaggtc

SEQ ID NO: 1698253 - DNA, 25 bp, Homo sapien
cgtgaacaggcggaataattgtgat

SEQ ID NO: 1698254 - DNA, 25 bp, Homo sapien
gttctctctgcacgtgaacaggcgg

SEQ ID NO: 1698255 - DNA, 25 bp, Homo sapien
aaatctgccccaagtgttctctctg

SEQ ID NO: 1698256 - DNA, 25 bp, Homo sapien
atgatcagtcagctgtgctgagatg

SEQ ID NO: 1698257 - DNA, 25 bp, Homo sapien
gagaatgatcagtcagctgtgctga

SEQ ID NO: 1698258 - DNA, 25 bp, Homo sapien
ccgagaatgatcagtcagctgtgct

SEQ ID NO: 1698259 - DNA, 25 bp, Homo sapien
gaatgatcagtcagctgtgctgaga

SEQ ID NO: 1698260 - DNA, 25 bp, Homo sapien
tgactgtcacctttcggccagacct

SEQ ID NO: 1698261 - DNA, 25 bp, Homo sapien
tttccacaactattcgagggcagag

SEQ ID NO: 1698262 - DNA, 25 bp, Homo sapien
tcctgggaatacctgagacaaaggg

SEQ ID NO: 1698263 - DNA, 25 bp, Homo sapien
gaataacaccagtcaagaaggagga

SEQ ID NO: 1698264 - DNA, 25 bp, Homo sapien
tgtggaatctcaagctgactgatga

SEQ ID NO: 1698265 - DNA, 25 bp, Homo sapien
tgtgtccactggtgccctggatcag

SEQ ID NO: 1698266 - DNA, 25 bp, Homo sapien
tccactggtgccctggatcagcaac

SEQ ID NO: 1698267 - DNA, 25 bp, Homo sapien
gaccttgtagatgtaaacatcttca

SEQ ID NO: 1698268 - DNA, 25 bp, Homo sapien
gactctgtagtgctcccaaaacatg

SEQ ID NO: 1698269 - DNA, 25 bp, Homo sapien
tgtctgaaggtgcacttcatgtcca

SEQ ID NO: 1698270 - DNA, 25 bp, Homo sapien
ctggtttattttcgctgaggacatc

SEQ ID NO: 1698271 - DNA, 25 bp, Homo sapien
tgcacttcatgtccaggtcaatctg

SEQ ID NO: 1698272 - DNA, 25 bp, Homo sapien
ccaaaatgcaggttagtcgcttgtt

SEQ ID NO: 1698273 - DNA, 25 bp, Homo sapien
tggttgccccatgctgtagttcagt

SEQ ID NO: 1698274 - DNA, 25 bp, Homo sapien
aacttgcactgtagggagagtccgg

SEQ ID NO: 1698275 - DNA, 25 bp, Homo sapien
gagacaacctcctaaagagtgagag

SEQ ID NO: 1698276 - DNA, 25 bp, Homo sapien
tgttcattaggcacttcaccatctt

SEQ ID NO: 1698277 - DNA, 25 bp, Homo sapien
atgttcattaggcacttcaccatct

SEQ ID NO: 1698278 - DNA, 25 bp, Homo sapien
agaaatgttcattaggcacttcacc

SEQ ID NO: 1698279 - DNA, 25 bp, Homo sapien
aaatgttcattaggcacttcaccat

SEQ ID NO: 1698280 - DNA, 25 bp, Homo sapien
taagtcacaattacccagccagtgt

SEQ ID NO: 1698281 - DNA, 25 bp, Homo sapien
tgtgatgcctcgtgggtagctgtcc

SEQ ID NO: 1698282 - DNA, 25 bp, Homo sapien
gacagaaggtgccttgtctgtaagt

SEQ ID NO: 1698283 - DNA, 25 bp, Homo sapien
atgtcacatgggaggactgtgtcac

SEQ ID NO: 1698284 - DNA, 25 bp, Homo sapien
cagcagggttgtaagagtcccctgc

SEQ ID NO: 1698285 - DNA, 25 bp, Homo sapien
tcagggccagaaggttgtgacacca

SEQ ID NO: 1698286 - DNA, 25 bp, Homo sapien
cagaaggttgtgacaccaggatgca

SEQ ID NO: 1698287 - DNA, 25 bp, Homo sapien
cccctgcataaggtcagggccagaa

SEQ ID NO: 1698288 - DNA, 25 bp, Homo sapien
gggccccaaggaatcagagcctact

SEQ ID NO: 1698289 - DNA, 25 bp, Homo sapien
gagcctactcctgagatgtggagcc

SEQ ID NO: 1698290 - DNA, 25 bp, Homo sapien
ctctggaagttagaacatcttggga

SEQ ID NO: 1698291 - DNA, 25 bp, Homo sapien
agaacatcttgggatgtagactcct

SEQ ID NO: 1698292 - DNA, 25 bp, Homo sapien
gaagcaccatagaaaccagtttaag

SEQ ID NO: 1698293 - DNA, 25 bp, Homo sapien
cagtttaaggtggaaagccggatgc

SEQ ID NO: 1698294 - DNA, 25 bp, Homo sapien
ccttatctcatcgatgaagcaccat

SEQ ID NO: 1698295 - DNA, 25 bp, Homo sapien
gggtctcctatgcatccttatctca

SEQ ID NO: 1698296 - DNA, 25 bp, Homo sapien
ctcccagtaggtagacatcccagag

SEQ ID NO: 1698297 - DNA, 25 bp, Homo sapien
ccagtaggtagacatcccagagcca

SEQ ID NO: 1698298 - DNA, 25 bp, Homo sapien
gccacaggatgagcatgaaggaagt

SEQ ID NO: 1698299 - DNA, 25 bp, Homo sapien
agtaggtagacatcccagagccaca

SEQ ID NO: 1698300 - DNA, 25 bp, Homo sapien
tctgtcctggctataggtcccaggg

SEQ ID NO: 1698301 - DNA, 25 bp, Homo sapien
attggccacccagggacttaattct

SEQ ID NO: 1698302 - DNA, 25 bp, Homo sapien
taccatagttgtcaccacacactca

SEQ ID NO: 1698303 - DNA, 25 bp, Homo sapien
tgtgaaggccatgtataccatagtt

SEQ ID NO: 1698304 - DNA, 25 bp, Homo sapien
caaacaggaacagcttcagggggtg

SEQ ID NO: 1698305 - DNA, 25 bp, Homo sapien
ctgcaagccaaacaggaacagcttc

SEQ ID NO: 1698306 - DNA, 25 bp, Homo sapien
gcaagccaaacaggaacagcttcag

SEQ ID NO: 1698307 - DNA, 25 bp, Homo sapien
aacaggaacagcttcagggggtgtt

SEQ ID NO: 1698308 - DNA, 25 bp, Homo sapien
agttcccccatggaggcctcagggt

SEQ ID NO: 1698309 - DNA, 25 bp, Homo sapien
ccctggtctaatgctgaggacactc

SEQ ID NO: 1698310 - DNA, 25 bp, Homo sapien
gaggcatgtccagtaaacccaaggt

SEQ ID NO: 1698311 - DNA, 25 bp, Homo sapien
gctgtcagggaagctcaagtcactc

SEQ ID NO: 1698312 - DNA, 25 bp, Homo sapien
tgacactgattttaggcccttggag

SEQ ID NO: 1698313 - DNA, 25 bp, Homo sapien
taggccagtcctatgatcttagagg

SEQ ID NO: 1698314 - DNA, 25 bp, Homo sapien
tcaggagggctatacccatgggctg

SEQ ID NO: 1698315 - DNA, 25 bp, Homo sapien
ccttgggtacagcatagccaggtga

SEQ ID NO: 1698316 - DNA, 25 bp, Homo sapien
catcacatgcaggagagttgtctct

SEQ ID NO: 1698317 - DNA, 25 bp, Homo sapien
gctttggggcagcttgccaagtgct

SEQ ID NO: 1698318 - DNA, 25 bp, Homo sapien
tttggggcagcttgccaagtgctgc

SEQ ID NO: 1698319 - DNA, 25 bp, Homo sapien
tcagtattgactttccatgtctaag

SEQ ID NO: 1698320 - DNA, 25 bp, Homo sapien
cctacaggttgggaccatggatgca

SEQ ID NO: 1698321 - DNA, 25 bp, Homo sapien
gagcagattgtggaccctggaagca

SEQ ID NO: 1698322 - DNA, 25 bp, Homo sapien
gagcctcctgcagtgagtagagcca

SEQ ID NO: 1698323 - DNA, 25 bp, Homo sapien
cccgggtatgtacgcagtgctccaa

SEQ ID NO: 1698324 - DNA, 25 bp, Homo sapien
tatggctcaaccagccatctacttc

SEQ ID NO: 1698325 - DNA, 25 bp, Homo sapien
agccatctacttcttggctggctac

SEQ ID NO: 1698326 - DNA, 25 bp, Homo sapien
gacctttgcctttgaccttctgttg

SEQ ID NO: 1698327 - DNA, 25 bp, Homo sapien
gctgtccatggtagtcagtatggct

SEQ ID NO: 1698328 - DNA, 25 bp, Homo sapien
gagacgaggccagaagaatccttga

SEQ ID NO: 1698329 - DNA, 25 bp, Homo sapien
gggagctccctagccacttctggat

SEQ ID NO: 1698330 - DNA, 25 bp, Homo sapien
cagaagcagccaacaaaaacgtaat

SEQ ID NO: 1698331 - DNA, 25 bp, Homo sapien
tagtaactaggacttcctcatggga

SEQ ID NO: 1698332 - DNA, 25 bp, Homo sapien
ctcccagaatgtttggaaggtcgaa

SEQ ID NO: 1698333 - DNA, 25 bp, Homo sapien
caacactcggtaggcagaatgatca

SEQ ID NO: 1698334 - DNA, 25 bp, Homo sapien
ggtcagtttgtggattgtaatccca

SEQ ID NO: 1698335 - DNA, 25 bp, Homo sapien
tgactaccccttataagcaaaggga

SEQ ID NO: 1698336 - DNA, 25 bp, Homo sapien
gcggcggcaccacgctagtagtgaa

SEQ ID NO: 1698337 - DNA, 25 bp, Homo sapien
tagaagagcgatacgaacttgcccc

SEQ ID NO: 1698338 - DNA, 25 bp, Homo sapien
cccgtcaaggtcaggaggtagcaca

SEQ ID NO: 1698339 - DNA, 25 bp, Homo sapien
gcaaccgagttggtgaggccactta

SEQ ID NO: 1698340 - DNA, 25 bp, Homo sapien
tccgcagcagcctcctcgctgcccc

SEQ ID NO: 1698341 - DNA, 25 bp, Homo sapien
cagcagcctcctcgctgcccccttc

SEQ ID NO: 1698342 - DNA, 25 bp, Homo sapien
cgcagcagcctcctcgctgccccct

SEQ ID NO: 1698343 - DNA, 25 bp, Homo sapien
gcagcctcctcgctgcccccttcac

SEQ ID NO: 1698344 - DNA, 25 bp, Homo sapien
tgcccagcctggcctctccccagac

SEQ ID NO: 1698345 - DNA, 25 bp, Homo sapien
atgaggagatccctgttcctgtctt

SEQ ID NO: 1698346 - DNA, 25 bp, Homo sapien
tgggttgacctcaatattctgctca

SEQ ID NO: 1698347 - DNA, 25 bp, Homo sapien
gatgagggcgccagtctgggtgagg

SEQ ID NO: 1698348 - DNA, 25 bp, Homo sapien
caggttctgctgattgagcattttc

SEQ ID NO: 1698349 - DNA, 25 bp, Homo sapien
caaagaacatgtccggtctaagacc

SEQ ID NO: 1698350 - DNA, 25 bp, Homo sapien
gcaatgatcgagactaagacgggta

SEQ ID NO: 1698351 - DNA, 25 bp, Homo sapien
ggcagattacggcatcagaaagggc

SEQ ID NO: 1698352 - DNA, 25 bp, Homo sapien
tgatgccaacccatatgacagcgtg

SEQ ID NO: 1698353 - DNA, 25 bp, Homo sapien
agaaagcctggtgcggagctttggt

SEQ ID NO: 1698354 - DNA, 25 bp, Homo sapien
gagaaagcctggtgcggagctttgg

SEQ ID NO: 1698355 - DNA, 25 bp, Homo sapien
aaagcctggtgcggagctttggtta

SEQ ID NO: 1698356 - DNA, 25 bp, Homo sapien
ggagaaagcctggtgcggagctttg

SEQ ID NO: 1698357 - DNA, 25 bp, Homo sapien
actacaaagagagtcctttccagtg

SEQ ID NO: 1698358 - DNA, 25 bp, Homo sapien
aactacaaagagagtcctttccagt

SEQ ID NO: 1698359 - DNA, 25 bp, Homo sapien
agcaggatgatgagtccaccggggt

SEQ ID NO: 1698360 - DNA, 25 bp, Homo sapien
caggatgatgagtccaccggggtta

SEQ ID NO: 1698361 - DNA, 25 bp, Homo sapien
ggatgatgagtccaccggggttagg

SEQ ID NO: 1698362 - DNA, 25 bp, Homo sapien
atgatgagtccaccggggttaggag

SEQ ID NO: 1698363 - DNA, 25 bp, Homo sapien
cagagcagcccagtaagatgatggt

SEQ ID NO: 1698364 - DNA, 25 bp, Homo sapien
cggggacacaacttatggtgaaaca

SEQ ID NO: 1698365 - DNA, 25 bp, Homo sapien
gcatcccggggacacaacttatggt

SEQ ID NO: 1698366 - DNA, 25 bp, Homo sapien
cagaggtggacgatggtggcatggc

SEQ ID NO: 1698367 - DNA, 25 bp, Homo sapien
ggcaggcgcagggtggatggtgtct

SEQ ID NO: 1698368 - DNA, 25 bp, Homo sapien
ggcgcagggtggatggtgtctggac

SEQ ID NO: 1698369 - DNA, 25 bp, Homo sapien
gcagaaaggcaggcgcagggtggat

SEQ ID NO: 1698370 - DNA, 25 bp, Homo sapien
aaggcaggcgcagggtggatggtgt

SEQ ID NO: 1698371 - DNA, 25 bp, Homo sapien
tcgaattagagctgggacctcacag

SEQ ID NO: 1698372 - DNA, 25 bp, Homo sapien
ggatctcattgtaggaggtgtcttc

SEQ ID NO: 1698373 - DNA, 25 bp, Homo sapien
gggacctcacagacaaaatcatcca

SEQ ID NO: 1698374 - DNA, 25 bp, Homo sapien
tctcattgtaggaggtgtcttcaca

SEQ ID NO: 1698375 - DNA, 25 bp, Homo sapien
cccaggcaatggctccataagagac

SEQ ID NO: 1698376 - DNA, 25 bp, Homo sapien
ccataagagacaaggatgaggctga

SEQ ID NO: 1698377 - DNA, 25 bp, Homo sapien
ctccataagagacaaggatgaggct

SEQ ID NO: 1698378 - DNA, 25 bp, Homo sapien
tgcccaggcaatggctccataagag

SEQ ID NO: 1698379 - DNA, 25 bp, Homo sapien
ctgtagaagagggtgaccacagtga

SEQ ID NO: 1698380 - DNA, 25 bp, Homo sapien
tgggaggagcaggtcccaaaagctt

SEQ ID NO: 1698381 - DNA, 25 bp, Homo sapien
gagcaggtcccaaaagctttcctct

SEQ ID NO: 1698382 - DNA, 25 bp, Homo sapien
ggaggagcaggtcccaaaagctttc

SEQ ID NO: 1698383 - DNA, 25 bp, Homo sapien
gaagagaccaaagaacttgcccctc

SEQ ID NO: 1698384 - DNA, 25 bp, Homo sapien
tttttgggctggaggtagacagcaa

SEQ ID NO: 1698385 - DNA, 25 bp, Homo sapien
tgcatagaagagaccaaagaacttg

SEQ ID NO: 1698386 - DNA, 25 bp, Homo sapien
tgcccactgcatagaagagaccaaa

SEQ ID NO: 1698387 - DNA, 25 bp, Homo sapien
agcaatctcctgaatgccctggtta

SEQ ID NO: 1698388 - DNA, 25 bp, Homo sapien
ccagcaatctcctgaatgccctggt

SEQ ID NO: 1698389 - DNA, 25 bp, Homo sapien
gcaatctcctgaatgccctggttac

SEQ ID NO: 1698390 - DNA, 25 bp, Homo sapien
cagcaatctcctgaatgccctggtt

SEQ ID NO: 1698391 - DNA, 25 bp, Homo sapien
actgctgctcccttttttctgaggc

SEQ ID NO: 1698392 - DNA, 25 bp, Homo sapien
gctcccttttttctgaggcccttgc

SEQ ID NO: 1698393 - DNA, 25 bp, Homo sapien
ctgctgctcccttttttctgaggcc

SEQ ID NO: 1698394 - DNA, 25 bp, Homo sapien
ccttttttctgaggcccttgctcca

SEQ ID NO: 1698395 - DNA, 25 bp, Homo sapien
ttgcgaccgccggatcccagttggc

SEQ ID NO: 1698396 - DNA, 25 bp, Homo sapien
cttgactcctctagaccttgcgacc

SEQ ID NO: 1698397 - DNA, 25 bp, Homo sapien
ttgactcctctagaccttgcgaccg

SEQ ID NO: 1698398 - DNA, 25 bp, Homo sapien
cccagttggcgtaatctgccacagt

SEQ ID NO: 1698399 - DNA, 25 bp, Homo sapien
gctgaacgacgttggtgatggcttt

SEQ ID NO: 1698400 - DNA, 25 bp, Homo sapien
tacttcctgctgaacgacgttggtg

SEQ ID NO: 1698401 - DNA, 25 bp, Homo sapien
tcctgctgaacgacgttggtgatgg

SEQ ID NO: 1698402 - DNA, 25 bp, Homo sapien
ctgctgaacgacgttggtgatggct

SEQ ID NO: 1698403 - DNA, 25 bp, Homo sapien
tgctgtcgatgatgtcatagggctc

SEQ ID NO: 1698404 - DNA, 25 bp, Homo sapien
gctgtcgatgatgtcatagggctca

SEQ ID NO: 1698405 - DNA, 25 bp, Homo sapien
ctgtcgatgatgtcatagggctcac

SEQ ID NO: 1698406 - DNA, 25 bp, Homo sapien
tgcatggggttggtctcatggccat

SEQ ID NO: 1698407 - DNA, 25 bp, Homo sapien
gaaagatggtgattgttgctcatca

SEQ ID NO: 1698408 - DNA, 25 bp, Homo sapien
tctcatggccatgagactcaaacga

SEQ ID NO: 1698409 - DNA, 25 bp, Homo sapien
catgagactcaaacgaaagatggtg

SEQ ID NO: 1698410 - DNA, 25 bp, Homo sapien
ggcctccagaaggtgttcatccgct

SEQ ID NO: 1698411 - DNA, 25 bp, Homo sapien
gaagtccatggatcttgaggagacc

SEQ ID NO: 1698412 - DNA, 25 bp, Homo sapien
gctaacttcataagctcggtgtcca

SEQ ID NO: 1698413 - DNA, 25 bp, Homo sapien
gatgctctcgcattgtacgaccacc

SEQ ID NO: 1698414 - DNA, 25 bp, Homo sapien
accaacaccatttacttccagaata

SEQ ID NO: 1698415 - DNA, 25 bp, Homo sapien
tcacaagttgtgcaaccaacaccat

SEQ ID NO: 1698416 - DNA, 25 bp, Homo sapien
ataaaattcgcccttttgaagtgtg

SEQ ID NO: 1698417 - DNA, 25 bp, Homo sapien
ttgtgcaaccaacaccatttacttc

SEQ ID NO: 1698418 - DNA, 25 bp, Homo sapien
ctccctttttgccaggactctctgc

SEQ ID NO: 1698419 - DNA, 25 bp, Homo sapien
tccctttttgccaggactctctgcc

SEQ ID NO: 1698420 - DNA, 25 bp, Homo sapien
gatctcgtaaggtatattgaatgaa

SEQ ID NO: 1698421 - DNA, 25 bp, Homo sapien
tctctgtaggctcaattattgctct

SEQ ID NO: 1698422 - DNA, 25 bp, Homo sapien
ttgagtgccactatgttctgaatgc

SEQ ID NO: 1698423 - DNA, 25 bp, Homo sapien
gcaaaggaggctgattaaaatatgc

SEQ ID NO: 1698424 - DNA, 25 bp, Homo sapien
ctttccaaggctcatcaccatccag

SEQ ID NO: 1698425 - DNA, 25 bp, Homo sapien
tgtactggacagcagatggatactc

SEQ ID NO: 1698426 - DNA, 25 bp, Homo sapien
tgttcttcctggtcaaacattgtct

SEQ ID NO: 1698427 - DNA, 25 bp, Homo sapien
tgtctagtgagagtgaggaatccat

SEQ ID NO: 1698428 - DNA, 25 bp, Homo sapien
cttgtttgtacctggagggatgagg

SEQ ID NO: 1698429 - DNA, 25 bp, Homo sapien
gaagcccggtgtggagctttggtta

SEQ ID NO: 1698430 - DNA, 25 bp, Homo sapien
ttggggaacacaactcgtggtgaaa

SEQ ID NO: 1698431 - DNA, 25 bp, Homo sapien
atcaaaagccatcactgtcaagagg

SEQ ID NO: 1698432 - DNA, 25 bp, Homo sapien
gcgatcaaaagccatcactgtcaag

SEQ ID NO: 1698433 - DNA, 25 bp, Homo sapien
gggaacacaactcgtggtgaaacag

SEQ ID NO: 1698434 - DNA, 25 bp, Homo sapien
tctcattgtaggaggtgtcttcaca

SEQ ID NO: 1698435 - DNA, 25 bp, Homo sapien
ggatctcattgtaggaggtgtcttc

SEQ ID NO: 1698436 - DNA, 25 bp, Homo sapien
gggacctcacagacaaaatcatcca

SEQ ID NO: 1698437 - DNA, 25 bp, Homo sapien
tcgaattagagctgggacctcacag

SEQ ID NO: 1698438 - DNA, 25 bp, Homo sapien
agcaatctcctgaatgccctggtta

SEQ ID NO: 1698439 - DNA, 25 bp, Homo sapien
ccagcaatctcctgaatgccctggt

SEQ ID NO: 1698440 - DNA, 25 bp, Homo sapien
cagcaatctcctgaatgccctggtt

SEQ ID NO: 1698441 - DNA, 25 bp, Homo sapien
gcaatctcctgaatgccctggttac

SEQ ID NO: 1698442 - DNA, 25 bp, Homo sapien
gcagctgtgatagggacacgtactg

SEQ ID NO: 1698443 - DNA, 25 bp, Homo sapien
ggacacgtactgaggcctgtgtggg

SEQ ID NO: 1698444 - DNA, 25 bp, Homo sapien
cagcagctgtgatagggacacgtac

SEQ ID NO: 1698445 - DNA, 25 bp, Homo sapien
acgtactgaggcctgtgtgggctgg

SEQ ID NO: 1698446 - DNA, 25 bp, Homo sapien
caccccagcagaaaatgggaagtgt

SEQ ID NO: 1698447 - DNA, 25 bp, Homo sapien
agatggtcctgccaattgctcctcc

SEQ ID NO: 1698448 - DNA, 25 bp, Homo sapien
aagtgttgaagatggtcctgccaat

SEQ ID NO: 1698449 - DNA, 25 bp, Homo sapien
cacagtccttggtagttttaggaca

SEQ ID NO: 1698450 - DNA, 25 bp, Homo sapien
gcagaaaaacaaacgagatcactta

SEQ ID NO: 1698451 - DNA, 25 bp, Homo sapien
gagtgttgggcatctcacagccatt

SEQ ID NO: 1698452 - DNA, 25 bp, Homo sapien
aagatggctttcaagcgttgtacct

SEQ ID NO: 1698453 - DNA, 25 bp, Homo sapien
ccttctcgacgtgggaagatgacca

SEQ ID NO: 1698454 - DNA, 25 bp, Homo sapien
tccaccttggaccagttggacttaa

SEQ ID NO: 1698455 - DNA, 25 bp, Homo sapien
ccttggaccagttggacttaatttg

SEQ ID NO: 1698456 - DNA, 25 bp, Homo sapien
gaacttccactaaagcatgggctgg

SEQ ID NO: 1698457 - DNA, 25 bp, Homo sapien
gaatcttagaccagtacttgaaaaa

SEQ ID NO: 1698458 - DNA, 25 bp, Homo sapien
ctgcaagggttggatgggccctgtc

SEQ ID NO: 1698459 - DNA, 25 bp, Homo sapien
catcttggagagtgcttttttgaag

SEQ ID NO: 1698460 - DNA, 25 bp, Homo sapien
tgattctcagatttttgtaagacag

SEQ ID NO: 1698461 - DNA, 25 bp, Homo sapien
gtcatcttggagagtgcttttttga

SEQ ID NO: 1698462 - DNA, 25 bp, Homo sapien
aaagtgattctcagatttttgtaag

SEQ ID NO: 1698463 - DNA, 25 bp, Homo sapien
tgtgatgggagtcgagtgcatttgc

SEQ ID NO: 1698464 - DNA, 25 bp, Homo sapien
atcaactccagtctcggcagcagct

SEQ ID NO: 1698465 - DNA, 25 bp, Homo sapien
cccgaccggcttagctgtgatggga

SEQ ID NO: 1698466 - DNA, 25 bp, Homo sapien
tactatcccaattgtgcttcttcct

SEQ ID NO: 1698467 - DNA, 25 bp, Homo sapien
caagagtctcgtaggtccttccaag

SEQ ID NO: 1698468 - DNA, 25 bp, Homo sapien
gatacaaccatgcaaagctctaggg

SEQ ID NO: 1698469 - DNA, 25 bp, Homo sapien
caagcatccttagggcctcaggtga

SEQ ID NO: 1698470 - DNA, 25 bp, Homo sapien
aaatgcctaggatcagctctttggc

SEQ ID NO: 1698471 - DNA, 25 bp, Homo sapien
cccaattttgtaatattcaggcacc

SEQ ID NO: 1698472 - DNA, 25 bp, Homo sapien
ttaacagcaattgcttaaagccaat

SEQ ID NO: 1698473 - DNA, 25 bp, Homo sapien
gaaccaagatctgccccaaacttag

SEQ ID NO: 1698474 - DNA, 25 bp, Homo sapien
gactcccaattttgtaatattcagg

SEQ ID NO: 1698475 - DNA, 25 bp, Homo sapien
catgctggaggtagttgagtcacca

SEQ ID NO: 1698476 - DNA, 25 bp, Homo sapien
catccccgtggttctgtgaataggt

SEQ ID NO: 1698477 - DNA, 25 bp, Homo sapien
gaagcatctgcttactccatcagga

SEQ ID NO: 1698478 - DNA, 25 bp, Homo sapien
cctggatcagcctgtgttggtagca

SEQ ID NO: 1698479 - DNA, 25 bp, Homo sapien
tttgtacttagctgttacatgcaga

SEQ ID NO: 1698480 - DNA, 25 bp, Homo sapien
tgtacttagctgttacatgcagagc

SEQ ID NO: 1698481 - DNA, 25 bp, Homo sapien
cttagctgttacatgcagagcaatc

SEQ ID NO: 1698482 - DNA, 25 bp, Homo sapien
tacttagctgttacatgcagagcaa

SEQ ID NO: 1698483 - DNA, 25 bp, Homo sapien
ttctgccgctcctggtgctgcttgt

SEQ ID NO: 1698484 - DNA, 25 bp, Homo sapien
tggagcggacctggtacctcttttg

SEQ ID NO: 1698485 - DNA, 25 bp, Homo sapien
tctgccgctcctggtgctgcttgtg

SEQ ID NO: 1698486 - DNA, 25 bp, Homo sapien
tgtgtgctcgtttggagcggacctg

SEQ ID NO: 1698487 - DNA, 25 bp, Homo sapien
gctactgggcagtacagtaagggta

SEQ ID NO: 1698488 - DNA, 25 bp, Homo sapien
catcatggacagcaaaatggcagca

SEQ ID NO: 1698489 - DNA, 25 bp, Homo sapien
taatggtaagggctactgggcagta

SEQ ID NO: 1698490 - DNA, 25 bp, Homo sapien
gtacagtaagggtactgagcatagt

SEQ ID NO: 1698491 - DNA, 25 bp, Homo sapien
tggtccttctgtcactacgtagtcg

SEQ ID NO: 1698492 - DNA, 25 bp, Homo sapien
gctgatggtccttctgtcactacgt

SEQ ID NO: 1698493 - DNA, 25 bp, Homo sapien
tgtcactacgtagtcgctccgacgc

SEQ ID NO: 1698494 - DNA, 25 bp, Homo sapien
gctccgacgccaggaaagtgcggtg

SEQ ID NO: 1698495 - DNA, 25 bp, Homo sapien
caggaccttaggaagaggcttgttc

SEQ ID NO: 1698496 - DNA, 25 bp, Homo sapien
gcctccactccggtaattgctgcag

SEQ ID NO: 1698497 - DNA, 25 bp, Homo sapien
gatgaccagggtttgccttccccac

SEQ ID NO: 1698498 - DNA, 25 bp, Homo sapien
agggaagatcttggagggcagtgct

SEQ ID NO: 1698499 - DNA, 25 bp, Homo sapien
agagagggtctcgataagcttgcca

SEQ ID NO: 1698500 - DNA, 25 bp, Homo sapien
cagagagggtctcgataagcttgcc

SEQ ID NO: 1698501 - DNA, 25 bp, Homo sapien
ggcagagagggtctcgataagcttg

SEQ ID NO: 1698502 - DNA, 25 bp, Homo sapien
gagagggtctcgataagcttgccat

SEQ ID NO: 1698503 - DNA, 25 bp, Homo sapien
gaagagatttaaggtcagagggaac

SEQ ID NO: 1698504 - DNA, 25 bp, Homo sapien
tttaaggtcagagggaaccttggca

SEQ ID NO: 1698505 - DNA, 25 bp, Homo sapien
gtcagagggaaccttggcaagcaag

SEQ ID NO: 1698506 - DNA, 25 bp, Homo sapien
tgtccaagacaccaaaaggaagaga

SEQ ID NO: 1698507 - DNA, 25 bp, Homo sapien
gaccagagcccggatagggtgtctt

SEQ ID NO: 1698508 - DNA, 25 bp, Homo sapien
tccatgcctgtagcgttcttcccag

SEQ ID NO: 1698509 - DNA, 25 bp, Homo sapien
ggtgtcttggtcctatcactctgaa

SEQ ID NO: 1698510 - DNA, 25 bp, Homo sapien
cccaggagatatgcgacatggcaat

SEQ ID NO: 1698511 - DNA, 25 bp, Homo sapien
tagagatgaaccaccctagagaagg

SEQ ID NO: 1698512 - DNA, 25 bp, Homo sapien
ctgtagagatgaaccaccctagaga

SEQ ID NO: 1698513 - DNA, 25 bp, Homo sapien
agatgaaccaccctagagaaggggg

SEQ ID NO: 1698514 - DNA, 25 bp, Homo sapien
tgtagagatgaaccaccctagagaa

SEQ ID NO: 1698515 - DNA, 25 bp, Homo sapien
cctcaccaatagcatctttcagcag

SEQ ID NO: 1698516 - DNA, 25 bp, Homo sapien
tgagaaccttacattccggatcctg

SEQ ID NO: 1698517 - DNA, 25 bp, Homo sapien
tgtccggccccgatattcaggtgcc

SEQ ID NO: 1698518 - DNA, 25 bp, Homo sapien
ggtaagaatgatctcggaagaagca

SEQ ID NO: 1698519 - DNA, 25 bp, Homo sapien
ggaaatcattcccaggactgagatg

SEQ ID NO: 1698520 - DNA, 25 bp, Homo sapien
tgagggatctcatctcagttgagag

SEQ ID NO: 1698521 - DNA, 25 bp, Homo sapien
cagacatccctaagcatgagtttct

SEQ ID NO: 1698522 - DNA, 25 bp, Homo sapien
tgaataatgatgcaacagacatccc

SEQ ID NO: 1698523 - DNA, 25 bp, Homo sapien
tcaaaggtagggatacatcacagct

SEQ ID NO: 1698524 - DNA, 25 bp, Homo sapien
caagctgtagactaaggctcctggc

SEQ ID NO: 1698525 - DNA, 25 bp, Homo sapien
agcagacattatcagcctccggatg

SEQ ID NO: 1698526 - DNA, 25 bp, Homo sapien
gaaggtagcttacacaggattcagt

SEQ ID NO: 1698527 - DNA, 25 bp, Homo sapien
atcgtgccactgcaaccaatcctgg

SEQ ID NO: 1698528 - DNA, 25 bp, Homo sapien
ccaatcctgggtgacagagtgagac

SEQ ID NO: 1698529 - DNA, 25 bp, Homo sapien
caatcctgggtgacagagtgagaca

SEQ ID NO: 1698530 - DNA, 25 bp, Homo sapien
atgatcgtgccactgcaaccaatcc

SEQ ID NO: 1698531 - DNA, 25 bp, Homo sapien
ctcagctattcaagaggctgagtca

SEQ ID NO: 1698532 - DNA, 25 bp, Homo sapien
atggtgacacaagcctgtggtctca

SEQ ID NO: 1698533 - DNA, 25 bp, Homo sapien
tcagctattcaagaggctgagtcag

SEQ ID NO: 1698534 - DNA, 25 bp, Homo sapien
ctgggcatggtgacacaagcctgtg

SEQ ID NO: 1698535 - DNA, 25 bp, Homo sapien
cgaggccaacagtgatctgcaggag

SEQ ID NO: 1698536 - DNA, 25 bp, Homo sapien
gcgaggagaaccagcactccagggc

SEQ ID NO: 1698537 - DNA, 25 bp, Homo sapien
ccagggctcacccagtagaaaggat

SEQ ID NO: 1698538 - DNA, 25 bp, Homo sapien
agcaccgcgaggagaaccagcactc

SEQ ID NO: 1698539 - DNA, 25 bp, Homo sapien
ccggcacaattacaaacagggttat

SEQ ID NO: 1698540 - DNA, 25 bp, Homo sapien
gatgatcaaggcaaccaagggtcca

SEQ ID NO: 1698541 - DNA, 25 bp, Homo sapien
tagtcttcgatgtagccagttgtag

SEQ ID NO: 1698542 - DNA, 25 bp, Homo sapien
acagggttatcttccagcagggcac

SEQ ID NO: 1698543 - DNA, 25 bp, Homo sapien
atgtgatccctcaatagcccgcctc

SEQ ID NO: 1698544 - DNA, 25 bp, Homo sapien
ccaggaggagtcttccctccaccca

SEQ ID NO: 1698545 - DNA, 25 bp, Homo sapien
cctcccaggaggagtcttccctcca

SEQ ID NO: 1698546 - DNA, 25 bp, Homo sapien
gtgatccctcaatagcccgcctctt

SEQ ID NO: 1698547 - DNA, 25 bp, Homo sapien
cattcctgcctcaatggttgatctg

SEQ ID NO: 1698548 - DNA, 25 bp, Homo sapien
cataaaaccattgaactagggagaa

SEQ ID NO: 1698549 - DNA, 25 bp, Homo sapien
tggaatgggcaatgagaccagctag

SEQ ID NO: 1698550 - DNA, 25 bp, Homo sapien
gaccagctagggttggattcctgct

SEQ ID NO: 1698551 - DNA, 25 bp, Homo sapien
tgtccccatagcaaagatgccagtg

SEQ ID NO: 1698552 - DNA, 25 bp, Homo sapien
tgaaagtgcaaattggaatgtcccc

SEQ ID NO: 1698553 - DNA, 25 bp, Homo sapien
gatgccagtgagtgtgcaacttgat

SEQ ID NO: 1698554 - DNA, 25 bp, Homo sapien
gatgtccccaaggacaaatccctgg

SEQ ID NO: 1698555 - DNA, 25 bp, Homo sapien
ttagccagagagggcttccaggtgg

SEQ ID NO: 1698556 - DNA, 25 bp, Homo sapien
gccagagagggcttccaggtggaag

SEQ ID NO: 1698557 - DNA, 25 bp, Homo sapien
agccagagagggcttccaggtggaa

SEQ ID NO: 1698558 - DNA, 25 bp, Homo sapien
ccagagagggcttccaggtggaaga

SEQ ID NO: 1698559 - DNA, 25 bp, Homo sapien
ccaggtccctagtaggctgccaaga

SEQ ID NO: 1698560 - DNA, 25 bp, Homo sapien
tgtgttgctctccagtacaggtgtc

SEQ ID NO: 1698561 - DNA, 25 bp, Homo sapien
ttttgcgcaatcagggctggagtct

SEQ ID NO: 1698562 - DNA, 25 bp, Homo sapien
gctgccaagacaaggaggagctctg

SEQ ID NO: 1698563 - DNA, 25 bp, Homo sapien
aagtgtgcttatgaaaacttgtatt

SEQ ID NO: 1698564 - DNA, 25 bp, Homo sapien
ctgagcagagaccaaagggccgtgc

SEQ ID NO: 1698565 - DNA, 25 bp, Homo sapien
cccgaagccctgagcagagaccaaa

SEQ ID NO: 1698566 - DNA, 25 bp, Homo sapien
accaaagggccgtgcgactgcagga

SEQ ID NO: 1698567 - DNA, 25 bp, Homo sapien
gcaatggctggaaagggtccccgaa

SEQ ID NO: 1698568 - DNA, 25 bp, Homo sapien
tcgcgctagcggtagtagaggctga

SEQ ID NO: 1698569 - DNA, 25 bp, Homo sapien
agcactgcgcccctaatcttggagg

SEQ ID NO: 1698570 - DNA, 25 bp, Homo sapien
aagggctcctggcacgtgttgaaaa

SEQ ID NO: 1698571 - DNA, 25 bp, Homo sapien
gggtgtatccaggtgccctgtccac

SEQ ID NO: 1698572 - DNA, 25 bp, Homo sapien
aggcctgcagaccacctgcgatgac

SEQ ID NO: 1698573 - DNA, 25 bp, Homo sapien
caggcctgcagaccacctgcgatga

SEQ ID NO: 1698574 - DNA, 25 bp, Homo sapien
ccttttctttgtgcccgcagtgttc

SEQ ID NO: 1698575 - DNA, 25 bp, Homo sapien
ctcgcttttcagctactactgttgg

SEQ ID NO: 1698576 - DNA, 25 bp, Homo sapien
gctctcgcttttcagctactactgt

SEQ ID NO: 1698577 - DNA, 25 bp, Homo sapien
ttccttttctttgtgcccgcagtgt

SEQ ID NO: 1698578 - DNA, 25 bp, Homo sapien
gaggacgtcaattcctgagaacgcc

SEQ ID NO: 1698579 - DNA, 25 bp, Homo sapien
agggtgctcactaccctcatctggg

SEQ ID NO: 1698580 - DNA, 25 bp, Homo sapien
tcagggtgctcactaccctcatctg

SEQ ID NO: 1698581 - DNA, 25 bp, Homo sapien
gggcctggaggacgtcaattcctga

SEQ ID NO: 1698582 - DNA, 25 bp, Homo sapien
gcaactgggataggcggcatcatca

SEQ ID NO: 1698583 - DNA, 25 bp, Homo sapien
atcaggaaggcgagccctgccgtgc

SEQ ID NO: 1698584 - DNA, 25 bp, Homo sapien
agggtcccagcttcccatacacctt

SEQ ID NO: 1698585 - DNA, 25 bp, Homo sapien
tccccagaagcaccttgtatctccc

SEQ ID NO: 1698586 - DNA, 25 bp, Homo sapien
ctgttatccacggtgaagtgcagtg

SEQ ID NO: 1698587 - DNA, 25 bp, Homo sapien
tgtcattcccacaaaccttaggatt

SEQ ID NO: 1698588 - DNA, 25 bp, Homo sapien
caggcaagtaccaccgtgctcaggt

SEQ ID NO: 1698589 - DNA, 25 bp, Homo sapien
gcatgagctaccatggttgaccaaa

SEQ ID NO: 1698590 - DNA, 25 bp, Homo sapien
gaatgaaggtgtagagacagtttct

SEQ ID NO: 1698591 - DNA, 25 bp, Homo sapien
cttggtgccagacaatgaacttgtc

SEQ ID NO: 1698592 - DNA, 25 bp, Homo sapien
ctgagaatgaaggtgtagagacagt

SEQ ID NO: 1698593 - DNA, 25 bp, Homo sapien
ttggtgccagacaatgaacttgtcc

SEQ ID NO: 1698594 - DNA, 25 bp, Homo sapien
gcgacgcccaatgggagtgagaaat

SEQ ID NO: 1698595 - DNA, 25 bp, Homo sapien
tggcttctctagaaacgcgacgccc

SEQ ID NO: 1698596 - DNA, 25 bp, Homo sapien
tttagaacctgggaactgcggcgac

SEQ ID NO: 1698597 - DNA, 25 bp, Homo sapien
ctgggaaaaatatgagtcccgcggg

SEQ ID NO: 1698598 - DNA, 25 bp, Homo sapien
gcccaagtatcggtcagggccaggg

SEQ ID NO: 1698599 - DNA, 25 bp, Homo sapien
cccaagtatcggtcagggccagggc

SEQ ID NO: 1698600 - DNA, 25 bp, Homo sapien
gcaggaggaggcttcggggcgccat

SEQ ID NO: 1698601 - DNA, 25 bp, Homo sapien
gcagcaggaggaggcttcggggcgc

SEQ ID NO: 1698602 - DNA, 25 bp, Homo sapien
agaggccgtttctctctggaccccg

SEQ ID NO: 1698603 - DNA, 25 bp, Homo sapien
agacccgccagaccctcctccggag

SEQ ID NO: 1698604 - DNA, 25 bp, Homo sapien
gagacccgccagaccctcctccgga

SEQ ID NO: 1698605 - DNA, 25 bp, Homo sapien
ctccccacagaggccgtttctctct

SEQ ID NO: 1698606 - DNA, 25 bp, Homo sapien
cgtctacgtactccacggcgatgta

SEQ ID NO: 1698607 - DNA, 25 bp, Homo sapien
caggaattgcgtgtcgtctacgtac

SEQ ID NO: 1698608 - DNA, 25 bp, Homo sapien
gaaccgcaggaattgcgtgtcgtct

SEQ ID NO: 1698609 - DNA, 25 bp, Homo sapien
gggccgcgacacagcggtgctgaaa

SEQ ID NO: 1698610 - DNA, 25 bp, Homo sapien
ccactcggtcagtctgtgcgttggc

SEQ ID NO: 1698611 - DNA, 25 bp, Homo sapien
tggccttggcgtaccctgtggtcca

SEQ ID NO: 1698612 - DNA, 25 bp, Homo sapien
ctgtgcgttggccttggcgtaccct

SEQ ID NO: 1698613 - DNA, 25 bp, Homo sapien
cagggccactcggtcagtctgtgcg

SEQ ID NO: 1698614 - DNA, 25 bp, Homo sapien
cagcctcgctctggttgtagcggcg

SEQ ID NO: 1698615 - DNA, 25 bp, Homo sapien
cctcgctctggttgtagcggcggag

SEQ ID NO: 1698616 - DNA, 25 bp, Homo sapien
agcctcgctctggttgtagcggcgg

SEQ ID NO: 1698617 - DNA, 25 bp, Homo sapien
gcctcgctctggttgtagcggcgga

SEQ ID NO: 1698618 - DNA, 25 bp, Homo sapien
gtcccgctgcctcggggtagatttc

SEQ ID NO: 1698619 - DNA, 25 bp, Homo sapien
gtagatttcggatccggagactctg

SEQ ID NO: 1698620 - DNA, 25 bp, Homo sapien
gggtagatttcggatccggagactc

SEQ ID NO: 1698621 - DNA, 25 bp, Homo sapien
tgcctcggggtagatttcggatccg

SEQ ID NO: 1698622 - DNA, 25 bp, Homo sapien
agccggtccccgcagtcagccccgc

SEQ ID NO: 1698623 - DNA, 25 bp, Homo sapien
ctagccggtccccgcagtcagcccc

SEQ ID NO: 1698624 - DNA, 25 bp, Homo sapien
agtcagccccgcccagctagccccg

SEQ ID NO: 1698625 - DNA, 25 bp, Homo sapien
cagtcagccccgcccagctagcccc

SEQ ID NO: 1698626 - DNA, 25 bp, Homo sapien
ggccccatgtcgcagccattcattc

SEQ ID NO: 1698627 - DNA, 25 bp, Homo sapien
gccccatgtcgcagccattcattcc

SEQ ID NO: 1698628 - DNA, 25 bp, Homo sapien
ccaggagcgcaggtcctcgttcagg

SEQ ID NO: 1698629 - DNA, 25 bp, Homo sapien
gaactcctctgcatattcctctgcc

SEQ ID NO: 1698630 - DNA, 25 bp, Homo sapien
caggtaggtcctgaactcctctgca

SEQ ID NO: 1698631 - DNA, 25 bp, Homo sapien
tgcctcatagaagcgctgggtgatc

SEQ ID NO: 1698632 - DNA, 25 bp, Homo sapien
ctgggtgatctgagccacggtgtcc

SEQ ID NO: 1698633 - DNA, 25 bp, Homo sapien
ccttcccattctccaagtatctgcg

SEQ ID NO: 1698634 - DNA, 25 bp, Homo sapien
ctgcgcgctgtagcgtctccttccc

SEQ ID NO: 1698635 - DNA, 25 bp, Homo sapien
tcccattctccaagtatctgcggag

SEQ ID NO: 1698636 - DNA, 25 bp, Homo sapien
tgcgcgctgtagcgtctccttccca

SEQ ID NO: 1698637 - DNA, 25 bp, Homo sapien
ggaaggcgcccatggcccctggtac

SEQ ID NO: 1698638 - DNA, 25 bp, Homo sapien
caggagatagggaaggcgcccatgg

SEQ ID NO: 1698639 - DNA, 25 bp, Homo sapien
ctacaggagatagggaaggcgccca

SEQ ID NO: 1698640 - DNA, 25 bp, Homo sapien
gatagggaaggcgcccatggcccct

SEQ ID NO: 1698641 - DNA, 25 bp, Homo sapien
ggtggtgggcaacgtgtgcctttgg

SEQ ID NO: 1698642 - DNA, 25 bp, Homo sapien
tgggcaacgtgtgcctttggaggat

SEQ ID NO: 1698643 - DNA, 25 bp, Homo sapien
gtgggcaacgtgtgcctttggagga

SEQ ID NO: 1698644 - DNA, 25 bp, Homo sapien
tggtgggcaacgtgtgcctttggag

SEQ ID NO: 1698645 - DNA, 25 bp, Homo sapien
cgcagggtagaagcccagggcccag

SEQ ID NO: 1698646 - DNA, 25 bp, Homo sapien
tccgcagggtagaagcccagggccc

SEQ ID NO: 1698647 - DNA, 25 bp, Homo sapien
ctccgcagggtagaagcccagggcc

SEQ ID NO: 1698648 - DNA, 25 bp, Homo sapien
agggtagaagcccagggcccagcac

SEQ ID NO: 1698649 - DNA, 25 bp, Homo sapien
tccccatcccgctgccaggtcagcg

SEQ ID NO: 1698650 - DNA, 25 bp, Homo sapien
accacagcggcccacttctggaagg

SEQ ID NO: 1698651 - DNA, 25 bp, Homo sapien
ggaaggttccatcccctgcaggcct

SEQ ID NO: 1698652 - DNA, 25 bp, Homo sapien
catcccgctgccaggtcagcgtgat

SEQ ID NO: 1698653 - DNA, 25 bp, Homo sapien
gcccctcgtgctgcacatggcatgt

SEQ ID NO: 1698654 - DNA, 25 bp, Homo sapien
ggcatgtgtatctctgttcctctcc

SEQ ID NO: 1698655 - DNA, 25 bp, Homo sapien
catggcatgtgtatctctgttcctc

SEQ ID NO: 1698656 - DNA, 25 bp, Homo sapien
gcagcccctcgtgctgcacatggca

SEQ ID NO: 1698657 - DNA, 25 bp, Homo sapien
caaggacaacaaggccagcaacgat

SEQ ID NO: 1698658 - DNA, 25 bp, Homo sapien
cacagctccaaggacaacaaggcca

SEQ ID NO: 1698659 - DNA, 25 bp, Homo sapien
tgaccacagctccaaggacaacaag

SEQ ID NO: 1698660 - DNA, 25 bp, Homo sapien
aaggccagcaacgatgcccacgatg

SEQ ID NO: 1698661 - DNA, 25 bp, Homo sapien
taatcatcgaagtgaagaatctgtc

SEQ ID NO: 1698662 - DNA, 25 bp, Homo sapien
ccataaggtcctagagcaaacccct

SEQ ID NO: 1698663 - DNA, 25 bp, Homo sapien
gaaaagtgtaactgtagatccaggg

SEQ ID NO: 1698664 - DNA, 25 bp, Homo sapien
tccagggcaggatcaagaaatatga

SEQ ID NO: 1698665 - DNA, 25 bp, Homo sapien
agcctgagagtagctccctctgttt

SEQ ID NO: 1698666 - DNA, 25 bp, Homo sapien
tgcagcctgagagtagctccctctg

SEQ ID NO: 1698667 - DNA, 25 bp, Homo sapien
ctgcagcctgagagtagctccctct

SEQ ID NO: 1698668 - DNA, 25 bp, Homo sapien
gcagcctgagagtagctccctctgt

SEQ ID NO: 1698669 - DNA, 25 bp, Homo sapien
gtgagctccctcataggctcctgac

SEQ ID NO: 1698670 - DNA, 25 bp, Homo sapien
tgaccacaatatcccaacaatctca

SEQ ID NO: 1698671 - DNA, 25 bp, Homo sapien
cctgaccacaatatcccaacaatct

SEQ ID NO: 1698672 - DNA, 25 bp, Homo sapien
tgggtgagctccctcataggctcct

SEQ ID NO: 1698673 - DNA, 25 bp, Homo sapien
ctttattagctgtgagagacacccc

SEQ ID NO: 1698674 - DNA, 25 bp, Homo sapien
accccagagccctgggcactgtcag

SEQ ID NO: 1698675 - DNA, 25 bp, Homo sapien
tttattagctgtgagagacacccca

SEQ ID NO: 1698676 - DNA, 25 bp, Homo sapien
ccagagccctgggcactgtcagtga

SEQ ID NO: 1698677 - DNA, 25 bp, Homo sapien
ccaagtcaaagaaacccaatagcac

SEQ ID NO: 1698678 - DNA, 25 bp, Homo sapien
atgctcaagacatccaagtcaaaga

SEQ ID NO: 1698679 - DNA, 25 bp, Homo sapien
gtcacagtgagaggtaacactctaa

SEQ ID NO: 1698680 - DNA, 25 bp, Homo sapien
gaggtaacactctaaatagcccatt

SEQ ID NO: 1698681 - DNA, 25 bp, Homo sapien
tatgtatgttcgtgaggcacaagtg

SEQ ID NO: 1698682 - DNA, 25 bp, Homo sapien
aatttatgtatgttcgtgaggcaca

SEQ ID NO: 1698683 - DNA, 25 bp, Homo sapien
ggcacaagtgcaattctgctacatt

SEQ ID NO: 1698684 - DNA, 25 bp, Homo sapien
tgctacattgatatcttgcttctca

SEQ ID NO: 1698685 - DNA, 25 bp, Homo sapien
gaatcttaatctctctattcactct

SEQ ID NO: 1698686 - DNA, 25 bp, Homo sapien
gatagaaaacaacagcctacttgtg

SEQ ID NO: 1698687 - DNA, 25 bp, Homo sapien
aagtcaacactctgattcagtctga

SEQ ID NO: 1698688 - DNA, 25 bp, Homo sapien
cacacacatttacgtgcatgctata

SEQ ID NO: 1698689 - DNA, 25 bp, Homo sapien
aataagcttgaccaccatgttatca

SEQ ID NO: 1698690 - DNA, 25 bp, Homo sapien
gaaataagcttgaccaccatgttat

SEQ ID NO: 1698691 - DNA, 25 bp, Homo sapien
ggagaaataagcttgaccaccatgt

SEQ ID NO: 1698692 - DNA, 25 bp, Homo sapien
taagcttgaccaccatgttatcatc

SEQ ID NO: 1698693 - DNA, 25 bp, Homo sapien
tagtatcatgggtcttgcaacttac

SEQ ID NO: 1698694 - DNA, 25 bp, Homo sapien
tctggacccttttcataagatggtg

SEQ ID NO: 1698695 - DNA, 25 bp, Homo sapien
tgcaacttactttagaatgactcag

SEQ ID NO: 1698696 - DNA, 25 bp, Homo sapien
taagatggtgccaagaacgaagaag

SEQ ID NO: 1698697 - DNA, 25 bp, Homo sapien
tcagggtgtccctcagttcaaggaa

SEQ ID NO: 1698698 - DNA, 25 bp, Homo sapien
cacagggagggttgcttgctcacat

SEQ ID NO: 1698699 - DNA, 25 bp, Homo sapien
ggaccccaggttacaggcctaagca

SEQ ID NO: 1698700 - DNA, 25 bp, Homo sapien
tggtcattccccacaagatgctggt

SEQ ID NO: 1698701 - DNA, 25 bp, Homo sapien
catgggttgcttggtcagtcaggaa

SEQ ID NO: 1698702 - DNA, 25 bp, Homo sapien
cttgggagctaacgcaagaacagct

SEQ ID NO: 1698703 - DNA, 25 bp, Homo sapien
gatgccccagtagtgcatgaatgaa

SEQ ID NO: 1698704 - DNA, 25 bp, Homo sapien
tctacaacaagagcagtaggcttgg

SEQ ID NO: 1698705 - DNA, 25 bp, Homo sapien
cctgactgaagcgacaaggtgtgtc

SEQ ID NO: 1698706 - DNA, 25 bp, Homo sapien
taaaccaggacatgatgaccctagc

SEQ ID NO: 1698707 - DNA, 25 bp, Homo sapien
gaagacagtcctccctagaattgaa

SEQ ID NO: 1698708 - DNA, 25 bp, Homo sapien
tcctgtgtcaagaagcatcgtccgg

SEQ ID NO: 1698709 - DNA, 25 bp, Homo sapien
ttaactgtaaatacatagttgtgca

SEQ ID NO: 1698710 - DNA, 25 bp, Homo sapien
tactttcagtttagacacctcatat

SEQ ID NO: 1698711 - DNA, 25 bp, Homo sapien
cgagcccctagcagccattagtcta

SEQ ID NO: 1698712 - DNA, 25 bp, Homo sapien
taaatggaaatgtgcagtattgggt

SEQ ID NO: 1698713 - DNA, 25 bp, Homo sapien
cacagcgcaatggtggatgcaacag

SEQ ID NO: 1698714 - DNA, 25 bp, Homo sapien
gatgcacccattgttgcacagcgca

SEQ ID NO: 1698715 - DNA, 25 bp, Homo sapien
actaatcctctcatatgtcaactgg

SEQ ID NO: 1698716 - DNA, 25 bp, Homo sapien
caactggactacttttcactgcctg

SEQ ID NO: 1698717 - DNA, 25 bp, Homo sapien
tggcagccacgtgtttccatcctgg

SEQ ID NO: 1698718 - DNA, 25 bp, Homo sapien
ggaggaacactgagctgtaggtgga

SEQ ID NO: 1698719 - DNA, 25 bp, Homo sapien
gccctggtgtgcaggtgcttctgca

SEQ ID NO: 1698720 - DNA, 25 bp, Homo sapien
caggtaggagctgcctgctcaggac

SEQ ID NO: 1698721 - DNA, 25 bp, Homo sapien
catcccaagtgcaggtcatggacct

SEQ ID NO: 1698722 - DNA, 25 bp, Homo sapien
agggcatcccaagtgcaggtcatgg

SEQ ID NO: 1698723 - DNA, 25 bp, Homo sapien
ccaagtgcaggtcatggacctgggt

SEQ ID NO: 1698724 - DNA, 25 bp, Homo sapien
tggatttccagggatgagtggacca

SEQ ID NO: 1698725 - DNA, 25 bp, Homo sapien
gcagtaaaggtttccttgtaggtca

SEQ ID NO: 1698726 - DNA, 25 bp, Homo sapien
catctcccgtagaggaattgtcagt

SEQ ID NO: 1698727 - DNA, 25 bp, Homo sapien
gcagcatctcccgtagaggaattgt

SEQ ID NO: 1698728 - DNA, 25 bp, Homo sapien
cccgtagaggaattgtcagttctgg

SEQ ID NO: 1698729 - DNA, 25 bp, Homo sapien
ctgcagcatctcccgtagaggaatt

SEQ ID NO: 1698730 - DNA, 25 bp, Homo sapien
tgttttttggggcacccacagcagg

SEQ ID NO: 1698731 - DNA, 25 bp, Homo sapien
cagtccccaggaccatgttttttgg

SEQ ID NO: 1698732 - DNA, 25 bp, Homo sapien
ggaacacagtccccaggaccatgtt

SEQ ID NO: 1698733 - DNA, 25 bp, Homo sapien
cttgtctagcccccaggaacacagt

SEQ ID NO: 1698734 - DNA, 25 bp, Homo sapien
ctacatgggacacagagggaatcac

SEQ ID NO: 1698735 - DNA, 25 bp, Homo sapien
tacatgggacacagagggaatcaca

SEQ ID NO: 1698736 - DNA, 25 bp, Homo sapien
acagagggaatcacagcactcaccc

SEQ ID NO: 1698737 - DNA, 25 bp, Homo sapien
tgcatggccaccaggattccccgag

SEQ ID NO: 1698738 - DNA, 25 bp, Homo sapien
catggccaccaggattccccgagga

SEQ ID NO: 1698739 - DNA, 25 bp, Homo sapien
gcatggccaccaggattccccgagg

SEQ ID NO: 1698740 - DNA, 25 bp, Homo sapien
tgtcctgcccaatgggaatgggacc

SEQ ID NO: 1698741 - DNA, 25 bp, Homo sapien
gtcctgcccaatgggaatgggacct

SEQ ID NO: 1698742 - DNA, 25 bp, Homo sapien
gtgtcctgcccaatgggaatgggac

SEQ ID NO: 1698743 - DNA, 25 bp, Homo sapien
gcgagagtcagaacaatagagagga

SEQ ID NO: 1698744 - DNA, 25 bp, Homo sapien
cccaggtaaggaccgatttgcagaa

SEQ ID NO: 1698745 - DNA, 25 bp, Homo sapien
tctatccctggaatatctctctgac

SEQ ID NO: 1698746 - DNA, 25 bp, Homo sapien
tcagtgtgggtttcagcgagagtca

SEQ ID NO: 1698747 - DNA, 25 bp, Homo sapien
ctcagcatcaaagccggagtcccag

SEQ ID NO: 1698748 - DNA, 25 bp, Homo sapien
cggagtcccagagtgtgaggccaca

SEQ ID NO: 1698749 - DNA, 25 bp, Homo sapien
tcctgaggcccatcttccagcaagc

SEQ ID NO: 1698750 - DNA, 25 bp, Homo sapien
tcctcagcatcaaagccggagtccc

SEQ ID NO: 1698751 - DNA, 25 bp, Homo sapien
ggtttctcgctgagggacatctgga

SEQ ID NO: 1698752 - DNA, 25 bp, Homo sapien
gggtttctcgctgagggacatctgg

SEQ ID NO: 1698753 - DNA, 25 bp, Homo sapien
agggtttctcgctgagggacatctg

SEQ ID NO: 1698754 - DNA, 25 bp, Homo sapien
cagggtttctcgctgagggacatct

SEQ ID NO: 1698755 - DNA, 25 bp, Homo sapien
gtgtgttaaacattgatgtgaagtt

SEQ ID NO: 1698756 - DNA, 25 bp, Homo sapien
tgtgttaaacattgatgtgaagtta

SEQ ID NO: 1698757 - DNA, 25 bp, Homo sapien
tgtgtgttaaacattgatgtgaagt

SEQ ID NO: 1698758 - DNA, 25 bp, Homo sapien
gtgttaaacattgatgtgaagttac

SEQ ID NO: 1698759 - DNA, 25 bp, Homo sapien
tcctcaggaaggtcgggacagcaga

SEQ ID NO: 1698760 - DNA, 25 bp, Homo sapien
tttccttgcgtctgaaatcctcatt

SEQ ID NO: 1698761 - DNA, 25 bp, Homo sapien
cccagttttccttgcgtctgaaatc

SEQ ID NO: 1698762 - DNA, 25 bp, Homo sapien
tccctttgcccgtgtgcatttcctg

SEQ ID NO: 1698763 - DNA, 25 bp, Homo sapien
tagaaaacgtctctggcaccacagc

SEQ ID NO: 1698764 - DNA, 25 bp, Homo sapien
tcaaaggcagtggaccttgcctcca

SEQ ID NO: 1698765 - DNA, 25 bp, Homo sapien
ttctccctgggatacggacctcgta

SEQ ID NO: 1698766 - DNA, 25 bp, Homo sapien
caccttgtccatgttgagccttcct

SEQ ID NO: 1698767 - DNA, 25 bp, Homo sapien
gggacccggagctagtgcttcctgc

SEQ ID NO: 1698768 - DNA, 25 bp, Homo sapien
cagaggattcttcctgcgacttctc

SEQ ID NO: 1698769 - DNA, 25 bp, Homo sapien
ctcctttctcgggacccggagctag

SEQ ID NO: 1698770 - DNA, 25 bp, Homo sapien
gggttggagtctgcaggctccgggc

SEQ ID NO: 1698771 - DNA, 25 bp, Homo sapien
tggaaccttccccttctgagtgtgg

SEQ ID NO: 1698772 - DNA, 25 bp, Homo sapien
tcccagctcgtgattggccctaagc

SEQ ID NO: 1698773 - DNA, 25 bp, Homo sapien
ccatggagatgagcctagtcctgct

SEQ ID NO: 1698774 - DNA, 25 bp, Homo sapien
ccagttttcattgggtgagcggtcg

SEQ ID NO: 1698775 - DNA, 25 bp, Homo sapien
aacaccactacactctgaccagcct

SEQ ID NO: 1698776 - DNA, 25 bp, Homo sapien
ctactccctgaagtctagggacagg

SEQ ID NO: 1698777 - DNA, 25 bp, Homo sapien
caggaagatggttggagacctgact

SEQ ID NO: 1698778 - DNA, 25 bp, Homo sapien
gaagatggttggagacctgactggg

SEQ ID NO: 1698779 - DNA, 25 bp, Homo sapien
ggacaggaagatggttggagacctg

SEQ ID NO: 1698780 - DNA, 25 bp, Homo sapien
ttcatagcggcagctgtgagtgccc

SEQ ID NO: 1698781 - DNA, 25 bp, Homo sapien
atagcggcagctgtgagtgccccgc

SEQ ID NO: 1698782 - DNA, 25 bp, Homo sapien
tcatagcggcagctgtgagtgcccc

SEQ ID NO: 1698783 - DNA, 25 bp, Homo sapien
agcggcagctgtgagtgccccgcgg

SEQ ID NO: 1698784 - DNA, 25 bp, Homo sapien
gaggagccagtttccgtcagaaccg

SEQ ID NO: 1698785 - DNA, 25 bp, Homo sapien
gagccagtttccgtcagaaccgccc

SEQ ID NO: 1698786 - DNA, 25 bp, Homo sapien
aggagccagtttccgtcagaaccgc

SEQ ID NO: 1698787 - DNA, 25 bp, Homo sapien
ggagccagtttccgtcagaaccgcc

SEQ ID NO: 1698788 - DNA, 25 bp, Homo sapien
ctcgggatgtaaatttaggatcctc

SEQ ID NO: 1698789 - DNA, 25 bp, Homo sapien
gtcgctccagtctttgatggggcca

SEQ ID NO: 1698790 - DNA, 25 bp, Homo sapien
cacactcgggatgtaaatttaggat

SEQ ID NO: 1698791 - DNA, 25 bp, Homo sapien
ggccacactcgggatgtaaatttag

SEQ ID NO: 1698792 - DNA, 25 bp, Homo sapien
tagcagctctttggagtccgatgga

SEQ ID NO: 1698793 - DNA, 25 bp, Homo sapien
gccaaaacacaacgagctatgcatt

SEQ ID NO: 1698794 - DNA, 25 bp, Homo sapien
tgacacatcggcaggtagaggctta

SEQ ID NO: 1698795 - DNA, 25 bp, Homo sapien
tgtgggtgtgtacaacagccaaaac

SEQ ID NO: 1698796 - DNA, 25 bp, Homo sapien
tccttaccgcagttgctactgggta

SEQ ID NO: 1698797 - DNA, 25 bp, Homo sapien
aaagcacactctgcgctgttgggcc

SEQ ID NO: 1698798 - DNA, 25 bp, Homo sapien
gctgcgtcctgtccttaccgcagtt

SEQ ID NO: 1698799 - DNA, 25 bp, Homo sapien
tgactcactggtacaatttcgctgc

SEQ ID NO: 1698800 - DNA, 25 bp, Homo sapien
gtggaggagtctgtacttcatgaga

SEQ ID NO: 1698801 - DNA, 25 bp, Homo sapien
ggaggagtctgtacttcatgagaag

SEQ ID NO: 1698802 - DNA, 25 bp, Homo sapien
cagtggactttgtctctttttcctg

SEQ ID NO: 1698803 - DNA, 25 bp, Homo sapien
gagtctgtacttcatgagaagtcct

SEQ ID NO: 1698804 - DNA, 25 bp, Homo sapien
actataggctcgagccctggaccac

SEQ ID NO: 1698805 - DNA, 25 bp, Homo sapien
caggcgctgtcatattttgggtgga

SEQ ID NO: 1698806 - DNA, 25 bp, Homo sapien
ggaccacaggcgctgtcatattttg

SEQ ID NO: 1698807 - DNA, 25 bp, Homo sapien
gctgctgggcatccactataggctc

SEQ ID NO: 1698808 - DNA, 25 bp, Homo sapien
cctgaatatgaacccttcaggcctt

SEQ ID NO: 1698809 - DNA, 25 bp, Homo sapien
gagttttcaagtcaagtggacctga

SEQ ID NO: 1698810 - DNA, 25 bp, Homo sapien
taagacaacaaagtttgtggcatgg

SEQ ID NO: 1698811 - DNA, 25 bp, Homo sapien
cataagtaaggtcaatatgagtttt

SEQ ID NO: 1698812 - DNA, 25 bp, Homo sapien
agtgctgcttcagacttgggtgttt

SEQ ID NO: 1698813 - DNA, 25 bp, Homo sapien
ggcctgcattgacccatagtgaagg

SEQ ID NO: 1698814 - DNA, 25 bp, Homo sapien
gtgctgcttcagacttgggtgtttt

SEQ ID NO: 1698815 - DNA, 25 bp, Homo sapien
catagtgaaggctggctaacttcca

SEQ ID NO: 1698816 - DNA, 25 bp, Homo sapien
tagtttttaggcagacccacataag

SEQ ID NO: 1698817 - DNA, 25 bp, Homo sapien
cataaggtattaaaggccaactgca

SEQ ID NO: 1698818 - DNA, 25 bp, Homo sapien
aagatcaccctgcaaggctctgtag

SEQ ID NO: 1698819 - DNA, 25 bp, Homo sapien
taaccaggagccagtacggacttta

SEQ ID NO: 1698820 - DNA, 25 bp, Homo sapien
tgcatgagatagaatagagaccagt

SEQ ID NO: 1698821 - DNA, 25 bp, Homo sapien
tctggaaaagttgtgcctgagtgca

SEQ ID NO: 1698822 - DNA, 25 bp, Homo sapien
taatgatcaggaatctaatcggcca

SEQ ID NO: 1698823 - DNA, 25 bp, Homo sapien
tagcagaatcttggtaactcctaat

SEQ ID NO: 1698824 - DNA, 25 bp, Homo sapien
aaaatcaccccagggagcttgttgc

SEQ ID NO: 1698825 - DNA, 25 bp, Homo sapien
atcaccccagggagcttgttgccag

SEQ ID NO: 1698826 - DNA, 25 bp, Homo sapien
cccagggagcttgttgccagagagt

SEQ ID NO: 1698827 - DNA, 25 bp, Homo sapien
agaaaaatcaccccagggagcttgt

SEQ ID NO: 1698828 - DNA, 25 bp, Homo sapien
tcctgagagccacgcctgaggccct

SEQ ID NO: 1698829 - DNA, 25 bp, Homo sapien
caagcgctctgtctcaatgtttccc

SEQ ID NO: 1698830 - DNA, 25 bp, Homo sapien
tcactttgcatcacggaatccccgt

SEQ ID NO: 1698831 - DNA, 25 bp, Homo sapien
aatgtttccctgagtcttggcccag

SEQ ID NO: 1698832 - DNA, 25 bp, Homo sapien
tgcaaagatggggaatgcccagcgc

SEQ ID NO: 1698833 - DNA, 25 bp, Homo sapien
aaagatggggaatgcccagcgctgg

SEQ ID NO: 1698834 - DNA, 25 bp, Homo sapien
caaagatggggaatgcccagcgctg

SEQ ID NO: 1698835 - DNA, 25 bp, Homo sapien
agatggggaatgcccagcgctgggc

SEQ ID NO: 1698836 - DNA, 25 bp, Homo sapien
caggaagaaggacccgacacaggtt

SEQ ID NO: 1698837 - DNA, 25 bp, Homo sapien
gaaggacccgacacaggttgggaga

SEQ ID NO: 1698838 - DNA, 25 bp, Homo sapien
tgagtacccaggaagaaggacccga

SEQ ID NO: 1698839 - DNA, 25 bp, Homo sapien
acccaggaagaaggacccgacacag

SEQ ID NO: 1698840 - DNA, 25 bp, Homo sapien
cgcggctacattgattggcttctct

SEQ ID NO: 1698841 - DNA, 25 bp, Homo sapien
gaccgcggctacattgattggcttc

SEQ ID NO: 1698842 - DNA, 25 bp, Homo sapien
ccgggaccgcggctacattgattgg

SEQ ID NO: 1698843 - DNA, 25 bp, Homo sapien
tagaaccgggaccgcggctacattg

SEQ ID NO: 1698844 - DNA, 25 bp, Homo sapien
gaccagggcccccgagagcagcaga

SEQ ID NO: 1698845 - DNA, 25 bp, Homo sapien
gcagaagcagggttcggggcgccat

SEQ ID NO: 1698846 - DNA, 25 bp, Homo sapien
gggcccccgagagcagcagaagcag

SEQ ID NO: 1698847 - DNA, 25 bp, Homo sapien
ctgcccaggtctgggtcaggaccag

SEQ ID NO: 1698848 - DNA, 25 bp, Homo sapien
tggcgtcgctgtcgagccgcacgca

SEQ ID NO: 1698849 - DNA, 25 bp, Homo sapien
tgtcgtccacgtcgcccacggagag

SEQ ID NO: 1698850 - DNA, 25 bp, Homo sapien
tcctgggactcgtggcgtcgctgtc

SEQ ID NO: 1698851 - DNA, 25 bp, Homo sapien
tccatcctgggactcgtggcgtcgc

SEQ ID NO: 1698852 - DNA, 25 bp, Homo sapien
ttggccttggcggtccctgtctcct

SEQ ID NO: 1698853 - DNA, 25 bp, Homo sapien
tgtgctttggccttggcggtccctg

SEQ ID NO: 1698854 - DNA, 25 bp, Homo sapien
taaaactgtgctttggccttggcgg

SEQ ID NO: 1698855 - DNA, 25 bp, Homo sapien
tcggtaaaactgtgctttggccttg

SEQ ID NO: 1698856 - DNA, 25 bp, Homo sapien
aggcctcactctggttgtagtagcc

SEQ ID NO: 1698857 - DNA, 25 bp, Homo sapien
tagtagccgctcagggtccgcaggt

SEQ ID NO: 1698858 - DNA, 25 bp, Homo sapien
ctggttgtagtagccgctcagggtc

SEQ ID NO: 1698859 - DNA, 25 bp, Homo sapien
agccgctcagggtccgcaggttcac

SEQ ID NO: 1698860 - DNA, 25 bp, Homo sapien
ctcggcgtggatctcggacccagag

SEQ ID NO: 1698861 - DNA, 25 bp, Homo sapien
gcgtggatctcggacccagagactc

SEQ ID NO: 1698862 - DNA, 25 bp, Homo sapien
tagatgggtgtgagaccctggcccc

SEQ ID NO: 1698863 - DNA, 25 bp, Homo sapien
cgagccccgccctcgccaggaccaa

SEQ ID NO: 1698864 - DNA, 25 bp, Homo sapien
cgcccaccgagccccgccctcgcca

SEQ ID NO: 1698865 - DNA, 25 bp, Homo sapien
ctagatgggtgtgagaccctggccc

SEQ ID NO: 1698866 - DNA, 25 bp, Homo sapien
cgaccccacgtcgcagacagacatc

SEQ ID NO: 1698867 - DNA, 25 bp, Homo sapien
gtaatccttgccatcgtaagcaagc

SEQ ID NO: 1698868 - DNA, 25 bp, Homo sapien
ttgccatcgtaagcaagctggtgat

SEQ ID NO: 1698869 - DNA, 25 bp, Homo sapien
cacatctaataggtgcctatccctg

SEQ ID NO: 1698870 - DNA, 25 bp, Homo sapien
ataggtgcctatccctgtgaggatg

SEQ ID NO: 1698871 - DNA, 25 bp, Homo sapien
tcaggaatgccaatagtgatactgg

SEQ ID NO: 1698872 - DNA, 25 bp, Homo sapien
caggaatgccaatagtgatactggc

SEQ ID NO: 1698873 - DNA, 25 bp, Homo sapien
gctggcactaagttgtgtctgtaga

SEQ ID NO: 1698874 - DNA, 25 bp, Homo sapien
gttgtgtctgtagagacctgtccat

SEQ ID NO: 1698875 - DNA, 25 bp, Homo sapien
agcactatagagacatctttgattc

SEQ ID NO: 1698876 - DNA, 25 bp, Homo sapien
cactatagagacatctttgattcaa

SEQ ID NO: 1698877 - DNA, 25 bp, Homo sapien
cctacagagcccagatattggagat

SEQ ID NO: 1698878 - DNA, 25 bp, Homo sapien
tataagggtttagatatggagccac

SEQ ID NO: 1698879 - DNA, 25 bp, Homo sapien
gagaagtgcaaaatcaccctgaagg

SEQ ID NO: 1698880 - DNA, 25 bp, Homo sapien
ttccatggactctcatttaaatgtc

SEQ ID NO: 1698881 - DNA, 25 bp, Homo sapien
gaatatgaaaccctctcaggctggg

SEQ ID NO: 1698882 - DNA, 25 bp, Homo sapien
caagtgtgaccccaagtgctggaca

SEQ ID NO: 1698883 - DNA, 25 bp, Homo sapien
tccttgtgtgatagcagccctgcct

SEQ ID NO: 1698884 - DNA, 25 bp, Homo sapien
tgtttgacgcatcctagagcacagg

SEQ ID NO: 1698885 - DNA, 25 bp, Homo sapien
ctgggtgtcgtggtggatgcctata

SEQ ID NO: 1698886 - DNA, 25 bp, Homo sapien
caacaagagggagactccatctcga

SEQ ID NO: 1698887 - DNA, 25 bp, Homo sapien
cagctactcaggaggctgaggtagg

SEQ ID NO: 1698888 - DNA, 25 bp, Homo sapien
gtgtcgtggtggatgcctataattc

SEQ ID NO: 1698889 - DNA, 25 bp, Homo sapien
gccaaggctatttttcatgagatcc

SEQ ID NO: 1698890 - DNA, 25 bp, Homo sapien
agagttgccaattagcccagggtca

SEQ ID NO: 1698891 - DNA, 25 bp, Homo sapien
tgccagacaatgtagagagttgcca

SEQ ID NO: 1698892 - DNA, 25 bp, Homo sapien
caaatgacctctttctagccaaggc

SEQ ID NO: 1698893 - DNA, 25 bp, Homo sapien
ccaaagtagaaacttcagtgagtct

SEQ ID NO: 1698894 - DNA, 25 bp, Homo sapien
tgtcagcattactctatcagttaga

SEQ ID NO: 1698895 - DNA, 25 bp, Homo sapien
gtgagtcttatgttctacacccaga

SEQ ID NO: 1698896 - DNA, 25 bp, Homo sapien
agaagtgagtcattaagtccaggcc

SEQ ID NO: 1698897 - DNA, 25 bp, Homo sapien
gattcatcctctcttgtgaagctgt

SEQ ID NO: 1698898 - DNA, 25 bp, Homo sapien
acttcctagtcacatggaccacagg

SEQ ID NO: 1698899 - DNA, 25 bp, Homo sapien
gaccacaggcctccttatgacacaa

SEQ ID NO: 1698900 - DNA, 25 bp, Homo sapien
aacgttgcagtctagttgtcttcca

SEQ ID NO: 1698901 - DNA, 25 bp, Homo sapien
atatagccatggaaatttttattaa

SEQ ID NO: 1698902 - DNA, 25 bp, Homo sapien
tatagccatggaaatttttattaaa

SEQ ID NO: 1698903 - DNA, 25 bp, Homo sapien
atagccatggaaatttttattaaat

SEQ ID NO: 1698904 - DNA, 25 bp, Homo sapien
tagccatggaaatttttattaaata

SEQ ID NO: 1698905 - DNA, 25 bp, Homo sapien
ctacagtgggtagcacaatcttggt

SEQ ID NO: 1698906 - DNA, 25 bp, Homo sapien
cagtgggtagcacaatcttggtagc

SEQ ID NO: 1698907 - DNA, 25 bp, Homo sapien
gtgggtagcacaatcttggtagccc

SEQ ID NO: 1698908 - DNA, 25 bp, Homo sapien
tacagtgggtagcacaatcttggta

SEQ ID NO: 1698909 - DNA, 25 bp, Homo sapien
ttgtgtcgagggtctccacgagtcc

SEQ ID NO: 1698910 - DNA, 25 bp, Homo sapien
cagcctcggcgtgggtctccgattg

SEQ ID NO: 1698911 - DNA, 25 bp, Homo sapien
cgcagcctcggcgtgggtctccgat

SEQ ID NO: 1698912 - DNA, 25 bp, Homo sapien
tcgagggtctccacgagtcccgcag

SEQ ID NO: 1698913 - DNA, 25 bp, Homo sapien
ctgtccccaagcccgcggtcagcct

SEQ ID NO: 1698914 - DNA, 25 bp, Homo sapien
agcccgcggtcagcctcagccactg

SEQ ID NO: 1698915 - DNA, 25 bp, Homo sapien
cctctgccccgatcaatcccccggg

SEQ ID NO: 1698916 - DNA, 25 bp, Homo sapien
tcctcctctgccccgatcaatcccc

SEQ ID NO: 1698917 - DNA, 25 bp, Homo sapien
ttttccgctgcggtccaagagagca

SEQ ID NO: 1698918 - DNA, 25 bp, Homo sapien
gggtatgttcatccccgcgcgaaga

SEQ ID NO: 1698919 - DNA, 25 bp, Homo sapien
ttaggacgaggtaactggcgccatc

SEQ ID NO: 1698920 - DNA, 25 bp, Homo sapien
caaaacatctgagccgccttttccg

SEQ ID NO: 1698921 - DNA, 25 bp, Homo sapien
tcttaaggcctttgctgagccactc

SEQ ID NO: 1698922 - DNA, 25 bp, Homo sapien
cattcttaaggcctttgctgagcca

SEQ ID NO: 1698923 - DNA, 25 bp, Homo sapien
ttaaggcctttgctgagccactccg

SEQ ID NO: 1698924 - DNA, 25 bp, Homo sapien
taaggcctttgctgagccactccgc

SEQ ID NO: 1698925 - DNA, 25 bp, Homo sapien
gctcctgggtcagtgtgatctccag

SEQ ID NO: 1698926 - DNA, 25 bp, Homo sapien
gggtggagggttacctgtgccttca

SEQ ID NO: 1698927 - DNA, 25 bp, Homo sapien
gaaggttctgtaccctgcaagtctg

SEQ ID NO: 1698928 - DNA, 25 bp, Homo sapien
tcagcgtggcctcatagttggagat

SEQ ID NO: 1698929 - DNA, 25 bp, Homo sapien
ggacttctgctttgcctgagaagag

SEQ ID NO: 1698930 - DNA, 25 bp, Homo sapien
gattacagcaactagaagaaccagg

SEQ ID NO: 1698931 - DNA, 25 bp, Homo sapien
cagcgactacagctacagtgattac

SEQ ID NO: 1698932 - DNA, 25 bp, Homo sapien
cagcagcgactacagctacagtgat

SEQ ID NO: 1698933 - DNA, 25 bp, Homo sapien
gctacagtgattacagcaactagaa

SEQ ID NO: 1698934 - DNA, 25 bp, Homo sapien
aagcctgagcataactgcctccttt

SEQ ID NO: 1698935 - DNA, 25 bp, Homo sapien
gcctgagcataactgcctccttttc

SEQ ID NO: 1698936 - DNA, 25 bp, Homo sapien
tgaagcctgagcataactgcctcct

SEQ ID NO: 1698937 - DNA, 25 bp, Homo sapien
atgaagcctgagcataactgcctcc

SEQ ID NO: 1698938 - DNA, 25 bp, Homo sapien
aaaatctggtcagagcccacaggtg

SEQ ID NO: 1698939 - DNA, 25 bp, Homo sapien
aaaaacaaaatctggtcagagccca

SEQ ID NO: 1698940 - DNA, 25 bp, Homo sapien
acaaaatctggtcagagcccacagg

SEQ ID NO: 1698941 - DNA, 25 bp, Homo sapien
aaacaaaatctggtcagagcccaca

SEQ ID NO: 1698942 - DNA, 25 bp, Homo sapien
acttcaggccctctaaggtgtcact

SEQ ID NO: 1698943 - DNA, 25 bp, Homo sapien
tctaaggtgtcacttttacaagcct

SEQ ID NO: 1698944 - DNA, 25 bp, Homo sapien
tcacttcaggccctctaaggtgtca

SEQ ID NO: 1698945 - DNA, 25 bp, Homo sapien
ggccctctaaggtgtcacttttaca

SEQ ID NO: 1698946 - DNA, 25 bp, Homo sapien
ttacctgttactgtagacatagaca

SEQ ID NO: 1698947 - DNA, 25 bp, Homo sapien
tacctgttactgtagacatagacac

SEQ ID NO: 1698948 - DNA, 25 bp, Homo sapien
acagcccaaatgcaggttatgggga

SEQ ID NO: 1698949 - DNA, 25 bp, Homo sapien
cagcatcaggtcaggtgcagactcc

SEQ ID NO: 1698950 - DNA, 25 bp, Homo sapien
ccagcatcaggtcaggtgcagactc

SEQ ID NO: 1698951 - DNA, 25 bp, Homo sapien
gcatcaggtcaggtgcagactccat

SEQ ID NO: 1698952 - DNA, 25 bp, Homo sapien
catctcctcaagacaaagtaccaca

SEQ ID NO: 1698953 - DNA, 25 bp, Homo sapien
cattccgtagccctaagtttccgtg

SEQ ID NO: 1698954 - DNA, 25 bp, Homo sapien
gtagccctaagtttccgtgtgagtc

SEQ ID NO: 1698955 - DNA, 25 bp, Homo sapien
gacatctcctcaagacaaagtacca

SEQ ID NO: 1698956 - DNA, 25 bp, Homo sapien
tagaaccaggaccgcggcgacgctg

SEQ ID NO: 1698957 - DNA, 25 bp, Homo sapien
tctctaaaaacctgtcacctaatgg

SEQ ID NO: 1698958 - DNA, 25 bp, Homo sapien
accaggaccgcggcgacgctgattg

SEQ ID NO: 1698959 - DNA, 25 bp, Homo sapien
aacctgtcacctaatgggagtgaga

SEQ ID NO: 1698960 - DNA, 25 bp, Homo sapien
cccaggtctcggtcagggtcagggc

SEQ ID NO: 1698961 - DNA, 25 bp, Homo sapien
gcagcaggaagagggttcggggcgc

SEQ ID NO: 1698962 - DNA, 25 bp, Homo sapien
ccgcccaggtctcggtcagggtcag

SEQ ID NO: 1698963 - DNA, 25 bp, Homo sapien
gcaggaagagggttcggggcgccat

SEQ ID NO: 1698964 - DNA, 25 bp, Homo sapien
ctcggacacgccgagtcgctgtcga

SEQ ID NO: 1698965 - DNA, 25 bp, Homo sapien
gcggctccatcctcggacacgccga

SEQ ID NO: 1698966 - DNA, 25 bp, Homo sapien
cggacacgccgagtcgctgtcgaac

SEQ ID NO: 1698967 - DNA, 25 bp, Homo sapien
tccatcctcggacacgccgagtcgc

SEQ ID NO: 1698968 - DNA, 25 bp, Homo sapien
ccttggtgttccgtgtctcctcttc

SEQ ID NO: 1698969 - DNA, 25 bp, Homo sapien
cttggtgttccgtgtctcctcttcc

SEQ ID NO: 1698970 - DNA, 25 bp, Homo sapien
cgcggcctcggggtggatcccagac

SEQ ID NO: 1698971 - DNA, 25 bp, Homo sapien
aggtgggggtcgtgatctgctccct

SEQ ID NO: 1698972 - DNA, 25 bp, Homo sapien
gatctgctccctgggccggagttac

SEQ ID NO: 1698973 - DNA, 25 bp, Homo sapien
tcccagacccggagactcgggagta

SEQ ID NO: 1698974 - DNA, 25 bp, Homo sapien
gcgccttggggttctcccaggtaga

SEQ ID NO: 1698975 - DNA, 25 bp, Homo sapien
cgccttggggttctcccaggtagag

SEQ ID NO: 1698976 - DNA, 25 bp, Homo sapien
cgagcctcgccctcgcccggaccca

SEQ ID NO: 1698977 - DNA, 25 bp, Homo sapien
ccctcggtcagccccgcccaccgag

SEQ ID NO: 1698978 - DNA, 25 bp, Homo sapien
aggtcgcagccaatcatccactgga

SEQ ID NO: 1698979 - DNA, 25 bp, Homo sapien
ggtcgcagccaatcatccactggag

SEQ ID NO: 1698980 - DNA, 25 bp, Homo sapien
caggtcgcagccaatcatccactgg

SEQ ID NO: 1698981 - DNA, 25 bp, Homo sapien
cccaggtcgcagccaatcatccact

SEQ ID NO: 1698982 - DNA, 25 bp, Homo sapien
ttggagatctgagccgcagtgtccg

SEQ ID NO: 1698983 - DNA, 25 bp, Homo sapien
ggaggcgccccactgcccctggtac

SEQ ID NO: 1698984 - DNA, 25 bp, Homo sapien
gggaggcgccccactgcccctggta

SEQ ID NO: 1698985 - DNA, 25 bp, Homo sapien
agggaggcgccccactgcccctggt

SEQ ID NO: 1698986 - DNA, 25 bp, Homo sapien
tcagggaggcgccccactgcccctg

SEQ ID NO: 1698987 - DNA, 25 bp, Homo sapien
tggcctcatagtcaaagacagggtg

SEQ ID NO: 1698988 - DNA, 25 bp, Homo sapien
gcctcatagtcaaagacagggtggt

SEQ ID NO: 1698989 - DNA, 25 bp, Homo sapien
ctcatagtcaaagacagggtggtgg

SEQ ID NO: 1698990 - DNA, 25 bp, Homo sapien
gtggcctcatagtcaaagacagggt

SEQ ID NO: 1698991 - DNA, 25 bp, Homo sapien
catctcagcatgaggggctccggca

SEQ ID NO: 1698992 - DNA, 25 bp, Homo sapien
ccatctcagcatgaggggctccggc

SEQ ID NO: 1698993 - DNA, 25 bp, Homo sapien
tccatctcagcatgaggggctccgg

SEQ ID NO: 1698994 - DNA, 25 bp, Homo sapien
gctcctgctttccctaacagacatg

SEQ ID NO: 1698995 - DNA, 25 bp, Homo sapien
cctgctttccctaacagacatgatg

SEQ ID NO: 1698996 - DNA, 25 bp, Homo sapien
ctgctttccctaacagacatgatgc

SEQ ID NO: 1698997 - DNA, 25 bp, Homo sapien
ctgcaaggacaaccaggccagcaac

SEQ ID NO: 1698998 - DNA, 25 bp, Homo sapien
ggccagcaacgatacccatgatggg

SEQ ID NO: 1698999 - DNA, 25 bp, Homo sapien
caggccagcaacgatacccatgatg

SEQ ID NO: 1699000 - DNA, 25 bp, Homo sapien
gcaaggacaaccaggccagcaacga

SEQ ID NO: 1699001 - DNA, 25 bp, Homo sapien
tttctccacagcacagcagcgaccg

SEQ ID NO: 1699002 - DNA, 25 bp, Homo sapien
tctccacagcacagcagcgaccgca

SEQ ID NO: 1699003 - DNA, 25 bp, Homo sapien
ttctccacagcacagcagcgaccgc

SEQ ID NO: 1699004 - DNA, 25 bp, Homo sapien
cagcctgagagtagctccctccttt

SEQ ID NO: 1699005 - DNA, 25 bp, Homo sapien
tgcagcctgagagtagctccctcct

SEQ ID NO: 1699006 - DNA, 25 bp, Homo sapien
gcagcctgagagtagctccctcctt

SEQ ID NO: 1699007 - DNA, 25 bp, Homo sapien
ttgcagcctgagagtagctccctcc

SEQ ID NO: 1699008 - DNA, 25 bp, Homo sapien
acaagatcccaaggatctcagggat

SEQ ID NO: 1699009 - DNA, 25 bp, Homo sapien
tgggctcccaaacacaagatcccaa

SEQ ID NO: 1699010 - DNA, 25 bp, Homo sapien
cccatgggctcccaaacacaagatc

SEQ ID NO: 1699011 - DNA, 25 bp, Homo sapien
acacaagatcccaaggatctcaggg

SEQ ID NO: 1699012 - DNA, 25 bp, Homo sapien
cacattagagccctgggcactgtca

SEQ ID NO: 1699013 - DNA, 25 bp, Homo sapien
acaagccgtgagagacacattagag

SEQ ID NO: 1699014 - DNA, 25 bp, Homo sapien
acattagagccctgggcactgtcac

SEQ ID NO: 1699015 - DNA, 25 bp, Homo sapien
atttacaagccgtgagagacacatt

SEQ ID NO: 1699016 - DNA, 25 bp, Homo sapien
gctcaatacattgaagtcaaagaaa

SEQ ID NO: 1699017 - DNA, 25 bp, Homo sapien
tcatagcacagctatgtcccctgtt

SEQ ID NO: 1699018 - DNA, 25 bp, Homo sapien
gacactttaaacagcccatcacatg

SEQ ID NO: 1699019 - DNA, 25 bp, Homo sapien
tcatatcagtcacagtgaggggtga

SEQ ID NO: 1699020 - DNA, 25 bp, Homo sapien
ctgcacaaagaggagtcagggttct

SEQ ID NO: 1699021 - DNA, 25 bp, Homo sapien
gaagtaagttatagctcagtggacc

SEQ ID NO: 1699022 - DNA, 25 bp, Homo sapien
gcagttcagcatgaggaagagggtc

SEQ ID NO: 1699023 - DNA, 25 bp, Homo sapien
agtggaccacaaatttgagacagag

SEQ ID NO: 1699024 - DNA, 25 bp, Homo sapien
tcagtggaccacaaatttgagacag

SEQ ID NO: 1699025 - DNA, 25 bp, Homo sapien
ttaacccatcaatctctcttggaaa

SEQ ID NO: 1699026 - DNA, 25 bp, Homo sapien
attaacccatcaatctctcttggaa

SEQ ID NO: 1699027 - DNA, 25 bp, Homo sapien
aattaacccatcaatctctcttgga

SEQ ID NO: 1699028 - DNA, 25 bp, Homo sapien
taacccatcaatctctcttggaaat

SEQ ID NO: 1699029 - DNA, 25 bp, Homo sapien
aattcgaaatccatgaacactctgc

SEQ ID NO: 1699030 - DNA, 25 bp, Homo sapien
ttctttgatggaattcgaaatccat

SEQ ID NO: 1699031 - DNA, 25 bp, Homo sapien
ctttgatggaattcgaaatccatga

SEQ ID NO: 1699032 - DNA, 25 bp, Homo sapien
gatggaattcgaaatccatgaacac

SEQ ID NO: 1699033 - DNA, 25 bp, Homo sapien
caaggccgcattgcccttcgggctg

SEQ ID NO: 1699034 - DNA, 25 bp, Homo sapien
gatgctttgccggactagcctgagg

SEQ ID NO: 1699035 - DNA, 25 bp, Homo sapien
ccttgtctagacagggctgagctgt

SEQ ID NO: 1699036 - DNA, 25 bp, Homo sapien
gtccctattggatctggtgccggcc

SEQ ID NO: 1699037 - DNA, 25 bp, Homo sapien
cactggaaaccagatacgacgccct

SEQ ID NO: 1699038 - DNA, 25 bp, Homo sapien
tctttagaccccactggaaaccaga

SEQ ID NO: 1699039 - DNA, 25 bp, Homo sapien
aaaccagatacgacgccctcatcgg

SEQ ID NO: 1699040 - DNA, 25 bp, Homo sapien
tctgatggcgtctttagaccccact

SEQ ID NO: 1699041 - DNA, 25 bp, Homo sapien
ctgggagcttcttacggtgtagggg

SEQ ID NO: 1699042 - DNA, 25 bp, Homo sapien
catgtggccgattccagtttttgcc

SEQ ID NO: 1699043 - DNA, 25 bp, Homo sapien
taggaatgggttggttgcatgatac

SEQ ID NO: 1699044 - DNA, 25 bp, Homo sapien
caccggtttcctattgatgtacatg

SEQ ID NO: 1699045 - DNA, 25 bp, Homo sapien
gaaggcttacatatcgttttaccac

SEQ ID NO: 1699046 - DNA, 25 bp, Homo sapien
gaaacaacactaatgaccggtttgc

SEQ ID NO: 1699047 - DNA, 25 bp, Homo sapien
gagtcttctgatacgtattcctttg

SEQ ID NO: 1699048 - DNA, 25 bp, Homo sapien
agctggtctcggcaggagactccat

SEQ ID NO: 1699049 - DNA, 25 bp, Homo sapien
tccatcctgagtcttctgatacgta

SEQ ID NO: 1699050 - DNA, 25 bp, Homo sapien
tcattttcaaagcccatgctggagg

SEQ ID NO: 1699051 - DNA, 25 bp, Homo sapien
attaggacagtccaagcaggataaa

SEQ ID NO: 1699052 - DNA, 25 bp, Homo sapien
tggaggaaacccctcatgctgagtc

SEQ ID NO: 1699053 - DNA, 25 bp, Homo sapien
gcaggataaacccagcctaaagtca

SEQ ID NO: 1699054 - DNA, 25 bp, Homo sapien
tagcacactgtgtactttgcaacca

SEQ ID NO: 1699055 - DNA, 25 bp, Homo sapien
tgcccaaaagcgttacaacaggact

SEQ ID NO: 1699056 - DNA, 25 bp, Homo sapien
aatacattggatagcagaaccttgg

SEQ ID NO: 1699057 - DNA, 25 bp, Homo sapien
ttttgcagtgtacctgtgactcccg

SEQ ID NO: 1699058 - DNA, 25 bp, Homo sapien
cgcggcggcaccgattggcttctct

SEQ ID NO: 1699059 - DNA, 25 bp, Homo sapien
gcttctctagaaacccgacacctag

SEQ ID NO: 1699060 - DNA, 25 bp, Homo sapien
cacctagtgggaatgagaactgtgc

SEQ ID NO: 1699061 - DNA, 25 bp, Homo sapien
tgtgcccgcttcgtgagtatccagg

SEQ ID NO: 1699062 - DNA, 25 bp, Homo sapien
ccaggtctgggtcagggccagggcc

SEQ ID NO: 1699063 - DNA, 25 bp, Homo sapien
gcaggaggagggttcggggcgccat

SEQ ID NO: 1699064 - DNA, 25 bp, Homo sapien
agcagcaggaggagggttcggggcg

SEQ ID NO: 1699065 - DNA, 25 bp, Homo sapien
agcaggaggagggttcggggcgcca

SEQ ID NO: 1699066 - DNA, 25 bp, Homo sapien
tatcgtccacgtagccgacggagat

SEQ ID NO: 1699067 - DNA, 25 bp, Homo sapien
gcgtatcgtccacgtagccgacgga

SEQ ID NO: 1699068 - DNA, 25 bp, Homo sapien
gtatcgtccacgtagccgacggaga

SEQ ID NO: 1699069 - DNA, 25 bp, Homo sapien
atcgtccacgtagccgacggagatg

SEQ ID NO: 1699070 - DNA, 25 bp, Homo sapien
ctcgttcagtccgtgcttgggcctt

SEQ ID NO: 1699071 - DNA, 25 bp, Homo sapien
gcttgggccttgcagatctgtgtgt

SEQ ID NO: 1699072 - DNA, 25 bp, Homo sapien
ttgtagtagcggagcgcgatccgca

SEQ ID NO: 1699073 - DNA, 25 bp, Homo sapien
tagcggagcgcgatccgcaggttct

SEQ ID NO: 1699074 - DNA, 25 bp, Homo sapien
tctggttgtagtagcggagcgcgat

SEQ ID NO: 1699075 - DNA, 25 bp, Homo sapien
gtagcggagcgcgatccgcaggttc

SEQ ID NO: 1699076 - DNA, 25 bp, Homo sapien
gcctgggcctctcccaggtcaaggg

SEQ ID NO: 1699077 - DNA, 25 bp, Homo sapien
ggtaaaggcgcctgggcctctccca

SEQ ID NO: 1699078 - DNA, 25 bp, Homo sapien
ctgggcctctcccaggtcaagggtc

SEQ ID NO: 1699079 - DNA, 25 bp, Homo sapien
gcgcctgggcctctcccaggtcaag

SEQ ID NO: 1699080 - DNA, 25 bp, Homo sapien
gccatacatcacctgcatggtgtga

SEQ ID NO: 1699081 - DNA, 25 bp, Homo sapien
tcgcagccatacatcacctgcatgg

SEQ ID NO: 1699082 - DNA, 25 bp, Homo sapien
catacatcacctgcatggtgtgaga

SEQ ID NO: 1699083 - DNA, 25 bp, Homo sapien
gcagccatacatcacctgcatggtg

SEQ ID NO: 1699084 - DNA, 25 bp, Homo sapien
ctgttcatacccgcagaggaagcgc

SEQ ID NO: 1699085 - DNA, 25 bp, Homo sapien
tacccgcagaggaagcgcccgtcgg

SEQ ID NO: 1699086 - DNA, 25 bp, Homo sapien
ttcatacccgcagaggaagcgcccg

SEQ ID NO: 1699087 - DNA, 25 bp, Homo sapien
cagaggaagcgcccgtcgggcccca

SEQ ID NO: 1699088 - DNA, 25 bp, Homo sapien
caggtatctgcggagccactccacg

SEQ ID NO: 1699089 - DNA, 25 bp, Homo sapien
cgtctccttcccgttctccaggtat

SEQ ID NO: 1699090 - DNA, 25 bp, Homo sapien
gatgtaatccttgccgtcgtaggcg

SEQ ID NO: 1699091 - DNA, 25 bp, Homo sapien
tccaggagcgcaggtcctcgttcag

SEQ ID NO: 1699092 - DNA, 25 bp, Homo sapien
caggccatccgggaggcgccctgtg

SEQ ID NO: 1699093 - DNA, 25 bp, Homo sapien
agccccggagatctacaggccatcc

SEQ ID NO: 1699094 - DNA, 25 bp, Homo sapien
cggagatctacaggccatccgggag

SEQ ID NO: 1699095 - DNA, 25 bp, Homo sapien
ggcgatattatagtgttggtcccat

SEQ ID NO: 1699096 - DNA, 25 bp, Homo sapien
ttaattgtgtcagagagcacggcgg

SEQ ID NO: 1699097 - DNA, 25 bp, Homo sapien
cttaattgtgtcagagagcacggcg

SEQ ID NO: 1699098 - DNA, 25 bp, Homo sapien
taattgtgtcagagagcacggcgga

SEQ ID NO: 1699099 - DNA, 25 bp, Homo sapien
gggtggtgggtcatatgtgtcttgg

SEQ ID NO: 1699100 - DNA, 25 bp, Homo sapien
cctcatggtcagagatggggtggtg

SEQ ID NO: 1699101 - DNA, 25 bp, Homo sapien
tgggtcatatgtgtcttgggggggt

SEQ ID NO: 1699102 - DNA, 25 bp, Homo sapien
ctccgcagggtagaagcccagggcc

SEQ ID NO: 1699103 - DNA, 25 bp, Homo sapien
gggctctggcagaccctcatgctgc

SEQ ID NO: 1699104 - DNA, 25 bp, Homo sapien
tggaaggttccatcccctgcaggcc

SEQ ID NO: 1699105 - DNA, 25 bp, Homo sapien
agctccgtgtgtgggtctggtcctc

SEQ ID NO: 1699106 - DNA, 25 bp, Homo sapien
gaccctcatgctgcacatggcaggt

SEQ ID NO: 1699107 - DNA, 25 bp, Homo sapien
ggctttccctaagggacatgacacc

SEQ ID NO: 1699108 - DNA, 25 bp, Homo sapien
agagaggctctggctttccctaagg

SEQ ID NO: 1699109 - DNA, 25 bp, Homo sapien
ggctctggctttccctaagggacat

SEQ ID NO: 1699110 - DNA, 25 bp, Homo sapien
ctaaagctctccagagaggctctgg

SEQ ID NO: 1699111 - DNA, 25 bp, Homo sapien
acaagtagaaccaggccagcaacga

SEQ ID NO: 1699112 - DNA, 25 bp, Homo sapien
tcttcctccacattacagcagcgac

SEQ ID NO: 1699113 - DNA, 25 bp, Homo sapien
gctacaagtagaaccaggccagcaa

SEQ ID NO: 1699114 - DNA, 25 bp, Homo sapien
gaccacagctacaagtagaaccagg

SEQ ID NO: 1699115 - DNA, 25 bp, Homo sapien
ttgcagcctgagagtagctccctcc

SEQ ID NO: 1699116 - DNA, 25 bp, Homo sapien
cagcctgagagtagctccctccttt

SEQ ID NO: 1699117 - DNA, 25 bp, Homo sapien
tgcagcctgagagtagctccctcct

SEQ ID NO: 1699118 - DNA, 25 bp, Homo sapien
gcagcctgagagtagctccctcctt

SEQ ID NO: 1699119 - DNA, 25 bp, Homo sapien
cacgctgtgagagacacatcagagc

SEQ ID NO: 1699120 - DNA, 25 bp, Homo sapien
gctgtgagagacacatcagagccct

SEQ ID NO: 1699121 - DNA, 25 bp, Homo sapien
tcacgctgtgagagacacatcagag

SEQ ID NO: 1699122 - DNA, 25 bp, Homo sapien
tgtgagagacacatcagagccctgg

SEQ ID NO: 1699123 - DNA, 25 bp, Homo sapien
tgacactttggcagcccatcgcatg

SEQ ID NO: 1699124 - DNA, 25 bp, Homo sapien
cagtaatggatgacactttggcagc

SEQ ID NO: 1699125 - DNA, 25 bp, Homo sapien
ttggcagcccatcgcatgctcaaaa

SEQ ID NO: 1699126 - DNA, 25 bp, Homo sapien
tcatatctgtcccagtaatggatga

SEQ ID NO: 1699127 - DNA, 25 bp, Homo sapien
tcagattctaattttaagagggaag

SEQ ID NO: 1699128 - DNA, 25 bp, Homo sapien
tgtttactcagattctaattttaag

SEQ ID NO: 1699129 - DNA, 25 bp, Homo sapien
tactcagattctaattttaagaggg

SEQ ID NO: 1699130 - DNA, 25 bp, Homo sapien
gaacacagatcagcgtggggaagag

SEQ ID NO: 1699131 - DNA, 25 bp, Homo sapien
gatagcccttactctccagactagg

SEQ ID NO: 1699132 - DNA, 25 bp, Homo sapien
ccttaagccccactgtagattctga

SEQ ID NO: 1699133 - DNA, 25 bp, Homo sapien
catcaaggccaattatgcatgtgga

SEQ ID NO: 1699134 - DNA, 25 bp, Homo sapien
tcatagatatgaagcagtgccctcg

SEQ ID NO: 1699135 - DNA, 25 bp, Homo sapien
cacatggtagaagcccgggacccag

SEQ ID NO: 1699136 - DNA, 25 bp, Homo sapien
gtccccacaagctctgcgtcctaaa

SEQ ID NO: 1699137 - DNA, 25 bp, Homo sapien
catggcccctcattcatctccttag

SEQ ID NO: 1699138 - DNA, 25 bp, Homo sapien
tagtggatcacacatgtattctggg

SEQ ID NO: 1699139 - DNA, 25 bp, Homo sapien
agcacctagaacaaccaggacggta

SEQ ID NO: 1699140 - DNA, 25 bp, Homo sapien
ctagaacaaccaggacggtaacgat

SEQ ID NO: 1699141 - DNA, 25 bp, Homo sapien
ccaggacggtaacgatgcccatgat

SEQ ID NO: 1699142 - DNA, 25 bp, Homo sapien
acagcagtgaccacagcacctagaa

SEQ ID NO: 1699143 - DNA, 25 bp, Homo sapien
ccatctggagcttgaaatccacgaa

SEQ ID NO: 1699144 - DNA, 25 bp, Homo sapien
ttgaaatccacgaatggaagaagaa

SEQ ID NO: 1699145 - DNA, 25 bp, Homo sapien
ttgaagcctgagcatagctgactcc

SEQ ID NO: 1699146 - DNA, 25 bp, Homo sapien
aagcctgagcatagctgactccttt

SEQ ID NO: 1699147 - DNA, 25 bp, Homo sapien
gcctgagcatagctgactccttttc

SEQ ID NO: 1699148 - DNA, 25 bp, Homo sapien
tgaagcctgagcatagctgactcct

SEQ ID NO: 1699149 - DNA, 25 bp, Homo sapien
gaggttgcacatagccagtggctct

SEQ ID NO: 1699150 - DNA, 25 bp, Homo sapien
tgcagctccgctaagaattttcctg

SEQ ID NO: 1699151 - DNA, 25 bp, Homo sapien
tccctagggaggtggcacaatgcct

SEQ ID NO: 1699152 - DNA, 25 bp, Homo sapien
tatgcacataggctattacaggcag

SEQ ID NO: 1699153 - DNA, 25 bp, Homo sapien
tacgggatgcctaaaagagtgaagc

SEQ ID NO: 1699154 - DNA, 25 bp, Homo sapien
tcttaagaacggtggctagctgcca

SEQ ID NO: 1699155 - DNA, 25 bp, Homo sapien
agtgaagctgtatgtccctgagacc

SEQ ID NO: 1699156 - DNA, 25 bp, Homo sapien
gcttcaagggctatacaaggaccag

SEQ ID NO: 1699157 - DNA, 25 bp, Homo sapien
agtcagggccttcagtgcatccacc

SEQ ID NO: 1699158 - DNA, 25 bp, Homo sapien
aagaaactcctctacgatacaccca

SEQ ID NO: 1699159 - DNA, 25 bp, Homo sapien
taggaactataattgatctctgcca

SEQ ID NO: 1699160 - DNA, 25 bp, Homo sapien
cactggagacagatacattgacccc

SEQ ID NO: 1699161 - DNA, 25 bp, Homo sapien
cacctgacacaaatgtgatggtcaa

SEQ ID NO: 1699162 - DNA, 25 bp, Homo sapien
gatcctggcattattgtcacctgac

SEQ ID NO: 1699163 - DNA, 25 bp, Homo sapien
tattgtcacctgacacaaatgtgat

SEQ ID NO: 1699164 - DNA, 25 bp, Homo sapien
tgaggatcctggcattattgtcacc

SEQ ID NO: 1699165 - DNA, 25 bp, Homo sapien
cccaggccctggtgctcaagatcca

SEQ ID NO: 1699166 - DNA, 25 bp, Homo sapien
caggccctggtgctcaagatccaaa

SEQ ID NO: 1699167 - DNA, 25 bp, Homo sapien
ggcccaggccctggtgctcaagatc

SEQ ID NO: 1699168 - DNA, 25 bp, Homo sapien
gggcccaggccctggtgctcaagat

SEQ ID NO: 1699169 - DNA, 25 bp, Homo sapien
ggcccaagctgaggagttgcttgca

SEQ ID NO: 1699170 - DNA, 25 bp, Homo sapien
gcaacacaggttccaagggcctcaa

SEQ ID NO: 1699171 - DNA, 25 bp, Homo sapien
catgagatcttgcaacacaggttcc

SEQ ID NO: 1699172 - DNA, 25 bp, Homo sapien
agctgaggagttgcttgcacagcag

SEQ ID NO: 1699173 - DNA, 25 bp, Homo sapien
gagaaggcaaacccttgcagcatgc

SEQ ID NO: 1699174 - DNA, 25 bp, Homo sapien
cagagaaggcaaacccttgcagcat

SEQ ID NO: 1699175 - DNA, 25 bp, Homo sapien
aggcaaacccttgcagcatgcaggg

SEQ ID NO: 1699176 - DNA, 25 bp, Homo sapien
gaaggcaaacccttgcagcatgcag

SEQ ID NO: 1699177 - DNA, 25 bp, Homo sapien
gtgtcctccagtcacaacagaacat

SEQ ID NO: 1699178 - DNA, 25 bp, Homo sapien
ttgtccccagatgatcaaaaccggg

SEQ ID NO: 1699179 - DNA, 25 bp, Homo sapien
catgggtttttatctcaggaccttc

SEQ ID NO: 1699180 - DNA, 25 bp, Homo sapien
tcttgtccccagatgatcaaaaccg

SEQ ID NO: 1699181 - DNA, 25 bp, Homo sapien
gaatctgaactttggctgaggtcta

SEQ ID NO: 1699182 - DNA, 25 bp, Homo sapien
accagggctgggtctatggaaccag

SEQ ID NO: 1699183 - DNA, 25 bp, Homo sapien
ggttgcagggtattcctcctaggga

SEQ ID NO: 1699184 - DNA, 25 bp, Homo sapien
cctttgctgaaggactgagggaatt

SEQ ID NO: 1699185 - DNA, 25 bp, Homo sapien
ctgttgagcctgtgtatgaatttta

SEQ ID NO: 1699186 - DNA, 25 bp, Homo sapien
gaattttataagattgcataacaaa

SEQ ID NO: 1699187 - DNA, 25 bp, Homo sapien
caattcattccgagtctgttgagcc

SEQ ID NO: 1699188 - DNA, 25 bp, Homo sapien
tgtaactagtgtgcatatcaattca

SEQ ID NO: 1699189 - DNA, 25 bp, Homo sapien
tcttggcaacccctaaatgatcagg

SEQ ID NO: 1699190 - DNA, 25 bp, Homo sapien
ttactgggtgagtccaagacatctc

SEQ ID NO: 1699191 - DNA, 25 bp, Homo sapien
gcgttactatatgttgcaaccggga

SEQ ID NO: 1699192 - DNA, 25 bp, Homo sapien
gcaaccgggagccagtacagacttt

SEQ ID NO: 1699193 - DNA, 25 bp, Homo sapien
agagagggagctcgccgccagagag

SEQ ID NO: 1699194 - DNA, 25 bp, Homo sapien
cagagagggagctcgccgccagaga

SEQ ID NO: 1699195 - DNA, 25 bp, Homo sapien
agggaccccagcgacgccgattggc

SEQ ID NO: 1699196 - DNA, 25 bp, Homo sapien
gcgacgccgattggcttcgctagaa

SEQ ID NO: 1699197 - DNA, 25 bp, Homo sapien
cgctagaaacccgacaccaaatggg

SEQ ID NO: 1699198 - DNA, 25 bp, Homo sapien
atctgagtcccaatgggttcgcggg

SEQ ID NO: 1699199 - DNA, 25 bp, Homo sapien
cagtgcgcgggcccctacctcctcc

SEQ ID NO: 1699200 - DNA, 25 bp, Homo sapien
ctgcgccccagtgcgcgggccccta

SEQ ID NO: 1699201 - DNA, 25 bp, Homo sapien
gccccagtgcgcgggcccctacctc

SEQ ID NO: 1699202 - DNA, 25 bp, Homo sapien
cctgcgccccagtgcgcgggcccct

SEQ ID NO: 1699203 - DNA, 25 bp, Homo sapien
gaactgcgtgtcgtccacgtagccc

SEQ ID NO: 1699204 - DNA, 25 bp, Homo sapien
aactgcgtgtcgtccacgtagccca

SEQ ID NO: 1699205 - DNA, 25 bp, Homo sapien
ctacatcctcggagtcgccgcgtcg

SEQ ID NO: 1699206 - DNA, 25 bp, Homo sapien
tagctctggtggtagtagcggcgcg

SEQ ID NO: 1699207 - DNA, 25 bp, Homo sapien
tcttgtcagtctgtgcgcgggcctg

SEQ ID NO: 1699208 - DNA, 25 bp, Homo sapien
gcgcggcatgggcaggttcactctt

SEQ ID NO: 1699209 - DNA, 25 bp, Homo sapien
tgatgttccgtgtgctccggtccca

SEQ ID NO: 1699210 - DNA, 25 bp, Homo sapien
cctctcccgggtcgaggatctggcg

SEQ ID NO: 1699211 - DNA, 25 bp, Homo sapien
tggagccggagactcgcggggggga

SEQ ID NO: 1699212 - DNA, 25 bp, Homo sapien
gcctctcccgggtcgaggatctggc

SEQ ID NO: 1699213 - DNA, 25 bp, Homo sapien
gggtggatcttggagccggagactc

SEQ ID NO: 1699214 - DNA, 25 bp, Homo sapien
tagttccgggctatgtaatccttgc

SEQ ID NO: 1699215 - DNA, 25 bp, Homo sapien
tacattatctggagggtgttagacc

SEQ ID NO: 1699216 - DNA, 25 bp, Homo sapien
gagcgcaggtcctagttccgggcta

SEQ ID NO: 1699217 - DNA, 25 bp, Homo sapien
caggtcctagttccgggctatgtaa

SEQ ID NO: 1699218 - DNA, 25 bp, Homo sapien
aggtaggccctgatctgctctgcaa

SEQ ID NO: 1699219 - DNA, 25 bp, Homo sapien
ccaggtaggccctgatctgctctgc

SEQ ID NO: 1699220 - DNA, 25 bp, Homo sapien
ggtaggccctgatctgctctgcaaa

SEQ ID NO: 1699221 - DNA, 25 bp, Homo sapien
caggtaggccctgatctgctctgca

SEQ ID NO: 1699222 - DNA, 25 bp, Homo sapien
tctccaggtgtctgcgagcctctcc

SEQ ID NO: 1699223 - DNA, 25 bp, Homo sapien
aggtgtctgcgagcctctccacgca

SEQ ID NO: 1699224 - DNA, 25 bp, Homo sapien
tcccgttctccaggtgtctgcgagc

SEQ ID NO: 1699225 - DNA, 25 bp, Homo sapien
cgttctccaggtgtctgcgagcctc

SEQ ID NO: 1699226 - DNA, 25 bp, Homo sapien
ggaccagagagaggacgacattcta

SEQ ID NO: 1699227 - DNA, 25 bp, Homo sapien
tcttgtacaggatctggaaacccag

SEQ ID NO: 1699228 - DNA, 25 bp, Homo sapien
ggaggcgtcttgtgttccctggtac

SEQ ID NO: 1699229 - DNA, 25 bp, Homo sapien
atctacaggcgatcagggaggcgtc

SEQ ID NO: 1699230 - DNA, 25 bp, Homo sapien
tatctgggataatctccgaattccg

SEQ ID NO: 1699231 - DNA, 25 bp, Homo sapien
tctccgaattccgtggaaaattcca

SEQ ID NO: 1699232 - DNA, 25 bp, Homo sapien
acacaggtatctgggataatctccg

SEQ ID NO: 1699233 - DNA, 25 bp, Homo sapien
ctccgaattccgtggaaaattccag

SEQ ID NO: 1699234 - DNA, 25 bp, Homo sapien
gggagcacagaacccagacaccaac

SEQ ID NO: 1699235 - DNA, 25 bp, Homo sapien
aagggagcacagaacccagacacca

SEQ ID NO: 1699236 - DNA, 25 bp, Homo sapien
ggaagggagcacagaacccagacac

SEQ ID NO: 1699237 - DNA, 25 bp, Homo sapien
gtggggaagggagcacagaacccag

SEQ ID NO: 1699238 - DNA, 25 bp, Homo sapien
gcatctctcatgagacactccagca

SEQ ID NO: 1699239 - DNA, 25 bp, Homo sapien
tctctcatgagacactccagcagca

SEQ ID NO: 1699240 - DNA, 25 bp, Homo sapien
ttgcatctctcatgagacactccag

SEQ ID NO: 1699241 - DNA, 25 bp, Homo sapien
tgcatctctcatgagacactccagc

SEQ ID NO: 1699242 - DNA, 25 bp, Homo sapien
ctgggggagaggtctaacaggaagt

SEQ ID NO: 1699243 - DNA, 25 bp, Homo sapien
ccttatagtcagagacggaatggtg

SEQ ID NO: 1699244 - DNA, 25 bp, Homo sapien
cagagacggaatggtggatcatatg

SEQ ID NO: 1699245 - DNA, 25 bp, Homo sapien
tagtcagagacggaatggtggatca

SEQ ID NO: 1699246 - DNA, 25 bp, Homo sapien
cagggtggccttatagtcagagacg

SEQ ID NO: 1699247 - DNA, 25 bp, Homo sapien
atgtcccgagtctggtcctctccat

SEQ ID NO: 1699248 - DNA, 25 bp, Homo sapien
ggtctctagaagctccatgtcccga

SEQ ID NO: 1699249 - DNA, 25 bp, Homo sapien
ctggtctctagaagctccatgtccc

SEQ ID NO: 1699250 - DNA, 25 bp, Homo sapien
tagaagctccatgtcccgagtctgg

SEQ ID NO: 1699251 - DNA, 25 bp, Homo sapien
tcttcttcctgcacatcacagcaga

SEQ ID NO: 1699252 - DNA, 25 bp, Homo sapien
aggccagcaacgatacccacgatgg

SEQ ID NO: 1699253 - DNA, 25 bp, Homo sapien
gagaaccaggccagcaacgataccc

SEQ ID NO: 1699254 - DNA, 25 bp, Homo sapien
ccagtgactacagctccaaggagaa

SEQ ID NO: 1699255 - DNA, 25 bp, Homo sapien
tgcagcttcagagtagctcactcta

SEQ ID NO: 1699256 - DNA, 25 bp, Homo sapien
gcagcttcagagtagctcactctat

SEQ ID NO: 1699257 - DNA, 25 bp, Homo sapien
ttgcagcttcagagtagctcactct

SEQ ID NO: 1699258 - DNA, 25 bp, Homo sapien
gacacatcagaaccctgcgcatggt

SEQ ID NO: 1699259 - DNA, 25 bp, Homo sapien
agagacacatcagaaccctgcgcat

SEQ ID NO: 1699260 - DNA, 25 bp, Homo sapien
cacatcagaaccctgcgcatggtcg

SEQ ID NO: 1699261 - DNA, 25 bp, Homo sapien
catcagaaccctgcgcatggtcgct

SEQ ID NO: 1699262 - DNA, 25 bp, Homo sapien
cagctgcgtccactattgcccccaa

SEQ ID NO: 1699263 - DNA, 25 bp, Homo sapien
tagcacagctgcgtccactattgcc

SEQ ID NO: 1699264 - DNA, 25 bp, Homo sapien
catagcacagctgcgtccactattg

SEQ ID NO: 1699265 - DNA, 25 bp, Homo sapien
gcacagctgcgtccactattgcccc

SEQ ID NO: 1699266 - DNA, 25 bp, Homo sapien
cacctctatggagcaggaatgatta

SEQ ID NO: 1699267 - DNA, 25 bp, Homo sapien
taattattggagacggaacacaggt

SEQ ID NO: 1699268 - DNA, 25 bp, Homo sapien
gagcaggaatgattaattattggag

SEQ ID NO: 1699269 - DNA, 25 bp, Homo sapien
acatctcagcctcacctctatggag

SEQ ID NO: 1699270 - DNA, 25 bp, Homo sapien
tcttctcctttaattaacccatcaa

SEQ ID NO: 1699271 - DNA, 25 bp, Homo sapien
atcttctcctttaattaacccatca

SEQ ID NO: 1699272 - DNA, 25 bp, Homo sapien
tctcaaattttaggaatcttctcct

SEQ ID NO: 1699273 - DNA, 25 bp, Homo sapien
ctcactttccagactgggcagtcag

SEQ ID NO: 1699274 - DNA, 25 bp, Homo sapien
actttccagactgggcagtcaggca

SEQ ID NO: 1699275 - DNA, 25 bp, Homo sapien
tcctagatgggatggcggccaggca

SEQ ID NO: 1699276 - DNA, 25 bp, Homo sapien
atgatgggcggccgggcagaaacgc

SEQ ID NO: 1699277 - DNA, 25 bp, Homo sapien
gagaatcctttttacagagaatggg

SEQ ID NO: 1699278 - DNA, 25 bp, Homo sapien
cagagaatggggagataaccaggac

SEQ ID NO: 1699279 - DNA, 25 bp, Homo sapien
ttttacagagaatcctttttacaga

SEQ ID NO: 1699280 - DNA, 25 bp, Homo sapien
tacagagaatcctttttacagagaa

SEQ ID NO: 1699281 - DNA, 25 bp, Homo sapien
cgctgggtaatctgagccgccatgg

SEQ ID NO: 1699282 - DNA, 25 bp, Homo sapien
tgggtaatctgagccgccatggccg

SEQ ID NO: 1699283 - DNA, 25 bp, Homo sapien
aggcgatcagggaggcgcccgtggt

SEQ ID NO: 1699284 - DNA, 25 bp, Homo sapien
atggccgccgcagtccaagagctca

SEQ ID NO: 1699285 - DNA, 25 bp, Homo sapien
gtcataaactggccccgagactggc

SEQ ID NO: 1699286 - DNA, 25 bp, Homo sapien
tcataaactggccccgagactggcc

SEQ ID NO: 1699287 - DNA, 25 bp, Homo sapien
ctgtaaaactaccctgggctgctac

SEQ ID NO: 1699288 - DNA, 25 bp, Homo sapien
tctcacaaggttgcactccagttgt

SEQ ID NO: 1699289 - DNA, 25 bp, Homo sapien
gttgcactccagttgtcagccaggg

SEQ ID NO: 1699290 - DNA, 25 bp, Homo sapien
aggagaggtttccctgagtgcttcc

SEQ ID NO: 1699291 - DNA, 25 bp, Homo sapien
tctcccacagtttccaatcgtcagg

SEQ ID NO: 1699292 - DNA, 25 bp, Homo sapien
tgctcctgtgcgaagcgctctgtct

SEQ ID NO: 1699293 - DNA, 25 bp, Homo sapien
aactgggtccgcgtcgtgagtatcc

SEQ ID NO: 1699294 - DNA, 25 bp, Homo sapien
ggctttagaacagcgaccgcgacga

SEQ ID NO: 1699295 - DNA, 25 bp, Homo sapien
caggatgaaggaccctacgtaggtt

SEQ ID NO: 1699296 - DNA, 25 bp, Homo sapien
gagagtagcaggaggagggttcggg

SEQ ID NO: 1699297 - DNA, 25 bp, Homo sapien
agggccagggcccccgagagtagca

SEQ ID NO: 1699298 - DNA, 25 bp, Homo sapien
aggagggttcggggcgccatgacgg

SEQ ID NO: 1699299 - DNA, 25 bp, Homo sapien
gggcccccgagagtagcaggaggag

SEQ ID NO: 1699300 - DNA, 25 bp, Homo sapien
ggccttcacattccgtgtctcctgg

SEQ ID NO: 1699301 - DNA, 25 bp, Homo sapien
catcctctggctcgcggcgtcgctg

SEQ ID NO: 1699302 - DNA, 25 bp, Homo sapien
cagtctgtgactgggccttcacatt

SEQ ID NO: 1699303 - DNA, 25 bp, Homo sapien
gtcagtctgtgactgggccttcaca

SEQ ID NO: 1699304 - DNA, 25 bp, Homo sapien
ttgtagtagccgcgcagggtcccca

SEQ ID NO: 1699305 - DNA, 25 bp, Homo sapien
ctggttgtagtagccgcgcagggtc

SEQ ID NO: 1699306 - DNA, 25 bp, Homo sapien
cggcctcgctctggttgtagtagcc

SEQ ID NO: 1699307 - DNA, 25 bp, Homo sapien
gttgtagtagccgcgcagggtcccc

SEQ ID NO: 1699308 - DNA, 25 bp, Homo sapien
actgtgggcgacctggcccgtccgt

SEQ ID NO: 1699309 - DNA, 25 bp, Homo sapien
tcccgcggcttcggggtggatctcg

SEQ ID NO: 1699310 - DNA, 25 bp, Homo sapien
ccggagactgtgggcgacctggccc

SEQ ID NO: 1699311 - DNA, 25 bp, Homo sapien
cgcggcttcggggtggatctcggac

SEQ ID NO: 1699312 - DNA, 25 bp, Homo sapien
ttggtgatctgagccgccatgtccg

SEQ ID NO: 1699313 - DNA, 25 bp, Homo sapien
gcgcttggtgatctgagccgccatg

SEQ ID NO: 1699314 - DNA, 25 bp, Homo sapien
gcttggtgatctgagccgccatgtc

SEQ ID NO: 1699315 - DNA, 25 bp, Homo sapien
cgcttggtgatctgagccgccatgt

SEQ ID NO: 1699316 - DNA, 25 bp, Homo sapien
gcgtctccttcccgttctccaggta

SEQ ID NO: 1699317 - DNA, 25 bp, Homo sapien
cgtctccttcccgttctccaggtat

SEQ ID NO: 1699318 - DNA, 25 bp, Homo sapien
cagcgtctccttcccgttctccagg

SEQ ID NO: 1699319 - DNA, 25 bp, Homo sapien
tctccttcccgttctccaggtatct

SEQ ID NO: 1699320 - DNA, 25 bp, Homo sapien
ggtgatattctagtgttggtcccaa

SEQ ID NO: 1699321 - DNA, 25 bp, Homo sapien
tctctggtacaggatctggaaccca

SEQ ID NO: 1699322 - DNA, 25 bp, Homo sapien
caggcgatcagggaggcgccccgtg

SEQ ID NO: 1699323 - DNA, 25 bp, Homo sapien
ggcgatcagggaggcgccccgtggc

SEQ ID NO: 1699324 - DNA, 25 bp, Homo sapien
caaagggaaccactcatcagtattc

SEQ ID NO: 1699325 - DNA, 25 bp, Homo sapien
gggaacagcgacttctggtcctgac

SEQ ID NO: 1699326 - DNA, 25 bp, Homo sapien
ttttgcatctgtcatgggacactcc

SEQ ID NO: 1699327 - DNA, 25 bp, Homo sapien
caccagcacgcatgtggccatcttg

SEQ ID NO: 1699328 - DNA, 25 bp, Homo sapien
tggtgggtcatatgtgtcttggggg

SEQ ID NO: 1699329 - DNA, 25 bp, Homo sapien
cctcatggtcagagatggggtggtg

SEQ ID NO: 1699330 - DNA, 25 bp, Homo sapien
tggggtggtgggtcatatgtgtctt

SEQ ID NO: 1699331 - DNA, 25 bp, Homo sapien
ggtggtgggtcatatgtgtcttggg

SEQ ID NO: 1699332 - DNA, 25 bp, Homo sapien
gtgatctccgcagggtagaagccca

SEQ ID NO: 1699333 - DNA, 25 bp, Homo sapien
tcctccccatcccgctgccaggtca

SEQ ID NO: 1699334 - DNA, 25 bp, Homo sapien
ctccccatcccgctgccaggtcagt

SEQ ID NO: 1699335 - DNA, 25 bp, Homo sapien
gtgtcctgggtctggtcctccccat

SEQ ID NO: 1699336 - DNA, 25 bp, Homo sapien
gaccctcatgctgcacatggcaggt

SEQ ID NO: 1699337 - DNA, 25 bp, Homo sapien
cttgggcagaccctcatgctgcaca

SEQ ID NO: 1699338 - DNA, 25 bp, Homo sapien
gggcagaccctcatgctgcacatgg

SEQ ID NO: 1699339 - DNA, 25 bp, Homo sapien
gggcttgggcagaccctcatgctgc

SEQ ID NO: 1699340 - DNA, 25 bp, Homo sapien
ctgaccctgctaaaggtctccagag

SEQ ID NO: 1699341 - DNA, 25 bp, Homo sapien
tgaccctgctaaaggtctccagaga

SEQ ID NO: 1699342 - DNA, 25 bp, Homo sapien
gcgaccacagctccagtgatcacag

SEQ ID NO: 1699343 - DNA, 25 bp, Homo sapien
tcacagctccaaggagaaccaggcc

SEQ ID NO: 1699344 - DNA, 25 bp, Homo sapien
tcctcctccacatcacggcagcgac

SEQ ID NO: 1699345 - DNA, 25 bp, Homo sapien
ggccagcaatgatgcccacgatggg

SEQ ID NO: 1699346 - DNA, 25 bp, Homo sapien
tgagacagggcacatttctagctgg

SEQ ID NO: 1699347 - DNA, 25 bp, Homo sapien
gaaccctcagtgagacaagaaatct

SEQ ID NO: 1699348 - DNA, 25 bp, Homo sapien
cgtaatcaaggtgataaatctgtcc

SEQ ID NO: 1699349 - DNA, 25 bp, Homo sapien
gcccatgattgtggacggtgcttcc

SEQ ID NO: 1699350 - DNA, 25 bp, Homo sapien
tgggctcccaaacacaatatcccaa

SEQ ID NO: 1699351 - DNA, 25 bp, Homo sapien
cagaacctggtcagatcccacagaa

SEQ ID NO: 1699352 - DNA, 25 bp, Homo sapien
gaacctggtcagatcccacagaaga

SEQ ID NO: 1699353 - DNA, 25 bp, Homo sapien
cccatgggctcccaaacacaatatc

SEQ ID NO: 1699354 - DNA, 25 bp, Homo sapien
caagctgtgagggacacatcagagc

SEQ ID NO: 1699355 - DNA, 25 bp, Homo sapien
tcagagccctgggcactgtcactgc

SEQ ID NO: 1699356 - DNA, 25 bp, Homo sapien
acatcagagccctgggcactgtcac

SEQ ID NO: 1699357 - DNA, 25 bp, Homo sapien
tttacaagctgtgagggacacatca

SEQ ID NO: 1699358 - DNA, 25 bp, Homo sapien
agctgtgtccactgttccgcccaac

SEQ ID NO: 1699359 - DNA, 25 bp, Homo sapien
gcatgctcaatacatccaatgcaaa

SEQ ID NO: 1699360 - DNA, 25 bp, Homo sapien
catcgcatgctcaatacatccaatg

SEQ ID NO: 1699361 - DNA, 25 bp, Homo sapien
gctgtgtccactgttccgcccaaca

SEQ ID NO: 1699362 - DNA, 25 bp, Homo sapien
tcatgaacaaattcatatccatcac

SEQ ID NO: 1699363 - DNA, 25 bp, Homo sapien
tgaacaaattcatatccatcacagt

SEQ ID NO: 1699364 - DNA, 25 bp, Homo sapien
acaaattcatatccatcacagtgag

SEQ ID NO: 1699365 - DNA, 25 bp, Homo sapien
aaattcatatccatcacagtgaggg

SEQ ID NO: 1699366 - DNA, 25 bp, Homo sapien
tctcagtcccacacaaggcagctgt

SEQ ID NO: 1699367 - DNA, 25 bp, Homo sapien
ctcagtcccacacaaggcagctgtc

SEQ ID NO: 1699368 - DNA, 25 bp, Homo sapien
ctctcagtcccacacaaggcagctg

SEQ ID NO: 1699369 - DNA, 25 bp, Homo sapien
agtcagggttcttcaagtcacaaag

SEQ ID NO: 1699370 - DNA, 25 bp, Homo sapien
tcagggttcttcaagtcacaaaggg

SEQ ID NO: 1699371 - DNA, 25 bp, Homo sapien
cagggttcttcaagtcacaaaggga

SEQ ID NO: 1699372 - DNA, 25 bp, Homo sapien
aaagtcagggttcttcaagtcacaa

SEQ ID NO: 1699373 - DNA, 25 bp, Homo sapien
taattaactcatcaacctctcatgg

SEQ ID NO: 1699374 - DNA, 25 bp, Homo sapien
ctcatggcaagaatttgagaaagta

SEQ ID NO: 1699375 - DNA, 25 bp, Homo sapien
actcatcaacctctcatggcaagaa

SEQ ID NO: 1699376 - DNA, 25 bp, Homo sapien
tcatggcaagaatttgagaaagtaa

SEQ ID NO: 1699377 - DNA, 25 bp, Homo sapien
aatgatcactgtagagcacctccct

SEQ ID NO: 1699378 - DNA, 25 bp, Homo sapien
gatgagaaactatgggacccctcct

SEQ ID NO: 1699379 - DNA, 25 bp, Homo sapien
ttggagccagcactaggattactac

SEQ ID NO: 1699380 - DNA, 25 bp, Homo sapien
gaacataagttcacgtggacatcca

SEQ ID NO: 1699381 - DNA, 25 bp, Homo sapien
aattgtgcctgtagagtcctgtcca

SEQ ID NO: 1699382 - DNA, 25 bp, Homo sapien
tccaagctggtactgaattgtgcct

SEQ ID NO: 1699383 - DNA, 25 bp, Homo sapien
ccaggatggatggtgctcaagctat

SEQ ID NO: 1699384 - DNA, 25 bp, Homo sapien
cacgagcagagtattcagaggaagc

SEQ ID NO: 1699385 - DNA, 25 bp, Homo sapien
aagtgctcaatgcagccaaagtgcc

SEQ ID NO: 1699386 - DNA, 25 bp, Homo sapien
tcattaagttcaggccacactcaca

SEQ ID NO: 1699387 - DNA, 25 bp, Homo sapien
aaagagtcccacgactggtgccgta

SEQ ID NO: 1699388 - DNA, 25 bp, Homo sapien
tacagtagctagaccaaagagtccc

SEQ ID NO: 1699389 - DNA, 25 bp, Homo sapien
tccacaggcctgcttatgacacagc

SEQ ID NO: 1699390 - DNA, 25 bp, Homo sapien
catcttcttattgtctggccccagg

SEQ ID NO: 1699391 - DNA, 25 bp, Homo sapien
caagaatatcccacgtggctgttgg

SEQ ID NO: 1699392 - DNA, 25 bp, Homo sapien
aattgcggtctaattgtcatccagg

SEQ ID NO: 1699393 - DNA, 25 bp, Homo sapien
ttataatcaatttagagcaaatgaa

SEQ ID NO: 1699394 - DNA, 25 bp, Homo sapien
tcttataatcaatttagagcaaatg

SEQ ID NO: 1699395 - DNA, 25 bp, Homo sapien
ttaatatcttataatcaatttagag

SEQ ID NO: 1699396 - DNA, 25 bp, Homo sapien
tatcttataatcaatttagagcaaa

SEQ ID NO: 1699397 - DNA, 25 bp, Homo sapien
gacagtccaagcaggataatcccca

SEQ ID NO: 1699398 - DNA, 25 bp, Homo sapien
agaaatccaggcctagtgtcagaga

SEQ ID NO: 1699399 - DNA, 25 bp, Homo sapien
tatagagctcgttggcagaattcgg

SEQ ID NO: 1699400 - DNA, 25 bp, Homo sapien
cattagtgtcaaccgagtaactggg

SEQ ID NO: 1699401 - DNA, 25 bp, Homo sapien
agggtgtgagacccattcccagcga

SEQ ID NO: 1699402 - DNA, 25 bp, Homo sapien
ctgtgtacccattgaagggtgtgag

SEQ ID NO: 1699403 - DNA, 25 bp, Homo sapien
gaagggtgtgagacccattcccagc

SEQ ID NO: 1699404 - DNA, 25 bp, Homo sapien
gtgtacccattgaagggtgtgagac

SEQ ID NO: 1699405 - DNA, 25 bp, Homo sapien
gggcatctgagccgccttgtccgct

SEQ ID NO: 1699406 - DNA, 25 bp, Homo sapien
tagggtatgttcatacccactgagg

SEQ ID NO: 1699407 - DNA, 25 bp, Homo sapien
tgaggagactgcagtccgagtccac

SEQ ID NO: 1699408 - DNA, 25 bp, Homo sapien
taactggcgccgtgatagggtatgt

SEQ ID NO: 1699409 - DNA, 25 bp, Homo sapien
ccattcttaaggactttgctgagcc

SEQ ID NO: 1699410 - DNA, 25 bp, Homo sapien
ctccttcccattcttaaggactttg

SEQ ID NO: 1699411 - DNA, 25 bp, Homo sapien
cttcccattcttaaggactttgctg

SEQ ID NO: 1699412 - DNA, 25 bp, Homo sapien
cattcttaaggactttgctgagcca

SEQ ID NO: 1699413 - DNA, 25 bp, Homo sapien
gcatcctacatttggtcctgtccat

SEQ ID NO: 1699414 - DNA, 25 bp, Homo sapien
tgtccatcccactactgggtcagtg

SEQ ID NO: 1699415 - DNA, 25 bp, Homo sapien
acaacctctgcatcctacatttggt

SEQ ID NO: 1699416 - DNA, 25 bp, Homo sapien
ctgtccatcccactactgggtcagt

SEQ ID NO: 1699417 - DNA, 25 bp, Homo sapien
tggcagcccatcgtgctgcacatgg

SEQ ID NO: 1699418 - DNA, 25 bp, Homo sapien
cagcccatcgtgctgcacatggcat

SEQ ID NO: 1699419 - DNA, 25 bp, Homo sapien
gctctggcagcccatcgtgctgcac

SEQ ID NO: 1699420 - DNA, 25 bp, Homo sapien
gcccatcgtgctgcacatggcatgt

SEQ ID NO: 1699421 - DNA, 25 bp, Homo sapien
gaagggctcctagttcccgtgagaa

SEQ ID NO: 1699422 - DNA, 25 bp, Homo sapien
gggctcctagttcccgtgagaagag

SEQ ID NO: 1699423 - DNA, 25 bp, Homo sapien
ccagaagggctcctagttcccgtga

SEQ ID NO: 1699424 - DNA, 25 bp, Homo sapien
cctagttcccgtgagaagagacatg

SEQ ID NO: 1699425 - DNA, 25 bp, Homo sapien
agtgaccacagctctggtgaaaaca

SEQ ID NO: 1699426 - DNA, 25 bp, Homo sapien
gcaccaagaacaaccaggacagtaa

SEQ ID NO: 1699427 - DNA, 25 bp, Homo sapien
accaggacagtaacgatgcccatga

SEQ ID NO: 1699428 - DNA, 25 bp, Homo sapien
gaccacagctctggtgaaaacagca

SEQ ID NO: 1699429 - DNA, 25 bp, Homo sapien
ctgagcatagctgcctccttttcca

SEQ ID NO: 1699430 - DNA, 25 bp, Homo sapien
ttgcatgaagcctgagcatagctgc

SEQ ID NO: 1699431 - DNA, 25 bp, Homo sapien
tgagcatagctgcctccttttccat

SEQ ID NO: 1699432 - DNA, 25 bp, Homo sapien
catgaagcctgagcatagctgcctc

SEQ ID NO: 1699433 - DNA, 25 bp, Homo sapien
cttcaggccccctaagttgtcattt

SEQ ID NO: 1699434 - DNA, 25 bp, Homo sapien
ccctaagttgtcattttacaagcct

SEQ ID NO: 1699435 - DNA, 25 bp, Homo sapien
cattttacaagccttgagagacaca

SEQ ID NO: 1699436 - DNA, 25 bp, Homo sapien
agagacacatcagagccctgggtac

SEQ ID NO: 1699437 - DNA, 25 bp, Homo sapien
gtaagtccctatagctgtgagcctg

SEQ ID NO: 1699438 - DNA, 25 bp, Homo sapien
gaatcctgagcacactggttcaagt

SEQ ID NO: 1699439 - DNA, 25 bp, Homo sapien
tcaagtggtgggctcacaatgccat

SEQ ID NO: 1699440 - DNA, 25 bp, Homo sapien
tcccaaatgtgctaggttgttccag

SEQ ID NO: 1699441 - DNA, 25 bp, Homo sapien
gatgtcacctctaaaactggaaaag

SEQ ID NO: 1699442 - DNA, 25 bp, Homo sapien
catatgtgatgcagtggtaccagga

SEQ ID NO: 1699443 - DNA, 25 bp, Homo sapien
tattgctgcctgcagtctaggtcag

SEQ ID NO: 1699444 - DNA, 25 bp, Homo sapien
ctatgaccaagagtagaccgaggga

SEQ ID NO: 1699445 - DNA, 25 bp, Homo sapien
tgtaaagggtctccagtttgtccag

SEQ ID NO: 1699446 - DNA, 25 bp, Homo sapien
tgggctgcaaggatcctcccctggc

SEQ ID NO: 1699447 - DNA, 25 bp, Homo sapien
tcctctccgtggcaggcctagaggt

SEQ ID NO: 1699448 - DNA, 25 bp, Homo sapien
ttacacattccaccttaaagcattt

SEQ ID NO: 1699449 - DNA, 25 bp, Homo sapien
tctggagtgcaggtacacctgggac

SEQ ID NO: 1699450 - DNA, 25 bp, Homo sapien
taatacatggcgactgtctcaagac

SEQ ID NO: 1699451 - DNA, 25 bp, Homo sapien
cacttaggtgatggcaagctagccc

SEQ ID NO: 1699452 - DNA, 25 bp, Homo sapien
gacttatggccctagtgactgcact

SEQ ID NO: 1699453 - DNA, 25 bp, Homo sapien
gcagaggattcttcctgcgactgct

SEQ ID NO: 1699454 - DNA, 25 bp, Homo sapien
cctattgctgtggggactatggggc

SEQ ID NO: 1699455 - DNA, 25 bp, Homo sapien
ggcagaggattcttcctgcgactgc

SEQ ID NO: 1699456 - DNA, 25 bp, Homo sapien
ctccctggagtccgcgtgttctcag

SEQ ID NO: 1699457 - DNA, 25 bp, Homo sapien
ctgtgaatggcattcgagggccctt

SEQ ID NO: 1699458 - DNA, 25 bp, Homo sapien
tcctctcacttttcggacaaaccag

SEQ ID NO: 1699459 - DNA, 25 bp, Homo sapien
tcggacaaaccagcccttctgaagt

SEQ ID NO: 1699460 - DNA, 25 bp, Homo sapien
tcctgtgaatggcattcgagggccc

SEQ ID NO: 1699461 - DNA, 25 bp, Homo sapien
gggtctgcattttcacagcggcagg

SEQ ID NO: 1699462 - DNA, 25 bp, Homo sapien
cgcgcgaccctgagaggctttttcc

SEQ ID NO: 1699463 - DNA, 25 bp, Homo sapien
tgcgggcggcggagcccgtttccac

SEQ ID NO: 1699464 - DNA, 25 bp, Homo sapien
gcggcggagcccgtttccaccagaa

SEQ ID NO: 1699465 - DNA, 25 bp, Homo sapien
gcgcgcgaccctgagaggctttttc

SEQ ID NO: 1699466 - DNA, 25 bp, Homo sapien
gctcatgttctctgcagcttgacct

SEQ ID NO: 1699467 - DNA, 25 bp, Homo sapien
ggtagaagctcatgttctctgcagc

SEQ ID NO: 1699468 - DNA, 25 bp, Homo sapien
gaagctcatgttctctgcagcttga

SEQ ID NO: 1699469 - DNA, 25 bp, Homo sapien
ctggaggtagaagctcatgttctct

SEQ ID NO: 1699470 - DNA, 25 bp, Homo sapien
tatttctgagacaagatctcttgct

SEQ ID NO: 1699471 - DNA, 25 bp, Homo sapien
aagctatccttcagcttccagagct

SEQ ID NO: 1699472 - DNA, 25 bp, Homo sapien
tttatttctgagacaagatctcttg

SEQ ID NO: 1699473 - DNA, 25 bp, Homo sapien
ctcaagctatccttcagcttccaga

SEQ ID NO: 1699474 - DNA, 25 bp, Homo sapien
cacaggtaaaggcagtgttcacctg

SEQ ID NO: 1699475 - DNA, 25 bp, Homo sapien
cagaatcttcaggcatgtcacaggt

SEQ ID NO: 1699476 - DNA, 25 bp, Homo sapien
ctgattcacgtaggtctcagaatct

SEQ ID NO: 1699477 - DNA, 25 bp, Homo sapien
gattcacgtaggtctcagaatcttc

SEQ ID NO: 1699478 - DNA, 25 bp, Homo sapien
tgtggaggagacgtctgtctcagca

SEQ ID NO: 1699479 - DNA, 25 bp, Homo sapien
tctcagcaggtagctcctaacactg

SEQ ID NO: 1699480 - DNA, 25 bp, Homo sapien
gaggatcctggcacaattctcatcc

SEQ ID NO: 1699481 - DNA, 25 bp, Homo sapien
aattctcatccgacacaagccctgt

SEQ ID NO: 1699482 - DNA, 25 bp, Homo sapien
gactttggccccttgatatataaag

SEQ ID NO: 1699483 - DNA, 25 bp, Homo sapien
tgttcctatgtgttgcaaccaggag

SEQ ID NO: 1699484 - DNA, 25 bp, Homo sapien
acatctcctcaatacaaagtagcca

SEQ ID NO: 1699485 - DNA, 25 bp, Homo sapien
cattcacctcaaagttgcaagcgct

SEQ ID NO: 1699486 - DNA, 25 bp, Homo sapien
tgggtgcatgagatagtatagagac

SEQ ID NO: 1699487 - DNA, 25 bp, Homo sapien
gcaggaggagggttcggggcgccat

SEQ ID NO: 1699488 - DNA, 25 bp, Homo sapien
ccgcccaggtctcggccagggccag

SEQ ID NO: 1699489 - DNA, 25 bp, Homo sapien
agcaggaggagggttcggggcgcca

SEQ ID NO: 1699490 - DNA, 25 bp, Homo sapien
gggccagggtccccgagagcagcag

SEQ ID NO: 1699491 - DNA, 25 bp, Homo sapien
gccttggcgcccagtgtctgtaggt

SEQ ID NO: 1699492 - DNA, 25 bp, Homo sapien
gcgcccgcgtcttcatcctcagact

SEQ ID NO: 1699493 - DNA, 25 bp, Homo sapien
atcctcagactcacggcgtcactgt

SEQ ID NO: 1699494 - DNA, 25 bp, Homo sapien
gcccggccaggaaacggcggtgctg

SEQ ID NO: 1699495 - DNA, 25 bp, Homo sapien
cgcctcgctctggttgtagtagcgg

SEQ ID NO: 1699496 - DNA, 25 bp, Homo sapien
tagcggagcagggtccgcaggttca

SEQ ID NO: 1699497 - DNA, 25 bp, Homo sapien
tcgctctggttgtagtagcggagca

SEQ ID NO: 1699498 - DNA, 25 bp, Homo sapien
ctggttgtagtagcggagcagggtc

SEQ ID NO: 1699499 - DNA, 25 bp, Homo sapien
ccaggtcgcagccaaacattccctg

SEQ ID NO: 1699500 - DNA, 25 bp, Homo sapien
cccaggtcgcagccaaacattccct

SEQ ID NO: 1699501 - DNA, 25 bp, Homo sapien
aggtcgcagccaaacattccctgga

SEQ ID NO: 1699502 - DNA, 25 bp, Homo sapien
caggtcgcagccaaacattccctgg

SEQ ID NO: 1699503 - DNA, 25 bp, Homo sapien
aggtaggctctcctttgctcagcca

SEQ ID NO: 1699504 - DNA, 25 bp, Homo sapien
caggtaggctctcctttgctcagcc

SEQ ID NO: 1699505 - DNA, 25 bp, Homo sapien
ctgaaaggaagagtcggaaaactca

SEQ ID NO: 1699506 - DNA, 25 bp, Homo sapien
tgaaaggaagagtcggaaaactcag

SEQ ID NO: 1699507 - DNA, 25 bp, Homo sapien
tcatgttcagagaggggggtgggtc

SEQ ID NO: 1699508 - DNA, 25 bp, Homo sapien
ctcatgttcagagaggggggtgggt

SEQ ID NO: 1699509 - DNA, 25 bp, Homo sapien
tcctccccatcccgctgccaggtca

SEQ ID NO: 1699510 - DNA, 25 bp, Homo sapien
gtgatctccgcagggtagaagccca

SEQ ID NO: 1699511 - DNA, 25 bp, Homo sapien
tgggcctggtctccacgagctccat

SEQ ID NO: 1699512 - DNA, 25 bp, Homo sapien
cctgtgggcctggtctccacgagct

SEQ ID NO: 1699513 - DNA, 25 bp, Homo sapien
taccacaaccgcccacttctggaag

SEQ ID NO: 1699514 - DNA, 25 bp, Homo sapien
ctggaaggttccatcccctgtgggc

SEQ ID NO: 1699515 - DNA, 25 bp, Homo sapien
ggcttgggcagccccttgtgctgca

SEQ ID NO: 1699516 - DNA, 25 bp, Homo sapien
ccttgtgctgcacatggcatgtgta

SEQ ID NO: 1699517 - DNA, 25 bp, Homo sapien
ccatctcaggatgaggggcttgggc

SEQ ID NO: 1699518 - DNA, 25 bp, Homo sapien
ggcatgtgtatctctgttcctctcc

SEQ ID NO: 1699519 - DNA, 25 bp, Homo sapien
ggccagcaatgatacccacaatggg

SEQ ID NO: 1699520 - DNA, 25 bp, Homo sapien
tgaccacagctccaaggagaaccag

SEQ ID NO: 1699521 - DNA, 25 bp, Homo sapien
ccacagctccaaggagaaccaggcc

SEQ ID NO: 1699522 - DNA, 25 bp, Homo sapien
gagaaccaggccagcaatgataccc

SEQ ID NO: 1699523 - DNA, 25 bp, Homo sapien
tcctagtcttggaacctcgagaagt

SEQ ID NO: 1699524 - DNA, 25 bp, Homo sapien
tcttggaacctcgagaagtttccag

SEQ ID NO: 1699525 - DNA, 25 bp, Homo sapien
tagtcttggaacctcgagaagtttc

SEQ ID NO: 1699526 - DNA, 25 bp, Homo sapien
ttggaacctcgagaagtttccagaa

SEQ ID NO: 1699527 - DNA, 25 bp, Homo sapien
ttgcagcctgagagtagctccctcc

SEQ ID NO: 1699528 - DNA, 25 bp, Homo sapien
cagcctgagagtagctccctccttt

SEQ ID NO: 1699529 - DNA, 25 bp, Homo sapien
tgcagcctgagagtagctccctcct

SEQ ID NO: 1699530 - DNA, 25 bp, Homo sapien
gcctgagagtagctccctccttttc

SEQ ID NO: 1699531 - DNA, 25 bp, Homo sapien
aagccgtgagagacacatcagagcc

SEQ ID NO: 1699532 - DNA, 25 bp, Homo sapien
ctttacaagccgtgagagacacatc

SEQ ID NO: 1699533 - DNA, 25 bp, Homo sapien
tacaagccgtgagagacacatcaga

SEQ ID NO: 1699534 - DNA, 25 bp, Homo sapien
ttacaagccgtgagagacacatcag

SEQ ID NO: 1699535 - DNA, 25 bp, Homo sapien
ctctcagtcccacacaaggcagctg

SEQ ID NO: 1699536 - DNA, 25 bp, Homo sapien
gcctctcagtcccacacaaggcagc

SEQ ID NO: 1699537 - DNA, 25 bp, Homo sapien
tctcagtcccacacaaggcagctgt

SEQ ID NO: 1699538 - DNA, 25 bp, Homo sapien
cttgcctctcagtcccacacaaggc

SEQ ID NO: 1699539 - DNA, 25 bp, Homo sapien
aacagggtcatggtggacacgggtg

SEQ ID NO: 1699540 - DNA, 25 bp, Homo sapien
tcacattatgcctatagggacacag

SEQ ID NO: 1699541 - DNA, 25 bp, Homo sapien
catcaacccgtcatggaaataattt

SEQ ID NO: 1699542 - DNA, 25 bp, Homo sapien
caccacctcacattatgcctatagg

SEQ ID NO: 1699543 - DNA, 25 bp, Homo sapien
gggagaatcagtgctctggctctga

SEQ ID NO: 1699544 - DNA, 25 bp, Homo sapien
tataaccaatagcagaccacaactt

SEQ ID NO: 1699545 - DNA, 25 bp, Homo sapien
tgctcactcagtccaatactgtggg

SEQ ID NO: 1699546 - DNA, 25 bp, Homo sapien
tccattgaatgcctgcgatgccctc

SEQ ID NO: 1699547 - DNA, 25 bp, Homo sapien
gcgtctggcaggtgccgatgttgat

SEQ ID NO: 1699548 - DNA, 25 bp, Homo sapien
ggtggtgggcgtctggcaggtgccg

SEQ ID NO: 1699549 - DNA, 25 bp, Homo sapien
ggcaggtgccgatgttgatggagtc

SEQ ID NO: 1699550 - DNA, 25 bp, Homo sapien
tgggcgtctggcaggtgccgatgtt

SEQ ID NO: 1699551 - DNA, 25 bp, Homo sapien
ggttgagtaccttgcacttcttctc

SEQ ID NO: 1699552 - DNA, 25 bp, Homo sapien
gttgagtaccttgcacttcttctca

SEQ ID NO: 1699553 - DNA, 25 bp, Homo sapien
ttgagtaccttgcacttcttctcag

SEQ ID NO: 1699554 - DNA, 25 bp, Homo sapien
gacatttcatcaggaccttatggca

SEQ ID NO: 1699555 - DNA, 25 bp, Homo sapien
tgtatggagacacttgaatttccac

SEQ ID NO: 1699556 - DNA, 25 bp, Homo sapien
tgaatttccacaaagatgctggaca

SEQ ID NO: 1699557 - DNA, 25 bp, Homo sapien
ccaagacatataatgctgtatggag

SEQ ID NO: 1699558 - DNA, 25 bp, Homo sapien
caatgatgtattaattggtttgaaa

SEQ ID NO: 1699559 - DNA, 25 bp, Homo sapien
ctgtatggaatttgttgtcacacaa

SEQ ID NO: 1699560 - DNA, 25 bp, Homo sapien
tgaaatgttcaaaatcaatgttaac

SEQ ID NO: 1699561 - DNA, 25 bp, Homo sapien
ttgtcacacaaatacaatgatgtat

SEQ ID NO: 1699562 - DNA, 25 bp, Homo sapien
taccatctattacgatgaatccaga

SEQ ID NO: 1699563 - DNA, 25 bp, Homo sapien
tccttggagggtgccaaaaagtgca

SEQ ID NO: 1699564 - DNA, 25 bp, Homo sapien
gatccacagtgagtttttgcaggac

SEQ ID NO: 1699565 - DNA, 25 bp, Homo sapien
tattacgatgaatccagacttgctt

SEQ ID NO: 1699566 - DNA, 25 bp, Homo sapien
tgaacattgttaggtcacttttcca

SEQ ID NO: 1699567 - DNA, 25 bp, Homo sapien
actttcgattgtaaccgctgatcaa

SEQ ID NO: 1699568 - DNA, 25 bp, Homo sapien
tctgctactttctgaacattgttag

SEQ ID NO: 1699569 - DNA, 25 bp, Homo sapien
ccgctgatcaaacgtatcagattga

SEQ ID NO: 1699570 - DNA, 25 bp, Homo sapien
ggacttcagtagatagcccaacagc

SEQ ID NO: 1699571 - DNA, 25 bp, Homo sapien
caatgtatccctactaatttcttct

SEQ ID NO: 1699572 - DNA, 25 bp, Homo sapien
gatagcccaacagcttggttgaatc

SEQ ID NO: 1699573 - DNA, 25 bp, Homo sapien
tcaacaccaaaacagtacctgcctg

SEQ ID NO: 1699574 - DNA, 25 bp, Homo sapien
caatgtagctccgacttttttatag

SEQ ID NO: 1699575 - DNA, 25 bp, Homo sapien
taagcgcatgttcctgcctggtctc

SEQ ID NO: 1699576 - DNA, 25 bp, Homo sapien
cattctttggaaatccacttggtac

SEQ ID NO: 1699577 - DNA, 25 bp, Homo sapien
tccacttggtaccacaagagacctc

SEQ ID NO: 1699578 - DNA, 25 bp, Homo sapien
gcaattttcatccttgaaacggcca

SEQ ID NO: 1699579 - DNA, 25 bp, Homo sapien
cagtttgattttgcaatgcaatttt

SEQ ID NO: 1699580 - DNA, 25 bp, Homo sapien
aattttcatccttgaaacggccagt

SEQ ID NO: 1699581 - DNA, 25 bp, Homo sapien
atgcaattttcatccttgaaacggc

SEQ ID NO: 1699582 - DNA, 25 bp, Homo sapien
tgtggaacatgaaactatcaataac

SEQ ID NO: 1699583 - DNA, 25 bp, Homo sapien
gatattcatccttgatactacacta

SEQ ID NO: 1699584 - DNA, 25 bp, Homo sapien
cactaaaatgatagaagtgttagct

SEQ ID NO: 1699585 - DNA, 25 bp, Homo sapien
gtcacctcgctaggccaggaatgtt

SEQ ID NO: 1699586 - DNA, 25 bp, Homo sapien
caagctctttacatctaattcatat

SEQ ID NO: 1699587 - DNA, 25 bp, Homo sapien
cagatttttgtcttacatctccatt

SEQ ID NO: 1699588 - DNA, 25 bp, Homo sapien
gagtcacacacctaggaagtggtag

SEQ ID NO: 1699589 - DNA, 25 bp, Homo sapien
gacagaagttacttgccctgagtca

SEQ ID NO: 1699590 - DNA, 25 bp, Homo sapien
gactttataatcaggagcttgacct

SEQ ID NO: 1699591 - DNA, 25 bp, Homo sapien
gcaactatgccaggttttgagctga

SEQ ID NO: 1699592 - DNA, 25 bp, Homo sapien
gaagggaagatcactgacagagtag

SEQ ID NO: 1699593 - DNA, 25 bp, Homo sapien
tattatgtgtcaaggatcatcagca

SEQ ID NO: 1699594 - DNA, 25 bp, Homo sapien
ggaacttgaaattctaccctcctca

SEQ ID NO: 1699595 - DNA, 25 bp, Homo sapien
gaacttgaaattctaccctcctcag

SEQ ID NO: 1699596 - DNA, 25 bp, Homo sapien
tatagttctagcgttccttgggtcc

SEQ ID NO: 1699597 - DNA, 25 bp, Homo sapien
taattgcgaaccgtgtctcgggagc

SEQ ID NO: 1699598 - DNA, 25 bp, Homo sapien
tagtcttttcgctgggagaggctcc

SEQ ID NO: 1699599 - DNA, 25 bp, Homo sapien
gaggaatgcttagtcccacgggacg

SEQ ID NO: 1699600 - DNA, 25 bp, Homo sapien
tcccagacagcgtcgggtactaaag

SEQ ID NO: 1699601 - DNA, 25 bp, Homo sapien
ccggaattcccagacagcgtcgggt

SEQ ID NO: 1699602 - DNA, 25 bp, Homo sapien
cagcgtcgggtactaaaggacttgg

SEQ ID NO: 1699603 - DNA, 25 bp, Homo sapien
ctctgcgaccaaggagccgaaacgc

SEQ ID NO: 1699604 - DNA, 25 bp, Homo sapien
taactattctgtcccaggacctagg

SEQ ID NO: 1699605 - DNA, 25 bp, Homo sapien
cagaggtcgtaactattctgtccca

SEQ ID NO: 1699606 - DNA, 25 bp, Homo sapien
caggacctaggagtatataacccga

SEQ ID NO: 1699607 - DNA, 25 bp, Homo sapien
tcctgtcccagaggtcgtaactatt

SEQ ID NO: 1699608 - DNA, 25 bp, Homo sapien
gaccgagccgcaatctgaacagaaa

SEQ ID NO: 1699609 - DNA, 25 bp, Homo sapien
cccgaacgttgatgttgaagccaca

SEQ ID NO: 1699610 - DNA, 25 bp, Homo sapien
tgaagccacagcgaatacaggtgac

SEQ ID NO: 1699611 - DNA, 25 bp, Homo sapien
caggtccgactgaaagctggagcaa

SEQ ID NO: 1699612 - DNA, 25 bp, Homo sapien
ccctcagttttcatcgctagaccaa

SEQ ID NO: 1699613 - DNA, 25 bp, Homo sapien
caagtaagaactggttatggagaca

SEQ ID NO: 1699614 - DNA, 25 bp, Homo sapien
gctagaccaaatgtacaaccgcctg

SEQ ID NO: 1699615 - DNA, 25 bp, Homo sapien
tatggagacaaccagagacagctga

SEQ ID NO: 1699616 - DNA, 25 bp, Homo sapien
tccaccgacataggcatggctgtcc

SEQ ID NO: 1699617 - DNA, 25 bp, Homo sapien
aacacaaccgaagtcttcacaacct

SEQ ID NO: 1699618 - DNA, 25 bp, Homo sapien
ccagttggtggaacacaaccgaagt

SEQ ID NO: 1699619 - DNA, 25 bp, Homo sapien
ttcctccaccgacataggcatggct

SEQ ID NO: 1699620 - DNA, 25 bp, Homo sapien
gaattgggcacaaaactctccagag

SEQ ID NO: 1699621 - DNA, 25 bp, Homo sapien
cccaccttatggagccagttcttga

SEQ ID NO: 1699622 - DNA, 25 bp, Homo sapien
ggaggcctggtcatatccccttact

SEQ ID NO: 1699623 - DNA, 25 bp, Homo sapien
gatcacgcctctcaaacgtcgatgg

SEQ ID NO: 1699624 - DNA, 25 bp, Homo sapien
ggtatgccattccttcatgaccaca

SEQ ID NO: 1699625 - DNA, 25 bp, Homo sapien
ttcatgaccacatcgagggcagcgc

SEQ ID NO: 1699626 - DNA, 25 bp, Homo sapien
cttcatgaccacatcgagggcagcg

SEQ ID NO: 1699627 - DNA, 25 bp, Homo sapien
ggtgtggtatgccattccttcatga

SEQ ID NO: 1699628 - DNA, 25 bp, Homo sapien
gacagtttgcccttcatcggctgaa

SEQ ID NO: 1699629 - DNA, 25 bp, Homo sapien
gtttgcccttcatcggctgaacgca

SEQ ID NO: 1699630 - DNA, 25 bp, Homo sapien
tgtagaagacagtttgcccttcatc

SEQ ID NO: 1699631 - DNA, 25 bp, Homo sapien
cccttcatcggctgaacgcatctgt

SEQ ID NO: 1699632 - DNA, 25 bp, Homo sapien
taaggtctgataggagatcccgtgc

SEQ ID NO: 1699633 - DNA, 25 bp, Homo sapien
gggaactgcaaaaggctgccctttc

SEQ ID NO: 1699634 - DNA, 25 bp, Homo sapien
tccctatgaaacgtgacagtgacac

SEQ ID NO: 1699635 - DNA, 25 bp, Homo sapien
taatcctttgatgagatggcaagaa

SEQ ID NO: 1699636 - DNA, 25 bp, Homo sapien
aagatatgcaatcaaataatcaagg

SEQ ID NO: 1699637 - DNA, 25 bp, Homo sapien
tgaggactggctcccctaaacaaac

SEQ ID NO: 1699638 - DNA, 25 bp, Homo sapien
tctagtagtataagataagatatgc

SEQ ID NO: 1699639 - DNA, 25 bp, Homo sapien
tatattcaccaaaagatgagtttct

SEQ ID NO: 1699640 - DNA, 25 bp, Homo sapien
tcaagagtcttccttctcctggaac

SEQ ID NO: 1699641 - DNA, 25 bp, Homo sapien
tcaactaagggtaggagtactccag

SEQ ID NO: 1699642 - DNA, 25 bp, Homo sapien
gcaaaacattgcaaccagacaggat

SEQ ID NO: 1699643 - DNA, 25 bp, Homo sapien
aatggtaatccccacatgatgatct

SEQ ID NO: 1699644 - DNA, 25 bp, Homo sapien
agtatccttcaccttccgaaaggag

SEQ ID NO: 1699645 - DNA, 25 bp, Homo sapien
tatagtgatcacttagtggcattac

SEQ ID NO: 1699646 - DNA, 25 bp, Homo sapien
aatgtctcactatccaaattcctag

SEQ ID NO: 1699647 - DNA, 25 bp, Homo sapien
tccacatatatgtagactcaagcag

SEQ ID NO: 1699648 - DNA, 25 bp, Homo sapien
tatattagcctcattcctgactcta

SEQ ID NO: 1699649 - DNA, 25 bp, Homo sapien
tagtaatgaccctaccgtggcctat

SEQ ID NO: 1699650 - DNA, 25 bp, Homo sapien
accggcgaggaagcttaaggagcaa

SEQ ID NO: 1699651 - DNA, 25 bp, Homo sapien
gcgagggcggagttgtgtgcaccaa

SEQ ID NO: 1699652 - DNA, 25 bp, Homo sapien
tgctgcagatttccgtttgccttgt

SEQ ID NO: 1699653 - DNA, 25 bp, Homo sapien
tagttccgccgtaacgtgacagcgc

SEQ ID NO: 1699654 - DNA, 25 bp, Homo sapien
cgcaggcgtcgctggattagttccg

SEQ ID NO: 1699655 - DNA, 25 bp, Homo sapien
ttccgggtgtgacgcatactgcagt

SEQ ID NO: 1699656 - DNA, 25 bp, Homo sapien
ttccacggcaccaaatgcgtcaaag

SEQ ID NO: 1699657 - DNA, 25 bp, Homo sapien
ccctttttctgtcgctgaggtctaa

SEQ ID NO: 1699658 - DNA, 25 bp, Homo sapien
taagagaagcggtatcggattcaga

SEQ ID NO: 1699659 - DNA, 25 bp, Homo sapien
tctgtcgctgaggtctaagagaagc

SEQ ID NO: 1699660 - DNA, 25 bp, Homo sapien
gtatcggattcagagtggtagccag

SEQ ID NO: 1699661 - DNA, 25 bp, Homo sapien
tctcagtgacggtctcgctcagccc

SEQ ID NO: 1699662 - DNA, 25 bp, Homo sapien
tcagtgacggtctcgctcagcccag

SEQ ID NO: 1699663 - DNA, 25 bp, Homo sapien
ctcagtgacggtctcgctcagccca

SEQ ID NO: 1699664 - DNA, 25 bp, Homo sapien
ccagccctagatattcaaccccaca

SEQ ID NO: 1699665 - DNA, 25 bp, Homo sapien
gccctagatattcaaccccacacct

SEQ ID NO: 1699666 - DNA, 25 bp, Homo sapien
ccccacacctcccatatccctaggc

SEQ ID NO: 1699667 - DNA, 25 bp, Homo sapien
cctcccatatccctaggcctagctc

SEQ ID NO: 1699668 - DNA, 25 bp, Homo sapien
accatctctgccactccaaatagct

SEQ ID NO: 1699669 - DNA, 25 bp, Homo sapien
tctgccactccaaatagctccaata

SEQ ID NO: 1699670 - DNA, 25 bp, Homo sapien
catctctgccactccaaatagctcc

SEQ ID NO: 1699671 - DNA, 25 bp, Homo sapien
tctctgccactccaaatagctccaa

SEQ ID NO: 1699672 - DNA, 25 bp, Homo sapien
caatgcaaccttctccctttgaagg

SEQ ID NO: 1699673 - DNA, 25 bp, Homo sapien
taatccaagagtattaagcccaatg

SEQ ID NO: 1699674 - DNA, 25 bp, Homo sapien
tccctttgaaggcaacttaacatgt

SEQ ID NO: 1699675 - DNA, 25 bp, Homo sapien
gataagttggcctccaaccatgctt

SEQ ID NO: 1699676 - DNA, 25 bp, Homo sapien
agcacctaatctttgatctcccttc

SEQ ID NO: 1699677 - DNA, 25 bp, Homo sapien
acctaatctttgatctcccttcctt

SEQ ID NO: 1699678 - DNA, 25 bp, Homo sapien
cctaatctttgatctcccttccttt

SEQ ID NO: 1699679 - DNA, 25 bp, Homo sapien
ccccagcacctaatctttgatctcc

SEQ ID NO: 1699680 - DNA, 25 bp, Homo sapien
cttgctgtttctccgtcttcctccc

SEQ ID NO: 1699681 - DNA, 25 bp, Homo sapien
gaaaggtcccagcaactcttcaaag

SEQ ID NO: 1699682 - DNA, 25 bp, Homo sapien
aggaaaggtcccagcaactcttcaa

SEQ ID NO: 1699683 - DNA, 25 bp, Homo sapien
ccttgctgtttctccgtcttcctcc

SEQ ID NO: 1699684 - DNA, 25 bp, Homo sapien
tagtcccttgaggaataagtattat

SEQ ID NO: 1699685 - DNA, 25 bp, Homo sapien
tcttataccaccagtataagagaag

SEQ ID NO: 1699686 - DNA, 25 bp, Homo sapien
tcagatagtcccttgaggaataagt

SEQ ID NO: 1699687 - DNA, 25 bp, Homo sapien
tataagagaagacacaattcctaac

SEQ ID NO: 1699688 - DNA, 25 bp, Homo sapien
ctagaaggttaaggatgagcatacc

SEQ ID NO: 1699689 - DNA, 25 bp, Homo sapien
tttcttctttagctcaatcagtacc

SEQ ID NO: 1699690 - DNA, 25 bp, Homo sapien
gatgagcatacctatctagtcccct

SEQ ID NO: 1699691 - DNA, 25 bp, Homo sapien
taccataggcatagcaccagaggag

SEQ ID NO: 1699692 - DNA, 25 bp, Homo sapien
gtttgatggtaaggctccggttctc

SEQ ID NO: 1699693 - DNA, 25 bp, Homo sapien
agtttgatggtaaggctccggttct

SEQ ID NO: 1699694 - DNA, 25 bp, Homo sapien
tattttctcctaccttccaggatcc

SEQ ID NO: 1699695 - DNA, 25 bp, Homo sapien
cctattttctcctaccttccaggat

SEQ ID NO: 1699696 - DNA, 25 bp, Homo sapien
attttctcctaccttccaggatcca

SEQ ID NO: 1699697 - DNA, 25 bp, Homo sapien
tcctattttctcctaccttccagga

SEQ ID NO: 1699698 - DNA, 25 bp, Homo sapien
ctcgccaaaggcccgaggtttctca

SEQ ID NO: 1699699 - DNA, 25 bp, Homo sapien
cgccaaaggcccgaggtttctcata

SEQ ID NO: 1699700 - DNA, 25 bp, Homo sapien
gccaaaggcccgaggtttctcataa

SEQ ID NO: 1699701 - DNA, 25 bp, Homo sapien
tcgccaaaggcccgaggtttctcat

SEQ ID NO: 1699702 - DNA, 25 bp, Homo sapien
ggtcctagggttgcacgacgccgtc

SEQ ID NO: 1699703 - DNA, 25 bp, Homo sapien
tcggtcctagggttgcacgacgccg

SEQ ID NO: 1699704 - DNA, 25 bp, Homo sapien
tcctagggttgcacgacgccgtcct

SEQ ID NO: 1699705 - DNA, 25 bp, Homo sapien
tagggttgcacgacgccgtcctttg

SEQ ID NO: 1699706 - DNA, 25 bp, Homo sapien
ttagtgctgcattggccctggaggg

SEQ ID NO: 1699707 - DNA, 25 bp, Homo sapien
tagtgctgcattggccctggagggg

SEQ ID NO: 1699708 - DNA, 25 bp, Homo sapien
agtgctgcattggccctggaggggg

SEQ ID NO: 1699709 - DNA, 25 bp, Homo sapien
cacatggatacatttagggccagac

SEQ ID NO: 1699710 - DNA, 25 bp, Homo sapien
gaagtagccacatggatacatttag

SEQ ID NO: 1699711 - DNA, 25 bp, Homo sapien
tggagaagtagccacatggatacat

SEQ ID NO: 1699712 - DNA, 25 bp, Homo sapien
tagccacatggatacatttagggcc

SEQ ID NO: 1699713 - DNA, 25 bp, Homo sapien
aattcctggaatctgactgggaccc

SEQ ID NO: 1699714 - DNA, 25 bp, Homo sapien
caaggtgcctagatccctcgagaga

SEQ ID NO: 1699715 - DNA, 25 bp, Homo sapien
tactcatgttgagagtgcagggcca

SEQ ID NO: 1699716 - DNA, 25 bp, Homo sapien
gattagcaagcaaagttagggcgca

SEQ ID NO: 1699717 - DNA, 25 bp, Homo sapien
tctgggctgccggagaaatcaaagt

SEQ ID NO: 1699718 - DNA, 25 bp, Homo sapien
gggacataccccaatctctttgctc

SEQ ID NO: 1699719 - DNA, 25 bp, Homo sapien
aactgtgtatggcaaaaggaccgga

SEQ ID NO: 1699720 - DNA, 25 bp, Homo sapien
gagacagtcggctctaagtgaccaa

SEQ ID NO: 1699721 - DNA, 25 bp, Homo sapien
cattcacacgcccattgcaggagta

SEQ ID NO: 1699722 - DNA, 25 bp, Homo sapien
gatctaaggactgggctaccctgcc

SEQ ID NO: 1699723 - DNA, 25 bp, Homo sapien
gaggctctgctggtcaaatacttga

SEQ ID NO: 1699724 - DNA, 25 bp, Homo sapien
caactagaagtttggcccggccact

SEQ ID NO: 1699725 - DNA, 25 bp, Homo sapien
cttgaggttccagtatcagtacgac

SEQ ID NO: 1699726 - DNA, 25 bp, Homo sapien
aacagatccctgaaggttaggtgcc

SEQ ID NO: 1699727 - DNA, 25 bp, Homo sapien
taaactgcctagagaaggtggtcca

SEQ ID NO: 1699728 - DNA, 25 bp, Homo sapien
tcactcccaagaagaagggtgcctc

SEQ ID NO: 1699729 - DNA, 25 bp, Homo sapien
tatataccaactcttagcccgaggg

SEQ ID NO: 1699730 - DNA, 25 bp, Homo sapien
gagggacactgctaactcagacaga

SEQ ID NO: 1699731 - DNA, 25 bp, Homo sapien
tctaattcagaggatgatctccctg

SEQ ID NO: 1699732 - DNA, 25 bp, Homo sapien
gaaacagtcatggacgagcctggga

SEQ ID NO: 1699733 - DNA, 25 bp, Homo sapien
gaatccattccctcgtcttttgcag

SEQ ID NO: 1699734 - DNA, 25 bp, Homo sapien
tgtcaggccgatcacttctcatgct

SEQ ID NO: 1699735 - DNA, 25 bp, Homo sapien
cctatcagagcatagaagtgcatct

SEQ ID NO: 1699736 - DNA, 25 bp, Homo sapien
aggttacccacttccttagcttgtg

SEQ ID NO: 1699737 - DNA, 25 bp, Homo sapien
aataaggccgcatatctacaagtat

SEQ ID NO: 1699738 - DNA, 25 bp, Homo sapien
taaggccgcatatctacaagtatct

SEQ ID NO: 1699739 - DNA, 25 bp, Homo sapien
aaataaggccgcatatctacaagta

SEQ ID NO: 1699740 - DNA, 25 bp, Homo sapien
aggccgcatatctacaagtatctga

SEQ ID NO: 1699741 - DNA, 25 bp, Homo sapien
atcctagtttgatttgatccttcag

SEQ ID NO: 1699742 - DNA, 25 bp, Homo sapien
tgatttgatccttcaggacatgttt

SEQ ID NO: 1699743 - DNA, 25 bp, Homo sapien
cgtgcaagccgaaagtcttctttag

SEQ ID NO: 1699744 - DNA, 25 bp, Homo sapien
gccaccgtgcaagccgaaagtcttc

SEQ ID NO: 1699745 - DNA, 25 bp, Homo sapien
cttcctggtccaataagaatatgag

SEQ ID NO: 1699746 - DNA, 25 bp, Homo sapien
caaattagtgccttgctgtgtgata

SEQ ID NO: 1699747 - DNA, 25 bp, Homo sapien
gaatatgagagtcaaatgcagcttc

SEQ ID NO: 1699748 - DNA, 25 bp, Homo sapien
caaatgcagcttctacttctcccag

SEQ ID NO: 1699749 - DNA, 25 bp, Homo sapien
gcctagagcagtggctgttgggaag

SEQ ID NO: 1699750 - DNA, 25 bp, Homo sapien
aggcagggactgtcatctctgactt

SEQ ID NO: 1699751 - DNA, 25 bp, Homo sapien
ttggtgatgagttgtctggtggacc

SEQ ID NO: 1699752 - DNA, 25 bp, Homo sapien
gtggaccagagatggcctcaggcag

SEQ ID NO: 1699753 - DNA, 25 bp, Homo sapien
tattggacagtgcaagtctagctgg

SEQ ID NO: 1699754 - DNA, 25 bp, Homo sapien
ttcatacatttaggctgcagccggg

SEQ ID NO: 1699755 - DNA, 25 bp, Homo sapien
tctcagcgtatatccaaatgcagtc

SEQ ID NO: 1699756 - DNA, 25 bp, Homo sapien
tgcaggtatgatgggccaccccaaa

SEQ ID NO: 1699757 - DNA, 25 bp, Homo sapien
agtgtcaccagctctcctaagagac

SEQ ID NO: 1699758 - DNA, 25 bp, Homo sapien
ccaggcacagcctgtccaaacggcc

SEQ ID NO: 1699759 - DNA, 25 bp, Homo sapien
ctcctaagagaccaggaggatttta

SEQ ID NO: 1699760 - DNA, 25 bp, Homo sapien
cacagcctgtccaaacggccctctt

SEQ ID NO: 1699761 - DNA, 25 bp, Homo sapien
aaaccaggggttatcaatgtgtgag

SEQ ID NO: 1699762 - DNA, 25 bp, Homo sapien
ggatgagctggaacaattagtagtg

SEQ ID NO: 1699763 - DNA, 25 bp, Homo sapien
ggagcatcgacttctccagagaatt

SEQ ID NO: 1699764 - DNA, 25 bp, Homo sapien
ggttatcaatgtgtgagcctccatc

SEQ ID NO: 1699765 - DNA, 25 bp, Homo sapien
gatagggtcggtttccaacaggagc

SEQ ID NO: 1699766 - DNA, 25 bp, Homo sapien
tgtcgtttgcagaagaccgtcgcca

SEQ ID NO: 1699767 - DNA, 25 bp, Homo sapien
agcttttctaaaacgccgccaggca

SEQ ID NO: 1699768 - DNA, 25 bp, Homo sapien
gagctgaaccggaaaacaagtctgt

SEQ ID NO: 1699769 - DNA, 25 bp, Homo sapien
tttctcctgctacaatttcagatca

SEQ ID NO: 1699770 - DNA, 25 bp, Homo sapien
aatttctcctgctacaatttcagat

SEQ ID NO: 1699771 - DNA, 25 bp, Homo sapien
ttctcctgctacaatttcagatcat

SEQ ID NO: 1699772 - DNA, 25 bp, Homo sapien
atttctcctgctacaatttcagatc

SEQ ID NO: 1699773 - DNA, 25 bp, Homo sapien
tctcctacactgtcacaccgggtgg

SEQ ID NO: 1699774 - DNA, 25 bp, Homo sapien
tcccagggtcatatagattccacac

SEQ ID NO: 1699775 - DNA, 25 bp, Homo sapien
ggtggctcactgctgcccattatta

SEQ ID NO: 1699776 - DNA, 25 bp, Homo sapien
ccaaagatgacccaaagaaagaagt

SEQ ID NO: 1699777 - DNA, 25 bp, Homo sapien
tcttcactggtcttcggaaggcctg

SEQ ID NO: 1699778 - DNA, 25 bp, Homo sapien
gctttgacatggaccctgcggtttc

SEQ ID NO: 1699779 - DNA, 25 bp, Homo sapien
tccctcaagggtgccgtgacataga

SEQ ID NO: 1699780 - DNA, 25 bp, Homo sapien
acacaaaccacaattctgcacgagt

SEQ ID NO: 1699781 - DNA, 25 bp, Homo sapien
gatgtccgcagttggtgctcacggc

SEQ ID NO: 1699782 - DNA, 25 bp, Homo sapien
tgtcaggcacactcgacagaagaga

SEQ ID NO: 1699783 - DNA, 25 bp, Homo sapien
tcaatggtcagttcatgatgagaca

SEQ ID NO: 1699784 - DNA, 25 bp, Homo sapien
gcagatatagcctgtccctagcacc

SEQ ID NO: 1699785 - DNA, 25 bp, Homo sapien
tccatgagtacacataaggtccacc

SEQ ID NO: 1699786 - DNA, 25 bp, Homo sapien
cattgactggtcagtgaggaaacag

SEQ ID NO: 1699787 - DNA, 25 bp, Homo sapien
gcagacagcgagtcttcatggataa

SEQ ID NO: 1699788 - DNA, 25 bp, Homo sapien
taaaagcctcaccactactagcatt

SEQ ID NO: 1699789 - DNA, 25 bp, Homo sapien
gcttcctgctccggcgattgagtcg

SEQ ID NO: 1699790 - DNA, 25 bp, Homo sapien
ttcctgctccggcgattgagtcgtt

SEQ ID NO: 1699791 - DNA, 25 bp, Homo sapien
tcctgctccggcgattgagtcgttc

SEQ ID NO: 1699792 - DNA, 25 bp, Homo sapien
cttcctgctccggcgattgagtcgt

SEQ ID NO: 1699793 - DNA, 25 bp, Homo sapien
ctgagccttgagccgctgaagttct

SEQ ID NO: 1699794 - DNA, 25 bp, Homo sapien
gctgagccttgagccgctgaagttc

SEQ ID NO: 1699795 - DNA, 25 bp, Homo sapien
cctgtggttcccgtggtctacctga

SEQ ID NO: 1699796 - DNA, 25 bp, Homo sapien
agcctccagcctgtggttcccgtgg

SEQ ID NO: 1699797 - DNA, 25 bp, Homo sapien
tccagcctgtggttcccgtggtcta

SEQ ID NO: 1699798 - DNA, 25 bp, Homo sapien
tgtggttcccgtggtctacctgaaa

SEQ ID NO: 1699799 - DNA, 25 bp, Homo sapien
caggcttctgagctgtgttactgcc

SEQ ID NO: 1699800 - DNA, 25 bp, Homo sapien
agatgtcaaggattctggccgcttc

SEQ ID NO: 1699801 - DNA, 25 bp, Homo sapien
tccagatcaatgaccaggcttctga

SEQ ID NO: 1699802 - DNA, 25 bp, Homo sapien
tggtgtctaattccttggccgtcct

SEQ ID NO: 1699803 - DNA, 25 bp, Homo sapien
ggaaagaagaagggacagctcgtac

SEQ ID NO: 1699804 - DNA, 25 bp, Homo sapien
atatgcacatgtgggaaagaagaag

SEQ ID NO: 1699805 - DNA, 25 bp, Homo sapien
ttatatgcacatgtgggaaagaaga

SEQ ID NO: 1699806 - DNA, 25 bp, Homo sapien
tgggaaagaagaagggacagctcgt

SEQ ID NO: 1699807 - DNA, 25 bp, Homo sapien
gaagaagcaattcactgactccttt

SEQ ID NO: 1699808 - DNA, 25 bp, Homo sapien
aacctctaatttctgtggagcactc

SEQ ID NO: 1699809 - DNA, 25 bp, Homo sapien
tctccaactggggataaataacctc

SEQ ID NO: 1699810 - DNA, 25 bp, Homo sapien
ctgaagaagcaattcactgactcct

SEQ ID NO: 1699811 - DNA, 25 bp, Homo sapien
ctgaagtgaggtgtcccagggatga

SEQ ID NO: 1699812 - DNA, 25 bp, Homo sapien
aggctgaggtgagcctgaagtgagg

SEQ ID NO: 1699813 - DNA, 25 bp, Homo sapien
ggtgagcctgaagtgaggtgtccca

SEQ ID NO: 1699814 - DNA, 25 bp, Homo sapien
tgagcctgaagtgaggtgtcccagg

SEQ ID NO: 1699815 - DNA, 25 bp, Homo sapien
ggcatcaggtgatgactgtggacat

SEQ ID NO: 1699816 - DNA, 25 bp, Homo sapien
gagctggcaggcccgaagatgcact

SEQ ID NO: 1699817 - DNA, 25 bp, Homo sapien
tcaggcatcaggtgatgactgtgga

SEQ ID NO: 1699818 - DNA, 25 bp, Homo sapien
cccgaagatgcactgggtagaccca

SEQ ID NO: 1699819 - DNA, 25 bp, Homo sapien
ggctggctatcgtccaagagtcaga

SEQ ID NO: 1699820 - DNA, 25 bp, Homo sapien
caagggcatgaattccaagaggtga

SEQ ID NO: 1699821 - DNA, 25 bp, Homo sapien
tgggcactaccatcagtttacaggc

SEQ ID NO: 1699822 - DNA, 25 bp, Homo sapien
gaaattttggcacagcttcactggg

SEQ ID NO: 1699823 - DNA, 25 bp, Homo sapien
tgttgtatgcccaggacctaccggt

SEQ ID NO: 1699824 - DNA, 25 bp, Homo sapien
gggtcaccactcgttcctgtaggaa

SEQ ID NO: 1699825 - DNA, 25 bp, Homo sapien
caggccccgtgagaagctatgtcag

SEQ ID NO: 1699826 - DNA, 25 bp, Homo sapien
gatagtaagtcgcagagccagcatt

SEQ ID NO: 1699827 - DNA, 25 bp, Homo sapien
catgtggacttgatccctggctgaa

SEQ ID NO: 1699828 - DNA, 25 bp, Homo sapien
gaggactctcaatctactgatcaag

SEQ ID NO: 1699829 - DNA, 25 bp, Homo sapien
gctgaatcacctggatgacttggaa

SEQ ID NO: 1699830 - DNA, 25 bp, Homo sapien
agtacaggactcatatcaacccaag

SEQ ID NO: 1699831 - DNA, 25 bp, Homo sapien
atagtcataacaaacacccatggat

SEQ ID NO: 1699832 - DNA, 25 bp, Homo sapien
tagtcataacaaacacccatggata

SEQ ID NO: 1699833 - DNA, 25 bp, Homo sapien
aatagtcataacaaacacccatgga

SEQ ID NO: 1699834 - DNA, 25 bp, Homo sapien
agtcataacaaacacccatggatac

SEQ ID NO: 1699835 - DNA, 25 bp, Homo sapien
ccacagttatgtcaccctagaagga

SEQ ID NO: 1699836 - DNA, 25 bp, Homo sapien
caattttgaaatgacccacccacag

SEQ ID NO: 1699837 - DNA, 25 bp, Homo sapien
gcaaatacttccagtgacctgtcag

SEQ ID NO: 1699838 - DNA, 25 bp, Homo sapien
tcaggaatgggacatggctctctgc

SEQ ID NO: 1699839 - DNA, 25 bp, Homo sapien
cacacttacatgaatcgcagaggga

SEQ ID NO: 1699840 - DNA, 25 bp, Homo sapien
cacctatcagcggagtgggtccaaa

SEQ ID NO: 1699841 - DNA, 25 bp, Homo sapien
gggtccaaattccagggcgtctcga

SEQ ID NO: 1699842 - DNA, 25 bp, Homo sapien
gaacagagcacaccatgaggtcaca

SEQ ID NO: 1699843 - DNA, 25 bp, Homo sapien
agagccggcagaaggtgtgtccaca

SEQ ID NO: 1699844 - DNA, 25 bp, Homo sapien
ggatcttgcccgaggattgggcccc

SEQ ID NO: 1699845 - DNA, 25 bp, Homo sapien
aggcagctcatggaccaccttcagg

SEQ ID NO: 1699846 - DNA, 25 bp, Homo sapien
agaggaactcggcatcgttctcgca

SEQ ID NO: 1699847 - DNA, 25 bp, Homo sapien
aggaaccccacggtgtgcgcctggt

SEQ ID NO: 1699848 - DNA, 25 bp, Homo sapien
acggtgtgcgcctggtgcgtgggac

SEQ ID NO: 1699849 - DNA, 25 bp, Homo sapien
accccacggtgtgcgcctggtgcgt

SEQ ID NO: 1699850 - DNA, 25 bp, Homo sapien
gaatggcctcgtccaggaaccccac

SEQ ID NO: 1699851 - DNA, 25 bp, Homo sapien
ctcagagcttccagtcgactcctga

SEQ ID NO: 1699852 - DNA, 25 bp, Homo sapien
aatctcatctctctccgtgctcaga

SEQ ID NO: 1699853 - DNA, 25 bp, Homo sapien
gcttccagtcgactcctgagacgat

SEQ ID NO: 1699854 - DNA, 25 bp, Homo sapien
ggtcttcttgacactttacatcctc

SEQ ID NO: 1699855 - DNA, 25 bp, Homo sapien
aggaaacagataccagccaacgggt

SEQ ID NO: 1699856 - DNA, 25 bp, Homo sapien
aggtagccagtgacgtggcctgtac

SEQ ID NO: 1699857 - DNA, 25 bp, Homo sapien
ccaggaaacagataccagccaacgg

SEQ ID NO: 1699858 - DNA, 25 bp, Homo sapien
aaaggtagccagtgacgtggcctgt

SEQ ID NO: 1699859 - DNA, 25 bp, Homo sapien
tggttttagccgtggaaatcaccaa

SEQ ID NO: 1699860 - DNA, 25 bp, Homo sapien
gattggagtcaacacaacttagtgg

SEQ ID NO: 1699861 - DNA, 25 bp, Homo sapien
taaccctactatgccttcttagagt

SEQ ID NO: 1699862 - DNA, 25 bp, Homo sapien
tacagggcatacgttgatgagagct

SEQ ID NO: 1699863 - DNA, 25 bp, Homo sapien
tgtgatatattcatccctctccttc

SEQ ID NO: 1699864 - DNA, 25 bp, Homo sapien
ctccaagccgggtgacttcctcaga

SEQ ID NO: 1699865 - DNA, 25 bp, Homo sapien
cctgggctccaagccgggtgacttc

SEQ ID NO: 1699866 - DNA, 25 bp, Homo sapien
agcaggagacatcgctgctgctcca

SEQ ID NO: 1699867 - DNA, 25 bp, Homo sapien
taatgcttatagcagacagggaagg

SEQ ID NO: 1699868 - DNA, 25 bp, Homo sapien
cacttgctgcattaccttgaagact

SEQ ID NO: 1699869 - DNA, 25 bp, Homo sapien
ttgaaaagcatgtttggagacactt

SEQ ID NO: 1699870 - DNA, 25 bp, Homo sapien
tgggtttatcctccctgcacgggaa

SEQ ID NO: 1699871 - DNA, 25 bp, Homo sapien
caaatgttcgggtgagaccacgtga

SEQ ID NO: 1699872 - DNA, 25 bp, Homo sapien
tcttggcgtctgtggtgaataatca

SEQ ID NO: 1699873 - DNA, 25 bp, Homo sapien
cgggtgagaccacgtgaggctaaaa

SEQ ID NO: 1699874 - DNA, 25 bp, Homo sapien
cagactaaagaatgatcttggcgtc

SEQ ID NO: 1699875 - DNA, 25 bp, Homo sapien
tgggagggtgagtattttcctgtgg

SEQ ID NO: 1699876 - DNA, 25 bp, Homo sapien
aaatggcctcaggactcacaaaagt

SEQ ID NO: 1699877 - DNA, 25 bp, Homo sapien
tcctgtggaaatcacggatcttctt

SEQ ID NO: 1699878 - DNA, 25 bp, Homo sapien
aatcacggatcttcttgacaaggtc

SEQ ID NO: 1699879 - DNA, 25 bp, Homo sapien
tctagtggaggagaagggtcctcac

SEQ ID NO: 1699880 - DNA, 25 bp, Homo sapien
gatgctctgggaatagtgcccctga

SEQ ID NO: 1699881 - DNA, 25 bp, Homo sapien
caaggtgacttgagtacaatgtgaa

SEQ ID NO: 1699882 - DNA, 25 bp, Homo sapien
gatgaggacagaagactcggcttct

SEQ ID NO: 1699883 - DNA, 25 bp, Homo sapien
tctatttccagatgatgcgccaagt

SEQ ID NO: 1699884 - DNA, 25 bp, Homo sapien
atttccagatgatgcgccaagtttt

SEQ ID NO: 1699885 - DNA, 25 bp, Homo sapien
aatctatttccagatgatgcgccaa

SEQ ID NO: 1699886 - DNA, 25 bp, Homo sapien
tatttccagatgatgcgccaagttt

SEQ ID NO: 1699887 - DNA, 25 bp, Homo sapien
ttgctctgtttgctgccatggattg

SEQ ID NO: 1699888 - DNA, 25 bp, Homo sapien
tctgtttgctgccatggattgaatg

SEQ ID NO: 1699889 - DNA, 25 bp, Homo sapien
tttgctgccatggattgaatggatg

SEQ ID NO: 1699890 - DNA, 25 bp, Homo sapien
gctgccatggattgaatggatgaat

SEQ ID NO: 1699891 - DNA, 25 bp, Homo sapien
ttctcaaagtgcagcgggagggacc

SEQ ID NO: 1699892 - DNA, 25 bp, Homo sapien
gaaccgcccttctacctaatcagca

SEQ ID NO: 1699893 - DNA, 25 bp, Homo sapien
ggtgctgttaaggatttgcttctca

SEQ ID NO: 1699894 - DNA, 25 bp, Homo sapien
ttctacctaatcagcaagtggtgct

SEQ ID NO: 1699895 - DNA, 25 bp, Homo sapien
gacatcaacagcgggcggcaaccac

SEQ ID NO: 1699896 - DNA, 25 bp, Homo sapien
cagcgggcggcaaccacagatgttc

SEQ ID NO: 1699897 - DNA, 25 bp, Homo sapien
ggaggagcgcgcagacatcaacagc

SEQ ID NO: 1699898 - DNA, 25 bp, Homo sapien
aggagcgcgcagacatcaacagcgg

SEQ ID NO: 1699899 - DNA, 25 bp, Homo sapien
ctgtcttccgagagaaccaggctcc

SEQ ID NO: 1699900 - DNA, 25 bp, Homo sapien
gtagtccagggcgactctcacgccg

SEQ ID NO: 1699901 - DNA, 25 bp, Homo sapien
cctttcagcgtaaggcaggaacctt

SEQ ID NO: 1699902 - DNA, 25 bp, Homo sapien
ctgctggtgcgagatgatcacggcc

SEQ ID NO: 1699903 - DNA, 25 bp, Homo sapien
gctgagggcctaagataaataaagt

SEQ ID NO: 1699904 - DNA, 25 bp, Homo sapien
cagggaggctcaggacgtcagggag

SEQ ID NO: 1699905 - DNA, 25 bp, Homo sapien
tgttctctcgcctcacgcgggcaca

SEQ ID NO: 1699906 - DNA, 25 bp, Homo sapien
tgttcgagactcaagtcccctgttc

SEQ ID NO: 1699907 - DNA, 25 bp, Homo sapien
acagccgaagccgtctgtggttctg

SEQ ID NO: 1699908 - DNA, 25 bp, Homo sapien
ggcacagccgaagccgtctgtggtt

SEQ ID NO: 1699909 - DNA, 25 bp, Homo sapien
ctaggcacagccgaagccgtctgtg

SEQ ID NO: 1699910 - DNA, 25 bp, Homo sapien
gccgaagccgtctgtggttctgcac

SEQ ID NO: 1699911 - DNA, 25 bp, Homo sapien
gctggctcctaggttggctgttgcc

SEQ ID NO: 1699912 - DNA, 25 bp, Homo sapien
agcccgctggctcctaggttggctg

SEQ ID NO: 1699913 - DNA, 25 bp, Homo sapien
cgctggctcctaggttggctgttgc

SEQ ID NO: 1699914 - DNA, 25 bp, Homo sapien
cccgctggctcctaggttggctgtt

SEQ ID NO: 1699915 - DNA, 25 bp, Homo sapien
tctacaagtccagagaaatgaccag

SEQ ID NO: 1699916 - DNA, 25 bp, Homo sapien
catcagcgctaattggacacatgga

SEQ ID NO: 1699917 - DNA, 25 bp, Homo sapien
gacacatggaatccagaggtctgtg

SEQ ID NO: 1699918 - DNA, 25 bp, Homo sapien
catcttcaggtgtgtgtcaaagtac

SEQ ID NO: 1699919 - DNA, 25 bp, Homo sapien
tatctctagattggtccttgtgagg

SEQ ID NO: 1699920 - DNA, 25 bp, Homo sapien
agttctgaccgggttccccagcagg

SEQ ID NO: 1699921 - DNA, 25 bp, Homo sapien
cagtggagcagaacctctcctgcct

SEQ ID NO: 1699922 - DNA, 25 bp, Homo sapien
caccaagacaaacatccagtggagc

SEQ ID NO: 1699923 - DNA, 25 bp, Homo sapien
aaaccagtcaattacgcctaagatc

SEQ ID NO: 1699924 - DNA, 25 bp, Homo sapien
catctactgccctaatggggctctt

SEQ ID NO: 1699925 - DNA, 25 bp, Homo sapien
gctggtttcccgagggaacttctga

SEQ ID NO: 1699926 - DNA, 25 bp, Homo sapien
cccgatgcagcattttcttgcccag

SEQ ID NO: 1699927 - DNA, 25 bp, Homo sapien
gagagtagcaccttccgccaatttc

SEQ ID NO: 1699928 - DNA, 25 bp, Homo sapien
ttcatgcatttgtaccctttctggg

SEQ ID NO: 1699929 - DNA, 25 bp, Homo sapien
tctacttcaaagatatcggactgaa

SEQ ID NO: 1699930 - DNA, 25 bp, Homo sapien
ccaaatttctcttacatgggagctc

SEQ ID NO: 1699931 - DNA, 25 bp, Homo sapien
gggcaacctaagaccagaggccata

SEQ ID NO: 1699932 - DNA, 25 bp, Homo sapien
tttcccagctgcacaatagaagccc

SEQ ID NO: 1699933 - DNA, 25 bp, Homo sapien
tagaggcctctgcttgctagtctga

SEQ ID NO: 1699934 - DNA, 25 bp, Homo sapien
ggctgcatggctcctatattcagag

SEQ ID NO: 1699935 - DNA, 25 bp, Homo sapien
tccaggagacttgggcggatcactt

SEQ ID NO: 1699936 - DNA, 25 bp, Homo sapien
gagacactgcatcctgccctggtaa

SEQ ID NO: 1699937 - DNA, 25 bp, Homo sapien
ttgatgctctctgttagtaaccggg

SEQ ID NO: 1699938 - DNA, 25 bp, Homo sapien
agaaatgtgctaccagtctctgggc

SEQ ID NO: 1699939 - DNA, 25 bp, Homo sapien
cagcttgggatactcaagagaggcc

SEQ ID NO: 1699940 - DNA, 25 bp, Homo sapien
ggaggtccagacatatgcttgagaa

SEQ ID NO: 1699941 - DNA, 25 bp, Homo sapien
cagggaatggagctctaggctaagt

SEQ ID NO: 1699942 - DNA, 25 bp, Homo sapien
tgggattcactgtctaccagggcac

SEQ ID NO: 1699943 - DNA, 25 bp, Homo sapien
tcagtgacgtaaaagagactaaggt

SEQ ID NO: 1699944 - DNA, 25 bp, Homo sapien
ctgtctggggatttgcccggtgatc

SEQ ID NO: 1699945 - DNA, 25 bp, Homo sapien
cggtgatcagtgacgtaaaagagac

SEQ ID NO: 1699946 - DNA, 25 bp, Homo sapien
ggatttgcccggtgatcagtgacgt

SEQ ID NO: 1699947 - DNA, 25 bp, Homo sapien
cctccagatttctcagaggggaggc

SEQ ID NO: 1699948 - DNA, 25 bp, Homo sapien
tccagatttctcagaggggaggcag

SEQ ID NO: 1699949 - DNA, 25 bp, Homo sapien
ctccagatttctcagaggggaggca

SEQ ID NO: 1699950 - DNA, 25 bp, Homo sapien
ccagatttctcagaggggaggcagc

SEQ ID NO: 1699951 - DNA, 25 bp, Homo sapien
acagtcaatggtcactgggtctctc

SEQ ID NO: 1699952 - DNA, 25 bp, Homo sapien
aaagacatgaccacagtcaatggtc

SEQ ID NO: 1699953 - DNA, 25 bp, Homo sapien
tcaatggtcactgggtctctcaagt

SEQ ID NO: 1699954 - DNA, 25 bp, Homo sapien
gatgcagtggtagcaaaagacatga

SEQ ID NO: 1699955 - DNA, 25 bp, Homo sapien
agctggcttgcacagagaacaatgt

SEQ ID NO: 1699956 - DNA, 25 bp, Homo sapien
gaacaatgtaatggttgcctagtag

SEQ ID NO: 1699957 - DNA, 25 bp, Homo sapien
cagagaacaatgtaatggttgccta

SEQ ID NO: 1699958 - DNA, 25 bp, Homo sapien
taatggttgcctagtagattcacag

SEQ ID NO: 1699959 - DNA, 25 bp, Homo sapien
tcacatacaccatctgctggtcatc

SEQ ID NO: 1699960 - DNA, 25 bp, Homo sapien
tgaagcattaatggagcttctccag

SEQ ID NO: 1699961 - DNA, 25 bp, Homo sapien
tccaggtgtcgcctacacagcttct

SEQ ID NO: 1699962 - DNA, 25 bp, Homo sapien
ggtgcttgtgttctcgggactccaa

SEQ ID NO: 1699963 - DNA, 25 bp, Homo sapien
ccttcagaatcttccgatggtttag

SEQ ID NO: 1699964 - DNA, 25 bp, Homo sapien
gaatgctatccctgtatcccttcag

SEQ ID NO: 1699965 - DNA, 25 bp, Homo sapien
ttctcccatagattgagaattctga

SEQ ID NO: 1699966 - DNA, 25 bp, Homo sapien
agggcctgaatctcatcttctccca

SEQ ID NO: 1699967 - DNA, 25 bp, Homo sapien
tgatacaatgtcttgcctgtggttc

SEQ ID NO: 1699968 - DNA, 25 bp, Homo sapien
gatacaatgtcttgcctgtggttct

SEQ ID NO: 1699969 - DNA, 25 bp, Homo sapien
tacaatgtcttgcctgtggttctga

SEQ ID NO: 1699970 - DNA, 25 bp, Homo sapien
actgatacaatgtcttgcctgtggt

SEQ ID NO: 1699971 - DNA, 25 bp, Homo sapien
tcagaacccttgatgacacggctgt

SEQ ID NO: 1699972 - DNA, 25 bp, Homo sapien
tgctccaacaggtactgttcccttt

SEQ ID NO: 1699973 - DNA, 25 bp, Homo sapien
agttcaagtgctggctgccgagact

SEQ ID NO: 1699974 - DNA, 25 bp, Homo sapien
cttgctctagccctaccagctgctc

SEQ ID NO: 1699975 - DNA, 25 bp, Homo sapien
cagatacagtttggttggtccttta

SEQ ID NO: 1699976 - DNA, 25 bp, Homo sapien
tcagatacagtttggttggtccttt

SEQ ID NO: 1699977 - DNA, 25 bp, Homo sapien
ctgtagtgccgggatcttagtgccg

SEQ ID NO: 1699978 - DNA, 25 bp, Homo sapien
tggttgcgccgggactgtagtgccg

SEQ ID NO: 1699979 - DNA, 25 bp, Homo sapien
gggatcgcggcgaagctgattggct

SEQ ID NO: 1699980 - DNA, 25 bp, Homo sapien
gagaatctgagtgcgggtggttgcg

SEQ ID NO: 1699981 - DNA, 25 bp, Homo sapien
ctgaaatacctcaaggagtgggagc

SEQ ID NO: 1699982 - DNA, 25 bp, Homo sapien
tgctgaaatacctcaaggagtggga

SEQ ID NO: 1699983 - DNA, 25 bp, Homo sapien
gcggtgctgaaatacctcaaggagt

SEQ ID NO: 1699984 - DNA, 25 bp, Homo sapien
ggtgctgaaatacctcaaggagtgg

SEQ ID NO: 1699985 - DNA, 25 bp, Homo sapien
ttcactcggtaaatctgcgcgtggc

SEQ ID NO: 1699986 - DNA, 25 bp, Homo sapien
actcggtaaatctgcgcgtggccct

SEQ ID NO: 1699987 - DNA, 25 bp, Homo sapien
aggttcactcggtaaatctgcgcgt

SEQ ID NO: 1699988 - DNA, 25 bp, Homo sapien
gctccatcctcggactcacggagtc

SEQ ID NO: 1699989 - DNA, 25 bp, Homo sapien
cgcccgagtttcttccctggtcgag

SEQ ID NO: 1699990 - DNA, 25 bp, Homo sapien
gcgcccgagtttcttccctggtcga

SEQ ID NO: 1699991 - DNA, 25 bp, Homo sapien
aggaggcgcctgtcgggcccacgtc

SEQ ID NO: 1699992 - DNA, 25 bp, Homo sapien
gggcccacgtcgcagccatgcttcc

SEQ ID NO: 1699993 - DNA, 25 bp, Homo sapien
ggaggcgcctgtcgggcccacgtcg

SEQ ID NO: 1699994 - DNA, 25 bp, Homo sapien
ctgtcgggcccacgtcgcagccatg

SEQ ID NO: 1699995 - DNA, 25 bp, Homo sapien
agatctgagccgctgtgttcgcggc

SEQ ID NO: 1699996 - DNA, 25 bp, Homo sapien
ctgggagatctgagccgctgtgttc

SEQ ID NO: 1699997 - DNA, 25 bp, Homo sapien
tctgagtatttgtccgcttcccact

SEQ ID NO: 1699998 - DNA, 25 bp, Homo sapien
ctgctctgagtatttgtccgcttcc

SEQ ID NO: 1699999 - DNA, 25 bp, Homo sapien
cacttgccctcaggtaggccctgac

SEQ ID NO: 1700000 - DNA, 25 bp, Homo sapien
gcacttgccctcaggtaggccctga

SEQ ID NO: 1700001 - DNA, 25 bp, Homo sapien
cagcgtctccttcccgttctccagg

SEQ ID NO: 1700002 - DNA, 25 bp, Homo sapien
agctggaatcggagccacggacaca

SEQ ID NO: 1700003 - DNA, 25 bp, Homo sapien
gtggaggccaaggcactcagaagag

SEQ ID NO: 1700004 - DNA, 25 bp, Homo sapien
gtgtcctgggtctggtcctccccat

SEQ ID NO: 1700005 - DNA, 25 bp, Homo sapien
gccctgccctgctgaaggtctcctg

SEQ ID NO: 1700006 - DNA, 25 bp, Homo sapien
aaggtctcctgctttccctgagagg

SEQ ID NO: 1700007 - DNA, 25 bp, Homo sapien
ctttccctgagaggagacaacttac

SEQ ID NO: 1700008 - DNA, 25 bp, Homo sapien
tgaaggtctcctgctttccctgaga

SEQ ID NO: 1700009 - DNA, 25 bp, Homo sapien
tgaccacagctccaaggagaaacag

SEQ ID NO: 1700010 - DNA, 25 bp, Homo sapien
caaggagaaacaggccagcaacgat

SEQ ID NO: 1700011 - DNA, 25 bp, Homo sapien
tttcttcctccacatcgcagcagca

SEQ ID NO: 1700012 - DNA, 25 bp, Homo sapien
ttcttcctccacatcgcagcagcaa

SEQ ID NO: 1700013 - DNA, 25 bp, Homo sapien
agcccgagcatagctcctccttgtt

SEQ ID NO: 1700014 - DNA, 25 bp, Homo sapien
gcccgagcatagctcctccttgttc

SEQ ID NO: 1700015 - DNA, 25 bp, Homo sapien
tatcatgagatgcatcagagtactg

SEQ ID NO: 1700016 - DNA, 25 bp, Homo sapien
ctttacaagtatcatgagatgcatc

SEQ ID NO: 1700017 - DNA, 25 bp, Homo sapien
tgcatcagagtactgagcacaattg

SEQ ID NO: 1700018 - DNA, 25 bp, Homo sapien
gagatgcatcagagtactgagcaca

SEQ ID NO: 1700019 - DNA, 25 bp, Homo sapien
gatacaaaatattagggccagacca

SEQ ID NO: 1700020 - DNA, 25 bp, Homo sapien
ataatgatacaaaatattagggcca

SEQ ID NO: 1700021 - DNA, 25 bp, Homo sapien
acaaaatattagggccagaccatag

SEQ ID NO: 1700022 - DNA, 25 bp, Homo sapien
aaatattagggccagaccatagact

SEQ ID NO: 1700023 - DNA, 25 bp, Homo sapien
gaaagagatcagaacgcagacacca

SEQ ID NO: 1700024 - DNA, 25 bp, Homo sapien
gaacgcagacaccagaacaggaaca

SEQ ID NO: 1700025 - DNA, 25 bp, Homo sapien
ccagaacaggaacaggcatagtcct

SEQ ID NO: 1700026 - DNA, 25 bp, Homo sapien
cttccaccttgtggggttaatgaca

SEQ ID NO: 1700027 - DNA, 25 bp, Homo sapien
gaaatagggtaaaagctgcacgggc

SEQ ID NO: 1700028 - DNA, 25 bp, Homo sapien
ccacatgtgggcttctaatcaggat

SEQ ID NO: 1700029 - DNA, 25 bp, Homo sapien
cagtgtcggccatcagggtatcaga

SEQ ID NO: 1700030 - DNA, 25 bp, Homo sapien
gatgcatagcctaggaatcctggtc

SEQ ID NO: 1700031 - DNA, 25 bp, Homo sapien
tcagtgtatacatggatcctctgat

SEQ ID NO: 1700032 - DNA, 25 bp, Homo sapien
cagtgtatacatggatcctctgatg

SEQ ID NO: 1700033 - DNA, 25 bp, Homo sapien
gatgtcttacagatacgggttttta

SEQ ID NO: 1700034 - DNA, 25 bp, Homo sapien
ctctgatgtcttacagatacgggtt

SEQ ID NO: 1700035 - DNA, 25 bp, Homo sapien
gttgtaagcccaaatcactttggct

SEQ ID NO: 1700036 - DNA, 25 bp, Homo sapien
aatagttgccatcctgttgtaagcc

SEQ ID NO: 1700037 - DNA, 25 bp, Homo sapien
tattcaccctataactgcaagttgg

SEQ ID NO: 1700038 - DNA, 25 bp, Homo sapien
tcacactgtacattaggtttccaga

SEQ ID NO: 1700039 - DNA, 25 bp, Homo sapien
tgttttagattgcaaatatgaggtt

SEQ ID NO: 1700040 - DNA, 25 bp, Homo sapien
gaacttgttcattatataactgaga

SEQ ID NO: 1700041 - DNA, 25 bp, Homo sapien
cattactgcccatactgaacattag

SEQ ID NO: 1700042 - DNA, 25 bp, Homo sapien
gaacattagatttctagaacttgtt

SEQ ID NO: 1700043 - DNA, 25 bp, Homo sapien
tgccttgtctcaggttgagactctg

SEQ ID NO: 1700044 - DNA, 25 bp, Homo sapien
gactgttgggaagatataactgtat

SEQ ID NO: 1700045 - DNA, 25 bp, Homo sapien
ctgtattttgcagtatgagaaggac

SEQ ID NO: 1700046 - DNA, 25 bp, Homo sapien
gacaccagaggtggaataatatgat

SEQ ID NO: 1700047 - DNA, 25 bp, Homo sapien
tgctagcaataataagccatctgtg

SEQ ID NO: 1700048 - DNA, 25 bp, Homo sapien
gaactaactcttatgcagttgcaaa

SEQ ID NO: 1700049 - DNA, 25 bp, Homo sapien
gcatgatttgcatccaatatttaca

SEQ ID NO: 1700050 - DNA, 25 bp, Homo sapien
tttggctattcacacagcttttgag

SEQ ID NO: 1700051 - DNA, 25 bp, Homo sapien
tcaatgtgacttctgcgataaacag

SEQ ID NO: 1700052 - DNA, 25 bp, Homo sapien
tctgtctagtgcctgggaatcttga

SEQ ID NO: 1700053 - DNA, 25 bp, Homo sapien
caggatcaggacacgaggaagagta

SEQ ID NO: 1700054 - DNA, 25 bp, Homo sapien
gagtcaatccctcagtaagtcagtg

SEQ ID NO: 1700055 - DNA, 25 bp, Homo sapien
caacatgaaggatttagcctgggag

SEQ ID NO: 1700056 - DNA, 25 bp, Homo sapien
tgcaacatgaaggatttagcctggg

SEQ ID NO: 1700057 - DNA, 25 bp, Homo sapien
ctgcaacatgaaggatttagcctgg

SEQ ID NO: 1700058 - DNA, 25 bp, Homo sapien
acatgaaggatttagcctgggagga

SEQ ID NO: 1700059 - DNA, 25 bp, Homo sapien
cttgctttgctgacaagaggtatta

SEQ ID NO: 1700060 - DNA, 25 bp, Homo sapien
ctgtcttgctttgctgacaagaggt

SEQ ID NO: 1700061 - DNA, 25 bp, Homo sapien
gaccagagaatacctctgtcttgct

SEQ ID NO: 1700062 - DNA, 25 bp, Homo sapien
tgctttgctgacaagaggtattaat

SEQ ID NO: 1700063 - DNA, 25 bp, Homo sapien
cacagcaccagatatgccaggattt

SEQ ID NO: 1700064 - DNA, 25 bp, Homo sapien
atgccaggattttggcctttgattc

SEQ ID NO: 1700065 - DNA, 25 bp, Homo sapien
acagcaccagatatgccaggatttt

SEQ ID NO: 1700066 - DNA, 25 bp, Homo sapien
gccaggattttggcctttgattcag

SEQ ID NO: 1700067 - DNA, 25 bp, Homo sapien
cccactagcagggcattagctggtg

SEQ ID NO: 1700068 - DNA, 25 bp, Homo sapien
ctttgcccactagcagggcattagc

SEQ ID NO: 1700069 - DNA, 25 bp, Homo sapien
cagtggctgcttggcgagcctggat

SEQ ID NO: 1700070 - DNA, 25 bp, Homo sapien
tgcccactagcagggcattagctgg

SEQ ID NO: 1700071 - DNA, 25 bp, Homo sapien
ttaatatccctaattaggggaatgc

SEQ ID NO: 1700072 - DNA, 25 bp, Homo sapien
aatatccctaattaggggaatgcaa

SEQ ID NO: 1700073 - DNA, 25 bp, Homo sapien
aaatgcttaatatccctaattaggg

SEQ ID NO: 1700074 - DNA, 25 bp, Homo sapien
aaaaatgcttaatatccctaattag

SEQ ID NO: 1700075 - DNA, 25 bp, Homo sapien
tacaacttctatcacccaacagtgc

SEQ ID NO: 1700076 - DNA, 25 bp, Homo sapien
agtgccaatggccctgatggtccct

SEQ ID NO: 1700077 - DNA, 25 bp, Homo sapien
ccgtatttacaacttctatcaccca

SEQ ID NO: 1700078 - DNA, 25 bp, Homo sapien
tctatcacccaacagtgccaatggc

SEQ ID NO: 1700079 - DNA, 25 bp, Homo sapien
tggagatggtgtcatccatgtacct

SEQ ID NO: 1700080 - DNA, 25 bp, Homo sapien
gagatggtgtcatccatgtacctta

SEQ ID NO: 1700081 - DNA, 25 bp, Homo sapien
tatggagatggtgtcatccatgtac

SEQ ID NO: 1700082 - DNA, 25 bp, Homo sapien
acatatggagatggtgtcatccatg

SEQ ID NO: 1700083 - DNA, 25 bp, Homo sapien
cagaggcctaaattttcggctccat

SEQ ID NO: 1700084 - DNA, 25 bp, Homo sapien
gcttccagaggcctaaattttcggc

SEQ ID NO: 1700085 - DNA, 25 bp, Homo sapien
ttttcggctccatttgtatccttca

SEQ ID NO: 1700086 - DNA, 25 bp, Homo sapien
tccagaggcctaaattttcggctcc

SEQ ID NO: 1700087 - DNA, 25 bp, Homo sapien
gaagtagggacatagacgtgatcac

SEQ ID NO: 1700088 - DNA, 25 bp, Homo sapien
ccctggcatagctcagaaaatttgg

SEQ ID NO: 1700089 - DNA, 25 bp, Homo sapien
aaaaggaacaacatgcgctctaggc

SEQ ID NO: 1700090 - DNA, 25 bp, Homo sapien
ccagagtgcatttgagccagaggta

SEQ ID NO: 1700091 - DNA, 25 bp, Homo sapien
gtcagcacagggcatcggaggcccc

SEQ ID NO: 1700092 - DNA, 25 bp, Homo sapien
tccaagttctgaacagcacacagcc

SEQ ID NO: 1700093 - DNA, 25 bp, Homo sapien
atgcaaatcagtgtccccgcagcgt

SEQ ID NO: 1700094 - DNA, 25 bp, Homo sapien
caaaggcttgtactgctgctcatac

SEQ ID NO: 1700095 - DNA, 25 bp, Homo sapien
aatcttaaggaatctcccaattaca

SEQ ID NO: 1700096 - DNA, 25 bp, Homo sapien
caattacactgtggacacttgcatc

SEQ ID NO: 1700097 - DNA, 25 bp, Homo sapien
gcagactgtgagataagaatgtgag

SEQ ID NO: 1700098 - DNA, 25 bp, Homo sapien
tgggtttaccaagaagcagactgtg

SEQ ID NO: 1700099 - DNA, 25 bp, Homo sapien
catgtgatgtgcaagatgtctgaca

SEQ ID NO: 1700100 - DNA, 25 bp, Homo sapien
cggtacttttgccagattgggctgc

SEQ ID NO: 1700101 - DNA, 25 bp, Homo sapien
ttttgtctccagatctaaggatcgg

SEQ ID NO: 1700102 - DNA, 25 bp, Homo sapien
tgacaaaagtcagagaagcccgttg

SEQ ID NO: 1700103 - DNA, 25 bp, Homo sapien
atagtagggagcttctggtgatctg

SEQ ID NO: 1700104 - DNA, 25 bp, Homo sapien
ttgtgttgatagtagggagcttctg

SEQ ID NO: 1700105 - DNA, 25 bp, Homo sapien
ttccaatttgtgttgatagtaggga

SEQ ID NO: 1700106 - DNA, 25 bp, Homo sapien
gaaaatactgaatggtctcctcata

SEQ ID NO: 1700107 - DNA, 25 bp, Homo sapien
ggaggggttctttatacagtctgtg

SEQ ID NO: 1700108 - DNA, 25 bp, Homo sapien
tggactggaggggttctttatacag

SEQ ID NO: 1700109 - DNA, 25 bp, Homo sapien
tcatgtcgaatgaaaatccccaatg

SEQ ID NO: 1700110 - DNA, 25 bp, Homo sapien
aatctcatgtcgaatgaaaatcccc

SEQ ID NO: 1700111 - DNA, 25 bp, Homo sapien
tatgttcttttgtatactaagtctt

SEQ ID NO: 1700112 - DNA, 25 bp, Homo sapien
tatattttatacatacgtcactagg

SEQ ID NO: 1700113 - DNA, 25 bp, Homo sapien
catacgtcactaggtctgtggttaa

SEQ ID NO: 1700114 - DNA, 25 bp, Homo sapien
ggttaagtgcttatggccattgtgg

SEQ ID NO: 1700115 - DNA, 25 bp, Homo sapien
tctcctcggtgagaaagggccctaa

SEQ ID NO: 1700116 - DNA, 25 bp, Homo sapien
tgggagccagaaactatttacttgc

SEQ ID NO: 1700117 - DNA, 25 bp, Homo sapien
gcagattttgctgtactctcctcgg

SEQ ID NO: 1700118 - DNA, 25 bp, Homo sapien
tagaaaagatagcttgtccgcctcc

SEQ ID NO: 1700119 - DNA, 25 bp, Homo sapien
gactgcggacttttgcattacagcc

SEQ ID NO: 1700120 - DNA, 25 bp, Homo sapien
gaaattatctacctatcccgctgga

SEQ ID NO: 1700121 - DNA, 25 bp, Homo sapien
tgttaactgggtgagagccaaggcc

SEQ ID NO: 1700122 - DNA, 25 bp, Homo sapien
gcaacacgtgcgctggataaacgct

SEQ ID NO: 1700123 - DNA, 25 bp, Homo sapien
ttttcctctcttcgggccagtctgg

SEQ ID NO: 1700124 - DNA, 25 bp, Homo sapien
cggtgcagctgaaagtcgacgaaga

SEQ ID NO: 1700125 - DNA, 25 bp, Homo sapien
gccgcctcccggtgcagctgaaagt

SEQ ID NO: 1700126 - DNA, 25 bp, Homo sapien
cggccggcgaggctgtctagtccag

SEQ ID NO: 1700127 - DNA, 25 bp, Homo sapien
agatacaggcccgcgcatgcgcgtg

SEQ ID NO: 1700128 - DNA, 25 bp, Homo sapien
cgaggaatcctctggagatacaggc

SEQ ID NO: 1700129 - DNA, 25 bp, Homo sapien
cgcatgcgcgtgctcgagcgctgaa

SEQ ID NO: 1700130 - DNA, 25 bp, Homo sapien
ggagggctggcgatgagaagcagca

SEQ ID NO: 1700131 - DNA, 25 bp, Homo sapien
acacacaatactcgccggaagcgga

SEQ ID NO: 1700132 - DNA, 25 bp, Homo sapien
ggcgcgacacacaatactcgccgga

SEQ ID NO: 1700133 - DNA, 25 bp, Homo sapien
ccgccggagcgctgcctccctcctt

SEQ ID NO: 1700134 - DNA, 25 bp, Homo sapien
gccccgcggcgcgacacacaatact

SEQ ID NO: 1700135 - DNA, 25 bp, Homo sapien
gggagaggactctcaactacagtca

SEQ ID NO: 1700136 - DNA, 25 bp, Homo sapien
gagtgcctctgcgttagtccttcct

SEQ ID NO: 1700137 - DNA, 25 bp, Homo sapien
tctactccttgtgtctcagctgaag

SEQ ID NO: 1700138 - DNA, 25 bp, Homo sapien
tctcctgagaggttgtccacaactc

SEQ ID NO: 1700139 - DNA, 25 bp, Homo sapien
ctgagacgagtagaactgtatgcac

SEQ ID NO: 1700140 - DNA, 25 bp, Homo sapien
tagaactgtatgcacagtaaggcac

SEQ ID NO: 1700141 - DNA, 25 bp, Homo sapien
gtatgcacagtaaggcaccaggacg

SEQ ID NO: 1700142 - DNA, 25 bp, Homo sapien
gagacgagtagaactgtatgcacag

SEQ ID NO: 1700143 - DNA, 25 bp, Homo sapien
ctgggcccactggaagaagtgtctt

SEQ ID NO: 1700144 - DNA, 25 bp, Homo sapien
gctttatgattaatccactggagtc

SEQ ID NO: 1700145 - DNA, 25 bp, Homo sapien
cacaatatccaaccttttggcttcc

SEQ ID NO: 1700146 - DNA, 25 bp, Homo sapien
ggagtctaagcttgattctctgaca

SEQ ID NO: 1700147 - DNA, 25 bp, Homo sapien
gacactgtatcctcgtttgacatac

SEQ ID NO: 1700148 - DNA, 25 bp, Homo sapien
tcctgatccaggctcattccactta

SEQ ID NO: 1700149 - DNA, 25 bp, Homo sapien
gaaccaatagttccagacactgtat

SEQ ID NO: 1700150 - DNA, 25 bp, Homo sapien
tgttagaaagagaagcttccttcaa

SEQ ID NO: 1700151 - DNA, 25 bp, Homo sapien
ttttttgcatccctgacccgacatt

SEQ ID NO: 1700152 - DNA, 25 bp, Homo sapien
tatccctatgttaagtcctaactcc

SEQ ID NO: 1700153 - DNA, 25 bp, Homo sapien
tttcaaaacttgtgactcccagcca

SEQ ID NO: 1700154 - DNA, 25 bp, Homo sapien
ccatcttctcttccaatcaattcaa

SEQ ID NO: 1700155 - DNA, 25 bp, Homo sapien
gaggccccagcctctaacagacttg

SEQ ID NO: 1700156 - DNA, 25 bp, Homo sapien
gccccagcctctaacagacttgtct

SEQ ID NO: 1700157 - DNA, 25 bp, Homo sapien
ggccccagcctctaacagacttgtc

SEQ ID NO: 1700158 - DNA, 25 bp, Homo sapien
aggccccagcctctaacagacttgt

SEQ ID NO: 1700159 - DNA, 25 bp, Homo sapien
tgcggtagcgggatgtctttcgaca

SEQ ID NO: 1700160 - DNA, 25 bp, Homo sapien
tgtagcatcgtccagtggcacaacg

SEQ ID NO: 1700161 - DNA, 25 bp, Homo sapien
caccagcgggtgatgcaagctttgc

SEQ ID NO: 1700162 - DNA, 25 bp, Homo sapien
tgtaagttctccaaagccgcagctg

SEQ ID NO: 1700163 - DNA, 25 bp, Homo sapien
ggacaactgatcacacatactgtgt

SEQ ID NO: 1700164 - DNA, 25 bp, Homo sapien
tacctagggagtatctcatcctctg

SEQ ID NO: 1700165 - DNA, 25 bp, Homo sapien
tacaaagtgagtagtaggagcttac

SEQ ID NO: 1700166 - DNA, 25 bp, Homo sapien
ggagcttacgatctctacctaggga

SEQ ID NO: 1700167 - DNA, 25 bp, Homo sapien
tcctcagaggacttgcagcgagtga

SEQ ID NO: 1700168 - DNA, 25 bp, Homo sapien
agaggacttgcagcgagtgatctcc

SEQ ID NO: 1700169 - DNA, 25 bp, Homo sapien
cttctcctcagaggacttgcagcga

SEQ ID NO: 1700170 - DNA, 25 bp, Homo sapien
gacttgcagcgagtgatctcctgca

SEQ ID NO: 1700171 - DNA, 25 bp, Homo sapien
ggtcagtgtggtataaggaagcctt

SEQ ID NO: 1700172 - DNA, 25 bp, Homo sapien
agggtcagtgtggtataaggaagcc

SEQ ID NO: 1700173 - DNA, 25 bp, Homo sapien
agggaagatgttgtatcagcagggt

SEQ ID NO: 1700174 - DNA, 25 bp, Homo sapien
tcagtgtggtataaggaagcctttc

SEQ ID NO: 1700175 - DNA, 25 bp, Homo sapien
tctcggagtcgctgcagaatgtcct

SEQ ID NO: 1700176 - DNA, 25 bp, Homo sapien
tcaagatctgctgtcggcgactttc

SEQ ID NO: 1700177 - DNA, 25 bp, Homo sapien
ggcgcttgtccccaaggtgagcagc

SEQ ID NO: 1700178 - DNA, 25 bp, Homo sapien
cagtcgtgaaagcaacacctgctgc

SEQ ID NO: 1700179 - DNA, 25 bp, Homo sapien
tcgaagcctgactgtaagcacttgc

SEQ ID NO: 1700180 - DNA, 25 bp, Homo sapien
catctcgaagcctgactgtaagcac

SEQ ID NO: 1700181 - DNA, 25 bp, Homo sapien
agcctgactgtaagcacttgccctc

SEQ ID NO: 1700182 - DNA, 25 bp, Homo sapien
cttaagcatctcgaagcctgactgt

SEQ ID NO: 1700183 - DNA, 25 bp, Homo sapien
agagcaaggctgttaactccttcag

SEQ ID NO: 1700184 - DNA, 25 bp, Homo sapien
tataagatcacatgattcccttaag

SEQ ID NO: 1700185 - DNA, 25 bp, Homo sapien
taagatcacatgattcccttaagcc

SEQ ID NO: 1700186 - DNA, 25 bp, Homo sapien
cagagcaaggctgttaactccttca

SEQ ID NO: 1700187 - DNA, 25 bp, Homo sapien
cccagtttaatatggaaggcagaac

SEQ ID NO: 1700188 - DNA, 25 bp, Homo sapien
taaatgtacaatgaagcctcactgc

SEQ ID NO: 1700189 - DNA, 25 bp, Homo sapien
caaatgctggtaatctaatctctaa

SEQ ID NO: 1700190 - DNA, 25 bp, Homo sapien
catgaaaggccataggaacaaatac

SEQ ID NO: 1700191 - DNA, 25 bp, Homo sapien
tcatgcaaatggatgattgccctcc

SEQ ID NO: 1700192 - DNA, 25 bp, Homo sapien
tttcatgcaaatggatgattgccct

SEQ ID NO: 1700193 - DNA, 25 bp, Homo sapien
ctgtatttcatgcaaatggatgatt

SEQ ID NO: 1700194 - DNA, 25 bp, Homo sapien
tatttcatgcaaatggatgattgcc

SEQ ID NO: 1700195 - DNA, 25 bp, Homo sapien
gagagccttatgatcccgtggacag

SEQ ID NO: 1700196 - DNA, 25 bp, Homo sapien
ttttactaatccaaggagagcctta

SEQ ID NO: 1700197 - DNA, 25 bp, Homo sapien
gagcctccgaactttctaggaatat

SEQ ID NO: 1700198 - DNA, 25 bp, Homo sapien
gacagatcgttgagagtgagcctcc

SEQ ID NO: 1700199 - DNA, 25 bp, Homo sapien
gcagggttagggagaagctccagcc

SEQ ID NO: 1700200 - DNA, 25 bp, Homo sapien
gaagctccagccaagtgactattca

SEQ ID NO: 1700201 - DNA, 25 bp, Homo sapien
cagccaagtgactattcagatgtta

SEQ ID NO: 1700202 - DNA, 25 bp, Homo sapien
agggagaagctccagccaagtgact

SEQ ID NO: 1700203 - DNA, 25 bp, Homo sapien
ctccatggtcttcaccttttcacat

SEQ ID NO: 1700204 - DNA, 25 bp, Homo sapien
gtcacctccatggtcttcacctttt

SEQ ID NO: 1700205 - DNA, 25 bp, Homo sapien
tgaagtcacctccatggtcttcacc

SEQ ID NO: 1700206 - DNA, 25 bp, Homo sapien
cctccatggtcttcaccttttcaca

SEQ ID NO: 1700207 - DNA, 25 bp, Homo sapien
agtactgtcggggaaaattgctgaa

SEQ ID NO: 1700208 - DNA, 25 bp, Homo sapien
tgtcggggaaaattgctgaagttct

SEQ ID NO: 1700209 - DNA, 25 bp, Homo sapien
tactgtcggggaaaattgctgaagt

SEQ ID NO: 1700210 - DNA, 25 bp, Homo sapien
gcaaagtactgtcggggaaaattgc

SEQ ID NO: 1700211 - DNA, 25 bp, Homo sapien
tgagacataggataactgaaaccca

SEQ ID NO: 1700212 - DNA, 25 bp, Homo sapien
ctgaaacccatataaggtaggacct

SEQ ID NO: 1700213 - DNA, 25 bp, Homo sapien
gactcagggtgagactaaaagccag

SEQ ID NO: 1700214 - DNA, 25 bp, Homo sapien
gagtagataacgcttaaggcttcct

SEQ ID NO: 1700215 - DNA, 25 bp, Homo sapien
catttatctcactatgtagagaagt

SEQ ID NO: 1700216 - DNA, 25 bp, Homo sapien
ctccctctgacattatcatttatct

SEQ ID NO: 1700217 - DNA, 25 bp, Homo sapien
tctcactatgtagagaagtacaagg

SEQ ID NO: 1700218 - DNA, 25 bp, Homo sapien
tccctctgacattatcatttatctc

SEQ ID NO: 1700219 - DNA, 25 bp, Homo sapien
ctggcgggagaagccagagtgggga

SEQ ID NO: 1700220 - DNA, 25 bp, Homo sapien
tggcgggagaagccagagtggggag

SEQ ID NO: 1700221 - DNA, 25 bp, Homo sapien
gacgctcttacgatcctctgacagg

SEQ ID NO: 1700222 - DNA, 25 bp, Homo sapien
gagtcttgtctccacgaacttgacg

SEQ ID NO: 1700223 - DNA, 25 bp, Homo sapien
tgtagaaagacagtgtgccggcctc

SEQ ID NO: 1700224 - DNA, 25 bp, Homo sapien
taggaatatgcctacccgcttgggt

SEQ ID NO: 1700225 - DNA, 25 bp, Homo sapien
gcttaacaccagttccaggccagat

SEQ ID NO: 1700226 - DNA, 25 bp, Homo sapien
ggtagacaatcctctgggaaccagc

SEQ ID NO: 1700227 - DNA, 25 bp, Homo sapien
tgacccgtccttgtgcaacagaaaa

SEQ ID NO: 1700228 - DNA, 25 bp, Homo sapien
gacacgaagacgttccagcaggaca

SEQ ID NO: 1700229 - DNA, 25 bp, Homo sapien
gagagtctggacaaagtcctgttga

SEQ ID NO: 1700230 - DNA, 25 bp, Homo sapien
tgaaatgccctcagtaaactgcaga

SEQ ID NO: 1700231 - DNA, 25 bp, Homo sapien
ttctgtgaagattacccgaatagca

SEQ ID NO: 1700232 - DNA, 25 bp, Homo sapien
cacagtcaaggcacaaaggtaagag

SEQ ID NO: 1700233 - DNA, 25 bp, Homo sapien
caggaagttgagcctctggaaggcc

SEQ ID NO: 1700234 - DNA, 25 bp, Homo sapien
gtccccgtggggcccttgtcgcaga

SEQ ID NO: 1700235 - DNA, 25 bp, Homo sapien
agcagtcactctgggacgccgagca

SEQ ID NO: 1700236 - DNA, 25 bp, Homo sapien
gggagcagtcactctgggacgccga

SEQ ID NO: 1700237 - DNA, 25 bp, Homo sapien
cgtggggcccttgtcgcagactcac

SEQ ID NO: 1700238 - DNA, 25 bp, Homo sapien
gccgcaagacgagccgcttcgcaat

SEQ ID NO: 1700239 - DNA, 25 bp, Homo sapien
tctcagtgtagcagtaaaacctcgc

SEQ ID NO: 1700240 - DNA, 25 bp, Homo sapien
cgcaatggtcctctcagtgtagcag

SEQ ID NO: 1700241 - DNA, 25 bp, Homo sapien
taaaacctcgccagcgcctggttct

SEQ ID NO: 1700242 - DNA, 25 bp, Homo sapien
ctccctctcgcgttcctcccgcgtc

SEQ ID NO: 1700243 - DNA, 25 bp, Homo sapien
aagagcagcctcgacagagagtcct

SEQ ID NO: 1700244 - DNA, 25 bp, Homo sapien
gaagagcagcctcgacagagagtcc

SEQ ID NO: 1700245 - DNA, 25 bp, Homo sapien
gagcagcctcgacagagagtcctct

SEQ ID NO: 1700246 - DNA, 25 bp, Homo sapien
cagcctcgacagagagtcctcttca

SEQ ID NO: 1700247 - DNA, 25 bp, Homo sapien
cttccacctccgttggagcactcac

SEQ ID NO: 1700248 - DNA, 25 bp, Homo sapien
caaaccctagtttgtgcaagtggcg

SEQ ID NO: 1700249 - DNA, 25 bp, Homo sapien
caaacccgaagaaggaagactcctg

SEQ ID NO: 1700250 - DNA, 25 bp, Homo sapien
tacagtgagaaaggcgctgttggcc

SEQ ID NO: 1700251 - DNA, 25 bp, Homo sapien
tgatgggaatcgtcctccacaaagc

SEQ ID NO: 1700252 - DNA, 25 bp, Homo sapien
ttgatggtgtcaggcctcggcataa

SEQ ID NO: 1700253 - DNA, 25 bp, Homo sapien
taacaagacttcaagaactggcctg

SEQ ID NO: 1700254 - DNA, 25 bp, Homo sapien
tagaagtaacggtctcttgctgcca

SEQ ID NO: 1700255 - DNA, 25 bp, Homo sapien
tatcataaacttcgccaccactggc

SEQ ID NO: 1700256 - DNA, 25 bp, Homo sapien
atcattgaggaagcgttggctgcgc

SEQ ID NO: 1700257 - DNA, 25 bp, Homo sapien
aggtctgtacggtccagcgctgtcc

SEQ ID NO: 1700258 - DNA, 25 bp, Homo sapien
tgtctccccagagtaaatgcccggg

SEQ ID NO: 1700259 - DNA, 25 bp, Homo sapien
taggcaggtctgtacggtccagcgc

SEQ ID NO: 1700260 - DNA, 25 bp, Homo sapien
gactgtggtacttctcacaccaacc

SEQ ID NO: 1700261 - DNA, 25 bp, Homo sapien
tccattgtccctatcctctggggtg

SEQ ID NO: 1700262 - DNA, 25 bp, Homo sapien
caacccagaacctgtccatgtgtcc

SEQ ID NO: 1700263 - DNA, 25 bp, Homo sapien
tcttcactctacgttctccattgtc

SEQ ID NO: 1700264 - DNA, 25 bp, Homo sapien
tggcaagggttgtagtggtttggaa

SEQ ID NO: 1700265 - DNA, 25 bp, Homo sapien
ctgtgtttggcaagggttgtagtgg

SEQ ID NO: 1700266 - DNA, 25 bp, Homo sapien
agtgggctgtgtttggcaagggttg

SEQ ID NO: 1700267 - DNA, 25 bp, Homo sapien
aaatggagtgggctgtgtttggcaa

SEQ ID NO: 1700268 - DNA, 25 bp, Homo sapien
tcactggttactggaaccctgagtc

SEQ ID NO: 1700269 - DNA, 25 bp, Homo sapien
acaagtaaactttatttgggagatg

SEQ ID NO: 1700270 - DNA, 25 bp, Homo sapien
caagtaaactttatttgggagatgg

SEQ ID NO: 1700271 - DNA, 25 bp, Homo sapien
ttatttgggagatggggtgaatcca

SEQ ID NO: 1700272 - DNA, 25 bp, Homo sapien
actttatttgggagatggggtgaat

SEQ ID NO: 1700273 - DNA, 25 bp, Homo sapien
agcacctcagggtggtattacagtc

SEQ ID NO: 1700274 - DNA, 25 bp, Homo sapien
ccaagaacataggaggtgagagtga

SEQ ID NO: 1700275 - DNA, 25 bp, Homo sapien
aagttttccttaggctgcactgccc

SEQ ID NO: 1700276 - DNA, 25 bp, Homo sapien
tgcttttaccagagagttggcggtg

SEQ ID NO: 1700277 - DNA, 25 bp, Homo sapien
tgaagcaaaattacgtttgatgccc

SEQ ID NO: 1700278 - DNA, 25 bp, Homo sapien
gtttccataacaaccattgagcacc

SEQ ID NO: 1700279 - DNA, 25 bp, Homo sapien
ttccataacaaccattgagcaccac

SEQ ID NO: 1700280 - DNA, 25 bp, Homo sapien
acaggacaagtactgttgccccaag

SEQ ID NO: 1700281 - DNA, 25 bp, Homo sapien
acaagtactgttgccccaagtaagg

SEQ ID NO: 1700282 - DNA, 25 bp, Homo sapien
tctccgtgggatttggcatgactgc

SEQ ID NO: 1700283 - DNA, 25 bp, Homo sapien
taatatccaggccaacttagggacc

SEQ ID NO: 1700284 - DNA, 25 bp, Homo sapien
gcaaaggcgcagaaacggacagagt

SEQ ID NO: 1700285 - DNA, 25 bp, Homo sapien
tctacctgtttgcaagcgctcttgg

SEQ ID NO: 1700286 - DNA, 25 bp, Homo sapien
gataccatgatacatcagggagaaa

SEQ ID NO: 1700287 - DNA, 25 bp, Homo sapien
tggataccatgatacatcagggaga

SEQ ID NO: 1700288 - DNA, 25 bp, Homo sapien
ataccatgatacatcagggagaaaa

SEQ ID NO: 1700289 - DNA, 25 bp, Homo sapien
ctggataccatgatacatcagggag

SEQ ID NO: 1700290 - DNA, 25 bp, Homo sapien
gaaccatggacagttctacacgtcc

SEQ ID NO: 1700291 - DNA, 25 bp, Homo sapien
catttgtaaaggtggtgggacctgc

SEQ ID NO: 1700292 - DNA, 25 bp, Homo sapien
gctagtttgtctttcagaaccatgg

SEQ ID NO: 1700293 - DNA, 25 bp, Homo sapien
tacacgtcctgggatgtagggagcc

SEQ ID NO: 1700294 - DNA, 25 bp, Homo sapien
gtcatagtccctgcttgctgaaatt

SEQ ID NO: 1700295 - DNA, 25 bp, Homo sapien
cagtcatagtccctgcttgctgaaa

SEQ ID NO: 1700296 - DNA, 25 bp, Homo sapien
ccagtcatagtccctgcttgctgaa

SEQ ID NO: 1700297 - DNA, 25 bp, Homo sapien
tcatagtccctgcttgctgaaattt

SEQ ID NO: 1700298 - DNA, 25 bp, Homo sapien
tgtaacccatgaccaccttcagact

SEQ ID NO: 1700299 - DNA, 25 bp, Homo sapien
agtctttgaccctccaagaacaaca

SEQ ID NO: 1700300 - DNA, 25 bp, Homo sapien
gactcccagctaagtaagtctttga

SEQ ID NO: 1700301 - DNA, 25 bp, Homo sapien
ctccaagaacaacatctccttggct

SEQ ID NO: 1700302 - DNA, 25 bp, Homo sapien
catagagcaggaacgactgaccatc

SEQ ID NO: 1700303 - DNA, 25 bp, Homo sapien
gactatacaaatccatcctgggaca

SEQ ID NO: 1700304 - DNA, 25 bp, Homo sapien
tagagcaggaacgactgaccatcca

SEQ ID NO: 1700305 - DNA, 25 bp, Homo sapien
cgagaaaccctgactatacaaatcc

SEQ ID NO: 1700306 - DNA, 25 bp, Homo sapien
tgatattcatagctaaggtctgagc

SEQ ID NO: 1700307 - DNA, 25 bp, Homo sapien
gatgccctcctaggattcgagatgt

SEQ ID NO: 1700308 - DNA, 25 bp, Homo sapien
tgtagtttctgcagacggtctgcca

SEQ ID NO: 1700309 - DNA, 25 bp, Homo sapien
tctgccatcacagggtgaaagtgtc

SEQ ID NO: 1700310 - DNA, 25 bp, Homo sapien
catgtgggggtgactttgttctctg

SEQ ID NO: 1700311 - DNA, 25 bp, Homo sapien
ccaggccagagagatattctgggga

SEQ ID NO: 1700312 - DNA, 25 bp, Homo sapien
gggatagaagccagaagcccagcat

SEQ ID NO: 1700313 - DNA, 25 bp, Homo sapien
tgtgggggtgactttgttctctgag

SEQ ID NO: 1700314 - DNA, 25 bp, Homo sapien
tggggaatcttagtggccacccagg

SEQ ID NO: 1700315 - DNA, 25 bp, Homo sapien
aggacaccagggtaagtgctgtgat

SEQ ID NO: 1700316 - DNA, 25 bp, Homo sapien
caccagggtaagtgctgtgattcct

SEQ ID NO: 1700317 - DNA, 25 bp, Homo sapien
ttcttggggaatcttagtggccacc

SEQ ID NO: 1700318 - DNA, 25 bp, Homo sapien
cttggcctgaccctttctaggtcag

SEQ ID NO: 1700319 - DNA, 25 bp, Homo sapien
acacttgagggtcgccccaggctca

SEQ ID NO: 1700320 - DNA, 25 bp, Homo sapien
tggcctgaccctttctaggtcagaa

SEQ ID NO: 1700321 - DNA, 25 bp, Homo sapien
tctaggtcagaacacttgagggtcg

SEQ ID NO: 1700322 - DNA, 25 bp, Homo sapien
cggaacggttgccatagactctgaa

SEQ ID NO: 1700323 - DNA, 25 bp, Homo sapien
caacatacggaacggttgccataga

SEQ ID NO: 1700324 - DNA, 25 bp, Homo sapien
agcagcagccgcaacatacggaacg

SEQ ID NO: 1700325 - DNA, 25 bp, Homo sapien
gcagccgcaacatacggaacggttg

SEQ ID NO: 1700326 - DNA, 25 bp, Homo sapien
cccacgctgatgcacgctggtgagc

SEQ ID NO: 1700327 - DNA, 25 bp, Homo sapien
tgaggctgcaagaccttcctgccct

SEQ ID NO: 1700328 - DNA, 25 bp, Homo sapien
gaccttcctgccctgttcctagcag

SEQ ID NO: 1700329 - DNA, 25 bp, Homo sapien
accttcctgccctgttcctagcagg

SEQ ID NO: 1700330 - DNA, 25 bp, Homo sapien
attccagctgtatggtgccctggtg

SEQ ID NO: 1700331 - DNA, 25 bp, Homo sapien
tctgggctttgtaggctcatgtgct

SEQ ID NO: 1700332 - DNA, 25 bp, Homo sapien
ctgtcccaaccaggtgttgatctgg

SEQ ID NO: 1700333 - DNA, 25 bp, Homo sapien
aaattccagctgtatggtgccctgg

SEQ ID NO: 1700334 - DNA, 25 bp, Homo sapien
aggccagcccgcattcggagcggaa

SEQ ID NO: 1700335 - DNA, 25 bp, Homo sapien
gagcgcgcttggatcttgcagcagc

SEQ ID NO: 1700336 - DNA, 25 bp, Homo sapien
tgagaggacccggtctctcctccag

SEQ ID NO: 1700337 - DNA, 25 bp, Homo sapien
gaaggtttctcaggccgcgagcctc

SEQ ID NO: 1700338 - DNA, 25 bp, Homo sapien
gggactggatggaagccgcggactc

SEQ ID NO: 1700339 - DNA, 25 bp, Homo sapien
ctggtgaatatgtcgcaggaccggt

SEQ ID NO: 1700340 - DNA, 25 bp, Homo sapien
ggtggcttggcagtcttctcctgtc

SEQ ID NO: 1700341 - DNA, 25 bp, Homo sapien
tcgccgccggcagctggtgaatatg

SEQ ID NO: 1700342 - DNA, 25 bp, Homo sapien
cagcggagagtttctcaggccacaa

SEQ ID NO: 1700343 - DNA, 25 bp, Homo sapien
ggcgctgcccaagtcgggcagcctt

SEQ ID NO: 1700344 - DNA, 25 bp, Homo sapien
aacagctcggctttgaagaaggctc

SEQ ID NO: 1700345 - DNA, 25 bp, Homo sapien
gcccagattcgcagcggagagtttc

SEQ ID NO: 1700346 - DNA, 25 bp, Homo sapien
aagagcggactggacggaagcagcg

SEQ ID NO: 1700347 - DNA, 25 bp, Homo sapien
aaaagccgggagaccagatgtggac

SEQ ID NO: 1700348 - DNA, 25 bp, Homo sapien
gtcactgttgtgaaaagccgggaga

SEQ ID NO: 1700349 - DNA, 25 bp, Homo sapien
aagccgccagtgctgcgtcctcttg

SEQ ID NO: 1700350 - DNA, 25 bp, Homo sapien
caggccagacccgacacaaaagccc

SEQ ID NO: 1700351 - DNA, 25 bp, Homo sapien
agccaggccagacccgacacaaaag

SEQ ID NO: 1700352 - DNA, 25 bp, Homo sapien
agaaagccaggccagacccgacaca

SEQ ID NO: 1700353 - DNA, 25 bp, Homo sapien
aaagccaggccagacccgacacaaa

SEQ ID NO: 1700354 - DNA, 25 bp, Homo sapien
ggacccaggagtcttccaggaacgc

SEQ ID NO: 1700355 - DNA, 25 bp, Homo sapien
acttgtctttcgtcaggacccagga

SEQ ID NO: 1700356 - DNA, 25 bp, Homo sapien
atatccaggagctgcgagtcccgct

SEQ ID NO: 1700357 - DNA, 25 bp, Homo sapien
ggaacgctggcatatccaggagctg

SEQ ID NO: 1700358 - DNA, 25 bp, Homo sapien
tcttcattagtgagcgcggttacct

SEQ ID NO: 1700359 - DNA, 25 bp, Homo sapien
caagcgggtccacgagatcttcatt

SEQ ID NO: 1700360 - DNA, 25 bp, Homo sapien
tggttgttctccagtaggactaggt

SEQ ID NO: 1700361 - DNA, 25 bp, Homo sapien
tctctttatacctcgcaagcgggtc

SEQ ID NO: 1700362 - DNA, 25 bp, Homo sapien
ttccagcgtgagaatagctctgact

SEQ ID NO: 1700363 - DNA, 25 bp, Homo sapien
caacgaaggttttgtgtcctgaagc

SEQ ID NO: 1700364 - DNA, 25 bp, Homo sapien
aactcagtgagttctaatggcctgc

SEQ ID NO: 1700365 - DNA, 25 bp, Homo sapien
gaagctccacttgtgcgttcagcct

SEQ ID NO: 1700366 - DNA, 25 bp, Homo sapien
cggccaccaacagcgggcggaagaa

SEQ ID NO: 1700367 - DNA, 25 bp, Homo sapien
caacagcgggcggaagaacatggag

SEQ ID NO: 1700368 - DNA, 25 bp, Homo sapien
ggcggccaccaacagcgggcggaag

SEQ ID NO: 1700369 - DNA, 25 bp, Homo sapien
caccaacagcgggcggaagaacatg

SEQ ID NO: 1700370 - DNA, 25 bp, Homo sapien
tgctgctgtacttggagtccatggt

SEQ ID NO: 1700371 - DNA, 25 bp, Homo sapien
ttgccacatatcctttgggaacaga

SEQ ID NO: 1700372 - DNA, 25 bp, Homo sapien
ctttgccacatatcctttgggaaca

SEQ ID NO: 1700373 - DNA, 25 bp, Homo sapien
gccacatatcctttgggaacagaga

SEQ ID NO: 1700374 - DNA, 25 bp, Homo sapien
cacatatcctttgggaacagagaca

SEQ ID NO: 1700375 - DNA, 25 bp, Homo sapien
gtttcctaatcatttgtgaaggaac

SEQ ID NO: 1700376 - DNA, 25 bp, Homo sapien
tgttggccccactatgtaaacttcc

SEQ ID NO: 1700377 - DNA, 25 bp, Homo sapien
gccccactatgtaaacttcctatta

SEQ ID NO: 1700378 - DNA, 25 bp, Homo sapien
ttggccccactatgtaaacttccta

SEQ ID NO: 1700379 - DNA, 25 bp, Homo sapien
caatgttggccccactatgtaaact

SEQ ID NO: 1700380 - DNA, 25 bp, Homo sapien
ctggagagcttattcctctttgata

SEQ ID NO: 1700381 - DNA, 25 bp, Homo sapien
gctggagagcttattcctctttgat

SEQ ID NO: 1700382 - DNA, 25 bp, Homo sapien
tttacaagcactctagcagcttcca

SEQ ID NO: 1700383 - DNA, 25 bp, Homo sapien
cacatgcgcttgctttgcttcacta

SEQ ID NO: 1700384 - DNA, 25 bp, Homo sapien
gcagcttccaccaaatcatcacaag

SEQ ID NO: 1700385 - DNA, 25 bp, Homo sapien
acaaggaaattagctggagtctctc

SEQ ID NO: 1700386 - DNA, 25 bp, Homo sapien
cccaaggtggctacatacttcttct

SEQ ID NO: 1700387 - DNA, 25 bp, Homo sapien
tcaaatgatgtttcacgaaagtcgt

SEQ ID NO: 1700388 - DNA, 25 bp, Homo sapien
acacccaaggtggctacatacttct

SEQ ID NO: 1700389 - DNA, 25 bp, Homo sapien
tcaacacccaaggtggctacatact

SEQ ID NO: 1700390 - DNA, 25 bp, Homo sapien
catcaaacactatgatggtactctg

SEQ ID NO: 1700391 - DNA, 25 bp, Homo sapien
tacatcaaacactatgatggtactc

SEQ ID NO: 1700392 - DNA, 25 bp, Homo sapien
caaacactatgatggtactctgggc

SEQ ID NO: 1700393 - DNA, 25 bp, Homo sapien
cactatgatggtactctgggcttgg

SEQ ID NO: 1700394 - DNA, 25 bp, Homo sapien
gttgccactcaacacagtgggggtg

SEQ ID NO: 1700395 - DNA, 25 bp, Homo sapien
ttgccactcaacacagtgggggtgt

SEQ ID NO: 1700396 - DNA, 25 bp, Homo sapien
gccactcaacacagtgggggtgttt

SEQ ID NO: 1700397 - DNA, 25 bp, Homo sapien
cactcaacacagtgggggtgttttc

SEQ ID NO: 1700398 - DNA, 25 bp, Homo sapien
gcagaaatgtcgtagtactgaagat

SEQ ID NO: 1700399 - DNA, 25 bp, Homo sapien
aaatgtcgtagtactgaagattctt

SEQ ID NO: 1700400 - DNA, 25 bp, Homo sapien
cttttggcagaaatgtcgtagtact

SEQ ID NO: 1700401 - DNA, 25 bp, Homo sapien
gaaatgtcgtagtactgaagattct

SEQ ID NO: 1700402 - DNA, 25 bp, Homo sapien
gctcatactgtgctgccaaagctgg

SEQ ID NO: 1700403 - DNA, 25 bp, Homo sapien
tcgtgctcatactgtgctgccaaag

SEQ ID NO: 1700404 - DNA, 25 bp, Homo sapien
ctctaagtcgtgctcatactgtgct

SEQ ID NO: 1700405 - DNA, 25 bp, Homo sapien
taagtcgtgctcatactgtgctgcc

SEQ ID NO: 1700406 - DNA, 25 bp, Homo sapien
gaagcacatgttccgcttagctaga

SEQ ID NO: 1700407 - DNA, 25 bp, Homo sapien
gatgaagcacatgttccgcttagct

SEQ ID NO: 1700408 - DNA, 25 bp, Homo sapien
tgaagcacatgttccgcttagctag

SEQ ID NO: 1700409 - DNA, 25 bp, Homo sapien
acagatgaagcacatgttccgctta

SEQ ID NO: 1700410 - DNA, 25 bp, Homo sapien
gagtcctgagaacttcttgagtccg

SEQ ID NO: 1700411 - DNA, 25 bp, Homo sapien
tgagaacttcttgagtccggatggg

SEQ ID NO: 1700412 - DNA, 25 bp, Homo sapien
cctgagaacttcttgagtccggatg

SEQ ID NO: 1700413 - DNA, 25 bp, Homo sapien
agtcctgagaacttcttgagtccgg

SEQ ID NO: 1700414 - DNA, 25 bp, Homo sapien
ccagggcctccgagaggagtaaaag

SEQ ID NO: 1700415 - DNA, 25 bp, Homo sapien
gccagggcctccgagaggagtaaaa

SEQ ID NO: 1700416 - DNA, 25 bp, Homo sapien
cagggcctccgagaggagtaaaagg

SEQ ID NO: 1700417 - DNA, 25 bp, Homo sapien
gtttccatcccgaccccgcactcac

SEQ ID NO: 1700418 - DNA, 25 bp, Homo sapien
ccctctctactcccggtagaggccg

SEQ ID NO: 1700419 - DNA, 25 bp, Homo sapien
cgtttccatcccgaccccgcactca

SEQ ID NO: 1700420 - DNA, 25 bp, Homo sapien
ctctctactcccggtagaggccgtt

SEQ ID NO: 1700421 - DNA, 25 bp, Homo sapien
tggaaatacttcaaggagtgggagc

SEQ ID NO: 1700422 - DNA, 25 bp, Homo sapien
cgggacacggaagtgtggaaatact

SEQ ID NO: 1700423 - DNA, 25 bp, Homo sapien
gccgggacacggaagtgtggaaata

SEQ ID NO: 1700424 - DNA, 25 bp, Homo sapien
gtgtggaaatacttcaaggagtggg

SEQ ID NO: 1700425 - DNA, 25 bp, Homo sapien
aaaatctgtgcggtgtccctggcgc

SEQ ID NO: 1700426 - DNA, 25 bp, Homo sapien
ttgtcgaagcgcacgaactgggtgt

SEQ ID NO: 1700427 - DNA, 25 bp, Homo sapien
gtcgttgtcgaagcgcacgaactgg

SEQ ID NO: 1700428 - DNA, 25 bp, Homo sapien
cgcagcgtccgcaggttcactcgga

SEQ ID NO: 1700429 - DNA, 25 bp, Homo sapien
tgagactctccccggtctagggtct

SEQ ID NO: 1700430 - DNA, 25 bp, Homo sapien
cttagtcagtcccgcccaccaagcc

SEQ ID NO: 1700431 - DNA, 25 bp, Homo sapien
ggtgaatctgggacccgaagattcg

SEQ ID NO: 1700432 - DNA, 25 bp, Homo sapien
aatctgggacccgaagattcgaggg

SEQ ID NO: 1700433 - DNA, 25 bp, Homo sapien
aggaagcgcctgtcgggccccagct

SEQ ID NO: 1700434 - DNA, 25 bp, Homo sapien
ctcgcagccatgcatccactgcagg

SEQ ID NO: 1700435 - DNA, 25 bp, Homo sapien
gaggaagcgcctgtcgggccccagc

SEQ ID NO: 1700436 - DNA, 25 bp, Homo sapien
agctcgcagccatgcatccactgca

SEQ ID NO: 1700437 - DNA, 25 bp, Homo sapien
cagggtgagataatccttgccgtcg

SEQ ID NO: 1700438 - DNA, 25 bp, Homo sapien
attcagggtgagataatccttgccg

SEQ ID NO: 1700439 - DNA, 25 bp, Homo sapien
cctcattcagggtgagataatcctt

SEQ ID NO: 1700440 - DNA, 25 bp, Homo sapien
cggagatctgagccgccgtgtccac

SEQ ID NO: 1700441 - DNA, 25 bp, Homo sapien
ctggtgctccgcctcagaggcatca

SEQ ID NO: 1700442 - DNA, 25 bp, Homo sapien
cttccaggtaggctctctggtgctc

SEQ ID NO: 1700443 - DNA, 25 bp, Homo sapien
ggtgctccgcctcagaggcatcatt

SEQ ID NO: 1700444 - DNA, 25 bp, Homo sapien
cactccacgcatgtgtcttccaggt

SEQ ID NO: 1700445 - DNA, 25 bp, Homo sapien
ggtggtgagtcacgtgtgtctttgg

SEQ ID NO: 1700446 - DNA, 25 bp, Homo sapien
ctcatggtcagagatggggtggtga

SEQ ID NO: 1700447 - DNA, 25 bp, Homo sapien
ggggtggtgagtcacgtgtgtcttt

SEQ ID NO: 1700448 - DNA, 25 bp, Homo sapien
agatggggtggtgagtcacgtgtgt

SEQ ID NO: 1700449 - DNA, 25 bp, Homo sapien
gtgatctccgcagggtagaagccca

SEQ ID NO: 1700450 - DNA, 25 bp, Homo sapien
ctgcacatggcacgtgtatctctgc

SEQ ID NO: 1700451 - DNA, 25 bp, Homo sapien
ctctccagaaggcaccaccacagct

SEQ ID NO: 1700452 - DNA, 25 bp, Homo sapien
acatggcacgtgtatctctgctcct

SEQ ID NO: 1700453 - DNA, 25 bp, Homo sapien
tggcacgtgtatctctgctcctctc

SEQ ID NO: 1700454 - DNA, 25 bp, Homo sapien
tgacgggctcgggtagcccctcatg

SEQ ID NO: 1700455 - DNA, 25 bp, Homo sapien
tccatctcagggtgacgggctcggg

SEQ ID NO: 1700456 - DNA, 25 bp, Homo sapien
atctcagggtgacgggctcgggtag

SEQ ID NO: 1700457 - DNA, 25 bp, Homo sapien
gtgacgggctcgggtagcccctcat

SEQ ID NO: 1700458 - DNA, 25 bp, Homo sapien
ccacagatccaaggagaaccaggcc

SEQ ID NO: 1700459 - DNA, 25 bp, Homo sapien
tcttcttcctccatatcacagcagc

SEQ ID NO: 1700460 - DNA, 25 bp, Homo sapien
ggccagcaatgatgcccacgatggg

SEQ ID NO: 1700461 - DNA, 25 bp, Homo sapien
agcagcaaccacagctccagagacc

SEQ ID NO: 1700462 - DNA, 25 bp, Homo sapien
ccaggctgggtaggctcgtgtgtgt

SEQ ID NO: 1700463 - DNA, 25 bp, Homo sapien
gacacacttttacctagggcttgaa

SEQ ID NO: 1700464 - DNA, 25 bp, Homo sapien
taacgaggcaggacacacttttacc

SEQ ID NO: 1700465 - DNA, 25 bp, Homo sapien
ccagtaacgaggcaggacacacttt

SEQ ID NO: 1700466 - DNA, 25 bp, Homo sapien
caggatcaggaaacgtgaagaaagc

SEQ ID NO: 1700467 - DNA, 25 bp, Homo sapien
gaacctcctagttttggatcccaga

SEQ ID NO: 1700468 - DNA, 25 bp, Homo sapien
tttcctgaactgtgactgcagaccc

SEQ ID NO: 1700469 - DNA, 25 bp, Homo sapien
gccataaggtcctagaggaacctcc

SEQ ID NO: 1700470 - DNA, 25 bp, Homo sapien
cagccttagagtagctccctccttt

SEQ ID NO: 1700471 - DNA, 25 bp, Homo sapien
ttagagtagctccctccttttccac

SEQ ID NO: 1700472 - DNA, 25 bp, Homo sapien
actcagccttagagtagctccctcc

SEQ ID NO: 1700473 - DNA, 25 bp, Homo sapien
gccttagagtagctccctccttttc

SEQ ID NO: 1700474 - DNA, 25 bp, Homo sapien
gtgcaggaggaattatagggtgggc

SEQ ID NO: 1700475 - DNA, 25 bp, Homo sapien
gcaggaggaattatagggtgggcga

SEQ ID NO: 1700476 - DNA, 25 bp, Homo sapien
gtggtgcaggaggaattatagggtg

SEQ ID NO: 1700477 - DNA, 25 bp, Homo sapien
tggtgcaggaggaattatagggtgg

SEQ ID NO: 1700478 - DNA, 25 bp, Homo sapien
ttacaagctgtgagactcagacccc

SEQ ID NO: 1700479 - DNA, 25 bp, Homo sapien
caagctgtgagactcagacccctgg

SEQ ID NO: 1700480 - DNA, 25 bp, Homo sapien
tacaagctgtgagactcagacccct

SEQ ID NO: 1700481 - DNA, 25 bp, Homo sapien
agctgtgagactcagacccctgggc

SEQ ID NO: 1700482 - DNA, 25 bp, Homo sapien
aattcaggtcagtcacggtaagtga

SEQ ID NO: 1700483 - DNA, 25 bp, Homo sapien
gaacaaattcaggtcagtcacggta

SEQ ID NO: 1700484 - DNA, 25 bp, Homo sapien
atgaacaaattcaggtcagtcacgg

SEQ ID NO: 1700485 - DNA, 25 bp, Homo sapien
aggtcagtcacggtaagtgatgaca

SEQ ID NO: 1700486 - DNA, 25 bp, Homo sapien
ttcagaggcccttgcaaaaagagaa

SEQ ID NO: 1700487 - DNA, 25 bp, Homo sapien
aggtggactgtttctctacctcctc

SEQ ID NO: 1700488 - DNA, 25 bp, Homo sapien
agagaacagggaaggaacacaggtc

SEQ ID NO: 1700489 - DNA, 25 bp, Homo sapien
tgtgctaacagggacacagacagat

SEQ ID NO: 1700490 - DNA, 25 bp, Homo sapien
aggcccgtgcctctgcgcccagcta

SEQ ID NO: 1700491 - DNA, 25 bp, Homo sapien
ctacaggcccgtgcctctgcgccca

SEQ ID NO: 1700492 - DNA, 25 bp, Homo sapien
ggcccgtgcctctgcgcccagctaa

SEQ ID NO: 1700493 - DNA, 25 bp, Homo sapien
gggactacaggcccgtgcctctgcg

SEQ ID NO: 1700494 - DNA, 25 bp, Homo sapien
gcacagccttacgatccaatcacat

SEQ ID NO: 1700495 - DNA, 25 bp, Homo sapien
tagggattaagtctcaacatgagtg

SEQ ID NO: 1700496 - DNA, 25 bp, Homo sapien
tattcaactccaaggtatatggtca

SEQ ID NO: 1700497 - DNA, 25 bp, Homo sapien
taaatttgctagagatgtgctgtgg

SEQ ID NO: 1700498 - DNA, 25 bp, Homo sapien
ctgggcatgctagctcagttctctt

SEQ ID NO: 1700499 - DNA, 25 bp, Homo sapien
tgggctgggcatgctagctcagttc

SEQ ID NO: 1700500 - DNA, 25 bp, Homo sapien
ctggatccactagacactagacatt

SEQ ID NO: 1700501 - DNA, 25 bp, Homo sapien
cactagacactagacatttccctgg

SEQ ID NO: 1700502 - DNA, 25 bp, Homo sapien
agacactagacatttccctggtggg

SEQ ID NO: 1700503 - DNA, 25 bp, Homo sapien
tgcacctcacatttccacttagcat

SEQ ID NO: 1700504 - DNA, 25 bp, Homo sapien
tacgtggctgctcgaatgggttgca

SEQ ID NO: 1700505 - DNA, 25 bp, Homo sapien
tttgctgggtgcagcctacgtggct

SEQ ID NO: 1700506 - DNA, 25 bp, Homo sapien
aggcctcaggtagccccgtgcctgt

SEQ ID NO: 1700507 - DNA, 25 bp, Homo sapien
gctgccactgactccacagttctgg

SEQ ID NO: 1700508 - DNA, 25 bp, Homo sapien
tgacttcgtgtgctgcctcacggac

SEQ ID NO: 1700509 - DNA, 25 bp, Homo sapien
gacttcgtgtgctgcctcacggaca

SEQ ID NO: 1700510 - DNA, 25 bp, Homo sapien
ttgacttcgtgtgctgcctcacgga

SEQ ID NO: 1700511 - DNA, 25 bp, Homo sapien
cttcgtgtgctgcctcacggacaca

SEQ ID NO: 1700512 - DNA, 25 bp, Homo sapien
aagtttacctcagatcagcctggga

SEQ ID NO: 1700513 - DNA, 25 bp, Homo sapien
caaagtttacctcagatcagcctgg

SEQ ID NO: 1700514 - DNA, 25 bp, Homo sapien
ttacctcagatcagcctgggaaggt

SEQ ID NO: 1700515 - DNA, 25 bp, Homo sapien
gtttacctcagatcagcctgggaag

SEQ ID NO: 1700516 - DNA, 25 bp, Homo sapien
ctccagaacagcagtaggcagggcc

SEQ ID NO: 1700517 - DNA, 25 bp, Homo sapien
gaaagcgaggcggtgcatcctccag

SEQ ID NO: 1700518 - DNA, 25 bp, Homo sapien
aaaggaaagcgaggcggtgcatcct

SEQ ID NO: 1700519 - DNA, 25 bp, Homo sapien
ggcggtgcatcctccagaacagcag

SEQ ID NO: 1700520 - DNA, 25 bp, Homo sapien
cagagccatccttgccggcttcttt

SEQ ID NO: 1700521 - DNA, 25 bp, Homo sapien
agagccatccttgccggcttctttt

SEQ ID NO: 1700522 - DNA, 25 bp, Homo sapien
gccatccttgccggcttcttttgtc

SEQ ID NO: 1700523 - DNA, 25 bp, Homo sapien
atccttgccggcttcttttgtcttg

SEQ ID NO: 1700524 - DNA, 25 bp, Homo sapien
gagccgcagaccagataaagatacg

SEQ ID NO: 1700525 - DNA, 25 bp, Homo sapien
tagtctcctatccaggaaacaggga

SEQ ID NO: 1700526 - DNA, 25 bp, Homo sapien
agaaggtgcctcctgtgatacaaga

SEQ ID NO: 1700527 - DNA, 25 bp, Homo sapien
gatacaagatacagacgtagtctcc

SEQ ID NO: 1700528 - DNA, 25 bp, Homo sapien
gttcataaaagcagcgtagacgcaa

SEQ ID NO: 1700529 - DNA, 25 bp, Homo sapien
tcataaaggtggtgcacccgaagtt

SEQ ID NO: 1700530 - DNA, 25 bp, Homo sapien
gcagcagtaacctctacgcacgtga

SEQ ID NO: 1700531 - DNA, 25 bp, Homo sapien
cagcgtagacgcaaagagtgaggag

SEQ ID NO: 1700532 - DNA, 25 bp, Homo sapien
tggcctttgctcaggaatgactaag

SEQ ID NO: 1700533 - DNA, 25 bp, Homo sapien
gggtaattgtttatctaagcctgca

SEQ ID NO: 1700534 - DNA, 25 bp, Homo sapien
ctctgaaacaatggcgggtaattgt

SEQ ID NO: 1700535 - DNA, 25 bp, Homo sapien
tgcaagggtggtttcggtgttttca

SEQ ID NO: 1700536 - DNA, 25 bp, Homo sapien
gctggttcgcactgatacggctcaa

SEQ ID NO: 1700537 - DNA, 25 bp, Homo sapien
taattaagagatcgcaacagccgtt

SEQ ID NO: 1700538 - DNA, 25 bp, Homo sapien
cagccgttggtaaatggacttcccg

SEQ ID NO: 1700539 - DNA, 25 bp, Homo sapien
tctgtcacaggagggaacagcgctg

SEQ ID NO: 1700540 - DNA, 25 bp, Homo sapien
catagctggctagtctcttgatgga

SEQ ID NO: 1700541 - DNA, 25 bp, Homo sapien
gaaatacgcaccctcttgtctgggt

SEQ ID NO: 1700542 - DNA, 25 bp, Homo sapien
gaatacttgaccatggaggtctggg

SEQ ID NO: 1700543 - DNA, 25 bp, Homo sapien
tgcagatgaggatgaatagggcccc

SEQ ID NO: 1700544 - DNA, 25 bp, Homo sapien
cctcaggggtttcatcaggggtatt

SEQ ID NO: 1700545 - DNA, 25 bp, Homo sapien
gggccatacccgatactttcagacc

SEQ ID NO: 1700546 - DNA, 25 bp, Homo sapien
tgcctaggcagttgcaggtatgacg

SEQ ID NO: 1700547 - DNA, 25 bp, Homo sapien
ttctggcagggatctaccctatcgc

SEQ ID NO: 1700548 - DNA, 25 bp, Homo sapien
gatccaggagccctacactgctgtg

SEQ ID NO: 1700549 - DNA, 25 bp, Homo sapien
gccgccgcggcggtaattctgtcgg

SEQ ID NO: 1700550 - DNA, 25 bp, Homo sapien
ccaggtgactggtccgggccatgcc

SEQ ID NO: 1700551 - DNA, 25 bp, Homo sapien
gcagtcagttgaggcggcgggagct

SEQ ID NO: 1700552 - DNA, 25 bp, Homo sapien
gcccgctgacgtcacctgctagccc

SEQ ID NO: 1700553 - DNA, 25 bp, Homo sapien
tccaggtgagtggtaggttctcccg

SEQ ID NO: 1700554 - DNA, 25 bp, Homo sapien
tgtagtatagcctcagcgtgtccac

SEQ ID NO: 1700555 - DNA, 25 bp, Homo sapien
cagtctcggctttccactaaggtca

SEQ ID NO: 1700556 - DNA, 25 bp, Homo sapien
tccgtgacggagttagcctggtcct

SEQ ID NO: 1700557 - DNA, 25 bp, Homo sapien
agatcgccacatccggtcctcggtt

SEQ ID NO: 1700558 - DNA, 25 bp, Homo sapien
cgcccgcttttgcacttatgatctg

SEQ ID NO: 1700559 - DNA, 25 bp, Homo sapien
tatcatcgttcccacaaggaatttg

SEQ ID NO: 1700560 - DNA, 25 bp, Homo sapien
ttgggtcccaacaggtcggcaccca

SEQ ID NO: 1700561 - DNA, 25 bp, Homo sapien
tgctgcgtttctataaatgctttga

SEQ ID NO: 1700562 - DNA, 25 bp, Homo sapien
ccagctcctcagagtgtgtcacaga

SEQ ID NO: 1700563 - DNA, 25 bp, Homo sapien
acagagtcaacaggctctcgggcca

SEQ ID NO: 1700564 - DNA, 25 bp, Homo sapien
acaccttccctttgctgcgtttcta

SEQ ID NO: 1700565 - DNA, 25 bp, Homo sapien
cagcaatgctgaggctcccgccatt

SEQ ID NO: 1700566 - DNA, 25 bp, Homo sapien
tcgtgtctgcggcaatggctgcagc

SEQ ID NO: 1700567 - DNA, 25 bp, Homo sapien
cggagaacatctgcggcggccgcat

SEQ ID NO: 1700568 - DNA, 25 bp, Homo sapien
gcttctttcgtttcggcatcgtgtc

SEQ ID NO: 1700569 - DNA, 25 bp, Homo sapien
aggcatgtgcacatccctcccagac

SEQ ID NO: 1700570 - DNA, 25 bp, Homo sapien
gccccttgcccggacgggcttgaca

SEQ ID NO: 1700571 - DNA, 25 bp, Homo sapien
cccggacgggcttgacaggcatgtg

SEQ ID NO: 1700572 - DNA, 25 bp, Homo sapien
caggcatgtgcacatccctcccaga

SEQ ID NO: 1700573 - DNA, 25 bp, Homo sapien
gatggttccagtaagagaactcctg

SEQ ID NO: 1700574 - DNA, 25 bp, Homo sapien
gtcgctatccaaaacaacctaagtg

SEQ ID NO: 1700575 - DNA, 25 bp, Homo sapien
ctgcggctgcgcaaaagagctcttt

SEQ ID NO: 1700576 - DNA, 25 bp, Homo sapien
actgctggccagaggactagtttag

SEQ ID NO: 1700577 - DNA, 25 bp, Homo sapien
aaaatatggtcatcagaatggatta

SEQ ID NO: 1700578 - DNA, 25 bp, Homo sapien
tcaccccatctatctgccctttttt

SEQ ID NO: 1700579 - DNA, 25 bp, Homo sapien
aatatggtcatcagaatggattaaa

SEQ ID NO: 1700580 - DNA, 25 bp, Homo sapien
gcagtcttgggagttctcaccccat

SEQ ID NO: 1700581 - DNA, 25 bp, Homo sapien
gccatggggggagggcccagaaggc

SEQ ID NO: 1700582 - DNA, 25 bp, Homo sapien
tgacttagggtcgccaggttttcca

SEQ ID NO: 1700583 - DNA, 25 bp, Homo sapien
ggagggcccagaaggctgggtggtc

SEQ ID NO: 1700584 - DNA, 25 bp, Homo sapien
tagggtcgccaggttttccattggc

SEQ ID NO: 1700585 - DNA, 25 bp, Homo sapien
catgcccagcttacaaatcttgata

SEQ ID NO: 1700586 - DNA, 25 bp, Homo sapien
gtaagccctcccacttcaagattgt

SEQ ID NO: 1700587 - DNA, 25 bp, Homo sapien
gacctaatacaaggatcagggcccc

SEQ ID NO: 1700588 - DNA, 25 bp, Homo sapien
gattgtcttgatagtcgccttgata

SEQ ID NO: 1700589 - DNA, 25 bp, Homo sapien
ccagcagcagtacacaagagttcta

SEQ ID NO: 1700590 - DNA, 25 bp, Homo sapien
gacctttagttcatttagatctcca

SEQ ID NO: 1700591 - DNA, 25 bp, Homo sapien
agtacttgttcatttagacctttag

SEQ ID NO: 1700592 - DNA, 25 bp, Homo sapien
tctattgtatggcttcctgttaatt

SEQ ID NO: 1700593 - DNA, 25 bp, Homo sapien
accagcagttgtcctatagccttga

SEQ ID NO: 1700594 - DNA, 25 bp, Homo sapien
tgtcctatagccttgacaacacttg

SEQ ID NO: 1700595 - DNA, 25 bp, Homo sapien
tatttatttaatgagagattgggtc

SEQ ID NO: 1700596 - DNA, 25 bp, Homo sapien
tatagccttgacaacacttggaatt

SEQ ID NO: 1700597 - DNA, 25 bp, Homo sapien
cagtgtagtcccattgcatgcatac

SEQ ID NO: 1700598 - DNA, 25 bp, Homo sapien
tcgttgcagtgtagtcccattgcat

SEQ ID NO: 1700599 - DNA, 25 bp, Homo sapien
cattcattttcgttgcagtgtagtc

SEQ ID NO: 1700600 - DNA, 25 bp, Homo sapien
tcattttcgttgcagtgtagtccca

SEQ ID NO: 1700601 - DNA, 25 bp, Homo sapien
agtctgcattcttttatgtctggct

SEQ ID NO: 1700602 - DNA, 25 bp, Homo sapien
cattcttttatgtctggctcctttc

SEQ ID NO: 1700603 - DNA, 25 bp, Homo sapien
ttcttttatgtctggctcctttcgc

SEQ ID NO: 1700604 - DNA, 25 bp, Homo sapien
tgcattcttttatgtctggctcctt

SEQ ID NO: 1700605 - DNA, 25 bp, Homo sapien
tgtttttgaacttcacaaaaatgga

SEQ ID NO: 1700606 - DNA, 25 bp, Homo sapien
ttttgaacttcacaaaaatggaatc

SEQ ID NO: 1700607 - DNA, 25 bp, Homo sapien
tttgaacttcacaaaaatggaatca

SEQ ID NO: 1700608 - DNA, 25 bp, Homo sapien
ctgtttttgaacttcacaaaaatgg

SEQ ID NO: 1700609 - DNA, 25 bp, Homo sapien
gacacacttgagtttccaccaccag

SEQ ID NO: 1700610 - DNA, 25 bp, Homo sapien
ccagttttaagtgcacaacccagtt

SEQ ID NO: 1700611 - DNA, 25 bp, Homo sapien
cactatcctgacaccataggttagt

SEQ ID NO: 1700612 - DNA, 25 bp, Homo sapien
gagataaagccttattagcacctca

SEQ ID NO: 1700613 - DNA, 25 bp, Homo sapien
caccaaccacgaccatatgggctag

SEQ ID NO: 1700614 - DNA, 25 bp, Homo sapien
aagccctctccgaattgggcctcta

SEQ ID NO: 1700615 - DNA, 25 bp, Homo sapien
ccacgaccatatgggctagacctgg

SEQ ID NO: 1700616 - DNA, 25 bp, Homo sapien
attgggcctctaccccaaggaggag

SEQ ID NO: 1700617 - DNA, 25 bp, Homo sapien
ccttgggcgggcaggtattcttgat

SEQ ID NO: 1700618 - DNA, 25 bp, Homo sapien
ttgggcgggcaggtattcttgataa

SEQ ID NO: 1700619 - DNA, 25 bp, Homo sapien
gaccagcttttgagccttcgagggt

SEQ ID NO: 1700620 - DNA, 25 bp, Homo sapien
cagcttttgagccttcgagggtttc

SEQ ID NO: 1700621 - DNA, 25 bp, Homo sapien
catatcgacagtggccctttttggc

SEQ ID NO: 1700622 - DNA, 25 bp, Homo sapien
ggcacagaggtcctcatatcgacag

SEQ ID NO: 1700623 - DNA, 25 bp, Homo sapien
gtccattgacgcctgggtggtagaa

SEQ ID NO: 1700624 - DNA, 25 bp, Homo sapien
ctttttggcaaaatgtcggcagaca

SEQ ID NO: 1700625 - DNA, 25 bp, Homo sapien
gatgggtcccaaaggcgagtctcta

SEQ ID NO: 1700626 - DNA, 25 bp, Homo sapien
aatggtaggaaaccgctccagggct

SEQ ID NO: 1700627 - DNA, 25 bp, Homo sapien
tgatcatagatagaccatagcggtg

SEQ ID NO: 1700628 - DNA, 25 bp, Homo sapien
aataaatggccgctaggtcacagag

SEQ ID NO: 1700629 - DNA, 25 bp, Homo sapien
gagcttgtctcagttgcatctccta

SEQ ID NO: 1700630 - DNA, 25 bp, Homo sapien
ttttgaaaagccagcctaagccatg

SEQ ID NO: 1700631 - DNA, 25 bp, Homo sapien
tcatggctcacttgtactactgaag

SEQ ID NO: 1700632 - DNA, 25 bp, Homo sapien
tacataagccagaactacctggaga

SEQ ID NO: 1700633 - DNA, 25 bp, Homo sapien
ggaactggcctgacaataactggca

SEQ ID NO: 1700634 - DNA, 25 bp, Homo sapien
ccttttagggagataacctctgtag

SEQ ID NO: 1700635 - DNA, 25 bp, Homo sapien
cccggccaccatgtcttgagtagct

SEQ ID NO: 1700636 - DNA, 25 bp, Homo sapien
tgttgcccatagttaggccatggta

SEQ ID NO: 1700637 - DNA, 25 bp, Homo sapien
gcttttgttgccaccattgtctgaa

SEQ ID NO: 1700638 - DNA, 25 bp, Homo sapien
taccacttaatatgggagcttgagc

SEQ ID NO: 1700639 - DNA, 25 bp, Homo sapien
taggtttcctttgcatctaatgggc

SEQ ID NO: 1700640 - DNA, 25 bp, Homo sapien
ttgatagacttggtcgctccctccc

SEQ ID NO: 1700641 - DNA, 25 bp, Homo sapien
cggcgaagctcgcacgtgcgcagcc

SEQ ID NO: 1700642 - DNA, 25 bp, Homo sapien
tggcggcgaagctcgcacgtgcgca

SEQ ID NO: 1700643 - DNA, 25 bp, Homo sapien
ggcggcgaagctcgcacgtgcgcag

SEQ ID NO: 1700644 - DNA, 25 bp, Homo sapien
gcgaagctcgcacgtgcgcagcccg

SEQ ID NO: 1700645 - DNA, 25 bp, Homo sapien
gaagctcgcacgtgcgcagcccggg

SEQ ID NO: 1700646 - DNA, 25 bp, Homo sapien
atggcggcgaagctcgcacgtgcgc

SEQ ID NO: 1700647 - DNA, 25 bp, Homo sapien
ccccgggctgcgcacgtgcgagctt

SEQ ID NO: 1700648 - DNA, 25 bp, Homo sapien
gcgcacgtgcgagcttcgccgccat

SEQ ID NO: 1700649 - DNA, 25 bp, Homo sapien
ggctgcgcacgtgcgagcttcgccg

SEQ ID NO: 1700650 - DNA, 25 bp, Homo sapien
tgcgcacgtgcgagcttcgccgcca

SEQ ID NO: 1700651 - DNA, 25 bp, Homo sapien
ccgggctgcgcacgtgcgagcttcg

SEQ ID NO: 1700652 - DNA, 25 bp, Homo sapien
gggctgcgcacgtgcgagcttcgcc

SEQ ID NO: 1700653 - DNA, 25 bp, Homo sapien
gccacagtagctgtaactgccaccg

SEQ ID NO: 1700654 - DNA, 25 bp, Homo sapien
cacagtagctgtaactgccaccgcg

SEQ ID NO: 1700655 - DNA, 25 bp, Homo sapien
gggcgccgccacagtagctgtaact

SEQ ID NO: 1700656 - DNA, 25 bp, Homo sapien
ccgccggaagcggaaatagcaccgg

SEQ ID NO: 1700657 - DNA, 25 bp, Homo sapien
gccgccacagtagctgtaactgcca

SEQ ID NO: 1700658 - DNA, 25 bp, Homo sapien
aagcggaaatagcaccgggcgccgc

SEQ ID NO: 1700659 - DNA, 25 bp, Homo sapien
ccggtgctatttccgcttccggcgg

SEQ ID NO: 1700660 - DNA, 25 bp, Homo sapien
tggcggcgcccggtgctatttccgc

SEQ ID NO: 1700661 - DNA, 25 bp, Homo sapien
cgcggtggcagttacagctactgtg

SEQ ID NO: 1700662 - DNA, 25 bp, Homo sapien
cggtggcagttacagctactgtggc

SEQ ID NO: 1700663 - DNA, 25 bp, Homo sapien
tggcagttacagctactgtggcggc

SEQ ID NO: 1700664 - DNA, 25 bp, Homo sapien
agttacagctactgtggcggcgccc

SEQ ID NO: 1700665 - DNA, 25 bp, Homo sapien
cccgagtggatcggggacggagaga

SEQ ID NO: 1700666 - DNA, 25 bp, Homo sapien
gccggagcccgagtggatcggggac

SEQ ID NO: 1700667 - DNA, 25 bp, Homo sapien
ggagcccgagtggatcggggacgga

SEQ ID NO: 1700668 - DNA, 25 bp, Homo sapien
ccggagcccgagtggatcggggacg

SEQ ID NO: 1700669 - DNA, 25 bp, Homo sapien
gcccgagtggatcggggacggagag

SEQ ID NO: 1700670 - DNA, 25 bp, Homo sapien
agcccgagtggatcggggacggaga

SEQ ID NO: 1700671 - DNA, 25 bp, Homo sapien
ctctccgtccccgatccactcgggc

SEQ ID NO: 1700672 - DNA, 25 bp, Homo sapien
tccgtccccgatccactcgggctcc

SEQ ID NO: 1700673 - DNA, 25 bp, Homo sapien
cgtccccgatccactcgggctccgg

SEQ ID NO: 1700674 - DNA, 25 bp, Homo sapien
gtccccgatccactcgggctccggc

SEQ ID NO: 1700675 - DNA, 25 bp, Homo sapien
tctctccgtccccgatccactcggg

SEQ ID NO: 1700676 - DNA, 25 bp, Homo sapien
tctccgtccccgatccactcgggct

SEQ ID NO: 1700677 - DNA, 25 bp, Homo sapien
aaggcgcccaagcagcagccgccgg

SEQ ID NO: 1700678 - DNA, 25 bp, Homo sapien
atgccgaaggcgcccaagcagcagc

SEQ ID NO: 1700679 - DNA, 25 bp, Homo sapien
agcagccgccggagcccgagtggat

SEQ ID NO: 1700680 - DNA, 25 bp, Homo sapien
ggacggagagagcacgagcccatca

SEQ ID NO: 1700681 - DNA, 25 bp, Homo sapien
gccgccggagcccgagtggatcggg

SEQ ID NO: 1700682 - DNA, 25 bp, Homo sapien
gacggagagagcacgagcccatcag

SEQ ID NO: 1700683 - DNA, 25 bp, Homo sapien
tgatgggctcgtgctctctccgtcc

SEQ ID NO: 1700684 - DNA, 25 bp, Homo sapien
ctgatgggctcgtgctctctccgtc

SEQ ID NO: 1700685 - DNA, 25 bp, Homo sapien
atccactcgggctccggcggctgct

SEQ ID NO: 1700686 - DNA, 25 bp, Homo sapien
gctgctgcttgggcgccttcggcat

SEQ ID NO: 1700687 - DNA, 25 bp, Homo sapien
tccggcggctgctgcttgggcgcct

SEQ ID NO: 1700688 - DNA, 25 bp, Homo sapien
tctccgtccccgatccactcgggct

SEQ ID NO: 1700689 - DNA, 25 bp, Homo sapien
gtggtgaagaaagggaagaaggaca

SEQ ID NO: 1700690 - DNA, 25 bp, Homo sapien
ggaagaaggacaagaagatcaaaaa

SEQ ID NO: 1700691 - DNA, 25 bp, Homo sapien
gtgaagaaagggaagaaggacaaga

SEQ ID NO: 1700692 - DNA, 25 bp, Homo sapien
tggtgaagaaagggaagaaggacaa

SEQ ID NO: 1700693 - DNA, 25 bp, Homo sapien
caaagtggtgaagaaagggaagaag

SEQ ID NO: 1700694 - DNA, 25 bp, Homo sapien
gaagaaggacaagaagatcaaaaaa

SEQ ID NO: 1700695 - DNA, 25 bp, Homo sapien
tgtccttcttccctttcttcaccac

SEQ ID NO: 1700696 - DNA, 25 bp, Homo sapien
gatcttcttgtccttcttccctttc

SEQ ID NO: 1700697 - DNA, 25 bp, Homo sapien
ttgatcttcttgtccttcttccctt

SEQ ID NO: 1700698 - DNA, 25 bp, Homo sapien
cttcttccctttcttcaccactttg

SEQ ID NO: 1700699 - DNA, 25 bp, Homo sapien
ttttttgatcttcttgtccttcttc

SEQ ID NO: 1700700 - DNA, 25 bp, Homo sapien
tttttgatcttcttgtccttcttcc

SEQ ID NO: 1700701 - DNA, 25 bp, Homo sapien
gaagaagagaaagtgctcaaggaga

SEQ ID NO: 1700702 - DNA, 25 bp, Homo sapien
gaagagctggcagtagaagataaac

SEQ ID NO: 1700703 - DNA, 25 bp, Homo sapien
gctggcagtagaagataaacaggct

SEQ ID NO: 1700704 - DNA, 25 bp, Homo sapien
aaagtgctcaaggagaaggagcagc

SEQ ID NO: 1700705 - DNA, 25 bp, Homo sapien
aagagaaagtgctcaaggagaagga

SEQ ID NO: 1700706 - DNA, 25 bp, Homo sapien
tggcagtagaagataaacaggctgg

SEQ ID NO: 1700707 - DNA, 25 bp, Homo sapien
tgctccttctccttgagcactttct

SEQ ID NO: 1700708 - DNA, 25 bp, Homo sapien
tctccttgagcactttctcttcttc

SEQ ID NO: 1700709 - DNA, 25 bp, Homo sapien
tcttcttccccagcctgtttatctt

SEQ ID NO: 1700710 - DNA, 25 bp, Homo sapien
tgtttatcttctactgccagctctt

SEQ ID NO: 1700711 - DNA, 25 bp, Homo sapien
cagcctgtttatcttctactgccag

SEQ ID NO: 1700712 - DNA, 25 bp, Homo sapien
ttatcttctactgccagctcttcaa

SEQ ID NO: 1700713 - DNA, 25 bp, Homo sapien
ctctcagtgccaaccagtgatgagg

SEQ ID NO: 1700714 - DNA, 25 bp, Homo sapien
aaaagcgagatacccgaaaaggcag

SEQ ID NO: 1700715 - DNA, 25 bp, Homo sapien
cgtcttaagaagctctcagtgccaa

SEQ ID NO: 1700716 - DNA, 25 bp, Homo sapien
agatacccgaaaaggcaggcggaag

SEQ ID NO: 1700717 - DNA, 25 bp, Homo sapien
gctcatggagcgtcttaagaagctc

SEQ ID NO: 1700718 - DNA, 25 bp, Homo sapien
gagaaagagctcatggagcgtctta

SEQ ID NO: 1700719 - DNA, 25 bp, Homo sapien
cgcctgccttttcgggtatctcgct

SEQ ID NO: 1700720 - DNA, 25 bp, Homo sapien
gagcttcttaagacgctccatgagc

SEQ ID NO: 1700721 - DNA, 25 bp, Homo sapien
cctcatcactggttggcactgagag

SEQ ID NO: 1700722 - DNA, 25 bp, Homo sapien
cttccgcctgccttttcgggtatct

SEQ ID NO: 1700723 - DNA, 25 bp, Homo sapien
ttggcactgagagcttcttaagacg

SEQ ID NO: 1700724 - DNA, 25 bp, Homo sapien
taagacgctccatgagctctttctc

SEQ ID NO: 1700725 - DNA, 25 bp, Homo sapien
aatgtttttgcagccctgattcagg

SEQ ID NO: 1700726 - DNA, 25 bp, Homo sapien
ggtaatgtttttgcagccctgattc

SEQ ID NO: 1700727 - DNA, 25 bp, Homo sapien
ggtggtaatgtttttgcagccctga

SEQ ID NO: 1700728 - DNA, 25 bp, Homo sapien
gtttttgcagccctgattcaggatc

SEQ ID NO: 1700729 - DNA, 25 bp, Homo sapien
gaggaggaagaaaaacatcctccta

SEQ ID NO: 1700730 - DNA, 25 bp, Homo sapien
tgattcaggatcagagtgaggaaga

SEQ ID NO: 1700731 - DNA, 25 bp, Homo sapien
tcttcctcactctgatcctgaatca

SEQ ID NO: 1700732 - DNA, 25 bp, Homo sapien
gatcctgaatcagggctgcaaaaac

SEQ ID NO: 1700733 - DNA, 25 bp, Homo sapien
taggaggatgtttttcttcctcctc

SEQ ID NO: 1700734 - DNA, 25 bp, Homo sapien
tcagggctgcaaaaacattaccacc

SEQ ID NO: 1700735 - DNA, 25 bp, Homo sapien
gaatcagggctgcaaaaacattacc

SEQ ID NO: 1700736 - DNA, 25 bp, Homo sapien
cctgaatcagggctgcaaaaacatt

SEQ ID NO: 1700737 - DNA, 25 bp, Homo sapien
ccaagccggagaagaatcggatcaa

SEQ ID NO: 1700738 - DNA, 25 bp, Homo sapien
caagccggagaagaatcggatcaat

SEQ ID NO: 1700739 - DNA, 25 bp, Homo sapien
tgccaagccggagaagaatcggatc

SEQ ID NO: 1700740 - DNA, 25 bp, Homo sapien
gccaagccggagaagaatcggatca

SEQ ID NO: 1700741 - DNA, 25 bp, Homo sapien
cctgccaagccggagaagaatcgga

SEQ ID NO: 1700742 - DNA, 25 bp, Homo sapien
gccggagaagaatcggatcaataag

SEQ ID NO: 1700743 - DNA, 25 bp, Homo sapien
gatccgattcttctccggcttggca

SEQ ID NO: 1700744 - DNA, 25 bp, Homo sapien
ttgatccgattcttctccggcttgg

SEQ ID NO: 1700745 - DNA, 25 bp, Homo sapien
cttattgatccgattcttctccggc

SEQ ID NO: 1700746 - DNA, 25 bp, Homo sapien
tgatccgattcttctccggcttggc

SEQ ID NO: 1700747 - DNA, 25 bp, Homo sapien
tccgattcttctccggcttggcagg

SEQ ID NO: 1700748 - DNA, 25 bp, Homo sapien
tattgatccgattcttctccggctt

SEQ ID NO: 1700749 - DNA, 25 bp, Homo sapien
tagggtactcctcaactcatgatgg

SEQ ID NO: 1700750 - DNA, 25 bp, Homo sapien
tatgatggtgtgaaagtcatactca

SEQ ID NO: 1700751 - DNA, 25 bp, Homo sapien
tgatgggattatatccagataaacc

SEQ ID NO: 1700752 - DNA, 25 bp, Homo sapien
aagtcatactcatttagggtactcc

SEQ ID NO: 1700753 - DNA, 25 bp, Homo sapien
tccaacttctgcttcggtgtacgat

SEQ ID NO: 1700754 - DNA, 25 bp, Homo sapien
tgcttcggtgtacgatttttctact

SEQ ID NO: 1700755 - DNA, 25 bp, Homo sapien
cagtgctagtgccactcactctggt

SEQ ID NO: 1700756 - DNA, 25 bp, Homo sapien
gacttataatccttagccttgctga

SEQ ID NO: 1700757 - DNA, 25 bp, Homo sapien
tcttgagaaagcctccagtgctagt

SEQ ID NO: 1700758 - DNA, 25 bp, Homo sapien
gccttgctgacgttccctagttatc

SEQ ID NO: 1700759 - DNA, 25 bp, Homo sapien
ggtggcgcacttgcctgacttataa

SEQ ID NO: 1700760 - DNA, 25 bp, Homo sapien
ctatctagtctgaagctggagggta

SEQ ID NO: 1700761 - DNA, 25 bp, Homo sapien
cagagtgagtggcactagcactgga

SEQ ID NO: 1700762 - DNA, 25 bp, Homo sapien
taccctccagcttcagactagatag

SEQ ID NO: 1700763 - DNA, 25 bp, Homo sapien
tcagcaaggctaaggattataagtc

SEQ ID NO: 1700764 - DNA, 25 bp, Homo sapien
tataagtcaggcaagtgcgccacca

SEQ ID NO: 1700765 - DNA, 25 bp, Homo sapien
tagcactggaggctttctcaagagc

SEQ ID NO: 1700766 - DNA, 25 bp, Homo sapien
gataactagggaacgtcagcaaggc

SEQ ID NO: 1700767 - DNA, 25 bp, Homo sapien
ccatcatgagttgaggagtacccta

SEQ ID NO: 1700768 - DNA, 25 bp, Homo sapien
tatctggatataatcccatcatgag

SEQ ID NO: 1700769 - DNA, 25 bp, Homo sapien
atcgtacaccgaagcagaagttgga

SEQ ID NO: 1700770 - DNA, 25 bp, Homo sapien
gtagaaaaatcgtacaccgaagcag

SEQ ID NO: 1700771 - DNA, 25 bp, Homo sapien
gaggagtaccctaaatgagtatgac

SEQ ID NO: 1700772 - DNA, 25 bp, Homo sapien
aatgagtatgactttcacaccatca

SEQ ID NO: 1700773 - DNA, 25 bp, Homo sapien
tgcactcaagggcaaaaagggaaag

SEQ ID NO: 1700774 - DNA, 25 bp, Homo sapien
gaacagcagcctgcactcaagggca

SEQ ID NO: 1700775 - DNA, 25 bp, Homo sapien
gccgtatctgaggaacagcagcctg

SEQ ID NO: 1700776 - DNA, 25 bp, Homo sapien
gaagagaagtcaaaagggaaggcta

SEQ ID NO: 1700777 - DNA, 25 bp, Homo sapien
agcctgcactcaagggcaaaaaggg

SEQ ID NO: 1700778 - DNA, 25 bp, Homo sapien
agagaagtcaaaagggaaggctaag

SEQ ID NO: 1700779 - DNA, 25 bp, Homo sapien
tagccttcccttttgacttctcttc

SEQ ID NO: 1700780 - DNA, 25 bp, Homo sapien
ctttccctttttgcccttgagtgca

SEQ ID NO: 1700781 - DNA, 25 bp, Homo sapien
caggctgctgttcctcagatacggc

SEQ ID NO: 1700782 - DNA, 25 bp, Homo sapien
cccttgagtgcaggctgctgttcct

SEQ ID NO: 1700783 - DNA, 25 bp, Homo sapien
cttagccttcccttttgacttctct

SEQ ID NO: 1700784 - DNA, 25 bp, Homo sapien
ccctttttgcccttgagtgcaggct

SEQ ID NO: 1700785 - DNA, 25 bp, Homo sapien
tcaaaataaattcgctgctctggac

SEQ ID NO: 1700786 - DNA, 25 bp, Homo sapien
cctcaaaataaattcgctgctctgg

SEQ ID NO: 1700787 - DNA, 25 bp, Homo sapien
ctcaaaataaattcgctgctctgga

SEQ ID NO: 1700788 - DNA, 25 bp, Homo sapien
tccagagcagcgaatttattttgag

SEQ ID NO: 1700789 - DNA, 25 bp, Homo sapien
gtccagagcagcgaatttattttga

SEQ ID NO: 1700790 - DNA, 25 bp, Homo sapien
ccagagcagcgaatttattttgagg

SEQ ID NO: 1700791 - DNA, 25 bp, Homo sapien
tcaaaataaattcgctgctctggac

SEQ ID NO: 1700792 - DNA, 25 bp, Homo sapien
aaaataaattcgctgctctggacaa

SEQ ID NO: 1700793 - DNA, 25 bp, Homo sapien
cctcaaaataaattcgctgctctgg

SEQ ID NO: 1700794 - DNA, 25 bp, Homo sapien
ctcaaaataaattcgctgctctgga

SEQ ID NO: 1700795 - DNA, 25 bp, Homo sapien
caaaataaattcgctgctctggaca

SEQ ID NO: 1700796 - DNA, 25 bp, Homo sapien
ccagagcagcgaatttattttgagg

SEQ ID NO: 1700797 - DNA, 25 bp, Homo sapien
tgtccagagcagcgaatttattttg

SEQ ID NO: 1700798 - DNA, 25 bp, Homo sapien
tccagagcagcgaatttattttgag

SEQ ID NO: 1700799 - DNA, 25 bp, Homo sapien
ttgtccagagcagcgaatttatttt

SEQ ID NO: 1700800 - DNA, 25 bp, Homo sapien
gtccagagcagcgaatttattttga

SEQ ID NO: 1700801 - DNA, 25 bp, Homo sapien
caaacaagggaaggagaaggccaag

SEQ ID NO: 1700802 - DNA, 25 bp, Homo sapien
ggaggataaagaagaagaaattata

SEQ ID NO: 1700803 - DNA, 25 bp, Homo sapien
caagggaaggagaaggccaagaagg

SEQ ID NO: 1700804 - DNA, 25 bp, Homo sapien
tgaagaggaggataaagaagaagaa

SEQ ID NO: 1700805 - DNA, 25 bp, Homo sapien
gagcctcccaaacaagggaaggaga

SEQ ID NO: 1700806 - DNA, 25 bp, Homo sapien
acaagggaaggagaaggccaagaag

SEQ ID NO: 1700807 - DNA, 25 bp, Homo sapien
tctccttcccttgtttgggaggctc

SEQ ID NO: 1700808 - DNA, 25 bp, Homo sapien
ccttcttggccttctccttcccttg

SEQ ID NO: 1700809 - DNA, 25 bp, Homo sapien
ttcttcttctttatcctcctcttca

SEQ ID NO: 1700810 - DNA, 25 bp, Homo sapien
cttggccttctccttcccttgtttg

SEQ ID NO: 1700811 - DNA, 25 bp, Homo sapien
cttcttggccttctccttcccttgt

SEQ ID NO: 1700812 - DNA, 25 bp, Homo sapien
tataatttcttcttctttatcctcc

SEQ ID NO: 1700813 - DNA, 25 bp, Homo sapien
ccaggagtccctagttttgaccatc

SEQ ID NO: 1700814 - DNA, 25 bp, Homo sapien
gccaggagtccctagttttgaccat

SEQ ID NO: 1700815 - DNA, 25 bp, Homo sapien
caggagtccctagttttgaccatcc

SEQ ID NO: 1700816 - DNA, 25 bp, Homo sapien
atggtcaaaactagggactcctggc

SEQ ID NO: 1700817 - DNA, 25 bp, Homo sapien
ggatggtcaaaactagggactcctg

SEQ ID NO: 1700818 - DNA, 25 bp, Homo sapien
gatggtcaaaactagggactcctgg

SEQ ID NO: 1700819 - DNA, 25 bp, Homo sapien
tttgaccatccccgggttctcacag

SEQ ID NO: 1700820 - DNA, 25 bp, Homo sapien
tgaccttgggatctgcccgctttgg

SEQ ID NO: 1700821 - DNA, 25 bp, Homo sapien
gccaggagtccctagttttgaccat

SEQ ID NO: 1700822 - DNA, 25 bp, Homo sapien
cgcccagccaggagtccctagtttt

SEQ ID NO: 1700823 - DNA, 25 bp, Homo sapien
ggatctgcccgctttggcttcccaa

SEQ ID NO: 1700824 - DNA, 25 bp, Homo sapien
caggagtccctagttttgaccatcc

SEQ ID NO: 1700825 - DNA, 25 bp, Homo sapien
aaaactagggactcctggctgggcg

SEQ ID NO: 1700826 - DNA, 25 bp, Homo sapien
aaagcgggcagatcccaaggtcagg

SEQ ID NO: 1700827 - DNA, 25 bp, Homo sapien
ggatggtcaaaactagggactcctg

SEQ ID NO: 1700828 - DNA, 25 bp, Homo sapien
ttgggaagccaaagcgggcagatcc

SEQ ID NO: 1700829 - DNA, 25 bp, Homo sapien
gatggtcaaaactagggactcctgg

SEQ ID NO: 1700830 - DNA, 25 bp, Homo sapien
agccaaagcgggcagatcccaaggt

SEQ ID NO: 1700831 - DNA, 25 bp, Homo sapien
tcagaggaagaaggagaaggggaag

SEQ ID NO: 1700832 - DNA, 25 bp, Homo sapien
cagaggaagaaggagaaggggaaga

SEQ ID NO: 1700833 - DNA, 25 bp, Homo sapien
aggagaaggggaagaagaggaggag

SEQ ID NO: 1700834 - DNA, 25 bp, Homo sapien
agaaggagaaggggaagaagaggag

SEQ ID NO: 1700835 - DNA, 25 bp, Homo sapien
gttcagaggaagaaggagaagggga

SEQ ID NO: 1700836 - DNA, 25 bp, Homo sapien
ttcagaggaagaaggagaaggggaa

SEQ ID NO: 1700837 - DNA, 25 bp, Homo sapien
ctcctcctcttcttccccttctcct

SEQ ID NO: 1700838 - DNA, 25 bp, Homo sapien
tccccttctccttcttcctctgaac

SEQ ID NO: 1700839 - DNA, 25 bp, Homo sapien
tcttccccttctccttcttcctctg

SEQ ID NO: 1700840 - DNA, 25 bp, Homo sapien
ctcctcttcttccccttctccttct

SEQ ID NO: 1700841 - DNA, 25 bp, Homo sapien
cttccccttctccttcttcctctga

SEQ ID NO: 1700842 - DNA, 25 bp, Homo sapien
ttccccttctccttcttcctctgaa

SEQ ID NO: 1700843 - DNA, 25 bp, Homo sapien
gcagatgatccctatgctcatctta

SEQ ID NO: 1700844 - DNA, 25 bp, Homo sapien
gatgatccctatgctcatcttagca

SEQ ID NO: 1700845 - DNA, 25 bp, Homo sapien
gatccctatgctcatcttagcaaaa

SEQ ID NO: 1700846 - DNA, 25 bp, Homo sapien
tatgctcatcttagcaaaaaggaga

SEQ ID NO: 1700847 - DNA, 25 bp, Homo sapien
gctcatcttagcaaaaaggagaaga

SEQ ID NO: 1700848 - DNA, 25 bp, Homo sapien
ccctatgctcatcttagcaaaaagg

SEQ ID NO: 1700849 - DNA, 25 bp, Homo sapien
cctttttgctaagatgagcataggg

SEQ ID NO: 1700850 - DNA, 25 bp, Homo sapien
tctcctttttgctaagatgagcata

SEQ ID NO: 1700851 - DNA, 25 bp, Homo sapien
taagatgagcatagggatcatctgc

SEQ ID NO: 1700852 - DNA, 25 bp, Homo sapien
tcttctcctttttgctaagatgagc

SEQ ID NO: 1700853 - DNA, 25 bp, Homo sapien
tttgctaagatgagcatagggatca

SEQ ID NO: 1700854 - DNA, 25 bp, Homo sapien
tgctaagatgagcatagggatcatc

SEQ ID NO: 1700855 - DNA, 25 bp, Homo sapien
aggcggagatgtcctcccgccaagc

SEQ ID NO: 1700856 - DNA, 25 bp, Homo sapien
caggcggagatgtcctcccgccaag

SEQ ID NO: 1700857 - DNA, 25 bp, Homo sapien
gagtatgagcgccaagtggcttcat

SEQ ID NO: 1700858 - DNA, 25 bp, Homo sapien
ctccgtgtcccaggcggagatgtcc

SEQ ID NO: 1700859 - DNA, 25 bp, Homo sapien
gtgtcccaggcggagatgtcctccc

SEQ ID NO: 1700860 - DNA, 25 bp, Homo sapien
tgtcccaggcggagatgtcctcccg

SEQ ID NO: 1700861 - DNA, 25 bp, Homo sapien
gggaggacatctccgcctgggacac

SEQ ID NO: 1700862 - DNA, 25 bp, Homo sapien
tggcttggcgggaggacatctccgc

SEQ ID NO: 1700863 - DNA, 25 bp, Homo sapien
gcttggcgggaggacatctccgcct

SEQ ID NO: 1700864 - DNA, 25 bp, Homo sapien
atgaagccacttggcgctcatactc

SEQ ID NO: 1700865 - DNA, 25 bp, Homo sapien
cgggaggacatctccgcctgggaca

SEQ ID NO: 1700866 - DNA, 25 bp, Homo sapien
ggacatctccgcctgggacacggag

SEQ ID NO: 1700867 - DNA, 25 bp, Homo sapien
ctgtacattgtagccggccgccgct

SEQ ID NO: 1700868 - DNA, 25 bp, Homo sapien
gcaaggagctgttcgtcaatgcaga

SEQ ID NO: 1700869 - DNA, 25 bp, Homo sapien
ggcaaggagctgttcgtcaatgcag

SEQ ID NO: 1700870 - DNA, 25 bp, Homo sapien
atggcaaggagctgttcgtcaatgc

SEQ ID NO: 1700871 - DNA, 25 bp, Homo sapien
tcaatgcagacctgtacattgtagc

SEQ ID NO: 1700872 - DNA, 25 bp, Homo sapien
ttgtagccggccgccgctacgggct

SEQ ID NO: 1700873 - DNA, 25 bp, Homo sapien
gagaagttcagcatctccgctcatg

SEQ ID NO: 1700874 - DNA, 25 bp, Homo sapien
aagttcagcatctccgctcatggca

SEQ ID NO: 1700875 - DNA, 25 bp, Homo sapien
agttcagcatctccgctcatggcaa

SEQ ID NO: 1700876 - DNA, 25 bp, Homo sapien
ttcagcatctccgctcatggcaagg

SEQ ID NO: 1700877 - DNA, 25 bp, Homo sapien
gaagttcagcatctccgctcatggc

SEQ ID NO: 1700878 - DNA, 25 bp, Homo sapien
ggagaagttcagcatctccgctcat

SEQ ID NO: 1700879 - DNA, 25 bp, Homo sapien
tgccatgagcggagatgctgaactt

SEQ ID NO: 1700880 - DNA, 25 bp, Homo sapien
ttgccatgagcggagatgctgaact

SEQ ID NO: 1700881 - DNA, 25 bp, Homo sapien
ccttgccatgagcggagatgctgaa

SEQ ID NO: 1700882 - DNA, 25 bp, Homo sapien
catgagcggagatgctgaacttctc

SEQ ID NO: 1700883 - DNA, 25 bp, Homo sapien
gccatgagcggagatgctgaacttc

SEQ ID NO: 1700884 - DNA, 25 bp, Homo sapien
ccatgagcggagatgctgaacttct

SEQ ID NO: 1700885 - DNA, 25 bp, Homo sapien
tgcattgacgaacagctccttgcca

SEQ ID NO: 1700886 - DNA, 25 bp, Homo sapien
gctacaatgtacaggtctgcattga

SEQ ID NO: 1700887 - DNA, 25 bp, Homo sapien
gcattgacgaacagctccttgccat

SEQ ID NO: 1700888 - DNA, 25 bp, Homo sapien
agcccgtagcggcggccggctacaa

SEQ ID NO: 1700889 - DNA, 25 bp, Homo sapien
tctgcattgacgaacagctccttgc

SEQ ID NO: 1700890 - DNA, 25 bp, Homo sapien
agcggcggccggctacaatgtacag

SEQ ID NO: 1700891 - DNA, 25 bp, Homo sapien
caagggcaagaccacactcctcaag

SEQ ID NO: 1700892 - DNA, 25 bp, Homo sapien
cttgaggagtgtggtcttgcccttg

SEQ ID NO: 1700893 - DNA, 25 bp, Homo sapien
ctcccaacattgatgtgttgctgtg

SEQ ID NO: 1700894 - DNA, 25 bp, Homo sapien
cccaacattgatgtgttgctgtgtg

SEQ ID NO: 1700895 - DNA, 25 bp, Homo sapien
tcccaacattgatgtgttgctgtgt

SEQ ID NO: 1700896 - DNA, 25 bp, Homo sapien
caacattgatgtgttgctgtgtgag

SEQ ID NO: 1700897 - DNA, 25 bp, Homo sapien
ccaacattgatgtgttgctgtgtga

SEQ ID NO: 1700898 - DNA, 25 bp, Homo sapien
tcacacagcaacacatcaatgttgg

SEQ ID NO: 1700899 - DNA, 25 bp, Homo sapien
ctcacacagcaacacatcaatgttg

SEQ ID NO: 1700900 - DNA, 25 bp, Homo sapien
cacagcaacacatcaatgttgggag

SEQ ID NO: 1700901 - DNA, 25 bp, Homo sapien
cacacagcaacacatcaatgttggg

SEQ ID NO: 1700902 - DNA, 25 bp, Homo sapien
acacagcaacacatcaatgttggga

SEQ ID NO: 1700903 - DNA, 25 bp, Homo sapien
ctcccaacattgatgtgttgctgtg

SEQ ID NO: 1700904 - DNA, 25 bp, Homo sapien
ctgagcatccctcccaacattgatg

SEQ ID NO: 1700905 - DNA, 25 bp, Homo sapien
caacattgatgtgttgctgtgtgag

SEQ ID NO: 1700906 - DNA, 25 bp, Homo sapien
ccaacattgatgtgttgctgtgtga

SEQ ID NO: 1700907 - DNA, 25 bp, Homo sapien
cattgatgtgttgctgtgtgagcag

SEQ ID NO: 1700908 - DNA, 25 bp, Homo sapien
acattgccaaccgagccctgagcat

SEQ ID NO: 1700909 - DNA, 25 bp, Homo sapien
tcacacagcaacacatcaatgttgg

SEQ ID NO: 1700910 - DNA, 25 bp, Homo sapien
cacacagcaacacatcaatgttggg

SEQ ID NO: 1700911 - DNA, 25 bp, Homo sapien
tgctcacacagcaacacatcaatgt

SEQ ID NO: 1700912 - DNA, 25 bp, Homo sapien
cacagcaacacatcaatgttgggag

SEQ ID NO: 1700913 - DNA, 25 bp, Homo sapien
catcaatgttgggagggatgctcag

SEQ ID NO: 1700914 - DNA, 25 bp, Homo sapien
atgctcagggctcggttggcaatgt

SEQ ID NO: 1700915 - DNA, 25 bp, Homo sapien
ctgacaccaagcgattgaagctgct

SEQ ID NO: 1700916 - DNA, 25 bp, Homo sapien
gtccaggctgttcttcgagctgaca

SEQ ID NO: 1700917 - DNA, 25 bp, Homo sapien
tcgagctgacaccaagcgattgaag

SEQ ID NO: 1700918 - DNA, 25 bp, Homo sapien
tcttcgagctgacaccaagcgattg

SEQ ID NO: 1700919 - DNA, 25 bp, Homo sapien
ggctgttcttcgagctgacaccaag

SEQ ID NO: 1700920 - DNA, 25 bp, Homo sapien
atgacacagctgctgagaggctaga

SEQ ID NO: 1700921 - DNA, 25 bp, Homo sapien
agcagcttcaatcgcttggtgtcag

SEQ ID NO: 1700922 - DNA, 25 bp, Homo sapien
tgtcagctcgaagaacagcctggac

SEQ ID NO: 1700923 - DNA, 25 bp, Homo sapien
tctagcctctcagcagctgtgtcat

SEQ ID NO: 1700924 - DNA, 25 bp, Homo sapien
cttggtgtcagctcgaagaacagcc

SEQ ID NO: 1700925 - DNA, 25 bp, Homo sapien
cagctgtgtcatccccttgttccag

SEQ ID NO: 1700926 - DNA, 25 bp, Homo sapien
tcaatcgcttggtgtcagctcgaag

SEQ ID NO: 1700927 - DNA, 25 bp, Homo sapien
cgcaggggacacgggcaaagacttg

SEQ ID NO: 1700928 - DNA, 25 bp, Homo sapien
gcgcaggggacacgggcaaagactt

SEQ ID NO: 1700929 - DNA, 25 bp, Homo sapien
tggcgcaggggacacgggcaaagac

SEQ ID NO: 1700930 - DNA, 25 bp, Homo sapien
atggcgcaggggacacgggcaaaga

SEQ ID NO: 1700931 - DNA, 25 bp, Homo sapien
ggcgcaggggacacgggcaaagact

SEQ ID NO: 1700932 - DNA, 25 bp, Homo sapien
caggggacacgggcaaagacttggg

SEQ ID NO: 1700933 - DNA, 25 bp, Homo sapien
agtctttgcccgtgtcccctgcgcc

SEQ ID NO: 1700934 - DNA, 25 bp, Homo sapien
aagtctttgcccgtgtcccctgcgc

SEQ ID NO: 1700935 - DNA, 25 bp, Homo sapien
gtctttgcccgtgtcccctgcgcca

SEQ ID NO: 1700936 - DNA, 25 bp, Homo sapien
tctttgcccgtgtcccctgcgccat

SEQ ID NO: 1700937 - DNA, 25 bp, Homo sapien
cccaagtctttgcccgtgtcccctg

SEQ ID NO: 1700938 - DNA, 25 bp, Homo sapien
caagtctttgcccgtgtcccctgcg

SEQ ID NO: 1700939 - DNA, 25 bp, Homo sapien
caaagcacggcggatcctggctggc

SEQ ID NO: 1700940 - DNA, 25 bp, Homo sapien
gaccctgaaatgcagaatcgaccca

SEQ ID NO: 1700941 - DNA, 25 bp, Homo sapien
gaatcgacccacacagaagttctca

SEQ ID NO: 1700942 - DNA, 25 bp, Homo sapien
tgggctttgaccctgaaatgcagaa

SEQ ID NO: 1700943 - DNA, 25 bp, Homo sapien
tgaaatgcagaatcgacccacacag

SEQ ID NO: 1700944 - DNA, 25 bp, Homo sapien
tgtatgaggaattgcgggccactgg

SEQ ID NO: 1700945 - DNA, 25 bp, Homo sapien
ggtcgattctgcatttcagggtcaa

SEQ ID NO: 1700946 - DNA, 25 bp, Homo sapien
gaacttctgtgtgggtcgattctgc

SEQ ID NO: 1700947 - DNA, 25 bp, Homo sapien
cagtggcccgcaattcctcatacac

SEQ ID NO: 1700948 - DNA, 25 bp, Homo sapien
tgagaacttctgtgtgggtcgattc

SEQ ID NO: 1700949 - DNA, 25 bp, Homo sapien
ttctgcatttcagggtcaaagccca

SEQ ID NO: 1700950 - DNA, 25 bp, Homo sapien
gccagccaggatccgccgtgctttg

SEQ ID NO: 1700951 - DNA, 25 bp, Homo sapien
tcatggagcccacactgctgatgct

SEQ ID NO: 1700952 - DNA, 25 bp, Homo sapien
gttcatggagcccacactgctgatg

SEQ ID NO: 1700953 - DNA, 25 bp, Homo sapien
cactgttcatggagcccacactgct

SEQ ID NO: 1700954 - DNA, 25 bp, Homo sapien
accacctggacctcaacgctgtcat

SEQ ID NO: 1700955 - DNA, 25 bp, Homo sapien
ggcactgttcatggagcccacactg

SEQ ID NO: 1700956 - DNA, 25 bp, Homo sapien
actgttcatggagcccacactgctg

SEQ ID NO: 1700957 - DNA, 25 bp, Homo sapien
gatgacagcgttgaggtccaggtgg

SEQ ID NO: 1700958 - DNA, 25 bp, Homo sapien
catcagcagtgtgggctccatgaac

SEQ ID NO: 1700959 - DNA, 25 bp, Homo sapien
cagtgtgggctccatgaacagtgcc

SEQ ID NO: 1700960 - DNA, 25 bp, Homo sapien
agcatcagcagtgtgggctccatga

SEQ ID NO: 1700961 - DNA, 25 bp, Homo sapien
gcagtgtgggctccatgaacagtgc

SEQ ID NO: 1700962 - DNA, 25 bp, Homo sapien
cagcagtgtgggctccatgaacagt

SEQ ID NO: 1700963 - DNA, 25 bp, Homo sapien
gatgcccagcggctccactactata

SEQ ID NO: 1700964 - DNA, 25 bp, Homo sapien
gcccagcggctccactactataggg

SEQ ID NO: 1700965 - DNA, 25 bp, Homo sapien
ctccactactataggggcaattaca

SEQ ID NO: 1700966 - DNA, 25 bp, Homo sapien
gcggctccactactataggggcaat

SEQ ID NO: 1700967 - DNA, 25 bp, Homo sapien
atatcatccacctcgatgcccagcg

SEQ ID NO: 1700968 - DNA, 25 bp, Homo sapien
atgcccagcggctccactactatag

SEQ ID NO: 1700969 - DNA, 25 bp, Homo sapien
tgctgatcgtctcccatgaccaggg

SEQ ID NO: 1700970 - DNA, 25 bp, Homo sapien
ccagggcttcttggatgatgtctgc

SEQ ID NO: 1700971 - DNA, 25 bp, Homo sapien
gtctcccatgaccagggcttcttgg

SEQ ID NO: 1700972 - DNA, 25 bp, Homo sapien
gtctgcactgatatcatccacctcg

SEQ ID NO: 1700973 - DNA, 25 bp, Homo sapien
ggaagaccttgctgatcgtctccca

SEQ ID NO: 1700974 - DNA, 25 bp, Homo sapien
ggcttcttggatgatgtctgcactg

SEQ ID NO: 1700975 - DNA, 25 bp, Homo sapien
cgaggtggatgatatcagtgcagac

SEQ ID NO: 1700976 - DNA, 25 bp, Homo sapien
gcagacatcatccaagaagccctgg

SEQ ID NO: 1700977 - DNA, 25 bp, Homo sapien
ccaagaagccctggtcatgggagac

SEQ ID NO: 1700978 - DNA, 25 bp, Homo sapien
cctggtcatgggagacgatcagcaa

SEQ ID NO: 1700979 - DNA, 25 bp, Homo sapien
tgggagacgatcagcaaggtcttcc

SEQ ID NO: 1700980 - DNA, 25 bp, Homo sapien
cagtgcagacatcatccaagaagcc

SEQ ID NO: 1700981 - DNA, 25 bp, Homo sapien
tgcccctatagtagtggagccgctg

SEQ ID NO: 1700982 - DNA, 25 bp, Homo sapien
tatagtagtggagccgctgggcatc

SEQ ID NO: 1700983 - DNA, 25 bp, Homo sapien
taattgcccctatagtagtggagcc

SEQ ID NO: 1700984 - DNA, 25 bp, Homo sapien
ccgctgggcatcgaggtggatgata

SEQ ID NO: 1700985 - DNA, 25 bp, Homo sapien
tgtaattgcccctatagtagtggag

SEQ ID NO: 1700986 - DNA, 25 bp, Homo sapien
cctatagtagtggagccgctgggca

SEQ ID NO: 1700987 - DNA, 25 bp, Homo sapien
aagaactgctgaaacagtatgagaa

SEQ ID NO: 1700988 - DNA, 25 bp, Homo sapien
ttctcatactgtttcagcagttctt

SEQ ID NO: 1700989 - DNA, 25 bp, Homo sapien
aagaactgctgaaacagtatgagaa

SEQ ID NO: 1700990 - DNA, 25 bp, Homo sapien
gaccttcaaaaagatgtaccagcag

SEQ ID NO: 1700991 - DNA, 25 bp, Homo sapien
caaaaagatgtaccagcagaagcag

SEQ ID NO: 1700992 - DNA, 25 bp, Homo sapien
gatgtaccagcagaagcagaaagaa

SEQ ID NO: 1700993 - DNA, 25 bp, Homo sapien
gctgaaacagtatgagaagcaagag

SEQ ID NO: 1700994 - DNA, 25 bp, Homo sapien
gaaaaagctgaaggagctgaaggca

SEQ ID NO: 1700995 - DNA, 25 bp, Homo sapien
gcttctgctggtacatctttttgaa

SEQ ID NO: 1700996 - DNA, 25 bp, Homo sapien
tcagctccttcagctttttctcttg

SEQ ID NO: 1700997 - DNA, 25 bp, Homo sapien
tgctggtacatctttttgaaggtca

SEQ ID NO: 1700998 - DNA, 25 bp, Homo sapien
ttctcatactgtttcagcagttctt

SEQ ID NO: 1700999 - DNA, 25 bp, Homo sapien
tctcttgcttctcatactgtttcag

SEQ ID NO: 1701000 - DNA, 25 bp, Homo sapien
tctttctgcttctgctggtacatct

SEQ ID NO: 1701001 - DNA, 25 bp, Homo sapien
tgccgacggaaaaaccaagatgagg

SEQ ID NO: 1701002 - DNA, 25 bp, Homo sapien
tgaagcgccctaaggagtacactgt

SEQ ID NO: 1701003 - DNA, 25 bp, Homo sapien
agcagcagaaatgccgacggaaaaa

SEQ ID NO: 1701004 - DNA, 25 bp, Homo sapien
ccaagatgaggaatcccaggaggcc

SEQ ID NO: 1701005 - DNA, 25 bp, Homo sapien
ctgagctcctgaagcgccctaagga

SEQ ID NO: 1701006 - DNA, 25 bp, Homo sapien
ccctaaggagtacactgtgcgcttc

SEQ ID NO: 1701007 - DNA, 25 bp, Homo sapien
agtgtactccttagggcgcttcagg

SEQ ID NO: 1701008 - DNA, 25 bp, Homo sapien
ccttagggcgcttcaggagctcagg

SEQ ID NO: 1701009 - DNA, 25 bp, Homo sapien
cctcatcttggtttttccgtcggca

SEQ ID NO: 1701010 - DNA, 25 bp, Homo sapien
gaagcgcacagtgtactccttaggg

SEQ ID NO: 1701011 - DNA, 25 bp, Homo sapien
gggcctcctgggattcctcatcttg

SEQ ID NO: 1701012 - DNA, 25 bp, Homo sapien
tttttccgtcggcatttctgctgct

SEQ ID NO: 1701013 - DNA, 25 bp, Homo sapien
cagaaaccactctttaagaacttgg

SEQ ID NO: 1701014 - DNA, 25 bp, Homo sapien
ttttggcatcgacatggattcaagg

SEQ ID NO: 1701015 - DNA, 25 bp, Homo sapien
acattcggctaccagggacagaaac

SEQ ID NO: 1701016 - DNA, 25 bp, Homo sapien
tgacattcggctaccagggacagaa

SEQ ID NO: 1701017 - DNA, 25 bp, Homo sapien
tggattttggcatcgacatggattc

SEQ ID NO: 1701018 - DNA, 25 bp, Homo sapien
tgtgacattcggctaccagggacag

SEQ ID NO: 1701019 - DNA, 25 bp, Homo sapien
gtttctgtccctggtagccgaatgt

SEQ ID NO: 1701020 - DNA, 25 bp, Homo sapien
ccttgaatccatgtcgatgccaaaa

SEQ ID NO: 1701021 - DNA, 25 bp, Homo sapien
ctgtccctggtagccgaatgtcaca

SEQ ID NO: 1701022 - DNA, 25 bp, Homo sapien
gaatccatgtcgatgccaaaatcca

SEQ ID NO: 1701023 - DNA, 25 bp, Homo sapien
ccaagttcttaaagagtggtttctg

SEQ ID NO: 1701024 - DNA, 25 bp, Homo sapien
ttctgtccctggtagccgaatgtca

SEQ ID NO: 1701025 - DNA, 25 bp, Homo sapien
gggaagagtacgctactcctgctgc

SEQ ID NO: 1701026 - DNA, 25 bp, Homo sapien
gtgtggggaagagtacgctactcct

SEQ ID NO: 1701027 - DNA, 25 bp, Homo sapien
ggaagagtacgctactcctgctgct

SEQ ID NO: 1701028 - DNA, 25 bp, Homo sapien
tttgcattgtgggccctaatggtgt

SEQ ID NO: 1701029 - DNA, 25 bp, Homo sapien
tgcattgtgggccctaatggtgtgg

SEQ ID NO: 1701030 - DNA, 25 bp, Homo sapien
ttgcattgtgggccctaatggtgtg

SEQ ID NO: 1701031 - DNA, 25 bp, Homo sapien
cacaccattagggcccacaatgcaa

SEQ ID NO: 1701032 - DNA, 25 bp, Homo sapien
aggagtagcgtactcttccccacac

SEQ ID NO: 1701033 - DNA, 25 bp, Homo sapien
gcagcaggagtagcgtactcttccc

SEQ ID NO: 1701034 - DNA, 25 bp, Homo sapien
agcaggagtagcgtactcttcccca

SEQ ID NO: 1701035 - DNA, 25 bp, Homo sapien
caggagtagcgtactcttccccaca

SEQ ID NO: 1701036 - DNA, 25 bp, Homo sapien
agcagcaggagtagcgtactcttcc

SEQ ID NO: 1701037 - DNA, 25 bp, Homo sapien
gggaagagtacgctactcctgctgc

SEQ ID NO: 1701038 - DNA, 25 bp, Homo sapien
ggaagagtacgctactcctgctgct

SEQ ID NO: 1701039 - DNA, 25 bp, Homo sapien
gaagagtacgctactcctgctgctg

SEQ ID NO: 1701040 - DNA, 25 bp, Homo sapien
tttgcattgtgggccctaatggtgt

SEQ ID NO: 1701041 - DNA, 25 bp, Homo sapien
cctgctgctgactggcaagctgaca

SEQ ID NO: 1701042 - DNA, 25 bp, Homo sapien
gctgctgactggcaagctgacaccg

SEQ ID NO: 1701043 - DNA, 25 bp, Homo sapien
aatcccagcagggatcacctaaggt

SEQ ID NO: 1701044 - DNA, 25 bp, Homo sapien
accttaggtgatccctgctgggatt

SEQ ID NO: 1701045 - DNA, 25 bp, Homo sapien
agcctagccaacatagtgaaccccg

SEQ ID NO: 1701046 - DNA, 25 bp, Homo sapien
aaattagccgtgtgcggtggcgcgc

SEQ ID NO: 1701047 - DNA, 25 bp, Homo sapien
ggtggcgcgcacctatatcctagct

SEQ ID NO: 1701048 - DNA, 25 bp, Homo sapien
ggcacagtagctcactcctataatc

SEQ ID NO: 1701049 - DNA, 25 bp, Homo sapien
aatcccagcagggatcacctaaggt

SEQ ID NO: 1701050 - DNA, 25 bp, Homo sapien
gctcactcctataatcccagcaggg

SEQ ID NO: 1701051 - DNA, 25 bp, Homo sapien
agtagctaggatataggtgcgcgcc

SEQ ID NO: 1701052 - DNA, 25 bp, Homo sapien
cggggttcactatgttggctaggct

SEQ ID NO: 1701053 - DNA, 25 bp, Homo sapien
gattataggagtgagctactgtgcc

SEQ ID NO: 1701054 - DNA, 25 bp, Homo sapien
ctaggatataggtgcgcgccaccgc

SEQ ID NO: 1701055 - DNA, 25 bp, Homo sapien
accttaggtgatccctgctgggatt

SEQ ID NO: 1701056 - DNA, 25 bp, Homo sapien
ccctgctgggattataggagtgagc

SEQ ID NO: 1701057 - DNA, 25 bp, Homo sapien
atgcatacttgtccctggcccattt

SEQ ID NO: 1701058 - DNA, 25 bp, Homo sapien
tgcagcacctttttcccttgccctc

SEQ ID NO: 1701059 - DNA, 25 bp, Homo sapien
ctgaccttaagtgcctcctgacctg

SEQ ID NO: 1701060 - DNA, 25 bp, Homo sapien
tccttttcttatgcatacttgtccc

SEQ ID NO: 1701061 - DNA, 25 bp, Homo sapien
tcttatgcatacttgtccctggccc

SEQ ID NO: 1701062 - DNA, 25 bp, Homo sapien
tatgcatacttgtccctggcccatt

SEQ ID NO: 1701063 - DNA, 25 bp, Homo sapien
tgggccagggacaagtatgcataag

SEQ ID NO: 1701064 - DNA, 25 bp, Homo sapien
gccagggacaagtatgcataagaaa

SEQ ID NO: 1701065 - DNA, 25 bp, Homo sapien
aaatgggccagggacaagtatgcat

SEQ ID NO: 1701066 - DNA, 25 bp, Homo sapien
gagggcaagggaaaaaggtgctgca

SEQ ID NO: 1701067 - DNA, 25 bp, Homo sapien
caggtcaggaggcacttaaggtcag

SEQ ID NO: 1701068 - DNA, 25 bp, Homo sapien
gacaagtatgcataagaaaaggaat

SEQ ID NO: 1701069 - DNA, 25 bp, Homo sapien
agggaatgataatctgatggaggaa

SEQ ID NO: 1701070 - DNA, 25 bp, Homo sapien
tgataatctgatggaggaagtgtga

SEQ ID NO: 1701071 - DNA, 25 bp, Homo sapien
tagggaatgataatctgatggagga

SEQ ID NO: 1701072 - DNA, 25 bp, Homo sapien
gaggaagtgtgactttaaccgacca

SEQ ID NO: 1701073 - DNA, 25 bp, Homo sapien
gaatgataatctgatggaggaagtg

SEQ ID NO: 1701074 - DNA, 25 bp, Homo sapien
ttggcattgggatttagggaatgat

SEQ ID NO: 1701075 - DNA, 25 bp, Homo sapien
tggtcggttaaagtcacacttcctc

SEQ ID NO: 1701076 - DNA, 25 bp, Homo sapien
cacttcctccatcagattatcattc

SEQ ID NO: 1701077 - DNA, 25 bp, Homo sapien
ctccatcagattatcattccctaaa

SEQ ID NO: 1701078 - DNA, 25 bp, Homo sapien
tcctccatcagattatcattcccta

SEQ ID NO: 1701079 - DNA, 25 bp, Homo sapien
atcattccctaaatcccaatgccaa

SEQ ID NO: 1701080 - DNA, 25 bp, Homo sapien
tcacacttcctccatcagattatca

SEQ ID NO: 1701081 - DNA, 25 bp, Homo sapien
tgagtacctgcagcggggcttcaac

SEQ ID NO: 1701082 - DNA, 25 bp, Homo sapien
accatccagatctgcaaactctctg

SEQ ID NO: 1701083 - DNA, 25 bp, Homo sapien
ctaccaggatgcccgcaagtgcctg

SEQ ID NO: 1701084 - DNA, 25 bp, Homo sapien
gagagtcacgcccacaccatccaga

SEQ ID NO: 1701085 - DNA, 25 bp, Homo sapien
tgccctaccaggatgcccgcaagtg

SEQ ID NO: 1701086 - DNA, 25 bp, Homo sapien
gcaagtgcctgggccgcttcggcct

SEQ ID NO: 1701087 - DNA, 25 bp, Homo sapien
ttgaagccccgctgcaggtactcag

SEQ ID NO: 1701088 - DNA, 25 bp, Homo sapien
cgaagcggcccaggcacttgcgggc

SEQ ID NO: 1701089 - DNA, 25 bp, Homo sapien
cacttgcgggcatcctggtagggca

SEQ ID NO: 1701090 - DNA, 25 bp, Homo sapien
cagagagtttgcagatctggatggt

SEQ ID NO: 1701091 - DNA, 25 bp, Homo sapien
tctggatggtgtgggcgtgactctc

SEQ ID NO: 1701092 - DNA, 25 bp, Homo sapien
gttgaagccccgctgcaggtactca

SEQ ID NO: 1701093 - DNA, 25 bp, Homo sapien
tcacaaactggcacatcttgagggt

SEQ ID NO: 1701094 - DNA, 25 bp, Homo sapien
gtacctagaggaaccgagaatgagg

SEQ ID NO: 1701095 - DNA, 25 bp, Homo sapien
catgtctacaaactgtacctagagg

SEQ ID NO: 1701096 - DNA, 25 bp, Homo sapien
ccgagaatgagggagcctcagctca

SEQ ID NO: 1701097 - DNA, 25 bp, Homo sapien
aggtgctaggtgtgacagccctccc

SEQ ID NO: 1701098 - DNA, 25 bp, Homo sapien
aactggcacatcttgagggtttgcc

SEQ ID NO: 1701099 - DNA, 25 bp, Homo sapien
gggagggctgtcacacctagcacct

SEQ ID NO: 1701100 - DNA, 25 bp, Homo sapien
cctcattctcggttcctctaggtac

SEQ ID NO: 1701101 - DNA, 25 bp, Homo sapien
cctctaggtacagtttgtagacatg

SEQ ID NO: 1701102 - DNA, 25 bp, Homo sapien
tgagctgaggctccctcattctcgg

SEQ ID NO: 1701103 - DNA, 25 bp, Homo sapien
ggcaaaccctcaagatgtgccagtt

SEQ ID NO: 1701104 - DNA, 25 bp, Homo sapien
accctcaagatgtgccagtttgtga

SEQ ID NO: 1701105 - DNA, 25 bp, Homo sapien
agaaggcgcgagttgtgtttgctga

SEQ ID NO: 1701106 - DNA, 25 bp, Homo sapien
cagaaggcgcgagttgtgtttgctg

SEQ ID NO: 1701107 - DNA, 25 bp, Homo sapien
cgagttgtgtttgctgagctggcct

SEQ ID NO: 1701108 - DNA, 25 bp, Homo sapien
agttgtgtttgctgagctggcctgt

SEQ ID NO: 1701109 - DNA, 25 bp, Homo sapien
tcagaaggcgcgagttgtgtttgct

SEQ ID NO: 1701110 - DNA, 25 bp, Homo sapien
aaggcgcgagttgtgtttgctgagc

SEQ ID NO: 1701111 - DNA, 25 bp, Homo sapien
agcaaacacaactcgcgccttctga

SEQ ID NO: 1701112 - DNA, 25 bp, Homo sapien
gctcagcaaacacaactcgcgcctt

SEQ ID NO: 1701113 - DNA, 25 bp, Homo sapien
cagcaaacacaactcgcgccttctg

SEQ ID NO: 1701114 - DNA, 25 bp, Homo sapien
acaggccagctcagcaaacacaact

SEQ ID NO: 1701115 - DNA, 25 bp, Homo sapien
tcagcaaacacaactcgcgccttct

SEQ ID NO: 1701116 - DNA, 25 bp, Homo sapien
aggccagctcagcaaacacaactcg

SEQ ID NO: 1701117 - DNA, 25 bp, Homo sapien
tgcagtgctcagtcatggaattcct

SEQ ID NO: 1701118 - DNA, 25 bp, Homo sapien
agacgggagttgcagtgctcagtca

SEQ ID NO: 1701119 - DNA, 25 bp, Homo sapien
ggagttgcagtgctcagtcatggaa

SEQ ID NO: 1701120 - DNA, 25 bp, Homo sapien
acagtaatggaagacgggagttgca

SEQ ID NO: 1701121 - DNA, 25 bp, Homo sapien
acgggagttgcagtgctcagtcatg

SEQ ID NO: 1701122 - DNA, 25 bp, Homo sapien
gtgctcagtcatggaattcctccta

SEQ ID NO: 1701123 - DNA, 25 bp, Homo sapien
taggaggaattccatgactgagcac

SEQ ID NO: 1701124 - DNA, 25 bp, Homo sapien
tgcaactcccgtcttccattactgt

SEQ ID NO: 1701125 - DNA, 25 bp, Homo sapien
gaggaattccatgactgagcactgc

SEQ ID NO: 1701126 - DNA, 25 bp, Homo sapien
catgactgagcactgcaactcccgt

SEQ ID NO: 1701127 - DNA, 25 bp, Homo sapien
ggaattccatgactgagcactgcaa

SEQ ID NO: 1701128 - DNA, 25 bp, Homo sapien
tgactgagcactgcaactcccgtct

SEQ ID NO: 1701129 - DNA, 25 bp, Homo sapien
taacctggacatagagtctattgat

SEQ ID NO: 1701130 - DNA, 25 bp, Homo sapien
gaggccatcaatgaatacaagggtg

SEQ ID NO: 1701131 - DNA, 25 bp, Homo sapien
tctattgatgctctaggggaggcca

SEQ ID NO: 1701132 - DNA, 25 bp, Homo sapien
cctggacatagagtctattgatgct

SEQ ID NO: 1701133 - DNA, 25 bp, Homo sapien
catagagtctattgatgctctaggg

SEQ ID NO: 1701134 - DNA, 25 bp, Homo sapien
gggaggccatcaatgaatacaaggg

SEQ ID NO: 1701135 - DNA, 25 bp, Homo sapien
cacccttgtattcattgatggcctc

SEQ ID NO: 1701136 - DNA, 25 bp, Homo sapien
gatggcctcccctagagcatcaata

SEQ ID NO: 1701137 - DNA, 25 bp, Homo sapien
gcatcaatagactctatgtccaggt

SEQ ID NO: 1701138 - DNA, 25 bp, Homo sapien
tcattgatggcctcccctagagcat

SEQ ID NO: 1701139 - DNA, 25 bp, Homo sapien
tgtattcattgatggcctcccctag

SEQ ID NO: 1701140 - DNA, 25 bp, Homo sapien
tggcctcccctagagcatcaataga

SEQ ID NO: 1701141 - DNA, 25 bp, Homo sapien
tgtccttcactacagaagggcctag

SEQ ID NO: 1701142 - DNA, 25 bp, Homo sapien
ttcactacagaagggcctaggactc

SEQ ID NO: 1701143 - DNA, 25 bp, Homo sapien
cagaagggcctaggactcccttatt

SEQ ID NO: 1701144 - DNA, 25 bp, Homo sapien
ccctctgttgttgctatctttcttc

SEQ ID NO: 1701145 - DNA, 25 bp, Homo sapien
gggaccaagctgtagtgtccttcac

SEQ ID NO: 1701146 - DNA, 25 bp, Homo sapien
tacagaagggcctaggactccctta

SEQ ID NO: 1701147 - DNA, 25 bp, Homo sapien
gagtcctaggcccttctgtagtgaa

SEQ ID NO: 1701148 - DNA, 25 bp, Homo sapien
taggcccttctgtagtgaaggacac

SEQ ID NO: 1701149 - DNA, 25 bp, Homo sapien
actacagcttggtccccatggagca

SEQ ID NO: 1701150 - DNA, 25 bp, Homo sapien
tagtgaaggacactacagcttggtc

SEQ ID NO: 1701151 - DNA, 25 bp, Homo sapien
aataagggagtcctaggcccttctg

SEQ ID NO: 1701152 - DNA, 25 bp, Homo sapien
gaagaaagatagcaacaacagaggg

SEQ ID NO: 1701153 - DNA, 25 bp, Homo sapien
tgatgcccgactcatcacagaaacc

SEQ ID NO: 1701154 - DNA, 25 bp, Homo sapien
actacaagcgggaggtgttggaggc

SEQ ID NO: 1701155 - DNA, 25 bp, Homo sapien
ggagcagagtgttagccaaatcgat

SEQ ID NO: 1701156 - DNA, 25 bp, Homo sapien
tgggtgaagtcatggtcagccggcc

SEQ ID NO: 1701157 - DNA, 25 bp, Homo sapien
tagccaaatcgatggtgactttgaa

SEQ ID NO: 1701158 - DNA, 25 bp, Homo sapien
tgatcgttgtcagccatgatgcccg

SEQ ID NO: 1701159 - DNA, 25 bp, Homo sapien
gtcgggcatcatggctgacaacgat

SEQ ID NO: 1701160 - DNA, 25 bp, Homo sapien
catcgatttggctaacactctgctc

SEQ ID NO: 1701161 - DNA, 25 bp, Homo sapien
ggtttctgtgatgagtcgggcatca

SEQ ID NO: 1701162 - DNA, 25 bp, Homo sapien
gcatcatggctgacaacgatcacag

SEQ ID NO: 1701163 - DNA, 25 bp, Homo sapien
caaagtcaccatcgatttggctaac

SEQ ID NO: 1701164 - DNA, 25 bp, Homo sapien
gggccggctgaccatgacttcaccc

SEQ ID NO: 1701165 - DNA, 25 bp, Homo sapien
tgtgaggttccatccagccaagttt

SEQ ID NO: 1701166 - DNA, 25 bp, Homo sapien
gaccttgatgtgaccgggatcccac

SEQ ID NO: 1701167 - DNA, 25 bp, Homo sapien
aactgagctggccttatccttggca

SEQ ID NO: 1701168 - DNA, 25 bp, Homo sapien
tcccgagagacatatttgtgtggcc

SEQ ID NO: 1701169 - DNA, 25 bp, Homo sapien
tgtgtggcctagaagtcctctgtgg

SEQ ID NO: 1701170 - DNA, 25 bp, Homo sapien
tgccattatccagcccaagatttgg

SEQ ID NO: 1701171 - DNA, 25 bp, Homo sapien
gccacacaaatatgtctctcgggag

SEQ ID NO: 1701172 - DNA, 25 bp, Homo sapien
cacagaggacttctaggccacacaa

SEQ ID NO: 1701173 - DNA, 25 bp, Homo sapien
ccaaatcttgggctggataatggca

SEQ ID NO: 1701174 - DNA, 25 bp, Homo sapien
tgccaaggataaggccagctcagtt

SEQ ID NO: 1701175 - DNA, 25 bp, Homo sapien
taaacttggctggatggaacctcac

SEQ ID NO: 1701176 - DNA, 25 bp, Homo sapien
tcagagtgggatcccggtcacatca

SEQ ID NO: 1701177 - DNA, 25 bp, Homo sapien
attgatgggagttggaactgttctc

SEQ ID NO: 1701178 - DNA, 25 bp, Homo sapien
tgtcactgtttggagattgatggga

SEQ ID NO: 1701179 - DNA, 25 bp, Homo sapien
aatggatcttgtttgcagtcttgct

SEQ ID NO: 1701180 - DNA, 25 bp, Homo sapien
caacccttcacgcaaggaaaaagca

SEQ ID NO: 1701181 - DNA, 25 bp, Homo sapien
tgggagttggaactgttctcagtct

SEQ ID NO: 1701182 - DNA, 25 bp, Homo sapien
gatcttgtttgcagtcttgctgaca

SEQ ID NO: 1701183 - DNA, 25 bp, Homo sapien
tgtcagcaagactgcaaacaagatc

SEQ ID NO: 1701184 - DNA, 25 bp, Homo sapien
agactgagaacagttccaactccca

SEQ ID NO: 1701185 - DNA, 25 bp, Homo sapien
tgctttttccttgcgtgaagggttg

SEQ ID NO: 1701186 - DNA, 25 bp, Homo sapien
agcaagactgcaaacaagatccatt

SEQ ID NO: 1701187 - DNA, 25 bp, Homo sapien
gagaacagttccaactcccatcaat

SEQ ID NO: 1701188 - DNA, 25 bp, Homo sapien
tcccatcaatctccaaacagtgaca

SEQ ID NO: 1701189 - DNA, 25 bp, Homo sapien
cctgtgaagtaggtaactaccacct

SEQ ID NO: 1701190 - DNA, 25 bp, Homo sapien
aaagaggtatcaagaggctaatggc

SEQ ID NO: 1701191 - DNA, 25 bp, Homo sapien
ccctcaaattccataagaggcatgt

SEQ ID NO: 1701192 - DNA, 25 bp, Homo sapien
ttgaatcccctaataaccctgtgaa

SEQ ID NO: 1701193 - DNA, 25 bp, Homo sapien
ttttaagaataagctcggccgagcg

SEQ ID NO: 1701194 - DNA, 25 bp, Homo sapien
taagaataagctcggccgagcgcgg

SEQ ID NO: 1701195 - DNA, 25 bp, Homo sapien
tttaagaataagctcggccgagcgc

SEQ ID NO: 1701196 - DNA, 25 bp, Homo sapien
tattttaagaataagctcggccgag

SEQ ID NO: 1701197 - DNA, 25 bp, Homo sapien
tttgggagtcagctcactccctgct

SEQ ID NO: 1701198 - DNA, 25 bp, Homo sapien
tctatgaaaacagtggattggttgg

SEQ ID NO: 1701199 - DNA, 25 bp, Homo sapien
gcttccaggtacttcaccctgtcaa

SEQ ID NO: 1701200 - DNA, 25 bp, Homo sapien
gaaagtcacactacatgcactgcct

SEQ ID NO: 1701201 - DNA, 25 bp, Homo sapien
taaagctggttatcctggcgaacac

SEQ ID NO: 1701202 - DNA, 25 bp, Homo sapien
tgacacaggatcagctgcacttaag

SEQ ID NO: 1701203 - DNA, 25 bp, Homo sapien
gactggaaacgttcctggactgctg

SEQ ID NO: 1701204 - DNA, 25 bp, Homo sapien
tttgagaagattcgccctgtacccc

SEQ ID NO: 1701205 - DNA, 25 bp, Homo sapien
ggtcaccgaggccatgaccatcgag

SEQ ID NO: 1701206 - DNA, 25 bp, Homo sapien
gggcaacagcagtggacatcgtccc

SEQ ID NO: 1701207 - DNA, 25 bp, Homo sapien
gaagtggtggacatcgtccccatga

SEQ ID NO: 1701208 - DNA, 25 bp, Homo sapien
tggtgggcatcgtcctcacgaaggc

SEQ ID NO: 1701209 - DNA, 25 bp, Homo sapien
ggcagagagaagtaatagctcgcta

SEQ ID NO: 1701210 - DNA, 25 bp, Homo sapien
aagattgcagggtaaggagatgggc

SEQ ID NO: 1701211 - DNA, 25 bp, Homo sapien
gtaatagctcgctataactttttaa

SEQ ID NO: 1701212 - DNA, 25 bp, Homo sapien
gactgttaaatcctctcaattttaa

SEQ ID NO: 1701213 - DNA, 25 bp, Homo sapien
tatataaggaggaatggttaccttc

SEQ ID NO: 1701214 - DNA, 25 bp, Homo sapien
caagcagggtgcctttcaatttgcc

SEQ ID NO: 1701215 - DNA, 25 bp, Homo sapien
ggttaccttcctctggttagcagca

SEQ ID NO: 1701216 - DNA, 25 bp, Homo sapien
aagagatggtggatcttgtggccca

SEQ ID NO: 1701217 - DNA, 25 bp, Homo sapien
cccgaggtgctgacgtcgcaaaaaa

SEQ ID NO: 1701218 - DNA, 25 bp, Homo sapien
atctccattaaaaagggcctgtggg

SEQ ID NO: 1701219 - DNA, 25 bp, Homo sapien
ggcctgtgggtctaaacagtcttgt

SEQ ID NO: 1701220 - DNA, 25 bp, Homo sapien
ggagaaggaccaatctggtcactta

SEQ ID NO: 1701221 - DNA, 25 bp, Homo sapien
aatgaggccccctaaataattgagt

SEQ ID NO: 1701222 - DNA, 25 bp, Homo sapien
ataattgagttttgggtcctggttg

SEQ ID NO: 1701223 - DNA, 25 bp, Homo sapien
ctttttgatccaatgaggcccccta

SEQ ID NO: 1701224 - DNA, 25 bp, Homo sapien
aaattcactcatccagcgtttactt

SEQ ID NO: 1701225 - DNA, 25 bp, Homo sapien
gcctactttgtcgtctagtgggtaa

SEQ ID NO: 1701226 - DNA, 25 bp, Homo sapien
cgtataatgtctcgcgacaagggcg

SEQ ID NO: 1701227 - DNA, 25 bp, Homo sapien
tataaaagactccacccgagcgggc

SEQ ID NO: 1701228 - DNA, 25 bp, Homo sapien
gacaagggcgtttcactagcacgtt

SEQ ID NO: 1701229 - DNA, 25 bp, Homo sapien
gaattgacggaaaggcaactgcgca

SEQ ID NO: 1701230 - DNA, 25 bp, Homo sapien
aggaaactgagtagggcagggccaa

SEQ ID NO: 1701231 - DNA, 25 bp, Homo sapien
aggcggccccacgtttgcgtcagga

SEQ ID NO: 1701232 - DNA, 25 bp, Homo sapien
ttgacgtacgcccaggacaggaatt

SEQ ID NO: 1701233 - DNA, 25 bp, Homo sapien
gcctcagcacggtgtttaatacaga

SEQ ID NO: 1701234 - DNA, 25 bp, Homo sapien
ctctgtgagaacctcggaagagaga

SEQ ID NO: 1701235 - DNA, 25 bp, Homo sapien
tgaactctgtgagaacctcggaaga

SEQ ID NO: 1701236 - DNA, 25 bp, Homo sapien
agagagatagcataggaagccgcct

SEQ ID NO: 1701237 - DNA, 25 bp, Homo sapien
ttccagggctcatccttataaggag

SEQ ID NO: 1701238 - DNA, 25 bp, Homo sapien
gggctcatccttataaggagaaatg

SEQ ID NO: 1701239 - DNA, 25 bp, Homo sapien
cagggctcatccttataaggagaaa

SEQ ID NO: 1701240 - DNA, 25 bp, Homo sapien
aatgggaactgaggacaaagaatct

SEQ ID NO: 1701241 - DNA, 25 bp, Homo sapien
tgggtggctctgtccacttatctca

SEQ ID NO: 1701242 - DNA, 25 bp, Homo sapien
agtgtagtgggtggctctgtccact

SEQ ID NO: 1701243 - DNA, 25 bp, Homo sapien
acttatctcaaatcctatctgaccc

SEQ ID NO: 1701244 - DNA, 25 bp, Homo sapien
tcatacaagttattcctgggtggga

SEQ ID NO: 1701245 - DNA, 25 bp, Homo sapien
tagtcagcccagacggggcgagaac

SEQ ID NO: 1701246 - DNA, 25 bp, Homo sapien
acatgtcttccgagtccgctgtggg

SEQ ID NO: 1701247 - DNA, 25 bp, Homo sapien
ggcgagaaccatatcgctcctggta

SEQ ID NO: 1701248 - DNA, 25 bp, Homo sapien
acccttgtggttgcggcggtagtca

SEQ ID NO: 1701249 - DNA, 25 bp, Homo sapien
aaaaaacagcagttaaggatgttca

SEQ ID NO: 1701250 - DNA, 25 bp, Homo sapien
tgttactgttacttgtggcctcccc

SEQ ID NO: 1701251 - DNA, 25 bp, Homo sapien
caaacacgtcagaaaaagtgctgct

SEQ ID NO: 1701252 - DNA, 25 bp, Homo sapien
gctgctgttactgttacttgtggcc

SEQ ID NO: 1701253 - DNA, 25 bp, Homo sapien
acatgcaacttgtgatctcgacaga

SEQ ID NO: 1701254 - DNA, 25 bp, Homo sapien
atgcaacttgtgatctcgacagatg

SEQ ID NO: 1701255 - DNA, 25 bp, Homo sapien
cttgtgatctcgacagatggggcag

SEQ ID NO: 1701256 - DNA, 25 bp, Homo sapien
aacttgtgatctcgacagatggggc

SEQ ID NO: 1701257 - DNA, 25 bp, Homo sapien
ccgcgcccagcccctaatctttatt

SEQ ID NO: 1701258 - DNA, 25 bp, Homo sapien
cgcgcccagcccctaatctttattt

SEQ ID NO: 1701259 - DNA, 25 bp, Homo sapien
aagatgatacccgtgtgggcgcaga

SEQ ID NO: 1701260 - DNA, 25 bp, Homo sapien
tggagcatagaagatgatacccgtg

SEQ ID NO: 1701261 - DNA, 25 bp, Homo sapien
tgtgggcgcagacaaattgctccaa

SEQ ID NO: 1701262 - DNA, 25 bp, Homo sapien
ctgtgtatggagcatagaagatgat

SEQ ID NO: 1701263 - DNA, 25 bp, Homo sapien
caaagattagtctctgccgggcacg

SEQ ID NO: 1701264 - DNA, 25 bp, Homo sapien
cacaactgcttccatatggtgacag

SEQ ID NO: 1701265 - DNA, 25 bp, Homo sapien
taaagatttaggagggtctagccac

SEQ ID NO: 1701266 - DNA, 25 bp, Homo sapien
tagagggttgagttgaacaatccac

SEQ ID NO: 1701267 - DNA, 25 bp, Homo sapien
ggtcaaccgcttgtgctgcttcaca

SEQ ID NO: 1701268 - DNA, 25 bp, Homo sapien
gcctgggtcaaccgcttgtgctgct

SEQ ID NO: 1701269 - DNA, 25 bp, Homo sapien
tcaaccgcttgtgctgcttcacaca

SEQ ID NO: 1701270 - DNA, 25 bp, Homo sapien
gtcaaccgcttgtgctgcttcacac

SEQ ID NO: 1701271 - DNA, 25 bp, Homo sapien
tcctaaggcattgagaccagcagtt

SEQ ID NO: 1701272 - DNA, 25 bp, Homo sapien
taaacaaaactgctgtgtgccccgt

SEQ ID NO: 1701273 - DNA, 25 bp, Homo sapien
gaagaacatgctgggtgctaccatc

SEQ ID NO: 1701274 - DNA, 25 bp, Homo sapien
cagtgccatgtagtccagggccaga

SEQ ID NO: 1701275 - DNA, 25 bp, Homo sapien
ctgggggatgtggtaaatgaggaga

SEQ ID NO: 1701276 - DNA, 25 bp, Homo sapien
ctgaagtcaaggtcccgtggttcaa

SEQ ID NO: 1701277 - DNA, 25 bp, Homo sapien
tgaagtcaaggtcccgtggttcaac

SEQ ID NO: 1701278 - DNA, 25 bp, Homo sapien
gaccagggtgggggctggcggagta

SEQ ID NO: 1701279 - DNA, 25 bp, Homo sapien
agggtgggggctggcggagtagcac

SEQ ID NO: 1701280 - DNA, 25 bp, Homo sapien
tgagaccagggtgggggctggcgga

SEQ ID NO: 1701281 - DNA, 25 bp, Homo sapien
ccagggtgggggctggcggagtagc

SEQ ID NO: 1701282 - DNA, 25 bp, Homo sapien
gacagttctctctccggtggctgtt

SEQ ID NO: 1701283 - DNA, 25 bp, Homo sapien
ctcttcttggagatgaccctggtaa

SEQ ID NO: 1701284 - DNA, 25 bp, Homo sapien
tctgagggcctgtctgcccagtgga

SEQ ID NO: 1701285 - DNA, 25 bp, Homo sapien
taaagccggcgaaggcgagacagtt

SEQ ID NO: 1701286 - DNA, 25 bp, Homo sapien
ggtagaagtatgaaacggcaacaat

SEQ ID NO: 1701287 - DNA, 25 bp, Homo sapien
cacaactcttcagggtgatatccca

SEQ ID NO: 1701288 - DNA, 25 bp, Homo sapien
cagcctcaagatttatccctatcag

SEQ ID NO: 1701289 - DNA, 25 bp, Homo sapien
cggcaacaatgtttagcccagccca

SEQ ID NO: 1701290 - DNA, 25 bp, Homo sapien
cgcctctcggagtctttatttccag

SEQ ID NO: 1701291 - DNA, 25 bp, Homo sapien
cctctcgccgcaccgcctctcggag

SEQ ID NO: 1701292 - DNA, 25 bp, Homo sapien
ccctcctctcgccgcaccgcctctc

SEQ ID NO: 1701293 - DNA, 25 bp, Homo sapien
ctcctctcgccgcaccgcctctcgg

SEQ ID NO: 1701294 - DNA, 25 bp, Homo sapien
ccattgtgcgcggtcggacccgccc

SEQ ID NO: 1701295 - DNA, 25 bp, Homo sapien
gtcggacccgccccacacgacgtca

SEQ ID NO: 1701296 - DNA, 25 bp, Homo sapien
attgtgcgcggtcggacccgcccca

SEQ ID NO: 1701297 - DNA, 25 bp, Homo sapien
ggcccattgtgcgcggtcggacccg

SEQ ID NO: 1701298 - DNA, 25 bp, Homo sapien
cgggaacagcgcgtccacatcgaac

SEQ ID NO: 1701299 - DNA, 25 bp, Homo sapien
gtccagcaccgtgatccgctccggg

SEQ ID NO: 1701300 - DNA, 25 bp, Homo sapien
cgtccacatcgaacgggaactccat

SEQ ID NO: 1701301 - DNA, 25 bp, Homo sapien
acagcgcgtccacatcgaacgggaa

SEQ ID NO: 1701302 - DNA, 25 bp, Homo sapien
gccagagggtgggtttgagctgtca

SEQ ID NO: 1701303 - DNA, 25 bp, Homo sapien
aagggccagagggtgggtttgagct

SEQ ID NO: 1701304 - DNA, 25 bp, Homo sapien
ccagagggtgggtttgagctgtcac

SEQ ID NO: 1701305 - DNA, 25 bp, Homo sapien
gggccagagggtgggtttgagctgt

SEQ ID NO: 1701306 - DNA, 25 bp, Homo sapien
tcaaaaggggcgatcactagtcagt

SEQ ID NO: 1701307 - DNA, 25 bp, Homo sapien
aggtcacagatccaagcgctgatca

SEQ ID NO: 1701308 - DNA, 25 bp, Homo sapien
aagcgctgatcaatcccactaggcc

SEQ ID NO: 1701309 - DNA, 25 bp, Homo sapien
caggcctggacatcaaaaggggcga

SEQ ID NO: 1701310 - DNA, 25 bp, Homo sapien
ttattgtgaggaagcagaaaggcca

SEQ ID NO: 1701311 - DNA, 25 bp, Homo sapien
ctttcaaggtggcacactccctcct

SEQ ID NO: 1701312 - DNA, 25 bp, Homo sapien
cctcctcccttaaggttattgtgag

SEQ ID NO: 1701313 - DNA, 25 bp, Homo sapien
agcagaaaggccaggtcaaccacat

SEQ ID NO: 1701314 - DNA, 25 bp, Homo sapien
gcccagttcatctataatggtcata

SEQ ID NO: 1701315 - DNA, 25 bp, Homo sapien
ccagttcatctataatggtcataat

SEQ ID NO: 1701316 - DNA, 25 bp, Homo sapien
cccagttcatctataatggtcataa

SEQ ID NO: 1701317 - DNA, 25 bp, Homo sapien
gtgataggagcggaaagattctggg

SEQ ID NO: 1701318 - DNA, 25 bp, Homo sapien
tgataggagcggaaagattctgggc

SEQ ID NO: 1701319 - DNA, 25 bp, Homo sapien
ataaacaacatggcggttactctgc

SEQ ID NO: 1701320 - DNA, 25 bp, Homo sapien
tataaacaacatggcggttactctg

SEQ ID NO: 1701321 - DNA, 25 bp, Homo sapien
taaacaacatggcggttactctgca

SEQ ID NO: 1701322 - DNA, 25 bp, Homo sapien
aaacaacatggcggttactctgcat

SEQ ID NO: 1701323 - DNA, 25 bp, Homo sapien
ttcttgtatccaactttgatgaaac

SEQ ID NO: 1701324 - DNA, 25 bp, Homo sapien
accaataatggctccttttccagcc

SEQ ID NO: 1701325 - DNA, 25 bp, Homo sapien
tcttgtatccaactttgatgaaacc

SEQ ID NO: 1701326 - DNA, 25 bp, Homo sapien
acatatactggaagagttctcgccc

SEQ ID NO: 1701327 - DNA, 25 bp, Homo sapien
tggccatggcgttgcacagactcat

SEQ ID NO: 1701328 - DNA, 25 bp, Homo sapien
cagactcatggatgtaaaagtccag

SEQ ID NO: 1701329 - DNA, 25 bp, Homo sapien
agtccaggatgcaaagtggttctac

SEQ ID NO: 1701330 - DNA, 25 bp, Homo sapien
tgtgagggtcggtcaattgccagtt

SEQ ID NO: 1701331 - DNA, 25 bp, Homo sapien
attgccagttggtgcggttccactc

SEQ ID NO: 1701332 - DNA, 25 bp, Homo sapien
gttggtgcggttccactcgctcctt

SEQ ID NO: 1701333 - DNA, 25 bp, Homo sapien
gtgcttattcaggaatttcagcagc

SEQ ID NO: 1701334 - DNA, 25 bp, Homo sapien
cacagcggtgatccgatgcaaggga

SEQ ID NO: 1701335 - DNA, 25 bp, Homo sapien
gagccaccaccatttttcgccagga

SEQ ID NO: 1701336 - DNA, 25 bp, Homo sapien
caggacaccgaaccaggaacaatgc

SEQ ID NO: 1701337 - DNA, 25 bp, Homo sapien
ggactatgtcgattaagctgccaga

SEQ ID NO: 1701338 - DNA, 25 bp, Homo sapien
cttcaaagatcacaaagttgttcac

SEQ ID NO: 1701339 - DNA, 25 bp, Homo sapien
gatgttgatgggcaaagaagccttc

SEQ ID NO: 1701340 - DNA, 25 bp, Homo sapien
atgggcaaagaagccttcaaagatc

SEQ ID NO: 1701341 - DNA, 25 bp, Homo sapien
agaagccttcaaagatcacaaagtt

SEQ ID NO: 1701342 - DNA, 25 bp, Homo sapien
cgagagtgtcgagttgccctcagag

SEQ ID NO: 1701343 - DNA, 25 bp, Homo sapien
cagcgggcgtgggatcgactgcagc

SEQ ID NO: 1701344 - DNA, 25 bp, Homo sapien
gatcgactgcagcagcacgagagtg

SEQ ID NO: 1701345 - DNA, 25 bp, Homo sapien
gcagcacgagagtgtcgagttgccc

SEQ ID NO: 1701346 - DNA, 25 bp, Homo sapien
ccccgtggcatctagagtaagtagc

SEQ ID NO: 1701347 - DNA, 25 bp, Homo sapien
agttccaccccttcaatacaggctt

SEQ ID NO: 1701348 - DNA, 25 bp, Homo sapien
agagtaagtagccatcactgcacta

SEQ ID NO: 1701349 - DNA, 25 bp, Homo sapien
gcactgtaccccgtggcatctagag

SEQ ID NO: 1701350 - DNA, 25 bp, Homo sapien
tggaaatgttataaactctgagtgt

SEQ ID NO: 1701351 - DNA, 25 bp, Homo sapien
taaattttgggccatttgtgtcact

SEQ ID NO: 1701352 - DNA, 25 bp, Homo sapien
gcctctgaggtttggtttctccata

SEQ ID NO: 1701353 - DNA, 25 bp, Homo sapien
tctgtgactgcaaatggaagggctg

SEQ ID NO: 1701354 - DNA, 25 bp, Homo sapien
cacggccccctggtattctggggca

SEQ ID NO: 1701355 - DNA, 25 bp, Homo sapien
tcacggccccctggtattctggggc

SEQ ID NO: 1701356 - DNA, 25 bp, Homo sapien
cagccgggccaacgaggaccctggg

SEQ ID NO: 1701357 - DNA, 25 bp, Homo sapien
gcagtggaatggtcccagccgggcc

SEQ ID NO: 1701358 - DNA, 25 bp, Homo sapien
gcagggtaagcgttaggagacatac

SEQ ID NO: 1701359 - DNA, 25 bp, Homo sapien
cagttcctcctgagaacttgcagga

SEQ ID NO: 1701360 - DNA, 25 bp, Homo sapien
atggcaatgccagcacaccaaaagg

SEQ ID NO: 1701361 - DNA, 25 bp, Homo sapien
cgttaggagacatactttgcacccc

SEQ ID NO: 1701362 - DNA, 25 bp, Homo sapien
ttgggtggcagcttccttgctggag

SEQ ID NO: 1701363 - DNA, 25 bp, Homo sapien
attctcggtcactagaggagtatgg

SEQ ID NO: 1701364 - DNA, 25 bp, Homo sapien
tctttagagagaacgaatcctttcc

SEQ ID NO: 1701365 - DNA, 25 bp, Homo sapien
agagagaacgaatcctttccctggg

SEQ ID NO: 1701366 - DNA, 25 bp, Homo sapien
tctgagtctttagagagaacgaatc

SEQ ID NO: 1701367 - DNA, 25 bp, Homo sapien
gaaatctgagtctttagagagaacg

SEQ ID NO: 1701368 - DNA, 25 bp, Homo sapien
gtttaggggccaaggaggctccaca

SEQ ID NO: 1701369 - DNA, 25 bp, Homo sapien
tgtttaggggccaaggaggctccac

SEQ ID NO: 1701370 - DNA, 25 bp, Homo sapien
ctgtttaggggccaaggaggctcca

SEQ ID NO: 1701371 - DNA, 25 bp, Homo sapien
cagaggcgcaaggaacgcagcagct

SEQ ID NO: 1701372 - DNA, 25 bp, Homo sapien
ggacctcgttctggtgagtttccca

SEQ ID NO: 1701373 - DNA, 25 bp, Homo sapien
cgacgacgttgagctgggctgcccc

SEQ ID NO: 1701374 - DNA, 25 bp, Homo sapien
agcagccaacagaaggcgggcggta

SEQ ID NO: 1701375 - DNA, 25 bp, Homo sapien
ccagggtccctaggctccatataag

SEQ ID NO: 1701376 - DNA, 25 bp, Homo sapien
taactctcacattaaagccagggtc

SEQ ID NO: 1701377 - DNA, 25 bp, Homo sapien
aataaaggaaatgcccactccctgc

SEQ ID NO: 1701378 - DNA, 25 bp, Homo sapien
gctgcgatggactcttggcacacaa

SEQ ID NO: 1701379 - DNA, 25 bp, Homo sapien
tagtatcgactctcctcagagcggg

SEQ ID NO: 1701380 - DNA, 25 bp, Homo sapien
tcgactctcctcagagcggggaagg

SEQ ID NO: 1701381 - DNA, 25 bp, Homo sapien
ttagtatcgactctcctcagagcgg

SEQ ID NO: 1701382 - DNA, 25 bp, Homo sapien
tatcgactctcctcagagcggggaa

SEQ ID NO: 1701383 - DNA, 25 bp, Homo sapien
taggcagtttgagaccctgacatcc

SEQ ID NO: 1701384 - DNA, 25 bp, Homo sapien
aagggatctagctatactctgggca

SEQ ID NO: 1701385 - DNA, 25 bp, Homo sapien
tatatcgggacctagctaccaggga

SEQ ID NO: 1701386 - DNA, 25 bp, Homo sapien
ccattcgcaggctcaaagggcaagt

SEQ ID NO: 1701387 - DNA, 25 bp, Homo sapien
tgtgattctttttttcattgaaaat

SEQ ID NO: 1701388 - DNA, 25 bp, Homo sapien
ttttgtgattctttttttcattgaa

SEQ ID NO: 1701389 - DNA, 25 bp, Homo sapien
attctttttttcattgaaaatgtca

SEQ ID NO: 1701390 - DNA, 25 bp, Homo sapien
ttctttttttcattgaaaatgtcaa

SEQ ID NO: 1701391 - DNA, 25 bp, Homo sapien
tgtagaagaaatgggagatgatggg

SEQ ID NO: 1701392 - DNA, 25 bp, Homo sapien
ctgtagaagaaatgggagatgatgg

SEQ ID NO: 1701393 - DNA, 25 bp, Homo sapien
gaaatgggagatgatggggaggagg

SEQ ID NO: 1701394 - DNA, 25 bp, Homo sapien
atgggagatgatggggaggaggcta

SEQ ID NO: 1701395 - DNA, 25 bp, Homo sapien
gggatgaggaattcacccccccatg

SEQ ID NO: 1701396 - DNA, 25 bp, Homo sapien
ccccatggcggctgtagcagcagct

SEQ ID NO: 1701397 - DNA, 25 bp, Homo sapien
ccatggcggctgtagcagcagcttt

SEQ ID NO: 1701398 - DNA, 25 bp, Homo sapien
atgaggaattcacccccccatggcg

SEQ ID NO: 1701399 - DNA, 25 bp, Homo sapien
tatcaggcatgtgaatgggaaggca

SEQ ID NO: 1701400 - DNA, 25 bp, Homo sapien
atatcaggcatgtgaatgggaaggc

SEQ ID NO: 1701401 - DNA, 25 bp, Homo sapien
gagtagacagtgaatgtggcctact

SEQ ID NO: 1701402 - DNA, 25 bp, Homo sapien
tgtggcctacttgatttgagggtag

SEQ ID NO: 1701403 - DNA, 25 bp, Homo sapien
tttgtttcctgttctccctgcttgg

SEQ ID NO: 1701404 - DNA, 25 bp, Homo sapien
ctttgtttcctgttctccctgcttg

SEQ ID NO: 1701405 - DNA, 25 bp, Homo sapien
tgttctccctgcttggagtcttggt

SEQ ID NO: 1701406 - DNA, 25 bp, Homo sapien
tctccctgcttggagtcttggttgc

SEQ ID NO: 1701407 - DNA, 25 bp, Homo sapien
tacgataagatttaagagtaggaag

SEQ ID NO: 1701408 - DNA, 25 bp, Homo sapien
ggagctggtgtccagttcatacgat

SEQ ID NO: 1701409 - DNA, 25 bp, Homo sapien
agtgactgagaatgatgttaggaag

SEQ ID NO: 1701410 - DNA, 25 bp, Homo sapien
cttgcaggatgtaaggtagaaggaa

SEQ ID NO: 1701411 - DNA, 25 bp, Homo sapien
tgaagctggaaccattagtgctatg

SEQ ID NO: 1701412 - DNA, 25 bp, Homo sapien
taggacacatgatgggtatgaagct

SEQ ID NO: 1701413 - DNA, 25 bp, Homo sapien
tccaaagggaagtaccagagttgaa

SEQ ID NO: 1701414 - DNA, 25 bp, Homo sapien
tcagagaatccgtattccaaaggga

SEQ ID NO: 1701415 - DNA, 25 bp, Homo sapien
gagatggagagtgggttataggaat

SEQ ID NO: 1701416 - DNA, 25 bp, Homo sapien
tggagagtgggttataggaatacta

SEQ ID NO: 1701417 - DNA, 25 bp, Homo sapien
gagagtgggttataggaatactaaa

SEQ ID NO: 1701418 - DNA, 25 bp, Homo sapien
gatggagagtgggttataggaatac

SEQ ID NO: 1701419 - DNA, 25 bp, Homo sapien
tccccagacccatcctgtgacaagg

SEQ ID NO: 1701420 - DNA, 25 bp, Homo sapien
aggagctgtgtgcatgggcttctcc

SEQ ID NO: 1701421 - DNA, 25 bp, Homo sapien
agacccatcctgtgacaaggcctgc

SEQ ID NO: 1701422 - DNA, 25 bp, Homo sapien
tgtccaggactgggctggcggggcc

SEQ ID NO: 1701423 - DNA, 25 bp, Homo sapien
gtttcgaatgaacctggcgttgagt

SEQ ID NO: 1701424 - DNA, 25 bp, Homo sapien
caaggcctggtgctgcgacgttcct

SEQ ID NO: 1701425 - DNA, 25 bp, Homo sapien
gacgttcctgcaggtttcgaatgaa

SEQ ID NO: 1701426 - DNA, 25 bp, Homo sapien
gaacctggcgttgagtatgtcccca

SEQ ID NO: 1701427 - DNA, 25 bp, Homo sapien
tgacttgaatctgataagcctgctg

SEQ ID NO: 1701428 - DNA, 25 bp, Homo sapien
atccatctattatgagggttgggct

SEQ ID NO: 1701429 - DNA, 25 bp, Homo sapien
ttattggtctggttaaaagatacaa

SEQ ID NO: 1701430 - DNA, 25 bp, Homo sapien
tattatgagggttgggctttggctc

SEQ ID NO: 1701431 - DNA, 25 bp, Homo sapien
cgacctccggcctcctcacaggggt

SEQ ID NO: 1701432 - DNA, 25 bp, Homo sapien
ctcctgagtccgacctccggcctcc

SEQ ID NO: 1701433 - DNA, 25 bp, Homo sapien
tcctgagtccgacctccggcctcct

SEQ ID NO: 1701434 - DNA, 25 bp, Homo sapien
tgagtccgacctccggcctcctcac

SEQ ID NO: 1701435 - DNA, 25 bp, Homo sapien
ccgggccgcaccccggctgggctgg

SEQ ID NO: 1701436 - DNA, 25 bp, Homo sapien
taggcgcgcaggcaagggccgagac

SEQ ID NO: 1701437 - DNA, 25 bp, Homo sapien
caagggccgagacgccgggccgcac

SEQ ID NO: 1701438 - DNA, 25 bp, Homo sapien
tggggtcgagcctggtaggcgcgca

SEQ ID NO: 1701439 - DNA, 25 bp, Homo sapien
aggaccgacgtccttgcgcgacagg

SEQ ID NO: 1701440 - DNA, 25 bp, Homo sapien
ccctagcctgtccacgcgctgcagg

SEQ ID NO: 1701441 - DNA, 25 bp, Homo sapien
agagtcgggcgcaacgcagacgcgc

SEQ ID NO: 1701442 - DNA, 25 bp, Homo sapien
ctaggcacaggtaaccgcggagagt

SEQ ID NO: 1701443 - DNA, 25 bp, Homo sapien
tcggtccccgatggtgtcctagagg

SEQ ID NO: 1701444 - DNA, 25 bp, Homo sapien
ggaccgctctccgagtgcaagacgg

SEQ ID NO: 1701445 - DNA, 25 bp, Homo sapien
aaccgggtgcacactggccggcctt

SEQ ID NO: 1701446 - DNA, 25 bp, Homo sapien
cagcagggctacgaatctctcggcc

SEQ ID NO: 1701447 - DNA, 25 bp, Homo sapien
gctattatcatttcgggcccctcta

SEQ ID NO: 1701448 - DNA, 25 bp, Homo sapien
tgtaaacaaaacgtagcgacctaga

SEQ ID NO: 1701449 - DNA, 25 bp, Homo sapien
cctcaggagacagttaaaggctggc

SEQ ID NO: 1701450 - DNA, 25 bp, Homo sapien
tctaatgacagacacaacctcagga

SEQ ID NO: 1701451 - DNA, 25 bp, Homo sapien
tgtgcgaggcaaatgtacagagaaa

SEQ ID NO: 1701452 - DNA, 25 bp, Homo sapien
tgtaactttaggcattctcattccc

SEQ ID NO: 1701453 - DNA, 25 bp, Homo sapien
gaatatccagctgaagctaggaatc

SEQ ID NO: 1701454 - DNA, 25 bp, Homo sapien
tccgcttcctacaaatgtcctataa

SEQ ID NO: 1701455 - DNA, 25 bp, Homo sapien
ggcttccaatacctattcctcctga

SEQ ID NO: 1701456 - DNA, 25 bp, Homo sapien
cagaatggatggaattactatagga

SEQ ID NO: 1701457 - DNA, 25 bp, Homo sapien
aacaccccttgatcccctggatgct

SEQ ID NO: 1701458 - DNA, 25 bp, Homo sapien
ggagaaagataagaatccacttgtc

SEQ ID NO: 1701459 - DNA, 25 bp, Homo sapien
tgggaatggtagagtccctggataa

SEQ ID NO: 1701460 - DNA, 25 bp, Homo sapien
gaatggtagagtccctggataaagc

SEQ ID NO: 1701461 - DNA, 25 bp, Homo sapien
tggtagagtccctggataaagctgg

SEQ ID NO: 1701462 - DNA, 25 bp, Homo sapien
gtagagtccctggataaagctggtc

SEQ ID NO: 1701463 - DNA, 25 bp, Homo sapien
tggggaagacgctgggtgggaaggc

SEQ ID NO: 1701464 - DNA, 25 bp, Homo sapien
ggaagacgctgggtgggaaggcgtg

SEQ ID NO: 1701465 - DNA, 25 bp, Homo sapien
gaagacgctgggtgggaaggcgtgg

SEQ ID NO: 1701466 - DNA, 25 bp, Homo sapien
cctggggaagacgctgggtgggaag

SEQ ID NO: 1701467 - DNA, 25 bp, Homo sapien
gagggagaaccacccatgctgagct

SEQ ID NO: 1701468 - DNA, 25 bp, Homo sapien
ctggagggagaaccacccatgctga

SEQ ID NO: 1701469 - DNA, 25 bp, Homo sapien
gggagaaccacccatgctgagctga

SEQ ID NO: 1701470 - DNA, 25 bp, Homo sapien
ggagaaccacccatgctgagctgag

SEQ ID NO: 1701471 - DNA, 25 bp, Homo sapien
aaggcttctaagcccatccaggcag

SEQ ID NO: 1701472 - DNA, 25 bp, Homo sapien
gacttggaaaggtatccaagcccca

SEQ ID NO: 1701473 - DNA, 25 bp, Homo sapien
aggcagccgctatgcaactcaggtc

SEQ ID NO: 1701474 - DNA, 25 bp, Homo sapien
tggaaaggtatccaagccccaggat

SEQ ID NO: 1701475 - DNA, 25 bp, Homo sapien
tctcatacatgacagacagatgttc

SEQ ID NO: 1701476 - DNA, 25 bp, Homo sapien
tacatgacagacagatgttcctcca

SEQ ID NO: 1701477 - DNA, 25 bp, Homo sapien
gtctctcatacatgacagacagatg

SEQ ID NO: 1701478 - DNA, 25 bp, Homo sapien
catacatgacagacagatgttcctc

SEQ ID NO: 1701479 - DNA, 25 bp, Homo sapien
cactgtagacgaaggccacttttgc

SEQ ID NO: 1701480 - DNA, 25 bp, Homo sapien
gaatccagttgactatccctgtacg

SEQ ID NO: 1701481 - DNA, 25 bp, Homo sapien
tccctgtacgtccaaggattaccca

SEQ ID NO: 1701482 - DNA, 25 bp, Homo sapien
cacatccttcccactgtagacgaag

SEQ ID NO: 1701483 - DNA, 25 bp, Homo sapien
tacagactgtagtcgtgggactgaa

SEQ ID NO: 1701484 - DNA, 25 bp, Homo sapien
ttggtacgtatgttgaggatctcat

SEQ ID NO: 1701485 - DNA, 25 bp, Homo sapien
gaggatctcattgatgaattccaca

SEQ ID NO: 1701486 - DNA, 25 bp, Homo sapien
tccacatccaaggaatacagactgt

SEQ ID NO: 1701487 - DNA, 25 bp, Homo sapien
taaaacctccaaacgaaggtgtgca

SEQ ID NO: 1701488 - DNA, 25 bp, Homo sapien
cggtaatgctcgtctttgtcacgct

SEQ ID NO: 1701489 - DNA, 25 bp, Homo sapien
gaaccgcaaaaagagcaagtggacg

SEQ ID NO: 1701490 - DNA, 25 bp, Homo sapien
cagtgaaagaatgtaccatgtccgg

SEQ ID NO: 1701491 - DNA, 25 bp, Homo sapien
ctggggaatagagggaggcttactg

SEQ ID NO: 1701492 - DNA, 25 bp, Homo sapien
gaggccactggaattcaggtagaaa

SEQ ID NO: 1701493 - DNA, 25 bp, Homo sapien
tagaaagtggagtaggcatcatagg

SEQ ID NO: 1701494 - DNA, 25 bp, Homo sapien
tttatctagacgatggcgacaaatg

SEQ ID NO: 1701495 - DNA, 25 bp, Homo sapien
gacaaatgaggccactggaattcag

SEQ ID NO: 1701496 - DNA, 25 bp, Homo sapien
tgggggaggcacacaaatgttctac

SEQ ID NO: 1701497 - DNA, 25 bp, Homo sapien
agttgggggaggcacacaaatgttc

SEQ ID NO: 1701498 - DNA, 25 bp, Homo sapien
gttgggggaggcacacaaatgttct

SEQ ID NO: 1701499 - DNA, 25 bp, Homo sapien
ttgggggaggcacacaaatgttcta

SEQ ID NO: 1701500 - DNA, 25 bp, Homo sapien
agcttcttcacaggcgttggaggtg

SEQ ID NO: 1701501 - DNA, 25 bp, Homo sapien
gcttggaacacaggtttaagtcagg

SEQ ID NO: 1701502 - DNA, 25 bp, Homo sapien
ttggaggtgagtgtgaaggcatcag

SEQ ID NO: 1701503 - DNA, 25 bp, Homo sapien
ttcttcacaggcgttggaggtgagt

SEQ ID NO: 1701504 - DNA, 25 bp, Homo sapien
gcagctttacacagcatgagatgga

SEQ ID NO: 1701505 - DNA, 25 bp, Homo sapien
gaggaagctggctcctgagattctt

SEQ ID NO: 1701506 - DNA, 25 bp, Homo sapien
tttacaagttaaattacacagcagc

SEQ ID NO: 1701507 - DNA, 25 bp, Homo sapien
tcttgggcgtagcagtcttcagtgc

SEQ ID NO: 1701508 - DNA, 25 bp, Homo sapien
tgggatctagagaaagtgatatgtg

SEQ ID NO: 1701509 - DNA, 25 bp, Homo sapien
gaataaagcttgtgggaacatttgg

SEQ ID NO: 1701510 - DNA, 25 bp, Homo sapien
taaagcttgtgggaacatttgggat

SEQ ID NO: 1701511 - DNA, 25 bp, Homo sapien
ttttggaataaagcttgtgggaaca

SEQ ID NO: 1701512 - DNA, 25 bp, Homo sapien
ccctggtggaggaatcaagcgattc

SEQ ID NO: 1701513 - DNA, 25 bp, Homo sapien
tacaggcctgcagtaccacactcgg

SEQ ID NO: 1701514 - DNA, 25 bp, Homo sapien
aggcctgcagtaccacactcggcta

SEQ ID NO: 1701515 - DNA, 25 bp, Homo sapien
tgcctccctggtggaggaatcaagc

SEQ ID NO: 1701516 - DNA, 25 bp, Homo sapien
taaacgtgctggtgcatcctaggtc

SEQ ID NO: 1701517 - DNA, 25 bp, Homo sapien
tccccaagagggaaggctggaactc

SEQ ID NO: 1701518 - DNA, 25 bp, Homo sapien
taggtcatccaagagtgagcgccaa

SEQ ID NO: 1701519 - DNA, 25 bp, Homo sapien
gggactctcgggatttaagcactcg

SEQ ID NO: 1701520 - DNA, 25 bp, Homo sapien
tggggcggggaatccccattctgtc

SEQ ID NO: 1701521 - DNA, 25 bp, Homo sapien
ctggtcactgatcgcatccgccgga

SEQ ID NO: 1701522 - DNA, 25 bp, Homo sapien
tggctgcatcaggtgagaggccaag

SEQ ID NO: 1701523 - DNA, 25 bp, Homo sapien
gcatccgccggacagtcaagttcct

SEQ ID NO: 1701524 - DNA, 25 bp, Homo sapien
ctgaggccatagctcagggtggtca

SEQ ID NO: 1701525 - DNA, 25 bp, Homo sapien
caagctcacatctagggccactagg

SEQ ID NO: 1701526 - DNA, 25 bp, Homo sapien
tgtcaagactcccaaaccagttgaa

SEQ ID NO: 1701527 - DNA, 25 bp, Homo sapien
gcagcctctgatcttgagcctttta

SEQ ID NO: 1701528 - DNA, 25 bp, Homo sapien
ctgtgaagaaccctgaatcaactgt

SEQ ID NO: 1701529 - DNA, 25 bp, Homo sapien
gaaccctgaatcaactgtccctata

SEQ ID NO: 1701530 - DNA, 25 bp, Homo sapien
gagcaggacaaatatgtcctctgtg

SEQ ID NO: 1701531 - DNA, 25 bp, Homo sapien
tgtcctctgtcaagacccctgaaac

SEQ ID NO: 1701532 - DNA, 25 bp, Homo sapien
catgggaggtcctggctacacagcc

SEQ ID NO: 1701533 - DNA, 25 bp, Homo sapien
gggaggtcctggctacacagccatt

SEQ ID NO: 1701534 - DNA, 25 bp, Homo sapien
ggaggtcctggctacacagccattc

SEQ ID NO: 1701535 - DNA, 25 bp, Homo sapien
cctagatgaaccatgggaggtcctg

SEQ ID NO: 1701536 - DNA, 25 bp, Homo sapien
gccagggtcagccattatacatata

SEQ ID NO: 1701537 - DNA, 25 bp, Homo sapien
ccacagtggacatcaacacacaagt

SEQ ID NO: 1701538 - DNA, 25 bp, Homo sapien
ggatccacctggagagaagccaagc

SEQ ID NO: 1701539 - DNA, 25 bp, Homo sapien
ggacatcaacacacaagtggagaag

SEQ ID NO: 1701540 - DNA, 25 bp, Homo sapien
gaggaagaagtctcagcagcgctga

SEQ ID NO: 1701541 - DNA, 25 bp, Homo sapien
tttggcttcatcgacagcgacactg

SEQ ID NO: 1701542 - DNA, 25 bp, Homo sapien
gaagatcttccatggagtaggtaca

SEQ ID NO: 1701543 - DNA, 25 bp, Homo sapien
tatcaacagcgatacagatgacgag

SEQ ID NO: 1701544 - DNA, 25 bp, Homo sapien
caaacgcgacggcaggaaggttctg

SEQ ID NO: 1701545 - DNA, 25 bp, Homo sapien
tttgctcgcctcaaggtatgtatgg

SEQ ID NO: 1701546 - DNA, 25 bp, Homo sapien
gagacaaagcctcatcgagcctggc

SEQ ID NO: 1701547 - DNA, 25 bp, Homo sapien
ctggaaggttggaatgcgccccaga

SEQ ID NO: 1701548 - DNA, 25 bp, Homo sapien
cgatctggttgccacactgaccagc

SEQ ID NO: 1701549 - DNA, 25 bp, Homo sapien
cagcctggatgtgcacgatttccct

SEQ ID NO: 1701550 - DNA, 25 bp, Homo sapien
tggttgccacactgaccagcctgga

SEQ ID NO: 1701551 - DNA, 25 bp, Homo sapien
caccgatctggttgccacactgacc

SEQ ID NO: 1701552 - DNA, 25 bp, Homo sapien
tatgtgcagcgggtcccaagtgctc

SEQ ID NO: 1701553 - DNA, 25 bp, Homo sapien
tttccctgctctggatatgtgcagc

SEQ ID NO: 1701554 - DNA, 25 bp, Homo sapien
gtcgaccacacttcgataagcgccg

SEQ ID NO: 1701555 - DNA, 25 bp, Homo sapien
caccgcgcggcgcacaaaaggctgg

SEQ ID NO: 1701556 - DNA, 25 bp, Homo sapien
ttctagggcatggcatcccgtgggc

SEQ ID NO: 1701557 - DNA, 25 bp, Homo sapien
ccacaagcgctcaggccgttgttct

SEQ ID NO: 1701558 - DNA, 25 bp, Homo sapien
tcggccccacatctcccattttaat

SEQ ID NO: 1701559 - DNA, 25 bp, Homo sapien
tcaggccgttgttctagggcatggc

SEQ ID NO: 1701560 - DNA, 25 bp, Homo sapien
tttgtagaaacgtggcatgggggag

SEQ ID NO: 1701561 - DNA, 25 bp, Homo sapien
tgcaatcacggatgactacagcgtg

SEQ ID NO: 1701562 - DNA, 25 bp, Homo sapien
acggatgactacagcgtggaactcc

SEQ ID NO: 1701563 - DNA, 25 bp, Homo sapien
acctggagggatcccaattcgccca

SEQ ID NO: 1701564 - DNA, 25 bp, Homo sapien
cattgtagtacacagagatgcggtc

SEQ ID NO: 1701565 - DNA, 25 bp, Homo sapien
agtacacagagatgcggtccagctg

SEQ ID NO: 1701566 - DNA, 25 bp, Homo sapien
atgccatgttcatcactgatcacct

SEQ ID NO: 1701567 - DNA, 25 bp, Homo sapien
tgtggcttcattgtagtacacagag

SEQ ID NO: 1701568 - DNA, 25 bp, Homo sapien
cccaaaggggataaggcgtgcccag

SEQ ID NO: 1701569 - DNA, 25 bp, Homo sapien
agagatcccagataagtgggagaca

SEQ ID NO: 1701570 - DNA, 25 bp, Homo sapien
gagatcccagataagtgggagacag

SEQ ID NO: 1701571 - DNA, 25 bp, Homo sapien
caaaggggataaggcgtgcccagaa

SEQ ID NO: 1701572 - DNA, 25 bp, Homo sapien
tctagatccaccaggatggcacgag

SEQ ID NO: 1701573 - DNA, 25 bp, Homo sapien
ggatggcacgaggaacatatttgcc

SEQ ID NO: 1701574 - DNA, 25 bp, Homo sapien
gacctgagcgaacagagtccatggt

SEQ ID NO: 1701575 - DNA, 25 bp, Homo sapien
caaaaggacctgagcgaacagagtc

SEQ ID NO: 1701576 - DNA, 25 bp, Homo sapien
tccttccgtaccacatccaggacag

SEQ ID NO: 1701577 - DNA, 25 bp, Homo sapien
tccaggacagaatcaaccagctcgg

SEQ ID NO: 1701578 - DNA, 25 bp, Homo sapien
ccttccgtaccacatccaggacaga

SEQ ID NO: 1701579 - DNA, 25 bp, Homo sapien
aatcaaccagctcggcgccctctgt

SEQ ID NO: 1701580 - DNA, 25 bp, Homo sapien
cctgcaggcagtcacagctctctgc

SEQ ID NO: 1701581 - DNA, 25 bp, Homo sapien
ctgtgcccccgcccagtgagtgggt

SEQ ID NO: 1701582 - DNA, 25 bp, Homo sapien
tgcccccgcccagtgagtgggtcag

SEQ ID NO: 1701583 - DNA, 25 bp, Homo sapien
agtgggtcagctggaagccctgcag

SEQ ID NO: 1701584 - DNA, 25 bp, Homo sapien
cgatcagggtattcttctcggatct

SEQ ID NO: 1701585 - DNA, 25 bp, Homo sapien
ggtattcatgatgcgatcagggtat

SEQ ID NO: 1701586 - DNA, 25 bp, Homo sapien
tgctgggtgagttccggcactgtga

SEQ ID NO: 1701587 - DNA, 25 bp, Homo sapien
tgtgagagctcgatactgctggctt

SEQ ID NO: 1701588 - DNA, 25 bp, Homo sapien
gtcacaggcagccatcatgttcttg

SEQ ID NO: 1701589 - DNA, 25 bp, Homo sapien
ccatcatgttcttggcatcgaagac

SEQ ID NO: 1701590 - DNA, 25 bp, Homo sapien
ggtcacaggcagccatcatgttctt

SEQ ID NO: 1701591 - DNA, 25 bp, Homo sapien
cagccatcatgttcttggcatcgaa

SEQ ID NO: 1701592 - DNA, 25 bp, Homo sapien
gcagccacggtgaggtatcggccgt

SEQ ID NO: 1701593 - DNA, 25 bp, Homo sapien
ccgaccacggaagacagcagccacg

SEQ ID NO: 1701594 - DNA, 25 bp, Homo sapien
cagcagccacggtgaggtatcggcc

SEQ ID NO: 1701595 - DNA, 25 bp, Homo sapien
acggtgaggtatcggccgtggcggg

SEQ ID NO: 1701596 - DNA, 25 bp, Homo sapien
tgatactcagagacgaggtcgttca

SEQ ID NO: 1701597 - DNA, 25 bp, Homo sapien
caaacacaaattctgagggagagga

SEQ ID NO: 1701598 - DNA, 25 bp, Homo sapien
agtgggacagactcctccagagtag

SEQ ID NO: 1701599 - DNA, 25 bp, Homo sapien
ggttctaaatgggatctggagaccc

SEQ ID NO: 1701600 - DNA, 25 bp, Homo sapien
ctggacaaatggaatgggcaccaga

SEQ ID NO: 1701601 - DNA, 25 bp, Homo sapien
actccagagtcaggggtgttcattc

SEQ ID NO: 1701602 - DNA, 25 bp, Homo sapien
gctgaagttgcctgaatgatcctcc

SEQ ID NO: 1701603 - DNA, 25 bp, Homo sapien
cacactgctatgattgccaactcca

SEQ ID NO: 1701604 - DNA, 25 bp, Homo sapien
taaatcagactgtttgagcctgttg

SEQ ID NO: 1701605 - DNA, 25 bp, Homo sapien
tattttcctgaccaagactgaggga

SEQ ID NO: 1701606 - DNA, 25 bp, Homo sapien
cattttggaggtgaggctataaata

SEQ ID NO: 1701607 - DNA, 25 bp, Homo sapien
tatgcagcttacattatgacacagg

SEQ ID NO: 1701608 - DNA, 25 bp, Homo sapien
gaaacagctagtaagcaagtaaatg

SEQ ID NO: 1701609 - DNA, 25 bp, Homo sapien
aggctataaatatggaggtgaggca

SEQ ID NO: 1701610 - DNA, 25 bp, Homo sapien
tagtgtcctttagtgcaagcgggct

SEQ ID NO: 1701611 - DNA, 25 bp, Homo sapien
tgcaaagtgagatatgggcagccct

SEQ ID NO: 1701612 - DNA, 25 bp, Homo sapien
aaaggttaccaataaagtcgcagca

SEQ ID NO: 1701613 - DNA, 25 bp, Homo sapien
ttgcagacacgcacagtacccaggt

SEQ ID NO: 1701614 - DNA, 25 bp, Homo sapien
caaggcccacactagtctgtgagag

SEQ ID NO: 1701615 - DNA, 25 bp, Homo sapien
ccctggagacgttagagggccacca

SEQ ID NO: 1701616 - DNA, 25 bp, Homo sapien
tggatccaagagcatacatcccggc

SEQ ID NO: 1701617 - DNA, 25 bp, Homo sapien
gaggctgagattgcccacattgccc

SEQ ID NO: 1701618 - DNA, 25 bp, Homo sapien
gatgtggcaatcacccttacgccag

SEQ ID NO: 1701619 - DNA, 25 bp, Homo sapien
gcccagtctgcggttttcccaggta

SEQ ID NO: 1701620 - DNA, 25 bp, Homo sapien
cccgcggcgaatccgagatgtggca

SEQ ID NO: 1701621 - DNA, 25 bp, Homo sapien
tccggttgccggatgtagtctttca

SEQ ID NO: 1701622 - DNA, 25 bp, Homo sapien
tcacggagcgactgtcgagatcgcc

SEQ ID NO: 1701623 - DNA, 25 bp, Homo sapien
gacacctggaactgcggcaaagtag

SEQ ID NO: 1701624 - DNA, 25 bp, Homo sapien
tcttgaagtcgcctttagggtggct

SEQ ID NO: 1701625 - DNA, 25 bp, Homo sapien
ctactgtgtgagacttcggcggacc

SEQ ID NO: 1701626 - DNA, 25 bp, Homo sapien
tacgtcctcctaggtgatggagatg

SEQ ID NO: 1701627 - DNA, 25 bp, Homo sapien
atgtacgtcctcctaggtgatggag

SEQ ID NO: 1701628 - DNA, 25 bp, Homo sapien
tgatggagatgtgtacgtaatattt

SEQ ID NO: 1701629 - DNA, 25 bp, Homo sapien
tcttattgctcctaattaatattta

SEQ ID NO: 1701630 - DNA, 25 bp, Homo sapien
tgtgcaattccccttctatggtagg

SEQ ID NO: 1701631 - DNA, 25 bp, Homo sapien
ggtcccaactggaatattgcagccc

SEQ ID NO: 1701632 - DNA, 25 bp, Homo sapien
gtcagagacacagcagtcacacgca

SEQ ID NO: 1701633 - DNA, 25 bp, Homo sapien
gacactctagggaatccgtgagacg

SEQ ID NO: 1701634 - DNA, 25 bp, Homo sapien
aaccaaaatggattcactatcatgg

SEQ ID NO: 1701635 - DNA, 25 bp, Homo sapien
tagctccaatttcccgcagtcacat

SEQ ID NO: 1701636 - DNA, 25 bp, Homo sapien
acctcaaatccaacacaaccaaaat

SEQ ID NO: 1701637 - DNA, 25 bp, Homo sapien
tcacctgaactcctgtcttgtagct

SEQ ID NO: 1701638 - DNA, 25 bp, Homo sapien
tggcagaaatccagatagctgacgt

SEQ ID NO: 1701639 - DNA, 25 bp, Homo sapien
acctggtccagatggcggaagccat

SEQ ID NO: 1701640 - DNA, 25 bp, Homo sapien
gatagctgacgtcacctggtccaga

SEQ ID NO: 1701641 - DNA, 25 bp, Homo sapien
gaagccattgcccaaccataggaaa

SEQ ID NO: 1701642 - DNA, 25 bp, Homo sapien
gagtacgggctttagaaaagctcta

SEQ ID NO: 1701643 - DNA, 25 bp, Homo sapien
ctgggacccaggatgtcttgacaaa

SEQ ID NO: 1701644 - DNA, 25 bp, Homo sapien
aaatgagtaacagatcacatggaag

SEQ ID NO: 1701645 - DNA, 25 bp, Homo sapien
gagggtacctcacacgtcatttctg

SEQ ID NO: 1701646 - DNA, 25 bp, Homo sapien
gtctttcccactgtagtctgtagga

SEQ ID NO: 1701647 - DNA, 25 bp, Homo sapien
acacacctgggaataagagtggtct

SEQ ID NO: 1701648 - DNA, 25 bp, Homo sapien
ctttcccactgtagtctgtaggagg

SEQ ID NO: 1701649 - DNA, 25 bp, Homo sapien
tctttcccactgtagtctgtaggag

SEQ ID NO: 1701650 - DNA, 25 bp, Homo sapien
ccagtatcttgtgtagcacctggca

SEQ ID NO: 1701651 - DNA, 25 bp, Homo sapien
tgttcgctgctatagccagtatctt

SEQ ID NO: 1701652 - DNA, 25 bp, Homo sapien
gacgggctgtcctgttcgctgctat

SEQ ID NO: 1701653 - DNA, 25 bp, Homo sapien
gatgagacgggctgtcctgttcgct

SEQ ID NO: 1701654 - DNA, 25 bp, Homo sapien
ttgtcaccccagactaaattagatg

SEQ ID NO: 1701655 - DNA, 25 bp, Homo sapien
ttcttgggccgggttcgatggctca

SEQ ID NO: 1701656 - DNA, 25 bp, Homo sapien
tattccccaggtatgtcttaaacga

SEQ ID NO: 1701657 - DNA, 25 bp, Homo sapien
tggtaaacatgtcagccatggtccc

SEQ ID NO: 1701658 - DNA, 25 bp, Homo sapien
gcagcagcctctcgaagtaaatatt

SEQ ID NO: 1701659 - DNA, 25 bp, Homo sapien
cagagtacgatacaaagcttaagtg

SEQ ID NO: 1701660 - DNA, 25 bp, Homo sapien
aagcaggccggtgggatcactgcac

SEQ ID NO: 1701661 - DNA, 25 bp, Homo sapien
gaggtcaagaaagggtcggctctcc

SEQ ID NO: 1701662 - DNA, 25 bp, Homo sapien
gcttaactgagccacccacagccat

SEQ ID NO: 1701663 - DNA, 25 bp, Homo sapien
caggtagggtgtccttaagtctgaa

SEQ ID NO: 1701664 - DNA, 25 bp, Homo sapien
tctgaatcttgatccccatcgctgg

SEQ ID NO: 1701665 - DNA, 25 bp, Homo sapien
gattcccactgtaaaaatctccttg

SEQ ID NO: 1701666 - DNA, 25 bp, Homo sapien
ttgtaaaaggtggacagtagaggcc

SEQ ID NO: 1701667 - DNA, 25 bp, Homo sapien
tccattctcaccaggagcagctggc

SEQ ID NO: 1701668 - DNA, 25 bp, Homo sapien
ctccattctcaccaggagcagctgg

SEQ ID NO: 1701669 - DNA, 25 bp, Homo sapien
tggcttttgccttcaattgtgattg

SEQ ID NO: 1701670 - DNA, 25 bp, Homo sapien
atggcttttgccttcaattgtgatt

SEQ ID NO: 1701671 - DNA, 25 bp, Homo sapien
aaacccctttcacttagtctctcat

SEQ ID NO: 1701672 - DNA, 25 bp, Homo sapien
gcagaatcaacagtggcaatcactg

SEQ ID NO: 1701673 - DNA, 25 bp, Homo sapien
caacagtggcaatcactgaggtgac

SEQ ID NO: 1701674 - DNA, 25 bp, Homo sapien
atcagcagaatcaacagtggcaatc

SEQ ID NO: 1701675 - DNA, 25 bp, Homo sapien
acagtggcaatcactgaggtgacag

SEQ ID NO: 1701676 - DNA, 25 bp, Homo sapien
tgacatcatcctctgtactgcccga

SEQ ID NO: 1701677 - DNA, 25 bp, Homo sapien
atcctctgtactgcccgaatcctgc

SEQ ID NO: 1701678 - DNA, 25 bp, Homo sapien
tctgtactgcccgaatcctgctgca

SEQ ID NO: 1701679 - DNA, 25 bp, Homo sapien
acatcatcctctgtactgcccgaat

SEQ ID NO: 1701680 - DNA, 25 bp, Homo sapien
tatggtccggacagtgaacaggaag

SEQ ID NO: 1701681 - DNA, 25 bp, Homo sapien
ctgcacaggtgaccaactccaatta

SEQ ID NO: 1701682 - DNA, 25 bp, Homo sapien
acttatcggagtattctttaggcct

SEQ ID NO: 1701683 - DNA, 25 bp, Homo sapien
aagcccggccttgataaacttatcg

SEQ ID NO: 1701684 - DNA, 25 bp, Homo sapien
ttgtcagacaatgttcagacaatcc

SEQ ID NO: 1701685 - DNA, 25 bp, Homo sapien
agggcattgtcagacaatgttcaga

SEQ ID NO: 1701686 - DNA, 25 bp, Homo sapien
tcagacaatgttcagacaatccttg

SEQ ID NO: 1701687 - DNA, 25 bp, Homo sapien
gcattgtcagacaatgttcagacaa

SEQ ID NO: 1701688 - DNA, 25 bp, Homo sapien
ccaacgctgcctggctttgtccgag

SEQ ID NO: 1701689 - DNA, 25 bp, Homo sapien
ccagctgcggctggcttcaatgtga

SEQ ID NO: 1701690 - DNA, 25 bp, Homo sapien
gctcaggattctcttaggtcccagt

SEQ ID NO: 1701691 - DNA, 25 bp, Homo sapien
gaccatggcaaccaagtcccgctcc

SEQ ID NO: 1701692 - DNA, 25 bp, Homo sapien
ctgcagtcccgctcagggcccacga

SEQ ID NO: 1701693 - DNA, 25 bp, Homo sapien
gctgcagtcccgctcagggcccacg

SEQ ID NO: 1701694 - DNA, 25 bp, Homo sapien
tgcagtcccgctcagggcccacgag

SEQ ID NO: 1701695 - DNA, 25 bp, Homo sapien
gcgctagcgcccggcccggcctccc

SEQ ID NO: 1701696 - DNA, 25 bp, Homo sapien
cgcgcgctagcgcccggcccggcct

SEQ ID NO: 1701697 - DNA, 25 bp, Homo sapien
cccgcgcgctagcgcccggcccggc

SEQ ID NO: 1701698 - DNA, 25 bp, Homo sapien
gcgcgctagcgcccggcccggcctc

SEQ ID NO: 1701699 - DNA, 25 bp, Homo sapien
ccggcagacccaggcgtccgacccg

SEQ ID NO: 1701700 - DNA, 25 bp, Homo sapien
cgggagcggggcctcttcggcggcg

SEQ ID NO: 1701701 - DNA, 25 bp, Homo sapien
ctctcatcgctcttcccggcagacc

SEQ ID NO: 1701702 - DNA, 25 bp, Homo sapien
cagacccaggcgtccgacccgggag

SEQ ID NO: 1701703 - DNA, 25 bp, Homo sapien
cagcaacagccagcgagcttgggcg

SEQ ID NO: 1701704 - DNA, 25 bp, Homo sapien
agcaacagccagcgagcttgggcgc

SEQ ID NO: 1701705 - DNA, 25 bp, Homo sapien
aagtccaaccccatcgctcagtgaa

SEQ ID NO: 1701706 - DNA, 25 bp, Homo sapien
tcgctcagtgaatagccaccttcag

SEQ ID NO: 1701707 - DNA, 25 bp, Homo sapien
tcagtgaatagccaccttcagacac

SEQ ID NO: 1701708 - DNA, 25 bp, Homo sapien
aaccccatcgctcagtgaatagcca

SEQ ID NO: 1701709 - DNA, 25 bp, Homo sapien
aatgggtggtgcgtaagttaatcag

SEQ ID NO: 1701710 - DNA, 25 bp, Homo sapien
cacagtcacttcataaggtagatac

SEQ ID NO: 1701711 - DNA, 25 bp, Homo sapien
gtgccagacactggcctaaaccctt

SEQ ID NO: 1701712 - DNA, 25 bp, Homo sapien
gactgagtcatagctgacagcaaca

SEQ ID NO: 1701713 - DNA, 25 bp, Homo sapien
gctcctgatccctcgggcctaaggg

SEQ ID NO: 1701714 - DNA, 25 bp, Homo sapien
ctgatccctcgggcctaagggggtg

SEQ ID NO: 1701715 - DNA, 25 bp, Homo sapien
ctcctgatccctcgggcctaagggg

SEQ ID NO: 1701716 - DNA, 25 bp, Homo sapien
agctcctgatccctcgggcctaagg

SEQ ID NO: 1701717 - DNA, 25 bp, Homo sapien
cagcagcagtaaagatgacagggcc

SEQ ID NO: 1701718 - DNA, 25 bp, Homo sapien
cagcagtaaagatgacagggcctct

SEQ ID NO: 1701719 - DNA, 25 bp, Homo sapien
agcagtaaagatgacagggcctctg

SEQ ID NO: 1701720 - DNA, 25 bp, Homo sapien
gcagcagtaaagatgacagggcctc

SEQ ID NO: 1701721 - DNA, 25 bp, Homo sapien
cctcagggacccatgattcagtctc

SEQ ID NO: 1701722 - DNA, 25 bp, Homo sapien
gggacccatgattcagtctcctcac

SEQ ID NO: 1701723 - DNA, 25 bp, Homo sapien
ggccctcagggacccatgattcagt

SEQ ID NO: 1701724 - DNA, 25 bp, Homo sapien
ctggccctcagggacccatgattca

SEQ ID NO: 1701725 - DNA, 25 bp, Homo sapien
cactgtctgggatggtccggtcctg

SEQ ID NO: 1701726 - DNA, 25 bp, Homo sapien
tgtcactgtctgggatggtccggtc

SEQ ID NO: 1701727 - DNA, 25 bp, Homo sapien
ctgtctgggatggtccggtcctgca

SEQ ID NO: 1701728 - DNA, 25 bp, Homo sapien
tcactgtctgggatggtccggtcct

SEQ ID NO: 1701729 - DNA, 25 bp, Homo sapien
ctgctgtggcgggcggcagtggaat

SEQ ID NO: 1701730 - DNA, 25 bp, Homo sapien
gctgtggcgggcggcagtggaatct

SEQ ID NO: 1701731 - DNA, 25 bp, Homo sapien
gtggcgggcggcagtggaatctgac

SEQ ID NO: 1701732 - DNA, 25 bp, Homo sapien
tgtggcgggcggcagtggaatctga

SEQ ID NO: 1701733 - DNA, 25 bp, Homo sapien
accaggtgcagtcgttgtagatcca

SEQ ID NO: 1701734 - DNA, 25 bp, Homo sapien
tagctccgggagaactccttgccca

SEQ ID NO: 1701735 - DNA, 25 bp, Homo sapien
cgggagtaacgcagccggtagctcc

SEQ ID NO: 1701736 - DNA, 25 bp, Homo sapien
atccagcggcgaccatcccgggagt

SEQ ID NO: 1701737 - DNA, 25 bp, Homo sapien
ggtagaagcgaaccagtcgggcaac

SEQ ID NO: 1701738 - DNA, 25 bp, Homo sapien
tccagaggcagccatagagctctac

SEQ ID NO: 1701739 - DNA, 25 bp, Homo sapien
cagggtcctcattgcctgagatcac

SEQ ID NO: 1701740 - DNA, 25 bp, Homo sapien
agacagacgctcatgacccggtcag

SEQ ID NO: 1701741 - DNA, 25 bp, Homo sapien
gagtcgttgaggtacacggcctcag

SEQ ID NO: 1701742 - DNA, 25 bp, Homo sapien
taaatacattgtctgccccacaggg

SEQ ID NO: 1701743 - DNA, 25 bp, Homo sapien
cgcccacggtatgtccgtcataggt

SEQ ID NO: 1701744 - DNA, 25 bp, Homo sapien
tacacggcctcagataaatacattg

SEQ ID NO: 1701745 - DNA, 25 bp, Homo sapien
gtggttgctccatcccacatagtca

SEQ ID NO: 1701746 - DNA, 25 bp, Homo sapien
ggagaagctgtggttgctccatccc

SEQ ID NO: 1701747 - DNA, 25 bp, Homo sapien
atagtcatagcctggccagacccgc

SEQ ID NO: 1701748 - DNA, 25 bp, Homo sapien
cacatagtcatagcctggccagacc

SEQ ID NO: 1701749 - DNA, 25 bp, Homo sapien
aaagcgagccacacggccgccaagg

SEQ ID NO: 1701750 - DNA, 25 bp, Homo sapien
ccaggttgccccctaggttgtggcg

SEQ ID NO: 1701751 - DNA, 25 bp, Homo sapien
agggccacgccggaagcgacattcc

SEQ ID NO: 1701752 - DNA, 25 bp, Homo sapien
ggttgtggcgcatgggctccccctc

SEQ ID NO: 1701753 - DNA, 25 bp, Homo sapien
ccagggccccgcaaagaggaagcgg

SEQ ID NO: 1701754 - DNA, 25 bp, Homo sapien
ctgaagagtaaccagggccccgcaa

SEQ ID NO: 1701755 - DNA, 25 bp, Homo sapien
tgaagagtaaccagggccccgcaaa

SEQ ID NO: 1701756 - DNA, 25 bp, Homo sapien
gccccgcaaagaggaagcggcactg

SEQ ID NO: 1701757 - DNA, 25 bp, Homo sapien
aaggtgcctcccagtgccggagagg

SEQ ID NO: 1701758 - DNA, 25 bp, Homo sapien
gtgccggagaggaattgttcaccac

SEQ ID NO: 1701759 - DNA, 25 bp, Homo sapien
caagctgctgaagttggtgggaggt

SEQ ID NO: 1701760 - DNA, 25 bp, Homo sapien
gccggagaggaattgttcaccacat

SEQ ID NO: 1701761 - DNA, 25 bp, Homo sapien
agcagggtcagcaccacaggagggt

SEQ ID NO: 1701762 - DNA, 25 bp, Homo sapien
cagggtcagcaccacaggagggtcc

SEQ ID NO: 1701763 - DNA, 25 bp, Homo sapien
gcagcagggtcagcaccacaggagg

SEQ ID NO: 1701764 - DNA, 25 bp, Homo sapien
aggcagcagggtcagcaccacagga

SEQ ID NO: 1701765 - DNA, 25 bp, Homo sapien
tgcagccgccagagcatgagggcaa

SEQ ID NO: 1701766 - DNA, 25 bp, Homo sapien
atgaggatggcggtcgggctcccct

SEQ ID NO: 1701767 - DNA, 25 bp, Homo sapien
cgccagagcatgagggcaatgatga

SEQ ID NO: 1701768 - DNA, 25 bp, Homo sapien
gccgccagagcatgagggcaatgat

SEQ ID NO: 1701769 - DNA, 25 bp, Homo sapien
gacagagaggtgaaccgtcagctcc

SEQ ID NO: 1701770 - DNA, 25 bp, Homo sapien
gaggtgaaccgtcagctcctcttcc

SEQ ID NO: 1701771 - DNA, 25 bp, Homo sapien
tcctcttccaacaccctccgttcag

SEQ ID NO: 1701772 - DNA, 25 bp, Homo sapien
cagagaggtgaaccgtcagctcctc

SEQ ID NO: 1701773 - DNA, 25 bp, Homo sapien
ctcctggtacgggggtggctctcta

SEQ ID NO: 1701774 - DNA, 25 bp, Homo sapien
gggacacagggagcggagtggggcg

SEQ ID NO: 1701775 - DNA, 25 bp, Homo sapien
gcggattcccacgaggccggggctc

SEQ ID NO: 1701776 - DNA, 25 bp, Homo sapien
ggctcctggtacgggggtggctctc

SEQ ID NO: 1701777 - DNA, 25 bp, Homo sapien
ctgggtgttggtgggtttggcccag

SEQ ID NO: 1701778 - DNA, 25 bp, Homo sapien
ggacgggcgtaagtggccagaagga

SEQ ID NO: 1701779 - DNA, 25 bp, Homo sapien
aggcggtaggctggattggagagca

SEQ ID NO: 1701780 - DNA, 25 bp, Homo sapien
gtggccagaaggaggcggtaggctg

SEQ ID NO: 1701781 - DNA, 25 bp, Homo sapien
acaggacgaggcatcaggaacagcc

SEQ ID NO: 1701782 - DNA, 25 bp, Homo sapien
cactggcatgggacgagagttagct

SEQ ID NO: 1701783 - DNA, 25 bp, Homo sapien
ggccctgtgtctcccggttgagtga

SEQ ID NO: 1701784 - DNA, 25 bp, Homo sapien
tgcgccaacctcaaaccaggaagac

SEQ ID NO: 1701785 - DNA, 25 bp, Homo sapien
ggcttctcaggctccatatagtccc

SEQ ID NO: 1701786 - DNA, 25 bp, Homo sapien
cttctcaggctccatatagtcccca

SEQ ID NO: 1701787 - DNA, 25 bp, Homo sapien
ctggcttctcaggctccatatagtc

SEQ ID NO: 1701788 - DNA, 25 bp, Homo sapien
tggcttctcaggctccatatagtcc

SEQ ID NO: 1701789 - DNA, 25 bp, Homo sapien
acaatgtcagcctcggcataatggg

SEQ ID NO: 1701790 - DNA, 25 bp, Homo sapien
ctgcagggtaacaatgtcagcctcg

SEQ ID NO: 1701791 - DNA, 25 bp, Homo sapien
ggtaacaatgtcagcctcggcataa

SEQ ID NO: 1701792 - DNA, 25 bp, Homo sapien
cctcggcataatgggggacgctgtt

SEQ ID NO: 1701793 - DNA, 25 bp, Homo sapien
gcaggcacagcataggtgttgcccc

SEQ ID NO: 1701794 - DNA, 25 bp, Homo sapien
aagcttctccttgaagcggagtcga

SEQ ID NO: 1701795 - DNA, 25 bp, Homo sapien
cagtgcaggcacagcataggtgttg

SEQ ID NO: 1701796 - DNA, 25 bp, Homo sapien
cgagatcgagggaaatccactctgg

SEQ ID NO: 1701797 - DNA, 25 bp, Homo sapien
gcatcagagcacacaatagggccag

SEQ ID NO: 1701798 - DNA, 25 bp, Homo sapien
catggcatcagagcacacaataggg

SEQ ID NO: 1701799 - DNA, 25 bp, Homo sapien
gggccagacactgggtaggcaccct

SEQ ID NO: 1701800 - DNA, 25 bp, Homo sapien
tcagagcacacaatagggccagaca

SEQ ID NO: 1701801 - DNA, 25 bp, Homo sapien
catctggccgtaagatcttgacagc

SEQ ID NO: 1701802 - DNA, 25 bp, Homo sapien
taccagcaaagggtgtcccttacgc

SEQ ID NO: 1701803 - DNA, 25 bp, Homo sapien
gggaaatcaagactaaccagatctt

SEQ ID NO: 1701804 - DNA, 25 bp, Homo sapien
gggctgtcgacctcacacaggtgca

SEQ ID NO: 1701805 - DNA, 25 bp, Homo sapien
tccttgagcctcgacatgatcttca

SEQ ID NO: 1701806 - DNA, 25 bp, Homo sapien
cttgagcctcgacatgatcttcacc

SEQ ID NO: 1701807 - DNA, 25 bp, Homo sapien
ccttgagcctcgacatgatcttcac

SEQ ID NO: 1701808 - DNA, 25 bp, Homo sapien
gtccttgagcctcgacatgatcttc

SEQ ID NO: 1701809 - DNA, 25 bp, Homo sapien
gcagagggggtcgtcctgcacacac

SEQ ID NO: 1701810 - DNA, 25 bp, Homo sapien
tgaggtcgccgttctccatgtagtc

SEQ ID NO: 1701811 - DNA, 25 bp, Homo sapien
ggtcgccgttctccatgtagtcagt

SEQ ID NO: 1701812 - DNA, 25 bp, Homo sapien
tcgccgttctccatgtagtcagtaa

SEQ ID NO: 1701813 - DNA, 25 bp, Homo sapien
ccggaggcgatctgggctgccacat

SEQ ID NO: 1701814 - DNA, 25 bp, Homo sapien
tgagtgtggccagatagcgcatgcc

SEQ ID NO: 1701815 - DNA, 25 bp, Homo sapien
gttgagtgtggccagatagcgcatg

SEQ ID NO: 1701816 - DNA, 25 bp, Homo sapien
cagatagcgcatgccggaggcgatc

SEQ ID NO: 1701817 - DNA, 25 bp, Homo sapien
aactaggcagttccgcgtggccagg

SEQ ID NO: 1701818 - DNA, 25 bp, Homo sapien
cacggtaatagtccccagcatagag

SEQ ID NO: 1701819 - DNA, 25 bp, Homo sapien
caaagtctgcgattttgatggtgaa

SEQ ID NO: 1701820 - DNA, 25 bp, Homo sapien
gaggttccggctcatgccaaagtct

SEQ ID NO: 1701821 - DNA, 25 bp, Homo sapien
tcgatgacctgctcgtcggtgagct

SEQ ID NO: 1701822 - DNA, 25 bp, Homo sapien
acgtcactcgcagtcgtgaacttcc

SEQ ID NO: 1701823 - DNA, 25 bp, Homo sapien
tgctcgtcggtgagctgcccaaagg

SEQ ID NO: 1701824 - DNA, 25 bp, Homo sapien
acaccaaaggcccacacgtcactcg

SEQ ID NO: 1701825 - DNA, 25 bp, Homo sapien
tgtggcagtgtggatgagagtcagg

SEQ ID NO: 1701826 - DNA, 25 bp, Homo sapien
tgtcccccgcctcggacccatcttc

SEQ ID NO: 1701827 - DNA, 25 bp, Homo sapien
tttagtctccaagatgacaactctg

SEQ ID NO: 1701828 - DNA, 25 bp, Homo sapien
gagagtcagggaacaaatattcttt

SEQ ID NO: 1701829 - DNA, 25 bp, Homo sapien
aggcaggcggccgggacaggtacac

SEQ ID NO: 1701830 - DNA, 25 bp, Homo sapien
gcaccgaagcatcagctcatatagg

SEQ ID NO: 1701831 - DNA, 25 bp, Homo sapien
gaaaagggtggtcgctgctcagact

SEQ ID NO: 1701832 - DNA, 25 bp, Homo sapien
gccaggaaccgatgcagctgggaaa

SEQ ID NO: 1701833 - DNA, 25 bp, Homo sapien
gtggtcgctgctcagactcccggct

SEQ ID NO: 1701834 - DNA, 25 bp, Homo sapien
caggtgctccaatgggccatgtcca

SEQ ID NO: 1701835 - DNA, 25 bp, Homo sapien
ctgaggacaagtacaggagcaggca

SEQ ID NO: 1701836 - DNA, 25 bp, Homo sapien
cttccccaagggatggctagaggag

SEQ ID NO: 1701837 - DNA, 25 bp, Homo sapien
gagaagttctagctacaagactgca

SEQ ID NO: 1701838 - DNA, 25 bp, Homo sapien
aaaaatcaatgtggcagctacacta

SEQ ID NO: 1701839 - DNA, 25 bp, Homo sapien
aaatcaatgtggcagctacactaga

SEQ ID NO: 1701840 - DNA, 25 bp, Homo sapien
atcaatgtggcagctacactagaga

SEQ ID NO: 1701841 - DNA, 25 bp, Homo sapien
gaaaaatcaatgtggcagctacact

SEQ ID NO: 1701842 - DNA, 25 bp, Homo sapien
gctaggtccatatattagtgtaaaa

SEQ ID NO: 1701843 - DNA, 25 bp, Homo sapien
tcaagctaggtccatatattagtgt

SEQ ID NO: 1701844 - DNA, 25 bp, Homo sapien
cctagtgcaggggattaaaattgcc

SEQ ID NO: 1701845 - DNA, 25 bp, Homo sapien
ttaaaattgcctcaagctaggtcca

SEQ ID NO: 1701846 - DNA, 25 bp, Homo sapien
gcgtttatggcacaaaaaaggttca

SEQ ID NO: 1701847 - DNA, 25 bp, Homo sapien
cctctacagactgccaaaggcgttt

SEQ ID NO: 1701848 - DNA, 25 bp, Homo sapien
ttgagaaggttcatgcactcagaca

SEQ ID NO: 1701849 - DNA, 25 bp, Homo sapien
ggaggactcagtagacctctacaga

SEQ ID NO: 1701850 - DNA, 25 bp, Homo sapien
agaaagatttcacaggcaagagccc

SEQ ID NO: 1701851 - DNA, 25 bp, Homo sapien
aagatggtgaaaaaatgcgaggaaa

SEQ ID NO: 1701852 - DNA, 25 bp, Homo sapien
tcgcttaatcggagccaaagtctcg

SEQ ID NO: 1701853 - DNA, 25 bp, Homo sapien
tcggagccaaagtctcgcattggct

SEQ ID NO: 1701854 - DNA, 25 bp, Homo sapien
gagtctcgggccgtcgcttaatcgg

SEQ ID NO: 1701855 - DNA, 25 bp, Homo sapien
tcgggccgtcgcttaatcggagcca

SEQ ID NO: 1701856 - DNA, 25 bp, Homo sapien
cactctgtcgatcctcctcgcgcac

SEQ ID NO: 1701857 - DNA, 25 bp, Homo sapien
ggccccctaagaattcctgcagatt

SEQ ID NO: 1701858 - DNA, 25 bp, Homo sapien
cagggtgcccatacaatcggtccaa

SEQ ID NO: 1701859 - DNA, 25 bp, Homo sapien
gattcctgcattgtaggtgtactcg

SEQ ID NO: 1701860 - DNA, 25 bp, Homo sapien
atcggtccaataccccagggctcag

SEQ ID NO: 1701861 - DNA, 25 bp, Homo sapien
gttcttagccaaggatgggagctcc

SEQ ID NO: 1701862 - DNA, 25 bp, Homo sapien
agcatccgcatcacccagttcttag

SEQ ID NO: 1701863 - DNA, 25 bp, Homo sapien
tccttctttacccacagagctacag

SEQ ID NO: 1701864 - DNA, 25 bp, Homo sapien
gaattccttctttacccacagagct

SEQ ID NO: 1701865 - DNA, 25 bp, Homo sapien
cagtttgggaaatgtagctgttgag

SEQ ID NO: 1701866 - DNA, 25 bp, Homo sapien
agttttgtgatatatctattaacac

SEQ ID NO: 1701867 - DNA, 25 bp, Homo sapien
tattaacacttcctggaagtgctcc

SEQ ID NO: 1701868 - DNA, 25 bp, Homo sapien
tgagaaatttgtatctggctgagac

SEQ ID NO: 1701869 - DNA, 25 bp, Homo sapien
caatgcggaggttctggcggaaaat

SEQ ID NO: 1701870 - DNA, 25 bp, Homo sapien
gccagatccggaggccgctcagcag

SEQ ID NO: 1701871 - DNA, 25 bp, Homo sapien
ccagaagggcaatgcggaggttctg

SEQ ID NO: 1701872 - DNA, 25 bp, Homo sapien
ggagcagctgtgtgtgccagatccg

SEQ ID NO: 1701873 - DNA, 25 bp, Homo sapien
atcgctcctcggcgtacttgtcaag

SEQ ID NO: 1701874 - DNA, 25 bp, Homo sapien
cagctgacttgtgtcatcagaccag

SEQ ID NO: 1701875 - DNA, 25 bp, Homo sapien
tcccgggcatgcttgtctggtccca

SEQ ID NO: 1701876 - DNA, 25 bp, Homo sapien
gaacgtcccgggcatgcttgtctgg

SEQ ID NO: 1701877 - DNA, 25 bp, Homo sapien
ctggctgaggagctgagccaagtcc

SEQ ID NO: 1701878 - DNA, 25 bp, Homo sapien
caagtcctggctgacagctgcactg

SEQ ID NO: 1701879 - DNA, 25 bp, Homo sapien
ctgggggagcccaccatgaagtgca

SEQ ID NO: 1701880 - DNA, 25 bp, Homo sapien
gagcccaccatgaagtgcaagacca

SEQ ID NO: 1701881 - DNA, 25 bp, Homo sapien
tggaagccagcggaagtaatgcagg

SEQ ID NO: 1701882 - DNA, 25 bp, Homo sapien
aatactgcaacataaagtaccagag

SEQ ID NO: 1701883 - DNA, 25 bp, Homo sapien
aagtaatgcagggcggctctccagg

SEQ ID NO: 1701884 - DNA, 25 bp, Homo sapien
cataaagtaccagagctgagccggg

SEQ ID NO: 1701885 - DNA, 25 bp, Homo sapien
ggaaggagagaatctctaccaggtc

SEQ ID NO: 1701886 - DNA, 25 bp, Homo sapien
gaggaaggagagaatctctaccagg

SEQ ID NO: 1701887 - DNA, 25 bp, Homo sapien
ccagagtagagaagctgagctggaa

SEQ ID NO: 1701888 - DNA, 25 bp, Homo sapien
aaggagagaatctctaccaggtcca

SEQ ID NO: 1701889 - DNA, 25 bp, Homo sapien
cactcataccttccacagagtaatc

SEQ ID NO: 1701890 - DNA, 25 bp, Homo sapien
agttcaacagagaatcactcatacc

SEQ ID NO: 1701891 - DNA, 25 bp, Homo sapien
aacaagcccaaactcacgcagatgt

SEQ ID NO: 1701892 - DNA, 25 bp, Homo sapien
cgcagatgttgcaggaagttcaaca

SEQ ID NO: 1701893 - DNA, 25 bp, Homo sapien
gaaatatcagatccctcccaagatg

SEQ ID NO: 1701894 - DNA, 25 bp, Homo sapien
agttctggcaactgcttcctgctac

SEQ ID NO: 1701895 - DNA, 25 bp, Homo sapien
ggcagatgccttgtctcagaagtca

SEQ ID NO: 1701896 - DNA, 25 bp, Homo sapien
gaagccacttatctaggcgctcata

SEQ ID NO: 1701897 - DNA, 25 bp, Homo sapien
tgatgagagattgatggccaggcgt

SEQ ID NO: 1701898 - DNA, 25 bp, Homo sapien
ccgtgtaggcatacagtcggtaatt

SEQ ID NO: 1701899 - DNA, 25 bp, Homo sapien
ggtaattggtttccacgacaatgaa

SEQ ID NO: 1701900 - DNA, 25 bp, Homo sapien
aaacctggctgatgcacagtgcccc

SEQ ID NO: 1701901 - DNA, 25 bp, Homo sapien
tctgtagactgccaggtaaacacga

SEQ ID NO: 1701902 - DNA, 25 bp, Homo sapien
ttcaagtgtcatgagaaatgtcaga

SEQ ID NO: 1701903 - DNA, 25 bp, Homo sapien
cctcaagcccttctttcaagtgtca

SEQ ID NO: 1701904 - DNA, 25 bp, Homo sapien
cgaacataaactggcattccctcac

SEQ ID NO: 1701905 - DNA, 25 bp, Homo sapien
ctggcgattgcctgctgcacactct

SEQ ID NO: 1701906 - DNA, 25 bp, Homo sapien
gtcacctgcgccaccaccatgttgg

SEQ ID NO: 1701907 - DNA, 25 bp, Homo sapien
tgttggggaaccgatagagcatctc

SEQ ID NO: 1701908 - DNA, 25 bp, Homo sapien
agggcaatgagggcaatctgcagct

SEQ ID NO: 1701909 - DNA, 25 bp, Homo sapien
tagtttacgcagttaggatgtggca

SEQ ID NO: 1701910 - DNA, 25 bp, Homo sapien
gtgccgaggcacaaatccagatcta

SEQ ID NO: 1701911 - DNA, 25 bp, Homo sapien
ccaatgaattatcccggcaaccctg

SEQ ID NO: 1701912 - DNA, 25 bp, Homo sapien
gcatttattgcatgacaggtgctga

SEQ ID NO: 1701913 - DNA, 25 bp, Homo sapien
ctgtttgagcatcactgggtgggct

SEQ ID NO: 1701914 - DNA, 25 bp, Homo sapien
gcatcactgggtgggctcttgtcct

SEQ ID NO: 1701915 - DNA, 25 bp, Homo sapien
gagcatcactgggtgggctcttgtc

SEQ ID NO: 1701916 - DNA, 25 bp, Homo sapien
gtttgagcatcactgggtgggctct

SEQ ID NO: 1701917 - DNA, 25 bp, Homo sapien
gctgccagcctctgacatcttggag

SEQ ID NO: 1701918 - DNA, 25 bp, Homo sapien
agcaagggttgactgtagggactca

SEQ ID NO: 1701919 - DNA, 25 bp, Homo sapien
cccagatttggatgcccctttttct

SEQ ID NO: 1701920 - DNA, 25 bp, Homo sapien
ctgtagggactcagaatactgcccc

SEQ ID NO: 1701921 - DNA, 25 bp, Homo sapien
cccagagccggatctggtcggtgat

SEQ ID NO: 1701922 - DNA, 25 bp, Homo sapien
ccagctcccagagccggatctggtc

SEQ ID NO: 1701923 - DNA, 25 bp, Homo sapien
tgaaccggagtctgtccctttccag

SEQ ID NO: 1701924 - DNA, 25 bp, Homo sapien
ctcagtgaaccggagtctgtccctt

SEQ ID NO: 1701925 - DNA, 25 bp, Homo sapien
agttctcgaacacgagcacgcccag

SEQ ID NO: 1701926 - DNA, 25 bp, Homo sapien
tccacttgcgacaggaactggttat

SEQ ID NO: 1701927 - DNA, 25 bp, Homo sapien
accatgagccgcttggccgagttct

SEQ ID NO: 1701928 - DNA, 25 bp, Homo sapien
agctcaaagtccacttgcgacagga

SEQ ID NO: 1701929 - DNA, 25 bp, Homo sapien
aggagctatgtttctgccgcttcca

SEQ ID NO: 1701930 - DNA, 25 bp, Homo sapien
tcaggagctatgtttctgccgcttc

SEQ ID NO: 1701931 - DNA, 25 bp, Homo sapien
ttctgccgcttccaaaagcgcttga

SEQ ID NO: 1701932 - DNA, 25 bp, Homo sapien
tctgccgcttccaaaagcgcttgac

SEQ ID NO: 1701933 - DNA, 25 bp, Homo sapien
caagaaaagccctgacgcgtaaata

SEQ ID NO: 1701934 - DNA, 25 bp, Homo sapien
aggtccgtgtccaagtcccgcgctc

SEQ ID NO: 1701935 - DNA, 25 bp, Homo sapien
gccgctatcccagggcgccccgcgg

SEQ ID NO: 1701936 - DNA, 25 bp, Homo sapien
cggcagggactgaggaatccaccaa

SEQ ID NO: 1701937 - DNA, 25 bp, Homo sapien
gcggcggcagggactgaggaatcca

SEQ ID NO: 1701938 - DNA, 25 bp, Homo sapien
gccccgcggcggcagggactgagga

SEQ ID NO: 1701939 - DNA, 25 bp, Homo sapien
tagggctcagaaactcagggagatg

SEQ ID NO: 1701940 - DNA, 25 bp, Homo sapien
ctgacacatgagagatagggctcag

SEQ ID NO: 1701941 - DNA, 25 bp, Homo sapien
gagatgatgggcatcagcgcgccca

SEQ ID NO: 1701942 - DNA, 25 bp, Homo sapien
agagccagcaaagagtcccgccagg

SEQ ID NO: 1701943 - DNA, 25 bp, Homo sapien
gcgccatggagccacggatatcagg

SEQ ID NO: 1701944 - DNA, 25 bp, Homo sapien
gagtgtctggattcggcggtgacca

SEQ ID NO: 1701945 - DNA, 25 bp, Homo sapien
tcctccttgagagctagagtgcatg

SEQ ID NO: 1701946 - DNA, 25 bp, Homo sapien
tggtatcgacagacagcgccatgga

SEQ ID NO: 1701947 - DNA, 25 bp, Homo sapien
tcccgtctctaattagcacaggtct

SEQ ID NO: 1701948 - DNA, 25 bp, Homo sapien
gagaagggtcactccccttgttcca

SEQ ID NO: 1701949 - DNA, 25 bp, Homo sapien
cacattaggatatgggggtggagaa

SEQ ID NO: 1701950 - DNA, 25 bp, Homo sapien
tttcccgtctctaattagcacaggt

SEQ ID NO: 1701951 - DNA, 25 bp, Homo sapien
gagtgtttggaaaggggccgagatc

SEQ ID NO: 1701952 - DNA, 25 bp, Homo sapien
agtgtttggaaaggggccgagatct

SEQ ID NO: 1701953 - DNA, 25 bp, Homo sapien
tgtttggaaaggggccgagatctgt

SEQ ID NO: 1701954 - DNA, 25 bp, Homo sapien
caggagtgtttggaaaggggccgag

SEQ ID NO: 1701955 - DNA, 25 bp, Homo sapien
cgaaaagaagcgagaggcaaatgag

SEQ ID NO: 1701956 - DNA, 25 bp, Homo sapien
tgtgtagaaacggagtgaaacctgg

SEQ ID NO: 1701957 - DNA, 25 bp, Homo sapien
ggggaggccccgtgagtgcctcagc

SEQ ID NO: 1701958 - DNA, 25 bp, Homo sapien
aaaatggtggtcgaaaagaagcgag

SEQ ID NO: 1701959 - DNA, 25 bp, Homo sapien
cttctctcgcaggcgcttctgtttg

SEQ ID NO: 1701960 - DNA, 25 bp, Homo sapien
ttctctcgcaggcgcttctgtttgg

SEQ ID NO: 1701961 - DNA, 25 bp, Homo sapien
tggcttcacggttcctccgggagat

SEQ ID NO: 1701962 - DNA, 25 bp, Homo sapien
ggtttcgtagggatttcatacaata

SEQ ID NO: 1701963 - DNA, 25 bp, Homo sapien
tacaatactaactccttaggcctcc

SEQ ID NO: 1701964 - DNA, 25 bp, Homo sapien
tagggatttcatacaatactaactc

SEQ ID NO: 1701965 - DNA, 25 bp, Homo sapien
taggcctccaggccttaatggattc

SEQ ID NO: 1701966 - DNA, 25 bp, Homo sapien
cactgaacttgttcccaggctgcat

SEQ ID NO: 1701967 - DNA, 25 bp, Homo sapien
tattctggtttgaagaagccctctc

SEQ ID NO: 1701968 - DNA, 25 bp, Homo sapien
ccaggcagcctcaacatatcggggg

SEQ ID NO: 1701969 - DNA, 25 bp, Homo sapien
tcgtacccaccacgggtaccaggca

SEQ ID NO: 1701970 - DNA, 25 bp, Homo sapien
tttgaagaagccctctcgtacccac

SEQ ID NO: 1701971 - DNA, 25 bp, Homo sapien
agcgcacgagggcatcctgtatggc

SEQ ID NO: 1701972 - DNA, 25 bp, Homo sapien
tggaaaaggtctcccctgtagcttg

SEQ ID NO: 1701973 - DNA, 25 bp, Homo sapien
accgtgagtgcgtggccaatgtgca

SEQ ID NO: 1701974 - DNA, 25 bp, Homo sapien
tgacattgggaggtgggatacacat

SEQ ID NO: 1701975 - DNA, 25 bp, Homo sapien
tgcatgatctgaaccagggacccac

SEQ ID NO: 1701976 - DNA, 25 bp, Homo sapien
tgtagcaattcctgcatgatctgaa

SEQ ID NO: 1701977 - DNA, 25 bp, Homo sapien
gcacttgatccccacgcatccggtg

SEQ ID NO: 1701978 - DNA, 25 bp, Homo sapien
gcaattcctgcatgatctgaaccag

SEQ ID NO: 1701979 - DNA, 25 bp, Homo sapien
tcactccccgttccttccacagttg

SEQ ID NO: 1701980 - DNA, 25 bp, Homo sapien
tgccacacctccctaaggaaggcct

SEQ ID NO: 1701981 - DNA, 25 bp, Homo sapien
ttccacagttgtttctccaccacag

SEQ ID NO: 1701982 - DNA, 25 bp, Homo sapien
tcagctcatgtctcctcactccccg

SEQ ID NO: 1701983 - DNA, 25 bp, Homo sapien
tggtaaaacactctcgatcccagtc

SEQ ID NO: 1701984 - DNA, 25 bp, Homo sapien
catggtaaaacactctcgatcccag

SEQ ID NO: 1701985 - DNA, 25 bp, Homo sapien
ggtaaaacactctcgatcccagtcc

SEQ ID NO: 1701986 - DNA, 25 bp, Homo sapien
ccatggtaaaacactctcgatccca

SEQ ID NO: 1701987 - DNA, 25 bp, Homo sapien
caatgtccgagatggctgatcttaa

SEQ ID NO: 1701988 - DNA, 25 bp, Homo sapien
cagttgacaagctgatggttccggt

SEQ ID NO: 1701989 - DNA, 25 bp, Homo sapien
tgatcttaaagcacatgaccagttg

SEQ ID NO: 1701990 - DNA, 25 bp, Homo sapien
tagagccgcacaaaagcttcagtca

SEQ ID NO: 1701991 - DNA, 25 bp, Homo sapien
tgtgtgtggccaggcaggggccggt

SEQ ID NO: 1701992 - DNA, 25 bp, Homo sapien
tgtgtggccaggcaggggccggttc

SEQ ID NO: 1701993 - DNA, 25 bp, Homo sapien
tgtggccaggcaggggccggttctc

SEQ ID NO: 1701994 - DNA, 25 bp, Homo sapien
ggccaggcaggggccggttctccac

SEQ ID NO: 1701995 - DNA, 25 bp, Homo sapien
tccatccacggggaaggcaacagaa

SEQ ID NO: 1701996 - DNA, 25 bp, Homo sapien
caacagaaaataggaggccaaaaga

SEQ ID NO: 1701997 - DNA, 25 bp, Homo sapien
cagaaaataggaggccaaaagacac

SEQ ID NO: 1701998 - DNA, 25 bp, Homo sapien
gaaggcaacagaaaataggaggcca

SEQ ID NO: 1701999 - DNA, 25 bp, Homo sapien
gccaacatagctaaaggcagtagaa

SEQ ID NO: 1702000 - DNA, 25 bp, Homo sapien
tgccaacatagctaaaggcagtaga

SEQ ID NO: 1702001 - DNA, 25 bp, Homo sapien
catttaaacacttacagctggtcat

SEQ ID NO: 1702002 - DNA, 25 bp, Homo sapien
cacttacagctggtcatcatcctca

SEQ ID NO: 1702003 - DNA, 25 bp, Homo sapien
aaacacttacagctggtcatcatcc

SEQ ID NO: 1702004 - DNA, 25 bp, Homo sapien
taaacatttaaacacttacagctgg

SEQ ID NO: 1702005 - DNA, 25 bp, Homo sapien
ttgtggttcctaccacaacctctgc

SEQ ID NO: 1702006 - DNA, 25 bp, Homo sapien
tatcgcgagtcgtctggatgaacgg

SEQ ID NO: 1702007 - DNA, 25 bp, Homo sapien
agtcgtctggatgaacggccacagc

SEQ ID NO: 1702008 - DNA, 25 bp, Homo sapien
tgtgtatcgcgagtcgtctggatga

SEQ ID NO: 1702009 - DNA, 25 bp, Homo sapien
tctattatgccactgcagcagagct

SEQ ID NO: 1702010 - DNA, 25 bp, Homo sapien
gagggagtccaatcagaaccactga

SEQ ID NO: 1702011 - DNA, 25 bp, Homo sapien
tagcaagctagagcaaggtcagcaa

SEQ ID NO: 1702012 - DNA, 25 bp, Homo sapien
caagctggattaggaccatgggcca

SEQ ID NO: 1702013 - DNA, 25 bp, Homo sapien
tcaaggggtgacgaagctgtcgccc

SEQ ID NO: 1702014 - DNA, 25 bp, Homo sapien
tgacgaagctgtcgcccgtgtagat

SEQ ID NO: 1702015 - DNA, 25 bp, Homo sapien
gggtgacgaagctgtcgcccgtgta

SEQ ID NO: 1702016 - DNA, 25 bp, Homo sapien
ctgccccatcaaggggtgacgaagc

SEQ ID NO: 1702017 - DNA, 25 bp, Homo sapien
ccgtgcccacatgtggctgaacagc

SEQ ID NO: 1702018 - DNA, 25 bp, Homo sapien
catcctccgcaatgacattcaaggg

SEQ ID NO: 1702019 - DNA, 25 bp, Homo sapien
cccatctcagcatcggcaggactgt

SEQ ID NO: 1702020 - DNA, 25 bp, Homo sapien
tggtcccatcctccgcaatgacatt

SEQ ID NO: 1702021 - DNA, 25 bp, Homo sapien
aggggctcaagccatgtcgggcccc

SEQ ID NO: 1702022 - DNA, 25 bp, Homo sapien
agatgggcagtaccatggggtggtt

SEQ ID NO: 1702023 - DNA, 25 bp, Homo sapien
ctggaggccccggaacaggccccat

SEQ ID NO: 1702024 - DNA, 25 bp, Homo sapien
tgcagatgggcagtaccatggggtg

SEQ ID NO: 1702025 - DNA, 25 bp, Homo sapien
tgggcagtaccatggggtggttctg

SEQ ID NO: 1702026 - DNA, 25 bp, Homo sapien
actggttcttcagcaggtattctat

SEQ ID NO: 1702027 - DNA, 25 bp, Homo sapien
gtattctatcacatccccagaacgg

SEQ ID NO: 1702028 - DNA, 25 bp, Homo sapien
tggcagcggacaaaccactggttct

SEQ ID NO: 1702029 - DNA, 25 bp, Homo sapien
ttcctggcagcggacaaaccactgg

SEQ ID NO: 1702030 - DNA, 25 bp, Homo sapien
agtccttcctacactgcagcctcac

SEQ ID NO: 1702031 - DNA, 25 bp, Homo sapien
ccagtccttcctacactgcagcctc

SEQ ID NO: 1702032 - DNA, 25 bp, Homo sapien
cagtccttcctacactgcagcctca

SEQ ID NO: 1702033 - DNA, 25 bp, Homo sapien
aatatgggaaaaccagtgctgccag

SEQ ID NO: 1702034 - DNA, 25 bp, Homo sapien
ggaaaaccagtgctgccagttcttc

SEQ ID NO: 1702035 - DNA, 25 bp, Homo sapien
tatgggaaaaccagtgctgccagtt

SEQ ID NO: 1702036 - DNA, 25 bp, Homo sapien
ccaatatgggaaaaccagtgctgcc

SEQ ID NO: 1702037 - DNA, 25 bp, Homo sapien
ccaggtaggctggaatctgatggcc

SEQ ID NO: 1702038 - DNA, 25 bp, Homo sapien
gtcctctacaaccaggtaggctgga

SEQ ID NO: 1702039 - DNA, 25 bp, Homo sapien
ggtcctctacaaccaggtaggctgg

SEQ ID NO: 1702040 - DNA, 25 bp, Homo sapien
cctggcctccctgtcagttccgctg

SEQ ID NO: 1702041 - DNA, 25 bp, Homo sapien
gtcagttccgctgctacctctctgg

SEQ ID NO: 1702042 - DNA, 25 bp, Homo sapien
cgcccaaccacccaacagtcctctt

SEQ ID NO: 1702043 - DNA, 25 bp, Homo sapien
tctgaccgcccaaccacccaacagt

SEQ ID NO: 1702044 - DNA, 25 bp, Homo sapien
aaccatgtgtctaggacatcaggat

SEQ ID NO: 1702045 - DNA, 25 bp, Homo sapien
agaagaaaaccatgtgtctaggaca

SEQ ID NO: 1702046 - DNA, 25 bp, Homo sapien
gaaaaccatgtgtctaggacatcag

SEQ ID NO: 1702047 - DNA, 25 bp, Homo sapien
aagaaaaccatgtgtctaggacatc

SEQ ID NO: 1702048 - DNA, 25 bp, Homo sapien
ctgcccgtttccaaaagtgacaggg

SEQ ID NO: 1702049 - DNA, 25 bp, Homo sapien
gcagaaggtcgctgcccgtttccaa

SEQ ID NO: 1702050 - DNA, 25 bp, Homo sapien
gggtccccaacatgaccatgcggcc

SEQ ID NO: 1702051 - DNA, 25 bp, Homo sapien
ccacccagaacagcagaaggtcgct

SEQ ID NO: 1702052 - DNA, 25 bp, Homo sapien
ttccttggaggtgccttgggatctc

SEQ ID NO: 1702053 - DNA, 25 bp, Homo sapien
tttccttggaggtgccttgggatct

SEQ ID NO: 1702054 - DNA, 25 bp, Homo sapien
tccttggaggtgccttgggatctct

SEQ ID NO: 1702055 - DNA, 25 bp, Homo sapien
cccgaaccatgggatgaagaagcac

SEQ ID NO: 1702056 - DNA, 25 bp, Homo sapien
tgtcccgaaccatgggatgaagaag

SEQ ID NO: 1702057 - DNA, 25 bp, Homo sapien
gcctgtcccgaaccatgggatgaag

SEQ ID NO: 1702058 - DNA, 25 bp, Homo sapien
cctgcctgtcccgaaccatgggatg

SEQ ID NO: 1702059 - DNA, 25 bp, Homo sapien
caaatttccgcttctcagcttttcc

SEQ ID NO: 1702060 - DNA, 25 bp, Homo sapien
gggtccaaatttccgcttctcagct

SEQ ID NO: 1702061 - DNA, 25 bp, Homo sapien
tctgcagggtccaaatttccgcttc

SEQ ID NO: 1702062 - DNA, 25 bp, Homo sapien
agctctgcagggtccaaatttccgc

SEQ ID NO: 1702063 - DNA, 25 bp, Homo sapien
gtggcagatgcctttgtggctgcag

SEQ ID NO: 1702064 - DNA, 25 bp, Homo sapien
gagcagagtgtgaatctcagggcat

SEQ ID NO: 1702065 - DNA, 25 bp, Homo sapien
cagggatcccgtgaggaaagtcctt

SEQ ID NO: 1702066 - DNA, 25 bp, Homo sapien
acactcagggatcccgtgaggaaag

SEQ ID NO: 1702067 - DNA, 25 bp, Homo sapien
agcagagtgtgaatctcagggcatc

SEQ ID NO: 1702068 - DNA, 25 bp, Homo sapien
gaggataaagcgaagagcattccag

SEQ ID NO: 1702069 - DNA, 25 bp, Homo sapien
tttctcccctaaagcattgaggata

SEQ ID NO: 1702070 - DNA, 25 bp, Homo sapien
gcaggctgtggcacaaatttctccc

SEQ ID NO: 1702071 - DNA, 25 bp, Homo sapien
gaaatgtcggcagctctggacctca

SEQ ID NO: 1702072 - DNA, 25 bp, Homo sapien
catgagtgacgagcgagagctctcg

SEQ ID NO: 1702073 - DNA, 25 bp, Homo sapien
cagccagggcaaggcggctcaggat

SEQ ID NO: 1702074 - DNA, 25 bp, Homo sapien
gctcaggatccaggcatccatcggg

SEQ ID NO: 1702075 - DNA, 25 bp, Homo sapien
tagacgtcacagaggttgtgaagcc

SEQ ID NO: 1702076 - DNA, 25 bp, Homo sapien
gggacaggcagaagcacttagcact

SEQ ID NO: 1702077 - DNA, 25 bp, Homo sapien
gtaggacagcgtgagaacccctggt

SEQ ID NO: 1702078 - DNA, 25 bp, Homo sapien
caacctgctaaaggagccactctgg

SEQ ID NO: 1702079 - DNA, 25 bp, Homo sapien
gcagtacacagggacaggatttcca

SEQ ID NO: 1702080 - DNA, 25 bp, Homo sapien
ggcgagtgccacagcacgggcttca

SEQ ID NO: 1702081 - DNA, 25 bp, Homo sapien
ggggcgagtgccacagcacgggctt

SEQ ID NO: 1702082 - DNA, 25 bp, Homo sapien
gggcgagtgccacagcacgggcttc

SEQ ID NO: 1702083 - DNA, 25 bp, Homo sapien
ggtagggggcaaccgagatgctggg

SEQ ID NO: 1702084 - DNA, 25 bp, Homo sapien
tagggggcaaccgagatgctggggg

SEQ ID NO: 1702085 - DNA, 25 bp, Homo sapien
ggggcaaccgagatgctgggggcag

SEQ ID NO: 1702086 - DNA, 25 bp, Homo sapien
ctggggtagggggcaaccgagatgc

SEQ ID NO: 1702087 - DNA, 25 bp, Homo sapien
ccactccaaggtgcttgggactcac

SEQ ID NO: 1702088 - DNA, 25 bp, Homo sapien
cagacccactccaaggtgcttggga

SEQ ID NO: 1702089 - DNA, 25 bp, Homo sapien
cacagacccactccaaggtgcttgg

SEQ ID NO: 1702090 - DNA, 25 bp, Homo sapien
gacccactccaaggtgcttgggact

SEQ ID NO: 1702091 - DNA, 25 bp, Homo sapien
gcagcaaccctgcaggaacaatcca

SEQ ID NO: 1702092 - DNA, 25 bp, Homo sapien
cccagggctccacagtaaagtacga

SEQ ID NO: 1702093 - DNA, 25 bp, Homo sapien
acagtaaagtacgaaccattcctgc

SEQ ID NO: 1702094 - DNA, 25 bp, Homo sapien
tagggtcatcgcagcaaccctgcag

SEQ ID NO: 1702095 - DNA, 25 bp, Homo sapien
gccgggctttggtgagctggtacgt

SEQ ID NO: 1702096 - DNA, 25 bp, Homo sapien
cttagcacctgcacgacctcttgga

SEQ ID NO: 1702097 - DNA, 25 bp, Homo sapien
tacgtggctcggagagcccttagca

SEQ ID NO: 1702098 - DNA, 25 bp, Homo sapien
tcttggacccgggagaagcgccgct

SEQ ID NO: 1702099 - DNA, 25 bp, Homo sapien
ccaggctctgagctctgcagcagca

SEQ ID NO: 1702100 - DNA, 25 bp, Homo sapien
tccaagaaggcctcgaagaggccct

SEQ ID NO: 1702101 - DNA, 25 bp, Homo sapien
gaggccctggtccccaggctctgag

SEQ ID NO: 1702102 - DNA, 25 bp, Homo sapien
tggtccccaggctctgagctctgca

SEQ ID NO: 1702103 - DNA, 25 bp, Homo sapien
tgggggtaacaggcccacagcccca

SEQ ID NO: 1702104 - DNA, 25 bp, Homo sapien
tagacttgagccgtgtcactgagtg

SEQ ID NO: 1702105 - DNA, 25 bp, Homo sapien
ctgcgcctgggggtaacaggcccac

SEQ ID NO: 1702106 - DNA, 25 bp, Homo sapien
gacttgagccgtgtcactgagtgga

SEQ ID NO: 1702107 - DNA, 25 bp, Homo sapien
ggtagctggatctgcgggtccacca

SEQ ID NO: 1702108 - DNA, 25 bp, Homo sapien
cttcgggcggctaacagaggtagct

SEQ ID NO: 1702109 - DNA, 25 bp, Homo sapien
tgtgaggctgtcaagctgcttctgc

SEQ ID NO: 1702110 - DNA, 25 bp, Homo sapien
tgcttctgcaacttgtaccttcggg

SEQ ID NO: 1702111 - DNA, 25 bp, Homo sapien
catccatcagctgccggaggtgaga

SEQ ID NO: 1702112 - DNA, 25 bp, Homo sapien
gacaattccagctggagggaagaaa

SEQ ID NO: 1702113 - DNA, 25 bp, Homo sapien
gccttgtccagttttgacaattcca

SEQ ID NO: 1702114 - DNA, 25 bp, Homo sapien
tcatccatcagctgccggaggtgag

SEQ ID NO: 1702115 - DNA, 25 bp, Homo sapien
cagttagtccagaaagtaggtagaa

SEQ ID NO: 1702116 - DNA, 25 bp, Homo sapien
tcactgcgaccaagccagtctgtgt

SEQ ID NO: 1702117 - DNA, 25 bp, Homo sapien
aaaagtcaccactgggagcaaaggg

SEQ ID NO: 1702118 - DNA, 25 bp, Homo sapien
tgaaggcgatggaccacatagtctc

SEQ ID NO: 1702119 - DNA, 25 bp, Homo sapien
tctgccctgacccactatttaaaag

SEQ ID NO: 1702120 - DNA, 25 bp, Homo sapien
acctttacagtgagttctgccctga

SEQ ID NO: 1702121 - DNA, 25 bp, Homo sapien
tggtctccaggctactcctcgagct

SEQ ID NO: 1702122 - DNA, 25 bp, Homo sapien
aagccccagattgtccgccttgagt

SEQ ID NO: 1702123 - DNA, 25 bp, Homo sapien
ggagcagcaccagcacagtgtccat

SEQ ID NO: 1702124 - DNA, 25 bp, Homo sapien
ggcccaggagcagcaccagcacagt

SEQ ID NO: 1702125 - DNA, 25 bp, Homo sapien
tgggtccggccaaggcctgcaggcc

SEQ ID NO: 1702126 - DNA, 25 bp, Homo sapien
ccaggagcagcaccagcacagtgtc

SEQ ID NO: 1702127 - DNA, 25 bp, Homo sapien
tcttgataccgtacattaggctgac

SEQ ID NO: 1702128 - DNA, 25 bp, Homo sapien
agtgagagtgatcaacacaatggcc

SEQ ID NO: 1702129 - DNA, 25 bp, Homo sapien
caattgctgccaccaaagtgagagt

SEQ ID NO: 1702130 - DNA, 25 bp, Homo sapien
gatcaacacaatggcccagtctgag

SEQ ID NO: 1702131 - DNA, 25 bp, Homo sapien
actcatctccctccggaactggcag

SEQ ID NO: 1702132 - DNA, 25 bp, Homo sapien
catggtggctgctgtaaggggtcac

SEQ ID NO: 1702133 - DNA, 25 bp, Homo sapien
tcatttgacaagagtagcgctggct

SEQ ID NO: 1702134 - DNA, 25 bp, Homo sapien
ctttcatttgacaagagtagcgctg

SEQ ID NO: 1702135 - DNA, 25 bp, Homo sapien
gaccggctgggccatgtcggagctg

SEQ ID NO: 1702136 - DNA, 25 bp, Homo sapien
tgggccatgtcggagctgggtggct

SEQ ID NO: 1702137 - DNA, 25 bp, Homo sapien
cggctgggccatgtcggagctgggt

SEQ ID NO: 1702138 - DNA, 25 bp, Homo sapien
agcagaggctgtggaccggctgggc

SEQ ID NO: 1702139 - DNA, 25 bp, Homo sapien
gatttgcctgttgtggacttacgac

SEQ ID NO: 1702140 - DNA, 25 bp, Homo sapien
cgctggttccggatcattgggtctt

SEQ ID NO: 1702141 - DNA, 25 bp, Homo sapien
gagtcagcaggatcaacagagcgct

SEQ ID NO: 1702142 - DNA, 25 bp, Homo sapien
tgatcggatgttgagagttccccag

SEQ ID NO: 1702143 - DNA, 25 bp, Homo sapien
agtgtggtcttctcgttggctgtcg

SEQ ID NO: 1702144 - DNA, 25 bp, Homo sapien
tctgtgaattgcctgagttgtggaa

SEQ ID NO: 1702145 - DNA, 25 bp, Homo sapien
tgtgatcacattggctgatgtagcc

SEQ ID NO: 1702146 - DNA, 25 bp, Homo sapien
cattggccgacgtagtttttgctcc

SEQ ID NO: 1702147 - DNA, 25 bp, Homo sapien
tatggatggctctcgtttcctgtgg

SEQ ID NO: 1702148 - DNA, 25 bp, Homo sapien
agtgggcacctgatgagtaacttca

SEQ ID NO: 1702149 - DNA, 25 bp, Homo sapien
gggcttttatggtctcagtggtcag

SEQ ID NO: 1702150 - DNA, 25 bp, Homo sapien
cagcgtggatacctttctgtgagcc

SEQ ID NO: 1702151 - DNA, 25 bp, Homo sapien
ggaacaccaggaggagaatcacagc

SEQ ID NO: 1702152 - DNA, 25 bp, Homo sapien
acaccaggaggagaatcacagccac

SEQ ID NO: 1702153 - DNA, 25 bp, Homo sapien
caggaggagaatcacagccaccagg

SEQ ID NO: 1702154 - DNA, 25 bp, Homo sapien
agaagatcaggccaaggaacaccag

SEQ ID NO: 1702155 - DNA, 25 bp, Homo sapien
tcatcctctgcatcattgtactggg

SEQ ID NO: 1702156 - DNA, 25 bp, Homo sapien
tgctgctccatcaggtagaccgggt

SEQ ID NO: 1702157 - DNA, 25 bp, Homo sapien
gatctggcccatgccaagattctgc

SEQ ID NO: 1702158 - DNA, 25 bp, Homo sapien
ggcgtgtccgcatcatataggagac

SEQ ID NO: 1702159 - DNA, 25 bp, Homo sapien
tgtgagtccggttcctcatccagga

SEQ ID NO: 1702160 - DNA, 25 bp, Homo sapien
tttacgagataaagctacagctggc

SEQ ID NO: 1702161 - DNA, 25 bp, Homo sapien
tgctgagacaccaatcagggaaggt

SEQ ID NO: 1702162 - DNA, 25 bp, Homo sapien
cagggcgtccactgtagacatttag

SEQ ID NO: 1702163 - DNA, 25 bp, Homo sapien
ggtagtttcagacatggtggcctca

SEQ ID NO: 1702164 - DNA, 25 bp, Homo sapien
cccagaggcttttgtggagattgca

SEQ ID NO: 1702165 - DNA, 25 bp, Homo sapien
tgtggtgtccggtgttctcagagcc

SEQ ID NO: 1702166 - DNA, 25 bp, Homo sapien
gagggcgcagactctacagttgtcc

SEQ ID NO: 1702167 - DNA, 25 bp, Homo sapien
ccttgttgggcacgaaagtggcaga

SEQ ID NO: 1702168 - DNA, 25 bp, Homo sapien
cacaactgttttggtgatggtctga

SEQ ID NO: 1702169 - DNA, 25 bp, Homo sapien
ccaagaagggcgatgaggccaaagc

SEQ ID NO: 1702170 - DNA, 25 bp, Homo sapien
tgctcacagccatgttgctcgtgga

SEQ ID NO: 1702171 - DNA, 25 bp, Homo sapien
tcctacgtttgtgttcctgggaaga

SEQ ID NO: 1702172 - DNA, 25 bp, Homo sapien
tagatgtaccaagactttagagggc

SEQ ID NO: 1702173 - DNA, 25 bp, Homo sapien
aagaatcttggactcaggcgtgggc

SEQ ID NO: 1702174 - DNA, 25 bp, Homo sapien
caagatgcctgggtcctagatgtac

SEQ ID NO: 1702175 - DNA, 25 bp, Homo sapien
aatgcaatagtagaccaaacataag

SEQ ID NO: 1702176 - DNA, 25 bp, Homo sapien
agcttctaaatgcaatagtagacca

SEQ ID NO: 1702177 - DNA, 25 bp, Homo sapien
ctaaatgcaatagtagaccaaacat

SEQ ID NO: 1702178 - DNA, 25 bp, Homo sapien
caatagtagaccaaacataaggaga

SEQ ID NO: 1702179 - DNA, 25 bp, Homo sapien
gatgatcctcactctatggaagaga

SEQ ID NO: 1702180 - DNA, 25 bp, Homo sapien
tgatcctcactctatggaagagaag

SEQ ID NO: 1702181 - DNA, 25 bp, Homo sapien
tgattcgagtaaaatgatgatcctc

SEQ ID NO: 1702182 - DNA, 25 bp, Homo sapien
tctcagaccacccgattttaaataa

SEQ ID NO: 1702183 - DNA, 25 bp, Homo sapien
tcccactggaggttgtatggaactc

SEQ ID NO: 1702184 - DNA, 25 bp, Homo sapien
ccagtgttggcagaggtgctagtct

SEQ ID NO: 1702185 - DNA, 25 bp, Homo sapien
tgtgccagccccattggaggtcgtt

SEQ ID NO: 1702186 - DNA, 25 bp, Homo sapien
atgctgaccccattggaggtcacgc

SEQ ID NO: 1702187 - DNA, 25 bp, Homo sapien
cagagttggtggctgtgctggcccc

SEQ ID NO: 1702188 - DNA, 25 bp, Homo sapien
agagttggtggctgtgctggcccca

SEQ ID NO: 1702189 - DNA, 25 bp, Homo sapien
tcagagttggtggctgtgctggccc

SEQ ID NO: 1702190 - DNA, 25 bp, Homo sapien
gagttggtggctgtgctggccccac

SEQ ID NO: 1702191 - DNA, 25 bp, Homo sapien
gagttggtggctgtgccggccccac

SEQ ID NO: 1702192 - DNA, 25 bp, Homo sapien
gactcagaattggtgactgtgctga

SEQ ID NO: 1702193 - DNA, 25 bp, Homo sapien
ctggccccactggaggttgtgctgg

SEQ ID NO: 1702194 - DNA, 25 bp, Homo sapien
cccactggaggttgtgctggagtca

SEQ ID NO: 1702195 - DNA, 25 bp, Homo sapien
tggaggttgtgctggagtcagagtt

SEQ ID NO: 1702196 - DNA, 25 bp, Homo sapien
tgtgctggagtcagagttggtggct

SEQ ID NO: 1702197 - DNA, 25 bp, Homo sapien
gctgtgctggccccactggaggtcg

SEQ ID NO: 1702198 - DNA, 25 bp, Homo sapien
ctgtgctggccccactggaggtcgt

SEQ ID NO: 1702199 - DNA, 25 bp, Homo sapien
tgctggccccactggaggtcgtgct

SEQ ID NO: 1702200 - DNA, 25 bp, Homo sapien
gctggccccactggaggtcgtgctg

SEQ ID NO: 1702201 - DNA, 25 bp, Homo sapien
gatgcactatgggaagttgtgtgca

SEQ ID NO: 1702202 - DNA, 25 bp, Homo sapien
tgtgtgcattccagtcagagctgct

SEQ ID NO: 1702203 - DNA, 25 bp, Homo sapien
tgcagtagatgcactatgggaagtt

SEQ ID NO: 1702204 - DNA, 25 bp, Homo sapien
cactatgggaagttgtgtgcattcc

SEQ ID NO: 1702205 - DNA, 25 bp, Homo sapien
ccacaaccgagaccagggtgatgag

SEQ ID NO: 1702206 - DNA, 25 bp, Homo sapien
aggaagatttcccacggcaccaggg

SEQ ID NO: 1702207 - DNA, 25 bp, Homo sapien
gccgccacaaccgagaccagggtga

SEQ ID NO: 1702208 - DNA, 25 bp, Homo sapien
gaagatttcccacggcaccagggac

SEQ ID NO: 1702209 - DNA, 25 bp, Homo sapien
tcatctccatggctatcgaggatac

SEQ ID NO: 1702210 - DNA, 25 bp, Homo sapien
aggccatgagggtggtagacagctg

SEQ ID NO: 1702211 - DNA, 25 bp, Homo sapien
ccaaggccatggttgaggccatgag

SEQ ID NO: 1702212 - DNA, 25 bp, Homo sapien
tggctatcgaggatactggtctcct

SEQ ID NO: 1702213 - DNA, 25 bp, Homo sapien
taggagccctccattaccttgtggg

SEQ ID NO: 1702214 - DNA, 25 bp, Homo sapien
gacattggacatctggcgaggtgca

SEQ ID NO: 1702215 - DNA, 25 bp, Homo sapien
tcatgaaagggatacgtgcagctct

SEQ ID NO: 1702216 - DNA, 25 bp, Homo sapien
ttggaagattcgacctcagcaggcc

SEQ ID NO: 1702217 - DNA, 25 bp, Homo sapien
gcttctgctgctagccggatcttca

SEQ ID NO: 1702218 - DNA, 25 bp, Homo sapien
gaggtacacgtctttttctagttgc

SEQ ID NO: 1702219 - DNA, 25 bp, Homo sapien
ctaagttggatgtgaggagagacat

SEQ ID NO: 1702220 - DNA, 25 bp, Homo sapien
ctagttgcaattccttctctagaca

SEQ ID NO: 1702221 - DNA, 25 bp, Homo sapien
gagtgtggacacgaaggttcttcaa

SEQ ID NO: 1702222 - DNA, 25 bp, Homo sapien
gtggacacgaaggttcttcaaggcc

SEQ ID NO: 1702223 - DNA, 25 bp, Homo sapien
acagagtgtggacacgaaggttctt

SEQ ID NO: 1702224 - DNA, 25 bp, Homo sapien
gtgtggacacgaaggttcttcaagg

SEQ ID NO: 1702225 - DNA, 25 bp, Homo sapien
aaatgtcctatgtgcttgagtgccc

SEQ ID NO: 1702226 - DNA, 25 bp, Homo sapien
cctccttggagagtctgagtcatga

SEQ ID NO: 1702227 - DNA, 25 bp, Homo sapien
cagggacccggcaattacgtagagt

SEQ ID NO: 1702228 - DNA, 25 bp, Homo sapien
gattagtttcgcacagagtagggaa

SEQ ID NO: 1702229 - DNA, 25 bp, Homo sapien
catctctaaatgatgcacatagaag

SEQ ID NO: 1702230 - DNA, 25 bp, Homo sapien
ctcatctctaaatgatgcacataga

SEQ ID NO: 1702231 - DNA, 25 bp, Homo sapien
aaagcaggagagatatttcctcttc

SEQ ID NO: 1702232 - DNA, 25 bp, Homo sapien
gcaggagagatatttcctcttctca

SEQ ID NO: 1702233 - DNA, 25 bp, Homo sapien
tttacgatatacacctttatcactg

SEQ ID NO: 1702234 - DNA, 25 bp, Homo sapien
gagtctcaacacagtacacttccat

SEQ ID NO: 1702235 - DNA, 25 bp, Homo sapien
tcttcctgtaaaggcatgagagtct

SEQ ID NO: 1702236 - DNA, 25 bp, Homo sapien
tgctctaggatttacgatatacacc

SEQ ID NO: 1702237 - DNA, 25 bp, Homo sapien
tcttagagcctgtagttaaggccgt

SEQ ID NO: 1702238 - DNA, 25 bp, Homo sapien
ttaaggccgtagtagaggccatggt

SEQ ID NO: 1702239 - DNA, 25 bp, Homo sapien
tgtgaaggctgtggtattctcagag

SEQ ID NO: 1702240 - DNA, 25 bp, Homo sapien
tagagtctgtggtgatcttagagcc

SEQ ID NO: 1702241 - DNA, 25 bp, Homo sapien
ctgcagtagaagccatggtggaggc

SEQ ID NO: 1702242 - DNA, 25 bp, Homo sapien
cagtagaagccatggtggaggctga

SEQ ID NO: 1702243 - DNA, 25 bp, Homo sapien
ggtggaggctgaggttgtctcagag

SEQ ID NO: 1702244 - DNA, 25 bp, Homo sapien
tggtggaggctgaggttgtctcaga

SEQ ID NO: 1702245 - DNA, 25 bp, Homo sapien
ctatagtagtccctgagtctgtggt

SEQ ID NO: 1702246 - DNA, 25 bp, Homo sapien
gaggctatagtagtccctgagtctg

SEQ ID NO: 1702247 - DNA, 25 bp, Homo sapien
tagtggaggctatagtagtccctga

SEQ ID NO: 1702248 - DNA, 25 bp, Homo sapien
aaggtcctagtggaggctatagtag

SEQ ID NO: 1702249 - DNA, 25 bp, Homo sapien
aaaggttgttgtggtcccagagact

SEQ ID NO: 1702250 - DNA, 25 bp, Homo sapien
tagtttcagagcctgcagtggagcc

SEQ ID NO: 1702251 - DNA, 25 bp, Homo sapien
ctcagaaattatggaggaggccatc

SEQ ID NO: 1702252 - DNA, 25 bp, Homo sapien
gccatggtagtctcagggactgtag

SEQ ID NO: 1702253 - DNA, 25 bp, Homo sapien
cgtctcagaatgtgcagtagaggct

SEQ ID NO: 1702254 - DNA, 25 bp, Homo sapien
tagaggctgcggttgtctcaaaccc

SEQ ID NO: 1702255 - DNA, 25 bp, Homo sapien
gactgtggtgttctcggatcctgcc

SEQ ID NO: 1702256 - DNA, 25 bp, Homo sapien
tgctggatgccgtgatcaccttgga

SEQ ID NO: 1702257 - DNA, 25 bp, Homo sapien
ctccaagcctgtattagaggctgtg

SEQ ID NO: 1702258 - DNA, 25 bp, Homo sapien
tggtgtcagagcctatggtaaagac

SEQ ID NO: 1702259 - DNA, 25 bp, Homo sapien
ggtggtctccaagcctgtggtggaa

SEQ ID NO: 1702260 - DNA, 25 bp, Homo sapien
ctgtagtataggctgttttggtctc

SEQ ID NO: 1702261 - DNA, 25 bp, Homo sapien
tgaacctgtggtagaaactttagtg

SEQ ID NO: 1702262 - DNA, 25 bp, Homo sapien
tctcagagcccatagtagtgactgt

SEQ ID NO: 1702263 - DNA, 25 bp, Homo sapien
tgtgatggaggctgtagtaatctca

SEQ ID NO: 1702264 - DNA, 25 bp, Homo sapien
gagccttcagtagaggtgatggtcc

SEQ ID NO: 1702265 - DNA, 25 bp, Homo sapien
tcagtggccttggtgagtacaaacg

SEQ ID NO: 1702266 - DNA, 25 bp, Homo sapien
tggccccagaagctgtgatagagac

SEQ ID NO: 1702267 - DNA, 25 bp, Homo sapien
cttgcagtggaagctatggtgctct

SEQ ID NO: 1702268 - DNA, 25 bp, Homo sapien
tagtggtagaaactgtagtggcctc

SEQ ID NO: 1702269 - DNA, 25 bp, Homo sapien
cccaggccagaggtgtttaagacta

SEQ ID NO: 1702270 - DNA, 25 bp, Homo sapien
agaggccgtgaagtccattccaggg

SEQ ID NO: 1702271 - DNA, 25 bp, Homo sapien
gatgctcccatagtggatgtaccca

SEQ ID NO: 1702272 - DNA, 25 bp, Homo sapien
gaaatgaggatgatagcccagggct

SEQ ID NO: 1702273 - DNA, 25 bp, Homo sapien
ggttggtccagggagcgtggtcacg

SEQ ID NO: 1702274 - DNA, 25 bp, Homo sapien
tcacggtgattctgctggataatgt

SEQ ID NO: 1702275 - DNA, 25 bp, Homo sapien
cactggaagatatagtggacccagg

SEQ ID NO: 1702276 - DNA, 25 bp, Homo sapien
tgttcacagtaatttcgctggatgg

SEQ ID NO: 1702277 - DNA, 25 bp, Homo sapien
gttctgaacacctcaggagaagcag

SEQ ID NO: 1702278 - DNA, 25 bp, Homo sapien
ttcgctcgggactggccctgtctga

SEQ ID NO: 1702279 - DNA, 25 bp, Homo sapien
tggtgctagccaggacaccttttcc

SEQ ID NO: 1702280 - DNA, 25 bp, Homo sapien
tctcaagagaatccacatggtgcta

SEQ ID NO: 1702281 - DNA, 25 bp, Homo sapien
gagattacactcaggtcatgcttgg

SEQ ID NO: 1702282 - DNA, 25 bp, Homo sapien
cggttctggcaaaccaatgaggcag

SEQ ID NO: 1702283 - DNA, 25 bp, Homo sapien
tccgtgggacactaaacctgactct

SEQ ID NO: 1702284 - DNA, 25 bp, Homo sapien
aatgtgaattgttgatggcctatcc

SEQ ID NO: 1702285 - DNA, 25 bp, Homo sapien
tattcttgagtctttagggctggtc

SEQ ID NO: 1702286 - DNA, 25 bp, Homo sapien
catagtccttggtggtcgctgggtc

SEQ ID NO: 1702287 - DNA, 25 bp, Homo sapien
gacaaagttctcagtgagtggtccc

SEQ ID NO: 1702288 - DNA, 25 bp, Homo sapien
cagtgatgtggtcctcagtggtcct

SEQ ID NO: 1702289 - DNA, 25 bp, Homo sapien
cagtgacagagtcctcagtggtccc

SEQ ID NO: 1702290 - DNA, 25 bp, Homo sapien
tggtccctgggtctacagtgatgga

SEQ ID NO: 1702291 - DNA, 25 bp, Homo sapien
agtgacggagtcctcggtggtccct

SEQ ID NO: 1702292 - DNA, 25 bp, Homo sapien
ggtctgcagtgacggagtcctctgt

SEQ ID NO: 1702293 - DNA, 25 bp, Homo sapien
ctgaagtagttcacagaaggtgagt

SEQ ID NO: 1702294 - DNA, 25 bp, Homo sapien
tgaagtagttcacagaaggtgagtg

SEQ ID NO: 1702295 - DNA, 25 bp, Homo sapien
gtagttcacagaaggtgagtgtcac

SEQ ID NO: 1702296 - DNA, 25 bp, Homo sapien
aagtagttcacagaaggtgagtgtc

SEQ ID NO: 1702297 - DNA, 25 bp, Homo sapien
gttgcagccagggatatgaggataa

SEQ ID NO: 1702298 - DNA, 25 bp, Homo sapien
aggataattcccatgggtgtcagga

SEQ ID NO: 1702299 - DNA, 25 bp, Homo sapien
tgtcaggagcctggtgggtttcact

SEQ ID NO: 1702300 - DNA, 25 bp, Homo sapien
agcctggtgggtttcactgctgtga

SEQ ID NO: 1702301 - DNA, 25 bp, Homo sapien
taaccctggtggatggatttaatgg

SEQ ID NO: 1702302 - DNA, 25 bp, Homo sapien
cagatgggcatccttctgagtgtcc

SEQ ID NO: 1702303 - DNA, 25 bp, Homo sapien
tagataggtaaaggcgattgtccag

SEQ ID NO: 1702304 - DNA, 25 bp, Homo sapien
tgtgtgtaattcctcaaaacctggt

SEQ ID NO: 1702305 - DNA, 25 bp, Homo sapien
tattctggagaaagctacgtggcaa

SEQ ID NO: 1702306 - DNA, 25 bp, Homo sapien
tgctgccacaaagggatatgcgtat

SEQ ID NO: 1702307 - DNA, 25 bp, Homo sapien
gaataattagtacaggccagttgct

SEQ ID NO: 1702308 - DNA, 25 bp, Homo sapien
gaaggagactgactgggtaaagccc

SEQ ID NO: 1702309 - DNA, 25 bp, Homo sapien
gttctcatagccatgcacaggctta

SEQ ID NO: 1702310 - DNA, 25 bp, Homo sapien
tgcatgtacatgacagcaatattca

SEQ ID NO: 1702311 - DNA, 25 bp, Homo sapien
tagccatgcacaggcttatatgtcc

SEQ ID NO: 1702312 - DNA, 25 bp, Homo sapien
cttgaaggcaaaagctatttacatg

SEQ ID NO: 1702313 - DNA, 25 bp, Homo sapien
ctctgtatcagatgccactttcatt

SEQ ID NO: 1702314 - DNA, 25 bp, Homo sapien
cttctctgtatcagatgccactttc

SEQ ID NO: 1702315 - DNA, 25 bp, Homo sapien
ttctctgtatcagatgccactttca

SEQ ID NO: 1702316 - DNA, 25 bp, Homo sapien
tctctgtatcagatgccactttcat

SEQ ID NO: 1702317 - DNA, 25 bp, Homo sapien
tgccttagagactggaaaaccctga

SEQ ID NO: 1702318 - DNA, 25 bp, Homo sapien
taatgcagtgcgttgtcccagtgag

SEQ ID NO: 1702319 - DNA, 25 bp, Homo sapien
gatgctttgcactgggagttacact

SEQ ID NO: 1702320 - DNA, 25 bp, Homo sapien
gatagttcttcgtcccacagaggag

SEQ ID NO: 1702321 - DNA, 25 bp, Homo sapien
gggacacctggaagcttgggaaggc

SEQ ID NO: 1702322 - DNA, 25 bp, Homo sapien
aaggctgggacacaacaactccaac

SEQ ID NO: 1702323 - DNA, 25 bp, Homo sapien
aactccaaccagattcctgtcagct

SEQ ID NO: 1702324 - DNA, 25 bp, Homo sapien
gacacctggaagcttgggaaggctg

SEQ ID NO: 1702325 - DNA, 25 bp, Homo sapien
ctctctgggagtcatgagtctcgat

SEQ ID NO: 1702326 - DNA, 25 bp, Homo sapien
tctctgggagtcatgagtctcgatt

SEQ ID NO: 1702327 - DNA, 25 bp, Homo sapien
tatcctagcccaagtgaagcctctg

SEQ ID NO: 1702328 - DNA, 25 bp, Homo sapien
tgcgctctgcttgggagaaacccga

SEQ ID NO: 1702329 - DNA, 25 bp, Homo sapien
tgtttgtaacacgtgggacctggag

SEQ ID NO: 1702330 - DNA, 25 bp, Homo sapien
ggctctagtctacaaggtgcatccg

SEQ ID NO: 1702331 - DNA, 25 bp, Homo sapien
tttggattatatattagaactttta

SEQ ID NO: 1702332 - DNA, 25 bp, Homo sapien
tggattatatattagaacttttatt

SEQ ID NO: 1702333 - DNA, 25 bp, Homo sapien
ttggattatatattagaacttttat

SEQ ID NO: 1702334 - DNA, 25 bp, Homo sapien
ggctgcagagtctatttgagacgaa

SEQ ID NO: 1702335 - DNA, 25 bp, Homo sapien
gactgtagattccacccttgatcgt

SEQ ID NO: 1702336 - DNA, 25 bp, Homo sapien
tggactgtagattccacccttgatc

SEQ ID NO: 1702337 - DNA, 25 bp, Homo sapien
tctatttgagacgaaggcaagaagt

SEQ ID NO: 1702338 - DNA, 25 bp, Homo sapien
gcatggagcccacggtccgggggtg

SEQ ID NO: 1702339 - DNA, 25 bp, Homo sapien
tccgggggtgatggtttctgttgca

SEQ ID NO: 1702340 - DNA, 25 bp, Homo sapien
gctttgcccactggcatggagccca

SEQ ID NO: 1702341 - DNA, 25 bp, Homo sapien
catttcaaagccactggggcgctgc

SEQ ID NO: 1702342 - DNA, 25 bp, Homo sapien
caagtgcctgccacagctatgtgct

SEQ ID NO: 1702343 - DNA, 25 bp, Homo sapien
ctgccacagctatgtgctgggaact

SEQ ID NO: 1702344 - DNA, 25 bp, Homo sapien
cacagctatgtgctgggaactcagt

SEQ ID NO: 1702345 - DNA, 25 bp, Homo sapien
gctatgtgctgggaactcagtgaac

SEQ ID NO: 1702346 - DNA, 25 bp, Homo sapien
atcacaagtgccaaagtcaagactg

SEQ ID NO: 1702347 - DNA, 25 bp, Homo sapien
cacaagtgccaaagtcaagactgga

SEQ ID NO: 1702348 - DNA, 25 bp, Homo sapien
tcaagactggatggaggactgcctg

SEQ ID NO: 1702349 - DNA, 25 bp, Homo sapien
aagtcaagactggatggaggactgc

SEQ ID NO: 1702350 - DNA, 25 bp, Homo sapien
taaacgccgtgagttcagaagagtc

SEQ ID NO: 1702351 - DNA, 25 bp, Homo sapien
tgagcgagcgccaatgtaatagcct

SEQ ID NO: 1702352 - DNA, 25 bp, Homo sapien
gagtcacggtgagctggactagtca

SEQ ID NO: 1702353 - DNA, 25 bp, Homo sapien
taatagccttggcagtaaacgccgt

SEQ ID NO: 1702354 - DNA, 25 bp, Homo sapien
tatccgaccagggttagggatgaag

SEQ ID NO: 1702355 - DNA, 25 bp, Homo sapien
tcaggttagaaggacaggagctcag

SEQ ID NO: 1702356 - DNA, 25 bp, Homo sapien
agagatcccaatggtctactgtcaa

SEQ ID NO: 1702357 - DNA, 25 bp, Homo sapien
tgtcaatcaagtatccgaccagggt

SEQ ID NO: 1702358 - DNA, 25 bp, Homo sapien
acgcctggccaagagatgcattttc

SEQ ID NO: 1702359 - DNA, 25 bp, Homo sapien
ggagtctcactctatgcccaggctg

SEQ ID NO: 1702360 - DNA, 25 bp, Homo sapien
cacagcgcccggcttctttcttctt

SEQ ID NO: 1702361 - DNA, 25 bp, Homo sapien
atggagtctcactctatgcccaggc

SEQ ID NO: 1702362 - DNA, 25 bp, Homo sapien
gccacagcgcccggcttctttcttc

SEQ ID NO: 1702363 - DNA, 25 bp, Homo sapien
ttcaggctgcgtccgtccagacagg

SEQ ID NO: 1702364 - DNA, 25 bp, Homo sapien
aggctgcgtccgtccagacaggctc

SEQ ID NO: 1702365 - DNA, 25 bp, Homo sapien
tttgtgggtcagttcaggctgcgtc

SEQ ID NO: 1702366 - DNA, 25 bp, Homo sapien
ggtcagttcaggctgcgtccgtcca

SEQ ID NO: 1702367 - DNA, 25 bp, Homo sapien
gctctttgagagtgacttttttggt

SEQ ID NO: 1702368 - DNA, 25 bp, Homo sapien
gagctctttgagagtgacttttttg

SEQ ID NO: 1702369 - DNA, 25 bp, Homo sapien
cgagagctctttgagagtgactttt

SEQ ID NO: 1702370 - DNA, 25 bp, Homo sapien
gagagctctttgagagtgacttttt

SEQ ID NO: 1702371 - DNA, 25 bp, Homo sapien
ggagctgggatctgtgttaaggagc

SEQ ID NO: 1702372 - DNA, 25 bp, Homo sapien
atctgtgttaaggagctggggtcct

SEQ ID NO: 1702373 - DNA, 25 bp, Homo sapien
ggctccatgtggcaaagtcggtcag

SEQ ID NO: 1702374 - DNA, 25 bp, Homo sapien
caaagtcggtcaggattaacgtggg

SEQ ID NO: 1702375 - DNA, 25 bp, Homo sapien
cctgtaattacggtgcttcccaacg

SEQ ID NO: 1702376 - DNA, 25 bp, Homo sapien
tgcatcccaggtttgaaaggcacct

SEQ ID NO: 1702377 - DNA, 25 bp, Homo sapien
gggtagtagctgacactgtcccagc

SEQ ID NO: 1702378 - DNA, 25 bp, Homo sapien
tgccaagtgggtattgactgctcca

SEQ ID NO: 1702379 - DNA, 25 bp, Homo sapien
tgggtggctgccagatggaattcct

SEQ ID NO: 1702380 - DNA, 25 bp, Homo sapien
cattggcaggactgatgcaaacagc

SEQ ID NO: 1702381 - DNA, 25 bp, Homo sapien
tagagttggagccaaggtcctagag

SEQ ID NO: 1702382 - DNA, 25 bp, Homo sapien
tcctagaggcggataggtggattcc

SEQ ID NO: 1702383 - DNA, 25 bp, Homo sapien
catgttacttctgaaaggctaacag

SEQ ID NO: 1702384 - DNA, 25 bp, Homo sapien
ggcagaaaggtccttgagggaaaca

SEQ ID NO: 1702385 - DNA, 25 bp, Homo sapien
acattctaggggtctctctgggagg

SEQ ID NO: 1702386 - DNA, 25 bp, Homo sapien
tctgaaaggctaacagacttccagg

SEQ ID NO: 1702387 - DNA, 25 bp, Homo sapien
cataataaggtgttccttactgtgg

SEQ ID NO: 1702388 - DNA, 25 bp, Homo sapien
tgttccttactgtggggtagcggac

SEQ ID NO: 1702389 - DNA, 25 bp, Homo sapien
gtagcggaccaggcagggaacaacc

SEQ ID NO: 1702390 - DNA, 25 bp, Homo sapien
ttgcataataaggtgttccttactg

SEQ ID NO: 1702391 - DNA, 25 bp, Homo sapien
ccaggagggcataattgagcagttt

SEQ ID NO: 1702392 - DNA, 25 bp, Homo sapien
cagtttccgcatcaggtccacgtgg

SEQ ID NO: 1702393 - DNA, 25 bp, Homo sapien
gcagtttccgcatcaggtccacgtg

SEQ ID NO: 1702394 - DNA, 25 bp, Homo sapien
ggcataattgagcagtttccgcatc

SEQ ID NO: 1702395 - DNA, 25 bp, Homo sapien
gatgaagaaggaatactagactggg

SEQ ID NO: 1702396 - DNA, 25 bp, Homo sapien
agcatgatgaagaaggaatactaga

SEQ ID NO: 1702397 - DNA, 25 bp, Homo sapien
gcatgatgaagaaggaatactagac

SEQ ID NO: 1702398 - DNA, 25 bp, Homo sapien
gaagaaggaatactagactgggtgt

SEQ ID NO: 1702399 - DNA, 25 bp, Homo sapien
catttgttctcttccgcgccattgg

SEQ ID NO: 1702400 - DNA, 25 bp, Homo sapien
tcctcttcaagcagtgccagcctgt

SEQ ID NO: 1702401 - DNA, 25 bp, Homo sapien
ccgttcccgattggccagctcattt

SEQ ID NO: 1702402 - DNA, 25 bp, Homo sapien
agttttcccgggttgccgcagtgag

SEQ ID NO: 1702403 - DNA, 25 bp, Homo sapien
gaaagtgcaaacgagtccttaagta

SEQ ID NO: 1702404 - DNA, 25 bp, Homo sapien
tacttcccggcttctctaggtggga

SEQ ID NO: 1702405 - DNA, 25 bp, Homo sapien
gcgatcatgcaaggcatacccggcc

SEQ ID NO: 1702406 - DNA, 25 bp, Homo sapien
aaaacaggaaggagctccccgcgat

SEQ ID NO: 1702407 - DNA, 25 bp, Homo sapien
taactggttgaacctccgagggcaa

SEQ ID NO: 1702408 - DNA, 25 bp, Homo sapien
caaggcaaggatactttaggcagct

SEQ ID NO: 1702409 - DNA, 25 bp, Homo sapien
ggaaggaggtcctgttatacacacg

SEQ ID NO: 1702410 - DNA, 25 bp, Homo sapien
tcacctctgtgtaattcggagaaga

SEQ ID NO: 1702411 - DNA, 25 bp, Homo sapien
ggaaggtctccgtgcaatgcaaact

SEQ ID NO: 1702412 - DNA, 25 bp, Homo sapien
gctggatcctcagatcacaaaatat

SEQ ID NO: 1702413 - DNA, 25 bp, Homo sapien
tatggcacctcacttgagctggatc

SEQ ID NO: 1702414 - DNA, 25 bp, Homo sapien
aatgcaaactcaggaacacgtccta

SEQ ID NO: 1702415 - DNA, 25 bp, Homo sapien
gcacactacctgaatagcccaaatt

SEQ ID NO: 1702416 - DNA, 25 bp, Homo sapien
ggttaagccgacttgcaaatgaaaa

SEQ ID NO: 1702417 - DNA, 25 bp, Homo sapien
tttgagcacactacctgaatagccc

SEQ ID NO: 1702418 - DNA, 25 bp, Homo sapien
gactcaatgcaaaattggttaagcc

SEQ ID NO: 1702419 - DNA, 25 bp, Homo sapien
gcaccgctggcttaagttcgcttcc

SEQ ID NO: 1702420 - DNA, 25 bp, Homo sapien
cgcttcccagtctgatgcaaacttg

SEQ ID NO: 1702421 - DNA, 25 bp, Homo sapien
ctgggccacgcaccgctggcttaag

SEQ ID NO: 1702422 - DNA, 25 bp, Homo sapien
caaacttgagttgtgctgtatgcgg

SEQ ID NO: 1702423 - DNA, 25 bp, Homo sapien
ctcggcatgcagttcggcgtggatc

SEQ ID NO: 1702424 - DNA, 25 bp, Homo sapien
ccctgtggcccaagcgataggtgca

SEQ ID NO: 1702425 - DNA, 25 bp, Homo sapien
gccccctatgcgcagcagttggaag

SEQ ID NO: 1702426 - DNA, 25 bp, Homo sapien
gaaggtgtagagatcaccgcccctg

SEQ ID NO: 1702427 - DNA, 25 bp, Homo sapien
cttggctgctgtggtcttccaggct

SEQ ID NO: 1702428 - DNA, 25 bp, Homo sapien
ggctgctgtggtcttccaggctgac

SEQ ID NO: 1702429 - DNA, 25 bp, Homo sapien
ttggctgctgtggtcttccaggctg

SEQ ID NO: 1702430 - DNA, 25 bp, Homo sapien
tggctgctgtggtcttccaggctga

SEQ ID NO: 1702431 - DNA, 25 bp, Homo sapien
cagagagcttctgactgtgcacact

SEQ ID NO: 1702432 - DNA, 25 bp, Homo sapien
taaacttggcctctagtggcctcag

SEQ ID NO: 1702433 - DNA, 25 bp, Homo sapien
cctgtatgagctaaacgggaccaaa

SEQ ID NO: 1702434 - DNA, 25 bp, Homo sapien
tcaagtcacggagaaagacatgccc

SEQ ID NO: 1702435 - DNA, 25 bp, Homo sapien
tcttgggagtcggacattattgacc

SEQ ID NO: 1702436 - DNA, 25 bp, Homo sapien
tgacctcttgggagtcggacattat

SEQ ID NO: 1702437 - DNA, 25 bp, Homo sapien
gagtcggacattattgaccaaagta

SEQ ID NO: 1702438 - DNA, 25 bp, Homo sapien
ctgtgacctcttgggagtcggacat

SEQ ID NO: 1702439 - DNA, 25 bp, Homo sapien
cttcagggccaaaggtcaggaggtc

SEQ ID NO: 1702440 - DNA, 25 bp, Homo sapien
tcagggccaaaggtcaggaggtctc

SEQ ID NO: 1702441 - DNA, 25 bp, Homo sapien
caaaggtcaggaggtctccatcact

SEQ ID NO: 1702442 - DNA, 25 bp, Homo sapien
gaggtctccatcactcaattccagc

SEQ ID NO: 1702443 - DNA, 25 bp, Homo sapien
catgaagtagaactccgaggggctg

SEQ ID NO: 1702444 - DNA, 25 bp, Homo sapien
tgaagtagaactccgaggggctggt

SEQ ID NO: 1702445 - DNA, 25 bp, Homo sapien
aacatgaagtagaactccgaggggc

SEQ ID NO: 1702446 - DNA, 25 bp, Homo sapien
tagaactccgaggggctggttcctg

SEQ ID NO: 1702447 - DNA, 25 bp, Homo sapien
cctagaccgtgggatggtaatggca

SEQ ID NO: 1702448 - DNA, 25 bp, Homo sapien
agcataggccggaaaccagccccaa

SEQ ID NO: 1702449 - DNA, 25 bp, Homo sapien
tatggagtttaggatcagtgtggcc

SEQ ID NO: 1702450 - DNA, 25 bp, Homo sapien
ctgggagggcagcataggccggaaa

SEQ ID NO: 1702451 - DNA, 25 bp, Homo sapien
aacagatttcctccgattgcgttgg

SEQ ID NO: 1702452 - DNA, 25 bp, Homo sapien
gccaacactcggtgaacagatttcc

SEQ ID NO: 1702453 - DNA, 25 bp, Homo sapien
ttgtctacacggagtttcttcctgg

SEQ ID NO: 1702454 - DNA, 25 bp, Homo sapien
aggcaggctctttggtccaccccaa

SEQ ID NO: 1702455 - DNA, 25 bp, Homo sapien
tgagagggccaagtgaggactccac

SEQ ID NO: 1702456 - DNA, 25 bp, Homo sapien
tttcctatcagagctaacccaggtc

SEQ ID NO: 1702457 - DNA, 25 bp, Homo sapien
cagcctagggatacaaggaatcgaa

SEQ ID NO: 1702458 - DNA, 25 bp, Homo sapien
aaagcagtaaaacactgagagggcc

SEQ ID NO: 1702459 - DNA, 25 bp, Homo sapien
ctgaaggaagtgacacagacacaag

SEQ ID NO: 1702460 - DNA, 25 bp, Homo sapien
tgacacagacacaagggtcaccgga

SEQ ID NO: 1702461 - DNA, 25 bp, Homo sapien
cacagacacaagggtcaccggaaac

SEQ ID NO: 1702462 - DNA, 25 bp, Homo sapien
tgaaggaagtgacacagacacaagg

SEQ ID NO: 1702463 - DNA, 25 bp, Homo sapien
tacttccgaggacgccacgtcgatt

SEQ ID NO: 1702464 - DNA, 25 bp, Homo sapien
ggtacttccgaggacgccacgtcga

SEQ ID NO: 1702465 - DNA, 25 bp, Homo sapien
acttccgaggacgccacgtcgattt

SEQ ID NO: 1702466 - DNA, 25 bp, Homo sapien
tgggtacttccgaggacgccacgtc

SEQ ID NO: 1702467 - DNA, 25 bp, Homo sapien
atcacactgaacccaggccactgtc

SEQ ID NO: 1702468 - DNA, 25 bp, Homo sapien
acacaggccacatggaaccagacgt

SEQ ID NO: 1702469 - DNA, 25 bp, Homo sapien
ggccacatggaaccagacgtcacag

SEQ ID NO: 1702470 - DNA, 25 bp, Homo sapien
acatggaaccagacgtcacagccat

SEQ ID NO: 1702471 - DNA, 25 bp, Homo sapien
caggtgtgtccgatggtgccttggc

SEQ ID NO: 1702472 - DNA, 25 bp, Homo sapien
ctgggcatcggaagtcggcctccct

SEQ ID NO: 1702473 - DNA, 25 bp, Homo sapien
ttaggtctgaatgccagcccggcac

SEQ ID NO: 1702474 - DNA, 25 bp, Homo sapien
tgccttggcggtggaccttaggtct

SEQ ID NO: 1702475 - DNA, 25 bp, Homo sapien
ccaggagtgaatgaagcggcttgtc

SEQ ID NO: 1702476 - DNA, 25 bp, Homo sapien
gacccacaagaagagtaaatgccca

SEQ ID NO: 1702477 - DNA, 25 bp, Homo sapien
ccagaatgccttgggtgatgccacc

SEQ ID NO: 1702478 - DNA, 25 bp, Homo sapien
tacattttccatcggttgcaggcat

SEQ ID NO: 1702479 - DNA, 25 bp, Homo sapien
tatttgcacctttccagtaagcagg

SEQ ID NO: 1702480 - DNA, 25 bp, Homo sapien
gccctgacagtacaggtgaagcctg

SEQ ID NO: 1702481 - DNA, 25 bp, Homo sapien
cacccgtggagtggagctgtgtcac

SEQ ID NO: 1702482 - DNA, 25 bp, Homo sapien
gccatcacactggtaaactgctgta

SEQ ID NO: 1702483 - DNA, 25 bp, Homo sapien
taccatgtgtgggttaagcggtttg

SEQ ID NO: 1702484 - DNA, 25 bp, Homo sapien
ggcttggtgtaaggctcacaaaaga

SEQ ID NO: 1702485 - DNA, 25 bp, Homo sapien
agcggtttgattcacactgaaccag

SEQ ID NO: 1702486 - DNA, 25 bp, Homo sapien
gatgctttgacaatagtttggcttg

SEQ ID NO: 1702487 - DNA, 25 bp, Homo sapien
tagctgttacctgttcagagctggc

SEQ ID NO: 1702488 - DNA, 25 bp, Homo sapien
tggctctgccactagttcattaggg

SEQ ID NO: 1702489 - DNA, 25 bp, Homo sapien
ggccctgtgataggctagttcccaa

SEQ ID NO: 1702490 - DNA, 25 bp, Homo sapien
tagactcagtcaccatgtagctgtt

SEQ ID NO: 1702491 - DNA, 25 bp, Homo sapien
tgaaactaaggtgccatttacactc

SEQ ID NO: 1702492 - DNA, 25 bp, Homo sapien
aactaaggtgccatttacactcctt

SEQ ID NO: 1702493 - DNA, 25 bp, Homo sapien
gtgaccctgaaactaaggtgccatt

SEQ ID NO: 1702494 - DNA, 25 bp, Homo sapien
caatgctcatacccaagtgaccctg

SEQ ID NO: 1702495 - DNA, 25 bp, Homo sapien
ccagaagggcaagcgatcaagcagc

SEQ ID NO: 1702496 - DNA, 25 bp, Homo sapien
cgccagaagggcaagcgatcaagca

SEQ ID NO: 1702497 - DNA, 25 bp, Homo sapien
gccagaagggcaagcgatcaagcag

SEQ ID NO: 1702498 - DNA, 25 bp, Homo sapien
ttctgcatccccttggatgtgccag

SEQ ID NO: 1702499 - DNA, 25 bp, Homo sapien
ctgacaggtgttctccctcgaggcc

SEQ ID NO: 1702500 - DNA, 25 bp, Homo sapien
caggtgttctccctcgaggccaggg

SEQ ID NO: 1702501 - DNA, 25 bp, Homo sapien
tgcatccccttggatgtgccagttt

SEQ ID NO: 1702502 - DNA, 25 bp, Homo sapien
aggtgctcgataaatctcttgaatt

SEQ ID NO: 1702503 - DNA, 25 bp, Homo sapien
tagccgctggcttatagaaggtgct

SEQ ID NO: 1702504 - DNA, 25 bp, Homo sapien
cttgaagaacaagtgccgaatagca

SEQ ID NO: 1702505 - DNA, 25 bp, Homo sapien
ctttgtccactttgtatagccgctg

SEQ ID NO: 1702506 - DNA, 25 bp, Homo sapien
tgccatttagacaccagatgactac

SEQ ID NO: 1702507 - DNA, 25 bp, Homo sapien
tccgccggcagcctcatatggcatg

SEQ ID NO: 1702508 - DNA, 25 bp, Homo sapien
aatccaggatagcagagggcattta

SEQ ID NO: 1702509 - DNA, 25 bp, Homo sapien
gcttcaggactacaaaaaggccttg

SEQ ID NO: 1702510 - DNA, 25 bp, Homo sapien
gctgcgtctaccctctccggaaata

SEQ ID NO: 1702511 - DNA, 25 bp, Homo sapien
acggcccaccgtaggtgtgataggt

SEQ ID NO: 1702512 - DNA, 25 bp, Homo sapien
gaccacggttgtctgtgagttgttg

SEQ ID NO: 1702513 - DNA, 25 bp, Homo sapien
gacactggcactacaactgtgatgg

SEQ ID NO: 1702514 - DNA, 25 bp, Homo sapien
gggaggcagcactctaggataaaca

SEQ ID NO: 1702515 - DNA, 25 bp, Homo sapien
gaccaaggaggcactaaatattcac

SEQ ID NO: 1702516 - DNA, 25 bp, Homo sapien
ggataaacaccagacttgccgattg

SEQ ID NO: 1702517 - DNA, 25 bp, Homo sapien
cgtgtgtacagagatcaaaagggac

SEQ ID NO: 1702518 - DNA, 25 bp, Homo sapien
gcggcttagttgtcttgggcaaaaa

SEQ ID NO: 1702519 - DNA, 25 bp, Homo sapien
caaagttgcagactgtttgggccca

SEQ ID NO: 1702520 - DNA, 25 bp, Homo sapien
caaaaagttacatggtggagttcca

SEQ ID NO: 1702521 - DNA, 25 bp, Homo sapien
gactggtccttttctaggtgacaca

SEQ ID NO: 1702522 - DNA, 25 bp, Homo sapien
aaagctttagcagtgtggacgagaa

SEQ ID NO: 1702523 - DNA, 25 bp, Homo sapien
aagctttagcagtgtggacgagaac

SEQ ID NO: 1702524 - DNA, 25 bp, Homo sapien
acaccacggcggattcggagacagg

SEQ ID NO: 1702525 - DNA, 25 bp, Homo sapien
gcgatctggaatcttgactcgcttg

SEQ ID NO: 1702526 - DNA, 25 bp, Homo sapien
gactcgcttgaaacaccacggcgga

SEQ ID NO: 1702527 - DNA, 25 bp, Homo sapien
cgcgatctggaatcttgactcgctt

SEQ ID NO: 1702528 - DNA, 25 bp, Homo sapien
tccttgcagactttaggcgccactg

SEQ ID NO: 1702529 - DNA, 25 bp, Homo sapien
acctcctccttgcagactttaggcg

SEQ ID NO: 1702530 - DNA, 25 bp, Homo sapien
acagaggcgacctcctccttgcaga

SEQ ID NO: 1702531 - DNA, 25 bp, Homo sapien
ttgcagactttaggcgccactgcgg

SEQ ID NO: 1702532 - DNA, 25 bp, Homo sapien
actcgccttagattcctggactcac

SEQ ID NO: 1702533 - DNA, 25 bp, Homo sapien
ttctccctcagcactcgccttagat

SEQ ID NO: 1702534 - DNA, 25 bp, Homo sapien
tccctcagcactcgccttagattcc

SEQ ID NO: 1702535 - DNA, 25 bp, Homo sapien
agcactcgccttagattcctggact

SEQ ID NO: 1702536 - DNA, 25 bp, Homo sapien
gattaaatgatcaccaggcctagaa

SEQ ID NO: 1702537 - DNA, 25 bp, Homo sapien
aagatggccaccagtctcaaggagt

SEQ ID NO: 1702538 - DNA, 25 bp, Homo sapien
tcaccatggataacagggccacagc

SEQ ID NO: 1702539 - DNA, 25 bp, Homo sapien
aattaggtgtcatcccagtcagtgg

SEQ ID NO: 1702540 - DNA, 25 bp, Homo sapien
tttttgctcagcaatcaattgctgg

SEQ ID NO: 1702541 - DNA, 25 bp, Homo sapien
tttgctcagcaatcaattgctggaa

SEQ ID NO: 1702542 - DNA, 25 bp, Homo sapien
gctcagcaatcaattgctggaacac

SEQ ID NO: 1702543 - DNA, 25 bp, Homo sapien
tgctcagcaatcaattgctggaaca

SEQ ID NO: 1702544 - DNA, 25 bp, Homo sapien
catgaggaacgtgatgctgcctgac

SEQ ID NO: 1702545 - DNA, 25 bp, Homo sapien
gcctcttgaatgtgttggaccagct

SEQ ID NO: 1702546 - DNA, 25 bp, Homo sapien
ctttggtgactagaacatgaggaac

SEQ ID NO: 1702547 - DNA, 25 bp, Homo sapien
gcataagatgccttgtggttctgac

SEQ ID NO: 1702548 - DNA, 25 bp, Homo sapien
cataggtgtacatgagggtgattct

SEQ ID NO: 1702549 - DNA, 25 bp, Homo sapien
cactcgatgtaggagacagagagca

SEQ ID NO: 1702550 - DNA, 25 bp, Homo sapien
tccaggtcgtataagagccacagca

SEQ ID NO: 1702551 - DNA, 25 bp, Homo sapien
cagagccctgggtatgtacagagca

SEQ ID NO: 1702552 - DNA, 25 bp, Homo sapien
gatgagaagccaggtgctctgcatg

SEQ ID NO: 1702553 - DNA, 25 bp, Homo sapien
gcatggcaaggtgtggttgccctca

SEQ ID NO: 1702554 - DNA, 25 bp, Homo sapien
agaagccaggtgctctgcatggcaa

SEQ ID NO: 1702555 - DNA, 25 bp, Homo sapien
cctgcagccgggtcagagtgagctt

SEQ ID NO: 1702556 - DNA, 25 bp, Homo sapien
ctagcaagcatgttctgggcggtct

SEQ ID NO: 1702557 - DNA, 25 bp, Homo sapien
gtgcagcctttgacatccctcagag

SEQ ID NO: 1702558 - DNA, 25 bp, Homo sapien
gcagctccctcggaccatgaaagaa

SEQ ID NO: 1702559 - DNA, 25 bp, Homo sapien
aaaataaactgtacaccctgagagg

SEQ ID NO: 1702560 - DNA, 25 bp, Homo sapien
ggtgaccaaacacactgtgcaaagg

SEQ ID NO: 1702561 - DNA, 25 bp, Homo sapien
tccagtggtgggaaatcgcacctca

SEQ ID NO: 1702562 - DNA, 25 bp, Homo sapien
cccaagagccttcagacagtcaagt

SEQ ID NO: 1702563 - DNA, 25 bp, Homo sapien
aagagattccatctgcatgtatgca

SEQ ID NO: 1702564 - DNA, 25 bp, Homo sapien
gctatgaagcgttgatggattaatt

SEQ ID NO: 1702565 - DNA, 25 bp, Homo sapien
aaatatttgctatgaagcgttgatg

SEQ ID NO: 1702566 - DNA, 25 bp, Homo sapien
agttaagaacctgaatataaatttg

SEQ ID NO: 1702567 - DNA, 25 bp, Homo sapien
ccctaatgaagttaagaacctgaat

SEQ ID NO: 1702568 - DNA, 25 bp, Homo sapien
ggagctgtggtcaccgctatgatgt

SEQ ID NO: 1702569 - DNA, 25 bp, Homo sapien
caccgagcttgtggagaccaggcca

SEQ ID NO: 1702570 - DNA, 25 bp, Homo sapien
agcacgaggggctgcaagagcccct

SEQ ID NO: 1702571 - DNA, 25 bp, Homo sapien
gacaagagcagagatacacgtgcca

SEQ ID NO: 1702572 - DNA, 25 bp, Homo sapien
tggtggtgccttctggacaagagca

SEQ ID NO: 1702573 - DNA, 25 bp, Homo sapien
tggctccgcagatacctggagaacg

SEQ ID NO: 1702574 - DNA, 25 bp, Homo sapien
atcgccctgaacgaggacctgcgct

SEQ ID NO: 1702575 - DNA, 25 bp, Homo sapien
cctggagaacgggaaggagacgctg

SEQ ID NO: 1702576 - DNA, 25 bp, Homo sapien
cgcctacgacggcaaggattacatc

SEQ ID NO: 1702577 - DNA, 25 bp, Homo sapien
gattccagcaatactcggcagctgc

SEQ ID NO: 1702578 - DNA, 25 bp, Homo sapien
ccaatgaataaactgggattccagc

SEQ ID NO: 1702579 - DNA, 25 bp, Homo sapien
ctggaggaatccacatgtctatcaa

SEQ ID NO: 1702580 - DNA, 25 bp, Homo sapien
tcattaataacaagccctaactgga

SEQ ID NO: 1702581 - DNA, 25 bp, Homo sapien
tttttggataggattataaacagtc

SEQ ID NO: 1702582 - DNA, 25 bp, Homo sapien
cttttttggataggattataaacag

SEQ ID NO: 1702583 - DNA, 25 bp, Homo sapien
ttttggataggattataaacagtca

SEQ ID NO: 1702584 - DNA, 25 bp, Homo sapien
tttggataggattataaacagtcac

SEQ ID NO: 1702585 - DNA, 25 bp, Homo sapien
tcagagagtcgttcagtttctccag

SEQ ID NO: 1702586 - DNA, 25 bp, Homo sapien
ttgaatggaagtaatactgctgttg

SEQ ID NO: 1702587 - DNA, 25 bp, Homo sapien
ttagccaacgtgctgccatcctctc

SEQ ID NO: 1702588 - DNA, 25 bp, Homo sapien
catatcttagtttaaggctttcaga

SEQ ID NO: 1702589 - DNA, 25 bp, Homo sapien
gaactaaaccagtcaagaagtacca

SEQ ID NO: 1702590 - DNA, 25 bp, Homo sapien
cagaactaaaccagtcaagaagtac

SEQ ID NO: 1702591 - DNA, 25 bp, Homo sapien
gcagaactaaaccagtcaagaagta

SEQ ID NO: 1702592 - DNA, 25 bp, Homo sapien
ggcccattgcacaggacagtcttac

SEQ ID NO: 1702593 - DNA, 25 bp, Homo sapien
aggcccattgcacaggacagtctta

SEQ ID NO: 1702594 - DNA, 25 bp, Homo sapien
ttccaatgagggataagtaaaatcc

SEQ ID NO: 1702595 - DNA, 25 bp, Homo sapien
tccaatgagggataagtaaaatcca

SEQ ID NO: 1702596 - DNA, 25 bp, Homo sapien
gagactgttgctcatgatttgtact

SEQ ID NO: 1702597 - DNA, 25 bp, Homo sapien
tttgactgccagttttttagtatga

SEQ ID NO: 1702598 - DNA, 25 bp, Homo sapien
tcttcatccacttctataggtggag

SEQ ID NO: 1702599 - DNA, 25 bp, Homo sapien
ggtcctgtcctctcattttgatcat

SEQ ID NO: 1702600 - DNA, 25 bp, Homo sapien
ggctttttgctcgtgttcttccctc

SEQ ID NO: 1702601 - DNA, 25 bp, Homo sapien
gctttttgctcgtgttcttccctcc

SEQ ID NO: 1702602 - DNA, 25 bp, Homo sapien
tcttcacttcgtgctattatcgaag

SEQ ID NO: 1702603 - DNA, 25 bp, Homo sapien
tatcgaaggttctcgttgagtttta

SEQ ID NO: 1702604 - DNA, 25 bp, Homo sapien
ttctgtacttctggggttgaacatc

SEQ ID NO: 1702605 - DNA, 25 bp, Homo sapien
gacttctcggcaccagaggtttcat

SEQ ID NO: 1702606 - DNA, 25 bp, Homo sapien
tcagctttagggtagcatgttggct

SEQ ID NO: 1702607 - DNA, 25 bp, Homo sapien
gcttgtcttcctgattaactgttgg

SEQ ID NO: 1702608 - DNA, 25 bp, Homo sapien
aatgaaacgttccagtgattggatc

SEQ ID NO: 1702609 - DNA, 25 bp, Homo sapien
cagtgttagtggtgaatgataataa

SEQ ID NO: 1702610 - DNA, 25 bp, Homo sapien
cataggcactgcaatattgagttca

SEQ ID NO: 1702611 - DNA, 25 bp, Homo sapien
attgagttcatataacaagtatttc

SEQ ID NO: 1702612 - DNA, 25 bp, Homo sapien
cggttgaaataatcagccaaatgtg

SEQ ID NO: 1702613 - DNA, 25 bp, Homo sapien
tcctaagttacgaagtccagtaaga

SEQ ID NO: 1702614 - DNA, 25 bp, Homo sapien
tataccaaattcttctgccacttca

SEQ ID NO: 1702615 - DNA, 25 bp, Homo sapien
ataccaaattcttctgccacttcac

SEQ ID NO: 1702616 - DNA, 25 bp, Homo sapien
gattataccaaattcttctgccact

SEQ ID NO: 1702617 - DNA, 25 bp, Homo sapien
ttataccaaattcttctgccacttc

SEQ ID NO: 1702618 - DNA, 25 bp, Homo sapien
ccaatggtgactttaaggtcttttg

SEQ ID NO: 1702619 - DNA, 25 bp, Homo sapien
cttcccaatggtgactttaaggtct

SEQ ID NO: 1702620 - DNA, 25 bp, Homo sapien
agagacaaatacatgaaggcctcaa

SEQ ID NO: 1702621 - DNA, 25 bp, Homo sapien
tagagacaaatacatgaaggcctca

SEQ ID NO: 1702622 - DNA, 25 bp, Homo sapien
ctgcaaagattgcagtaaaatctgt

SEQ ID NO: 1702623 - DNA, 25 bp, Homo sapien
atctaaggcaatcctataatgtaca

SEQ ID NO: 1702624 - DNA, 25 bp, Homo sapien
ctaaggcaatcctataatgtacatt

SEQ ID NO: 1702625 - DNA, 25 bp, Homo sapien
gtaaaatctgttattatctatgagt

SEQ ID NO: 1702626 - DNA, 25 bp, Homo sapien
aacgggaagtccacagatgtctgta

SEQ ID NO: 1702627 - DNA, 25 bp, Homo sapien
gtttcagatgcactaaaagcacagg

SEQ ID NO: 1702628 - DNA, 25 bp, Homo sapien
tttggaccaataacatactgtgaca

SEQ ID NO: 1702629 - DNA, 25 bp, Homo sapien
caaattgttctttggaccaataaca

SEQ ID NO: 1702630 - DNA, 25 bp, Homo sapien
ctgcatttttacagtaggctgtgta

SEQ ID NO: 1702631 - DNA, 25 bp, Homo sapien
ttaaaccaccgctgttttgctgcat

SEQ ID NO: 1702632 - DNA, 25 bp, Homo sapien
gaaacttcatgatcatcaaacttaa

SEQ ID NO: 1702633 - DNA, 25 bp, Homo sapien
catttttacagtaggctgtgtaatg

SEQ ID NO: 1702634 - DNA, 25 bp, Homo sapien
aagaggatataagctgctgaagatt

SEQ ID NO: 1702635 - DNA, 25 bp, Homo sapien
taaaagaggatataagctgctgaag

SEQ ID NO: 1702636 - DNA, 25 bp, Homo sapien
ctgtgagacatcacgccatcaaatc

SEQ ID NO: 1702637 - DNA, 25 bp, Homo sapien
ggacccatgtctgggagtggagaac

SEQ ID NO: 1702638 - DNA, 25 bp, Homo sapien
tgctgcgcttccaaggcaggaagcc

SEQ ID NO: 1702639 - DNA, 25 bp, Homo sapien
acccatgtctgggagtggagaactt

SEQ ID NO: 1702640 - DNA, 25 bp, Homo sapien
ctgcgcttccaaggcaggaagccga

SEQ ID NO: 1702641 - DNA, 25 bp, Homo sapien
ggctgtgaggtggaccggcttggac

SEQ ID NO: 1702642 - DNA, 25 bp, Homo sapien
tggaccggcttggacgggtcatcct

SEQ ID NO: 1702643 - DNA, 25 bp, Homo sapien
tgtgaggtggaccggcttggacggg

SEQ ID NO: 1702644 - DNA, 25 bp, Homo sapien
aggtggaccggcttggacgggtcat

SEQ ID NO: 1702645 - DNA, 25 bp, Homo sapien
atcctggcctgtcgacttcccgcac

SEQ ID NO: 1702646 - DNA, 25 bp, Homo sapien
tggcctgtcgacttcccgcacgatg

SEQ ID NO: 1702647 - DNA, 25 bp, Homo sapien
tcgacttcccgcacgatgtgggtca

SEQ ID NO: 1702648 - DNA, 25 bp, Homo sapien
cttggatcctggcctgtcgacttcc

SEQ ID NO: 1702649 - DNA, 25 bp, Homo sapien
agcctccaccacctccttcttgttc

SEQ ID NO: 1702650 - DNA, 25 bp, Homo sapien
cctccaccacctccttcttgttcac

SEQ ID NO: 1702651 - DNA, 25 bp, Homo sapien
aatggtcacagcctccaccacctcc

SEQ ID NO: 1702652 - DNA, 25 bp, Homo sapien
acagcctccaccacctccttcttgt

SEQ ID NO: 1702653 - DNA, 25 bp, Homo sapien
gcccacaatgcccactggtggcctc

SEQ ID NO: 1702654 - DNA, 25 bp, Homo sapien
cttgaggggtttccacgcagcccac

SEQ ID NO: 1702655 - DNA, 25 bp, Homo sapien
ccacaatgcccactggtggcctctc

SEQ ID NO: 1702656 - DNA, 25 bp, Homo sapien
acaatgcccactggtggcctctcca

SEQ ID NO: 1702657 - DNA, 25 bp, Homo sapien
aagacagtcttgcaagtccggaagc

SEQ ID NO: 1702658 - DNA, 25 bp, Homo sapien
ctgggtgtgggcaatgacgcagatg

SEQ ID NO: 1702659 - DNA, 25 bp, Homo sapien
tgggtgtgggcaatgacgcagatga

SEQ ID NO: 1702660 - DNA, 25 bp, Homo sapien
gggtgtgggcaatgacgcagatgac

SEQ ID NO: 1702661 - DNA, 25 bp, Homo sapien
aggtacctggtgcttgagcctctcg

SEQ ID NO: 1702662 - DNA, 25 bp, Homo sapien
cctggtgcttgagcctctcgccagc

SEQ ID NO: 1702663 - DNA, 25 bp, Homo sapien
acctggtgcttgagcctctcgccag

SEQ ID NO: 1702664 - DNA, 25 bp, Homo sapien
gtacctggtgcttgagcctctcgcc

SEQ ID NO: 1702665 - DNA, 25 bp, Homo sapien
tagccaatcctatagatcttcttgt

SEQ ID NO: 1702666 - DNA, 25 bp, Homo sapien
ctagccaatcctatagatcttcttg

SEQ ID NO: 1702667 - DNA, 25 bp, Homo sapien
tggtagcctttctgcccaccacgta

SEQ ID NO: 1702668 - DNA, 25 bp, Homo sapien
gatctcagtgcggtgatggtagcct

SEQ ID NO: 1702669 - DNA, 25 bp, Homo sapien
ccatagtggacgaagccacccaaag

SEQ ID NO: 1702670 - DNA, 25 bp, Homo sapien
ttcaccatagtggacgaagccaccc

SEQ ID NO: 1702671 - DNA, 25 bp, Homo sapien
atagtggacgaagccacccaaaggg

SEQ ID NO: 1702672 - DNA, 25 bp, Homo sapien
tggacgaagccacccaaagggttga

SEQ ID NO: 1702673 - DNA, 25 bp, Homo sapien
cttgcggagggtgagcacccacttc

SEQ ID NO: 1702674 - DNA, 25 bp, Homo sapien
atcttctccagagcccgctgctttg

SEQ ID NO: 1702675 - DNA, 25 bp, Homo sapien
ttgcggagggtgagcacccacttct

SEQ ID NO: 1702676 - DNA, 25 bp, Homo sapien
tccagagcccgctgctttgtctgca

SEQ ID NO: 1702677 - DNA, 25 bp, Homo sapien
cttgagtggtcccatgaatgctttc

SEQ ID NO: 1702678 - DNA, 25 bp, Homo sapien
agtggccatggccaaacttggaggg

SEQ ID NO: 1702679 - DNA, 25 bp, Homo sapien
tcctccatggtctggaagtggccat

SEQ ID NO: 1702680 - DNA, 25 bp, Homo sapien
tggccatggccaaacttggaggggg

SEQ ID NO: 1702681 - DNA, 25 bp, Homo sapien
ccttcttcctttgcaattcggtctt

SEQ ID NO: 1702682 - DNA, 25 bp, Homo sapien
ctccttcttcctttgcaattcggtc

SEQ ID NO: 1702683 - DNA, 25 bp, Homo sapien
cttcttcctttgcaattcggtcttt

SEQ ID NO: 1702684 - DNA, 25 bp, Homo sapien
tccttcttcctttgcaattcggtct

SEQ ID NO: 1702685 - DNA, 25 bp, Homo sapien
tattgagatcccaccagttgcaata

SEQ ID NO: 1702686 - DNA, 25 bp, Homo sapien
ttgagatcccaccagttgcaatatc

SEQ ID NO: 1702687 - DNA, 25 bp, Homo sapien
ttattgagatcccaccagttgcaat

SEQ ID NO: 1702688 - DNA, 25 bp, Homo sapien
tgagatcccaccagttgcaatatct

SEQ ID NO: 1702689 - DNA, 25 bp, Homo sapien
tctccacaggcgtcttcatggccat

SEQ ID NO: 1702690 - DNA, 25 bp, Homo sapien
ttctccacaggcgtcttcatggcca

SEQ ID NO: 1702691 - DNA, 25 bp, Homo sapien
catggggttgaagtgacccataggc

SEQ ID NO: 1702692 - DNA, 25 bp, Homo sapien
cccataggctgatggagtgtgcttg

SEQ ID NO: 1702693 - DNA, 25 bp, Homo sapien
tggactgaagtctattgcatttgcc

SEQ ID NO: 1702694 - DNA, 25 bp, Homo sapien
catttgccacagtcccgactgggga

SEQ ID NO: 1702695 - DNA, 25 bp, Homo sapien
gtatgatatcccactcaaagagatg

SEQ ID NO: 1702696 - DNA, 25 bp, Homo sapien
gatgccacactgctagataaagtgg

SEQ ID NO: 1702697 - DNA, 25 bp, Homo sapien
tgttggcacaatgggcacatatctg

SEQ ID NO: 1702698 - DNA, 25 bp, Homo sapien
tcatcatcccaagataatccacggc

SEQ ID NO: 1702699 - DNA, 25 bp, Homo sapien
tgaagctgtcattcacacgatgcat

SEQ ID NO: 1702700 - DNA, 25 bp, Homo sapien
aatgaagctgtcattcacacgatgc

SEQ ID NO: 1702701 - DNA, 25 bp, Homo sapien
atgaagctgtcattcacacgatgca

SEQ ID NO: 1702702 - DNA, 25 bp, Homo sapien
tatatgctctgggacctctccagct

SEQ ID NO: 1702703 - DNA, 25 bp, Homo sapien
gggccacttggcttcagtcccctga

SEQ ID NO: 1702704 - DNA, 25 bp, Homo sapien
ggtgacgaaggcctcatagacttca

SEQ ID NO: 1702705 - DNA, 25 bp, Homo sapien
cctgatggcagtaagaggcagctcc

SEQ ID NO: 1702706 - DNA, 25 bp, Homo sapien
ttgtgtccactgtgacccctgttcc

SEQ ID NO: 1702707 - DNA, 25 bp, Homo sapien
tgttcccatgctgacctgtgtttcc

SEQ ID NO: 1702708 - DNA, 25 bp, Homo sapien
gctatgagaggttgatggattaatt

SEQ ID NO: 1702709 - DNA, 25 bp, Homo sapien
tcaactttacgtgcactgagctgca

SEQ ID NO: 1702710 - DNA, 25 bp, Homo sapien
ccagggctctgatgtgtctctcaca

SEQ ID NO: 1702711 - DNA, 25 bp, Homo sapien
gtgcccagggctctgatgtgtctct

SEQ ID NO: 1702712 - DNA, 25 bp, Homo sapien
gcccagggctctgatgtgtctctca

SEQ ID NO: 1702713 - DNA, 25 bp, Homo sapien
cccagggctctgatgtgtctctcac

SEQ ID NO: 1702714 - DNA, 25 bp, Homo sapien
ctggagggcacgtgcgtggagtggc

SEQ ID NO: 1702715 - DNA, 25 bp, Homo sapien
gagggcacgtgcgtggagtggctcc

SEQ ID NO: 1702716 - DNA, 25 bp, Homo sapien
gtgcgtggagtggctccgcagatac

SEQ ID NO: 1702717 - DNA, 25 bp, Homo sapien
agggcacgtgcgtggagtggctccg

SEQ ID NO: 1702718 - DNA, 25 bp, Homo sapien
tcctattttaatatatgtgctgcca

SEQ ID NO: 1702719 - DNA, 25 bp, Homo sapien
cacccttgtgcaggggccgtgctga

SEQ ID NO: 1702720 - DNA, 25 bp, Homo sapien
tcttctctgtatcattcctatttta

SEQ ID NO: 1702721 - DNA, 25 bp, Homo sapien
tcacccttgtgcaggggccgtgctg

SEQ ID NO: 1702722 - DNA, 25 bp, Homo sapien
actgcagtctacaaaggttcaacaa

SEQ ID NO: 1702723 - DNA, 25 bp, Homo sapien
gtctgtgcattttaacgtcttctgt

SEQ ID NO: 1702724 - DNA, 25 bp, Homo sapien
ggtgatgtttctaactgtctgtgca

SEQ ID NO: 1702725 - DNA, 25 bp, Homo sapien
aggccgaggctggaacattgctgga

SEQ ID NO: 1702726 - DNA, 25 bp, Homo sapien
gatggtttcaagacctcagcgggag

SEQ ID NO: 1702727 - DNA, 25 bp, Homo sapien
gccatacaaagcactagggtacagg

SEQ ID NO: 1702728 - DNA, 25 bp, Homo sapien
cccaggtcctcgtgagaggcagtca

SEQ ID NO: 1702729 - DNA, 25 bp, Homo sapien
cattttgaggacaccagctctgcac

SEQ ID NO: 1702730 - DNA, 25 bp, Homo sapien
catctgtcatgtgcacactgagtgg

SEQ ID NO: 1702731 - DNA, 25 bp, Homo sapien
tcctgaggatggagcatctgtcatg

SEQ ID NO: 1702732 - DNA, 25 bp, Homo sapien
tgcacttgtgtcttcagccttgtcc

SEQ ID NO: 1702733 - DNA, 25 bp, Homo sapien
ctccacgtctttgtcatctcctgag

SEQ ID NO: 1702734 - DNA, 25 bp, Homo sapien
tgtggcaggaggttgtgggaatgag

SEQ ID NO: 1702735 - DNA, 25 bp, Homo sapien
ccgcctcacggagctgtccctgtgg

SEQ ID NO: 1702736 - DNA, 25 bp, Homo sapien
gagcggcaccgcctcacggagctgt

SEQ ID NO: 1702737 - DNA, 25 bp, Homo sapien
gttgtgggaatgagcggcaccgcct

SEQ ID NO: 1702738 - DNA, 25 bp, Homo sapien
gacgacactaagtcatcctgcacag

SEQ ID NO: 1702739 - DNA, 25 bp, Homo sapien
gagtggctaggtcctctgtttggaa

SEQ ID NO: 1702740 - DNA, 25 bp, Homo sapien
tctgaagtctgaggctctgccaggc

SEQ ID NO: 1702741 - DNA, 25 bp, Homo sapien
tgccaggcaacgtttcatcccgatc

SEQ ID NO: 1702742 - DNA, 25 bp, Homo sapien
ttcacataagcaaagtacaagtctc

SEQ ID NO: 1702743 - DNA, 25 bp, Homo sapien
cctgtgagggtaagttgcagacagc

SEQ ID NO: 1702744 - DNA, 25 bp, Homo sapien
cgcacccggccggagagagaaaatt

SEQ ID NO: 1702745 - DNA, 25 bp, Homo sapien
ctctaaatctgtaaatatgctgcta

SEQ ID NO: 1702746 - DNA, 25 bp, Homo sapien
cgccctggtctacggaaaatgaaat

SEQ ID NO: 1702747 - DNA, 25 bp, Homo sapien
tctggaatccggctttcttgaaaca

SEQ ID NO: 1702748 - DNA, 25 bp, Homo sapien
tagggtcccgccacttcagtgagga

SEQ ID NO: 1702749 - DNA, 25 bp, Homo sapien
aattcactgcgaggactgggatcac

SEQ ID NO: 1702750 - DNA, 25 bp, Homo sapien
tgctctaccccatcaactacgtttt

SEQ ID NO: 1702751 - DNA, 25 bp, Homo sapien
agggagtcatgaagccagtcctctc

SEQ ID NO: 1702752 - DNA, 25 bp, Homo sapien
acttgtttcttagtgcccaggcctg

SEQ ID NO: 1702753 - DNA, 25 bp, Homo sapien
caggtcttctgtccaaagccctccc

SEQ ID NO: 1702754 - DNA, 25 bp, Homo sapien
ttctaccctatgaaccctccaagat

SEQ ID NO: 1702755 - DNA, 25 bp, Homo sapien
ccatgatccctagcctatacttttc

SEQ ID NO: 1702756 - DNA, 25 bp, Homo sapien
gatcctcataatttattgagcacag

SEQ ID NO: 1702757 - DNA, 25 bp, Homo sapien
ctccaagatcaggaaatgtgtccgt

SEQ ID NO: 1702758 - DNA, 25 bp, Homo sapien
acctctgccttggaacccatcagac

SEQ ID NO: 1702759 - DNA, 25 bp, Homo sapien
tgccttggaacccatcagaccacac

SEQ ID NO: 1702760 - DNA, 25 bp, Homo sapien
tccctcttccaggctattgtaacct

SEQ ID NO: 1702761 - DNA, 25 bp, Homo sapien
tcttccaggctattgtaacctctgc

SEQ ID NO: 1702762 - DNA, 25 bp, Homo sapien
cgaccgctcatccaatgaaactggg

SEQ ID NO: 1702763 - DNA, 25 bp, Homo sapien
aggcgccgcggaaacttagtcacct

SEQ ID NO: 1702764 - DNA, 25 bp, Homo sapien
gcccggaacttagggccaatcacga

SEQ ID NO: 1702765 - DNA, 25 bp, Homo sapien
cttagggccaatcacgagcggagag

SEQ ID NO: 1702766 - DNA, 25 bp, Homo sapien
gcaggaagaccgggcccagccccat

SEQ ID NO: 1702767 - DNA, 25 bp, Homo sapien
gctcccggaggtgcaaaagggaaga

SEQ ID NO: 1702768 - DNA, 25 bp, Homo sapien
agaagcaggaagaccgggcccagcc

SEQ ID NO: 1702769 - DNA, 25 bp, Homo sapien
agctcccggaggtgcaaaagggaag

SEQ ID NO: 1702770 - DNA, 25 bp, Homo sapien
gaaacgtcccactgctcccgctccg

SEQ ID NO: 1702771 - DNA, 25 bp, Homo sapien
ccggaaacgtcccactgctcccgct

SEQ ID NO: 1702772 - DNA, 25 bp, Homo sapien
ccgctccgccgaggaccgccaggaa

SEQ ID NO: 1702773 - DNA, 25 bp, Homo sapien
gaggaccgccaggaacgccactcac

SEQ ID NO: 1702774 - DNA, 25 bp, Homo sapien
taaggagctcgaacaactataggaa

SEQ ID NO: 1702775 - DNA, 25 bp, Homo sapien
gggaaacaatgtggaggttcttcca

SEQ ID NO: 1702776 - DNA, 25 bp, Homo sapien
catcattcgtcaacagatgaaggca

SEQ ID NO: 1702777 - DNA, 25 bp, Homo sapien
cactgttaggcatatactccaaaga

SEQ ID NO: 1702778 - DNA, 25 bp, Homo sapien
gataaagctatcctgagcaaaatga

SEQ ID NO: 1702779 - DNA, 25 bp, Homo sapien
cagaatagataaagctatcctgagc

SEQ ID NO: 1702780 - DNA, 25 bp, Homo sapien
aaaaccagaatagataaagctatcc

SEQ ID NO: 1702781 - DNA, 25 bp, Homo sapien
gaatagataaagctatcctgagcaa

SEQ ID NO: 1702782 - DNA, 25 bp, Homo sapien
tgtgcccaccgaacctcaaaaatat

SEQ ID NO: 1702783 - DNA, 25 bp, Homo sapien
ctgtgcccaccgaacctcaaaaata

SEQ ID NO: 1702784 - DNA, 25 bp, Homo sapien
cactgtgcccaccgaacctcaaaaa

SEQ ID NO: 1702785 - DNA, 25 bp, Homo sapien
actgtgcccaccgaacctcaaaaat

SEQ ID NO: 1702786 - DNA, 25 bp, Homo sapien
cgtgaggttataacgaagactgtgg

SEQ ID NO: 1702787 - DNA, 25 bp, Homo sapien
aaccctgactgcacagatccatccc

SEQ ID NO: 1702788 - DNA, 25 bp, Homo sapien
aggttataacgaagactgtggggct

SEQ ID NO: 1702789 - DNA, 25 bp, Homo sapien
catcccaggacagcaccgtgaggtt

SEQ ID NO: 1702790 - DNA, 25 bp, Homo sapien
atcctgaggtcctttccgttccctg

SEQ ID NO: 1702791 - DNA, 25 bp, Homo sapien
ctttccgttccctgtcaagtccctg

SEQ ID NO: 1702792 - DNA, 25 bp, Homo sapien
tgaggtcctttccgttccctgtcaa

SEQ ID NO: 1702793 - DNA, 25 bp, Homo sapien
tccgttccctgtcaagtccctggtc

SEQ ID NO: 1702794 - DNA, 25 bp, Homo sapien
tgtgggctgagtgccggctcacctc

SEQ ID NO: 1702795 - DNA, 25 bp, Homo sapien
cctgtgtgggctgagtgccggctca

SEQ ID NO: 1702796 - DNA, 25 bp, Homo sapien
ttccacccaagtgaggaactcagcc

SEQ ID NO: 1702797 - DNA, 25 bp, Homo sapien
ctcagcccagggggtatgcctccct

SEQ ID NO: 1702798 - DNA, 25 bp, Homo sapien
cgtagtagaaatgctgggagctcct

SEQ ID NO: 1702799 - DNA, 25 bp, Homo sapien
ctacgccggattctagatatcgccg

SEQ ID NO: 1702800 - DNA, 25 bp, Homo sapien
tcctcaggactacgccggattctag

SEQ ID NO: 1702801 - DNA, 25 bp, Homo sapien
tagatatcgccgtagttcctgcagg

SEQ ID NO: 1702802 - DNA, 25 bp, Homo sapien
ctgttctcctcaggactacgccgga

SEQ ID NO: 1702803 - DNA, 25 bp, Homo sapien
gtcacggtgatgttgccctctgagg

SEQ ID NO: 1702804 - DNA, 25 bp, Homo sapien
cccatcctgacgccaggtcagtatg

SEQ ID NO: 1702805 - DNA, 25 bp, Homo sapien
acggtgatgttgccctctgaggcct

SEQ ID NO: 1702806 - DNA, 25 bp, Homo sapien
ccatcctgacgccaggtcagtatga

SEQ ID NO: 1702807 - DNA, 25 bp, Homo sapien
ttacaacaacggacatagaaaataa

SEQ ID NO: 1702808 - DNA, 25 bp, Homo sapien
tacaacaacggacatagaaaataat

SEQ ID NO: 1702809 - DNA, 25 bp, Homo sapien
acaacaacggacatagaaaataata

SEQ ID NO: 1702810 - DNA, 25 bp, Homo sapien
ctggaccctctgcagctgatgtttt

SEQ ID NO: 1702811 - DNA, 25 bp, Homo sapien
accctctgcagctgatgttttcttc

SEQ ID NO: 1702812 - DNA, 25 bp, Homo sapien
ggaccctctgcagctgatgttttct

SEQ ID NO: 1702813 - DNA, 25 bp, Homo sapien
tggaccctctgcagctgatgttttc

SEQ ID NO: 1702814 - DNA, 25 bp, Homo sapien
cacttatgggtgtagatggagatgc

SEQ ID NO: 1702815 - DNA, 25 bp, Homo sapien
ttcatcccctgttacggaagccttg

SEQ ID NO: 1702816 - DNA, 25 bp, Homo sapien
ggatgccacagctgggcgtttgacc

SEQ ID NO: 1702817 - DNA, 25 bp, Homo sapien
gcgtttgacccttgcttgggcagca

SEQ ID NO: 1702818 - DNA, 25 bp, Homo sapien
gggtaaatgctccactgggtgcagt

SEQ ID NO: 1702819 - DNA, 25 bp, Homo sapien
ctgggtgcagtgttgtgtttattcc

SEQ ID NO: 1702820 - DNA, 25 bp, Homo sapien
tgctccaaaaccagatttgcccttt

SEQ ID NO: 1702821 - DNA, 25 bp, Homo sapien
ttcagttgctccaaaaccagatttg

SEQ ID NO: 1702822 - DNA, 25 bp, Homo sapien
ggagccagtggacccaagagctgac

SEQ ID NO: 1702823 - DNA, 25 bp, Homo sapien
gtgtggcatccctgtggtcactcgt

SEQ ID NO: 1702824 - DNA, 25 bp, Homo sapien
gtggcatccctgtggtcactcgtcc

SEQ ID NO: 1702825 - DNA, 25 bp, Homo sapien
gtggtcactcgtcccaactgggtgt

SEQ ID NO: 1702826 - DNA, 25 bp, Homo sapien
tctgtttcataggtcaggaaactga

SEQ ID NO: 1702827 - DNA, 25 bp, Homo sapien
ctgtttcataggtcaggaaactgag

SEQ ID NO: 1702828 - DNA, 25 bp, Homo sapien
catatctactaacattttgcagcct

SEQ ID NO: 1702829 - DNA, 25 bp, Homo sapien
gcctcatatctactaacattttgca

SEQ ID NO: 1702830 - DNA, 25 bp, Homo sapien
caaatgcctcatatctactaacatt

SEQ ID NO: 1702831 - DNA, 25 bp, Homo sapien
atgcctcatatctactaacattttg

SEQ ID NO: 1702832 - DNA, 25 bp, Homo sapien
cgaatatcacacttcagctctgtgt

SEQ ID NO: 1702833 - DNA, 25 bp, Homo sapien
acctgactgactgggattcttcaaa

SEQ ID NO: 1702834 - DNA, 25 bp, Homo sapien
cagcagtcactttacgccagaacct

SEQ ID NO: 1702835 - DNA, 25 bp, Homo sapien
tctgtgtcatcacatgaaggctcca

SEQ ID NO: 1702836 - DNA, 25 bp, Homo sapien
tctctggatcagtaagtagcacatg

SEQ ID NO: 1702837 - DNA, 25 bp, Homo sapien
gaaaatgtcaacgaacacatctctg

SEQ ID NO: 1702838 - DNA, 25 bp, Homo sapien
tagcacatgagtgaattccctactc

SEQ ID NO: 1702839 - DNA, 25 bp, Homo sapien
tgccttgaccaagaagtgcatcacc

SEQ ID NO: 1702840 - DNA, 25 bp, Homo sapien
atacctaatgagaacagaattcaac

SEQ ID NO: 1702841 - DNA, 25 bp, Homo sapien
caagtgacacttgctaactaaaata

SEQ ID NO: 1702842 - DNA, 25 bp, Homo sapien
caacaagtgacacttgctaactaaa

SEQ ID NO: 1702843 - DNA, 25 bp, Homo sapien
atttatacctaatgagaacagaatt

SEQ ID NO: 1702844 - DNA, 25 bp, Homo sapien
tcttagtgcaatgaaaccccaatgt

SEQ ID NO: 1702845 - DNA, 25 bp, Homo sapien
gctccccagggattcacatgactca

SEQ ID NO: 1702846 - DNA, 25 bp, Homo sapien
catgaagagacattcacgccgctgt

SEQ ID NO: 1702847 - DNA, 25 bp, Homo sapien
ttcaaacgggaattagagcacatca

SEQ ID NO: 1702848 - DNA, 25 bp, Homo sapien
atctttagggaatcacgctgagtga

SEQ ID NO: 1702849 - DNA, 25 bp, Homo sapien
tacatgtggatctatgattacctca

SEQ ID NO: 1702850 - DNA, 25 bp, Homo sapien
cacttatatgggcatgcaaaggcaa

SEQ ID NO: 1702851 - DNA, 25 bp, Homo sapien
cctgaacgacgttggaggccattat

SEQ ID NO: 1702852 - DNA, 25 bp, Homo sapien
ccaatcgagtatctgctgtcttcaa

SEQ ID NO: 1702853 - DNA, 25 bp, Homo sapien
gggccacccaactcaattatctaga

SEQ ID NO: 1702854 - DNA, 25 bp, Homo sapien
aatgggtaaaaatccaccaatcgag

SEQ ID NO: 1702855 - DNA, 25 bp, Homo sapien
ggtattaaggcaacaacctgcatga

SEQ ID NO: 1702856 - DNA, 25 bp, Homo sapien
tctgatgtctctggcgcttttgaaa

SEQ ID NO: 1702857 - DNA, 25 bp, Homo sapien
taagtgtgtacgatttcatttctga

SEQ ID NO: 1702858 - DNA, 25 bp, Homo sapien
tgattgtggaaaactccgaataagt

SEQ ID NO: 1702859 - DNA, 25 bp, Homo sapien
tttggcactcacagaaatttcaatg

SEQ ID NO: 1702860 - DNA, 25 bp, Homo sapien
tctgccctgagacaaaagtccagtc

SEQ ID NO: 1702861 - DNA, 25 bp, Homo sapien
tgggaagctggatgaactcagagcc

SEQ ID NO: 1702862 - DNA, 25 bp, Homo sapien
tcggattctgactgagcgctttcgg

SEQ ID NO: 1702863 - DNA, 25 bp, Homo sapien
cagtcaatcagttgtgggagaaaac

SEQ ID NO: 1702864 - DNA, 25 bp, Homo sapien
aaaacatgggatagaggctgggtac

SEQ ID NO: 1702865 - DNA, 25 bp, Homo sapien
ggacattcctgagcatcacaaaggt

SEQ ID NO: 1702866 - DNA, 25 bp, Homo sapien
gaagcaatgggcttatcacgtagcc

SEQ ID NO: 1702867 - DNA, 25 bp, Homo sapien
gaagctatctcaccattgagcgaag

SEQ ID NO: 1702868 - DNA, 25 bp, Homo sapien
gaactgaggccgcatcatgagtatc

SEQ ID NO: 1702869 - DNA, 25 bp, Homo sapien
aggaacccaacacccaatggaagtg

SEQ ID NO: 1702870 - DNA, 25 bp, Homo sapien
cgcatcatgagtatccaggtaaaag

SEQ ID NO: 1702871 - DNA, 25 bp, Homo sapien
ccaatggaagtgagaactgaggccg

SEQ ID NO: 1702872 - DNA, 25 bp, Homo sapien
agaaccaggaaccgcggcgacactg

SEQ ID NO: 1702873 - DNA, 25 bp, Homo sapien
accaggaaccgcggcgacactgatt

SEQ ID NO: 1702874 - DNA, 25 bp, Homo sapien
gacccgcaaccttggcgtctgggga

SEQ ID NO: 1702875 - DNA, 25 bp, Homo sapien
aaccaggaaccgcggcgacactgat

SEQ ID NO: 1702876 - DNA, 25 bp, Homo sapien
agggccacggctcccgagaacagca

SEQ ID NO: 1702877 - DNA, 25 bp, Homo sapien
ccagagttgtaatgtaaaaatgaga

SEQ ID NO: 1702878 - DNA, 25 bp, Homo sapien
atttctgccttgattgtaattgtaa

SEQ ID NO: 1702879 - DNA, 25 bp, Homo sapien
gccttttccagagttgtaatgtaaa

SEQ ID NO: 1702880 - DNA, 25 bp, Homo sapien
atgagatcatttctgccttgattgt

SEQ ID NO: 1702881 - DNA, 25 bp, Homo sapien
tgcccatcacttgggggcacacttg

SEQ ID NO: 1702882 - DNA, 25 bp, Homo sapien
ctgcccatcacttgggggcacactt

SEQ ID NO: 1702883 - DNA, 25 bp, Homo sapien
gactcctttgatggccaatagtggc

SEQ ID NO: 1702884 - DNA, 25 bp, Homo sapien
gggacacagaggactcctttgatgg

SEQ ID NO: 1702885 - DNA, 25 bp, Homo sapien
gaggactcttccacggccttgatca

SEQ ID NO: 1702886 - DNA, 25 bp, Homo sapien
atggccaatagtggctggaggactc

SEQ ID NO: 1702887 - DNA, 25 bp, Homo sapien
cagaggccctacttctctcaggctg

SEQ ID NO: 1702888 - DNA, 25 bp, Homo sapien
tcaggctgttcccagcgggtgatgg

SEQ ID NO: 1702889 - DNA, 25 bp, Homo sapien
taagtgtgaggagaatcgtccagcc

SEQ ID NO: 1702890 - DNA, 25 bp, Homo sapien
gatttcagtcgcatttccaggtaat

SEQ ID NO: 1702891 - DNA, 25 bp, Homo sapien
aaggcctcgttcctgtgctctgaca

SEQ ID NO: 1702892 - DNA, 25 bp, Homo sapien
gtccagccacccaacctgagagggt

SEQ ID NO: 1702893 - DNA, 25 bp, Homo sapien
cattgaactacacattacagctgcc

SEQ ID NO: 1702894 - DNA, 25 bp, Homo sapien
ggaattggacagtatgtgtccagag

SEQ ID NO: 1702895 - DNA, 25 bp, Homo sapien
ggagacaaatgagtgcccattgaac

SEQ ID NO: 1702896 - DNA, 25 bp, Homo sapien
gctgctgtcacacaatgagggtagg

SEQ ID NO: 1702897 - DNA, 25 bp, Homo sapien
tctctcccaaaaccacactctgcag

SEQ ID NO: 1702898 - DNA, 25 bp, Homo sapien
gaacccaatgatcttccctggtagg

SEQ ID NO: 1702899 - DNA, 25 bp, Homo sapien
gatgaggctacctatgggtccaaca

SEQ ID NO: 1702900 - DNA, 25 bp, Homo sapien
tcttgtgagttgagcctgaatccca

SEQ ID NO: 1702901 - DNA, 25 bp, Homo sapien
gaacacgtgggtccagataccaagg

SEQ ID NO: 1702902 - DNA, 25 bp, Homo sapien
ctttaattcatagtttgcctcaggg

SEQ ID NO: 1702903 - DNA, 25 bp, Homo sapien
ctcagggctattataattccccagg

SEQ ID NO: 1702904 - DNA, 25 bp, Homo sapien
caggcctctatagtacagtcttaag

SEQ ID NO: 1702905 - DNA, 25 bp, Homo sapien
gtgggatccacaacactttaattca

SEQ ID NO: 1702906 - DNA, 25 bp, Homo sapien
cacagccaaccgtatcacatgggtt

SEQ ID NO: 1702907 - DNA, 25 bp, Homo sapien
gacattacgtgaggccggaaagccc

SEQ ID NO: 1702908 - DNA, 25 bp, Homo sapien
ggaaaaaatgatgccggtatctcac

SEQ ID NO: 1702909 - DNA, 25 bp, Homo sapien
tagacctgacttagttgccccggaa

SEQ ID NO: 1702910 - DNA, 25 bp, Homo sapien
gtgatcctgccatctactcactgtc

SEQ ID NO: 1702911 - DNA, 25 bp, Homo sapien
aaactacacagctggtggaatccac

SEQ ID NO: 1702912 - DNA, 25 bp, Homo sapien
gcctcctactggtctgggtgactct

SEQ ID NO: 1702913 - DNA, 25 bp, Homo sapien
cccttgcgttgccatacttgtttgg

SEQ ID NO: 1702914 - DNA, 25 bp, Homo sapien
gctctaggagctaagggtggcccct

SEQ ID NO: 1702915 - DNA, 25 bp, Homo sapien
tccatccagtcatcagggagacaag

SEQ ID NO: 1702916 - DNA, 25 bp, Homo sapien
cacgagtaggttgcattacatggca

SEQ ID NO: 1702917 - DNA, 25 bp, Homo sapien
gactatctgtgtgggcccgatcaaa

SEQ ID NO: 1702918 - DNA, 25 bp, Homo sapien
gcggcctcgctctgtgctcagtaaa

SEQ ID NO: 1702919 - DNA, 25 bp, Homo sapien
catgtgctgggatttgtgcctggtc

SEQ ID NO: 1702920 - DNA, 25 bp, Homo sapien
ttttcaagttaagggctgggcacaa

SEQ ID NO: 1702921 - DNA, 25 bp, Homo sapien
tcacttcttctgtgggacagtcagg

SEQ ID NO: 1702922 - DNA, 25 bp, Homo sapien
gaagggaagcgtctcactgtacaca

SEQ ID NO: 1702923 - DNA, 25 bp, Homo sapien
tcaggaccatgacactgggtgctcc

SEQ ID NO: 1702924 - DNA, 25 bp, Homo sapien
tggtattcaagacccttatggcccc

SEQ ID NO: 1702925 - DNA, 25 bp, Homo sapien
aacagcagggtagcaacactcagga

SEQ ID NO: 1702926 - DNA, 25 bp, Homo sapien
tacacctgttgggatctctctagca

SEQ ID NO: 1702927 - DNA, 25 bp, Homo sapien
catgccataagcttggatcctccag

SEQ ID NO: 1702928 - DNA, 25 bp, Homo sapien
ttagcccggtctaaatgagcactga

SEQ ID NO: 1702929 - DNA, 25 bp, Homo sapien
ggcagtcatgccataagcttggatc

SEQ ID NO: 1702930 - DNA, 25 bp, Homo sapien
tcttctgcacttggaacaacagggt

SEQ ID NO: 1702931 - DNA, 25 bp, Homo sapien
gaattccagcttccgttgtcagtca

SEQ ID NO: 1702932 - DNA, 25 bp, Homo sapien
gcaatggtccctaaatcatgccaag

SEQ ID NO: 1702933 - DNA, 25 bp, Homo sapien
gagtcccacatctaccatggaaaag

SEQ ID NO: 1702934 - DNA, 25 bp, Homo sapien
caacaagctcagtacaataaggagt

SEQ ID NO: 1702935 - DNA, 25 bp, Homo sapien
gcatcagaagtggttgctttcctga

SEQ ID NO: 1702936 - DNA, 25 bp, Homo sapien
gactttggagaactacatagcactg

SEQ ID NO: 1702937 - DNA, 25 bp, Homo sapien
cagaatcactaaagtaaataggact

SEQ ID NO: 1702938 - DNA, 25 bp, Homo sapien
agtgctccagcatctacagcaaaag

SEQ ID NO: 1702939 - DNA, 25 bp, Homo sapien
gggagccatctgtgtctagacgata

SEQ ID NO: 1702940 - DNA, 25 bp, Homo sapien
ggaggcagtaaaaccccacagtgct

SEQ ID NO: 1702941 - DNA, 25 bp, Homo sapien
tagacagaaattgccgtactgcctt

SEQ ID NO: 1702942 - DNA, 25 bp, Homo sapien
aacatcttacaacgatgtaatttgc

SEQ ID NO: 1702943 - DNA, 25 bp, Homo sapien
tgactctgtggactttgacttcatc

SEQ ID NO: 1702944 - DNA, 25 bp, Homo sapien
ggactttgacttcatcattaaacat

SEQ ID NO: 1702945 - DNA, 25 bp, Homo sapien
tcttacaacgatgtaatttgctttg

SEQ ID NO: 1702946 - DNA, 25 bp, Homo sapien
aacagcacggtgtcaaggccctcac

SEQ ID NO: 1702947 - DNA, 25 bp, Homo sapien
agaacagcacggtgtcaaggccctc

SEQ ID NO: 1702948 - DNA, 25 bp, Homo sapien
gaacagcacggtgtcaaggccctca

SEQ ID NO: 1702949 - DNA, 25 bp, Homo sapien
cgctgtgaaaatgcagacccgcggg

SEQ ID NO: 1702950 - DNA, 25 bp, Homo sapien
ccgctgtgaaaatgcagacccgcgg

SEQ ID NO: 1702951 - DNA, 25 bp, Homo sapien
gccgctgtgaaaatgcagacccgcg

SEQ ID NO: 1702952 - DNA, 25 bp, Homo sapien
ccactgcagggtccggaaaagaaag

SEQ ID NO: 1702953 - DNA, 25 bp, Homo sapien
aaagaaagagaaacggcccagcgcg

SEQ ID NO: 1702954 - DNA, 25 bp, Homo sapien
aagaaagagaaacggcccagcgcgg

SEQ ID NO: 1702955 - DNA, 25 bp, Homo sapien
taatttattaagcacagcagggact

SEQ ID NO: 1702956 - DNA, 25 bp, Homo sapien
caccttagagagattattttcactg

SEQ ID NO: 1702957 - DNA, 25 bp, Homo sapien
ctaaagatcataagcatagtttgag

SEQ ID NO: 1702958 - DNA, 25 bp, Homo sapien
tgtaatgtattcgagaactttaaca

SEQ ID NO: 1702959 - DNA, 25 bp, Homo sapien
ccccgtcgaaatttagtcacctgcg

SEQ ID NO: 1702960 - DNA, 25 bp, Homo sapien
tgaatgaaaccggtgagaagacccc

SEQ ID NO: 1702961 - DNA, 25 bp, Homo sapien
gctgctcagcagtggccaactgaat

SEQ ID NO: 1702962 - DNA, 25 bp, Homo sapien
gtcgaaatttagtcacctgcgcccc

SEQ ID NO: 1702963 - DNA, 25 bp, Homo sapien
gtgcaaaagggaaggcgacggccag

SEQ ID NO: 1702964 - DNA, 25 bp, Homo sapien
gaaggcgacggccagaaacagcagg

SEQ ID NO: 1702965 - DNA, 25 bp, Homo sapien
aagggaaggcgacggccagaaacag

SEQ ID NO: 1702966 - DNA, 25 bp, Homo sapien
tgcaaaagggaaggcgacggccaga

SEQ ID NO: 1702967 - DNA, 25 bp, Homo sapien
aggactgaaaggagacgggaggtcg

SEQ ID NO: 1702968 - DNA, 25 bp, Homo sapien
gaaaatgcgggtgatgcgcgatccc

SEQ ID NO: 1702969 - DNA, 25 bp, Homo sapien
agaccagaaaatgcgggtgatgcgc

SEQ ID NO: 1702970 - DNA, 25 bp, Homo sapien
tgcgcgatcccgaggaggactgaaa

SEQ ID NO: 1702971 - DNA, 25 bp, Homo sapien
gaggttgtaacgaagactgtggggc

SEQ ID NO: 1702972 - DNA, 25 bp, Homo sapien
catgaggttgtaacgaagactgtgg

SEQ ID NO: 1702973 - DNA, 25 bp, Homo sapien
aggttgtaacgaagactgtggggct

SEQ ID NO: 1702974 - DNA, 25 bp, Homo sapien
atgaggttgtaacgaagactgtggg

SEQ ID NO: 1702975 - DNA, 25 bp, Homo sapien
tgtccctggggctttgccctgcgtt

SEQ ID NO: 1702976 - DNA, 25 bp, Homo sapien
gtttctgcctgtcatagcgcaggaa

SEQ ID NO: 1702977 - DNA, 25 bp, Homo sapien
ttctggtccttgatatgagtcaggg

SEQ ID NO: 1702978 - DNA, 25 bp, Homo sapien
tgagtcagggtcctcctgaggtctt

SEQ ID NO: 1702979 - DNA, 25 bp, Homo sapien
ttgtagtagaaatgccgggagcccc

SEQ ID NO: 1702980 - DNA, 25 bp, Homo sapien
tgtcgattcttgagtctccaggttt

SEQ ID NO: 1702981 - DNA, 25 bp, Homo sapien
cattgtagtagaaatgccgggagcc

SEQ ID NO: 1702982 - DNA, 25 bp, Homo sapien
agaggaagagctccccattgtagta

SEQ ID NO: 1702983 - DNA, 25 bp, Homo sapien
cagatatcgctgtagtttctgcagg

SEQ ID NO: 1702984 - DNA, 25 bp, Homo sapien
tgttctcctgatggccaccccggat

SEQ ID NO: 1702985 - DNA, 25 bp, Homo sapien
ggccaccccggatttcagatatcgc

SEQ ID NO: 1702986 - DNA, 25 bp, Homo sapien
ggatttcagatatcgctgtagtttc

SEQ ID NO: 1702987 - DNA, 25 bp, Homo sapien
cacggtgatgttgccctctgagacc

SEQ ID NO: 1702988 - DNA, 25 bp, Homo sapien
cggtgatgttgccctctgagacctc

SEQ ID NO: 1702989 - DNA, 25 bp, Homo sapien
gtgatgttgccctctgagacctcgc

SEQ ID NO: 1702990 - DNA, 25 bp, Homo sapien
gtcacggtgatgttgccctctgaga

SEQ ID NO: 1702991 - DNA, 25 bp, Homo sapien
ctctccagggtcaccccaggctcac

SEQ ID NO: 1702992 - DNA, 25 bp, Homo sapien
cctctccagggtcaccccaggctca

SEQ ID NO: 1702993 - DNA, 25 bp, Homo sapien
tatggaaagtctgtccgttgactct

SEQ ID NO: 1702994 - DNA, 25 bp, Homo sapien
aagtctgtccgttgactctgaagca

SEQ ID NO: 1702995 - DNA, 25 bp, Homo sapien
catggcatagcagcagaaacatatg

SEQ ID NO: 1702996 - DNA, 25 bp, Homo sapien
gaaacatatggaaagtctgtccgtt

SEQ ID NO: 1702997 - DNA, 25 bp, Homo sapien
gtggaaccagtggacccagtagctg

SEQ ID NO: 1702998 - DNA, 25 bp, Homo sapien
tcagtggaaccagtggacccagtag

SEQ ID NO: 1702999 - DNA, 25 bp, Homo sapien
ggaaccagtggacccagtagctgac

SEQ ID NO: 1703000 - DNA, 25 bp, Homo sapien
cctcagtggaaccagtggacccagt

SEQ ID NO: 1703001 - DNA, 25 bp, Homo sapien
cagagtaatgcataacggtgtgacg

SEQ ID NO: 1703002 - DNA, 25 bp, Homo sapien
taatatggcactgttaagggcccca

SEQ ID NO: 1703003 - DNA, 25 bp, Homo sapien
tcaggaggagtcatcaccaagatac

SEQ ID NO: 1703004 - DNA, 25 bp, Homo sapien
aaactgggctggtcaacttggcgaa

SEQ ID NO: 1703005 - DNA, 25 bp, Homo sapien
caggcaggtgtatctcaggccttct

SEQ ID NO: 1703006 - DNA, 25 bp, Homo sapien
ctacggggagaaatttgatgatgag

SEQ ID NO: 1703007 - DNA, 25 bp, Homo sapien
ggagaaatttgatgatgagaacttc

SEQ ID NO: 1703008 - DNA, 25 bp, Homo sapien
tacggggagaaatttgatgatgaga

SEQ ID NO: 1703009 - DNA, 25 bp, Homo sapien
gaaatttgatgatgagaacttcatc

SEQ ID NO: 1703010 - DNA, 25 bp, Homo sapien
caacatcgctgtcaatggtgagccc

SEQ ID NO: 1703011 - DNA, 25 bp, Homo sapien
ctgcttcttccatagcttctggatg

SEQ ID NO: 1703012 - DNA, 25 bp, Homo sapien
cttcttccatagcttctggatgtac

SEQ ID NO: 1703013 - DNA, 25 bp, Homo sapien
gcttcttccatagcttctggatgta

SEQ ID NO: 1703014 - DNA, 25 bp, Homo sapien
gactgcttcttccatagcttctgga

SEQ ID NO: 1703015 - DNA, 25 bp, Homo sapien
gctgtagcccagtagcgtgctttat

SEQ ID NO: 1703016 - DNA, 25 bp, Homo sapien
ccagtagcgtgctttattgggctgg

SEQ ID NO: 1703017 - DNA, 25 bp, Homo sapien
ttggctgtagcccagtagcgtgctt

SEQ ID NO: 1703018 - DNA, 25 bp, Homo sapien
tagcccagtagcgtgctttattggg

SEQ ID NO: 1703019 - DNA, 25 bp, Homo sapien
caggcttgctgttaagttgccttct

SEQ ID NO: 1703020 - DNA, 25 bp, Homo sapien
cttgctcttctgtaacagactgaag

SEQ ID NO: 1703021 - DNA, 25 bp, Homo sapien
tgttaagttgccttcttaggaacta

SEQ ID NO: 1703022 - DNA, 25 bp, Homo sapien
gctcttctgtaacagactgaaggct

SEQ ID NO: 1703023 - DNA, 25 bp, Homo sapien
tccctatgcttgttgtggaccactg

SEQ ID NO: 1703024 - DNA, 25 bp, Homo sapien
tggaatggatcaactaggatagcct

SEQ ID NO: 1703025 - DNA, 25 bp, Homo sapien
gatagcctacgcatctccctatgct

SEQ ID NO: 1703026 - DNA, 25 bp, Homo sapien
aacattaccggtagctgtggagctg

SEQ ID NO: 1703027 - DNA, 25 bp, Homo sapien
gagcagcacccatgggagccctggg

SEQ ID NO: 1703028 - DNA, 25 bp, Homo sapien
gagggcagaaggaggcgaaggaaat

SEQ ID NO: 1703029 - DNA, 25 bp, Homo sapien
tcctctggagttggtctgctcttcc

SEQ ID NO: 1703030 - DNA, 25 bp, Homo sapien
cgaaggaaatggtaccgagagagcc

SEQ ID NO: 1703031 - DNA, 25 bp, Homo sapien
cactgcctgccaattgcctgcggtt

SEQ ID NO: 1703032 - DNA, 25 bp, Homo sapien
gaattcctataaggcctgggtgccc

SEQ ID NO: 1703033 - DNA, 25 bp, Homo sapien
tgtttatgatcccaaggctcctggt

SEQ ID NO: 1703034 - DNA, 25 bp, Homo sapien
tgtattttcagtgccggagggtgct

SEQ ID NO: 1703035 - DNA, 25 bp, Homo sapien
tgctcaccaaaacattaaacctaag

SEQ ID NO: 1703036 - DNA, 25 bp, Homo sapien
tattcctgctcaccaaaacattaaa

SEQ ID NO: 1703037 - DNA, 25 bp, Homo sapien
gagatcacctcatgaaaaagtgata

SEQ ID NO: 1703038 - DNA, 25 bp, Homo sapien
aattaagatctggaggggtaactga

SEQ ID NO: 1703039 - DNA, 25 bp, Homo sapien
gaaatcaaaattgccagacatgcta

SEQ ID NO: 1703040 - DNA, 25 bp, Homo sapien
gaggggtaactgatattcctgctca

SEQ ID NO: 1703041 - DNA, 25 bp, Homo sapien
tatcactttttcatgaggtgatctc

SEQ ID NO: 1703042 - DNA, 25 bp, Homo sapien
gtgagcaggaatatcagttacccct

SEQ ID NO: 1703043 - DNA, 25 bp, Homo sapien
tagcatgtctggcaattttgatttc

SEQ ID NO: 1703044 - DNA, 25 bp, Homo sapien
cttaggtttaatgttttggtgagca

SEQ ID NO: 1703045 - DNA, 25 bp, Homo sapien
ggtttaatgttttggtgagcaggaa

SEQ ID NO: 1703046 - DNA, 25 bp, Homo sapien
tcagttacccctccagatcttaatt

SEQ ID NO: 1703047 - DNA, 25 bp, Homo sapien
gctcagcccctaagatatttatacc

SEQ ID NO: 1703048 - DNA, 25 bp, Homo sapien
cctactggacgtctaactgacctgg

SEQ ID NO: 1703049 - DNA, 25 bp, Homo sapien
tacagctggagtgctccaatgctca

SEQ ID NO: 1703050 - DNA, 25 bp, Homo sapien
taactgacctggttgaactcaagga

SEQ ID NO: 1703051 - DNA, 25 bp, Homo sapien
ccgtgcctggccaaggatcttaatt

SEQ ID NO: 1703052 - DNA, 25 bp, Homo sapien
ttattgaggacatacccgtgccagc

SEQ ID NO: 1703053 - DNA, 25 bp, Homo sapien
tgtccttgagttcaaccaggtcagt

SEQ ID NO: 1703054 - DNA, 25 bp, Homo sapien
caggtcagttagacgtccagtaggg

SEQ ID NO: 1703055 - DNA, 25 bp, Homo sapien
gggatgagcattggagcactccagc

SEQ ID NO: 1703056 - DNA, 25 bp, Homo sapien
aattaagatccttggccaggcacgg

SEQ ID NO: 1703057 - DNA, 25 bp, Homo sapien
ggtatgtcctcaataacctcaagga

SEQ ID NO: 1703058 - DNA, 25 bp, Homo sapien
tggctggcacgggtatgtcctcaat

SEQ ID NO: 1703059 - DNA, 25 bp, Homo sapien
gtggtctctctcacattacatctaa

SEQ ID NO: 1703060 - DNA, 25 bp, Homo sapien
tgagttttaagactgcccaactaaa

SEQ ID NO: 1703061 - DNA, 25 bp, Homo sapien
aatgaagtcaaggagcagtgaaacc

SEQ ID NO: 1703062 - DNA, 25 bp, Homo sapien
tgcaaatgaagtcaaggagcagtga

SEQ ID NO: 1703063 - DNA, 25 bp, Homo sapien
tctaatttccttcctatcagatgag

SEQ ID NO: 1703064 - DNA, 25 bp, Homo sapien
tctctcacattacatctaatttcct

SEQ ID NO: 1703065 - DNA, 25 bp, Homo sapien
ggaaattagatgtaatgtgagagag

SEQ ID NO: 1703066 - DNA, 25 bp, Homo sapien
tttagttgggcagtcttaaaactca

SEQ ID NO: 1703067 - DNA, 25 bp, Homo sapien
tcactgctccttgacttcatttgca

SEQ ID NO: 1703068 - DNA, 25 bp, Homo sapien
ggtttcactgctccttgacttcatt

SEQ ID NO: 1703069 - DNA, 25 bp, Homo sapien
ttagatgtaatgtgagagagaccac

SEQ ID NO: 1703070 - DNA, 25 bp, Homo sapien
ctcatctgataggaaggaaattaga

SEQ ID NO: 1703071 - DNA, 25 bp, Homo sapien
gaagatagttaatatgaagacccag

SEQ ID NO: 1703072 - DNA, 25 bp, Homo sapien
ccatctacaggtttacaggaaaggt

SEQ ID NO: 1703073 - DNA, 25 bp, Homo sapien
gcagcagatacgcttttaagggaca

SEQ ID NO: 1703074 - DNA, 25 bp, Homo sapien
caagatgagttacttgccgtcagac

SEQ ID NO: 1703075 - DNA, 25 bp, Homo sapien
gatcagaatgctgcaatggacagtc

SEQ ID NO: 1703076 - DNA, 25 bp, Homo sapien
gccgtcagaccacaacaggatagtt

SEQ ID NO: 1703077 - DNA, 25 bp, Homo sapien
aactatcctgttgtggtctgacggc

SEQ ID NO: 1703078 - DNA, 25 bp, Homo sapien
acctttcctgtaaacctgtagatgg

SEQ ID NO: 1703079 - DNA, 25 bp, Homo sapien
ggcattttgactgtccattgcagca

SEQ ID NO: 1703080 - DNA, 25 bp, Homo sapien
ggtctgacggcaagtaactcatctt

SEQ ID NO: 1703081 - DNA, 25 bp, Homo sapien
ttcttagtcaagagaccagtctcat

SEQ ID NO: 1703082 - DNA, 25 bp, Homo sapien
tgtcccttaaaagcgtatctgctgc

SEQ ID NO: 1703083 - DNA, 25 bp, Homo sapien
ggcattttccaaaggcaagcctgga

SEQ ID NO: 1703084 - DNA, 25 bp, Homo sapien
taggtaagctttggccttcgctaca

SEQ ID NO: 1703085 - DNA, 25 bp, Homo sapien
ggatctgtataaccgcggaaggccc

SEQ ID NO: 1703086 - DNA, 25 bp, Homo sapien
tacccttttcacaggcgatggtctg

SEQ ID NO: 1703087 - DNA, 25 bp, Homo sapien
gccaaggaccccgtgggaactcgca

SEQ ID NO: 1703088 - DNA, 25 bp, Homo sapien
actcgcagccttcgccacactcgtt

SEQ ID NO: 1703089 - DNA, 25 bp, Homo sapien
acactcgttcctcgcgcatccacgg

SEQ ID NO: 1703090 - DNA, 25 bp, Homo sapien
caaggaccccgtgggaactcgcagc

SEQ ID NO: 1703091 - DNA, 25 bp, Homo sapien
gccaagaacattctgctcgaattaa

SEQ ID NO: 1703092 - DNA, 25 bp, Homo sapien
aaagacggggatagcaaatgtttca

SEQ ID NO: 1703093 - DNA, 25 bp, Homo sapien
attaacagtattaatgggccgggcg

SEQ ID NO: 1703094 - DNA, 25 bp, Homo sapien
cccatctcaaagacggggatagcaa

SEQ ID NO: 1703095 - DNA, 25 bp, Homo sapien
tgttaccaccaatcaagttctcctt

SEQ ID NO: 1703096 - DNA, 25 bp, Homo sapien
ttttcaccgcattcacaacccttta

SEQ ID NO: 1703097 - DNA, 25 bp, Homo sapien
ttcacaaccctttatgcttcctctg

SEQ ID NO: 1703098 - DNA, 25 bp, Homo sapien
ttcctctgttaccaccaatcaagtt

SEQ ID NO: 1703099 - DNA, 25 bp, Homo sapien
gtaggcccaaggcctgtgtttaaga

SEQ ID NO: 1703100 - DNA, 25 bp, Homo sapien
ggcccaaggcctgtgtttaagaagc

SEQ ID NO: 1703101 - DNA, 25 bp, Homo sapien
gtgtttaagaagctcggagacggga

SEQ ID NO: 1703102 - DNA, 25 bp, Homo sapien
tgtgtttaagaagctcggagacggg

SEQ ID NO: 1703103 - DNA, 25 bp, Homo sapien
ccggcagacagatgtggaggcttct

SEQ ID NO: 1703104 - DNA, 25 bp, Homo sapien
cagacagatgtggaggcttcttcct

SEQ ID NO: 1703105 - DNA, 25 bp, Homo sapien
gacagatgtggaggcttcttcctct

SEQ ID NO: 1703106 - DNA, 25 bp, Homo sapien
ggcagacagatgtggaggcttcttc

SEQ ID NO: 1703107 - DNA, 25 bp, Homo sapien
cgaaagcgacgttctcggcgttggc

SEQ ID NO: 1703108 - DNA, 25 bp, Homo sapien
gggctgcccagcatctacatcgagg

SEQ ID NO: 1703109 - DNA, 25 bp, Homo sapien
gaccagccgtcctgcagacaagtaa

SEQ ID NO: 1703110 - DNA, 25 bp, Homo sapien
ccgtgtccccatggcggtcctggtg

SEQ ID NO: 1703111 - DNA, 25 bp, Homo sapien
tggtcctgtctctcattcgcttgtt

SEQ ID NO: 1703112 - DNA, 25 bp, Homo sapien
tattaaacagccactacaactgagg

SEQ ID NO: 1703113 - DNA, 25 bp, Homo sapien
tgtgacctgtcacagaccctctcaa

SEQ ID NO: 1703114 - DNA, 25 bp, Homo sapien
gcaaggccaggaaggcaagaagaca

SEQ ID NO: 1703115 - DNA, 25 bp, Homo sapien
cggcaacaactatggccggcggcag

SEQ ID NO: 1703116 - DNA, 25 bp, Homo sapien
tatggccggcggcagagcaagctct

SEQ ID NO: 1703117 - DNA, 25 bp, Homo sapien
ccggcggcagagcaagctctttcca

SEQ ID NO: 1703118 - DNA, 25 bp, Homo sapien
gaggtgaaccggcaacaactatggc

SEQ ID NO: 1703119 - DNA, 25 bp, Homo sapien
agggacagcggcttagcagcgggag

SEQ ID NO: 1703120 - DNA, 25 bp, Homo sapien
ccgctccttggaggcatcatcttct

SEQ ID NO: 1703121 - DNA, 25 bp, Homo sapien
gcagcgggaggaagaaatcggtgta

SEQ ID NO: 1703122 - DNA, 25 bp, Homo sapien
tcttcagcagaatcccaggggggtc

SEQ ID NO: 1703123 - DNA, 25 bp, Homo sapien
caaacctccccatgacttcctgcca

SEQ ID NO: 1703124 - DNA, 25 bp, Homo sapien
gacttcctgccactcgtcctccagc

SEQ ID NO: 1703125 - DNA, 25 bp, Homo sapien
cttcaaacctccccatgacttcctg

SEQ ID NO: 1703126 - DNA, 25 bp, Homo sapien
atgacttcctgccactcgtcctcca

SEQ ID NO: 1703127 - DNA, 25 bp, Homo sapien
gcgatctgaccaggctgagaaggac

SEQ ID NO: 1703128 - DNA, 25 bp, Homo sapien
cacgtgggggtcgacaggatccctc

SEQ ID NO: 1703129 - DNA, 25 bp, Homo sapien
gcacttctgggcatgttcccgggcc

SEQ ID NO: 1703130 - DNA, 25 bp, Homo sapien
gggctcgctccctgaagagccgctg

SEQ ID NO: 1703131 - DNA, 25 bp, Homo sapien
tctgcatggcgattcagggcctgag

SEQ ID NO: 1703132 - DNA, 25 bp, Homo sapien
tgggttctcggtcccctagagcctc

SEQ ID NO: 1703133 - DNA, 25 bp, Homo sapien
agggcacatcaccaaatcgccagag

SEQ ID NO: 1703134 - DNA, 25 bp, Homo sapien
gtctcaatctggcttcggaatcgct

SEQ ID NO: 1703135 - DNA, 25 bp, Homo sapien
cacccatatcctctgctgagcagca

SEQ ID NO: 1703136 - DNA, 25 bp, Homo sapien
gagatgtggaaccaggtcttattag

SEQ ID NO: 1703137 - DNA, 25 bp, Homo sapien
ttaggaaacggcagagtcaaggagc

SEQ ID NO: 1703138 - DNA, 25 bp, Homo sapien
tgttacaactttcgctcccacccat

SEQ ID NO: 1703139 - DNA, 25 bp, Homo sapien
gctccagttgcccaagaacagacaa

SEQ ID NO: 1703140 - DNA, 25 bp, Homo sapien
cacctctcaggacttcaactactgg

SEQ ID NO: 1703141 - DNA, 25 bp, Homo sapien
tacaactgacaagctagagggcaga

SEQ ID NO: 1703142 - DNA, 25 bp, Homo sapien
tgtttatagggaaggccatgcctgg

SEQ ID NO: 1703143 - DNA, 25 bp, Homo sapien
ccaccttttggacagacgttgagag

SEQ ID NO: 1703144 - DNA, 25 bp, Homo sapien
tattaattcacaagatgatggccgt

SEQ ID NO: 1703145 - DNA, 25 bp, Homo sapien
aagacgtgttattcgcctatggaac

SEQ ID NO: 1703146 - DNA, 25 bp, Homo sapien
ttgtcaggctcgctcaagacgtgtt

SEQ ID NO: 1703147 - DNA, 25 bp, Homo sapien
tctcattagactgcaagttctatga

SEQ ID NO: 1703148 - DNA, 25 bp, Homo sapien
tcattgagcactttattaccctaag

SEQ ID NO: 1703149 - DNA, 25 bp, Homo sapien
tgtatactgtctcattagactgcaa

SEQ ID NO: 1703150 - DNA, 25 bp, Homo sapien
gcaggcatacctatacattataact

SEQ ID NO: 1703151 - DNA, 25 bp, Homo sapien
cctcaactgtaaaatctgtgggtag

SEQ ID NO: 1703152 - DNA, 25 bp, Homo sapien
tcaggaactggtaaaatttccctca

SEQ ID NO: 1703153 - DNA, 25 bp, Homo sapien
tgtaatcgtctagttcctgaaccca

SEQ ID NO: 1703154 - DNA, 25 bp, Homo sapien
caacctatgtaaagtgatttctgcc

SEQ ID NO: 1703155 - DNA, 25 bp, Homo sapien
agggcagaacctcttctggaatgag

SEQ ID NO: 1703156 - DNA, 25 bp, Homo sapien
gtatagggcagaacctcttctggaa

SEQ ID NO: 1703157 - DNA, 25 bp, Homo sapien
aaggagtatcatctaatggtcacag

SEQ ID NO: 1703158 - DNA, 25 bp, Homo sapien
ctaatggtcacagactgggactggg

SEQ ID NO: 1703159 - DNA, 25 bp, Homo sapien
aggcctaggagagaaccacaggctg

SEQ ID NO: 1703160 - DNA, 25 bp, Homo sapien
gcctaggagagaaccacaggctggg

SEQ ID NO: 1703161 - DNA, 25 bp, Homo sapien
caggcagcgggcgggttctaggtcg

SEQ ID NO: 1703162 - DNA, 25 bp, Homo sapien
tgaggcctaggagagaaccacaggc

SEQ ID NO: 1703163 - DNA, 25 bp, Homo sapien
gcccctgggcccggacgctcaggtc

SEQ ID NO: 1703164 - DNA, 25 bp, Homo sapien
tgtggagcccctgggcccggacgct

SEQ ID NO: 1703165 - DNA, 25 bp, Homo sapien
agcccctgggcccggacgctcaggt

SEQ ID NO: 1703166 - DNA, 25 bp, Homo sapien
tgctgtgtggagcccctgggcccgg

SEQ ID NO: 1703167 - DNA, 25 bp, Homo sapien
cggtagtccaaagcacgaagcacgg

SEQ ID NO: 1703168 - DNA, 25 bp, Homo sapien
gggcggtagtccaaagcacgaagca

SEQ ID NO: 1703169 - DNA, 25 bp, Homo sapien
tagtccaaagcacgaagcacgggca

SEQ ID NO: 1703170 - DNA, 25 bp, Homo sapien
cactgcggggcggtagtccaaagca

SEQ ID NO: 1703171 - DNA, 25 bp, Homo sapien
ggaggaagagacgttcaggtggtgt

SEQ ID NO: 1703172 - DNA, 25 bp, Homo sapien
tgggaggaagagacgttcaggtggt

SEQ ID NO: 1703173 - DNA, 25 bp, Homo sapien
ggaagagacgttcaggtggtgtcat

SEQ ID NO: 1703174 - DNA, 25 bp, Homo sapien
aggaagagacgttcaggtggtgtca

SEQ ID NO: 1703175 - DNA, 25 bp, Homo sapien
agttgaggggggctctagggctcaa

SEQ ID NO: 1703176 - DNA, 25 bp, Homo sapien
gctctagggctcaaggtttggctga

SEQ ID NO: 1703177 - DNA, 25 bp, Homo sapien
tagggctcaaggtttggctgagcca

SEQ ID NO: 1703178 - DNA, 25 bp, Homo sapien
ggctcaaggtttggctgagccaccc

SEQ ID NO: 1703179 - DNA, 25 bp, Homo sapien
caagatgcatcttggggtgctgacg

SEQ ID NO: 1703180 - DNA, 25 bp, Homo sapien
ggtgagcagcaggtttgaggttgct

SEQ ID NO: 1703181 - DNA, 25 bp, Homo sapien
ctgtgggcaagatgcatcttggggt

SEQ ID NO: 1703182 - DNA, 25 bp, Homo sapien
aggtgagcagcaggtttgaggttgc

SEQ ID NO: 1703183 - DNA, 25 bp, Homo sapien
cctggatacaccatcttctgggagc

SEQ ID NO: 1703184 - DNA, 25 bp, Homo sapien
gttgctcaaggagaaaccatcctgg

SEQ ID NO: 1703185 - DNA, 25 bp, Homo sapien
gcagccccgtggtacatcgagtgca

SEQ ID NO: 1703186 - DNA, 25 bp, Homo sapien
gaccacctgggagtagacgaagtag

SEQ ID NO: 1703187 - DNA, 25 bp, Homo sapien
tattgggcttcatcgagggtgcaga

SEQ ID NO: 1703188 - DNA, 25 bp, Homo sapien
aaagctccggtgacttgatcaggga

SEQ ID NO: 1703189 - DNA, 25 bp, Homo sapien
tcttggtcagccttgtgcgcatgcc

SEQ ID NO: 1703190 - DNA, 25 bp, Homo sapien
tcctctgtgtgtggatctaggcccc

SEQ ID NO: 1703191 - DNA, 25 bp, Homo sapien
gcttgtcaggggatgtggcgtctga

SEQ ID NO: 1703192 - DNA, 25 bp, Homo sapien
ccgtgggtcagtatgtgagaggaag

SEQ ID NO: 1703193 - DNA, 25 bp, Homo sapien
gggtctgtagttgcttctctccctc

SEQ ID NO: 1703194 - DNA, 25 bp, Homo sapien
ttctctccctcttagctggtcctct

SEQ ID NO: 1703195 - DNA, 25 bp, Homo sapien
tccacgtcccggatcatgctttcag

SEQ ID NO: 1703196 - DNA, 25 bp, Homo sapien
gctgaggaacaagcaccgcctggag

SEQ ID NO: 1703197 - DNA, 25 bp, Homo sapien
cagcaggcagaagagcgtggtggcg

SEQ ID NO: 1703198 - DNA, 25 bp, Homo sapien
tggtggcgcctgccacgatcaggaa

SEQ ID NO: 1703199 - DNA, 25 bp, Homo sapien
tatcagcgcacatctttcacccatc

SEQ ID NO: 1703200 - DNA, 25 bp, Homo sapien
tcagcgcacatctttcacccatccc

SEQ ID NO: 1703201 - DNA, 25 bp, Homo sapien
tctccctctcttgcgtctccatttc

SEQ ID NO: 1703202 - DNA, 25 bp, Homo sapien
cctatcagcgcacatctttcaccca

SEQ ID NO: 1703203 - DNA, 25 bp, Homo sapien
ggctgattagagagaggtccctggg

SEQ ID NO: 1703204 - DNA, 25 bp, Homo sapien
ggccagagggctgattagagagagg

SEQ ID NO: 1703205 - DNA, 25 bp, Homo sapien
gggctgattagagagaggtccctgg

SEQ ID NO: 1703206 - DNA, 25 bp, Homo sapien
cagagggctgattagagagaggtcc

SEQ ID NO: 1703207 - DNA, 25 bp, Homo sapien
ctacaacatgggctacaggcttgtc

SEQ ID NO: 1703208 - DNA, 25 bp, Homo sapien
atgggctacaggcttgtcactcggg

SEQ ID NO: 1703209 - DNA, 25 bp, Homo sapien
tcactcggggttcgagaagatgatc

SEQ ID NO: 1703210 - DNA, 25 bp, Homo sapien
caacatgggctacaggcttgtcact

SEQ ID NO: 1703211 - DNA, 25 bp, Homo sapien
caagttccaagacacatcctcagag

SEQ ID NO: 1703212 - DNA, 25 bp, Homo sapien
agtcagtgtggccatgtcggttcac

SEQ ID NO: 1703213 - DNA, 25 bp, Homo sapien
atcccacctggccatgacgttctga

SEQ ID NO: 1703214 - DNA, 25 bp, Homo sapien
tgagtatcccactaaggcctgtgct

SEQ ID NO: 1703215 - DNA, 25 bp, Homo sapien
tagtcgggccgattgatctcagcgc

SEQ ID NO: 1703216 - DNA, 25 bp, Homo sapien
tagatgggctcataccagggcttgg

SEQ ID NO: 1703217 - DNA, 25 bp, Homo sapien
caatgatcccaaagtagacctgccc

SEQ ID NO: 1703218 - DNA, 25 bp, Homo sapien
tcggcaaagtcgagatagtcgggcc

SEQ ID NO: 1703219 - DNA, 25 bp, Homo sapien
cggaaaacatgtctgagccaaggca

SEQ ID NO: 1703220 - DNA, 25 bp, Homo sapien
tcagggatcaaagctgtaggcccca

SEQ ID NO: 1703221 - DNA, 25 bp, Homo sapien
gaaggcctaaggtccacttgtgtca

SEQ ID NO: 1703222 - DNA, 25 bp, Homo sapien
caaacataaatagagggagctggct

SEQ ID NO: 1703223 - DNA, 25 bp, Homo sapien
ttgtgtcccgacataagccccttgt

SEQ ID NO: 1703224 - DNA, 25 bp, Homo sapien
aaggaacaggcgtttctgacgagcg

SEQ ID NO: 1703225 - DNA, 25 bp, Homo sapien
tttaggatcgcattcccaagagcgc

SEQ ID NO: 1703226 - DNA, 25 bp, Homo sapien
tgagctgaatctgaactctgggcac

SEQ ID NO: 1703227 - DNA, 25 bp, Homo sapien
cactgcatctgttgagacctcttga

SEQ ID NO: 1703228 - DNA, 25 bp, Homo sapien
gacctcttgatcttggcatatgtct

SEQ ID NO: 1703229 - DNA, 25 bp, Homo sapien
agacctcttgatcttggcatatgtc

SEQ ID NO: 1703230 - DNA, 25 bp, Homo sapien
tctgttgagacctcttgatcttggc

SEQ ID NO: 1703231 - DNA, 25 bp, Homo sapien
cctccccagcattgttaggagagga

SEQ ID NO: 1703232 - DNA, 25 bp, Homo sapien
cccagcattgttaggagaggaagtt

SEQ ID NO: 1703233 - DNA, 25 bp, Homo sapien
cattgttaggagaggaagttcggct

SEQ ID NO: 1703234 - DNA, 25 bp, Homo sapien
tgttaggagaggaagttcggctcca

SEQ ID NO: 1703235 - DNA, 25 bp, Homo sapien
acaggcagatgctgctagggctgaa

SEQ ID NO: 1703236 - DNA, 25 bp, Homo sapien
caggcagatgctgctagggctgaag

SEQ ID NO: 1703237 - DNA, 25 bp, Homo sapien
aggcagatgctgctagggctgaagt

SEQ ID NO: 1703238 - DNA, 25 bp, Homo sapien
acttttcagccctggatggttctag

SEQ ID NO: 1703239 - DNA, 25 bp, Homo sapien
tcagccctggatggttctaggtgct

SEQ ID NO: 1703240 - DNA, 25 bp, Homo sapien
tctaggtgctggtaaggggatgatg

SEQ ID NO: 1703241 - DNA, 25 bp, Homo sapien
ttttcagccctggatggttctaggt

SEQ ID NO: 1703242 - DNA, 25 bp, Homo sapien
cagaacatagggtatcatggtgccc

SEQ ID NO: 1703243 - DNA, 25 bp, Homo sapien
ggactttactaggtcacccatccca

SEQ ID NO: 1703244 - DNA, 25 bp, Homo sapien
taaagacccgagattcaagcctgga

SEQ ID NO: 1703245 - DNA, 25 bp, Homo sapien
tcatggtgcccgttgcccaagtaaa

SEQ ID NO: 1703246 - DNA, 25 bp, Homo sapien
ctctgttataatcgttcccaggctg

SEQ ID NO: 1703247 - DNA, 25 bp, Homo sapien
gggagcctcccttatgtgccaaccc

SEQ ID NO: 1703248 - DNA, 25 bp, Homo sapien
gggccctctgttataatcgttccca

SEQ ID NO: 1703249 - DNA, 25 bp, Homo sapien
gccctctgttataatcgttcccagg

SEQ ID NO: 1703250 - DNA, 25 bp, Homo sapien
aatgatcaggggctggtgacttgcc

SEQ ID NO: 1703251 - DNA, 25 bp, Homo sapien
caggggctggtgacttgcctcaagt

SEQ ID NO: 1703252 - DNA, 25 bp, Homo sapien
cttgctcttttaggcgaaatgatca

SEQ ID NO: 1703253 - DNA, 25 bp, Homo sapien
tcaggaactctagtccttgctcttt

SEQ ID NO: 1703254 - DNA, 25 bp, Homo sapien
tatgcagatgcaagagacactttac

SEQ ID NO: 1703255 - DNA, 25 bp, Homo sapien
gcagaaaaatataccctcagagctt

SEQ ID NO: 1703256 - DNA, 25 bp, Homo sapien
gaggcctgtccacctagtcatgagc

SEQ ID NO: 1703257 - DNA, 25 bp, Homo sapien
gctcaaggttatgaagcccattcct

SEQ ID NO: 1703258 - DNA, 25 bp, Homo sapien
aggcggacagaaggaccactgccag

SEQ ID NO: 1703259 - DNA, 25 bp, Homo sapien
agaaggaccactgccagaagcagga

SEQ ID NO: 1703260 - DNA, 25 bp, Homo sapien
cccaggcccccgtagatacatatat

SEQ ID NO: 1703261 - DNA, 25 bp, Homo sapien
agccaacacaggcaggcggacagaa

SEQ ID NO: 1703262 - DNA, 25 bp, Homo sapien
ggaaagcagtgggaaagcgtgtggg

SEQ ID NO: 1703263 - DNA, 25 bp, Homo sapien
ggggagggagggagtgcagcgctca

SEQ ID NO: 1703264 - DNA, 25 bp, Homo sapien
ctgggaaagcagtgggaaagcgtgt

SEQ ID NO: 1703265 - DNA, 25 bp, Homo sapien
aagcagtgggaaagcgtgtgggggt

SEQ ID NO: 1703266 - DNA, 25 bp, Homo sapien
tcaacacagcccaccctttgtgctt

SEQ ID NO: 1703267 - DNA, 25 bp, Homo sapien
caggcgtggactcccctgttggctt

SEQ ID NO: 1703268 - DNA, 25 bp, Homo sapien
aagaagctcaacacagcccaccctt

SEQ ID NO: 1703269 - DNA, 25 bp, Homo sapien
agcaggcgtggactcccctgttggc

SEQ ID NO: 1703270 - DNA, 25 bp, Homo sapien
cctctcagcgctcagccatgcttct

SEQ ID NO: 1703271 - DNA, 25 bp, Homo sapien
aaccctcctctcagcgctcagccat

SEQ ID NO: 1703272 - DNA, 25 bp, Homo sapien
atgggaggcgatgccgtcagatcct

SEQ ID NO: 1703273 - DNA, 25 bp, Homo sapien
actcacccactcaggatctctcttg

SEQ ID NO: 1703274 - DNA, 25 bp, Homo sapien
agtggagttcctgctctgaggagcc

SEQ ID NO: 1703275 - DNA, 25 bp, Homo sapien
gttcctgctctgaggagccctgggc

SEQ ID NO: 1703276 - DNA, 25 bp, Homo sapien
tggagttcctgctctgaggagccct

SEQ ID NO: 1703277 - DNA, 25 bp, Homo sapien
agttcctgctctgaggagccctggg

SEQ ID NO: 1703278 - DNA, 25 bp, Homo sapien
cagcaatgcaggcatagtcagctct

SEQ ID NO: 1703279 - DNA, 25 bp, Homo sapien
aatgcaggcatagtcagctcttgga

SEQ ID NO: 1703280 - DNA, 25 bp, Homo sapien
ttctcagcaatgcaggcatagtcag

SEQ ID NO: 1703281 - DNA, 25 bp, Homo sapien
gcaggcatagtcagctcttggatcc

SEQ ID NO: 1703282 - DNA, 25 bp, Homo sapien
gaccctgtccacccgcctgggttga

SEQ ID NO: 1703283 - DNA, 25 bp, Homo sapien
tgtccacccgcctgggttgaggaag

SEQ ID NO: 1703284 - DNA, 25 bp, Homo sapien
cacccgcctgggttgaggaaggtgt

SEQ ID NO: 1703285 - DNA, 25 bp, Homo sapien
cctgtccacccgcctgggttgagga

SEQ ID NO: 1703286 - DNA, 25 bp, Homo sapien
tcaatttgaacggaggctcgagatg

SEQ ID NO: 1703287 - DNA, 25 bp, Homo sapien
tttgaacggaggctcgagatggact

SEQ ID NO: 1703288 - DNA, 25 bp, Homo sapien
aatttgaacggaggctcgagatgga

SEQ ID NO: 1703289 - DNA, 25 bp, Homo sapien
tgatcaatttgaacggaggctcgag

SEQ ID NO: 1703290 - DNA, 25 bp, Homo sapien
tcagatccccttcgccaactgggac

SEQ ID NO: 1703291 - DNA, 25 bp, Homo sapien
cagatccccttcgccaactgggaca

SEQ ID NO: 1703292 - DNA, 25 bp, Homo sapien
caactgggacatcttccgacatggc

SEQ ID NO: 1703293 - DNA, 25 bp, Homo sapien
aactgggacatcttccgacatggcc

SEQ ID NO: 1703294 - DNA, 25 bp, Homo sapien
cagggggcaggccttgccttgccat

SEQ ID NO: 1703295 - DNA, 25 bp, Homo sapien
tagctcgggcctcccatgctctctg

SEQ ID NO: 1703296 - DNA, 25 bp, Homo sapien
tcgggcctcccatgctctctgacca

SEQ ID NO: 1703297 - DNA, 25 bp, Homo sapien
cattggtagctcgggcctcccatgc

SEQ ID NO: 1703298 - DNA, 25 bp, Homo sapien
tctgctctgtagatcggagaagaat

SEQ ID NO: 1703299 - DNA, 25 bp, Homo sapien
caggcagctgtggataggaagacaa

SEQ ID NO: 1703300 - DNA, 25 bp, Homo sapien
gcattttgtcaggtttcatgagtct

SEQ ID NO: 1703301 - DNA, 25 bp, Homo sapien
tctgtagatcggagaagaatctgaa

SEQ ID NO: 1703302 - DNA, 25 bp, Homo sapien
ccaccagtcttctcagaagccttcc

SEQ ID NO: 1703303 - DNA, 25 bp, Homo sapien
ttccccatcaggttctgctgacact

SEQ ID NO: 1703304 - DNA, 25 bp, Homo sapien
cctcacttccccatcaggttctgct

SEQ ID NO: 1703305 - DNA, 25 bp, Homo sapien
ctcccaccagtcttctcagaagcct

SEQ ID NO: 1703306 - DNA, 25 bp, Homo sapien
agctcagcagatgctggtagaggtg

SEQ ID NO: 1703307 - DNA, 25 bp, Homo sapien
cctgtaaatccctggtttggctcat

SEQ ID NO: 1703308 - DNA, 25 bp, Homo sapien
cttgttgatctcatccagcctctct

SEQ ID NO: 1703309 - DNA, 25 bp, Homo sapien
tgttgatctcatccagcctctcttc

SEQ ID NO: 1703310 - DNA, 25 bp, Homo sapien
gggccttcagcagtctgaaagcttt

SEQ ID NO: 1703311 - DNA, 25 bp, Homo sapien
ctgggccttcagcagtctgaaagct

SEQ ID NO: 1703312 - DNA, 25 bp, Homo sapien
tcactgctatatttgggatcgtcta

SEQ ID NO: 1703313 - DNA, 25 bp, Homo sapien
tatatttgggatcgtctaggaattg

SEQ ID NO: 1703314 - DNA, 25 bp, Homo sapien
agtttggagggcagatcctcatcac

SEQ ID NO: 1703315 - DNA, 25 bp, Homo sapien
ggagggcagatcctcatcactgcta

SEQ ID NO: 1703316 - DNA, 25 bp, Homo sapien
ccccgctagggtgtaaggagctaga

SEQ ID NO: 1703317 - DNA, 25 bp, Homo sapien
caggcccgggaaagggaccgcagtg

SEQ ID NO: 1703318 - DNA, 25 bp, Homo sapien
caggagggcaataaaggcaggttcc

SEQ ID NO: 1703319 - DNA, 25 bp, Homo sapien
ccaaccaactgctaggtggaggaga

SEQ ID NO: 1703320 - DNA, 25 bp, Homo sapien
aagggataagcgctgactggagggt

SEQ ID NO: 1703321 - DNA, 25 bp, Homo sapien
ggataagcgctgactggagggtttt

SEQ ID NO: 1703322 - DNA, 25 bp, Homo sapien
agagcagaagggataagcgctgact

SEQ ID NO: 1703323 - DNA, 25 bp, Homo sapien
ggagagagcagaagggataagcgct

SEQ ID NO: 1703324 - DNA, 25 bp, Homo sapien
tcgccatttccattaaggtcaaact

SEQ ID NO: 1703325 - DNA, 25 bp, Homo sapien
caatatcgccatttccattaaggtc

SEQ ID NO: 1703326 - DNA, 25 bp, Homo sapien
catttccattaaggtcaaactccat

SEQ ID NO: 1703327 - DNA, 25 bp, Homo sapien
tatcgccatttccattaaggtcaaa

SEQ ID NO: 1703328 - DNA, 25 bp, Homo sapien
tggagcatgtaggagagacctctgt

SEQ ID NO: 1703329 - DNA, 25 bp, Homo sapien
ctcccacttccgcatccccattctc

SEQ ID NO: 1703330 - DNA, 25 bp, Homo sapien
atcatgaggaatggagcatgtagga

SEQ ID NO: 1703331 - DNA, 25 bp, Homo sapien
gtcttcttaggcctgcacaccaccc

SEQ ID NO: 1703332 - DNA, 25 bp, Homo sapien
tgaacgtctccccggagccactgga

SEQ ID NO: 1703333 - DNA, 25 bp, Homo sapien
actggacacctctccaattaatttc

SEQ ID NO: 1703334 - DNA, 25 bp, Homo sapien
tagctgaacgtctccccggagccac

SEQ ID NO: 1703335 - DNA, 25 bp, Homo sapien
cacctctccaattaatttctttagc

SEQ ID NO: 1703336 - DNA, 25 bp, Homo sapien
gatcagggaacactcctctcaaggg

SEQ ID NO: 1703337 - DNA, 25 bp, Homo sapien
taaatcatagggtgctaggaaaggc

SEQ ID NO: 1703338 - DNA, 25 bp, Homo sapien
ttggaagggtccctctaaggatgga

SEQ ID NO: 1703339 - DNA, 25 bp, Homo sapien
gatgatgggcaacgtgtagaaatgt

SEQ ID NO: 1703340 - DNA, 25 bp, Homo sapien
tcgctttttcctcatacatcaggat

SEQ ID NO: 1703341 - DNA, 25 bp, Homo sapien
ccttttctctcgctttttcctcata

SEQ ID NO: 1703342 - DNA, 25 bp, Homo sapien
gcaactcagagatagctttcttggc

SEQ ID NO: 1703343 - DNA, 25 bp, Homo sapien
ttctctcgctttttcctcatacatc

SEQ ID NO: 1703344 - DNA, 25 bp, Homo sapien
tgttgactctggcttacaattttgt

SEQ ID NO: 1703345 - DNA, 25 bp, Homo sapien
gttgactctggcttacaattttgtc

SEQ ID NO: 1703346 - DNA, 25 bp, Homo sapien
tttatttaatttgttgactctggct

SEQ ID NO: 1703347 - DNA, 25 bp, Homo sapien
ttaatttgttgactctggcttacaa

SEQ ID NO: 1703348 - DNA, 25 bp, Homo sapien
ccgtggcgccttcagctagggagaa

SEQ ID NO: 1703349 - DNA, 25 bp, Homo sapien
accacgcagcgtaggcattcttcgg

SEQ ID NO: 1703350 - DNA, 25 bp, Homo sapien
tattacgtcatgcaaatgaggtggc

SEQ ID NO: 1703351 - DNA, 25 bp, Homo sapien
tgagtttccgcaggcctggtaagag

SEQ ID NO: 1703352 - DNA, 25 bp, Homo sapien
tggccgggtgcgcggggatccggga

SEQ ID NO: 1703353 - DNA, 25 bp, Homo sapien
ctggccgggtgcgcggggatccggg

SEQ ID NO: 1703354 - DNA, 25 bp, Homo sapien
tggcggcggatggcgccgggttcgg

SEQ ID NO: 1703355 - DNA, 25 bp, Homo sapien
atggcggcggatggcgccgggttcg

SEQ ID NO: 1703356 - DNA, 25 bp, Homo sapien
ggccagacagcaagtgtctcagtct

SEQ ID NO: 1703357 - DNA, 25 bp, Homo sapien
aggcacctcccccaaaacgtgccag

SEQ ID NO: 1703358 - DNA, 25 bp, Homo sapien
agtatgttgggtcctgcaggcacct

SEQ ID NO: 1703359 - DNA, 25 bp, Homo sapien
tcattgagtatgttgggtcctgcag

SEQ ID NO: 1703360 - DNA, 25 bp, Homo sapien
ctggaagctcattgagtatgttggg

SEQ ID NO: 1703361 - DNA, 25 bp, Homo sapien
taaggacttgcccttatacgtatca

SEQ ID NO: 1703362 - DNA, 25 bp, Homo sapien
gttgagcgaggaatacttctttcca

SEQ ID NO: 1703363 - DNA, 25 bp, Homo sapien
catcctttcccttggcagtcggccc

SEQ ID NO: 1703364 - DNA, 25 bp, Homo sapien
cagtcggccccgagcgatcggacat

SEQ ID NO: 1703365 - DNA, 25 bp, Homo sapien
gggaaccacagacacgcctttgtag

SEQ ID NO: 1703366 - DNA, 25 bp, Homo sapien
catgagcctgcaagaagcaagctgg

SEQ ID NO: 1703367 - DNA, 25 bp, Homo sapien
cacagacacgcctttgtaggaggat

SEQ ID NO: 1703368 - DNA, 25 bp, Homo sapien
tatgtgagattggttgatcatgagc

SEQ ID NO: 1703369 - DNA, 25 bp, Homo sapien
gaacaagacggagagagggtcgaaa

SEQ ID NO: 1703370 - DNA, 25 bp, Homo sapien
gagaacaagacggagagagggtcga

SEQ ID NO: 1703371 - DNA, 25 bp, Homo sapien
acaagacggagagagggtcgaaaat

SEQ ID NO: 1703372 - DNA, 25 bp, Homo sapien
ctggagaacaagacggagagagggt

SEQ ID NO: 1703373 - DNA, 25 bp, Homo sapien
cctgttccgtcttttggcactagtg

SEQ ID NO: 1703374 - DNA, 25 bp, Homo sapien
tggcatacgccgggcaatggcaact

SEQ ID NO: 1703375 - DNA, 25 bp, Homo sapien
tttcccgagactctgcaggccatgg

SEQ ID NO: 1703376 - DNA, 25 bp, Homo sapien
ggtcggactgctcctgtttgcttgc

SEQ ID NO: 1703377 - DNA, 25 bp, Homo sapien
gttattcacacctgagatgcctccc

SEQ ID NO: 1703378 - DNA, 25 bp, Homo sapien
ggacagaatgggaaggttattcaca

SEQ ID NO: 1703379 - DNA, 25 bp, Homo sapien
gaaggttattcacacctgagatgcc

SEQ ID NO: 1703380 - DNA, 25 bp, Homo sapien
gggacagaatgggaaggttattcac

SEQ ID NO: 1703381 - DNA, 25 bp, Homo sapien
tccggcggctgagcggttgaggcat

SEQ ID NO: 1703382 - DNA, 25 bp, Homo sapien
gtggctgcgattccggcggctgagc

SEQ ID NO: 1703383 - DNA, 25 bp, Homo sapien
ccggcagtggctgcgattccggcgg

SEQ ID NO: 1703384 - DNA, 25 bp, Homo sapien
gggtcgtttcggctggttggaggca

SEQ ID NO: 1703385 - DNA, 25 bp, Homo sapien
tgcccaggactttaccccgcttgga

SEQ ID NO: 1703386 - DNA, 25 bp, Homo sapien
catgggtgacgctggcttgtgccca

SEQ ID NO: 1703387 - DNA, 25 bp, Homo sapien
tgtgctccatgggtgacgctggctt

SEQ ID NO: 1703388 - DNA, 25 bp, Homo sapien
ctccatgggtgacgctggcttgtgc

SEQ ID NO: 1703389 - DNA, 25 bp, Homo sapien
gaagacatttcctgaggacatgcta

SEQ ID NO: 1703390 - DNA, 25 bp, Homo sapien
catttcctgaggacatgctataaaa

SEQ ID NO: 1703391 - DNA, 25 bp, Homo sapien
aaagtggaagactctggctgggcgc

SEQ ID NO: 1703392 - DNA, 25 bp, Homo sapien
cagaagacatttcctgaggacatgc

SEQ ID NO: 1703393 - DNA, 25 bp, Homo sapien
gagagaatcgtgacagtaggcttga

SEQ ID NO: 1703394 - DNA, 25 bp, Homo sapien
gggtcggaaattcctctcgagagaa

SEQ ID NO: 1703395 - DNA, 25 bp, Homo sapien
ctgcagggtcggaaattcctctcga

SEQ ID NO: 1703396 - DNA, 25 bp, Homo sapien
tcctctcgagagaatcgtgacagta

SEQ ID NO: 1703397 - DNA, 25 bp, Homo sapien
acgactgttcggcagactccctttc

SEQ ID NO: 1703398 - DNA, 25 bp, Homo sapien
aggcttggtccgggcccagacgact

SEQ ID NO: 1703399 - DNA, 25 bp, Homo sapien
ttggtccgggcccagacgactgttc

SEQ ID NO: 1703400 - DNA, 25 bp, Homo sapien
ggcccagacgactgttcggcagact

SEQ ID NO: 1703401 - DNA, 25 bp, Homo sapien
gagagaggtatcaatgattggagga

SEQ ID NO: 1703402 - DNA, 25 bp, Homo sapien
agaggtatcaatgattggaggacaa

SEQ ID NO: 1703403 - DNA, 25 bp, Homo sapien
gagaggtatcaatgattggaggaca

SEQ ID NO: 1703404 - DNA, 25 bp, Homo sapien
gtagagagaggtatcaatgattgga

SEQ ID NO: 1703405 - DNA, 25 bp, Homo sapien
tgatgaagtttggagtccgggccct

SEQ ID NO: 1703406 - DNA, 25 bp, Homo sapien
catcattccgcggtagggagggaac

SEQ ID NO: 1703407 - DNA, 25 bp, Homo sapien
tgggcctgaaggctgtagcccaccc

SEQ ID NO: 1703408 - DNA, 25 bp, Homo sapien
cctccgtccctccaagttgtagaat

SEQ ID NO: 1703409 - DNA, 25 bp, Homo sapien
tagggcggagggaacgggagatatg

SEQ ID NO: 1703410 - DNA, 25 bp, Homo sapien
gggaacgggagatatgggggataca

SEQ ID NO: 1703411 - DNA, 25 bp, Homo sapien
gagggaacgggagatatgggggata

SEQ ID NO: 1703412 - DNA, 25 bp, Homo sapien
tccatagggcggagggaacgggaga

SEQ ID NO: 1703413 - DNA, 25 bp, Homo sapien
atcaggagtggggtatcggtaaggc

SEQ ID NO: 1703414 - DNA, 25 bp, Homo sapien
gcccatcaggagtggggtatcggta

SEQ ID NO: 1703415 - DNA, 25 bp, Homo sapien
tcaggagtggggtatcggtaaggcc

SEQ ID NO: 1703416 - DNA, 25 bp, Homo sapien
ccatcaggagtggggtatcggtaag

SEQ ID NO: 1703417 - DNA, 25 bp, Homo sapien
taaccacatgcgagactgatcctag

SEQ ID NO: 1703418 - DNA, 25 bp, Homo sapien
gaaatatggcatgttgtataaccac

SEQ ID NO: 1703419 - DNA, 25 bp, Homo sapien
agactgatcctagactgagcctcct

SEQ ID NO: 1703420 - DNA, 25 bp, Homo sapien
tgttgtataaccacatgcgagactg

SEQ ID NO: 1703421 - DNA, 25 bp, Homo sapien
aactctttgagattatcctctttga

SEQ ID NO: 1703422 - DNA, 25 bp, Homo sapien
ctttgagaatagagggacgacccac

SEQ ID NO: 1703423 - DNA, 25 bp, Homo sapien
gacccacaggctctactaagcgcat

SEQ ID NO: 1703424 - DNA, 25 bp, Homo sapien
tactaagcgcattggtggccctgag

SEQ ID NO: 1703425 - DNA, 25 bp, Homo sapien
gatgcacagtccacacccaactaaa

SEQ ID NO: 1703426 - DNA, 25 bp, Homo sapien
caatgtctgcctttcacccacataa

SEQ ID NO: 1703427 - DNA, 25 bp, Homo sapien
ggtcttcctacacttcaatgtctgc

SEQ ID NO: 1703428 - DNA, 25 bp, Homo sapien
gcctttcaagatccaaattcttgac

SEQ ID NO: 1703429 - DNA, 25 bp, Homo sapien
tcatcagagtctcgcccatcttcct

SEQ ID NO: 1703430 - DNA, 25 bp, Homo sapien
ccatcttcctcatcgctgaacttga

SEQ ID NO: 1703431 - DNA, 25 bp, Homo sapien
tcctcatcagagtctcgcccatctt

SEQ ID NO: 1703432 - DNA, 25 bp, Homo sapien
tcctcatcgctgaacttgagctttt

SEQ ID NO: 1703433 - DNA, 25 bp, Homo sapien
gggagttgccctttttgccatctgc

SEQ ID NO: 1703434 - DNA, 25 bp, Homo sapien
tcaccagaagctgattgggaatccc

SEQ ID NO: 1703435 - DNA, 25 bp, Homo sapien
ccgtcttaggagtgggcggttcgct

SEQ ID NO: 1703436 - DNA, 25 bp, Homo sapien
gcaggaggtcccggctctgtctctg

SEQ ID NO: 1703437 - DNA, 25 bp, Homo sapien
tgacgactgctttcgtcgctgccgc

SEQ ID NO: 1703438 - DNA, 25 bp, Homo sapien
tcatcgagtcgcttgagcttctcag

SEQ ID NO: 1703439 - DNA, 25 bp, Homo sapien
tgctttgagccgcttgtcaggtgcc

SEQ ID NO: 1703440 - DNA, 25 bp, Homo sapien
gccagggaaatctcagatgacgact

SEQ ID NO: 1703441 - DNA, 25 bp, Homo sapien
gccactgctggtgctactggtactg

SEQ ID NO: 1703442 - DNA, 25 bp, Homo sapien
ggctggcttcgaagctgccactgct

SEQ ID NO: 1703443 - DNA, 25 bp, Homo sapien
ctgggctggcttcgaagctgccact

SEQ ID NO: 1703444 - DNA, 25 bp, Homo sapien
ccactgctggtgctactggtactgc

SEQ ID NO: 1703445 - DNA, 25 bp, Homo sapien
tgaacaccccaggaatctcacgtct

SEQ ID NO: 1703446 - DNA, 25 bp, Homo sapien
tattgaagcccctcccatttaagac

SEQ ID NO: 1703447 - DNA, 25 bp, Homo sapien
ctctcatgagcctatggtggtggca

SEQ ID NO: 1703448 - DNA, 25 bp, Homo sapien
caacagagtgatctagtccaacaat

SEQ ID NO: 1703449 - DNA, 25 bp, Homo sapien
ctgccgctggaaacgaggaggcaac

SEQ ID NO: 1703450 - DNA, 25 bp, Homo sapien
gaggcaacgacttctgatatttggg

SEQ ID NO: 1703451 - DNA, 25 bp, Homo sapien
tggcgggtgggaccaatcccatcac

SEQ ID NO: 1703452 - DNA, 25 bp, Homo sapien
gaacctcttctggtggttcaggacc

SEQ ID NO: 1703453 - DNA, 25 bp, Homo sapien
ggaaattggcgtgacaatggagaca

SEQ ID NO: 1703454 - DNA, 25 bp, Homo sapien
tggagacaactggacaaagaagcaa

SEQ ID NO: 1703455 - DNA, 25 bp, Homo sapien
ggagacaactggacaaagaagcaaa

SEQ ID NO: 1703456 - DNA, 25 bp, Homo sapien
actaggggaaattggcgtgacaatg

SEQ ID NO: 1703457 - DNA, 25 bp, Homo sapien
ctgccactggtgctgctgctgctgc

SEQ ID NO: 1703458 - DNA, 25 bp, Homo sapien
gctgctgctgcttcaggagctgctc

SEQ ID NO: 1703459 - DNA, 25 bp, Homo sapien
tgctgctgctgcttcaggagctgct

SEQ ID NO: 1703460 - DNA, 25 bp, Homo sapien
ctgctgccactggtgctgctgctgc

SEQ ID NO: 1703461 - DNA, 25 bp, Homo sapien
gcactggggtaggaggggcagagcc

SEQ ID NO: 1703462 - DNA, 25 bp, Homo sapien
taggaggggcagagccctgttgatg

SEQ ID NO: 1703463 - DNA, 25 bp, Homo sapien
gggtaggaggggcagagccctgttg

SEQ ID NO: 1703464 - DNA, 25 bp, Homo sapien
tggtggtgatgggggcactggggta

SEQ ID NO: 1703465 - DNA, 25 bp, Homo sapien
tggagcctgtggagctggcacagcc

SEQ ID NO: 1703466 - DNA, 25 bp, Homo sapien
ggggcgggggtggagcctgtggagc

SEQ ID NO: 1703467 - DNA, 25 bp, Homo sapien
ctggcacagcccccagggtcacagg
